United States Patent Application Publication US 2011/0182862 A1 - sequence listing, part 21

SEQ ID NO: 30289 - protein, 344 aa, Muscodor strobelii
  misc_feature: SGI Peptide ID NO. 570415
  misc_feature (89)..(288): Pfam Id: PF00297 Pfam Desc: Ribosomal protein L3
  misc_feature (1)..(338): NCBI GI: 46109318 Blast Desc: FG01541.1 [Gibberella zeae PH-1]
  misc_feature (1)..(333): NCBI GI: 171689544 Blast Desc: protein product [Podospora anserina] gi|170944734|emb|CAP70845.1| protein product [Podospora anserina]
  misc_feature (1)..(333): NCBI GI: 261355132 Blast Desc: 54S ribosomal protein L9 [Verticillium albo-atrum VaMs.102]
  misc_feature (1)..(333): NCBI GI: 85110563 Blast Desc: 60S ribosomal protein L3, mitochondrial precursor [Neurospora crassa OR74A] gi|28881355|emb|CAD70397.1| related to ribosomal protein L3 precursor, mitochondrial [Neurospora crassa]
  misc_feature (1)..(333): NCBI GI: 116199553 Blast Desc: CHGG_07932 [Chaetomium globosum CBS 148.51] gi|88179211|gb|EAQ86679.1| CHGG_07932 [Chaetomium globosum CBS 148.51]
  misc_feature (1)..(333): NCBI GI: 145606142 Blast Desc: MGG_02511 [Magnaporthe grisea 70-15] gi|145013870|gb|EDJ98511.1| MGG_02511 [Magnaporthe grisea 70-15]
  misc_feature (1)..(296): NCBI GI: 156044218 Blast Desc: SS1G_10212 [Sclerotinia sclerotiorum 1980] gi|154694601|gb|EDN94339.1| SS1G_10212 [Sclerotinia sclerotiorum 1980]
  misc_feature (1)..(296): NCBI GI: 225678845 Blast Desc: 50S ribosomal protein L3 [Paracoccidioides brasiliensis Pb03]
  misc_feature (1)..(296): NCBI GI: 226293678 Blast Desc: 54S ribosomal protein L9 [Paracoccidioides brasiliensis Pb18]
  misc_feature (1)..(296): NCBI GI: 226281500 Blast Desc: 54S ribosomal protein L9 [Paracoccidioides brasiliensis Pb01]
  misc_feature: Useful for introducing or modulating the production of volatile compounds
MAPRLPARWATALTSPSTSRVLITPTRTFLPRTAKRGVKYGWSTAPKRGKPNRFNQVSMGIPAPTTGPAAALKRKAQSTPIRTGVLAEKKGVSAMYDTTKGTRTPCTILQLDQCQVVAQKTRAKNGYWALQIGSGHKQADNTTSPMLGYYEAKGIAPKRHLAEFKVRGEEGLLPVGVQLSPDWFKVGQFVDARSNSRGMGFAGGMKRHGFAGQEASHGNSKNHRTIGSAGPSQGSGSRVLPGKKMPGRMGNERVTVQNLRVLKVDNELGIVVIKGHIAGPKGCLVQIADAIKKPPPVDTFLAKAKTALLQRNKGHAERLEMARVMHMDLKKVRERLQMTPRMPF

SEQ ID NO: 30290 - DNA, 630 bp, Muscodor strobelii
  misc_feature: SGI cDNA ID NO. 570416
  misc_feature: Reduced expression when VOC is produced
  misc_feature: Encodes the peptide sequence at SEQ ID NO 30291
atgtccacagtactatccagaatagcacggaggagagcagggctcctcctccagaacaccaaatccacacccagaaccctcgtccaacgacgaacgatagtagccgcgccgaaacccggcgatgggccgttgatgcagaggagagcagaccgggagcttccgacaatcaaagaattccgctggtcaacaaccctccccatcttcgggcttctcatcgccctatcatccgtcgccatcttcaactaccaaaagctctcctcccccgtcgtcgcatcaaccctctactctctccgaaccaacccccgcgcacgagctctactcggagacgaaatctatttcaagcaccagattccttggatttccggggagatgaaccaagtccgtggcagaatcgatgtgagcttcagtgtcaaggggacaaagggcgtgggagtcatgagatttgcgagtgtgaggccgagtgcgaagggtatgttcgagactaccgagtggagcctcacgatggagagtggtgagacggtggatttactggatgggagtgatccgtttaagggtattgcgggtggtatggatgaggaggagaaggaggaggcgcttgctacgaggggctttcggcagcagatcaagtga

SEQ ID NO: 30291 - protein, 209 aa, Muscodor strobelii
  misc_feature: SGI Peptide ID NO. 570416
  misc_feature (51)..(184): Pfam Id: PF08695 Pfam Desc: Fungal protein of function (DUF1783)
  misc_feature (5)..(209): NCBI GI: 46109320 Blast Desc: FG01542.1 [Gibberella zeae PH-1]
  misc_feature (4)..(209): NCBI GI: 261355131 Blast Desc: cytochrome oxidase assembly [Verticillium albo-atrum VaMs.102]
  misc_feature (29)..(209): NCBI GI: 256730569 Blast Desc: NECHADRAFT_98553 [Nectria haematococca mpVI 77-13-4]
  misc_feature (1)..(209): NCBI GI: 85110561 Blast Desc: NCU06748 [Neurospora crassa OR74A] gi|28881356|emb|CAD70398.1| conserved [Neurospora crassa] gi|28925203|gb|EAA34284.1| conserved [Neurospora crassa OR74A]
  misc_feature (25)..(206): NCBI GI: 171689546 Blast Desc: protein product [Podospora anserina] gi|170944735|emb|CAP70846.1| protein product [Podospora anserina]
  misc_feature (59)..(209): NCBI GI: 116199551 Blast Desc: CHGG_07931 [Chaetomium globosum CBS 148.51] gi|88179210|gb|EAQ86678.1| CHGG_07931 [Chaetomium globosum CBS 148.51]
  misc_feature (4)..(184): NCBI GI: 255943635 Blast Desc: Pc20g00210 [Penicillium chrysogenum Wisconsin 54-1255] gi|211587320|emb|CAP85350.1| Pc20g00210 [Penicillium chrysogenum Wisconsin 54-1255]
  misc_feature (11)..(189): NCBI GI: 261197063 Blast Desc: cytochrome oxidase complex assembly protein [Ajellomyces dermatitidis SLH14081] gi|239595564|gb|EEQ78145.1| cytochrome oxidase complex assembly protein [Ajellomyces oxidase
  misc_feature (24)..(189): NCBI GI: 240279634 Blast Desc: cytochrome oxidase assembly [Ajellomyces capsulatus H143]
  misc_feature (28)..(184): NCBI GI: 121706454 Blast Desc: conserved [Aspergillus clavatus NRRL 1] gi|119399637|gb|EAW10063.1| conserved [Aspergillus clavatus NRRL 1]
  misc_feature: Useful for introducing or modulating the production of volatile compounds
MSTVLSRIARRRAGLLLQNTKSTPRTLVQRRTIVAAPKPGDGPLMQRRADRELPTIKEFRWSTTLPIFGLLIALSSVAIFNYQKLSSPVVASTLYSLRTNPRARALLGDEIYFKHQIPWISGEMNQVRGRIDVSFSVKGTKGVGVMRFASVRPSAKGMFETTEWSLTMESGETVDLLDGSDPFKGIAGGMDEEEKEEALATRGFRQQIK

SEQ ID NO: 30292 - DNA, 2536 bp, Muscodor strobelii
  misc_feature: SGI EST ID NO. CUFF.71995.0
  misc_feature: Variant of the nucleotide sequence at SEQ ID NO 30290
ccgaatctcaagatatctgatgagcaaagtgggatgatagttgagttcataatacgacgatctctacacaatctctagacacaatgtccacagtactatccagaatagcacggaggagagcagggctcctcctccagaacaccaaatccacacccagaaccctcgtccaacgacgaacgatagtagccgcgccgaaacccggcgatgggccgttgatgcagaggagagcagaccgggagcttccgacaatcaaagaattccgctggtcaacaaccctccccatcttcgggcttctcatcgccctatcatccgtcgccatcttcaactaccaaaagctctcctcccccgtcgtcgcatcaaccctctactctctccgaaccaacccccgcgcacgagctctactcggagacgaaatctatttcaagcaccagattccttggatttccggggagatgaaccaagtccgtggcagaatcgatgtgagcttcagtgtcaaggggacaaagggcgtgggagtcatgagatttgcgagtgtgaggccgagtgcgaagggtatgttcgagactaccgagtggagcctcacgatggagagtggtgagacggtggatttactggatgggagtgatccgtttaagggtattgcgggtggtatggatgaggaggagaaggaggaggcgcttgctacgaggggctttcggcagcagatcaagtgagcggtattgggctggagatcgctgttgggaggaagatgctcgaatactttagccttgacttgctaagtgcttgatattgaaacccacttctggtctcgaatcagacgagggcaaatcaccaagagggatgaaagcacatccacaaggtggttcatgtacagtccccattgctcacctattactacaaagggactcggcatatggtataagttgtacaacaggtgtatatatgtataatacaatgtccaaatacagcacgccagctctctgattttacatttacacattcccgccaatcttagaaaggcatcctgggcgtcatctgtagcctctctctaaccttcttcagatccatatgcatcaccctcgccatctctaacctctcagcatgccccttattccgctgcaataacgccgtcttcgccttggcgaggaatgtgtcgacgggcggtggtttcttgatcgcgtcggcgatctggacgagacagcccttgggtccggcgatatggcccttaatcactacgatcccgagctcattatcgactttcagaacgcggagattctggacggtgactcgttcattgcccatgcgacccggcatcttcttgccgggcaacacacgtgaaccgctgccctgcgacggaccggcggaaccgatggttcggtgattcttcgagttaccgtgagacgcctcctgaccggcgaacccgtgccgcttcataccaccggcgaatcccatacctctggaattactccgtgcgtcgacgaattggccgactttgaaccagtctggagataactggacgcctacgggtagcagtccttcttcgccgcggactttgaactcggcgagatggcgcttgggtgctatacccttggcttcgtagtaccccagcataggcgatgtggtgttatcggcttgcttgtgaccggagccaatctgcagtgcccagtatccgttcttggcgcgtgtcttctgtgctacgacctggcattggtcgagctggaggattgtgcagggtgttcgcgtgcccttcgtcgtgtcgtacattgccgatacgcccttcttctctgcgaggacaccggtccggatgggcgtggactgggccttgcgcttgagggcggcggcgggaccggtggtgggcgctggtatgcccatggatacctggttgaagcggttcggcttgccgcgctttggggccgtggaccagccgtatttgacgccgcgctttgctgttcgggggaggaaggtgcgggtgggtgttatgaggacgcgcgaggtcgagggtgaggtcagggccgtggcccagcgggctggcagtctgggtgccatggtcgctgggagcccgatcggctctcgagattgtgtgggagagacacgctgtagatggtcgtggtggtgagatgaacaattggtcgctgggatgaatctggacccgacagctcagggtgtcgtctcggccgtgtcgacgttgagcttcgaggaaaagtttaggtgggtctcggtgcagctggggttcaatcgacagaggtcgaattgcaggtgcagggaccacttggccaatcctcgccctcacaccccggcaaggtcacatttcagcatctcttctcacatgccaacctttgtctagatatatcctagagcaaatttctgcatttgaaagcttcacttcgaaatatccgctcttaattttgtcggagtctgacaacatggtctactacttcacttcaaatgttgtcgatccgcccgccaacatctatgtagggaaggacaagttcgagaatgaggagctgatcaaacacggctgggaggaggatgtctg

SEQ ID NO: 30293 - DNA, 414 bp, Muscodor strobelii
  misc_feature: SGI cDNA ID NO. 570417
  misc_feature: Reduced expression when VOC is produced
  misc_feature: Encodes the peptide sequence at SEQ ID NO 30294
atggtcaaggtcagcaccagcgtgagcagctcgcgccgcaagagccgcaaggctcacttcagcgctcccagcagcatccgccgcaacatcatgtccgctcccctctccaaggagctgcgtgagaagtacaacgtccgctccatccccgtgcgaaaggacgacgaggtcctcatcaaccgcggctccaacaagggccgcgagggcaaggtcacctccgtctaccgtctcaagtaccagatccacgtcgagcgtgtcacccgcgagaaagtctccggccagagcgtgcccctcggcatccacccctccaacgtcgtcatcaccaagctcaagctcgacaaggaccgtgagaacatcttggagcgcatcaaggccggccgtgagctgcgtaccaagggcaaggctgctgccaagtaa

SEQ ID NO: 30294 - protein, 137 aa, Muscodor strobelii
  misc_feature: SGI Peptide ID NO. 570417
  misc_feature (52)..(83): Pfam Id: PF00467 Pfam Desc: KOW motif
  misc_feature (1)..(136): NCBI GI: 171689994 Blast Desc: protein product [Podospora anserina] gi|170944952|emb|CAP71063.1| protein product [Podospora anserina]
  misc_feature (1)..(136): NCBI GI: 85078195 Blast Desc: NCU03565 [Neurospora crassa OR74A] gi|18376034|emb|CAD21040.1| ribosomal protein L26 [Neurospora crassa] gi|28917176|gb|EAA26892.1| conserved [Neurospora crassa
  misc_feature (1)..(136): NCBI GI: 116200195 Blast Desc: conserved [Chaetomium globosum CBS 148.51] gi|88179532|gb|EAQ87000.1| conserved [Chaetomium globosum CBS 148.51]
  misc_feature (1)..(136): NCBI GI: 154313998 Blast Desc: 60S ribosomal protein L26 [Botryotinia fuckeliana B05.10] gi|150849088|gb|EDN24281.1| 60S ribosomal protein L26 [Botryotinia fuckeliana B05.10]
  misc_feature (1)..(136): NCBI GI: 156060731 Blast Desc: 60S ribosomal protein L26 [Sclerotinia sclerotiorum 1980] gi|154699912|gb|EDN99650.1| 60S ribosomal protein L26 [Sclerotinia sclerotiorum 1980]
  misc_feature (1)..(136): NCBI GI: 256728919 Blast Desc: [Nectria haematococca mpVI 77-13-4]
  misc_feature (1)..(134): NCBI GI: 145607081 Blast Desc: conserved [Magnaporthe grisea 70-15] gi|145014678|gb|EDJ99246.1| conserved [Magnaporthe grisea 70-15]
  misc_feature (1)..(136): NCBI GI: 46138661 Blast Desc: FG10845.1 [Gibberella zeae PH-1]
  misc_feature (5)..(135): NCBI GI: 242803512 Blast Desc: ribosomal protein L26 [Talaromyces stipitatus ATCC 10500] gi|218717534|gb|EED16955.1| ribosomal protein L26 [Talaromyces stipitatus ATCC 10500]
  misc_feature (1)..(137): NCBI GI: 154271432 Blast Desc: HCAG_08351 [Ajellomyces capsulatus NAm1] gi|150409239|gb|EDN04689.1| HCAG_08351 [Ajellomyces capsulatus NAm1] gi|225556850|gb|EEH05137.1| 60S ribosomal protein L26
  misc_feature: Useful for introducing or modulating the production of volatile compounds
MVKVSTSVSSSRRKSRKAHFSAPSSIRRNIMSAPLSKELREKYNVRSIPVRKDDEVLINRGSNKGREGKVTSVYRLKYQIHVERVTREKVSGQSVPLGIHPSNVVITKLKLDKDRENILERIKAGRELRTKGKAAAK

SEQ ID NO: 30295 - DNA, 1284 bp, Muscodor strobelii
  misc_feature: SGI EST ID NO. CUFF.71633.0
  misc_feature: Variant of the nucleotide sequence at SEQ ID NO 30293
ccaattcgttcgaaattggttgcagacacccgaacttttcctcgcatcgtgaacttctgtcttcgtcaatcgccctcacgttcaacaaccaccaactactaacccgcccacccaacagtcaagatggtcaaggtcagcaccagcgtgagcagctcgcgccgcaagagccgcaaggctcacttcagcgctcccagcagcatccgccgcaacatcatgtccgctcccctctccaaggagctgcgtgagaagtacaacgtccgctccatccccgtgcgaaaggacgacgaggtcctcatcaaccgcggctccaacaagggccgcgagggcaaggtcacctccgtctaccgtctcaagtaccagatccacgtcgagcgtgtcacccgcgagaaagtctccggccagagcgtgcccctcggcatccacccctccaacgtcgtcatcaccaagctcaagctcgacaaggaccgtgagaacatcttggagcgcatcaaggccggccgtgagctgcgtaccaagggcaaggctgctgccaagtaaattgaccacctctcccaattcaagacaaaagccacgatgagatgacccgggatacgacacttggcgttgaggacggaaaagcatcattgcagcttcatagatcgggactctagtcggcgtcgtccctcgtcatttctctttgcctgcgcctcagccaatccctccacgcgctccggaacacggaacgatatcatatggcgaaatgcacgcacacatgggcttgggcttcaactgcatgtgcatgacaacaagaatgagtggaggaacagggcggtaacggacggatacggttcagcatctaggtgcaacgacacctccacccgccgaacccaacaatgaaaaaaacatttcatgcacattatggccatttcgcgttcatccgtgaaatgctccatgggaggtcctcccgaagtctgtcccttgccgcagcatccctgtgtgcaatcgtgtatcgtgacatcgcctttcatgtctcttatcgtttctcttctcatgttagcgcatgaccacgtatgatttaactaaccacacagcatatacactcatcgagatcgggatgtcctaatccagggcaaccaatcagatgtcgagtactccatagcgtatctttcctcattcgaaatgcgtgcgcatccgaccctcctctcatatttattgtgttttggtgcttatccgaaatgcgtgcgcttccggcccctttctcatatacaatttcatgttaatacagtaatggcagtttatgtaata

SEQ ID NO: 30296 - DNA, 3099 bp, Muscodor strobelii
  misc_feature: SGI cDNA ID NO. 570418
  misc_feature: Encodes the peptide sequence at SEQ ID NO 30297
atgcatttccctcctctggctcctcctcggcttgttgttgccacgtatgggggcagaatgaagcgcatacggaagattctcaagcgcctcaagcatgcgcagaaaaatgatgcccgattgcctgagccatgcatctttgagatcaagtatttcatttggcaggtctttgcagttctccagctcctcggcgatcacatttcgcttgatccattcaattcgccgactacagttccaacagttttcttctggaaggatcgccgtggacagagacgcttctacgtatttgcctacatcgacctcaagatggactcacactcttacagtgtgcctgacctcctgagtctgcggaacaccaatcatccacaacaacttctggccaagcttcgagagaatgctgagactcgaaccctgctttccaaagatagggccagtgagaaccagcctgctgtatacaaccctgctgtttcttccaaccactcgcgagcttccaagaagtccaagcccaacccttcgtcctccaacgacagcgatgaggttgtgttccagggaaagaaccaaggcgaagttcaatggaagtatcgcggtcgtacagactcagaatgtgcttcaacagagcctttatcagcccccgtcggtctcgacaagcagcaaagcgaaggctttcagagattcttcaaagcagttgtctcgccaacacacgtccgagtcaccgctggaggggatgacgcccaagactctgccgaacctacaaaagagaccgcagccggatgtgctgcaccaactgcctatggccagatgcctcgcccaatgatctcgcccttgtacacccatcagcaaatgggcccgcttgtctatcagcatgcaggcatgccaatgcctctctatcctgtcccccatggctatatcccattcaccatggcgccggctagtggccctggcttttcgcacgtcccaattgtcccggccgccgagggacagagaactgtgcgaaacgaagacaatgtcaccgttggagctgacaatcgagcccaacagcctgctgtccaactctcatccccccatcaatttgatcagaccagaccctgctttccggttagctatccagtccaagtcgatggcccctcaatgtatcccgtgactggagcagctccagttccgcagcctcgtccatatcaggttgttggaaatagcttgatccaacaccctatcgctatgtatcctggtccagcgcaaccacctgtggcaaaccccctgccggttgatcattctcaaagcttatcaactacgccgcatgtctcctcgatccgacccagcgagatcactcgaaagcaggtggaaaatatgaagtcggctctgaagcattacataaaccagctcgagcacaatcgacaccagattgatgagccgtgggcttttgcccaggcaaagatgctccaagaggaggttgtgaagttcgagacgattcagcgagcgcaagaggtctacgagaaagagcggtatccggccatggagccaacgccagcacacatcactgcgcaatcattcatgcaggcacaaagattgatgcctcagcagatgatgcagcctggtcagatggtcatgcctattagcaatatcacaccctcccgagcaccaagcatcagacacaaccaggagagcggctcttctcatcatggctccaatagatcccatggtcgtcatgctgctcccagacacttccaaccaccgggtccacgtatggctcctttcatcaatgcagcaggcggagttatgacgggtgccgatgttgcccctcgccgacgcagcaggaatgcaggggcaactggtatcaacgcaactaagcaagaccaatcgacagaccacatagataactaccagaaacacctgatcgacaagttctctgctgaggatgccacagaagaagagaaggctgcattgaagaagatgacccaacccctgatgacgcagcaggacgaccagccgtcaacctctcagggagactccagcgataacacttcgtctaacaatacccagaagactcaagcatcgtctcaaacaacccctcaagatcatagtacagataccaagaactcgctgggttctagcgcacaactccccccgaacaactcatacggcgccgctctgagtatgaagcctgctggagcctatgccggtaatatgatgagttcatatctcactccagtcaacgagaacaacgtcaatgctccgtaccttgttggcaactatcccgctgggctatatccttggggatacaaccgaggcgtccgtgactacgtgtatgcgcgggaactcacggaagacgagaaacaagctcgccatctgtattggaatcagctaccaaataagggaactggccttcctaaatttgatggcaaggacttttggcccccttctcccgcgaaaccacaggatggccaacacgaacgcaacatctcatctggccagcccgatattggacatgaaatgcggaccgccgatgctgatccattccgctccagtcaagacaaagacagcattcgttcccaaaagacagagcgcagactgagcaaggccatcccgattgtggcacctcctcccgagacagataagaaggcggcatccggttcttctgatgcacgcaagactcagctgggcgaaggcgtaggagatgttgctagtaatggaggctcgtcgaacactcaatcggctcagtccagccgtagagtgatagagagatccagtaccaaatctggacaagacctgtggcagaccatgctcaagaagggatcaactagcggagccgcgctgcccggcacagtctcgtctactacagctaccggttaccttccccaatattcgggtaatgcagttgcctctcttggacccacaatctcgaatctgtccctggcaactgcctcgctggacattgacgacaagctaaatgaactggaggcaccccgttctgcaacggagaagagcggtgagaattgccctcccagttcggctccgtccttggagcacgacatcaccaaagatctccacgagcgtatgcttcgtgatgctaaacgccgtggagttatcggctccgattggcagtag

SEQ ID NO: 30297 - protein, 1032 aa, Muscodor strobelii
  misc_feature: SGI Peptide ID NO. 570418
  misc_feature (102)..(504): NCBI GI: 39943910 Blast Desc: MGG_03966 [Magnaporthe grisea 70-15] gi|145014679|gb|EDJ99247.1| MGG_03966 [Magnaporthe grisea 70-15]
  misc_feature (78)..(551): NCBI GI: 85078183 Blast Desc: NCU03562 [Neurospora crassa OR74A] gi|28917173|gb|EAA26889.1| [Neurospora crassa OR74A]
  misc_feature (189)..(500): NCBI GI: 116200175 Blast Desc: CHGG_08243 [Chaetomium globosum CBS 148.51] gi|88179522|gb|EAQ86990.1| CHGG_08243 [Chaetomium globosum CBS 148.51]
  misc_feature (78)..(551): NCBI GI: 18376037 Blast Desc: [Neurospora crassa]
  misc_feature (186)..(498): NCBI GI: 171690046 Blast Desc: protein product [Podospora anserina] gi|170944978|emb|CAP71089.1| protein product [Podospora anserina]
  misc_feature (102)..(504): NCBI GI: 46138659 Blast Desc: FG10844.1 [Gibberella zeae PH-1]
  misc_feature (738)..(1006): NCBI GI: 116200175 Blast Desc: CHGG_08243 [Chaetomium globosum CBS 148.51] gi|88179522|gb|EAQ86990.1| CHGG_08243 [Chaetomium globosum CBS 148.51]
  misc_feature (737)..(972): NCBI GI: 46138659 Blast Desc: FG10844.1 [Gibberella zeae PH-1]
  misc_feature (735)..(1026): NCBI GI: 256729106 Blast Desc: NECHADRAFT_80041 [Nectria haematococca mpVI 77-13-4]
  misc_feature (743)..(1031): NCBI GI: 39943910 Blast Desc: MGG_03966 [Magnaporthe grisea 70-15] gi|145014679|gb|EDJ99247.1| MGG_03966 [Magnaporthe grisea 70-15]
MHFPPLAPPRLVVATYGGRMKRIRKILKRLKHAQKNDARLPEPCIFEIKYFIWQVFAVLQLLGDHISLDPFNSPTTVPTVFFWKDRRGQRRFYVFAYIDLKMDSHSYSVPDLLSLRNTNHPQQLLAKLRENAETRTLLSKDRASENQPAVYNPAVSSNHSRASKKSKPNPSSSNDSDEVVFQGKNQGEVQWKYRGRTDSECASTEPLSAPVGLDKQQSEGFQRFFKAVVSPTHVRVTAGGDDAQDSAEPTKETAAGCAAPTAYGQMPRPMISPLYTHQQMGPLVYQHAGMPMPLYPVPHGYIPFTMAPASGPGFSHVPIVPAAEGQRTVRNEDNVTVGADNRAQQPAVQLSSPHQFDQTRPCFPVSYPVQVDGPSMYPVTGAAPVPQPRPYQVVGNSLIQHPIAMYPGPAQPPVANPLPVDHSQSLSTTPHVSSIRPSEITRKQVENMKSALKHYINQLEHNRHQIDEPWAFAQAKMLQEEVVKFETIQRAQEVYEKERYPAMEPTPAHITAQSFMQAQRLMPQQMMQPGQMVMPISNITPSRAPSIRHNQESGSSHHGSNRSHGRHAAPRHFQPPGPRMAPFINAAGGVMTGADVAPRRRSRNAGATGINATKQDQSTDHIDNYQKHLIDKFSAEDATEEEKAALKKMTQPLMTQQDDQPSTSQGDSSDNTSSNNTQKTQASSQTTPQDHSTDTKNSLGSSAQLPPNNSYGAALSMKPAGAYAGNMMSSYLTPVNENNVNAPYLVGNYPAGLYPWGYNRGVRDYVYARELTEDEKQARHLYWNQLPNKGTGLPKFDGKDFWPPSPAKPQDGQHERNISSGQPDIGHEMRTADADPFRSSQDKDSIRSQKTERRLSKAIPIVAPPPETDKKAASGSSDARKTQLGEGVGDVASNGGSSNTQSAQSSRRVIERSSTKSGQDLWQTMLKKGSTSGAALPGTVSSTTATGYLPQYSGNAVASLGPTISNLSLATASLDIDDKLNELEAPRSATEKSGENCPPSSAPSLEHDITKDLHERMLRDAKRRGVIGSDWQ

SEQ ID NO: 30298 - DNA, 1077 bp, Muscodor strobelii
  misc_feature: SGI cDNA ID NO. 570419
  misc_feature: Encodes the peptide sequence at SEQ ID NO 30299
atgaagctggtttatggtatcgctgcggcgcttctctgtctcggggctgaggccaacaccctgagatttcctgccgtgaaacgggccaacaatgcgacagcggcagttcctccgccgccgggcgcttacatcccagtgccgacattctttaaaggagccgcgaatgcgacgttaggcacaacttcttcgcctcttgacctggaaacgcaagccaagtattccgtgtacctagcggacgcagggataaccggctttgcaatttttggaagtacgggcgagccaatacatgtgtctagcaaagagcgtgttcaagtcatcaaggcaacgcgaaaggctctggatgcggcgggacataccaattaccccatcatcgccggcgtcgtgtcacaattgtttgaggaggtcatcgatcagttgtacgaagcccaaagcgctggtgcgacatggggtgtctgtctggtgcctggctattttgcagtggcaacgtcccagcaagggatcatcgattggtttacagccgttgctgatgccagcccattgccaattctgatctatgactaccccactgtttcgaacaacgtcctagtcacgccggctacattcgccgtcctggcacaacacccaaatattgtgggtgctaagctagcaatccaggatgtctcgtatcacgcccagatctgttcccatccggccattgattatgatacgttccatccatacactggcctcggtcaactaatgttgccggctgtggcggttggcgcattcggtgcccttgatgtggtcggaacatccttccctaaaaccatggttcagttgtataaactgagctctatcgtgggtccgaccgccgaggagcaaaaacaggctcgggatttacagtggaaagtgtcgagcatgggggagtattataattcatacaacatcttgggaatcaaggaggcaatctatcgcttgcgaggtttcggtgaccgtacgggtgttcgcctgccgctgctgaacactatcacagatgagcagtggaatgcgtatgagtcaatcattctcattatggaggagacagagaatagtctctag

SEQ ID NO: 30299 - protein, 358 aa, Muscodor strobelii
  misc_feature: SGI Peptide ID NO. 570419
  misc_feature (49)..(352): Pfam Id: PF00701 Pfam Desc: Dihydrodipicolinate synthetase family
  misc_feature (76)..(226): Pfam Id: PF00701 Pfam Desc: Dihydrodipicolinate synthetase family
  misc_feature (37)..(358): NCBI GI: 46137389 Blast Desc: FG10210.1 [Gibberella zeae PH-1]
  misc_feature (34)..(358): NCBI GI: 261359247 Blast Desc: dihydrodipicolinate synthase [Verticillium albo-atrum VaMs.102]
  misc_feature (48)..(358): NCBI GI: 156065939 Blast Desc: SS1G_00980 [Sclerotinia sclerotiorum 1980] gi|154691839|gb|EDN91577.1| SS1G_00980 [Sclerotinia sclerotiorum 1980]
  misc_feature (35)..(358): NCBI GI: 39973795 Blast Desc: MGG_00956 [Magnaporthe grisea 70-15] gi|145018088|gb|EDK02367.1| MGG_00956 [Magnaporthe grisea 70-15]
  misc_feature (38)..(358): NCBI GI: 169613012 Blast Desc: SNOG_09634 [Phaeosphaeria nodorum SN15] gi|111061779|gb|EAT82899.1| SNOG_09634 [Phaeosphaeria nodorum SN15]
  misc_feature (38)..(358): NCBI GI: 189211006 Blast Desc: dihydrodipicolinate synthetase family protein [Pyrenophora tritici-repentis Pt-1C-BFP] gi|187977927|gb|EDU44553.1| dihydrodipicolinate synthetase family
  misc_feature (38)..(358): NCBI GI: 116178780 Blast Desc: CHGG_00018 [Chaetomium globosum CBS 148.51] gi|88184315|gb|EAQ91783.1| CHGG_00018 [Chaetomium globosum CBS 148.51]
  misc_feature (38)..(357): NCBI GI: 154296852 Blast Desc: BC1G_12515 [Botryotinia fuckeliana B05.10] gi|150843169|gb|EDN18362.1| BC1G_12515 [Botryotinia fuckeliana B05.10]
  misc_feature (38)..(358): NCBI GI: 171680624 Blast Desc: protein product [Podospora anserina] gi|170939939|emb|CAP65165.1| protein product [Podospora anserina]
  misc_feature (36)..(358): NCBI GI: 50547563 Blast Desc: YALI0B23100p [Yarrowia lipolytica] gi|49647117|emb|CAG83504.1| YALI0B23100p [Yarrowia lipolytica]
  misc_feature (65)..(343): SWISSPROT Homolog: EC 4.2.1.52 Dihydrodipicolinate synthase
MKLVYGIAAALLCLGAEANTLRFPAVKRANNATAAVPPPPGAYIPVPTFFKGAANATLGTTSSPLDLETQAKYSVYLADAGITGFAIFGSTGEPIHVSSKERVQVIKATRKALDAAGHTNYPIIAGVVSQLFEEVIDQLYEAQSAGATWGVCLVPGYFAVATSQQGIIDWFTAVADASPLPILIYDYPTVSNNVLVTPATFAVLAQHPNIVGAKLAIQDVSYHAQICSHPAIDYDTFHPYTGLGQLMLPAVAVGAFGALDVVGTSFPKTMVQLYKLSSIVGPTAEEQKQARDLQWKVSSMGEYYNSYNILGIKEAIYRLRGFGDRTGVRLPLLNTITDEQWNAYESIILIMEETENSL

SEQ ID NO: 30300 - DNA, 1946 bp, Muscodor strobelii
  misc_feature: SGI EST ID NO. CUFF.71655.0
  misc_feature: Variant of the nucleotide sequence at SEQ ID NO 30298
tgagaacgcagatgaattgtgatagtagtagaagttaagtatgtacaaatccccagtgagttctttcaatacaagggagtgatatgatggtagggttcgtagacagtggaccctgctcgggagctgacatgcatatccactgttaccatcgcaagcttccgcttccttcgactcggaagaaccaatctgaagtttgaagccagactacaatgacccgttcaaagcactgtcatgccagctagatcaaatacccatgatcgtcatcgcgaaattgcactggctcggcccggtgctgacaaactggaccttgctcttggccgtatttgtcgtcgaggtatttaagcaacatggactactatgataagatcttggggtattaccatctgatctcaccagcgtgaaccgcaaggcttgttgacgatatgaagctggtttatggtatcgctgcggcgcttctctgtctcggggctgaggccaacaccctgagatttcctgccgtgaaacgggccaacaatgcgacagcggcagttcctccgccgccgggcgcttacatcccagtgccgacattctttaaaggagccgcgaatgcgacgttaggcacaacttcttcgcctcttgacctggaaacgcaagccaagtattccgtgtacctagcggacgcagggataaccggctttgcaatttttggaagtacgggcgagccaatacatgtgtctagcaaagagcgtgttcaagtcatcaaggcaacgcgaaaggctctggatgcggcgggacataccaattaccccatcatcgccggcgtcgtgtcacaattgtttgaggaggtcatcgatcagttgtacgaagcccaaagcgctggtgcgacatggggtgtctgtctggtgcctggctattttgcagtggcaacgtcccagcaagggatcatcgattggtttacagccgttgctgatgccagcccattgccaattctgatctatgactaccccactgtttcgaacaacgtcctagtcacgccggctacattcgccgtcctggcacaacacccaaatattgtgggtgctaagctagcaatccaggatgtctcgtatcacgcccagatctgttcccatccggccattgattatgatacgttccatccatacactggcctcggtcaactaatgttgccggctgtggcggttggcgcattcggtgcccttgatgtggtcggaacatccttccctaaaaccatggttcagttgtataaactgagctctatcgtgggtccgaccgccgaggagcaaaaacaggctcgggatttacagtggaaagtgtcgagcatgggggagtattataattcatacaacatcttgggaatcaaggaggcaatctatcgcttgcgaggtttcggtgaccgtacgggtgttcgcctgccgctgctgaacactatcacagatgagcagtggaatgcgtatgagtcaatcattctcattatggaggagacagagaatagtctctagatagactcacggtttgccatatccgggtgggccgctctagaatggcggtacgtgtgtgatggaacacacccgccaataataatgtataaggtagacaagtttgcttaccctttcccgctgcggacggggctctttgggcgtcttgtgacgtgatcctgatctagcctatcctgatatgcagatgcgactcatgttgactatgcgaggcccgggaatcgcgccgtgccggaacgcgcttcttcaaacggtctcggatatatgttcctataattgaccaaatcctcttggcactttgttgtgagaaaaccattggaaggacaacagaagctatatacagcccgtatacctcggcaagataaaataaaaatatcgatgacgcttagaccgtccaatgaattggatttctggtagcgaaccgaagttgatgcaatcgctaatgaaaccttg

SEQ ID NO: 30301 - DNA, 1911 bp, Muscodor strobelii
  misc_feature: SGI cDNA ID NO. 570420
  misc_feature: Encodes the peptide sequence at SEQ ID NO 30302
atggcaaaccaaggcggcggcggccgggcacgtctcagccatcgccgagtattctccctactgatcgctctgggcctgtttgctctattgtcactcatttttactttcccggatgccgtgccgacgggcccgagcctttcgcaatcgttagccgaccacaagatctctctgccgaaatataccgacaagctgaatccgttcaagccgcctgcgcataagccggagagtcaaaaggactccgagtacggtggcagctcctggtactctaattggaactggaggagccccttttcatctaccacgacattagacgagaaccgctcgcttcttcctcccctaaaagatcgaacgcccatatattgttattatgacacaacggcagatcgagatgcggccaccaaagaggccgaaagtagtcttctgttgacctggaggcgagcgtggtgggctcaaggcttcaagcccataatcctcagtgcggcagaggccatgaacaacccactgtataatgaactgcaaggcgttgagatggagcccaccttgaagagagatctaatggggtggcttgcgtgggaaaacatgggcggtgggttgcttgcgtcctacctccttcttcccatgggtcctcacgaagatcatctgctgtccttcctacgaaggggagattttcccgagctgacaaggtgggaggagctcaatgaagcgctcttcgttggtccacgtcagaatatcgccaaggcaattggcgaagcttttcaaaatcgacaaaagaagacatccaaacatctaattaccgcggtcgcaagcgacacttttaaagttgatcccgcccatgcagccctggcattctacgatcgactaactgttgagaaattctatccggacattgccgaggccaatgttggtagtcgtgctgaaagcctgcagagtctcaatcttttaatgaactatcatttgcacaatacctggcaagatatgttcagtgatggaatcgcagtactcaaacccctaccaactcatacgacgactatggtcgaacccgctctgcagctggccacgagactaactgcatgtcacgactcacctcttcccaagtcgtgcccaccaaatctaccgaagtgcacaccatgtcattcgtcaaagccaatgaaaatctcgacgccagcccatcacaagaataagacggagatgtatattatcggaactgtcccgcatccctatatgtggcgcacgctcgatgcgctccgcgcagatatagatgtggcgtacttcaggagacagaccgaacgagatcactggctctacctcgtttttgaagagcttctggggactaagattagttcgtccgcacgtgtggtgacatttaaagatgctgtagcaggcgagtacgctacagcacattccctttggctgactggcgaggatgaaactgtgccgaaggatatcgattggtggttcgggtttgctcttcccaagaatacaacagaagataccacgtcgaagagtcaaatatctgatagggccaagcctattcacgatcctgccgacggtgaaaactctccagttgatgaaatggcactcgagcccgaacttttgaggaaggcccgtgaggtgggatcgagcaaactagaagaggatgtacgaatccgagaagtagcagaagcctggaacttggcagacacagaagcctggcggttcgccaaggcattcctcgcccgttctacaatggagcggcagcagtgggagaagaaggaaagcaagtacgctggcggcgctggtggtgataccgacgacgttggtagaagtggtagtggtcgttggaaagacgacgatgagacattaaaagacgacaagaagaaagaacataaaccaaaagaggataaaccaccaagcaaaaaggctgggacgtaa

SEQ ID NO: 30302 - protein, 636 aa, Muscodor strobelii
  misc_feature: SGI Peptide ID NO. 570420
  misc_feature (15)..(610): NCBI GI: 154295435 Blast Desc: BC1G_13196 [Botryotinia fuckeliana B05.10] gi|150844064|gb|EDN19257.1| BC1G_13196 [Botryotinia fuckeliana B05.10]
  misc_feature (15)..(607): NCBI GI: 39960973 Blast Desc: MGG_09489 [Magnaporthe grisea 70-15] gi|145010987|gb|EDJ95643.1| MGG_09489 [Magnaporthe grisea 70-15]
  misc_feature (11)..(611): NCBI GI: 18376045 Blast Desc: [Neurospora crassa]
  misc_feature (11)..(593): NCBI GI: 85078149 Blast Desc: NCU03554 [Neurospora crassa OR74A] gi|28917165|gb|EAA26881.1| [Neurospora crassa OR74A]
  misc_feature (11)..(595): NCBI GI: 116200173 Blast Desc: CHGG_08242 [Chaetomium globosum CBS 148.51] gi|88179521|gb|EAQ86989.1| CHGG_08242 [Chaetomium globosum CBS 148.51]
  misc_feature (11)..(609): NCBI GI: 256729107 Blast Desc: NECHADRAFT_39784 [Nectria haematococca mpVI 77-13-4]
  misc_feature (53)..(595): NCBI GI: 171690066 Blast Desc: protein product [Podospora anserina] gi|170944988|emb|CAP71099.1| protein product [Podospora anserina]
  misc_feature (7)..(612): NCBI GI: 46138655 Blast Desc: FG10842.1 [Gibberella zeae PH-1]
  misc_feature (16)..(595): NCBI GI: 169771451 Blast Desc: [Aspergillus oryzae RIB40] gi|83768054|dbj|BAE58193.1| protein product [Aspergillus oryzae]
  misc_feature (16)..(595): NCBI GI: 238485986 Blast Desc: conserved [Aspergillus flavus NRRL3357] gi|220699110|gb|EED55449.1| conserved [Aspergillus flavus NRRL3357]
MANQGGGGRARLSHRRVFSLLIALGLFALLSLIFTFPDAVPTGPSLSQSLADHKISLPKYTDKLNPFKPPAHKPESQKDSEYGGSSWYSNWNWRSPFSSTTTLDENRSLLPPLKDRTPIYCYYDTTADRDAATKEAESSLLLTWRRAWWAQGFKPIILSAAEAMNNPLYNELQGVEMEPTLKRDLMGWLAWENMGGGLLASYLLLPMGPHEDHLLSFLRRGDFPELTRWEELNEALFVGPRQNIAKAIGEAFQNRQKKTSKHLITAVASDTFKVDPAHAALAFYDRLTVEKFYPDIAEANVGSRAESLQSLNLLMNYHLHNTWQDMFSDGIAVLKPLPTHTTTMVEPALQLATRLTACHDSPLPKSCPPNLPKCTPCHSSKPMKISTPAHHKNKTEMYIIGTVPHPYMWRTLDALRADIDVAYFRRQTERDHWLYLVFEELLGTKISSSARVVTFKDAVAGEYATAHSLWLTGEDETVPKDIDWWFGFALPKNTTEDTTSKSQISDRAKPIHDPADGENSPVDEMALEPELLRKAREVGSSKLEEDVRIREVAEAWNLADTEAWRFAKAFLARSTMERQQWEKKESKYAGGAGGDTDDVGRSGSGRWKDDDETLKDDKKKEHKPKEDKPPSKKAGT

SEQ ID NO: 30303 - DNA, 2439 bp, Muscodor strobelii
  misc_feature: SGI EST ID NO. CUFF.71681.0
  misc_feature: Variant of the nucleotide sequence at SEQ ID NO 30301
cttcaacgtaggattccgacatcaacactctttttatttccttacacaagctcatccgacacgacgagaggctcgaagagggcgcctttctgccgcgtttttggattgtgcacaacgttttgaatggactgaatatcttggaaatgcaactgtcataaggtctaccggtggcatttcctatctttcgttacgatttgcttccttgtcctcttcataaacatccttcattgttgtccatttccatcgtttttggacgcagctgctttatgccttgagtcaggtttggtacttaccaagcctaacattcgctattattctgtatatcagagtacgcgattgaccattcgtacgtccaagacagcatggcaaaccaaggcggcggcggccgggcacgtctcagccatcgccgagtattctccctactgatcgctctgggcctgtttgctctattgtcactcatttttactttcccggatgccgtgccgacgggcccgagcctttcgcaatcgttagccgaccacaagatctctctgccgaaatataccgacaagctgaatccgttcaagccgcctgcgcataagccggagagtcaaaaggactccgagtacggtggcagctcctggtactctaattggaactggaggagccccttttcatctaccacgacattagacgagaaccgctcgcttcttcctcccctaaaagatcgaacgcccatatattgttattatgacacaacggcagatcgagatgcggccaccaaagaggccgaaagtagtcttctgttgacctggaggcgagcgtggtgggctcaaggcttcaagcccataatcctcagtgcggcagaggccatgaacaacccactgtataatgaactgcaaggcgttgagatggagcccaccttgaagagagatctaatggggtggcttgcgtgggaaaacatgggcggtgggttgcttgcgtcctacctccttcttcccatgggtcctcacgaagatcatctgctgtccttcctacgaaggggagattttcccgagctgacaaggtgggaggagctcaatgaagcgctcttcgttggtccacgtcagaatatcgccaaggcaattggcgaagcttttcaaaatcgacaaaagaagacatccaaacatctaattaccgcggtcgcaagcgacacttttaaagttgatcccgcccatgcagccctggcattctacgatcgactaactgttgagaaattctatccggacattgccgaggccaatgttggtagtcgtgctgaaagcctgcagagtctcaatcttttaatgaactatcatttgcacaatacctggcaagatatgttcagtgatggaatcgcagtactcaaacccctaccaactcatacgacgactatggtcgaacccgctctgcagctggccacgagactaactgcatgtcacgactcacctcttcccaagtcgtgcccaccaaatctaccgaagtgcacaccatgtcattcgtcaaagccaatgaaaatctcgacgccagcccatcacaagaataagacggagatgtatattatcggaactgtcccgcatccctatatgtggcgcacgctcgatgcgctccgcgcagatatagatgtggcgtacttcaggagacagaccgaacgagatcactggctctacctcgtttttgaagagcttctggggactaagattagttcgtccgcacgtgtggtgacatttaaagatgctgtagcaggcgagtacgctacagcacattccctttggctgactggcgaggatgaaactgtgccgaaggatatcgattggtggttcgggtttgctcttcccaagaatacaacagaagataccacgtcgaagagtcaaatatctgatagggccaagcctattcacgatcctgccgacggtgaaaactctccagttgatgaaatggcactcgagcccgaacttttgaggaaggcccgtgaggtgggatcgagcaaactagaagaggatgtacgaatccgagaagtagcagaagcctggaacttggcagacacagaagcctggcggttcgccaaggcattcctcgcccgttctacaatggagcggcagcagtgggagaagaaggaaagcaagtacgctggcggcgctggtggtgataccgacgacgttggtagaagtggtagtggtcgttggaaagacgacgatgagacattaaaagacgacaagaagaaagaacataaaccaaaagaggataaaccaccaagcaaaaaggctgggacgtaatgtgtatatcagtgctgtgagcattaggcgttgaagacttgggttggggctgcggctggatacccgcgactgtttttgtacatagcatggagtttgtgcggcttgacggggctggtgttgcaattgtttatagatctctattcttaattgaacattaatactcaat

SEQ ID NO: 30304 - DNA, 4245 bp, Muscodor strobelii
  misc_feature: SGI cDNA ID NO. 570421
  misc_feature: Encodes the peptide sequence at SEQ ID NO 30305
atgatggcgtctactagactttatgacagagctctgcaccacttctcaactgaggcgaggcagcggtaccccgacccgaagaatcaacagctcttggcagagtttctcaaggaaaggagtagtccatacgaagctgaggtagctgcaacgaatcttgagtctgccgctaaggagaaatatggaaatgatcttggccctattccagcatcgtggttaaacaatattatggagaacatcagcagcgtcatagcggtcggtagcttcgctatgcaaggagcgccgggtccggaaggacttgtctggaccgccgtcaaggtcacattgggcgccgttcaaagcaatttcgcagtgtactcattgtttggcacaggtttgactgacatttgcgaggtcatgattctcgttactcattacgatcgcatgaatgaaggagcagcggattccagctggaaacctagcgagatggatgtatttggtgccgagaagcgaaagtttcaaggtaaactggacgacattgcagctttgaaaattgtcatcttagagagtagcgatgctgtattccgagataagtcgttacaagaattcgagaaaatgcacaataccatgcaggatatcgactctacagtacaacgtattcgagggttcgaaactcaactcgacgacatcaagaagagacaagagaaccaaacgaatgtcttgaggggggatatagaagatctcaaaaaatcgttgattggttctcataccccttggggaaaagctctcaaaatttgtgagcggtatctagatgatcttaatcccctcaagaacactctaggtccagtataccagtctctggacaaaaaggacgatggcacttgcagtgggaagtccattgtgcttgcgagtatgtgggatagtctcgcatcaaaatatctcggagacggcaccactatcgtcctatatgtatcatgtgaatcaattgttttgaacaaatccgaggcggcacagactttttcgaagcggattaccaacaccctcatgcattctctgtacgaagctgctgtgactgatatgaacctcgatgttctggagtcatgcaatcagattttcgacaatccaaaaaagcgaaagatgggcggtgcagttgcgctacagtcaaaaaccactccgcagatacctgaacccggaagacgcacatatggtgcaccgaaccaaccggagttctcggatactttcccggagttagctacaaaactcaagaagaatatcatcgtggtattagatgctgtcgacctcttaagagattcggagcaagacgcacttttcgacaatatgtacagcattgtagaatctgacggacactgggtgtgccgtgtcattgtcggttgtcggtcatcatgctccttccatctcaaattaatggatgctggtcccaagtgcagctctatcgacgtcagcgttgtcagtggccacgtcgatcaaggcacggttctttcatcggctctcaaggtcataccagggcttactgacggggagcgggaacaagcaaaacaagagattctcactaaagcgggtcgtcgcttcgattacattaaggacgtcgcaataccattcatgcgagaaccgttccagcgaccgttatcaaggcgactagctatactacctatggggattgctgacacatataacaaggcacttttcaccatgagccaaaactatgtcacccttctcaaaagagctcttttgtggtccctgttggctccaactccaccaaaagtagaagaaatcatggatgactatcgcggaacgtacagtcaaggattcgtcgacgagaaccaggagatggctgagcaggaagacacctcaaagttcaaagaagccttgctccttgatattgaacaattaagaaccgcgagtggtccgtttttgcaagttgacaactggggctatgtcaagttacaagaccccgagtcgatacgcgatttctgccttgcttcaacaggttcaagtaacacaaaaactggccaagcaatcaatagagtaggaatttcggtggaccaagacacagagcaagataaacgatcgaactttgtcgatgagaatgatcaaatgccagacacggccatggaagaggaggataacgcacaaacagccgatgcgattgaagttgacaaaacgagctcagcatctgaagactgtgccaaatcaccaacagaagaccgaaacgactcacaagatggatacgaaagcgagaactcacaagatggatacgaaagtgagaagtctgaggaagatgaaccatcgaggactattgcgcagaacttagaaggacataaaaatgtggctgctaacagcgttgacgatctcaggcgcactacgagatatgagatccaacagtgggtgtaccacttgcgctgtgccgatcagctttgcatacaaaatttgctcgagcttgggggagatcctacacttgtagacgatattgggcaaaatgcttttcacttcttcgctgagagtggagaagatactgaagcatttggtcagcttatcaagcgggcaggagatcgcgttggagaatatattaacaagctcgattgcaatggcgacactcctctacaccgtcttcttatccgacgacagacaccttcgaatctcctccaagcccttgtcgacaacggagcaaacgtcaacattgaggacgcagcttctacacgaccactccaaatggcaagtctttggggcgaagtagaattgttgaggatcatacagccaaacgttgaagatatagacgatccagatgatgacggagattccgctttacaccaagctgctgtcggcggtcatgcagacgcaattcgatttctcctcaaccatggtgcgaatgtcaatctaagaaataacagaggacgaacagctttacatgatgcagcagcaggctgtttttcggaatgtgccgaaattctgctttcttggccagaaaccaacatcatcatctgcgataacaataagcgaactgcattgttcttagcatgcgcaagccacgcgccggagaccgcctctatcatcttagacaggctgatcgaacgcgacctctctgtagcggaagtcaatcagcaaacgagccggaagaggacgcctttcagccagtcttgcatgagggcgtttgacaaaattgtaacacgattaatcaagtatgcccagagacgcaacgaggtatcaagcctgcacatcgatgaagctgatgcaaagactggactctcgcccctccatcatgctgcttctcaaggctcagcagcttgtgtgcgtgagcttattgcaattgaagcggatcttagccttaaagacaagagaggtagaacaccattggcaatcgcttacgaacagtggtcccgacgatctaaaatttctggatacgaggaaaccatatctatgcttatgagcaaagaccccaagggcgctctttcggatcaagagctgatcgctacgtgcgctgcaaacggtagcatatcattgctcgagcagcttgacggcctcagcaagggtctcggtgtagactttagcaagccggatagacacgactggactccactcgacttggcacggaagaacggaaaactggaagtggaagaattccttaggcgccgactaaatcgtgcgaatttactatcttcaagatggagcagtgagagtgggaagatagtcatcagtgagaatggcttgcacgttgtctacggtgggaggaccgaatcctacccggacgatgagaagagagcgcagtcgatctcgacggagaaaccacttccattcgggaccgatttattctattttgaagtcatcatcaaaaggctagattcgatacagtcttcgaatcccaagatggcagtcggattctgcacgttagacggtgccgtgatacgatttccaggatggaatgcaagcaacgccccttcagcaatctcctggggctatcacagcgatgacggttctttccggcacagtgatatggctgaagccgatattaaagtggactacgcgtggcgatacggagcaggtgacaccgtagggtgcggcgtcgatttcaataaaggagagatctggtttacgcttaacggaaagaaggttcacgtttttccgaatgttcaagggcgtctgtttcctgtgttaggactcattgatcacgtggaactcgagaccaagttcactggcgacttcttatataagtttgaagaagccaaggcggatgacgaggaagtcaaagattag

SEQ ID NO: 30305 - protein, 1414 aa, Muscodor strobelii
  misc_feature: SGI Peptide ID NO. 570421
  misc_feature (929)..(961): Pfam Id: PF00023 Pfam Desc: Ankyrin repeat
  misc_feature (1078)..(1110): Pfam Id: PF00023 Pfam Desc: Ankyrin repeat
  misc_feature (1265)..(1398): Pfam Id: PF00622 Pfam Desc: SPRY domain
  misc_feature (861)..(895): Pfam Id: PF00023 Pfam Desc: Ankyrin repeat
  misc_feature (2)..(659): NCBI GI: 169623941 Blast Desc: SNOG_15219 [Phaeosphaeria nodorum SN15] gi|160705081|gb|EAT77444.2| SNOG_15219 [Phaeosphaeria nodorum SN15]
  misc_feature (790)..(1413): NCBI GI: 169623941 Blast Desc: SNOG_15219 [Phaeosphaeria nodorum SN15] gi|160705081|gb|EAT77444.2| SNOG_15219 [Phaeosphaeria nodorum SN15]
  misc_feature (782)..(1401): NCBI GI: 171677754 Blast Desc: protein product [Podospora anserina] gi|170936945|emb|CAP61604.1| protein product [Podospora anserina]
  misc_feature (806)..(1322): NCBI GI: 116201341 Blast Desc: CHGG_08555 [Chaetomium globosum CBS 148.51] gi|88177073|gb|EAQ84541.1| CHGG_08555 [Chaetomium globosum CBS 148.51]
  misc_feature (7)..(664): NCBI GI: 171677754 Blast Desc: protein product [Podospora anserina] gi|170936945|emb|CAP61604.1| protein product [Podospora anserina]
  misc_feature (994)..(1394): NCBI GI: 189206359 Blast Desc: ankyrin repeat and protein kinase domain containing protein 1 [Pyrenophora tritici-repentis Pt-1C-BFP] gi|187975607|gb|EDU42233.1| ankyrin repeat and protein kinase 1
  misc_feature (7)..(425): NCBI GI: 116201341 Blast Desc: CHGG_08555 [Chaetomium globosum CBS 148.51] gi|88177073|gb|EAQ84541.1| CHGG_08555 [Chaetomium globosum CBS 148.51]
  misc_feature (76)..(803): NCBI GI: 189206357 Blast Desc: inversin [Pyrenophora tritici-repentis Pt-1C-BFP] gi|187975606|gb|EDU42232.1| inversin [Pyrenophora tritici-repentis Pt-1C-BFP]
  misc_feature (500)..(639): NCBI GI: 116201341 Blast Desc: CHGG_08555 [Chaetomium globosum CBS 148.51] gi|88177073|gb|EAQ84541.1| CHGG_08555 [Chaetomium globosum CBS 148.51]
  misc_feature (809)..(1206): NCBI GI: 123444605 Blast Desc: ankyrin repeat protein [Trichomonas vaginalis G3] gi|121892867|gb|EAX98141.1| ankyrin repeat protein, [Trichomonas vaginalis G3]
MMASTRLYDRALHHFSTEARQRYPDPKNQQLLAEFLKERSSPYEAEVAATNLESAAKEKYGNDLGPIPASWLNNIMENISSVIAVGSFAMQGAPGPEGLVWTAVKVTLGAVQSNFAVYSLFGTGLTDICEVMILVTHYDRMNEGAADSSWKPSEMDVFGAEKRKFQGKLDDIAALKIVILESSDAVFRDKSLQEFEKMHNTMQDIDSTVQRIRGFETQLDDIKKRQENQTNVLRGDIEDLKKSLIGSHTPWGKALKICERYLDDLNPLKNTLGPVYQSLDKKDDGTCSGKSIVLASMWDSLASKYLGDGTTIVLYVSCESIVLNKSEAAQTFSKRITNTLMHSLYEAAVTDMNLDVLESCNQIFDNPKKRKMGGAVALQSKTTPQIPEPGRRTYGAPNQPEFSDTFPELATKLKKNIIVVLDAVDLLRDSEQDALFDNMYSIVESDGHWVCRVIVGCRSSCSFHLKLMDAGPKCSSIDVSVVSGHVDQGTVLSSALKVIPGLTDGEREQAKQEILTKAGRRFDYIKDVAIPFMREPFQRPLSRRLAILPMGIADTYNKALFTMSQNYVTLLKRALLWSLLAPTPPKVEEIMDDYRGTYSQGFVDENQEMAEQEDTSKFKEALLLDIEQLRTASGPFLQVDNWGYVKLQDPESIRDFCLASTGSSNTKTGQAINRVGISVDQDTEQDKRSNFVDENDQMPDTAMEEEDNAQTADAIEVDKTSSASEDCAKSPTEDRNDSQDGYESENSQDGYESEKSEEDEPSRTIAQNLEGHKNVAANSVDDLRRTTRYEIQQWVYHLRCADQLCIQNLLELGGDPTLVDDIGQNAFHFFAESGEDTEAFGQLIKRAGDRVGEYINKLDCNGDTPLHRLLIRRQTPSNLLQALVDNGANVNIEDAASTRPLQMASLWGEVELLRIIQPNVEDIDDPDDDGDSALHQAAVGGHADAIRFLLNHGANVNLRNNRGRTALHDAAAGCFSECAEILLSWPETNIIICDNNKRTALFLACASHAPETASIILDRLIERDLSVAEVNQQTSRKRTPFSQSCMRAFDKIVTRLIKYAQRRNEVSSLHIDEADAKTGLSPLHHAASQGSAACVRELIAIEADLSLKDKRGRTPLAIAYEQWSRRSKISGYEETISMLMSKDPKGALSDQELIATCAANGSISLLEQLDGLSKGLGVDFSKPDRHDWTPLDLARKNGKLEVEEFLRRRLNRANLLSSRWSSESGKIVISENGLHVVYGGRTESYPDDEKRAQSISTEKPLPFGTDLFYFEVIIKRLDSIQSSNPKMAVGFCTLDGAVIRFPGWNASNAPSAISWGYHSDDGSFRHSDMAEADIKVDYAWRYGAGDTVGCGVDFNKGEIWFTLNGKKVHVFPNVQGRLFPVLGLIDHVELETKFTGDFLYKFEEAKADDEEVKD

SEQ ID NO: 30306 - DNA, 288 bp, Muscodor strobelii
  misc_feature: SGI cDNA ID NO. 570422
  misc_feature: Encodes the peptide sequence at SEQ ID NO 30307
atggctcccgtcactggaaagaagcagaagaagaagtggtccaagggcaaggtcaaggacaaggcccagcacgccgtccttctcgacaagaccacctccgagaagctctacaaagatgtccagtcctaccgcctcgtcaccgtctccaccctcgtcgaccgtctcaagatcaacggctctctggcacgcaaatgcttgaaggacctcgaggagaagggccagatcaagcccgtcgttacccacagcaagatgaagatctacacccgggccgtcggtgcctctgactaa

SEQ ID NO: 30307 - protein, 95 aa, Muscodor strobelii
  misc_feature: SGI Peptide ID NO. 570422
  misc_feature (1)..(91): Pfam Id: PF03297 Pfam Desc: S25 ribosomal protein
  misc_feature (6)..(91): Pfam Id: PF03297 Pfam Desc: S25 ribosomal protein
  misc_feature (9)..(95): NCBI GI: 261357055 Blast Desc: 40S ribosomal protein S25 [Verticillium albo-atrum VaMs.102]
  misc_feature (1)..(95): NCBI GI: 145606102 Blast Desc: MGG_06657 [Magnaporthe grisea 70-15] gi|145013829|gb|EDJ98470.1| MGG_06657 [Magnaporthe grisea 70-15]
  misc_feature (1)..(95): NCBI GI: 256732555 Blast Desc: NECHADRAFT_102538 [Nectria haematococca mpVI 77-13-4]
  misc_feature (1)..(93): NCBI GI: 145230361 Blast Desc: An01g10720 [Aspergillus niger] gi|134055606|emb|CAK37252.1| protein product [Aspergillus niger]
  misc_feature (1)..(93): NCBI GI: 238483963 Blast Desc: 40S ribosomal protein S25, [Aspergillus flavus NRRL3357] gi|220701270|gb|EED57608.1| 40S ribosomal protein S25, [Aspergillus flavus NRRL3357]
  misc_feature (1)..(95): NCBI GI: 46123285 Blast Desc: FG06020.1 [Gibberella zeae PH-1]
  misc_feature (1)..(93): NCBI GI: 169767136 Blast Desc: [Aspergillus oryzae RIB40] gi|83765894|dbj|BAE56037.1| protein product [Aspergillus oryzae]
  misc_feature (1)..(95): NCBI GI: 85110088 Blast Desc: 40S ribosomal protein S25 [Neurospora crassa OR74A] gi|51701991|sp|Q7SC06.1|RS25_NEUCR RecName: Full=40S ribosomal protein S25 gi|28924901|gb|EAA33995.1| 40S ribosomal protein S25
  misc_feature (21)..(95): NCBI GI: 261357054 Blast Desc: 40S ribosomal protein S25 [Verticillium albo-atrum VaMs.102]
  misc_feature (1)..(95): NCBI GI: 116205327 Blast Desc: 40S ribosomal protein S25 [Chaetomium globosum CBS 148.51] gi|88176675|gb|EAQ84143.1| 40S ribosomal protein S25 [Chaetomium globosum CBS 148.51]
MAPVTGKKQKKKWSKGKVKDKAQHAVLLDKTTSEKLYKDVQSYRLVTVSTLVDRLKINGSLARKCLKDLEEKGQIKPVVTHSKMKIYTRAVGASD

SEQ ID NO: 30308 - DNA, 964 bp, Muscodor strobelii
  misc_feature: SGI EST ID NO. CUFF.72067.0
  misc_feature: Variant of the nucleotide sequence at SEQ ID NO 30306
ccgcccggcccctccaccatcgcacatcaccactctccaaccagcaacaccatccagatacgacaaaatggctcccgtcactggaaagaagcagaagaagaagtggtccaagggcaagggtacgtattttccacaatggccgtgtaacgacgacgaaccgatatcaccatctttcgaaagcgacctctttggcctcgccatcatcaatcaaccgcgacgtatgcgctgacctaatttctccctacagtcaaggacaaggcccagcacgccgtccttctcgacaagaccacctccgagaagctctacaaagatgtccagtcctaccgcctcgtcaccgtctccaccctcgtcgaccgtctcaagatcaacggctctctggcacgcaaatgcttgaaggacctcgaggagaagggccagatcaagcccgtcgttacccacagcaagatgaagatctacacccgggccgtcggtgcctctgactaaacttttccatctcacgataccacgatgacgaagatgtcgattggcagaaaagaatcctccggaagaggaggatcggggatgggttatttgatggacatgagcatttgatctccggcgtagcatacgggaacggtcacggctttgagctttcacagctttactcagataggagtcgaatgaaaaaccctgatattctgctcacacaaacgcttgtctcctgcggcctgtcgtgatcccagccattacgaaatgcctcgattacttcccgccgagttcttcacaccgatccagtcaagtccttcatccgctgcgaagcctcgatcatctgggcgtggatccgggaccattcattgcactttgaaatgttgtaaccggcacatactctctaacaccagacgtgggaagttatacacacagcctaagccacggctagaaatttgtagacaaccaatggcttgtctgcttctatggcagcaaatag

SEQ ID NO: 30309 - DNA, 942 bp, Muscodor strobelii
  misc_feature: SGI cDNA ID NO. 570423
  misc_feature: Reduced expression when VOC is produced
  misc_feature: Encodes the peptide sequence at SEQ ID NO 30310
atgtctgagaaaggtaccgtcctgggcatgccgcccttcgttgcggacttcttgatgggtggtgtttccgccgccgtctcgaagactgctgctgcccccattgagcgtgtcaagctcctcatccagaaccaggatgagatgctcaaggccggtcgtctcgaccgcaagtacgccggtattggtgactgcttcaagcgcaccatggccgacgagggtgtcatgtccctgtggcgtggtaacactgccaacgtcatccgatactttcctacccaggctctgaacttcgccttccgtgacaagttcaaggctatgttcggctacaagaaggacaaggatggctacgccaagtggatggctggtaacttggcttccggtggtgctgctggtgccacttccctcctcttcgtctactccctcgactacgcccgtacccgtcttgccaacgacgccaagtccgccaagaagggtggtgaccgtcagttcaacggtctcgtcgatgtctaccgcaagaccctcgcctctgatggtattgccggtctctaccgtggcttcatgccctccgtcgctggtatcatcgtctaccgtggtctgtacttcggtatgtacgactcgatcaagcctgtcgtcctcgtcggttccctcgcaaacaacttcttggcctctttcgctctcggttggtgcgtcaccactggtgccggtatcgcctcttaccctcttgacaccatccgccgtcgcatgatgatgacctctggtgaggccgtcaagtacaacggtactctcgatgctgcccgccagattatcgccaaggagggtgttaagtctctcttcaagggtgctggtgccaacattctccgtggtgtcgccggtgctggtgtgctctccatctacgatcagctccaggtcctcatgttcggcaaggccttcaagggtggctctggttaa

SEQ ID NO: 30310 - protein, 313 aa, Muscodor strobelii
  misc_feature: SGI Peptide ID NO. 570423
  misc_feature (12)..(109): Pfam Id: PF00153 Pfam Desc: Mitochondrial carrier protein
  misc_feature (117)..(213): Pfam Id: PF00153 Pfam Desc: Mitochondrial carrier protein
  misc_feature (217)..(307): Pfam Id: PF00153 Pfam Desc: Mitochondrial carrier protein
  misc_feature (2)..(309): NCBI GI: 46123287 Blast Desc: ADT_NEUCR ADP,ATP CARRIER PROTEIN (ADP/ATP TRANSLOCASE) (ADENINE NUCLEOTIDE TRANSLOCATOR) (ANT) [Gibberella zeae PH-1]
  misc_feature (3)..(309): NCBI GI: 261357056 Blast Desc: ADP,ATP carrier protein [Verticillium albo-atrum VaMs.102]
  misc_feature (1)..(313): NCBI GI: 85110027 Blast Desc: ADP,ATP carrier protein [Neurospora crassa OR74A] gi|113466|sp|P02723.1|ADT_NEUCR RecName: Full=ADP,ATP carrier protein; AltName: Full=ADP/ATP translocase; AltName: Full=Adenine
  misc_feature (4)..(313): NCBI GI: 171689774 Blast Desc: protein product [Podospora anserina] gi|170944849|emb|CAP70961.1| protein product [Podospora anserina]
  misc_feature (3)..(313): NCBI GI: 145606104 Blast Desc: ADP,ATP carrier protein [Magnaporthe grisea 70-15] gi|145013830|gb|EDJ98471.1| ADP,ATP carrier protein [Magnaporthe grisea 70-15]
  misc_feature (8)..(313): NCBI GI: 59802910 Blast Desc: ADP/ATP carrier protein-like protein [Magnaporthe grisea]
  misc_feature (7)..(313): NCBI GI: 25989569 Blast Desc: ADP-ATP translocase [Gaeumannomyces graminis var. tritici]
  misc_feature (3)..(309): NCBI GI: 116205325 Blast Desc: ADP,ATP carrier protein [Chaetomium globosum CBS 148.51] gi|88176674|gb|EAQ84142.1| ADP,ATP carrier protein [Chaetomium globosum CBS 148.51]
  misc_feature (6)..(313): NCBI GI: 169605167 Blast Desc: SNOG_05601 [Phaeosphaeria nodorum SN15] gi|111065545|gb|EAT86665.1| SNOG_05601 [Phaeosphaeria nodorum SN15]
  misc_feature (1)..(313): NCBI GI: 189195496 Blast Desc: ADP,ATP carrier protein [Pyrenophora tritici-repentis Pt-1C-BFP] gi|187979965|gb|EDU46591.1| ADP,ATP carrier protein [Pyrenophora tritici-repentis Pt-1C-BFP]
  misc_feature: Useful for introducing or modulating the production of volatile compounds
MSEKGTVLGMPPFVADFLMGGVSAAVSKTAAAPIERVKLLIQNQDEMLKAGRLDRKYAGIGDCFKRTMADEGVMSLWRGNTANVIRYFPTQALNFAFRDKFKAMFGYKKDKDGYAKWMAGNLASGGAAGATSLLFVYSLDYARTRLANDAKSAKKGGDRQFNGLVDVYRKTLASDGIAGLYRGFMPSVAGIIVYRGLYFGMYDSIKPVVLVGSLANNFLASFALGWCVTTGAGIASYPLDTIRRRMMMTSGEAVKYNGTLDAARQIIAKEGVKSLFKGAGANILRGVAGAGVLSIYDQLQVLMFGKAFKGGSG

SEQ ID NO: 30311 - DNA, 1561 bp, Muscodor strobelii
  misc_feature: SGI EST ID NO. CUFF.71793.0
  misc_feature: Variant of the nucleotide sequence at SEQ ID NO 30309
tttttcctgcctcccccgaaccctttttcactcctgcagggccccgtcgctgagtagaaatatttctctcgacctttatcaacccatcgctcccatctttcccttctctcccattcttcttctattccctattccatctccactcaccccttctcttcaaagacacgtctttgacacagccgcgaagatgtctgagaaaggtaccgtcctgggcatgccgcccttcgttgcggacttcttgatgggtggtgtttccgccgccgtctcgaagactgctgctgcccccattgagcgtgtcaagctcctcatccagaaccaggatgagatgctcaaggccggtcgtctcgaccgcaagtacgccggtattggtgactgcttcaagcgcaccatggccgacgagggtgtcatgtccctgtggcgtggtaacactgccaacgtcatccgatactttcctacccaggctctgaacttcgccttccgtgacaagttcaaggctatgttcggctacaagaaggacaaggatggctacgccaagtggatggctggtaacttggcttccggtggtgctgctggtgccacttccctcctcttcgtctactccctcgactacgcccgtacccgtcttgccaacgacgccaagtccgccaagaagggtggtgaccgtcagttcaacggtctcgtcgatgtctaccgcaagaccctcgcctctgatggtattgccggtctctaccgtggcttcatgccctccgtcgctggtatcatcgtctaccgtggtctgtacttcggtatgtacgactcgatcaagcctgtcgtcctcgtcggttccctcgcaaacaacttcttggcctctttcgctctcggttggtgcgtcaccactggtgccggtatcgcctcttaccctcttgacaccatccgccgtcgcatgatgatgacctctggtgaggccgtcaagtacaacggtactctcgatgctgcccgccagattatcgccaaggagggtgttaagtctctcttcaagggtgctggtgccaacattctccgtggtgtcgccggtgctggtgtgctctccatctacgatcagctccaggtcctcatgttcggcaaggccttcaagggtggctctggttaaataccctctcatcatacctcaatagacagcggaggcgtggtggtgtaatgcaatggataagtgattcggccaagtcataagggggccggtaaaagatgtgattaagactgcggcagaaggttgttacagatcaagatcacataacccgtggcgttctggaacagcttttgattttgcggcatgggctgatagacgaggcaaaactcgatttccggagtctcttaatcggtctcccgctgtaatttagatacaaagcaaattcccttgattgtacttctgcacgcgcccttcctctctcgctgaacgatcatgattcccttaagcctgtatctgttgcatacgatgttatagatttgcaaatgacaatgatttctcaaatgtcctttgttatttctacaagtgagggcccataagatattacttcgtgaaatc

SEQ ID NO: 30312 - DNA, 483 bp, Muscodor strobelii
  misc_feature: SGI cDNA ID NO. 570424
  misc_feature: Encodes the peptide sequence at SEQ ID NO 30313
atgcccgccaatcaatctaaggcggctccccgcggccgtccccgtggaggcgctcgaggcggttcatcatccgcaggacaatcctcaagatctagctgcaagacagcgtccaaagcgcagagcagagtcgcggaggaggatatcgacgatgatccattcgcagatgatagcgaggagatgcaaagacgggatagggatagtaatgcgatggaagttgaggagattgatgatgaggacgatgatgagctcgatgtccagaagacgattcctcctgagcttttgacgaggattctgcatgagttctttgagaagagtggtacgaggatctcgaaggatgctaataaggcggttgctaagtatatggatatctttgtccgcgaggctattgctaggagttgtgttgagaagcctgaagataggggggtttttcttgaggtttcggaccttgagaaggttgcgccgcagcttttgatggatctttga

SEQ ID NO: 30313 - protein, 160 aa, Muscodor strobelii
  misc_feature: SGI Peptide ID NO. 570424
  misc_feature (90)..(160): Pfam Id: PF09415 Pfam Desc: Domain of function (DUF2008)
  misc_feature (1)..(160): NCBI GI: 39977541 Blast Desc: MGG_06655 [Magnaporthe grisea 70-15] gi|145013831|gb|EDJ98472.1| MGG_06655 [Magnaporthe grisea 70-15]
  misc_feature (87)..(160): NCBI GI: 46123289 Blast Desc: FG06022.1 [Gibberella zeae PH-1]
  misc_feature (88)..(160): NCBI GI: 85110029 Blast Desc: NCU09478 [Neurospora crassa OR74A] gi|28924871|gb|EAA33966.1| [Neurospora crassa OR74A]
  misc_feature (88)..(160): NCBI GI: 38524275 Blast Desc: [Neurospora crassa]
  misc_feature (2)..(160): NCBI GI: 238483957 Blast Desc: conserved [Aspergillus flavus NRRL3357] gi|220701267|gb|EED57605.1| conserved [Aspergillus flavus NRRL3357]
  misc_feature (63)..(160): NCBI GI: 156065595 Blast Desc: [Sclerotinia sclerotiorum 1980] gi|154691667|gb|EDN91405.1| [Sclerotinia sclerotiorum 1980]
  misc_feature (71)..(160): NCBI GI: 145230355 Blast Desc: An01g10690 [Aspergillus niger] gi|134055603|emb|CAK37249.1| protein product [Aspergillus niger]
  misc_feature (76)..(160): NCBI GI: 119494425 Blast Desc: NFIA_008890 [Neosartorya fischeri NRRL 181] gi|119412270|gb|EAW22211.1| conserved [Neosartorya fischeri NRRL 181]
  misc_feature (89)..(160): NCBI GI: 242778619 Blast Desc: conserved [Talaromyces stipitatus ATCC 10500] gi|218722895|gb|EED22313.1| conserved [Talaromyces stipitatus ATCC 10500]
  misc_feature (76)..(160): NCBI GI: 146322668 Blast Desc: conserved [Aspergillus fumigatus Af293] gi|129557782|gb|EAL90983.2| conserved [Aspergillus fumigatus Af293] gi|159131755|gb|EDP56868.1| conserved [Aspergillus A1163]
MPANQSKAAPRGRPRGGARGGSSSAGQSSRSSCKTASKAQSRVAEEDIDDDPFADDSEEMQRRDRDSNAMEVEEIDDEDDDELDVQKTIPPELLTRILHEFFEKSGTRISKDANKAVAKYMDIFVREAIARSCVEKPEDRGVFLEVSDLEKVAPQLLMDL

SEQ ID NO: 30314 - DNA, 2193 bp, Muscodor strobelii
  misc_feature: SGI cDNA ID NO. 570425
  misc_feature: Encodes the peptide sequence at SEQ ID NO 30315
atggcagaggtcgtgggtactgtggcgagcgtgattacgctggtcgggctgctcaaaggttgtattgacgcctgtgagctcattcgctccgcaaaagactacaaggaggaactcgaaagatgtgaccttaagctcgcattggagcaatgccgcctcaaaacttggggcaagagtatggggcttattagggacgaggattcacaacaaggacgatctctcttagaatacttcgagtttcgggatgttgtccaggatgcgctgcggcagattatcaatctgctcaccaacacgcatcgactgagcaacaaatatggtgctcagcccgtatcgagagaaagggcactgctttcttctcctaacccgggctcttggaggtcgtcatcagctctcaagctcactgtggccttcaaacggctcaggatccatgatatcatccgtgaccagaccaacgaggcggtgcggtcgtctgtgtggatcttctacgatcaaaagaaatactcgctactgatagaagagcttcggacgttggtagatgcagtcgagaatgtgactcgggatctggtaactcgagagcaacagcagcaattctttgtatcccgtataaatgccatatcagacgtcagaacacttaatatgctcactgaggtgtgcgaagtcgaccatccggcgttttctgacgccgcttctgtccgtgctgaggttctctccttcaccacgacacaccagacggacttaaaaaactggattgacggtgccacaaacaatttgaacgattcccaagaagaagtcacagatgaaatggaaaattgggatctagccgattttaggcgtcaatatttagcattacgaaacgttcaggctgccaagccgcgggccgcgacagatcctgaagcagcgaagaagtccaagaaggagaaacagaaaaacgtgcagatgatatacgacgaccttttcactcccgaggagagaatggctatgatgccgagatacgcctttactcccgaagctacaacgacagctacgacgccggctacgacgccggctatgacatcgaaatataatgctttgtcaaaagatgatcttaagcgtaaaggtggcgtggactttgaccaggcgattgcctatgtcaacaagattaaaaaccgctttaggcgtcggccagaagtatacaggcaatttctagagacgttgcaggcttatcaacgagaaaggatgtctattaaggaagtatacgctaaaattatagatctcttctggccagaaacagatttaattgaggatttcaagtcctttctccctgacgtcacggcagagcagccacaagcccctttagatcaagacgttgaaggatcgatagccgagttttatccaaacctgcacgcgctttgctctgccatagtcacggaccttgccatagttacggacggtgaagacagatctatagatatagatatgtttggaacgccatcacaagagcgccagttccaacagccagtcctagacgacgccctgaggtacctggatatcgtcaagttgcaatttccagatactccagatgtttataatcgtttcatggacattatgaaggactttaggaacggaaaagtagatactccaggggtgatcggccgcgtcaagactctgttctcaggacatgaaaagctcataagggggtttgaccgctttttgccacctgaataccgattactggacgatggcgtcaaagcgattacaccaacaccagtcggcgacagtgaggctgaaaatgacgtagatccatcaatttcatcagccgatgacgatttattggccgttaacacgatactgcctgctacggctcctctctccgagatcaccatgggctttgacatgaacgatgtcgaaacgctacgatactacaccgagctcgctatatacaagtacagtccgcgtcgcgacatactagttttccctccgcagctggagtttgagccgctgaatcgcgtggcgaacgttgctgagcgcttcaggcttgaacacgaaataatagtcctgagagacagtagtttacaaattacggtctatcgacctgatcaggacttaagcgatgatgacggtaacggtggcagtgaccataatgctagtgatggtgactgtgatcgcgttgtttcgaggtccacggtcaaagaagatacagagatgactgagctctaa

SEQ ID NO: 30315 - protein, 730 aa, Muscodor strobelii
  misc_feature: SGI Peptide ID NO. 570425
  misc_feature (518)..(564): Pfam Id: PF02671 Pfam Desc: Paired amphipathic helix repeat
  misc_feature (387)..(433): Pfam Id: PF02671 Pfam Desc: Paired amphipathic helix repeat
  misc_feature (494)..(612): NCBI GI: 226291070 Blast Desc: transcriptional regulatory protein SIN3 [Paracoccidioides brasiliensis Pb18]
  misc_feature (494)..(612): NCBI GI: 225679348 Blast Desc: paired amphipathic helix protein Sin3b [Paracoccidioides brasiliensis Pb03]
  misc_feature (487)..(602): NCBI GI: 225561997 Blast Desc: transcriptional repressor Sin3p [Ajellomyces capsulatus G186AR]
  misc_feature (487)..(602): NCBI GI: 154283751 Blast Desc: conserved [Ajellomyces capsulatus NAm1] gi|150410851|gb|EDN06239.1| conserved [Ajellomyces capsulatus NAm1]
  misc_feature (494)..(626): NCBI GI: 189203277 Blast Desc: paired amphipathic helix protein Sin3a [Pyrenophora tritici-repentis Pt-1C-BFP] gi|187985073|gb|EDU50561.1| paired amphipathic helix protein Sin3a [Pyrenophora tritici-repentis
  misc_feature (494)..(616): NCBI GI: 169603355 Blast Desc: SNOG_04686 [Phaeosphaeria nodorum SN15] gi|160706376|gb|EAT88446.2| SNOG_04686 [Phaeosphaeria nodorum SN15]
  misc_feature (494)..(600): NCBI GI: 226278238 Blast Desc: conserved [Paracoccidioides brasiliensis Pb01]
  misc_feature (494)..(648): NCBI GI: 62825066 Blast Desc: AF443185_1 transcriptional repressor Sin3p [Paracoccidioides brasiliensis]
  misc_feature (494)..(602): NCBI GI: 261197792 Blast Desc: transcriptional repressor Sin3p [Ajellomyces dermatitidis SLH14081] gi|239595261|gb|EEQ77842.1| transcriptional repressor Sin3p [Ajellomyces dermatitidis Sin3p
  misc_feature (489)..(569): NCBI GI: 256734847 Blast Desc: histone deacetylase complex protein [Nectria haematococca mpVI 77-13-4]
MAEVVGTVASVITLVGLLKGCIDACELIRSAKDYKEELERCDLKLALEQCRLKTWGKSMGLIRDEDSQQGRSLLEYFEFRDVVQDALRQIINLLTNTHRLSNKYGAQPVSRERALLSSPNPGSWRSSSALKLTVAFKRLRIHDIIRDQTNEAVRSSVWIFYDQKKYSLLIEELRTLVDAVENVTRDLVTREQQQQFFVSRINAISDVRTLNMLTEVCEVDHPAFSDAASVRAEVLSFTTTHQTDLKNWIDGATNNLNDSQEEVTDEMENWDLADFRRQYLALRNVQAAKPRAATDPEAAKKSKKEKQKNVQMIYDDLFTPEERMAMMPRYAFTPEATTTATTPATTPAMTSKYNALSKDDLKRKGGVDFDQAIAYVNKIKNRFRRRPEVYRQFLETLQAYQRERMSIKEVYAKIIDLFWPETDLIEDFKSFLPDVTAEQPQAPLDQDVEGSIAEFYPNLHALCSAIVTDLAIVTDGEDRSIDIDMFGTPSQERQFQQPVLDDALRYLDIVKLQFPDTPDVYNRFMDIMKDFRNGKVDTPGVIGRVKTLFSGHEKLIRGFDRFLPPEYRLLDDGVKAITPTPVGDSEAENDVDPSISSADDDLLAVNTILPATAPLSEITMGFDMNDVETLRYYTELAIYKYSPRRDILVFPPQLEFEPLNRVANVAERFRLEHEIIVLRDSSLQITVYRPDQDLSDDDGNGGSDHNASDGDCDRVVSRSTVKEDTEMTEL

SEQ ID NO: 30316 - DNA, 3261 bp, Muscodor strobelii
  misc_feature: SGI EST ID NO. CUFF.71714.0
  misc_feature: Variant of the nucleotide sequence at SEQ ID NO 30314
atagtgagggcgcgtccgaatgaaatgtgccttctgtgggtcgtaatgcatgatactggaccccttttgggcactcagcgcagcctattgctgcgcctctgtgacattgcgcctgtctcagcctcaccggccctgggcgagtccttcgactaactggtgtttggctacatctttcttcttcctatttcctggccgactgatgacatgtgtgagaatatcacgtctcatggcagaggtcgtgggtactgtggcgagcgtgattacgctggtcgggctgctcaaaggttgtattgacgcctgtgagctcattcgctccgcaaaagactacaaggaggaactcgaaagatgtgaccttaagctcgcattggagcaatgccgcctcaaaacttggggcaagagtatggggcttattagggacgaggattcacaacaaggacgatctctcttagaatacttcgagtttcgggatgttgtccaggatgcgctgcggcagattatcaatctgctcaccaacacgcatcgactgagcaacaaatatggtgctcagcccgtatcgagagaaagggcactgctttcttctcctaacccgggctcttggaggtcgtcatcagctctcaagctcactgtggccttcaaacggctcaggatccatgatatcatccgtgaccagaccaacgaggcggtgcggtcgtctgtgtggatcttctacgatcaaaagaaatactcgctactgatagaagagcttcggacgttggtagatgcagtcgagaatgtgactcgggatctggtaactcgagagcaacagcagcaattctttgtatcccgtataaatgccatatcagacgtcagaacacttaatatgctcactgaggtgtgcgaagtcgaccatccggcgttttctgacgccgcttctgtccgtgctgaggttctctccttcaccacgacacaccagacggacttaaaaaactggattgacggtgccacaaacaatttgaacgattcccaagaagaagtcacagatgaaatggaaaattgggatctagccgattttaggcgtcaatatttagcattacgaaacgttcaggctgccaagccgcgggccgcgacagatcctgaagcagcgaagaagtccaagaaggagaaacagaaaaacgtgcagatgatatacgacgaccttttcactcccgaggagagaatggctatgatgccgagatacgcctttactcccgaagctacaacgacagctacgacgccggctacgacgccggctatgacatcgaaatataatgctttgtcaaaagatgatcttaagcgtaaaggtggcgtggactttgaccaggcgattgcctatgtcaacaagattaaaaaccgctttaggcgtcggccagaagtatacaggcaatttctagagacgttgcaggcttatcaacgagaaaggatgtctattaaggaagtatacgctaaaattatagatctcttctggccagaaacagatttaattgaggatttcaagtcctttctccctgacgtcacggcagagcagccacaagcccctttagatcaagacgttgaaggatcgatagccgagttttatccaaacctgcacgcgctttgctctgccatagtcacggaccttgccatagttacggacggtgaagacagatctatagatatagatatgtttggaacgccatcacaagagcgccagttccaacagccagtcctagacgacgccctgaggtacctggatatcgtcaagttgcaatttccagatactccagatgtttataatcgtttcatggacattatgaaggactttaggaacggaaaagtagatactccaggggtgatcggccgcgtcaagactctgttctcaggacatgaaaagctcataagggggtttgaccgctttttgccacctgaataccgattactggacgatggcgtcaaagcgattacaccaacaccagtcggcgacagtgaggctgaaaatgacgtagatccatcaatttcatcagccgatgacgatttattggccgttaacacgatactgcctgctacggctcctctctccgagatcaccatgggctttgacatgaacgatgtcgaaacgctacgatactacaccgagctcgctatatacaagtacagtccgcgtcgcgacatactagttttccctccgcagctggagtttgagccgctgaatcgcgtggcgaacgttgctgagcgcttcaggcttgaacacgaaataatagtcctgagagacagtagtttacaaattacggtctatcgacctgatcaggacttaagcgatgatgacggtaacggtggcagtgaccataatgctagtgatggtgactgtgatcgcgttgtttcgaggtccacggtcaaagaagatacagagatgactgagctctaagcatgcttctcgcattaaatgcaaagctctttactttatatcgtgatgacattcttactcccaatgtcagagttgagagagaggacagaagcactatttgtttctactatcatcgcggaagagaatcccgtagatcattcatgaaacttcggtaacgaggtcgaagaagtggttgccaagaaacgatcatttttgatatgatctagactctgtttcaaagtcgggaaatctgcggtatgtatgtaagattcacgataaggcctacgttatagctatggatgcgtgttgggaaaatactgttgtacaaaggttgatcttgttcattgctggtgctgcaccattgaatagacggattgattcttgatgcaagacctgactacgaagcagaacatgacacgaaacagtatacagtagccatttggagagaatctttagccaacactaaagtccagactttgcgaacgtgaatgagcatcgaaacaattcattcctccatgtgcaatctttcgtttgatgatgttcgccaagtctcaagatcagaccgagttgcatattagctagcaataaactcctctctagagaagatcgcaaagcgtgcaagaaacatctacgtgcccttgaaacaactccgtaatgacaaacgcgacaccataagacctcggcggtaataagctactgtatcgctcgcttcgcaggactctgaccccagcctccacttaatcagttccaccatccaatatctaccacaacccaatccttcgagaaccggcaaatatgacatgcaaaatttcagggactagaaatgagatgaatgatcgaggctctgttcggttagcattccg

SEQ ID NO: 30317 - DNA, 741 bp, Muscodor strobelii
  misc_feature: SGI cDNA ID NO. 570426
  misc_feature: Elevated expression when VOC is produced
  misc_feature: Encodes the peptide sequence at SEQ ID NO 30318
atgtttggaacgccatcacaagagcgccagttccaacagccagtcctagacgacgccctgaggtacctggatatcgtcaagttgcaatttccagatactccagatgtttataatcgtttcatggacattatgaaggactttaggaacggaaaagtagatactccaggggtgatcggccgcgtcaagactctgttctcaggacatgaaaagctcataagggggtttgaccgctttttgccacctgaataccgattactggacgatggcgtcaaagcgattacaccaacaccagtcggcgacagtgaggctgaaaatgacgtagatccatcaatttcatcagccgatgacgatttattggccgttaacacgatactgcctgctacggctcctctctccgagatcaccatgggctttgacatgaacgatgtcgaaacgctacgatactacaccgagctcgctatatacaagtacagtccgcgtcgcgacatactagttttccctccgcagctggagtttgagccgctgaatcgcgtggcgaacgttgctgagcgcttcaggcttgaacacgaaataatagtcctgagagacagtagtttacaaattacggtctatcgacctgatcaggacttaagcgatgatgacggtaacggtggcagtgaccataatgctagtgatggtgactgtgatcgcgttgtttcgaggtccacggtcaaagaagatacagagatgactgagctctaa

SEQ ID NO: 30318 - protein, 246 aa, Muscodor strobelii
  misc_feature: SGI Peptide ID NO. 570426
  misc_feature (34)..(80): Pfam Id: PF02671 Pfam Desc: Paired amphipathic helix repeat
  misc_feature (3)..(118): NCBI GI: 154283751 Blast Desc: conserved [Ajellomyces capsulatus NAm1] gi|150410851|gb|EDN06239.1| conserved [Ajellomyces capsulatus NAm1]
  misc_feature (3)..(118): NCBI GI: 225561997 Blast Desc: transcriptional repressor Sin3p [Ajellomyces capsulatus G186AR]
  misc_feature (10)..(128): NCBI GI: 225679348 Blast Desc: paired amphipathic helix protein Sin3b [Paracoccidioides brasiliensis Pb03]
  misc_feature (10)..(128): NCBI GI: 226291070 Blast Desc: transcriptional regulatory protein SIN3 [Paracoccidioides brasiliensis Pb18]
  misc_feature (10)..(116): NCBI GI: 226278238 Blast Desc: conserved [Paracoccidioides brasiliensis Pb01]
  misc_feature (10)..(118): NCBI GI: 261197792 Blast Desc: transcriptional repressor Sin3p [Ajellomyces dermatitidis SLH14081] gi|239595261|gb|EEQ77842.1| transcriptional repressor Sin3p [Ajellomyces dermatitidis Sin3p
  misc_feature (10)..(132): NCBI GI: 189203277 Blast Desc: paired amphipathic helix protein Sin3a [Pyrenophora tritici-repentis Pt-1C-BFP] gi|187985073|gb|EDU50561.1| paired amphipathic helix protein Sin3a [Pyrenophora tritici-repentis
  misc_feature (10)..(164): NCBI GI: 62825066 Blast Desc: AF443185_1 transcriptional repressor Sin3p [Paracoccidioides brasiliensis]
  misc_feature (10)..(132): NCBI GI: 169603355 Blast Desc: SNOG_04686 [Phaeosphaeria nodorum SN15] gi|160706376|gb|EAT88446.2| SNOG_04686 [Phaeosphaeria nodorum SN15]
  misc_feature (10)..(85): NCBI GI: 256734847 Blast Desc: histone deacetylase complex protein [Nectria haematococca mpVI 77-13-4]
  misc_feature: Useful for introducing or modulating the production of volatile compounds
MFGTPSQERQFQQPVLDDALRYLDIVKLQFPDTPDVYNRFMDIMKDFRNGKVDTPGVIGRVKTLFSGHEKLIRGFDRFLPPEYRLLDDGVKAITPTPVGDSEAENDVDPSISSADDDLLAVNTILPATAPLSEITMGFDMNDVETLRYYTELAIYKYSPRRDILVFPPQLEFEPLNRVANVAERFRLEHEIIVLRDSSLQITVYRPDQDLSDDDGNGGSDHNASDGDCDRVVSRSTVKEDTEMTEL

SEQ ID NO: 30319 - DNA, 3261 bp, Muscodor strobelii; identical to SEQ ID NO: 30316
  misc_feature: SGI EST ID NO. CUFF.71714.0
  misc_feature: Variant of the nucleotide sequence at SEQ ID NO 30317

SEQ ID NO: 30320 - DNA, 642 bp, Muscodor strobelii
  misc_feature: SGI cDNA ID NO. 570427
  misc_feature: Elevated expression when VOC is produced
  misc_feature: Encodes the peptide sequence at SEQ ID NO 30321
atgtatttctcgaccgtagccatcaccacccttctgggtctcgcctcggcgcaaactatccacgtagtttccgtctcaaatgcagacaagaaactgatattctcgccgaacaacatcaaggccgcagtaggcgagatggtacaattccagttccagtcaggaaaccacagtgtcgttcagtccaacttcgataacccttgcgaacccattgctcttcacaactccagcgccaagggcatgttctctggttacatggacgtagcggctggcgagagcacgggaatggcaccagtatataccatgatgatctctgccgcaacgcccgtctggttgtactgctcccagggaaagcattgccaggctggtatgactatggttatcaatgagaacactgctgccaacgctacgagatctctgtcaaactacaacacaatcgctgccggcgtcgccacctcacttgaccccatcagcgctggcgtagctagcggcagcagcgatggctcctctggctccggtactggcaccgactcgagcacacccgcatcctcaacatctgccgtaccaacaggtctgggctctactgtctctgtatctgcttggactggtttgctcgcctttgccgcggccatgatgatgttgtga

SEQ ID NO: 30321 - protein, 213 aa, Muscodor strobelii
  misc_feature: SGI Peptide ID NO. 570427
  misc_feature (21)..(155): NCBI GI: 154320267 Blast Desc: BC1G_02114 [Botryotinia fuckeliana B05.10] gi|150854853|gb|EDN30045.1| BC1G_02114 [Botryotinia fuckeliana B05.10]
  misc_feature (1)..(144): NCBI GI: 256732557 Blast Desc: NECHADRAFT_78860 [Nectria haematococca mpVI 77-13-4]
  misc_feature (1)..(167): NCBI GI: 171689778 Blast Desc: protein product [Podospora anserina] gi|170944851|emb|CAP70963.1| protein product [Podospora anserina]
  misc_feature (21)..(155): NCBI GI: 156065597 Blast Desc: SS1G_00809 [Sclerotinia sclerotiorum 1980] gi|154691668|gb|EDN91406.1| SS1G_00809 [Sclerotinia sclerotiorum 1980]
  misc_feature (16)..(155): NCBI GI: 85110031 Blast Desc: NCU09479 [Neurospora crassa OR74A] gi|28924872|gb|EAA33967.1| [Neurospora crassa OR74A] gi|38524274|emb|CAE75738.1| conserved [Neurospora crassa]
  misc_feature (32)..(152): NCBI GI: 46123291 Blast Desc: FG06023.1 [Gibberella zeae PH-1]
  misc_feature (1)..(149): NCBI GI: 39977537 Blast Desc: MGG_06653 [Magnaporthe grisea 70-15] gi|145013833|gb|EDJ98474.1| MGG_06653 [Magnaporthe grisea 70-15]
  misc_feature (20)..(152): NCBI GI: 119185977 Blast Desc: CIMG_03036 [Coccidioides immitis RS]
  misc_feature (20)..(152): NCBI GI: 240108742 Blast Desc: CPC735_010950 [Coccidioides posadasii C735 delta SOWgp]
  misc_feature (20)..(131): NCBI GI: 261357059 Blast Desc: conserved [Verticillium albo-atrum VaMs.102]
  misc_feature: Useful for introducing or modulating the production of volatile compounds
MYFSTVAITTLLGLASAQTIHVVSVSNADKKLIFSPNNIKAAVGEMVQFQFQSGNHSVVQSNFDNPCEPIALHNSSAKGMFSGYMDVAAGESTGMAPVYTMMISAATPVWLYCSQGKHCQAGMTMVINENTAANATRSLSNYNTIAAGVATSLDPISAGVASGSSDGSSGSGTGTDSSTPASSTSAVPTGLGSTVSVSAWTGLLAFAAAMMML

SEQ ID NO: 30322 - DNA, 2937 bp, Muscodor strobelii
  misc_feature: SGI EST ID NO. CUFF.71774.0
  misc_feature: Variant of the nucleotide sequence at SEQ ID NO 30320
ctggcaaccgacttaactaagcgcttctctgttgagatttttgatgattgatcacgagaatcgttaataggttgaagaaatgtaggtattgagattcgtgatgtcatgtgaaatatcaattaaatgatgggaattgacagctatggtctactaatatgcagattatcttcacgactccaggtaaaatgtctcggtcgacctttcactaggcggctctgcatcacggagtgaagcccaatctcatctgcgacttatgatcgctcatatacagccaggccactatcgaagctccaggggcaagcgaggcctcaccagtgactaaatgccaggtcgcagaccgaccagtggcgtcctcatattatcaaggtcgaaacgtgtttcacgaacctctccccattcacatcactcacaacaacccccgtgaacttcagacacaatacggggatggatgcttggtacatccgatggagatccctcagctcccgcctcaggttcatataacctctatgcctggccttggccattgtttcttcttccctttctctctctattcttctccatctcagtctgtttctctacttcgtgtgtcctttcacggtctctcttttcttcgtccatcttaatattctcaggctagtcctacagcgcgagtcgcatttccaacgccaacaaaagttcaaaccaaacactctcttatcctctctcacgaattaataccacgatcaacatgtatttctcgaccgtagccatcaccacccttctgggtctcgcctcggcgcaaactatccacgtagtttccgtctcaaatgcagacaagaaactgatattctcgccgaacaacatcaaggccgcagtaggcgagatggtacaattccagttccagtcaggaaaccacagtgtcgttcagtccaacttcgataacccttgcgaacccattgctcttcacaactccagcgccaagggcatgttctctggttacatggacgtagcggctggcgagagcacgggaatggcaccagtatataccatgatgatctctgccgcaacgcccgtctggttgtactgctcccagggaaagcattgccaggctggtatgactatggttatcaatgagaacactgctgccaacgctacgagatctctgtcaaactacaacacaatcgctgccggcgtcgccacctcacttgaccccatcagcgctggcgtagctagcggcagcagcgatggctcctctggctccggtactggcaccgactcgagcacacccgcatcctcaacatctgccgtaccaacaggtctgggctctactgtctctgtatctgcttggactggtttgctcgcctttgccgcggccatgatgatgttgtgaaagtaacgaggtcatgaaatgttgaaaaaggggccctgggggttctcggaaaggattgtatgaagaacggtgatagggaaaggggttttggtttttcttcttgttggcatatttttgcattagatcaaaaacttgcgggtaactacctcgtcatagtcgatcgacacgacagacacggttttgctgtttactgttcatataaataacgttaatatacccatacgactttcagatcggtattgtcaagttcatgttattgcaatggtgaattagttgagatattttgttggaacaaatttttattccttttgtgcgtctgcccttgctattcaggcaacctgtacatatttgtacgtatttgaaaagttgggttgcaaaactggtttgacgtctattgttcgggaatcgttctcttcttcctacccttcgccgcagatttgcaaagcgtcttcctcggctctttatcaagccaattcttctcccgcttcacatacccaaccttcgggtatttggggttattcgcaaaaaagttgacccagtgcaacaaagcttcatatacacgcttctgagccttctcgagctcttctttcttcagcgccgctaactcttcggccgaccagtgtgcgtcagtctctgggtcgtcgagaggcagatacatgtcctcgacacctcgcatatctgcatttcgatcgtctttgaaacaccccgtcacgtagctccgtgctgcgtcggcaccggcgaagaattggtaggatccgcctggcccgtaggtccgacggttttcggatacgtcgtagatcgtgccgttaatagcgaggtaaaggggtttggactcgtcttgtccatcgtagcctgcgagttcggcgggtgtgaggtagattggacctttctatgtacttgcaattagccattgccgcattgagattgcttcaaacatcaccactaagaacgaatcccgcacagggtcattgacttacaaactgtgccttccaccactctttctgcaaatactttacgtgcgatttgcctccccaagtataactctcaccgccagagatcagataactcagcgcacacgaagcaaatacgaggaacgagaggacccgtaggatgtcgacccatggggtgtactcgtcatcttcatcgacgagcttttccttcggcgaccggttcgcattctttagcactgattctgtttcttcgcgctctctctcaatctcctcggcctcatcggtatcaacctcttcgacctgtggtggaggaggaggatttgcagcagcttctctggccttacgttggcggacgcttcctcgcgtttccgtcattatgaaggtgggccggagaaccgtggggttgatttacaagtatcccaaaaagagaaacaagtaatcctgaagcaagcgaaatccacagcacgaaaattaatgagaaaccccaaaaaagaagaacacaattggaaataaagaagacacaggaagtattggccaattggatatgtgtcatttcaattcacccccatctgcaacacgcgccttgttgcttagctggctgtttctggcttgtagccg

SEQ ID NO: 30323 - DNA, 846 bp, Muscodor strobelii
  misc_feature: SGI cDNA ID NO. 570428
  misc_feature: Reduced expression when VOC is produced
  misc_feature: Encodes the peptide sequence at SEQ ID NO 30324
atgacggaaacgcgaggaagcgtccgccaacgtaaggccagagaagctgctgcaaatcctcctcctccaccacaggtcgaagaggttgataccgatgaggccgaggagattgagagagagcgcgaagaaacagaatcagtgctaaagaatgcgaaccggtcgccgaaggaaaagctcgtcgatgaagatgacgagtacaccccatgggtcgacatcctacgggtcctctcgttcctcgtatttgcttcgtgtgcgctgagttatctgatctctggcggtgagagttatacttggggaggcaaatcgcacgtaaagtatttgcagaaagagtggtggaaggcacagtttaaaggtccaatctacctcacacccgccgaactcgcaggctacgatggacaagacgagtccaaacccctttacctcgctattaacggcacgatctacgacgtatccgaaaaccgtcggacctacgggccaggcggatcctaccaattcttcgccggtgccgacgcagcacggagctacgtgacggggtgtttcaaagacgatcgaaatgcagatatgcgaggtgtcgaggacatgtatctgcctctcgacgacccagagactgacgcacactggtcggccgaagagttagcggcgctgaagaaagaagagctcgagaaggctcagaagcgtgtatatgaagctttgttgcactgggtcaacttttttgcgaataaccccaaatacccgaaggttgggtatgtgaagcgggagaagaattggcttgataaagagccgaggaagacgctttgcaaatctgcggcgaagggtaggaagaagagaacgattcccgaacaatag

SEQ ID NO: 30324 - protein, 281 aa, Muscodor strobelii
  misc_feature: SGI Peptide ID NO. 570428
  misc_feature (121)..(251): Pfam Id: PF00173 Pfam Desc: Cytochrome b5-like Heme/Steroid binding domain
  misc_feature (121)..(171): Pfam Id: PF00173 Pfam Desc: Cytochrome b5-like Heme/Steroid binding domain
  misc_feature (7)..(281): NCBI GI: 116205319 Blast Desc: CHGG_10543 [Chaetomium globosum CBS 148.51] gi|88176671|gb|EAQ84139.1| CHGG_10543 [Chaetomium globosum CBS 148.51]
  misc_feature (7)..(281): NCBI GI: 85110033 Blast Desc: NCU09480 [Neurospora crassa OR74A] gi|28924873|gb|EAA33968.1| conserved [Neurospora crassa OR74A] gi|38524273|emb|CAE75737.1| conserved [Neurospora crassa]
  misc_feature (7)..(279): NCBI GI: 256732997 Blast Desc: NECHADRAFT_99985 [Nectria haematococca mpVI 77-13-4]
  misc_feature (61)..(281): NCBI GI: 171689780 Blast Desc: protein product [Podospora anserina] gi|170944852|emb|CAP70964.1| protein product [Podospora anserina]
  misc_feature (64)..(280): NCBI GI: 46123293 Blast Desc: FG06024.1 [Gibberella zeae PH-1]
  misc_feature (56)..(279): NCBI GI: 39977539 Blast Desc: MGG_06654 [Magnaporthe grisea 70-15] gi|145013832|gb|EDJ98473.1| MGG_06654 [Magnaporthe grisea 70-15]
  misc_feature (44)..(280): NCBI GI: 156065635 Blast Desc: SS1G_00828 [Sclerotinia sclerotiorum 1980] gi|154691687|gb|EDN91425.1| SS1G_00828 [Sclerotinia sclerotiorum 1980]
  misc_feature (7)..(245): NCBI GI: 261357060 Blast Desc: conserved [Verticillium albo-atrum VaMs.102]
  misc_feature (11)..(277): NCBI GI: 242774264 Blast Desc: heme/steroid binding domain protein, [Talaromyces stipitatus ATCC 10500] gi|218722026|gb|EED21444.1| heme/steroid binding domain protein, [Talaromyces stipitatus ATCC 10500]
  misc_feature (41)..(280): NCBI GI: 154320283 Blast Desc: BC1G_02122 [Botryotinia fuckeliana B05.10] gi|150854861|gb|EDN30053.1| BC1G_02122 [Botryotinia fuckeliana B05.10]
  misc_feature: Useful for introducing or modulating the production of volatile compounds
MTETRGSVRQRKAREAAANPPPPPQVEEVDTDEAEEIEREREETESVLKNANRSPKEKLVDEDDEYTPWVDILRVLSFLVFASCALSYLISGGESYTWGGKSHVKYLQKEWWKAQFKGPIYLTPAELAGYDGQDESKPLYLAINGTIYDVSENRRTYGPGGSYQFFAGADAARSYVTGCFKDDRNADMRGVEDMYLPLDDPETDAHWSAEELAALKKEELEKAQKRVYEALLHWVNFFANNPKYPKVGYVKREKNWLDKEPRKTLCKSAAKGRKKRTIPEQ

SEQ ID NO: 30325 - DNA, 2914 bp, Muscodor strobelii
  misc_feature: SGI EST ID NO. CUFF.71775.1
  misc_feature: Variant of the nucleotide sequence at SEQ ID NO 30323
cggctacaagccagaaacagccagctaagcaacaaggcgcgtgttgcagatgggggtgaattgaaatgacacatatccaattggccaatacttcctgtgtcttctttatttccaattgtgttcttcttttttggggtttctcattaattttcgtgctgtggatttcgcttgcttcaggattacttgtttctctttttgggatacttgtaaatcaaccccacggttctccggcccaccttcataatgacggaaacgcgaggaagcgtccgccaacgtaaggccagagaagctgctgcaaatcctcctcctccaccacaggtcgaagaggttgataccgatgaggccgaggagattgagagagagcgcgaagaaacagaatcagtgctaaagaatgcgaaccggtcgccgaaggaaaagctcgtcgatgaagatgacgagtacaccccatgggtcgacatcctacgggtcctctcgttcctcgtatttgcttcgtgtgcgctgagttatctgatctctggcggtgagagttatacttggggaggcaaatcgcacgtaaagtatttgcagaaagagtggtggaaggcacagtttaaaggtccaatctacctcacacccgccgaactcgcaggctacgatggacaagacgagtccaaacccctttacctcgctattaacggcacgatctacgacgtatccgaaaaccgtcggacctacgggccaggcggatcctaccaattcttcgccggtgccgacgcagcacggagctacgtgacggggtgtttcaaagacgatcgaaatgcagatatgcgaggtgtcgaggacatgtatctgcctctcgacgacccagagactgacgcacactggtcggccgaagagttagcggcgctgaagaaagaagagctcgagaaggctcagaagcgtgtatatgaagctttgttgcactgggtcaacttttttgcgaataaccccaaatacccgaaggttgggtatgtgaagcgggagaagaattggcttgataaagagccgaggaagacgctttgcaaatctgcggcgaagggtaggaagaagagaacgattcccgaacaatagacgtcaaaccagttttgcaacccaacttttcaaatacgtacaaatatgtacaggttgcctgaatagcaagggcagacgcacaaaaggaataaaaatttgttccaacaaaatatctcaactaattcaccattgcaataacatgaacttgacaataccgatctgaaagtcgtatgggtatattaacgttatttatatgaacagtaaacagcaaaaccgtgtctgtcgtgtcgatcgactatgacgaggtagttacccgcaagtttttgatctaatgcaaaaatatgccaacaagaagaaaaaccaaaacccctttccctatcaccgttcttcatacaatcctttccgagaacccccagggcccctttttcaacatttcatgacctcgttactttcacaacatcatcatggccgcggcaaaggcgagcaaaccagtccaagcagatacagagacagtagagcccagacctgttggtacggcagatgttgaggatgcgggtgtgctcgagtcggtgccagtaccggagccagaggagccatcgctgctgccgctagctacgccagcgctgatggggtcaagtgaggtggcgacgccggcagcgattgtgttgtagtttgacagagatctcgtagcgttggcagcagtgctgttttacgttagcgaactattcgactaatggcatcataggagatgtatgatatcatgacttacttctcattgataaccatagtcataccagcctggcaatgctttccctgggagcagtacaaccagacgggcgttgcggcagagatcatcatggtatatactggtgccattcccgtgctctcgccagccgctacgtccatgtaaccagagaacatgcccttggcgctggagttgtgaagagcaatgggttcgcaagggttatcgaagttggactgaacgacactgtggtttcctgactggaactggaattgtaccatctcgcctactgcggccttgatgttgttcggcgagaatatcagtttcttgtctgcatttgagacggaaactacgtggatagtttgcgccgaggcgagacccagaagggtggtgatggctacggtcgagaaatacatgttgatcgtggtattaattcgtgagagaggataagagagtgtttggtttgaacttttgttggcgttggaaatgcgactcgcgctgtaggactagcctgagaatattaagatggacgaagaaaagagagaccgtgaaaggacacacgaagtagagaaacagactgagatggagaagaatagagagagaaagggaagaagaaacaatggccaaggccaggcatagaggttatatgaacctgaggcgggagctgagggatctccatcggatgtaccaagcatccatccccgtattgtgtctgaagttcacgggggttgttgtgagtgatgtgaatggggagaggttcgtgaaacacgtttcgaccttgataatatgaggacgccactggtcggtctgcgacctggcatttagtcactggtgaggcctcgcttgcccctggagcttcgatagtggcctggctgtatatgagcgatcataagtcgcagatgagattgggcttcactccgtgatgcagagccgcctagtgaaaggtcgaccgagacattttacctggagtcgtgaagataatctgcatattagtagaccatagctgtcaattcccatcatttaattgatatttcacatgacatcacgaatctcaatacctacatttcttcaacctattaacgattctcgtgatcaatcatcaaaaatctcaacagagaagcgcttagttaagtcggttgccag

SEQ ID NO: 30326 - DNA, 642 bp, Muscodor strobelii
  misc_feature: SGI cDNA ID NO. 570429
  misc_feature: Reduced expression when VOC is produced
  misc_feature: Encodes the peptide sequence at SEQ ID NO 30327
atgtctgacaacggtgagatcgaggtcgagtcttcctcctaccaggtccttcccaaggatgtcacctccgagattggcagcatcaagctgttcaaccgatggagctacgaggatgttgagatccgtgacatctccttaaccgactacatccagatccgatcccccgtctacgtccctcactccgccggtcgctatgccgccaagcgattccgcaaggccaactgccccatcatcgagcgcctcaccaactcgctcatgatgcacggccgcaacaacggcaagaagctgatggccgtccgcatcgtcgcccactccttcgagatcatccacctcatgaccgaccagaaccccatccagattgccgttgacgccatcgtcaactgcggcccccgcgaagacagcacccgtatcggttccgccggtaccgtccgcagacaggccgtcgatgtctctcccctccgccgcgtcaaccaggccatcgccctcctcaccaccggtgcccgcgaggcctctttccgcaatgtcaagtccatcgccgagtgcttggctgaggagctgatcaacgctgccaagggaagcagtaactcgtacgccatcaagaagaaggatgagttggagcgtgtcgccaagtccaaccgataa

SEQ ID NO: 30327 - protein, 213 aa, Muscodor strobelii
  misc_feature: SGI Peptide ID NO. 570429
  misc_feature (58)..(213): Pfam Id: PF00177 Pfam Desc: Ribosomal protein S7p/S5e
  misc_feature (1)..(213): NCBI GI: 145606100 Blast Desc: 40S ribosomal protein S5 [Magnaporthe grisea 70-15] gi|145013828|gb|EDJ98469.1| 40S ribosomal protein S5 [Magnaporthe grisea 70-15]
  misc_feature (5)..(213): NCBI GI: 116205329 Blast Desc: 40s ribosomal protein S5 [Chaetomium globosum CBS 148.51] gi|88176676|gb|EAQ84144.1| 40s ribosomal protein S5 [Chaetomium globosum CBS 148.51]
  misc_feature (5)..(213): NCBI GI: 164422894 Blast Desc: 40s ribosomal protein s5 [Neurospora crassa OR74A] gi|182636685|sp|Q7RVI1.2|RS5_NEUCR RecName: Full=40S ribosomal protein S5 gi|38524278|emb|CAE75742.1| 40S ribosomal protein S5
  misc_feature (1)..(213): NCBI GI: 171689770 Blast Desc: protein product [Podospora anserina] gi|170944847|emb|CAP70959.1| protein product [Podospora anserina]
  misc_feature (1)..(213): NCBI GI: 154282927 Blast Desc: 40S ribosomal protein S5 [Ajellomyces capsulatus NAm1] gi|150410439|gb|EDN05827.1| 40S ribosomal protein S5 [Ajellomyces capsulatus NAm1] gi|225561581|gb|EEH09861.1| 40S ribosomal S5A S5
  misc_feature (5)..(213): NCBI GI: 154320341 Blast Desc: 40S ribosomal protein S5 [Botryotinia fuckeliana B05.10] gi|156065671|ref|XP_001598757.1| 40S ribosomal protein S5 [Sclerotinia sclerotiorum 1980] gi|150854890|gb|EDN30082.1| 40S
  misc_feature (1)..(213): NCBI GI: 119186515 Blast Desc: 40S ribosomal protein S5-A [Coccidioides immitis RS]
  misc_feature (1)..(213): NCBI GI: 226278869 Blast Desc: 40S ribosomal protein S5 [Paracoccidioides brasiliensis Pb01]
  misc_feature (1)..(213): NCBI GI: 145230912 Blast Desc: An01g13190 [Aspergillus niger] gi|134055844|emb|CAK96189.1| protein product [Aspergillus niger]
  misc_feature (1)..(213): NCBI GI: 119494910 Blast Desc: 40S ribosomal protein S5, [Neosartorya fischeri NRRL 181] gi|119412417|gb|EAW22358.1| 40S ribosomal protein S5, [Neosartorya fischeri NRRL 181]
  misc_feature: Useful for introducing or modulating the production of volatile compounds
MSDNGEIEVESSSYQVLPKDVTSEIGSIKLFNRWSYEDVEIRDISLTDYIQIRSPVYVPHSAGRYAAKRFRKANCPIIERLTNSLMMHGRNNGKKLMAVRIVAHSFEIIHLMTDQNPIQIAVDAIVNCGPREDSTRIGSAGTVRRQAVDVSPLRRVNQAIALLTTGAREASFRNVKSIAECLAEELINAAKGSSNSYAIKKKDELERVAKSNR

SEQ ID NO: 30328 - DNA, 1467 bp, Muscodor strobelii
  misc_feature: SGI EST ID NO. CUFF.71726.0
  misc_feature: Variant of the nucleotide sequence at SEQ ID NO 30326
tggcgggtgtccactgcactctgcactgaacccactccacttaccacatcccctctgcgctccggaggacttcccaccaaaaatcaattccgaagaggacccggccaaaatttctcagttgtacatttcgaagaccttcaagttcgcgatcctccccaccaccaaccagcacacctcagacagtcgccaaccacatcgcccaacatgtctgacaacggtgagatcgaggtcgagtcttcctcctaccaggtccttcccaaggatgtcacctccgagattggcagcatcaagctgttcaaccgatggagctacgaggatgttgagatccgtgacatctccttaaccgactacatccagatccgatcccccgtctacgtccctcactccgccggtcgctatgccgccaagcgattccgcaaggccaactgccccatcatcgagcgcctcaccaactcgctcatgatgcacggccgcaacaacggcaagaagctgatggccgtccgcatcgtcgcccactccttcgagatcatccacctcatgaccgaccagaaccccatccagattgccgttgacgccatcgtcaactgcggcccccgcgaagacagcacccgtatcggttccgccggtaccgtccgcagacaggccgtcgatgtctctcccctccgccgcgtcaaccaggccatcgccctcctcaccaccggtgcccgcgaggcctctttccgcaatgtcaagtccatcgccgagtgcttggctgaggagctgatcaacgctgccaagggaagcagtaactcgtacgccatcaagaagaaggatgagttggagcgtgtcgccaagtccaaccgataaagcaagggcgcttctctttctgggtttttcttcggcgtggaccatctgggcatcttacttctgtgcatttgtgcgttcgggctcaggcgggatgtggtaaacatggcatgatagtcatatagggctcctcaatacggctctgcccgtgtgggcaaaaaagttgagaaatgaaaattatgaaccacaaaaaatcagcttgacggacggcagtgtgataagaggcacttcggctacccgctgattcgtgacgagataggagtatggtaatggaatgatctgtgttcaactgtttgcgagacaaccggtgtccatgtgactgaaaaagatgctggataatgagttacgaagctaggaatttagccaacattgtctgagcctctagataatctcgcaaacatgggactgagcagaagggatcaagatacccttcgagtctaagcacgaataagagatcgccatgagctgctacatgatcagacaagttcctccaccaatagctcttgtatcatcttctatattcgacagcttccattgatcacacaaaactctactaccatcatgatgccgcagcattcacaacctcaacagcactgaccaaatcaagaccgcagatccccaaac

SEQ ID NO: 30329 - DNA, 465 bp, Muscodor strobelii
  misc_feature: SGI cDNA ID NO. 570430
  misc_feature: Elevated expression when VOC is produced
  misc_feature: Encodes the peptide sequence at SEQ ID NO 30330
atgccgccatttatcaactacgagcaaccgtctgctcttcctccacgtccgtccggctatgggaagcgtaacaccatggatttcatggatccagataaaaaagcggagctcgatatcgtcgtcgatcgcggcagaatagcgaagatcctgggagcagtgcggaagaagactgctgtgatgagcgatgctgagcgccacgacaatgagcggcatgctcattggtaccatatttcacagattgacgaagaaatcatgcaccttactggctcggctttgcaacagagacgagatgacaaggaaaagatgctgaaggaatggaataccgcccatgacaactgtcaatactgtgttcagttagtccctgttcagtcactctccgttcaggaagcctctattcaggaagcctctattcaggaattttctgttcaggaagtccctgttcaggcatactgcgttgaggcctaa

SEQ ID NO: 30330 - protein, 154 aa, Muscodor strobelii
  misc_feature: SGI Peptide ID NO. 570430
  misc_feature: Useful for introducing or modulating the production of volatile compounds
MPPFINYEQPSALPPRPSGYGKRNTMDFMDPDKKAELDIVVDRGRIAKILGAVRKKTAVMSDAERHDNERHAHWYHISQIDEEIMHLTGSALQQRRDDKEKMLKEWNTAHDNCQYCVQLVPVQSLSVQEASIQEASIQEFSVQEVPVQAYCVEA

SEQ ID NO: 30331 - DNA, 1427 bp, Muscodor strobelii
  misc_feature: SGI EST ID NO. CUFF.71732.0
  misc_feature: Variant of the nucleotide sequence at SEQ ID NO 30329
gccaccaattttgtactttgtagctaccgtgattgggagccaagactgcaacccaagtcatggcaggcatgtggcgcataagcagagccttattgtcgaatccaacaaaaagatgcctatttcctaggccatgtcacagactctgtatcattcgcgcaacgcaaacacaactacatttggacccccattcaattcatagtacgaaatcagcaaattactctacgaatctaaaagaaagcatacataatgccgccatttatcaactacgagcaaccgtctgctcttcctccacgtccgtccggctatgggaagcgtaacaccatggatttcatggatccagataaaaaagcggagctcgatatcgtcgtcgatcgcggcagaatagcgaagatcctgggagcagtgcggaagaagactgctgtgatgagcgatgctgagcgccacgacaatgagcggcatgctcattggtaccatatttcacagattgacgaagaaatcatgcaccttactggctcggctttgcaacagagacgagatgacaaggaaaagatgctgaaggaatggaataccgcccatgacaactgtcaatactgtgttcagttagtccctgttcagtcactctccgttcaggaagcctctattcaggaagcctctattcaggaattttctgttcaggaagtccctgttcaggcatactgcgttgaggcctaaatggtgttaggacgtgcagacggttgcttgtattcggaaacggaaacgcatgctcatttatagcgtgaaatggcagcaaattacgaatatacgaaataacagggttgattttgaagggctgcagattttctataggaagctcttacaatgtagctcgatggcgaggaaagaggcagtggtgcagttggttgactagcttctagcgtctcgatataatccgtataataggagtatttcgcagtcatcggaccgctctgcttgggccgcatcatcgagttatggagaaggaagtttgaggtttcggacatgtgcgtgcctattgaatgcgccagtgatctagagaaacggctatagggcgttgaacattgaatgttcaccaattctgagttgccattggccgcgggcagtgcttaaatatataaaattcaaagtgcaggtcagcttccaaactcaacaaaaatggtctaatggtctattggttccaacgagctatcaaaccaagggttcgattccgggcattgctaggtctacccactgagatagttgagccttacccttcttccctagacaagacgactcaatgtttagcgacaaccaccaccgatgcgtcgtttccgtaaggcgtgcttgggcagcagtacttcgagtatagggctgtataatattctacgcattatgagctgtatgttctacgcattaatttttttgccctttgc

SEQ ID NO: 30332 - DNA, 963 bp, Muscodor strobelii
  misc_feature: SGI cDNA ID NO. 570431
  misc_feature: Reduced expression when VOC is produced
  misc_feature: Encodes the peptide sequence at SEQ ID NO 30333
atgggtaccccattcattgctctccaagagcccgccaggcttgatggatacgaccccaatctgcccgcaacatcacaaccagcaagtatccctaccactttccgcgacgccatgcgtgtccgtgaagaagtctttgtatctgaacaaggctggccattgaacatcgagttcgaatcagacgatgctcgctcctgccattgggtcgtctacgcatccatcaagaagacggctgcgcccgcagagaccacacctataggcaccatccggattacgccatttcctcacccgcctcatccacctgatggtggagtgtatcaggacaatgtcttactaccgcctcatggcccagggaaggctgaagagggcaatggcaagcagaagacagagaatgaagacgatagtggagcaaagaatccaaagaacatcaatctagacggtgcaactgagagcaaaaataacgacaagaaagaggcatcactcagcccaaattcaaaactagatgctctcgctgaacgccgtgaaagccaggtccgttccgtcgtcgacgacttgcgtttcaacactgagctgccctacatcgaagatcgcccaaccacctatcacgacggtcaagagccgtacgtgaaactctgccgaatggcggtatccagcgatttcaggggccacggcattgccgtccagctctggaacgcggcgcgcgagtggctcatcaagaatcctggatactttaacccaagtgtcaaggagatgggcatggatcgctttaaagatgttgcaactaatgcagtgccagagtggaagggtctggtgtgcacacatgcccaggagcccgtgattaaggtctatgagcgctggggattcaaggtcgatgaggggatggggaggtggattgagcagggggttccgcatgtgggaatgtttcagaggttagatatcggggacaagatacctcagttgcgatag

SEQ ID NO: 30333 - protein, 320 aa, Muscodor strobelii
  misc_feature: SGI Peptide ID NO. 570431
  misc_feature (76)..(288): Pfam Id: PF00583 Pfam Desc: Acetyltransferase (GNAT) family
  misc_feature (76)..(236): Pfam Id: PF00583 Pfam Desc: Acetyltransferase (GNAT) family
  misc_feature (1)..(319): NCBI GI: 116205331 Blast Desc: CHGG_10549 [Chaetomium globosum CBS 148.51] gi|88176677|gb|EAQ84145.1| CHGG_10549 [Chaetomium globosum CBS 148.51]
  misc_feature (1)..(313): NCBI GI: 256732554 Blast Desc: NECHADRAFT_78857 [Nectria haematococca mpVI 77-13-4]
  misc_feature (1)..(305): NCBI GI: 46123281 Blast Desc: FG06018.1 [Gibberella zeae PH-1]
  misc_feature (5)..(313): NCBI GI: 171689768 Blast Desc: protein product [Podospora anserina] gi|170944846|emb|CAP70958.1| protein product [Podospora anserina]
  misc_feature (1)..(313): NCBI GI: 261357052 Blast Desc: conserved [Verticillium albo-atrum VaMs.102]
  misc_feature (2)..(316): NCBI GI: 156043966 Blast Desc: SS1G_10086 [Sclerotinia sclerotiorum 1980] gi|154694475|gb|EDN94213.1| SS1G_10086 [Sclerotinia sclerotiorum 1980]
  misc_feature (1)..(311): NCBI GI: 85110084 Blast Desc: NCU09474 [Neurospora crassa OR74A] gi|28924899|gb|EAA33993.1| conserved [Neurospora crassa OR74A] gi|38524257|emb|CAE75722.1| [Neurospora crassa]
  misc_feature (2)..(310): NCBI GI: 154296904 Blast Desc: BC1G_12541 [Botryotinia fuckeliana B05.10] gi|150843195|gb|EDN18388.1| BC1G_12541 [Botryotinia fuckeliana B05.10]
  misc_feature (3)..(296): NCBI GI: 145606098 Blast Desc: MGG_06659 [Magnaporthe grisea 70-15] gi|145013827|gb|EDJ98468.1| MGG_06659 [Magnaporthe grisea 70-15]
  misc_feature (22)..(312): NCBI GI: 212533789 Blast Desc: acetyltransferase, GNAT family, [Penicillium marneffei ATCC 18224] gi|210072415|gb|EEA26504.1| acetyltransferase, GNAT family, [Penicillium marneffei ATCC 18224]
  misc_feature: Useful for introducing or modulating the production of volatile compounds
MGTPFIALQEPARLDGYDPNLPATSQPASIPTTFRDAMRVREEVFVSEQGWPLNIEFESDDARSCHWVVYASIKKTAAPAETTPIGTIRITPFPHPPHPPDGGVYQDNVLLPPHGPGKAEEGNGKQKTENEDDSGAKNPKNINLDGATESKNNDKKEASLSPNSKLDALAERRESQVRSVVDDLRFNTELPYIEDRPTTYHDGQEPYVKLCRMAVSSDFRGHGIAVQLWNAAREWLIKNPGYFNPSVKEMGMDRFKDVATNAVPEWKGLVCTHAQEPVIKVYERWGFKVDEGMGRWIEQGVPHVGMFQRLDIGDKIPQLR

SEQ ID NO: 30334 - DNA, 1610 bp, Muscodor strobelii
  misc_feature: SGI EST ID NO. CUFF.71736.0
  misc_feature: Variant of the nucleotide sequence at SEQ ID NO 30332
caattgtattgatttcaggtgcgtccagtttactccactttacccagactacatattcccatcggagatcgtgcaacgtttgactgcattggacgagactcgtctatttaagttgtgattcccgcgagtcatttgtctataagaccagtttctagactgagatcaacgttgttatatcaagatatccgagcattgcttgcttcttctagcactactaccacatctaggtagttttagccacaaaatcgtcaattcttgtagccatttccccgggctttggacatagcgttcagtacagagatatcaacattgattccactctcgctactcaagcatcatttcagtacactgaacaccaccaaagctcgagatgggtaccccattcattgctctccaagagcccgccaggcttgatggatacgaccccaatctgcccgcaacatcacaaccagcaagtatccctaccactttccgcgacgccatgcgtgtccgtgaagaagtctttgtatctgaacaaggctggccattgaacatcgagttcgaatcagacgatgctcgctcctgccattgggtcgtctacgcatccatcaagaagacggctgcgcccgcagagaccacacctataggcaccatccggattacgccatttcctcacccgcctcatccacctgatggtggagtgtatcaggacaatgtcttactaccgcctcatggcccagggaaggctgaagagggcaatggcaagcagaagacagagaatgaagacgatagtggagcaaagaatccaaagaacatcaatctagacggtgcaactgagagcaaaaataacgacaagaaagaggcatcactcagcccaaattcaaaactagatgctctcgctgaacgccgtgaaagccaggtccgttccgtcgtcgacgacttgcgtttcaacactgagctgccctacatcgaagatcgcccaaccacctatcacgacggtcaagagccgtacgtgaaactctgccgaatggcggtatccagcgatttcaggggccacggcattgccgtccagctctggaacgcggcgcgcgagtggctcatcaagaatcctggatactttaacccaagtgtcaaggagatgggcatggatcgctttaaagatgttgcaactaatgcagtgccagagtggaagggtctggtgtgcacacatgcccaggagcccgtgattaaggtctatgagcgctggggattcaaggtcgatgaggggatggggaggtggattgagcagggggttccgcatgtgggaatgtttcagaggttagatatcggggacaagatacctcagttgcgatagagggaaagtgtcagtgacagtgagaaaaaacagctttgtgcggcatggttagactgaacatgagatagagagtcctgtatggcgcggtcagaatggttatgagaatgaacatgagatagaaactcggtgtatcagtctttgggcagacggcagctgtggtaaggtcgtcagcccattgcgactacgagttatacacacaagtgaatcaaactttgcagactggtcaagtgacaagaaaatgagagatgtgaccaagcaataagaagataagtcaaag

SEQ ID NO: 30335 - DNA, 777 bp, Muscodor strobelii
  misc_feature: SGI cDNA ID NO. 570432
  misc_feature: Encodes the peptide sequence at SEQ ID NO 30336
atggccgcagttgataatcgaataaaagggcgcctggcacttgtgacaggtgcctccggaggcattggtgcagctgtcgcccaagacttatgggccgagggctgctcattggcactgacaggcttcagcaagctcgctgcagttgaccaattagccacggaacttttcacaaaacgtgtgaatgacgagcagaacatatcgatacatcgtctagatacaagtgatgctaaagctctcgagaaattattcgaacagatcaagcatgagtatggccaagatggcccagatatcctagtctcaaacgccggttatggaaaacgattccctggaatcttggatgtgagccttgaagaattcgacaagacattaaacatcaatcttcgagcatcgttcattctatcgaggctcgcgattccatacatggagaagcagggatggggcagaatcatcttcgtctcttccatcgccgctctgggcggaggcataaacgcatgccagtacgctgcttcgaaggcaggactttcgggtatgatgcggaacttggcgaataagcatgcaagatctggcatcactgtcaatgacattgcgcctgcgatgataggagaaactggaatgatcccagatgccaagtctgtcgagggaagccctggtgatgtgaaaaatattcccgtgggccgactaggcacaccacaagaatgcgcaaacgttgttacgatgatgtgtaagactggctatcttacaggccaaagcatcctactagcaggcggccttaagtaa

SEQ ID NO: 30336 - protein, 258 aa, Muscodor strobelii
  misc_feature: SGI Peptide ID NO. 570432
  misc_feature (11)..(186): Pfam Id: PF00106 Pfam Desc: short chain dehydrogenase
  misc_feature (13)..(254): Pfam Id: PF01370 Pfam Desc: NAD dependent epimerase/dehydratase family
  misc_feature (14)..(202): Pfam Id: PF08659 Pfam Desc: KR domain
  misc_feature (1)..(257): NCBI GI: 85110082 Blast Desc: NCU09473 [Neurospora crassa OR74A] gi|28924898|gb|EAA33992.1| NCU09473 [Neurospora crassa OR74A] gi|38524256|emb|CAE75721.1| related to reductase [Neurospora
  misc_feature (3)..(258): NCBI GI: 39977551 Blast Desc: MGG_06660 [Magnaporthe grisea 70-15] gi|145013826|gb|EDJ98467.1| MGG_06660 [Magnaporthe grisea 70-15]
  misc_feature (1)..(252): NCBI GI: 116205333 Blast Desc: CHGG_10550 [Chaetomium globosum CBS 148.51] gi|88176678|gb|EAQ84146.1| CHGG_10550 [Chaetomium globosum CBS 148.51]
  misc_feature (6)..(258): NCBI GI: 255941652 Blast Desc: Pc16g12960 [Penicillium chrysogenum Wisconsin 54-1255] gi|211586218|emb|CAP93966.1| Pc16g12960 [Penicillium chrysogenum Wisconsin 54-1255]
  misc_feature (6)..(258): NCBI GI: 212531675 Blast Desc: 3-ketoacyl-acyl carrier protein reductase, [Penicillium marneffei ATCC 18224] gi|210071358|gb|EEA25447.1| 3-ketoacyl-acyl carrier protein reductase, [Penicillium marneffei
  misc_feature (6)..(258): NCBI GI: 242773694 Blast Desc: 3-ketoacyl-acyl carrier protein reductase, [Talaromyces stipitatus ATCC 10500] gi|218721910|gb|EED21328.1| 3-ketoacyl-acyl carrier protein reductase, [Talaromyces ATCC
  misc_feature (6)..(258): NCBI GI: 255956025 Blast Desc: Pc21g17680 [Penicillium chrysogenum Wisconsin 54-1255] gi|211590476|emb|CAP96665.1| Pc21g17680 [Penicillium chrysogenum Wisconsin 54-1255]
  misc_feature (6)..(258): NCBI GI: 121701115 Blast Desc: 3-ketoacyl-acyl carrier protein reductase [Aspergillus clavatus NRRL 1] gi|119396965|gb|EAW07396.1| 3-ketoacyl-acyl carrier protein reductase [Aspergillus clavatus NRRL 1]
  misc_feature (6)..(258): NCBI GI: 259488949 Blast Desc: TPA: 3-ketoacyl-acyl carrier protein reductase, (AFU_orthologue; AFUA_1G14380) [Aspergillus nidulans FGSC A4]
  misc_feature (6)..(258): NCBI GI: 70996106 Blast Desc: 3-ketoacyl-acyl carrier protein reductase [Aspergillus fumigatus Af293] gi|44890034|emb|CAF32152.1| 3-oxoacyl-[acyl-carrier protein] reductase, [Aspergillus carrier
  misc_feature (7)..(257): SWISSPROT Homolog: EC 1.1.1.100 3-oxoacyl-[acyl-carrier-protein] reductase
MAAVDNRIKGRLALVTGASGGIGAAVAQDLWAEGCSLALTGFSKLAAVDQLATELFTKRVNDEQNISIHRLDTSDAKALEKLFEQIKHEYGQDGPDILVSNAGYGKRFPGILDVSLEEFDKTLNINLRASFILSRLAIPYMEKQGWGRIIFVSSIAALGGGINACQYAASKAGLSGMMRNLANKHARSGITVNDIAPAMIGETGMIPDAKSVEGSPGDVKNIPVGRLGTPQECANVVTMMCKTGYLTGQSILLAGGLK

SEQ ID NO: 30337 - DNA, 1057 bp, Muscodor strobelii
  misc_feature: SGI EST ID NO. CUFF.71739.0
  misc_feature: Variant of the nucleotide sequence at SEQ ID NO 30335
cctcgctgtggtcgacttacacgagcttgttcgacatgagcacgacaatctgttatatacaaagatggccgcagttgataatcgaataaaagggcgcctggcacttgtgacaggtgcctccggaggcattggtgcagctgtcgcccaagacttatgggccgagggctgctcattggcactgacaggcttcagcaagctcgctgcagttgaccaattagccacggaacttttcacaaaacgtgtgaatgacgagcagaacatatcgatacatcgtctagatacaagtgatgctaaagctctcgagaaattattcgaacagatcaagcatgagtatggccaagatggcccagatatcctagtctcaaacgccggttatggaaaacgattccctggaatcttggatgtgagccttgaagaattcgacaagacattaaacatcaatcttcgagcatcgttcattctatcgaggctcgcgattccatacatggagaagcagggatggggcagaatcatcttcgtctcttccatcgccgctctgggcggaggcataaacgcatgccagtacgctgcttcgaaggcaggactttcgggtatgatgcggaacttggcgaataagcatgcaagatctggcatcactgtcaatgacattgcgcctgcgatgataggagaaactggaatgatcccagatgccaagtctgtcgagggaagccctggtgatgtgaaaaatattcccgtgggccgactaggcacaccacaagaatgcgcaaacgttgttacgatgatgtgtaagactggctatcttacaggccaaagcatcctactagcaggcggccttaagtaaatatcaacagtgtgtatggtgcgagtacatgaatgctactgcactgagtatataatttcaagatgcgactagaaaaggacatatggcttatgatcttcttgccgttaacagagtggagcaggttaaagaaaccagtgacctagtgaaacagctttattgcttgaatgtcatattaatgacgttgcttggtagtcggtttcatcagcaaagcagctt

SEQ ID NO: 30338 - DNA, 2997 bp, Muscodor strobelii
  misc_feature: SGI cDNA ID NO. 570433
  misc_feature: Reduced expression when VOC is produced
  misc_feature: Encodes the peptide sequence at SEQ ID NO 30339
atggcagcgcacacatcctccccacgctccatactactatgcgtcctattcttcttctcagcaaatgtactcgccgtatcagctgttcttggagtcgacctcggaactgagtacataaaagctgccctggtcaagcctggcattcctctcgagatcgtcttgacgaaagattcacgaagaaaggaaacctcagcagtcaccttcaagccctccaacaatgccctcaccagcggcgaataccccgagagactatatggctcagatgccttagctctagccgctcgattccctggcgaagtgtatcccaacctgaagacccttctcggtcttcccacggacgatgccatagtaaaagagtatgccgcgagacaccctagtctccaactggagacccaggagactcgcggcactgctgcgttcaagagcaaggcgactggtgacgattctgcctggatggtcgaagaactattggctatggagctccaaagcatccagcgcaacgccgaggccctagctggctccggcttcagtgttcgctctgtagtcattaccgtaccgccctactatactgtcgaggagaaacgcgctgttcagttggcctgtgatctcgtcggtctgaaggtcctttcgatgatcagcgacggtttggccgttggactcaactacgcaacgagccggacattcccgaaccttgaggagggaggcaagccagaataccacatggtcttcgacatgggagccggttccaccaaggcaactgtcatgcagtttcagggccgcaccgtcaaggactttggcaagtttaacaagaccattcaagaggtccaggctttgggaagtggctgggacaggacgcttggaggagatgtgttcaactatctaattgtcgatgacatgatatctaagttcgtcgagacatcagctgccaagaaggcttccgtgacagaagcgggtgtacgagggcatggacgcgctatggcgaaactcctgaaggacgctgagagagttcgccacgttttgagtgctaatactgaaacgtctgcgagctttgaggggctctacgaggatgttgatttcaagtacaaagtgagccgagctgaattcgaaaagatggccgagtctcacgcggatcgggtattagttgccgtcgaaaaggccctagaggtagctgagatggacatcaagcagcttgactccattatcctccacggtggtgcatctcgaactcctttcgtccagaagaagctcgaaagcctcgccggtactgacaagctgcgaagtaatgtgaactctgatgaagcggccgtattcggtgctggtttccgagcggccgagttgagtcctagtttccgtgttaaagaaattcgagtctccgagagggtttcttatcccatcggagtcaagtggatggagtccgagactgcctccagccaagcccgactgtggacccaaatatctccccctgatctacttcacaaagaggttgtcttcacgaaccgcgaggacttttctgctcagttttaccagcaaataccgtcggctgtgggtctcaactacgccgagttcaagcagctgacgacgaagaacttgactgacaccgtagcgtctcttgtcgagaagcacggctgtacagaggccgacatccacttcaaggtcaatcttcgaatgagcgtcgaaagcggtgatatcgagattctcaatgccactgctcagtgtgagactgagaccgcagaaaaggctggtgtaatggacggagtgaagaatctctttggttttggtaagaacaaagaccaaaaaccattagagggcgaggaagagactagcgaaagcagcaccactacaacttcctccgtaaataccaagtcctcctctacaactgccgcctctgctgagtcaactgaggaggctgcaatcccaaagaagcgtgttgtagccattcctgtcaagattacaaccgaacagctaggcaagcccagcttgccaaaggcagatgtgaccaaggcaaaggatcgtctcaaggcgtttgagtcttctgataaggctcgccgtcttcgggaagaaaccctgaaccaattagagggctatacctacaaagtgcgggacttcctaggaacagactcgtttgttgcagcctctaccgaggatgagcgcagcacgctagagaaattggcgagcgaggccagtgactggctttacgaggatggagcagatgcgccacgtgaggaactcaagtcccgcttgaagtcactcaaagatctagtctctccggtagaaaagagaattgaggaatctaccaagagaccagaactggtcaaagcattgagagattcattgaacaagaccactcactggattcagactatcaaggacgcgattcaagaggccgaggccttctcttctagcgcaagcgcaagtgccagctcaacaaccgaggccacatccagcatcactgaagctccatcatctggcgactttgacggtcttgaagatgatgaaacaacatctaccactacgactacggcagtcgaagatcgtggccctgctccacccctatacagcatggatgacttgaatgaactggccacgctctacgattccattatctcatggctcgatgaaaaggccactgagcaggagaagctacccgagaccgccgaccccgttctgctagcaaaggatatcttggaaaagaccaagaagctagaacaggcgggtgtcgacatggcgatgaggagcgtcaaggagttcgagtcgaagttcaagaaaggaagcagctcaaagtctaagacaaagacgaagtctaagaagtcttccaagacgagcgccggggacgcagagccaacctttgaatttaaggagggagagaactacatcaagttcggggagaacggggaaggccccacaaacgaagagatcgaggccatgatcaagaagatgcaggcagagcaggaggcaaaagaggccaaggagacgaaagtcgagcataatgaactatag

SEQ ID NO: 30339 - protein, 998 aa, Muscodor strobelii
  misc_feature: SGI Peptide ID NO. 570433
  misc_feature (29)..(763): Pfam Id: PF00012 Pfam Desc: Hsp70 protein
  misc_feature (324)..(455): Pfam Id: PF00012 Pfam Desc: Hsp70 protein
  misc_feature (674)..(763): Pfam Id: PF00012 Pfam Desc: Hsp70 protein
  misc_feature (25)..(939): NCBI GI: 225681818 Blast Desc: chaperone protein dnaK [Paracoccidioides brasiliensis Pb03]
  misc_feature (25)..(946): NCBI GI: 226284361 Blast Desc: Hsp70 [Paracoccidioides brasiliensis Pb01]
  misc_feature (1)..(990): NCBI GI: 171689752 Blast Desc: protein product [Podospora anserina] gi|170944838|emb|CAP70950.1| protein product [Podospora anserina]
  misc_feature (7)..(998): NCBI GI: 39977527 Blast Desc: conserved [Magnaporthe grisea 70-15] gi|145013838|gb|EDJ98479.1| conserved [Magnaporthe grisea 70-15] gi|154816270|gb|ABS87374.1| Hsp70 [Magnaporthe oryzae]
  misc_feature (7)..(998): NCBI GI: 59802906 Blast Desc: heat shock protein 70-like protein [Magnaporthe grisea]
  misc_feature (1)..(984): NCBI GI: 261357069 Blast Desc: stress protein ORP150 [Verticillium albo-atrum VaMs.102]
  misc_feature (1)..(986): NCBI GI: 256728928 Blast Desc: NECHADRAFT_104346 [Nectria haematococca mpVI 77-13-4]
  misc_feature (7)..(998): NCBI GI: 46138609 Blast Desc: FG10819.1 [Gibberella zeae PH-1]
  misc_feature (5)..(998): NCBI GI: 85110043 Blast Desc: NCU09485 [Neurospora crassa OR74A] gi|28924878|gb|EAA33973.1| conserved [Neurospora crassa OR74A] gi|38524268|emb|CAE75732.1| related to stress protein ORP150
  misc_feature (6)..(998): NCBI GI: 156043968 Blast Desc: SS1G_10087 [Sclerotinia sclerotiorum 1980] gi|154694476|gb|EDN94214.1| SS1G_10087 [Sclerotinia sclerotiorum 1980]
  misc_feature: Useful for introducing or modulating the production of volatile compounds
MAAHTSSPRSILLCVLFFFSANVLAVSAVLGVDLGTEYIKAALVKPGIPLEIVLTKDSRRKETSAVTFKPSNNALTSGEYPERLYGSDALALAARFPGEVYPNLKTLLGLPTDDAIVKEYAARHPSLQLETQETRGTAAFKSKATGDDSAWMVEELLAMELQSIQRNAEALAGSGFSVRSVVITVPPYYTVEEKRAVQLACDLVGLKVLSMISDGLAVGLNYATSRTFPNLEEGGKPEYHMVFDMGAGSTKATVMQFQGRTVKDFGKFNKTIQEVQALGSGWDRTLGGDVFNYLIVDDMISKFVETSAAKKASVTEAGVRGHGRAMAKLLKDAERVRHVLSANTETSASFEGLYEDVDFKYKVSRAEFEKMAESHADRVLVAVEKALEVAEMDIKQLDSIILHGGASRTPFVQKKLESLAGTDKLRSNVNSDEAAVFGAGFRAAELSPSFRVKEIRVSERVSYPIGVKWMESETASSQARLWTQISPPDLLHKEVVFTNREDFSAQFYQQIPSAVGLNYAEFKQLTTKNLTDTVASLVEKHGCTEADIHFKVNLRMSVESGDIEILNATAQCETETAEKAGVMDGVKNLFGFGKNKDQKPLEGEEETSESSTTTTSSVNTKSSSTTAASAESTEEAAIPKKRVVAIPVKITTEQLGKPSLPKADVTKAKDRLKAFESSDKARRLREETLNQLEGYTYKVRDFLGTDSFVAASTEDERSTLEKLASEASDWLYEDGADAPREELKSRLKSLKDLVSPVEKRIEESTKRPELVKALRDSLNKTTHWIQTIKDAIQEAEAFSSSASASASSTTEATSSITEAPSSGDFDGLEDDETTSTTTTTAVEDRGPAPPLYSMDDLNELATLYDSIISWLDEKATEQEKLPETADPVLLAKDILEKTKKLEQAGVDMAMRSVKEFESKFKKGSSSKSKTKTKSKKSSKTSAGDAEPTFEFKEGENYIKFGENGEGPTNEEIEAMIKKMQAEQEAKEAKETKVEHNEL

SEQ ID NO: 30340 - DNA, 3455 bp, Muscodor strobelii
  misc_feature: SGI EST ID NO. CUFF.71741.0
  misc_feature: Variant of the nucleotide sequence at SEQ ID NO 30338
catttgtattccaatgttgcaagcgctggccattgctgtgcctttgcttgtatgagtcttattgtagttgaggccagattctattaaccctttatctcattatatctggtcgaaacccgggactcaaaacgaggctattgctttgtgcaatagtcttgcctcgagctagagctttcccaccacgctactatttcctctgacctcatataccctcttagcgattctgtttgcttctgactgtcgatttcctttcctcgttggcaccttcacatctctcaagtaacactttcctccaattattcagaccaacgcaagccttcattggtctgttccatacgagtttgcgcgcgcaggcgaacctcccgccgaagtcgcccctcctctcataacgcccatcatggcagcgcacacatcctccccacgctccatactactatgcgtcctattcttcttctcagcaaatgtactcgccgtatcagctgttcttggagtcgacctcggaactgagtacataaaagctgccctggtcaagcctggcattcctctcgagatcgtcttgacgaaagattcacgaagaaaggaaacctcagcagtcaccttcaagccctccaacaatgccctcaccagcggcgaataccccgagagactatatggctcagatgccttagctctagccgctcgattccctggcgaagtgtatcccaacctgaagacccttctcggtcttcccacggacgatgccatagtaaaagagtatgccgcgagacaccctagtctccaactggagacccaggagactcgcggcactgctgcgttcaagagcaaggcgactggtgacgattctgcctggatggtcgaagaactattggctatggagctccaaagcatccagcgcaacgccgaggccctagctggctccggcttcagtgttcgctctgtagtcattaccgtaccgccctactatactgtcgaggagaaacgcgctgttcagttggcctgtgatctcgtcggtctgaaggtcctttcgatgatcagcgacggtttggccgttggactcaactacgcaacgagccggacattcccgaaccttgaggagggaggcaagccagaataccacatggtcttcgacatgggagccggttccaccaaggcaactgtcatgcagtttcagggccgcaccgtcaaggactttggcaagtttaacaagaccattcaagaggtccaggctttgggaagtggctgggacaggacgcttggaggagatgtgttcaactatctaattgtcgatgacatgatatctaagttcgtcgagacatcagctgccaagaaggcttccgtgacagaagcgggtgtacgagggcatggacgcgctatggcgaaactcctgaaggacgctgagagagttcgccacgttttgagtgctaatactgaaacgtctgcgagctttgaggggctctacgaggatgttgatttcaagtacaaagtgagccgagctgaattcgaaaagatggccgagtctcacgcggatcgggtattagttgccgtcgaaaaggccctagaggtagctgagatggacatcaagcagcttgactccattatcctccacggtggtgcatctcgaactcctttcgtccagaagaagctcgaaagcctcgccggtactgacaagctgcgaagtaatgtgaactctgatgaagcggccgtattcggtgctggtttccgagcggccgagttgagtcctagtttccgtgttaaagaaattcgagtctccgagagggtttcttatcccatcggagtcaagtggatggagtccgagactgcctccagccaagcccgactgtggacccaaatatctccccctgatctacttcacaaagaggttgtcttcacgaaccgcgaggacttttctgctcagttttaccagcaaataccgtcggctgtgggtctcaactacgccgagttcaagcagctgacgacgaagaacttgactgacaccgtagcgtctcttgtcgagaagcacggctgtacagaggccgacatccacttcaaggtcaatcttcgaatgagcgtcgaaagcggtgatatcgagattctcaatgccactgctcagtgtgagactgagaccgcagaaaaggctggtgtaatggacggagtgaagaatctctttggttttggtaagaacaaagaccaaaaaccattagagggcgaggaagagactagcgaaagcagcaccactacaacttcctccgtaaataccaagtcctcctctacaactgccgcctctgctgagtcaactgaggaggctgcaatcccaaagaagcgtgttgtagccattcctgtcaagattacaaccgaacagctaggcaagcccagcttgccaaaggcagatgtgaccaaggcaaaggatcgtctcaaggcgtttgagtcttctgataaggctcgccgtcttcgggaagaaaccctgaaccaattagagggctatacctacaaagtgcgggacttcctaggaacagactcgtttgttgcagcctctaccgaggatgagcgcagcacgctagagaaattggcgagcgaggccagtgactggctttacgaggatggagcagatgcgccacgtgaggaactcaagtcccgcttgaagtcactcaaagatctagtctctccggtagaaaagagaattgaggaatctaccaagagaccagaactggtcaaagcattgagagattcattgaacaagaccactcactggattcagactatcaaggacgcgattcaagaggccgaggccttctcttctagcgcaagcgcaagtgccagctcaacaaccgaggccacatccagcatcactgaagctccatcatctggcgactttgacggtcttgaagatgatgaaacaacatctaccactacgactacggcagtcgaagatcgtggccctgctccacccctatacagcatggatgacttgaatgaactggccacgctctacgattccattatctcatggctcgatgaaaaggccactgagcaggagaagctacccgagaccgccgaccccgttctgctagcaaaggatatcttggaaaagaccaagaagctagaacaggcgggtgtcgacatggcgatgaggagcgtcaaggagttcgagtcgaagttcaagaaaggaagcagctcaaagtctaagacaaagacgaagtctaagaagtcttccaagacgagcgccggggacgcagagccaacctttgaatttaaggagggagagaactacatcaagttcggggagaacggggaaggccccacaaacgaagagatcgaggccatgatcaagaagatgcaggcagagcaggaggcaaaagaggccaaggagacgaaagtcgagcataatgaactatagtcataaggataaaactagcatagatggtgtttcatgaatgttagcgtttttaagcatgctt

SEQ ID NO: 30341 - DNA, 1326 bp, Muscodor strobelii
  misc_feature: SGI cDNA ID NO. 570434
  misc_feature: Encodes the peptide sequence at SEQ ID NO 30342
atggtattcgtcctccattcctcagcccttgtggcactcattgcctttattggcctaatttccgctatgggcaacacattctctgttcctcttgtgcacaatcccgatgcgttgcgtcacggtcccaccgagctccttcgaaccttgaagaagtacaagtctcccattcctaatggccttcaagacactgtcgacgagttccatgcccagcttgctagctccaagatgatcgaagatgggggagacagtggcactgtaccaaccatttccaaagagggtgacctcttgtggatcactcaagttggcgtcggcactccaccccaggaactctacatggacttggacactggttcatctgatacctggttcttcaccaccgagacagccaagaaacaggtgaaaggtcagcaactctacgatccaggcaattctactacagcgataaagatcccaaattgcacttgggacattgtctacggagacttctcaagttcatccggtacatgctggaaggacacatttgccctcggcaatgtcagcattcctgaaatgacgattgagtcggctcagcaagtatccagcatgttcagcaaaacagaatacctgtccggccttgtaggtctcgcctggccagccattgcccagacgacacctgtgcagaagacattaatggactttctacctgatgccctcgacgagcctgtgttcacagttgatttccgacacaatggcagtgatggctcattcaacttcggattcgtagatgacagccttcatgacgataatattcaatggacagctgtagataacagcgaaggattctggtctgtcactaacacggcattcggagttggagaggagaacctcacctattcattcctcactccccgaaacgtcatcgtcgatactggcacgaccttgctcttcgcccccacagccgctgtcgagacatactacagcaaaattgatggggctgagttctcgggcagggactacggctatgtggtcccatgtaatgcgacgctccctgactttgtctgggagctaaaagatagcaatggaggtatcattaagggtgctgtgcctggcgaatacatcccatatgctcttgctgctaatggtacctgcttcgctggtattcagtccgtagccgccatcactggcgtggacggcattttcggagatgtctggctcaagagtctgttcgccgtcttcgatatcaagggccaacgcttcggtggcgcatcgaagcctctcaactttgacaatggcaaaaagcgaagtgttcctacggtggaaatgtccaagaacattgcttggatctaa

SEQ ID NO: 30342 - protein, 441 aa, Muscodor strobelii
  misc_feature: SGI Peptide ID NO. 570434
  misc_feature (98)..(417): Pfam Id: PF00026 Pfam Desc: Eukaryotic aspartyl protease
  misc_feature (21)..(402): NCBI GI: 85111370 Blast Desc: endothiapepsin precursor [Neurospora crassa OR74A] gi|28925652|gb|EAA34668.1| endothiapepsin precursor [Neurospora crassa OR74A]
  misc_feature (27)..(420): NCBI GI: 1469396 Blast Desc: secreted aspartic proteinase precursor [Glomerella cingulata]
  misc_feature (4)..(419): NCBI GI: 46126795 Blast Desc: FG07775.1 [Gibberella zeae PH-1]
  misc_feature (1)..(419): NCBI GI: 171694532 Blast Desc: protein product [Podospora anserina] gi|170947508|emb|CAP59669.1| protein product [Podospora anserina]
  misc_feature (10)..(417): NCBI GI: 11558498 Blast Desc: aspartate protease [Hypocrea lixii]
  misc_feature (17)..(419): NCBI GI: 18448713 Blast Desc: AF462062_1 aspartic protease [Fusarium venenatum]
  misc_feature (21)..(420): NCBI GI: 145606112 Blast Desc: MGG_06647 [Magnaporthe grisea 70-15] gi|145013839|gb|EDJ98480.1| MGG_06647 [Magnaporthe grisea 70-15]
  misc_feature (3)..(419): NCBI GI: 41016785 Blast Desc: CARP_PODAN RecName: Full=Podosporapepsin; Flags: Precursor gi|2384734|gb|AAC49997.1| podosporapepsin [Podospora anserina]
  misc_feature (27)..(424): NCBI GI: 116182964 Blast Desc: CHGG_02110 [Chaetomium globosum CBS 148.51] gi|88186407|gb|EAQ93875.1| CHGG_02110 [Chaetomium globosum CBS 148.51]
  misc_feature (47)..(419): NCBI GI: 171683756 Blast Desc: protein product [Podospora anserina] gi|170941838|emb|CAP67491.1| protein product [Podospora anserina]
  misc_feature (27)..(406): SWISSPROT Homolog: EC 3.4.23.22 Endothiapepsin
MVFVLHSSALVALIAFIGLISAMGNTFSVPLVHNPDALRHGPTELLRTLKKYKSPIPNGLQDTVDEFHAQLASSKMIEDGGDSGTVPTISKEGDLLWITQVGVGTPPQELYMDLDTGSSDTWFFTTETAKKQVKGQQLYDPGNSTTAIKIPNCTWDIVYGDFSSSSGTCWKDTFALGNVSIPEMTIESAQQVSSMFSKTEYLSGLVGLAWPAIAQTTPVQKTLMDFLPDALDEPVFTVDFRHNGSDGSFNFGFVDDSLHDDNIQWTAVDNSEGFWSVTNTAFGVGEENLTYSFLTPRNVIVDTGTTLLFAPTAAVETYYSKIDGAEFSGRDYGYVVPCNATLPDFVWELKDSNGGIIKGAVPGEYIPYALAANGTCFAGIQSVAAITGVDGIFGDVWLKSLFAVFDIKGQRFGGASKPLNFDNGKKRSVPTVEMSKNIAWI

SEQ ID NO: 30343 - DNA, 567 bp, Muscodor strobelii
  misc_feature: SGI cDNA ID NO. 570435
  misc_feature: Encodes the peptide sequence at SEQ ID NO 30344
atggaccgcaccgacgaggaactcgaccgtgactggcagcccaacggtcgccgcccccagtccacaattgcccgctcctttagtgcagagctcatggacattttccgcatcgagaacagtgttgccgacttggacgagcaggtcgacaagcgaaagcaacaggtcacatcaggccagacagagcttcaagctctagaagcacgaatcaaagagatggaggagcgtcttaaatccggcaaagtaggcagcgccaccggcagcccacgagccccacgacagcctctcaacaacacattcggtcagcagccgcaaggtcagtccaccgagaaagaactgccgcagagaccactccaaacatcagcctccacatcacggcccggcactgccaagcaaagccagccggcacccttgcacggaggcgccatgccgcccacccccacggccagcgaaggtgaattccagtccgacctcgtcaatagctcctcctccttcgaccgtaacgccgatgcccgaagttttgctgactatgtgatggttccaaaagatggtgatgaccgcgacagctag

SEQ ID NO: 30344 - protein, 188 aa, Muscodor strobelii
  misc_feature: SGI Peptide ID NO. 570435
  misc_feature (4)..(166): NCBI GI: 116205345 Blast Desc: CHGG_10556 [Chaetomium globosum CBS 148.51] gi|88176684|gb|EAQ84152.1| CHGG_10556 [Chaetomium globosum CBS 148.51]
  misc_feature (1)..(153): NCBI GI: 46138605 Blast Desc: FG10817.1 [Gibberella zeae PH-1]
  misc_feature (1)..(150): NCBI GI: 256729121 Blast Desc: NECHADRAFT_100395 [Nectria haematococca mpVI 77-13-4]
  misc_feature (4)..(150): NCBI GI: 164422888 Blast Desc: NCU09483 [Neurospora crassa OR74A] gi|157069863|gb|EAA33971.2| conserved [Neurospora crassa OR74A]
  misc_feature (1)..(150): NCBI GI: 171689806 Blast Desc: protein product [Podospora anserina] gi|170944865|emb|CAP70977.1| protein product [Podospora anserina]
  misc_feature (4)..(79): NCBI GI: 38524270 Blast Desc: [Neurospora crassa]
  misc_feature (4)..(65): NCBI GI: 261357073 Blast Desc: [Verticillium albo-atrum VaMs.102]
  misc_feature (4)..(184): NCBI GI: 156043385 Blast Desc: [Sclerotinia sclerotiorum 1980] gi|154695083|gb|EDN94821.1| [Sclerotinia sclerotiorum 1980]
  misc_feature (4)..(184): NCBI GI: 154316622 Blast Desc: [Botryotinia fuckeliana B05.10] gi|150846042|gb|EDN21235.1| [Botryotinia fuckeliana B05.10]
  misc_feature (4)..(174): NCBI GI: 238841917 Blast Desc: [Microsporum canis CBS 113480]
MDRTDEELDRDWQPNGRRPQSTIARSFSAELMDIFRIENSVADLDEQVDKRKQQVTSGQTELQALEARIKEMEERLKSGKVGSATGSPRAPRQPLNNTFGQQPQGQSTEKELPQRPLQTSASTSRPGTAKQSQPAPLHGGAMPPTPTASEGEFQSDLVNSSSSFDRNADARSFADYVMVPKDGDDRDS

SEQ ID NO: 30345 - DNA, 1723 bp, Muscodor strobelii
  misc_feature: SGI EST ID NO. CUFF.71878.0
  misc_feature: Variant of the nucleotide sequence at SEQ ID NO 30343
aaagcagttgaaggcagttgaagcggtcgtcagcccctgaacccttcccctgtcaactgcgaccttcatctgagaggtgccgcgcttgtgaaggtgtctccccactgaccggggcctctaattgctgcacagtgataaacacgtccgctgcccgccttcggatccagtccacaaccacatctcatttcgttatacaccgatactgctgcgagacagcttctgccaccttcacacatctcttacagcttagaacaacaagcaacacgaatctatctaccgtcatcctactcttttcatcctcatactcgaatcctacaacaccatggaccgcaccgacgaggaactcgaccgtgactggcagcccaacggtcgccgcccccagtccacaattgcccgctcctttagtgcagagctcatggacattttccgcatcgagaacagtgttgccgacttggacgagcaggtcgacaagcgaaagcaacaggtcacatcaggccagacagagcttcaagctctagaagcacgaatcaaagagatggaggagcgtcttaaatccggcaaagtaggcagcgccaccggcagcccacgagccccacgacagcctctcaacaacacattcggtcagcagccgcaaggtcagtccaccgagaaagaactgccgcagagaccactccaaacatcagcctccacatcacggcccggcactgccaagcaaagccagccggcacccttgcacggaggcgccatgccgcccacccccacggccagcgaaggtgaattccagtccgacctcgtcaatagctcctcctccttcgaccgtaacgccgatgcccgaagttttgctgactatgtgatggttccaaaagatggtgatgaccgcgacagctagattggtgcccttgagaaatttatctcaggcacgacgcccttgctgctgtgttgatttttcgatcccttgctttttcatctccgagctcccgaaattagatggtacctccaatgggcagaatgactttatgatccaatgtctcacgaagctttcatgagatcacgtgtgtcatgacaaaacggacgcctgtccacccatttcaggatactcaacctcgaagcaacaacgtctcgcaatttggatacacaatcgattgtggagagatgtacagcaagcaacgcaatccatcagagcacctaagcaaatcgtcttcgttttctctctcaaagatatcccctcgttagagcgacgcgacaaagggtctcatcgttttcgaccctcttgtccgtttggcgttttatggcgtaccttattggttttaataacccttgacgaaatcgtttcaacataacccaatggcgagcacaattgggctcttacctacccctatgcgcagccgcgacgtgaatttatactatggcggcagcaaatccctaatgaactgttaaaggcatcacattgagtggcattatcaccggtatggcatagttcggtattatggttttcatatattggcactggctggcgggacacgttactatactacctacatggcaaggcgatgactggtagagagagtgtgatgagtataggagttatgaacacacagcatgatgaacccgaacaagtccagcttttgtacattattagctgggatctcatgactagtgaatgtgaatccatatccatgatcatgcgtgaccagtgaagatatagatctgaacatcaaccgac

SEQ ID NO: 30346 - DNA, 501 bp, Muscodor strobelii
  misc_feature: SGI cDNA ID NO. 570436
  misc_feature: Encodes the peptide sequence at SEQ ID NO 30347
atgcctgtttggcgggagctcaccctggaagatatcgacgccctcatgcaagtggctaataccatccacactgacctaccagagcgacccgaagtcttcgcagagcgcgtcaggctctttccaagaggtgatttagcattagtagacgacaacaacaaagtctgcgggtatgccatctcgcatccgatatcctctggccagccgccggctctggacagtctattgggcgaaatagcatctgatgcagatcaatactacatccacgatgtatgtgtgctacctgaatggcgaggtcatggtcttgcggctcaatgtgtcaagacacttcttgatattgccgatgaatatcccacgactgctcttgtatccgtgtatggtactgcgtctttttgggggcgctttgggttcgtgcctcccgcagttgtggaggagaggttggaggcgaaagtgcgtggttatggagacgacgctgtgtatttggtgcgtttgaaagaccgataa

SEQ ID NO: 30347 - protein, 166 aa, Muscodor strobelii
  misc_feature: SGI Peptide ID NO. 570436
  misc_feature (46)..(137): Pfam Id: PF00583 Pfam Desc: Acetyltransferase (GNAT) family
  misc_feature (3)..(162): NCBI GI: 67516923 Blast Desc: AN0743.2 [Aspergillus nidulans FGSC A4] gi|40746229|gb|EAA65385.1| AN0743.2 [Aspergillus nidulans FGSC A4] gi|259488979|tpe|CBF88871.1| TPA: conserved [Aspergillus FGSC
  misc_feature (7)..(162): NCBI GI: 169620628 Blast Desc: SNOG_13517 [Phaeosphaeria nodorum SN15] gi|111057844|gb|EAT78964.1| SNOG_13517 [Phaeosphaeria nodorum SN15]
  misc_feature (4)..(160): NCBI GI: 171676348 Blast Desc: protein product [Podospora anserina] gi|170936240|emb|CAP60899.1| protein product [Podospora anserina]
  misc_feature (7)..(160): NCBI GI: 116200997 Blast Desc: CHGG_08383 [Chaetomium globosum CBS 148.51] gi|88176901|gb|EAQ84369.1| CHGG_08383 [Chaetomium globosum CBS 148.51]
  misc_feature (4)..(162): NCBI GI: 90419920 Blast Desc: GCN5-related N-acetyltransferase [Aurantimonas manganoxydans SI85-9A1] gi|90335961|gb|EAS49709.1| GCN5-related N-acetyltransferase [Aurantimonas manganoxydans SI85-9A1]
  misc_feature (4)..(162): NCBI GI: 209885504 Blast Desc: acetyltransferase [Oligotropha carboxidovorans OM5] gi|209873700|gb|ACI93496.1| acetyltransferase [Oligotropha carboxidovorans OM5]
  misc_feature (7)..(162): NCBI GI: 114705309 Blast Desc: acetyltransferase, GNAT family protein [Fulvimarina pelagi HTCC2506] gi|114540094|gb|EAU43214.1| acetyltransferase, GNAT family protein [Fulvimarina pelagi HTCC2506]
  misc_feature (2)..(162): NCBI GI: 225853141 Blast Desc: GCN5-related N-acetyltransferase [Brucella melitensis ATCC 23457] gi|256263368|ref|ZP_05465900.1| conserved [Brucella melitensis bv. 2 str. 63/9] gi|225641506|gb|ACO01420.1| [Brucella
  misc_feature (2)..(162): NCBI GI: 23502542 Blast Desc: acetyltransferase [Brucella suis 1330] gi|23348541|gb|AAN30584.1| acetyltransferase, GNAT family [Brucella suis 1330]
  misc_feature (2)..(162): NCBI GI: 153008561 Blast Desc: GCN5-related N-acetyltransferase [Ochrobactrum anthropi ATCC 49188] gi|151560449|gb|ABS13947.1| GCN5-related N-acetyltransferase [Ochrobactrum anthropi ATCC 49188]
MPVWRELTLEDIDALMQVANTIHTDLPERPEVFAERVRLFPRGDLALVDDNNKVCGYAISHPISSGQPPALDSLLGEIASDADQYYIHDVCVLPEWRGHGLAAQCVKTLLDIADEYPTTALVSVYGTASFWGRFGFVPPAVVEERLEAKVRGYGDDAVYLVRLKDR

SEQ ID NO: 30348 - DNA, 864 bp, Muscodor strobelii
  misc_feature: SGI EST ID NO. CUFF.71768.0
  misc_feature: Variant of the nucleotide sequence at SEQ ID NO 30346
gacctctgaactacatgtatccataatcaaaagacgggatgcttcaagtaccacgtgctgatcttcaactaataagtttctcagaacaaatttcccatttcaatttcataattcatactaggagaagcatgcctgtttggcgggagctcaccctggaagatatcgacgccctcatgcaagtggctaataccatccacactgacctaccagagcgacccgaagtcttcgcagagcgcgtcaggctctttccaagaggtgatttagcattagtagacgacaacaacaaagtctgcgggtatgccatctcgcatccgatatcctctggccagccgccggctctggacagtctattgggcgaaatagcatctgatgcagatcaatactacatccacgatgtatgtgtgctacctgaatggcgaggtcatggtcttgcggctcaatgtgtcaagacacttcttgatattgccgatgaatatcccacgactgctcttgtatccgtgtatggtactgcgtctttttgggggcgctttgggttcgtgcctcccgcagttgtggaggagaggttggaggcgaaagtgcgtggttatggagacgacgctgtgtatttggtgcgtttgaaagaccgataatatggatagcgagatgatatcgaagcggaatgttctacatgatcttcgtgcttgaactcgtgggcattgtaggagcatggtatcgtgtcttgaaatcgtgatttgagatacatttaaggctgcttgttggttgcatccatcaataccaacctgattacagatcaatatgtttcgacttaacgataactaggtatagtgggcaatgtgctccatgaattattgaattcgcgccata

SEQ ID NO: 30349 - DNA, 3030 bp, Muscodor strobelii
  misc_feature: SGI cDNA ID NO. 570437
  misc_feature: Reduced expression when VOC is produced
  misc_feature: Encodes the peptide sequence at SEQ ID NO 30350
atgaatatttcgatcccggctccatacacatccacagaagcttgttttctcttccgcttgctcaacaaatacggcttcatcaacggcagcttcgatcgcatttcccacgaactcctcgagacccctctaatcctcgagcaagaagactacgatggaggtcggctaacgcccgagaaactccagaagctcgcgctcgagctagtgagggacgaacagaggcgcgaggccgaggctgcagctgagacgggggctaatggtcactctcccgcaactaagaagcggaagctgcagcctcctccgctgcccacccttaaagaggcccacgagcgacgcgacaagttgcccatcctcgtcgacaggctgaatgctcgttttcgggaggaactcattaggcagatccaagaagaggagcaagagtatgctcggagagaggaagaatgtgatgcgatcgagcgtggcgactgggacgacaagatacgggaagagaaagagaagcaactaggggcggcggccagcaagaacgtccccgtccccgtccctgtcatcgatactcggctaccaccacctcgagccaatggtaccggaataccaataccaacaccaccccccattgcgacgcaaacgaaacagccctcaccgcctcagccgaaattccaagatccaggaaggcgagtcgacactcctgtttctactcccatacctaccccgcctcagcctcctcaacccccccaggttgtgcccgagaagcgaccgctgcagccaaccccatcacccattgcaccagcacctcgaccgaaggcagaacagcgacacggtacacctgatgccgggcgcaaccctaatgggacgacgcctgtgcttcagcacccggctgttgcgcagggtattgcacaacggccaccgtcggtcacgccccagccgcatgtgcaggatggtttgcaacgtcccgataacttgtccaaagccaggagtccagggccggctcaacaaggccaagtaggcacacaaggctcaggtcaaggaacggcattgaaatgggagcccccgtacatccctcagcagcaatctcaacaactactacctcaccaccagcaacctcatcaacaacttcagcatcagcagcctcagccacaacaacaacaacaacaccaaacagcagtacctccgcctcgtcccccttatggcactacaaacccaccaaaacctgcttctaattctcctcccaatgtccagtctgtgcctggagcaagccaaccacctcacaatatacagccgcacatctcaagcaaacagactccaggccgaaatgcatcccctcgtcctccgcagacttccgttctcttccccccacaaaatgctgggcagatcccaccgactttgcatcatcctcccacccaggctactcccgttggttccgcacagcagagtactctgagccggacaccctcggtgccatcggcagctcccacgggtccaagtattccaccgagtatgcatacgcaacaacatcaaccaccaagtataccaaagcagactcctatgcggatgcccccaggaccaccactctcacacccccaacctgttgctactcccaccaagcctccgactgcagcggcacaacgccctccagcagctggcactacgcgcacatctcacccacagccacagccgcgccctcatcctcagtctcgtccaccgcagccccctgtcccagctactcctgctcagcaacctcagaggggttctactgtaacccttggcactccatggaaccagcagagtgcaccagccaacagttctcaacccgttcctgggccgcagcaagctccggcgcaaccacaagtgactactccccaagtaccacgtccagttacaggacttcaactgcagacaccctcgggtagcaatatccgttctcatgtcattcggggtcatggtacgaagtggacatctacaccaactcctgcaactcctcgtatggaagatgtgagtggttactttgacactcagagcccagcctttgaacctatcagtcctccactccgaccagctcagctacccgaaccaacccctagctcggcttcgacgagcgaagttggtaaatctggcgggaaggccgaagcatcaagaccaagaggccgcccatctcgtgcgcagaaggctgaggtggcacaacaacctgaagatggacctgttgactcagagctcccacctccgcatatcaagcacgaggcggccacgccacaggcatttgaagagaccggcgagtccagtttcgacgggagcgcgaccagtcgcgtgccagcggcaacgagtactctgggcaccaagcgcaagcgccaggactctccgctgaacagagagccaccaactcctgctacccatgtgctttggacacgcgcgttccacaagattagtatgaccgcgctggatcaaatcattggccaccgatatgccaatatgtttgcgcatccgatcaagccaaaactagcacccggctattatgatatcatcttgcggcccacggacctgaaaaatatccaaaaagctatcacgatggggtcaaaggcagcagcagcagcagtagccaacatgccggatgtcgatcccaatgcaacgtctgtttggctacctatttctatcgatcttgtccccccacgaggaatcatcaatatcgcacagctcgagcgcgagttgattcacatgttcgccaacgctatcatgtataaccccgacccgctacggggtctcggtccgtcattcctgaagagttatcgatccgacgcggacggcgaaggagatgatgctcgtggttacgagttcgacgagaacggagtggtgaaggagacacgcaacatgtacgccgaggtcgagaaactacttggtgacctccgtaatgaggtagtacctcgcacacaagcaggcaacggaagtaggagtgtcagtgcggccgttggcgagtcgaacactgtggaagaagatggcgatgaacaaggaagcgacgccaagagacgcaggattaggggctag

SEQ ID NO: 30350 - protein, 1009 aa, Muscodor strobelii
  misc_feature: SGI Peptide ID NO. 570437
  misc_feature (802)..(849): Pfam Id: PF00439 Pfam Desc: Bromodomain
  misc_feature (447)..(1009): NCBI GI: 46108154 Blast Desc: FG00959.1 [Gibberella zeae PH-1]
  misc_feature (639)..(1007): NCBI GI: 256735387 Blast Desc: NECHADRAFT_103198 [Nectria haematococca mpVI 77-13-4]
  misc_feature (644)..(965): NCBI GI: 85110037 Blast Desc: NCU09482 [Neurospora crassa OR74A] gi|28924875|gb|EAA33970.1| NCU09482 [Neurospora crassa OR74A] gi|38524271|emb|CAE75735.1| [Neurospora crassa]
  misc_feature (641)..(966): NCBI GI: 154316620 Blast Desc: BC1G_04241 [Botryotinia fuckeliana B05.10] gi|150846041|gb|EDN21234.1| BC1G_04241 [Botryotinia fuckeliana B05.10]
  misc_feature (272)..(966): NCBI GI: 171689808 Blast Desc: protein product [Podospora anserina] gi|170944866|emb|CAP70978.1| protein product [Podospora anserina]
  misc_feature (630)..(971): NCBI GI: 116205361 Blast Desc: CHGG_10564 [Chaetomium globosum CBS 148.51] gi|88176692|gb|EAQ84160.1| CHGG_10564 [Chaetomium globosum CBS 148.51]
  misc_feature (741)..(965): NCBI GI: 145606114 Blast Desc: MGG_06645 [Magnaporthe grisea 70-15] gi|145013841|gb|EDJ98482.1| MGG_06645 [Magnaporthe grisea 70-15]
  misc_feature (618)..(917): NCBI GI: 156043379 Blast Desc: SS1G_10693 [Sclerotinia sclerotiorum 1980] gi|154695080|gb|EDN94818.1| SS1G_10693 [Sclerotinia sclerotiorum 1980]
  misc_feature (695)..(972): NCBI GI: 67540228 Blast Desc: AN6284.2 [Aspergillus nidulans FGSC A4] gi|40739478|gb|EAA58668.1| AN6284.2 [Aspergillus nidulans FGSC A4] gi|259479502|tpe|CBF69782.1| TPA: [Aspergillus nidulans FGSC
  misc_feature (771)..(975): NCBI GI: 238841916 Blast Desc: extensin [Microsporum canis CBS 113480]
  misc_feature: Useful for introducing or modulating the production of volatile compounds
MNISIPAPYTSTEACFLFRLLNKYGFINGSFDRISHELLETPLILEQEDYDGGRLTPEKLQKLALELVRDEQRREAEAAAETGANGHSPATKKRKLQPPPLPTLKEAHERRDKLPILVDRLNARFREELIRQIQEEEQEYARREEECDAIERGDWDDKIREEKEKQLGAAASKNVPVPVPVIDTRLPPPRANGTGIPIPTPPPIATQTKQPSPPQPKFQDPGRRVDTPVSTPIPTPPQPPQPPQVVPEKRPLQPTPSPIAPAPRPKAEQRHGTPDAGRNPNGTTPVLQHPAVAQGIAQRPPSVTPQPHVQDGLQRPDNLSKARSPGPAQQGQVGTQGSGQGTALKWEPPYIPQQQSQQLLPHHQQPHQQLQHQQPQPQQQQQHQTAVPPPRPPYGTTNPPKPASNSPPNVQSVPGASQPPHNIQPHISSKQTPGRNASPRPPQTSVLFPPQNAGQIPPTLHHPPTQATPVGSAQQSTLSRTPSVPSAAPTGPSIPPSMHTQQHQPPSIPKQTPMRMPPGPPLSHPQPVATPTKPPTAAAQRPPAAGTTRTSHPQPQPRPHPQSRPPQPPVPATPAQQPQRGSTVTLGTPWNQQSAPANSSQPVPGPQQAPAQPQVTTPQVPRPVTGLQLQTPSGSNIRSHVIRGHGTKWTSTPTPATPRMEDVSGYFDTQSPAFEPISPPLRPAQLPEPTPSSASTSEVGKSGGKAEASRPRGRPSRAQKAEVAQQPEDGPVDSELPPPHIKHEAATPQAFEETGESSFDGSATSRVPAATSTLGTKRKRQDSPLNREPPTPATHVLWTRAFHKISMTALDQIIGHRYANMFAHPIKPKLAPGYYDIILRPTDLKNIQKAITMGSKAAAAAVANMPDVDPNATSVWLPISIDLVPPRGIINIAQLERELIHMFANAIMYNPDPLRGLGPSFLKSYRSDADGEGDDARGYEFDENGVVKETRNMYAEVEKLLGDLRNEVVPRTQAGNGSRSVSAAVGESNTVEEDGDEQGSDAKRRRIRG

SEQ ID NO: 30351 - DNA, 3855 bp, Muscodor strobelii
  misc_feature: SGI EST ID NO. CUFF.71916.1
  misc_feature: Variant of the nucleotide sequence at SEQ ID NO 30349
gtgcatattgtcctatcaccctgcacgcgcgtggtagtgggccgtgtttctctgtccaccgagcaccaccgtcatctggagctcgaacaatctcatcaatctcgtatctatctccagacaaccatccccgattcccgcccatcaatcaaattactccaaaccaccaggcatttccatctaatagaacaccccatcgaatcacgtgacgtctctgcgaatgcaggacgggtgaaaatttcaacgcgacgagcatccatcatcagaaaaatcaattgcgccctcaattaatcgtccccaacgcggccgcatcggtctctatagacttgcgcgatcttgtattggtgtaaaaaaccatcttaatcctggcgccaattcaccctctgcaccagcgcggcggtcccctcgtccacggccgaggcggatactggggcatgaatatttcgatcccggctccatacacatccacagaagcttgttttctcttccgcttgctcaacaaatacggcttcatcaacggcagcttcgatcgcatttcccacgaactcctcgagacccctctaatcctcgagcaagaagactacgatggaggtcggctaacgcccgagaaactccagaagctcgcgctcgagctagtgagggacgaacagaggcgcgaggccgaggctgcagctgagacgggggctaatggtcactctcccgcaactaagaagcggaagctgcagcctcctccgctgcccacccttaaagaggcccacgagcgacgcgacaagttgcccatcctcgtcgacaggctgaatgctcgttttcgggaggaactcattaggcagatccaagaagaggagcaagagtatgctcggagagaggaagaatgtgatgcgatcgagcgtggcgactgggacgacaagatacgggaagagaaagagaagcaactaggggcggcggccagcaagaacgtccccgtccccgtccctgtcatcgatactcggctaccaccacctcgagccaatggtaccggaataccaataccaacaccaccccccattgcgacgcaaacgaaacagccctcaccgcctcagccgaaattccaagatccaggaaggcgagtcgacactcctgtttctactcccatacctaccccgcctcagcctcctcaacccccccaggttgtgcccgagaagcgaccgctgcagccaaccccatcacccattgcaccagcacctcgaccgaaggcagaacagcgacacggtacacctgatgccgggcgcaaccctaatgggacgacgcctgtgcttcagcacccggctgttgcgcagggtattgcacaacggccaccgtcggtcacgccccagccgcatgtgcaggatggtttgcaacgtcccgataacttgtccaaagccaggagtccagggccggctcaacaaggccaagtaggcacacaaggctcaggtcaaggaacggcattgaaatgggagcccccgtacatccctcagcagcaatctcaacaactactacctcaccaccagcaacctcatcaacaacttcagcatcagcagcctcagccacaacaacaacaacaacaccaaacagcagtacctccgcctcgtcccccttatggcactacaaacccaccaaaacctgcttctaattctcctcccaatgtccagtctgtgcctggagcaagccaaccacctcacaatatacagccgcacatctcaagcaaacagactccaggccgaaatgcatcccctcgtcctccgcagacttccgttctcttccccccacaaaatgctgggcagatcccaccgactttgcatcatcctcccacccaggctactcccgttggttccgcacagcagagtactctgagccggacaccctcggtgccatcggcagctcccacgggtccaagtattccaccgagtatgcatacgcaacaacatcaaccaccaagtataccaaagcagactcctatgcggatgcccccaggaccaccactctcacacccccaacctgttgctactcccaccaagcctccgactgcagcggcacaacgccctccagcagctggcactacgcgcacatctcacccacagccacagccgcgccctcatcctcagtctcgtccaccgcagccccctgtcccagctactcctgctcagcaacctcagaggggttctactgtaacccttggcactccatggaaccagcagagtgcaccagccaacagttctcaacccgttcctgggccgcagcaagctccggcgcaaccacaagtgactactccccaagtaccacgtccagttacaggacttcaactgcagacaccctcgggtagcaatatccgttctcatgtcattcggggtcatggtacgaagtggacatctacaccaactcctgcaactcctcgtatggaagatgtgagtggttactttgacactcagagcccagcctttgaacctatcagtcctccactccgaccagctcagctacccgaaccaacccctagctcggcttcgacgagcgaagttggtaaatctggcgggaaggccgaagcatcaagaccaagaggccgcccatctcgtgcgcagaaggctgaggtggcacaacaacctgaagatggacctgttgactcagagctcccacctccgcatatcaagcacgaggcggccacgccacaggcatttgaagagaccggcgagtccagtttcgacgggagcgcgaccagtcgcgtgccagcggcaacgagtactctgggcaccaagcgcaagcgccaggactctccgctgaacagagagccaccaactcctgctacccatgtgctttggacacgcgcgttccacaagattagtatgaccgcgctggatcaaatcattggccaccgatatgccaatatgtttgcgcatccgatcaagccaaaactagcacccggctattatgatatcatcttgcggcccacggacctgaaaaatatccaaaaagctatcacgatggggtcaaaggcagcagcagcagcagtagccaacatgccggatgtcgatcccaatgcaacgtctgtttggctacctatttctatcgatcttgtccccccacgaggaatcatcaatatcgcacagctcgagcgcgagttgattcacatgttcgccaacgctatcatgtataaccccgacccgctacggggtctcggtccgtcattcctgaagagttatcgatccgacgcggacggcgaaggagatgatgctcgtggttacgagttcgacgagaacggagtggtgaaggagacacgcaacatgtacgccgaggtcgagaaactacttggtgacctccgtaatgaggtagtacctcgcacacaagcaggcaacggaagtaggagtgtcagtgcggccgttggcgagtcgaacactgtggaagaagatggcgatgaacaaggaagcgacgccaagagacgcaggattaggggctagtatcctcgtcgctcacgttctcggaaatgattatgatgtggtcgtcttctatcagggcaacaaagtgctctgatgttctgaaagtggctggatatgcgaagacgcacgaacttaaagttaaaagactcgctggcctgccactgtgacccgtttgtcactcttgtatagggttcactttgccaccagcatatcttacctgcgccgagagagcaattatcgcttagactacgggtggcgcacgcagggtacccgaaagcttcaagaaagcatcttgaggtcgaaacttaatgttgaagtagaacccgttgtggacttgattaaatcctgcaatgatgatctggaatacccggagttcaaacctcctaagcaggccaaaatgtataatgaatattaa

SEQ ID NO: 30352 - DNA, 2088 bp, Muscodor strobelii
  misc_feature: SGI cDNA ID NO. 570438
  misc_feature: Encodes the peptide sequence at SEQ ID NO 30353
atgcctcgctgcaacgtcatcgcagattctgaagatgaagacgaactcggaggtttttcgccagatccctcggatgacgaagccgaaggcgagcgtcctgagccagaagctctgattcagaaccaagcgtcttcagtcccaccagctcacgatggacgtacccgctcatctgacaagacagaccccaacgtattcgcagatatttatgacgagcaacagagtctggcagtcgagcaatctcaactcattgagaatattgtacgccaaagtcagaaagccagcagaagtagcggcgatgtgtcgctctccgcaaagtctaagggacgaaacggggaacggtcatcgggcactgacactgcatcgcctatcaagttgatcaggcatgaagctcatgaaaacatcttgagtgacggggcgtctgactttaatgctcctcataagacacacagcgatgagtgggatatcccgagcagcgcagaggctgccatgcctccacctaaaagcaccaaaacgccaaaggggaagcagaaaacgtacgggaagaagaggaagagtggttcagctgcttctagtcctactgtagcggaagccttcacatttgacgacgcacaagcggagaatactgcagaagagacaggcttggacgatctactatatcaaggcgaggacgcagagaccccatcgttgccaatggcaaagcgaaggaagatatcattacatggcactaccaccacatcggaatccacgaatttctatgttgctcagagcaatttgacgacaatgcaaaagttagagtaccaaaaagtacacgtaccaacgactacatactccgggtttccagggtctattgcaaacaacaagtctagtagtgacagaactgttgcttattccacacctagcggatactcatcgattccaccattgccatgggaagagtctccagcacaacgtgcagacctttcagcgaaggaaattatagacataatcagttcgtcgcctgatgccctcaccactgcggttgacgatcgcgacgaaagcggggtggttagtgatcccatcccacaagaggacgaacaagcagagagtctcgaaacactacttccgacgcagaaacctactagcagcaagaagaagaaaacttctactctcaaggaggacgaagcagacgaattgggtatcgaggatatgttcgattctaatgaaatcggtctacctcgggagcgatataagccaagaccaagtcgacgacgatcaggagcggctcctaccgttgcccctgagactggatttccagaggaggatatcgagcctcttactgatgcggagacagccgtcgagccgactgcttctttagatccgatatcagctcccgtagaagtggagtcggcagaaccccgaccgaagaaacgtggacgtaagaagaaacaaccggttgtcgtggatgacgaccaggaagtagatttggatgaagagaaacagtcgatggatgagatcacattcattccggatgtagttgaggaagaagtcccagcggagaaacctaagaagaagcgaggacgtcctcgaaaggcatctgcgaaggctaccgttgaagttgtgcctgaagccgacgagcttgccgaagaggtagaagataacactgaaatttggaaaccttcacctaagaaaaaggacaaagacaagcggacatcgagcaaaaagaagatggtcatggatagtgacgatgacgaggacgtcgaattcgaagaggacaccgagagacctaaaccatcacttaagaagaagaaccaagacaagcagccgtcgaagaaaaagcagacgattgcagacagcgacgacgaggaagatgtcgatgacgaggaaacgaaattcgcggagaagaaactgccgctgaaggagttagacagaaactcgatgtcgccttctaagtctcccatcaaaaaaccggagaccaaagacgaggtttctacgccgaaatcactggctaaggatgcaaagattcctgcttcgcagtcgaaagtcaattatagagtggggttgagcaaaaaatcgaggattgctccgttgctgaagattattaagaaatag

SEQ ID NO: 30353 - protein, 695 aa, Muscodor strobelii
  misc_feature: SGI Peptide ID NO. 570438
MPRCNVIADSEDEDELGGFSPDPSDDEAEGERPEPEALIQNQASSVPPAHDGRTRSSDKTDPNVFADIYDEQQSLAVEQSQLIENIVRQSQKASRSSGDVSLSAKSKGRNGERSSGTDTASPIKLIRHEAHENILSDGASDFNAPHKTHSDEWDIPSSAEAAMPPPKSTKTPKGKQKTYGKKRKSGSAASSPTVAEAFTFDDAQAENTAEETGLDDLLYQGEDAETPSLPMAKRRKISLHGTTTTSESTNFYVAQSNLTTMQKLEYQKVHVPTTTYSGFPGSIANNKSSSDRTVAYSTPSGYSSIPPLPWEESPAQRADLSAKEIIDIISSSPDALTTAVDDRDESGVVSDPIPQEDEQAESLETLLPTQKPTSSKKKKTSTLKEDEADELGIEDMFDSNEIGLPRERYKPRPSRRRSGAAPTVAPETGFPEEDIEPLTDAETAVEPTASLDPISAPVEVESAEPRPKKRGRKKKQPVVVDDDQEVDLDEEKQSMDEITFIPDVVEEEVPAEKPKKKRGRPRKASAKATVEVVPEADELAEEVEDNTEIWKPSPKKKDKDKRTSSKKKMVMDSDDDEDVEFEEDTERPKPSLKKKNQDKQPSKKKQTIADSDDEEDVDDEETKFAEKKLPLKELDRNSMSPSKSPIKKPETKDEVSTPKSLAKDAKIPASQSKVNYRVGLSKKSRIAPLLKIIKK

SEQ ID NO: 30354 - DNA, 1548 bp, Muscodor strobelii
  misc_feature: SGI EST ID NO. CUFF.71778.0
  misc_feature: Variant of the nucleotide sequence at SEQ ID NO 30352
ctcattctattgttctagctcgaatcactcgcaattcaaattgcgagcattcgcctcccagttttgtcaaaatccgacgttgtggccaggtcgcaacgcgtcgcgtaaattgagttccagggtccttgaaaggtgtggcattgcactgaatcgcccacatgcctcgctgcaacgtcatcgcagattctgaagatgaagacgaactcggaggtttttcgccagatccctcggatgacgaagccgaaggcgagcgtcctgagccagaagctctgattcagaaccaagcgtcttcagtcccaccagctcacgatggacgtacccgctcatctgacaagacagaccccaacgtattcgcagatatttatgacgagcaacagagtctggcagtcgagcaatctcaactcattgagaatattgtacgccaaagtcagaaagccagcagaagtagcggcgatgtgtcgctctccgcaaagtctaagggacgaaacggggaacggtcatcgggcactgacactgcatcgcctatcaagttgatcaggcatgaagctcatgaaaacatcttgagtgacggggcgtctgactttaatgctcctcataagacacacagcgatgagtgggatatcccgagcagcgcagaggctgccatgcctccacctaaaagcaccaaaacgccaaaggggaagcagaaaacgtacgggaagaagaggaagagtggttcagctgcttctagtcctactgtagcggaagccttcacatttgacgacgcacaagcggagaatactgcagaagagacaggcttggacgatctactatatcaaggcgaggacgcagagaccccatcgttgccaatggcaaagcgaaggaagatatcattacatggcactaccaccacatcggaatccacgaatttctatgttgctcagagcaatttgacgacaatgcaaaagttagagtaccaaaaagtacacgtaccaacgactacatactccgggtttccagggtctattgcaaacaacaagtctagtagtgacagaactgttgcttattccacacctagcggatactcatcgattccaccattgccatgggaagagtctccagcacaacgtgcagacctttcagcgaaggaaattatagacataatcagttcgtcgcctgatgccctcaccactgcggttgacgatcgcgacgaaagcggggtggttagtgatcccatcccacaagaggacgaacaagcagagagtctcgaaacactacttccgacgcagaaacctactagcagcaagaagaagaaaacttctactctcaaggaggacgaagcagacgaattgggtatcgaggatatgttcgattctaatgaaatcggtctacctcgggagcgatataagccaagaccaagtcgacgacgatcaggagcggctcctaccgttgcccctgagactggatttccagaggaggatatcgagcctcttactgatgcggagacagccgtcgagccgactgcttctttagatccgatatcagctcccgtagaagtggagtcggcag

SEQ ID NO: 30355 - DNA, 2367 bp, Muscodor strobelii
  misc_feature: SGI cDNA ID NO. 570439
  misc_feature: Encodes the peptide sequence at SEQ ID NO 30356
atggcgacttttacccccctcaaccctattgctctcaacgtgtccaggaaacgccgcgcagcttctcctccgcggatcgaatcatcaccagcgacccgtccggagggcagctatccgtcacctatgccgccagtagcgcagagcgcaggtactgccccgggccagtcgcgtttcccgtcccggaagagcagcgtgggtcagcaagactgccccgagagtatcgatcggatggcccctagaatagatgcgaaccccgactctagctccagcaacaagcccgaaggtctaccttcggacggccacttgaatttctcgcctacttctcaaacatctaatgagaaccctatcgctcgattctacgaaaacaatgacggcccatggcatccgctcgaactcgactctggctatggtagctatgcgcagcttcgtcagaatgtgacgaatgggtctgtttgtgatgagaccctggataccaactatgatgagcagagcatgatatattccgtgcaaggctcgccttttttggtgccgacgaccagcccggtggccaaggcactgcccatagtgcggccgggcgatatatacaagcgcatggaggcggagaaagagaaggaaagattgtcgatggagtcgggacggccaagcatggagcccaatgattatgacctagctccgccgccgctgccgccgccgagatttttaccggccatgactgccgactcgtcttggcaactgcactactgtctagtttgcgatgtccgcgtagatgatggtccgtactgctcagattgcaggctgagggattgggagaacagctcctctcttagtgatgctgcgatcccaaacggcgtcgctgtgcccaagccaaatgtcggatggcaatgggctgagcatgacggccaacctccgagttttgattttgggcaggctccacctagttgggggacgagtagtgctttttcaagttctgcgaacccggacgaggactggaccaagctctccgacttagcggaacgtcggcgcatccagaatcggatcgctcaacgcaattatcgcaaaaagctgaaaaagcggctggaagagctagagagagaggccgcggcagcccgtgagcaaaaagagaaaactccgagggccatcagtataaacagagttaaattcaaaagattaaaggacataatcaacgagctcaaggcagctgagtcttcaacaactcaattcatgccagcatccgcctcctcctcgtatacgccctcacaacaaccatccagagagaatcgtaggaaggtacttcgcgtggcaatcaatggccagcaggatacggcatgtccagattcaggttcccaaaagaacatcatggccgagtcctgggccaagcagcacaggctaaaaatccgacgtgagagggaggatcaacgaatatttgaactagggaatggcaataaaatccgatcaattggtcgagtccgggcacgtgtccgactccttgcgggcgacctcaatgcacaaaaggaatggttttacgttttcgccaactgccccgtacctctgatcctcgggatgccatttctccaacgctacgagattcttaccaagaaccgatcgttcctagaggactgccccccgacgtatagcaaaatcgattctgtcttttggataggttcagtccgcaatcgactacaatgttcgctggactcacataaagccgtggcggtggcagacacagggtccgacgtcaacctcatgtctctggcatatgctaagcgagaaggatacctgattgatcgccgtcaggaatgccggcgcagactacaatttggtgacggtagccaggctgacacggtagggcaggtctacgtccacaatttgactctcgattggcgtgggtcagagtccaggcctggcccaatacctatatcgcgctccagtcaaactgatcacgaagaagccggtccagtgcaactatcggctatattctacgttctccccggcctaccatgtgatgtcattctcggccgcggccttcttgaagcaacggatgcattcaatttctgtcccgatctcaaatcgtccgacgaatcccaacgcgatcttttagctgagttaaacatagttatagatcgcggcagagttgcagagtttctaagatcgctgcggaagaaacccaatacagtcactgctgtgcagaacgatgtcgagcgacacgacagtgaacggcacgctcactggtatcgtatttcacagctcgaggaagaaatcgagcgattaactggcgtagctcttgaacaaaaacgagttactaaggagaagatgctgcgggaatgggaaagggctcatctccattgtcaatattgcattcaagtttaa

SEQ ID NO: 30356 - protein, 788 aa, Muscodor strobelii
  misc_feature: SGI Peptide ID NO. 570439
  misc_feature (315)..(377): NCBI GI: 189189864 Blast Desc: PTRG_00938 [Pyrenophora tritici-repentis Pt-1C-BFP] gi|187972877|gb|EDU40376.1| PTRG_00938 [Pyrenophora tritici-repentis Pt-1C-BFP]
  misc_feature (293)..(369): NCBI GI: 164426722 Blast Desc: NCU04058 [Neurospora crassa OR74A] gi|157071448|gb|EAA28437.2| NCU04058 [Neurospora crassa OR74A]
  misc_feature (315)..(423): NCBI GI: 256727728 Blast Desc: NECHADRAFT_66814 [Nectria haematococca mpVI 77-13-4]
  misc_feature (442)..(684): NCBI GI: 256724849 Blast Desc: NECHADRAFT_76965 [Nectria haematococca mpVI 77-13-4]
  misc_feature (305)..(403): NCBI GI: 259482871 Blast Desc: TPA: b-zip transcription factor (Eurofung) [Aspergillus nidulans FGSC A4]
  misc_feature (313)..(371): NCBI GI: 171682334 Blast Desc: protein product [Podospora anserina] gi|170941126|emb|CAP66776.1| protein product [Podospora anserina]
  misc_feature (293)..(369): NCBI GI: 39979245 Blast Desc: [Neurospora crassa]
  misc_feature (313)..(401): NCBI GI: 226293068 Blast Desc: PADG_04567 [Paracoccidioides brasiliensis Pb18]
  misc_feature (313)..(401): NCBI GI: 226277783 Blast Desc: PAAG_04399 [Paracoccidioides brasiliensis Pb01]
  misc_feature (313)..(369): NCBI GI: 156057847 Blast Desc: SS1G_04655 [Sclerotinia sclerotiorum 1980] gi|154702440|gb|EDO02179.1| SS1G_04655 [Sclerotinia sclerotiorum 1980]
MATFTPLNPIALNVSRKRRAASPPRIESSPATRPEGSYPSPMPPVAQSAGTAPGQSRFPSRKSSVGQQDCPESIDRMAPRIDANPDSSSSNKPEGLPSDGHLNFSPTSQTSNENPIARFYENNDGPWHPLELDSGYGSYAQLRQNVTNGSVCDETLDTNYDEQSMIYSVQGSPFLVPTTSPVAKALPIVRPGDIYKRMEAEKEKERLSMESGRPSMEPNDYDLAPPPLPPPRFLPAMTADSSWQLHYCLVCDVRVDDGPYCSDCRLRDWENSSSLSDAAIPNGVAVPKPNVGWQWAEHDGQPPSFDFGQAPPSWGTSSAFSSSANPDEDWTKLSDLAERRRIQNRIAQRNYRKKLKKRLEELEREAAAAREQKEKTPRAISINRVKFKRLKDIINELKAAESSTTQFMPASASSSYTPSQQPSRENRRKVLRVAINGQQDTACPDSGSQKNIMAESWAKQHRLKIRREREDQRIFELGNGNKIRSIGRVRARVRLLAGDLNAQKEWFYVFANCPVPLILGMPFLQRYEILTKNRSFLEDCPPTYSKIDSVFWIGSVRNRLQCSLDSHKAVAVADTGSDVNLMSLAYAKREGYLIDRRQECRRRLQFGDGSQADTVGQVYVHNLTLDWRGSESRPGPIPISRSSQTDHEEAGPVQLSAIFYVLPGLPCDVILGRGLLEATDAFNFCPDLKSSDESQRDLLAELNIVIDRGRVAEFLRSLRKKPNTVTAVQNDVERHDSERHAHWYRISQLEEEIERLTGVALEQKRVTKEKMLREWERAHLHCQYCIQV

SEQ ID NO: 30357 - DNA, 2977 bp, Muscodor strobelii
  misc_feature: SGI EST ID NO. CUFF.71785.0
  misc_feature: Variant of the nucleotide sequence at SEQ ID NO 30355
tcagcgaagtgtaacttgttttttctttccggaagctaattcgaagattctgtcgtgcttgcttcttgttgagtttcaaaaagtcgcagcgcaaaacacgaccacgatttgacctctattagagcgatggtggaagtctgaataacgtactctatacacctgaaaggcagcttacatggcgacttttacccccctcaaccctattgctctcaacgtgtccaggaaacgccgcgcagcttctcctccgcggatcgaatcatcaccagcgacccgtccggagggcagctatccgtcacctatgccgccagtagcgcagagcgcaggtactgccccgggccagtcgcgtttcccgtcccggaagagcagcgtgggtcagcaagactgccccgagagtatcgatcggatggcccctagaatagatgcgaaccccgactctagctccagcaacaagcccgaaggtctaccttcggacggccacttgaatttctcgcctacttctcaaacatctaatgagaaccctatcgctcgattctacgaaaacaatgacggcccatggcatccgctcgaactcgactctggctatggtagctatgcgcagcttcgtcagaatgtgacgaatgggtctgtttgtgatgagaccctggataccaactatgatgagcagagcatgatatattccgtgcaaggctcgccttttttggtgccgacgaccagcccggtggccaaggcactgcccatagtgcggccgggcgatatatacaagcgcatggaggcggagaaagagaaggaaagattgtcgatggagtcgggacggccaagcatggagcccaatgattatgacctagctccgccgccgctgccgccgccgagatttttaccggccatgactgccgactcgtcttggcaactgcactactgtctagtttgcgatgtccgcgtagatgatggtccgtactgctcagattgcaggctgagggattgggagaacagctcctctcttagtgatgctgcgatcccaaacggcgtcgctgtgcccaagccaaatgtcggatggcaatgggctgagcatgacggccaacctccgagttttgattttgggcaggctccacctagttgggggacgagtagtgctttttcaagttctgcgaacccggacgaggactggaccaagctctccgacttagcggaacgtcggcgcatccagaatcggatcgctcaacgcaattatcgcaaaaagctgaaaaagcggctggaagagctagagagagaggccgcggcagcccgtgagcaaaaagagaaaactccgagggccatcagtataaacagagttaaattcaaaagattaaaggacataatcaacgagctcaaggcagctgagtcttcaacaactcaattcatgccagcatccgcctcctcctcgtatacgccctcacaacaaccatccagagagaatcgtaggaaggtacttcgcgtggcaatcaatggccagcaggatacggcatgtccagattcaggttcccaaaagaacatcatggccgagtcctgggccaagcagcacaggctaaaaatccgacgtgagagggaggatcaacgaatatttgaactagggaatggcaataaaatccgatcaattggtcgagtccgggcacgtgtccgactccttgcgggcgacctcaatgcacaaaaggaatggttttacgttttcgccaactgccccgtacctctgatcctcgggatgccatttctccaacgctacgagattcttaccaagaaccgatcgttcctagaggactgccccccgacgtatagcaaaatcgattctgtcttttggataggttcagtccgcaatcgactacaatgttcgctggactcacataaagccgtggcggtggcagacacagggtccgacgtcaacctcatgtctctggcatatgctaagcgagaaggatacctgattgatcgccgtcaggaatgccggcgcagactacaatttggtgacggtagccaggctgacacggtagggcaggtctacgtccacaatttgactctcgattggcgtgggtcagagtccaggcctggcccaatacctatatcgcgctccagtcaaactgatcacgaagaagccggtccagtgcaactatcggctatattctacgttctccccggcctaccatgtgatgtcattctcggccgcggccttcttgaagcaacggatgcattcaatttctgtcccgatctcaaatcgtccgacgaatcccaacgcgatcttttagctgagttaaacatagttatagatcgcggcagagttgcagagtttctaagatcgctgcggaagaaacccaatacagtcactgctgtgcagaacgatgtcgagcgacacgacagtgaacggcacgctcactggtatcgtatttcacagctcgaggaagaaatcgagcgattaactggcgtagctcttgaacaaaaacgagttactaaggagaagatgctgcgggaatgggaaagggctcatctccattgtcaatattgcattcaagtttaaacggaattctgttttgaagatactggcttacattctgtaaatggaactttcttttggatatggatttacagcgaaatagggtatgggaaatgatagcgttgatagcgttctacggacttccttgagctgactttctacacagagtcagatccttgatgccttttaagatgaatttaagatcaagattttctattgtctatatctcctattaaatgtagtattatgagtttatatcccaacagtcctgcgataaaggaagaaataaaggaagaagaaaccctgacgtattccgttccctcatgtggaagagacactcaactttaaatagcgatatagacacttgttgttaaagaaatggcaggatggaaaataggagtttctcgtctgttctggtccaagggagctcaatctgatgatagcataggtagtcttcac

SEQ ID NO: 30358 - DNA, 912 bp, Muscodor strobelii
  misc_feature: SGI cDNA ID NO. 570440
  misc_feature: Encodes the peptide sequence at SEQ ID NO 30359
atgaattggaacacaatacatcaccaaagagaaccgatcaatggatttccaagagttgcgcacaagatcgccagtgatccggatcggacaggcactatttaccggcggttcgaccggctcgcgtccagagccttgttgttaatggaagccgagattgccgaattagaagctttacaagacaaatacgatgaagaagatcggttacgtggtgaccggctttctggcgagagccgtagtaaatggtcgacctttgagaaacaggcaaatgaaagggatagtaatggggtgttgataaatccggaagaagcaaagcgtatggaactagctatgaccattaacgacaagctagagaaatactatgatgcgttggctagacatcaggctctcttgaattttgagaagccggcacatacgacagtacaacgtatgcgcaaatggttcctgggcgaggcggagaataagcaaccgcaactttggggacggagccagaagcggttcgaggatgtcaatgacctggttgcgctgaaggtgcctgcgaaccaagatcgactttcactatttgttttgaactactttggcggactctttcaggcggatgaccatcacagcgtctcagacgtagtgcccgagcggtctgtcgccaaagtggttgcgattctatgctctatcttctccgcgatagttctcttcggatctgtcatatcactgtactttgtgtacaactcgccatacgctctattgggcttggtaggagcgtggacaatcttgttcgctttgtgtattggcgtcttgacgaatgccaaaagagaccaagtctttgctgcgactgccgcatatgctgcggtattagtagtttttatcagtccgtcgctgggtactacaggagaatgcaactgtacaataacaacctaa

SEQ ID NO: 30359 - protein, 303 aa, Muscodor strobelii
  misc_feature: SGI Peptide ID NO. 570440
  misc_feature (13)..(293): NCBI GI: 256724957 Blast Desc: NECHADRAFT_91425 [Nectria haematococca mpVI 77-13-4]
  misc_feature (13)..(293): NCBI GI: 46126473 Blast Desc: FG07614.1 [Gibberella zeae PH-1]
  misc_feature (2)..(278): NCBI GI: 169609999 Blast Desc: SNOG_08091 [Phaeosphaeria nodorum SN15] gi|111063247|gb|EAT84367.1| SNOG_08091 [Phaeosphaeria nodorum SN15]
  misc_feature (10)..(287): NCBI GI: 256726540 Blast Desc: NECHADRAFT_79592 [Nectria haematococca mpVI 77-13-4]
  misc_feature (11)..(288): NCBI GI: 156063086 Blast Desc: SS1G_01659 [Sclerotinia sclerotiorum 1980] gi|154696995|gb|EDN96733.1| SS1G_01659 [Sclerotinia sclerotiorum 1980]
  misc_feature (14)..(269): NCBI GI: 169616612 Blast Desc: SNOG_11479 [Phaeosphaeria nodorum SN15] gi|111060067|gb|EAT81187.1| SNOG_11479 [Phaeosphaeria nodorum SN15]
  misc_feature (15)..(273): NCBI GI: 115491261 Blast Desc: [Aspergillus terreus NIH2624] gi|114197118|gb|EAU38818.1| [Aspergillus terreus NIH2624]
  misc_feature (12)..(272): NCBI GI: 256734893 Blast Desc: NECHADRAFT_75615 [Nectria haematococca mpVI 77-13-4]
  misc_feature (15)..(278): NCBI GI: 189192693 Blast Desc: conserved [Pyrenophora tritici-repentis Pt-1C-BFP] gi|187978249|gb|EDU44875.1| conserved [Pyrenophora tritici-repentis Pt-1C-BFP]
  misc_feature (15)..(278): NCBI GI: 256731937 Blast Desc: NECHADRAFT_80821 [Nectria haematococca mpVI 77-13-4]
MNWNTIHHQREPINGFPRVAHKIASDPDRTGTIYRRFDRLASRALLLMEAEIAELEALQDKYDEEDRLRGDRLSGESRSKWSTFEKQANERDSNGVLINPEEAKRMELAMTINDKLEKYYDALARHQALLNFEKPAHTTVQRMRKWFLGEAENKQPQLWGRSQKRFEDVNDLVALKVPANQDRLSLFVLNYFGGLFQADDHHSVSDVVPERSVAKVVAILCSIFSAIVLFGSVISLYFVYNSPYALLGLVGAWTILFALCIGVLTNAKRDQVFAATAAYAAVLVVFISPSLGTTGECNCTITT

SEQ ID NO: 30360 - DNA, 1293 bp, Muscodor strobelii
  misc_feature: SGI EST ID NO. CUFF.71787.0
  misc_feature: Variant of the nucleotide sequence at SEQ ID NO 30358
ttatcccgtccaaaggcaattgaatcgacgtacaactatcaaggccggttgcgatggccgtttgtgactttagaaagagaggcacacagaatctattcaacaaattatgaattggaacacaatacatcaccaaagagaaccgatcaatggatttccaagagttgcgcacaagatcgccagtgatccggatcggacaggcactatttaccggcggttcgaccggctcgcgtccagagccttgttgttaatggaagccgagattgccgaattagaagctttacaagacaaatacgatgaagaagatcggttacgtggtgaccggctttctggcgagagccgtagtaaatggtcgacctttgagaaacaggcaaatgaaagggatagtaatggggtgttgataaatccggaagaagcaaagcgtatggaactagctatgaccattaacgacaagctagagaaatactatgatgcgttggctagacatcaggctctcttgaattttgagaagccggcacatacgacagtacaacgtatgcgcaaatggttcctgggcgaggcggagaataagcaaccgcaactttggggacggagccagaagcggttcgaggatgtcaatgacctggttgcgctgaaggtgcctgcgaaccaagatcgactttcactatttgttttgaactactttggcggactctttcaggcggatgaccatcacagcgtctcagacgtagtgcccgagcggtctgtcgccaaagtggttgcgattctatgctctatcttctccgcgatagttctcttcggatctgtcatatcactgtactttgtgtacaactcgccatacgctctattgggcttggtaggagcgtggacaatcttgttcgctttgtgtattggcgtcttgacgaatgccaaaagagaccaagtctttgctgcgactgccgcatatgctgcggtattagtagtttttatcagtccgtcgctgggtactacaggagaatgcaactgtacaataacaacctaatcattgaaggagacgctagatcgttcgcgaaaaggggcattggcagagggagctatacacccgggagcgatacgaactggaatgttattcgagagcattgcaaacgggaaattagacatggcattgcctttaactgtataacctatgctgcacgaattgtataactatctactaaatatgagaggagggtcggatgcgcacggatttcgaataagttggaataaggaccaaaacactacaagacatagaattgccattatgataaaacagataag

SEQ ID NO: 30361 - DNA, 1218 bp, Muscodor strobelii
  misc_feature: SGI cDNA ID NO. 570441
  misc_feature: Encodes the peptide sequence at SEQ ID NO 30362
atgaccgaccgcgtggccgccttcgtacgggtctcaggacccccaaacagtagttttctcgtcggctatcctggcatttccgcaacacttccgcgcattgaaggaaaagtcgaaatccgcccacagcaaggatactcagcccctgtcgccatctccctggtccgaatatgcctgcagcgacgagagacaatccacccggccgccgagaatatggccaagcgccatctgggcacgcctcgccgagaaacgacggatgtggttgggaaggagctccttctataccgatgcgcctccgggcgggaggccgacaacgtcatcgccatggatctcccattcgtgttgttcattccctttggacgaggcggcgaggagacgaacaggaggataccgcccgcatcattacagcttcctagtaggactgctgaaacgtattacgagttggttgtcacagttcagcagggccagagcgtacagaacaagtatgcatttcccgtgcctttgcagcgatacgacacgctgtcgacgtttgggatgtataatcgcccggagacgaaaatagcaaccaccgacaacatcgtcaccctcggcatctcccttcccagatggagttacggccctatggaccccatcagcgtctatatcaggcttgctcccaatctcgactggatggcaaaagcaaggaaggtcaccatcaaatcgattaccgtggccatcgaggaggaaatcacatacaacccggaaggcgatgagccgacgaaaaagatcaacaggatacaaaaacacagtcagaacgtaggactcaagatgtcggaagagggctatgcaacgaatatgggcatcatctttccacataaggatctgagagactcgaacggcatcatccgtagagggcagcctgcatttcctaactacgaagtgacttctttcacgacaacatcaacactctacaaaattgagtttttccttagcataaaggcaactctgacatcagcgcgagatatcactcttcggcaacctatcgtcatctgtccgctcgatcatcaagcttgcaaagaggaaatggatgctatcgagcaagcagctaaagacgcttcgtccgtcgaccaagccaaccccatgttgccagcaagaaacattgtgctggctaatgaccccaatgccctggcgacattgggattgtgtatggtcggaggacagaagaagcctttgattgagtga

SEQ ID NO: 30362 - protein, 405 aa, Muscodor strobelii
  misc_feature: SGI Peptide ID NO. 570441
  misc_feature (3)..(405): NCBI GI: 171689242 Blast Desc: protein product [Podospora anserina] gi|170944583|emb|CAP70694.1| protein product [Podospora anserina]
  misc_feature (7)..(405): NCBI GI: 256730595 Blast Desc: [Nectria haematococca mpVI 77-13-4]
  misc_feature (7)..(405): NCBI GI: 46109198 Blast Desc: FG01481.1 [Gibberella zeae PH-1]
  misc_feature (7)..(405): NCBI GI: 85110398 Blast Desc: NCU08511 [Neurospora crassa OR74A] gi|28925120|gb|EAA34204.1| NCU08511 [Neurospora crassa OR74A] gi|38524216|emb|CAE75683.1| conserved [Neurospora crassa]
  misc_feature (5)..(405): NCBI GI: 238840417 Blast Desc: arrestin domain-containing protein [Microsporum canis CBS 113480]
  misc_feature (5)..(405): NCBI GI: 70992189 Blast Desc: arrestin domain protein [Aspergillus fumigatus Af293] gi|66848576|gb|EAL88905.1| arrestin domain protein [Aspergillus fumigatus Af293] gi|159124512|gb|EDP49630.1| arrestin domain
  misc_feature (5)..(405): NCBI GI: 226278554 Blast Desc: arrestin domain-containing protein [Paracoccidioides brasiliensis Pb01]
  misc_feature (5)..(405): NCBI GI: 169772647 Blast Desc: [Aspergillus oryzae RIB40] gi|238490562|ref|XP_002376518.1| arrestin domain protein [Aspergillus flavus NRRL3357] gi|83768653|dbj|BAE58790.1| protein
  misc_feature (5)..(405): NCBI GI: 189189578 Blast Desc: arrestin domain conatining protein [Pyrenophora tritici-repentis Pt-1C-BFP] gi|187972734|gb|EDU40233.1| arrestin domain conatining protein [Pyrenophora tritici-repentis
  misc_feature (5)..(405): NCBI GI: 119175873 Blast Desc: CIMG_09710 [Coccidioides immitis RS]
MTDRVAAFVRVSGPPNSSFLVGYPGISATLPRIEGKVEIRPQQGYSAPVAISLVRICLQRRETIHPAAENMAKRHLGTPRRETTDVVGKELLLYRCASGREADNVIAMDLPFVLFIPFGRGGEETNRRIPPASLQLPSRTAETYYELVVTVQQGQSVQNKYAFPVPLQRYDTLSTFGMYNRPETKIATTDNIVTLGISLPRWSYGPMDPISVYIRLAPNLDWMAKARKVTIKSITVAIEEEITYNPEGDEPTKKINRIQKHSQNVGLKMSEEGYATNMGIIFPHKDLRDSNGIIRRGQPAFPNYEVTSFTTTSTLYKIEFFLSIKATLTSARDITLRQPIVICPLDHQACKEEMDAIEQAAKDASSVDQANPMLPARNIVLANDPNALATLGLCMVGGQKKPLIE

SEQ ID NO: 30363 - DNA, 3349 bp, Muscodor strobelii
  misc_feature: SGI EST ID NO. CUFF.71866.0
  misc_feature: Variant of the nucleotide sequence at SEQ ID NO 30361
gggatgttgcccctccaccgccggcgcttccaccacctcatctcatcctctctccactcgggctagcaacttgtcccaggccgcaaggtgtaacaagccgcctagggtcgacgctgcacgcacaatgccatcgccatcttcgccatccttccgccagtccacttctccaaaaccctgcattcgcggcaccacaggttgtgcggtgctgctcagctgcagttgttggctgtacgaggagacacaactctgtgaaatcaaatctctttcttccttttcctcacctccttgcctgcgctggacgactgtatcatcgttgactgccccatagccaggcacctagcccggacccttatcgcttttatcggctggttcatcgacctggctgtcgtacatcatctgtgtttgtctgcgtaacctacgaagccactgtgactacgtgcctctggtgaggagtagctagctgcctgctttgcagggtgacgagactactgtagacctaagacgtcttcgatctacggattaaggaagtcaggaaatggtagctcaccttcagcactgcaacggaccctctcgatattattacatcagccaccaccactttgttgttgtttcccccatccatccccagtctctccctctgcgtgcgcattagtctacctagcagccaatccatgcagtatccaagtcgcagcctcgattgaattgatcagtgaaacgaagctcaaatctctccaaaatcggtcaattactacctacaactctccgtctgtcctcgacccacgccgtcgctttcacccgcttctttgacacaaagaagtcctacgtcagtcccacacaaagtacctacttcgcgcctgattgacacctctccgccggcccttctacggcctgggtttagcacttgcggtctcaacggaactggactggacggccatcatctcggcggcgccaaccgatctggacgagaccttccgccaccagcgacgacgatttatctgtgccaatcctgtcgtcgctaacctgccgccgtgtgactcgctgccgtgcattgccatgaactaggaccaacgatcaatccgcatcactcgaccgccgtctgcctcagcgcgagggggtcggcgcacagccgcaggagtgggatagatgtggtcaataccgtgccgttgttcttgtcgccgctgaacgccaaccccgccattttggcgtcgcccaacgactccatcgccaccaccttcatgacgagcattttgtgcaacgaaccatgaccgaccgcgtggccgccttcgtacgggtctcaggacccccaaacagtagttttctcgtcggctatcctggcatttccgcaacacttccgcgcattgaaggaaaagtcgaaatccgcccacagcaaggatactcagcccctgtcgccatctccctggtccgaatatgcctgcagcgacgagagacaatccacccggccgccgagaatatggccaagcgccatctgggcacgcctcgccgagaaacgacggatgtggttgggaaggagctccttctataccgatgcgcctccgggcgggaggccgacaacgtcatcgccatggatctcccattcgtgttgttcattccctttggacgaggcggcgaggagacgaacaggaggataccgcccgcatcattacagcttcctagtaggactgctgaaacgtattacgagttggttgtcacagttcagcagggccagagcgtacagaacaagtatgcatttcccgtgcctttgcagcgatacgacacgctgtcgacgtttgggatgtataatcgcccggagacgaaaatagcaaccaccgacaacatcgtcaccctcggcatctcccttcccagatggagttacggccctatggaccccatcagcgtctatatcaggcttgctcccaatctcgactggatggcaaaagcaaggaaggtcaccatcaaatcgattaccgtggccatcgaggaggaaatcacatacaacccggaaggcgatgagccgacgaaaaagatcaacaggatacaaaaacacagtcagaacgtaggactcaagatgtcggaagagggctatgcaacgaatatgggcatcatctttccacataaggatctgagagactcgaacggcatcatccgtagagggcagcctgcatttcctaactacgaagtgacttctttcacgacaacatcaacactctacaaaattgagtttttccttagcataaaggcaactctgacatcagcgcgagatatcactcttcggcaacctatcgtcatctgtccgctcgatcatcaagcttgcaaagaggaaatggatgctatcgagcaagcagctaaagacgcttcgtccgtcgaccaagccaaccccatgttgccagcaagaaacattgtgctggctaatgaccccaatgccctggcgacattgggattgtgtatggtcggaggacagaagaagcctttgattgagtgatccggtttcgcatattttgcaatgttaagattaggaaaaaaagatgagtggctacctgagtcgtcatcttatactgggcacacgcgcagcccatgacaagcaatgagaaggtacggtgataataccgataataccgagcttttgcggcactgaaaccaatccttgcaatcagatctaggtttcgagcgccgaatttcaactcccgaagaaaggacctggttttcgtgctgccaattgttgaactatgctgccacaatgttcttcagcacacagctatgacgttgataaggcagtctcaggttctgatcagtcagacctttccagtaatccgtttctgcctatctcacgatacttatacgagctctttgacggccgggagaaagcgcacttgacagtgagcaaaggaaggacgtccgccaatctcgactaatgctcgagtcgggcatatttgtgtggtttacgatgatgatacttccgagaacttcgcgcggacaatgatccaacgactaagctcgaaggcgtttatacgggattcaagaggaatgcataggctcgagggaataacggtgcatggttctactggcgtttgcaggcgtccctgatatgaccatgcttaccgaacagatgatccttctcggcgtagaaggcaaaccttgcaatgacgcaacgcatttagataatgactatcggtctcaaaggcgttatggaatcataaccacccagtgaatgggtaggatatggtctgagattactgtaatcatactggttcaatacccctatagcaagtccaatggaaattgactggctactgctgttgatgttatatcatgaactattcgatcgccgttcgagcaatggataagacgtgag

SEQ ID NO: 30364 - DNA, 363 bp, Muscodor strobelii
  misc_feature: SGI cDNA ID NO. 570442
  misc_feature: Reduced expression when VOC is produced
  misc_feature: Encodes the peptide sequence at SEQ ID NO 30365
gcagactgcgcgctcgccatatccatcggtgaatttcccaccactgtctccccctcatcacccacaccaacgcaatcgagaaaactccgactcctatccgtgcggactatcgacccgccgtctcggcttacagcaccaggcgtgcctaacgccgtcaatgccgcggaatggggacaaggcgggggcgtgacaaaggaagttggtcttaggactgcagagacgggagatgtggagggtgtctggaaggcgcctaggggcgggacgaagattgggttgttgggattaatggttagtaaggtgttggagaagggtggtgttgctgaggaggttcttgaggggcttgagggtgttgagttggagtga

SEQ ID NO: 30365 - protein, 120 aa, Muscodor strobelii
  misc_feature: SGI Peptide ID NO. 570442
  misc_feature (1)..(119): NCBI GI: 85080121 Blast Desc: NCU01806 [Neurospora crassa OR74A] gi|18376105|emb|CAD21171.1| related to rRNA processing protein [Neurospora crassa] gi|28917550|gb|EAA27248.1| conserved crassa
  misc_feature (1)..(119): NCBI GI: 226279657 Blast Desc: conserved [Paracoccidioides brasiliensis Pb01]
  misc_feature (1)..(119): NCBI GI: 261199498 Blast Desc: 3' exoribonuclease [Ajellomyces dermatitidis SLH14081] gi|239594358|gb|EEQ76939.1| 3' exoribonuclease [Ajellomyces dermatitidis SLH14081]
  misc_feature (1)..(118): NCBI GI: 171689454 Blast Desc: protein product [Podospora anserina] gi|170944689|emb|CAP70800.1| protein product [Podospora anserina]
  misc_feature (1)..(119): NCBI GI: 256729086 Blast Desc: NECHADRAFT_40151 [Nectria haematococca mpVI 77-13-4]
  misc_feature (1)..(119): NCBI GI: 156065953 Blast Desc: SS1G_00987 [Sclerotinia sclerotiorum 1980] gi|154691846|gb|EDN91584.1| SS1G_00987 [Sclerotinia sclerotiorum 1980]
  misc_feature (1)..(119): NCBI GI: 225684791 Blast Desc: conserved [Paracoccidioides brasiliensis Pb03]
  misc_feature (1)..(119): NCBI GI: 46138729 Blast Desc: FG10879.1 [Gibberella zeae PH-1]
  misc_feature (27)..(119): NCBI GI: 261355143 Blast Desc: conserved [Verticillium albo-atrum VaMs.102]
  misc_feature (1)..(119): NCBI GI: 145606074 Blast Desc: MGG_06683 [Magnaporthe grisea 70-15] gi|145013801|gb|EDJ98442.1| MGG_06683 [Magnaporthe grisea 70-15]
  misc_feature: Useful for introducing or modulating the production of volatile compounds
ADCALAISIGEFPTTVSPSSPTPTQSRKLRLLSVRTIDPPSRLTAPGVPNAVNAAEWGQGGGVTKEVGLRTAETGDVEGVWKAPRGGTKIGLLGLMVSKVLEKGGVAEEVLEGLEGVELE

SEQ ID NO: 30366 - DNA, 1161 bp, Muscodor strobelii
  misc_feature: SGI cDNA ID NO. 570443
  misc_feature: Reduced expression when VOC is produced
  misc_feature: Encodes the peptide sequence at SEQ ID NO 30367
atgtggcgcgcagcagttcgatcgcccgccttcaagcgacccctcaatccagatgtcggccaggtcctcgtgcgctatgcatccaagacggcagccacagccactaccaagacgaccaaggcgaagaccttgaagagtgctgctgagaaagtgacggctccgaaggctgcatctacaaaggccagcactactgctaccaaagcggcaaaggcatcagcaccgacgaaggcaccgcctaaggtcaagtcgacggtatctgcgaccaaggcagcaacgatatccgctgcaaagacaaaacccgccgccaaggctacggcatccaaaactatcgcgacaccagaaagcgaacccgtatccaccgtcgatatcccagccgaagatgcaccaacagctactccggcagagccaacattaacaacaacgagctctcctccaatctcaagcacacccacagcctcaaagcccaccgacgcacccccaaaaccagcatcgaaaatcgccgtggacccctcaaagcccatcgtcctcgagaagccagagcgcttcaacccgccatcccacggcgctcgtctcccccgctcaacgccaaagcactacggcggtcccataacgcaagaagaagtcaaagcccaggcttcgcggacatacccaggcatgccaccgccaccaaacacgtggtcacactggtttatcaactctcgagggatccacctcttcatcactatgggaacgctcaccggcctagcactctacacattcacccaaaacttctccagtacctccccctacgcatccatgattccccccatctcgaccttcccctcagcaccaatccaatacatatcactctgtatcgaagccctacgactccacgaagaacacgaatccgccctcacagccgagaagcggcgtcagcgcgtcgacgacgtcgcgaagcggaacgcataccgtaaggcgcacggcatggagtccgccagtgggttctggggcgcgagggccgaggaattcaaaaagcctgaggtgaaggatgctggggagggagagggagaggtggatatccagtcaccgaaaagagcagatgtggaagttgacccgttggttgatgttagcgcgagtgtggatgagagcgggaagaggaagaagttcatgggtatcttttaa

SEQ ID NO: 30367 - protein, 386 aa, Muscodor strobelii
  misc_feature: SGI Peptide ID NO. 570443
  misc_feature (175)..(346): NCBI GI: 116199469 Blast Desc: CHGG_07890 [Chaetomium globosum CBS 148.51] gi|88179169|gb|EAQ86637.1| CHGG_07890 [Chaetomium globosum CBS 148.51]
  misc_feature (128)..(386): NCBI GI: 145606072 Blast Desc: MGG_06684 [Magnaporthe grisea 70-15] gi|145013800|gb|EDJ98441.1| MGG_06684 [Magnaporthe grisea 70-15]
  misc_feature (170)..(330): NCBI GI: 85080126 Blast Desc: NCU01807 [Neurospora crassa OR74A] gi|18376104|emb|CAD21170.1| [Neurospora crassa] gi|28917551|gb|EAA27249.1| [Neurospora crassa OR74A]
  misc_feature (119)..(351): NCBI GI: 154305522 Blast Desc: BC1G_08530 [Botryotinia fuckeliana B05.10] gi|150853317|gb|EDN28509.1| BC1G_08530 [Botryotinia fuckeliana B05.10]
  misc_feature (171)..(386): NCBI GI: 46138731 Blast Desc: FG10880.1 [Gibberella zeae PH-1]
  misc_feature (172)..(324): NCBI GI: 256728905 Blast Desc: NECHADRAFT_69013 [Nectria haematococca mpVI 77-13-4]
  misc_feature (169)..(386): NCBI GI: 119481485 Blast Desc: NFIA_088300 [Neosartorya fischeri NRRL 181] gi|119408925|gb|EAW18874.1| conserved [Neosartorya fischeri NRRL 181]
  misc_feature (169)..(385): NCBI GI: 145231706 Blast Desc: An02g01860 [Aspergillus niger] gi|134056231|emb|CAK37488.1| protein product [Aspergillus niger]
  misc_feature (169)..(386): NCBI GI: 71001926 Blast Desc: conserved [Aspergillus fumigatus Af293] gi|66853282|gb|EAL93606.1| conserved [Aspergillus fumigatus Af293] gi|159129701|gb|EDP54815.1| conserved [Aspergillus A1163]
  misc_feature (163)..(386): NCBI GI: 115384200 Blast Desc: conserved [Aspergillus terreus NIH2624] gi|114196339|gb|EAU38039.1| conserved [Aspergillus terreus NIH2624]
  misc_feature: Useful for introducing or modulating the production of volatile compounds
MWRAAVRSPAFKRPLNPDVGQVLVRYASKTAATATTKTTKAKTLKSAAEKVTAPKAASTKASTTATKAAKASAPTKAPPKVKSTVSATKAATISAAKTKPAAKATASKTIATPESEPVSTVDIPAEDAPTATPAEPTLTTTSSPPISSTPTASKPTDAPPKPASKIAVDPSKPIVLEKPERFNPPSHGARLPRSTPKHYGGPITQEEVKAQASRTYPGMPPPPNTWSHWFINSRGIHLFITMGTLTGLALYTFTQNFSSTSPYASMIPPISTFPSAPIQYISLCIEALRLHEEHESALTAEKRRQRVDDVAKRNAYRKAHGMESASGFWGARAEEFKKPEVKDAGEGEGEVDIQSPKRADVEVDPLVDVSASVDESGKRKKFMGIF

SEQ ID NO: 30368 - DNA, 2059 bp, Muscodor strobelii
  misc_feature: SGI EST ID NO. CUFF.71809.0
  misc_feature: Variant of the nucleotide sequence at SEQ ID NO 30366
tgccgggtccggcgcagcaccgaagaaaaaatcactggtcgacagctgttgggaagctgcaattaagatgagcgttgatgtcaacgttcatgcataacgcgaccagatgaacatcccacggccagccaccacccattgagtcatgccaccctcgcgtcgatgtgaccttgtgttgatattgtctgtcaattctctagagagaggaaatacctagaaagatatttccatcttgtggaatggcctcacaaacgacgacatatatcccacgcttcctcctcccgcagtccggaaccatgtggcgcgcagcagttcgatcgcccgccttcaagcgacccctcaatccagatgtcggccaggtcctcgtgcgctatgcatccaagacggcagccacagccactaccaagacgaccaaggcgaagaccttgaagagtgctgctgagaaagtgacggctccgaaggctgcatctacaaaggccagcactactgctaccaaagcggcaaaggcatcagcaccgacgaaggcaccgcctaaggtcaagtcgacggtatctgcgaccaaggcagcaacgatatccgctgcaaagacaaaacccgccgccaaggctacggcatccaaaactatcgcgacaccagaaagcgaacccgtatccaccgtcgatatcccagccgaagatgcaccaacagctactccggcagagccaacattaacaacaacgagctctcctccaatctcaagcacacccacagcctcaaagcccaccgacgcacccccaaaaccagcatcgaaaatcgccgtggacccctcaaagcccatcgtcctcgagaagccagagcgcttcaacccgccatcccacggcgctcgtctcccccgctcaacgccaaagcactacggcggtcccataacgcaagaagaagtcaaagcccaggcttcgcggacatacccaggcatgccaccgccaccaaacacgtggtcacactggtttatcaactctcgagggatccacctcttcatcactatgggaacgctcaccggcctagcactctacacattcacccaaaacttctccagtacctccccctacgcatccatgattccccccatctcgaccttcccctcagcaccaatccaatacatatcactctgtatcgaagccctacgactccacgaagaacacgaatccgccctcacagccgagaagcggcgtcagcgcgtcgacgacgtcgcgaagcggaacgcataccgtaaggcgcacggcatggagtccgccagtgggttctggggcgcgagggccgaggaattcaaaaagcctgaggtgaaggatgctggggagggagagggagaggtggatatccagtcaccgaaaagagcagatgtggaagttgacccgttggttgatgttagcgcgagtgtggatgagagcgggaagaggaagaagttcatgggtatcttttaatttgatgggattgcgttctcgcatacatgagggctgtagtgtagtgtactatctatgtacgagtaggacagaacatatgctacggctgggctccctgctcttgtacaattacacaatatctgtaccaagttgtgtatgcacatatgtgacccctaatgcacactcgcggtatcatcaaccccaacccactcatctccacgctgtgcaaatgtgccaacactttgttcaacacgcctcacatccccaatcactccaactcaacaccctcaagcccctcaagaacctcctcagcaacaccacccttctccaacaccttactaaccattaatcccaacaacccaatcttcgtcccgcccctaggcgccttccagacaccctccacatctcccgtctctgcagtcctaagaccaacttcctttgtcacgcccccgccttgtccccattccgcggcattgacggcgttaggcacgcctggtgctgtaagccgagacggcgggtcgatagtccgcacggataggagtcggagttttctcgattgcgttggtgtgggtgatgagggggagacagtggtgggaaattcaccgatggatatggcgagcgcgcag

SEQ ID NO: 30369 - DNA, 327 bp, Muscodor strobelii
  misc_feature: SGI cDNA ID NO. 570444
  misc_feature: Reduced expression when VOC is produced
  misc_feature: Encodes the peptide sequence at SEQ ID NO 30370
atgggtttctctgctggtgactccaagaagggtgccaacctcttcaagacccgctgcgctcagtgccacaccctcaaggacggtgagggcaacaaggtcggccctgctctgcacggtctcttcggccgcaagaccggttccgtcgaaggcttctcctacaccgacgccaacaagcagaagggcatcacatgggacgagggtactctgttcacatacctcgagaaccccaagaagtacatccccggcaccaagatggccttcggtggtctcaagaaggacaaggaccgaaacgatctcatcaccttcttgaaggaggctaccgcataa

SEQ ID NO: 30370 - protein, 108 aa, Muscodor strobelii
  misc_feature: SGI Peptide ID NO. 570444
  misc_feature (8)..(107): Pfam Id: PF00034 Pfam Desc: Cytochrome c
  misc_feature (1)..(108): NCBI GI: 164428202 Blast Desc: cytochrome c [Neurospora crassa OR74A] gi|118009|sp|P00048.2|CYC_NEUCR RecName: Full=Cytochrome c gi|3010|emb|CAA29050.1| cytochrome c [Neurospora crassa] c C c
  misc_feature (1)..(108): NCBI GI: 154305520 Blast Desc: cytochrome c [Botryotinia fuckeliana B05.10] gi|150853316|gb|EDN28508.1| cytochrome c [Botryotinia fuckeliana B05.10]
  misc_feature (1)..(107): NCBI GI: 169624810 Blast Desc: SNOG_15669 [Phaeosphaeria nodorum SN15] gi|111055924|gb|EAT77044.1| SNOG_15669 [Phaeosphaeria nodorum SN15]
  misc_feature (1)..(108): NCBI GI: 27805444 Blast Desc: CYC_ROSNE RecName: Full=Cytochrome c gi|60729605|pir||JC7922 cytochrome c - Rosellinia necatrix gi|27531289|dbj|BAC54258.1| cytochrome c [Rosellinia necatrix]
  misc_feature (1)..(107): NCBI GI: 156065957 Blast Desc: cytochrome c [Sclerotinia sclerotiorum 1980] gi|154691848|gb|EDN91586.1| cytochrome c [Sclerotinia sclerotiorum 1980]
  misc_feature (1)..(108): NCBI GI: 171689450 Blast Desc: protein product [Podospora anserina] gi|170944687|emb|CAP70798.1| protein product [Podospora anserina]
  misc_feature (1)..(107): NCBI GI: 2493971 Blast Desc: CYC_STELP RecName: Full=Cytochrome c gi|440586|emb|CAA79708.1| mitochondrial cytochrome c [Stellaria longipes]
  misc_feature (1)..(107): NCBI GI: 20137645 Blast Desc: CYC_CURLU RecName: Full=Cytochrome c gi|14585755|gb|AAK67492.1| cytochrome c [Cochliobolus lunatus]
  misc_feature (1)..(107): NCBI GI: 189199220 Blast Desc: cytochrome c [Pyrenophora tritici-repentis Pt-1C-BFP] gi|187983046|gb|EDU48534.1| cytochrome c [Pyrenophora tritici-repentis Pt-1C-BFP]
  misc_feature (1)..(107): NCBI GI: 154274964 Blast Desc: cytochrome c [Ajellomyces capsulatus NAm1] gi|150414773|gb|EDN10135.1| cytochrome c [Ajellomyces capsulatus NAm1]
  misc_feature: Useful for introducing or modulating the production of volatile compounds
MGFSAGDSKKGANLFKTRCAQCHTLKDGEGNKVGPALHGLFGRKTGSVEGFSYTDANKQKGITWDEGTLFTYLENPKKYIPGTKMAFGGLKKDKDRNDLITFLKEATA

SEQ ID NO: 30371 - DNA, 1259 bp, Muscodor strobelii
  misc_feature: SGI EST ID NO. CUFF.71811.0
  misc_feature: Variant of the nucleotide sequence at SEQ ID NO 30369
ggagtaccatgcccagaatcgcatgctgcaagtgacttctggcctgcgagtgttgagctcatcgcttttcgccttggtttaaatccttgatcgactcaattttttttattctctcttcctcctgcctcactcataccacacgatcaccaaccacctttgtctgcatcctttgcccagtacgacaagtcaaccgtcgtcttcctaatcagtaatactctgcttctcgtctacattctttaaccaccacaaccgtcaaaatgggtttctctgctggtgactccaagaagggtgccaacctcttcaagacccgctgcgctcagtgccacaccctcaaggacggtgagggcaacaaggtcggccctgctctgcacggtctcttcggccgcaagaccggttccgtcgaaggcttctcctacaccgacgccaacaagcagaagggcatcacatgggacgagggtactctgttcacatacctcgagaaccccaagaagtacatccccggcaccaagatggccttcggtggtctcaagaaggacaaggaccgaaacgatctcatcaccttcttgaaggaggctaccgcataaatttcaccgccagcggcggacgtgtaacgataactgcatagacggatggggcgacgattgtaccaatagacttttactagaacatggcggcgtcccatttggtgcgaacagagcatatatcccatctcctcttttctaattaatacggcgctgccttttttcttcttccttctcctcgccgaagaaaaaaagcaagaggcaaaaatagcggtcaatggcatcaccggagttgaagactgcacttctgatctggagcttctgggttggagttgggtattactactagtgaatatacgaccatgactacagactttatgagagttttgcaattgtgaaaatttggattgatgcgaatcgcgtggacgaggcatgagtcgggggatgcttggttttacgtggatgcttgttggttggtggataggggacccagtaaaatgttgcgatctccggtttgccgcggtttggatgactcggctcaggggaacaagtatgctgtcaagtgttctgctctaaggccaaaacctctagtcaatgagaggaatttggggttagcgatatggttgtttagttagatgtttatgaggtttgcttcgccgtactcaaaatggatgattagtcgaacctcgattcccatcgttattccctcaactaactgaaagatacagtggaggctgc

SEQ ID NO: 30372 - DNA, 432 bp, Muscodor strobelii
  misc_feature: SGI cDNA ID NO. 570445
  misc_feature: Encodes the peptide sequence at SEQ ID NO 30373
atggtagctgttgccaaagtcttagaatgctttgcgacgaagccagttgtcaattgggataagcttgctgcccgagccggtttcaaagacggtgttgcggccaaggcccactacgaaccacttcgcctccttcgctactgcgccgacgagacgtcagagacgcccgagactcgaattccaaggccactcatccccgaccacctgtgtaggcagccgccaattaggcctttagacctcacctcacgacgtggaccactcgacttcaatcatacaagtccacctgactttgacaacctcacatcacagctgagtcactttgagccttctgcattctcactgttggagttggatacactagctttgcgttgtggtccaagacttccgattgagccggatgagactcgaggtcggatgaagccgctcgactcctga

SEQ ID NO: 30373 - protein, 143 aa, Muscodor strobelii
  misc_feature: SGI Peptide ID NO. 570445
MVAVAKVLECFATKPVVNWDKLAARAGFKDGVAAKAHYEPLRLLRYCADETSETPETRIPRPLIPDHLCRQPPIRPLDLTSRRGPLDFNHTSPPDFDNLTSQLSHFEPSAFSLLELDTLALRCGPRLPIEPDETRGRMKPLDS

SEQ ID NO: 30374 - DNA, 2181 bp, Muscodor strobelii
  misc_feature: SGI cDNA ID NO. 570446
  misc_feature: Encodes the peptide sequence at SEQ ID NO 30375
atgcccactcgtcttttgcagggtctggaccgcgatgtctaccaaattattcggaaattcgaggaccaggacgaaaccggcaagcagaaactcacagttacaggcgtctatgactcgataaagcgctctaattcaagcctggctcgccagaagaagcgcccgcttgaggactcgattgacaggatcctacgccttcgccaggaagagaagcgagaagacgacgaggaagctgacctcgaagaggcaccaccggtatcccccaaaccaaaagagcgcaatcccttttcattaaacaagcaaattgccaagtcttgggatatacccaagaccccgcgcactgaggatatggccaactcagatgccgctgctattgagactgataggcaacctaacggagagcctaagccgaagaagcgcaagtctgatcgcaaggagaaggaagatagaagtcctcccacggatacccgtctggtagatcttggcgggatggatgatgccatcgaggttctcgttgagtctatcactctacctatgaaagaaccagaactgtgcttagaaggagttatcagacccgcacgtggtatacttatccatggacctccaggctgcggaaaaactatgttggcaaaagcatacgcagccgacttgggggttgctttcattcctgtttcagcgccctcactggtagcaggcatgtccggcgagtctgagaagaagatcagagagctttacgatgaggccaagaagcttgcaccatgcttggtattcatcgatgagatcgatgctatcatgggcaagcgagagaatgcccaaagggagatggaaaagcgtatagtcgcccagatgctgacttgcatggacgattgcgaccctcaaaagactggcggcaagcttgtggttacgctcgctgccacaaatcgccccgacagtattgatccggctctacggagagctggaagatttgatcatgagattagcctgggtatcccgaacgaacctgcgcgcgaggctatcctacgcaagatgctaagcaaaatcaaagtctctgatgacgttgacgtcaagatgctagcaaagaggacacccggatttgtaggagcagacttggaaagtctcatatctcaagcccaaaagagaatgacaagagctctcatgtcggagtttacaaatgatgattcatccgccgccatggaaatagactcagggaaccaaatgtccgccatcgtccagctccatcatgctattgtcgccgccccagataattccactccaagagggaagtacatactctcaatgtcacatttcatggaggcagtcaagcaagtacagccctcttccaaacgcgagggcttctcaactatacccgatacgacgtggaatcatatcggtgctctcgaggatgttcgtgaggaattgatgttttccattgtgcgtcccattgaaaatccacaagcattcgctgcacttggtatcgaagctccctcgggcgtgcttctctggggtcctccgggttgtggtaaaactctacttgccaaggccgttgccaacgaatccaaagccaatttcatctccgtcaaaggacctgagctgctgaacaaatacgtgggtgaatcagagcgctctgttcgccaagtctttagccgtgctcgtgcttctgcaccatgtgtcgtcttcttcgatgagttagatgccctggtaccccgacgcgactctagcggcacagactccagtgcaagagttgtcaatcagcttctcacagaactcgatggtatgagcagccgctcaggtgtctacgtaattggagctaccaaccgacccgatatgatcgatcccgctatcctacgaccaggacgcctcggcacgaacatctttgtcgatatacccgacgcagcgggacgtgtggagatcctcaagacccgtatccgacgactcgtgccttcctacaccgatttccatgttttggaggcggtggctcgtgacgttcgctgtgaaggcttcagtggtgctgatatcgataatctgcatagtgctgcagcgaaagcagcgatgaaacggtcggacatgctcgagacgcagttgctgcctcaagattgggaaagggcactcaatgaaactaagcctagtgtctcggatagtcatgcggagaagtttagacagcttaaggaattgggttgggactag

SEQ ID NO: 30375 - protein, 726 aa, Muscodor strobelii
  misc_feature: SGI Peptide ID NO. 570446
  misc_feature (496)..(684): Pfam Id: PF00004 Pfam Desc: ATPase family associated with various cellular activities (AAA)
  misc_feature (194)..(382): Pfam Id: PF00004 Pfam Desc: ATPase family associated with various cellular activities (AAA)
  misc_feature (190)..(221): Pfam Id: PF07724 Pfam Desc: ATPase family associated with various cellular activities (AAA)
  misc_feature (195)..(220): Pfam Id: PF07726 Pfam Desc: ATPase family associated with various cellular activities (AAA)
  misc_feature (497)..(522): Pfam Id: PF07726 Pfam Desc: ATPase family associated with various cellular activities (AAA)
  misc_feature (5)..(724): NCBI GI: 156044192 Blast Desc: SS1G_10199 [Sclerotinia sclerotiorum 1980] gi|154694588|gb|EDN94326.1| SS1G_10199 [Sclerotinia sclerotiorum 1980]
  misc_feature (5)..(724): NCBI GI: 154305492 Blast Desc: BC1G_08515 [Botryotinia fuckeliana B05.10] gi|150853302|gb|EDN28494.1| BC1G_08515 [Botryotinia fuckeliana B05.10]
  misc_feature (1)..(719): NCBI GI: 255939672 Blast Desc: Pc16g02330 [Penicillium chrysogenum Wisconsin 54-1255] gi|211585228|emb|CAP92903.1| Pc16g02330 [Penicillium chrysogenum Wisconsin 54-1255]
  misc_feature (5)..(721): NCBI GI: 259488300 Blast Desc: TPA: AAA family ATPase/60S ribosome export protein Rix7, (AFU_orthologue; AFUA_1G09210) [Aspergillus nidulans FGSC A4]
  misc_feature (1)..(721): NCBI GI: 242767242 Blast Desc: AAA family ATPase/60S ribosome export protein Rix7, [Talaromyces stipitatus ATCC 10500] gi|218724527|gb|EED23944.1| AAA family ATPase/60S ribosome export protein Rix7, [Talaromyces
  misc_feature (1)..(721): NCBI GI: 212528130 Blast Desc: AAA family ATPase/60S ribosome export protein Rix7, [Penicillium marneffei ATCC 18224] gi|210073620|gb|EEA27707.1| AAA family ATPase/60S ribosome export protein Rix7, [Penicillium
  misc_feature (5)..(719): NCBI GI: 169768094 Blast Desc: [Aspergillus oryzae RIB40] gi|238485043|ref|XP_002373760.1| AAA family ATPase/60S ribosome export protein Rix7, [Aspergillus flavus NRRL3357] protein AAA
  misc_feature (5)..(719): NCBI GI: 70995044 Blast Desc: AAA family ATPase/60S ribosome export protein Rix7 [Aspergillus fumigatus Af293] gi|66849923|gb|EAL90250.1| AAA family ATPase/60S ribosome export protein Rix7, [Aspergillus AAA
  misc_feature (5)..(724): NCBI GI: 225557765 Blast Desc: ribosome biogenesis ATPase RIX7 [Ajellomyces capsulatus G186AR]
  misc_feature (5)..(719): NCBI GI: 121702141 Blast Desc: AAA family ATPase/60S ribosome export protein Rix7, [Aspergillus clavatus NRRL 1] gi|119397478|gb|EAW07909.1| AAA family ATPase/60S ribosome export protein Rix7, [Aspergillus NRRL
MPTRLLQGLDRDVYQIIRKFEDQDETGKQKLTVTGVYDSIKRSNSSLARQKKRPLEDSIDRILRLRQEEKREDDEEADLEEAPPVSPKPKERNPFSLNKQIAKSWDIPKTPRTEDMANSDAAAIETDRQPNGEPKPKKRKSDRKEKEDRSPPTDTRLVDLGGMDDAIEVLVESITLPMKEPELCLEGVIRPARGILIHGPPGCGKTMLAKAYAADLGVAFIPVSAPSLVAGMSGESEKKIRELYDEAKKLAPCLVFIDEIDAIMGKRENAQREMEKRIVAQMLTCMDDCDPQKTGGKLVVTLAATNRPDSIDPALRRAGRFDHEISLGIPNEPAREAILRKMLSKIKVSDDVDVKMLAKRTPGFVGADLESLISQAQKRMTRALMSEFTNDDSSAAMEIDSGNQMSAIVQLHHAIVAAPDNSTPRGKYILSMSHFMEAVKQVQPSSKREGFSTIPDTTWNHIGALEDVREELMFSIVRPIENPQAFAALGIEAPSGVLLWGPPGCGKTLLAKAVANESKANFISVKGPELLNKYVGESERSVRQVFSRARASAPCVVFFDELDALVPRRDSSGTDSSARVVNQLLTELDGMSSRSGVYVIGATNRPDMIDPAILRPGRLGTNIFVDIPDAAGRVEILKTRIRRLVPSYTDFHVLEAVARDVRCEGFSGADIDNLHSAAAKAAMKRSDMLETQLLPQDWERALNETKPSVSDSHAEKFRQLKELGWD

SEQ ID NO: 30376 - DNA, 2477 bp, Muscodor strobelii
  misc_feature: SGI EST ID NO. CUFF.71863.0
  misc_feature: Variant of the nucleotide sequence at SEQ ID NO 30374
cgatcgtatatttggcttgcatgcgatttggcacttagacccacttaattttcacaaacttcaatggtcttgagatttcacatggcgccagtcacccgtagttttcaatacagaacacagcacaatctgtagtgataacagactagccagggccagttgctctgagtccaaagttaccatgcccactcgtcttttgcagggtctggaccgcgatgtctaccaaattattcggaaattcgaggaccaggacgaaaccggcaagcagaaactcacagttacaggcgtctatgactcgataaagcgctctaattcaagcctggctcgccagaagaagcgcccgcttgaggactcgattgacaggatcctacgccttcgccaggaagagaagcgagaagacgacgaggaagctgacctcgaagaggcaccaccggtatcccccaaaccaaaagagcgcaatcccttttcattaaacaagcaaattgccaagtcttgggatatacccaagaccccgcgcactgaggatatggccaactcagatgccgctgctattgagactgataggcaacctaacggagagcctaagccgaagaagcgcaagtctgatcgcaaggagaaggaagatagaagtcctcccacggatacccgtctggtagatcttggcgggatggatgatgccatcgaggttctcgttgagtctatcactctacctatgaaagaaccagaactgtgcttagaaggagttatcagacccgcacgtggtatacttatccatggacctccaggctgcggaaaaactatgttggcaaaagcatacgcagccgacttgggggttgctttcattcctgtttcagcgccctcactggtagcaggcatgtccggcgagtctgagaagaagatcagagagctttacgatgaggccaagaagcttgcaccatgcttggtattcatcgatgagatcgatgctatcatgggcaagcgagagaatgcccaaagggagatggaaaagcgtatagtcgcccagatgctgacttgcatggacgattgcgaccctcaaaagactggcggcaagcttgtggttacgctcgctgccacaaatcgccccgacagtattgatccggctctacggagagctggaagatttgatcatgagattagcctgggtatcccgaacgaacctgcgcgcgaggctatcctacgcaagatgctaagcaaaatcaaagtctctgatgacgttgacgtcaagatgctagcaaagaggacacccggatttgtaggagcagacttggaaagtctcatatctcaagcccaaaagagaatgacaagagctctcatgtcggagtttacaaatgatgattcatccgccgccatggaaatagactcagggaaccaaatgtccgccatcgtccagctccatcatgctattgtcgccgccccagataattccactccaagagggaagtacatactctcaatgtcacatttcatggaggcagtcaagcaagtacagccctcttccaaacgcgagggcttctcaactatacccgatacgacgtggaatcatatcggtgctctcgaggatgttcgtgaggaattgatgttttccattgtgcgtcccattgaaaatccacaagcattcgctgcacttggtatcgaagctccctcgggcgtgcttctctggggtcctccgggttgtggtaaaactctacttgccaaggccgttgccaacgaatccaaagccaatttcatctccgtcaaaggacctgagctgctgaacaaatacgtgggtgaatcagagcgctctgttcgccaagtctttagccgtgctcgtgcttctgcaccatgtgtcgtcttcttcgatgagttagatgccctggtaccccgacgcgactctagcggcacagactccagtgcaagagttgtcaatcagcttctcacagaactcgatggtatgagcagccgctcaggtgtctacgtaattggagctaccaaccgacccgatatgatcgatcccgctatcctacgaccaggacgcctcggcacgaacatctttgtcgatatacccgacgcagcgggacgtgtggagatcctcaagacccgtatccgacgactcgtgccttcctacaccgatttccatgttttggaggcggtggctcgtgacgttcgctgtgaaggcttcagtggtgctgatatcgataatctgcatagtgctgcagcgaaagcagcgatgaaacggtcggacatgctcgagacgcagttgctgcctcaagattgggaaagggcactcaatgaaactaagcctagtgtctcggatagtcatgcggagaagtttagacagcttaaggaattgggttgggactagggtaccggatagacagatagagctgaatggatactatttcctgagagcttgggaaagtacaaagacagtgtttattacgtgaagctgccgtgtctcaatattgggtattacaacagag

SEQ ID NO: 30377 - DNA, 645 bp, Muscodor strobelii
  misc_feature: SGI cDNA ID NO. 570447
  misc_feature: Encodes the peptide sequence at SEQ ID NO 30378
atggggaacaataatagccgggttacggcccaagacaaagcaatactagacctaaaaaaccaacgcgacagcctccacagataccaaaagcgcatcctcatcctaaccagtcgcgaaaccgaaatagcccggcaactcctctcccagggggacaaaaagcgcgcgcttctcgccctccggcgaaagaaatatcaagaatcccttctcgaaaagacagacacccaactcttccaactagagcaactagtccgcaacgtagaattcgccctaatccaaaaagacatcgtatacggtctatcccaagggacaaaagtcctccaagaaatccacgcagaaatgggcggaatagagcacgtcgagaaactcatgggcgaatccgcagacgccgtcgcctaccaacgagaaatctccgagatgctcggcggccgcatatccaacgccgacgaggacgaggtcgaggatgagctcgctgccatggaggccgaagttaacggcaaggaaccggaaacagcgatggatgtggggattggggctacgcctataaaagcgccggatgcgcctgtccacgagccacttcccaactccccagaagcagaaccgcagctggttaggaggccggagaaacaggctatgcacgcttcgtga

SEQ ID NO: 30378 - protein, 214 aa, Muscodor strobelii
  misc_feature: SGI Peptide ID NO. 570447
  misc_feature (13)..(191): Pfam Id: PF03357 Pfam Desc: Snf7
  misc_feature (1)..(165): NCBI GI: 39968845 Blast Desc: MGG_02515 [Magnaporthe grisea 70-15] gi|145013866|gb|EDJ98507.1| MGG_02515 [Magnaporthe grisea 70-15]
  misc_feature (1)..(148): NCBI GI: 256729084 Blast Desc: NECHADRAFT_40042 [Nectria haematococca mpVI 77-13-4]
  misc_feature (1)..(150): NCBI GI: 28881371 Blast Desc: conserved [Neurospora crassa]
  misc_feature (1)..(214): NCBI GI: 46138737 Blast Desc: FG10883.1 [Gibberella zeae PH-1]
  misc_feature (1)..(187): NCBI GI: 115402111 Blast Desc: conserved [Aspergillus terreus NIH2624] gi|114188978|gb|EAU30678.1| conserved [Aspergillus terreus NIH2624]
  misc_feature (1)..(148): NCBI GI: 171689516 Blast Desc: protein product [Podospora anserina] gi|170944720|emb|CAP70831.1| protein product [Podospora anserina]
  misc_feature (1)..(188): NCBI GI: 225557766 Blast Desc: SNF7 family protein [Ajellomyces capsulatus G186AR] gi|240274119|gb|EER37637.1| SNF7 family protein [Ajellomyces capsulatus H143]
  misc_feature (1)..(188): NCBI GI: 154288248 Blast Desc: conserved [Ajellomyces capsulatus NAm1] gi|150408560|gb|EDN04101.1| conserved [Ajellomyces capsulatus NAm1]
  misc_feature (1)..(163): NCBI GI: 119496139 Blast Desc: SNF7 family protein [Neosartorya fischeri NRRL 181] gi|119413005|gb|EAW22946.1| SNF7 family protein [Neosartorya fischeri NRRL 181]
  misc_feature (1)..(188): NCBI GI: 261198897 Blast Desc: SNF7 family protein [Ajellomyces dermatitidis SLH14081] gi|239595002|gb|EEQ77583.1| SNF7 family protein [Ajellomyces dermatitidis SLH14081] gi|239609887|gb|EEQ86874.1|
MGNNNSRVTAQDKAILDLKNQRDSLHRYQKRILILTSRETEIARQLLSQGDKKRALLALRRKKYQESLLEKTDTQLFQLEQLVRNVEFALIQKDIVYGLSQGTKVLQEIHAEMGGIEHVEKLMGESADAVAYQREISEMLGGRISNADEDEVEDELAAMEAEVNGKEPETAMDVGIGATPIKAPDAPVHEPLPNSPEAEPQLVRRPEKQAMHAS

SEQ ID NO: 30379 - DNA, 4044 bp, Muscodor strobelii
  misc_feature: SGI EST ID NO. CUFF.72182.0
  misc_feature: Variant of the nucleotide sequence at SEQ ID NO 30377
gtcctatcatatcctatcaaccacgccaacactacaaccgcatcacgcgaccaccggagcctaaactcgatatctactcgatgatataacctaggagaacaactcaaaataccctatcctaagaaatatcaaatactaccaaaatccgcgagatcacagacgatgtaaaggccaaatccaccgagtactagaactagacgacaccgcaacataactcgagatcgctacacatcactactaatacaactatatcatataatattacacaatggggaacaataatagccgggttacggcccaagacaaagcaatactagacctaaaaaaccaacgcgacagcctccacagataccaaaagcgcatcctcatcctaaccagtcgcgaaaccgaaatagcccggcaactcctctcccagggggacaaaaagcgcgcgcttctcgccctccggcgaaagaaatatcaagaatcccttctcgaaaagacagacacccaactcttccaactagagcaactagtccgcaacgtagaattcgccctaatccaaaaagacatcgtatacggtctatcccaagggacaaaagtcctccaagaaatccacgcagaaatgggcggaatagagcacgtcgagaaactcatgggcgaatccgcagacgccgtcgcctaccaacgagaaatctccgagatgctcggcggccgcatatccaacgccgacgaggacgaggtcgaggatgagctcgctgccatggaggccgaagttaacggcaaggaaccggaaacagcgatggatgtggggattggggctacgcctataaaagcgccggatgcgcctgtccacgagccacttcccaactccccagaagcagaaccgcagctggttaggaggccggagaaacaggctatgcacgcttcgtgaccgatatgctcttgtctttggtttgtttggtttgatatgtttcgagcggatcatggagtctttgttgtacatatacaggtgtacaaggcgtaagcagagggcgggtggttcccagcattggctacagcatttcacatagatataaggacggaagcatatatgagtattatctcaagcatatcaccaacagcccgcgtcttcttgaatgggaccttttcggtattactaccaccaagagtgctccagagagactgctccatagtatatactaggtgccctagcctgctgctttggcggaatccgccagattttactatcgatgaggagctctgcaacccgatgaacgtccaaagacgcgaccagtcacattactctcacatttcccccatttcactccttgttcctactgactcagcatggattttctctcccttaagctcatgcagctcacagagcatacggcagtatactcagagcaaatgcttgaagcaacacggtagtatgcttgagtcgaatccacacaagatccacttctcttccacataacccgattccagccagatcaatgcaaagggtatcaaaaagccaaacgatgccgatgtaatgtaatgcaatcccataccaggaacctcacaaaacgccaagccatgacatcaagtatatatgcctcaatgcgacggaggcagccatatgaacagacatggccatgcagagtgtttttacaattgaaaacaagtttttcagttaatccatatagatgacatctctgtaattgcgcagcatgcgctggtgagtagatgggccacgaatctcgacgtggctgctcggggcgggatgaaccgggaaaggttgctgaacaggtaggtagtgaccagacgtcatcggtgtatccacaggcatctgagatggtgcatagtgatccgaagtcataggcggatcttcaaacttctgggctggagcgtaactatgctggcccccacggtagtgctcgacgctggtggatgcgtgaacctcaggtcgagtctcccgaattacgacgtttcctcggcggtcgcttggtacaccactgcggatgacataaaaatcctgatggtggccgtactcacgtggttgagcctccgtgtacctaaaaaaggtgtaagtaagtggcaataaaaaagaggcacataaaattgagattgtattcgttattgatagcgggctatagttacctttgaaaacgcgatgagttagccgaagtcatttcgctttgcggataggtaatgttagatccgttgggggctgcctcaacgacgcggataatctctggctctcgagaaacaggatactgcgaggagggctcaacaactcgacgagcagtcggcaacggagtgtgcgagggtgaatgctgtgatccaagttcgtgatatgtgagcggccgtgtggaaatgtcatcatgataacccaacgagcttggatgctgtctgggtggaggatgattcgccaaattggacctgatagggtaatctcgaatacgagcactctcgggacgagggccattcacaatgtatcttcgctgtggcgaaacctctctggcaatagtctcatgacgaggatactcccgaattactaccctgcgtagttgaccattgttatccccattagtaggagcagttccttgataagttgagtattcccgagtaaccggtatggcacgatggctttcagcatcactgtctcggggttcctggtagtcttcagggaagaacgtggtgcaacggcgcttggagtggttctcttcaggactcacaggacgcagctcaggaagacgtgacgtgggtctggtcgcttcagccatggtgcgtgtcaccacatgcgaattgtctacaaaccgctgcgtatctgagtagactcttttatgcacaacaatagggccattgggtgatctaggctcaattgacggtacgagcatgtcctgtaatccaacccttaccggtggcagatggggctgcggagcccgagtgctggctgctgagtatggcccaactttgggccgttgagtgtccggaacacgaatgatttcacttgcgaggtcgcgatggatggagtgagagggagcatgaaagatggcatgaccagtggggcgtgagagaggtgcatcaacatctcggtaggcgtggaaattctcttttcctggttgaagattctcctttcctggtagaagtacagtggaacttcgagaaacagtatcggtacctacaggatgaactgtgcttggtgtacggatgtccctcttaggggaagtcaaggtcatgtctgcaagggcgccatcaacaaggtcagatgtgttagccaaagcttcagcagcaagagcatatcttctaaatcgcttctctttctggcgaacttctttcttctcagccttggtcaatttgcgcactctaagcggggtgtgaggagccgagttggtagtgccactgggaacgacaataacctgtgatgtcgacgattgccccaggggtaacgcagattggcctggatggtgaggagctgcggagtttctagtggtttgtggccgactgatgtccgcaccactactgctttcatcatcggattcaccttcagtatcggaaatttcaattacttctctgagaatttcatcgagctggtcacgtccagtctcttcatctccgcgccatttgatgataatgtccaggcatggcttcttgacagcttggcgggcattagcccagtcactctcttggagtagttcgtcatagcgcgtgagattgtgccgaatatgggcgagagcggcaagttgcactcggcgtgccaacgtgagttcttcagccatgcccactttcgattggccattgaatttgttatccttcttgaaggcgtgctcgataatttggcgtcggtctgtatgaggaattcgagggaaaaggtctctgaggacggcatcagcctgcaggttaatttcatgctgtgttttcgggatgggctcaggctctccaggtttgcgaacactcaaggtgaaatcatcaaagccttgctctgccagagtcttgcgtgcatcgtcagtaatcatttgacggaaatgataacccagtcgattcatatgatggtccagttcgttgacatcagtgtta

SEQ ID NO: 30380 - DNA, 2631 bp, Muscodor strobelii
  misc_feature: SGI cDNA ID NO. 570448
  misc_feature: Encodes the peptide sequence at SEQ ID NO 30381
atgggcaaaactaagaaaaaggtgcccgcgcccacccatggcgtggcggccgcccacaggcgagccaagtttgagagagccaaacaatttgatgatgcgatttggcgaaacctcaacgccctcaagagtgctccccagctcaagcacaagtcgtacttcgaggttgttgataacgaggacaaaaagtccaagaagctcgaatttcagatcaccacagaccaacagcctcccccgggctttgagttcattcctatcggacatcccgagctgtccacagaatgcaaagagctatcacgcgagagagttgccatgtactttattgtatcgactaacactgatgtcaacgaactggaccatcatatgaatcgactgggttatcatttccgtcaaatgattactgacgatgcacgcaagactctggcagagcaaggctttgatgatttcaccttgagtgttcgcaaacctggagagcctgagcccatcccgaaaacacagcatgaaattaacctgcaggctgatgccgtcctcagagaccttttccctcgaattcctcatacagaccgacgccaaattatcgagcacgccttcaagaaggataacaaattcaatggccaatcgaaagtgggcatggctgaagaactcacgttggcacgccgagtgcaacttgccgctctcgcccatattcggcacaatctcacgcgctatgacgaactactccaagagagtgactgggctaatgcccgccaagctgtcaagaagccatgcctggacattatcatcaaatggcgcggagatgaagagactggacgtgaccagctcgatgaaattctcagagaagtaattgaaatttccgatactgaaggtgaatccgatgatgaaagcagtagtggtgcggacatcagtcggccacaaaccactagaaactccgcagctcctcaccatccaggccaatctgcgttacccctggggcaatcgtcgacatcacaggttattgtcgttcccagtggcactaccaactcggctcctcacaccccgcttagagtgcgcaaattgaccaaggctgagaagaaagaagttcgccagaaagagaagcgatttagaagatatgctcttgctgctgaagctttggctaacacatctgaccttgttgatggcgcccttgcagacatgaccttgacttcccctaagagggacatccgtacaccaagcacagttcatcctgtaggtaccgatactgtttctcgaagttccactgtacttctaccaggaaaggagaatcttcaaccaggaaaagagaatttccacgcctaccgagatgttgatgcacctctctcacgccccactggtcatgccatctttcatgctccctctcactccatccatcgcgacctcgcaagtgaaatcattcgtgttccggacactcaacggcccaaagttgggccatactcagcagccagcactcgggctccgcagccccatctgccaccggtaagggttggattacaggacatgctcgtaccgtcaattgagcctagatcacccaatggccctattgttgtgcataaaagagtctactcagatacgcagcggtttgtagacaattcgcatgtggtgacacgcaccatggctgaagcgaccagacccacgtcacgtcttcctgagctgcgtcctgtgagtcctgaagagaaccactccaagcgccgttgcaccacgttcttccctgaagactaccaggaaccccgagacagtgatgctgaaagccatcgtgccataccggttactcgggaatactcaacttatcaaggaactgctcctactaatggggataacaatggtcaactacgcagggtagtaattcgggagtatcctcgtcatgagactattgccagagaggtttcgccacagcgaagatacattgtgaatggccctcgtcccgagagtgctcgtattcgagattaccctatcaggtccaatttggcgaatcatcctccacccagacagcatccaagctcgttgggttatcatgatgacatttccacacggccgctcacatatcacgaacttggatcacagcattcaccctcgcacactccgttgccgactgctcgtcgagttgttgagccctcctcgcagtatcctgtttctcgagagccagagattatccgcgtcgttgaggcagcccccaacggatctaacattacctatccgcaaagcgaaatgacttcggctaactcatcgcgttttcaaaggtacacggaggctcaaccacgtgagtacggccaccatcaggatttttatgtcatccgcagtggtgtaccaagcgaccgccgaggaaacgtcgtaattcgggagactcgacctgaggttcacgcatccaccagcgtcgagcactaccgtgggggccagcatagttacgctccagcccagaagtttgaagatccgcctatgacttcggatcactatgcaccatctcagatgcctgtggatacaccgatgacgtctggtcactacctacctgttcagcaacctttcccggttcatcccgccccgagcagccacgtcgagattcgtggcccatctactcaccagcgcatgctgcgcaattacagagatgtcatctatatggattaa

SEQ ID NO: 30381 - protein, 876 aa, Muscodor strobelii
  misc_feature: SGI Peptide ID NO. 570448
  misc_feature (48)..(284): NCBI GI: 154305486 Blast Desc: BC1G_08512 [Botryotinia fuckeliana B05.10] gi|150853299|gb|EDN28491.1| BC1G_08512 [Botryotinia fuckeliana B05.10]
  misc_feature (48)..(283): NCBI GI: 145606136 Blast Desc: MGG_02517 [Magnaporthe grisea 70-15] gi|145013864|gb|EDJ98505.1| MGG_02517 [Magnaporthe grisea 70-15]
  misc_feature (1)..(380): NCBI GI: 171689392 Blast Desc: protein product [Podospora anserina] gi|170944658|emb|CAP70769.1| protein product [Podospora anserina]
  misc_feature (48)..(284): NCBI GI: 156044196 Blast Desc: SS1G_10201 [Sclerotinia sclerotiorum 1980] gi|154694590|gb|EDN94328.1| SS1G_10201 [Sclerotinia sclerotiorum 1980]
  misc_feature (1)..(515): NCBI GI: 46109344 Blast Desc: FG01554.1 [Gibberella zeae PH-1]
  misc_feature (1)..(372): NCBI GI: 261355139 Blast Desc: conserved [Verticillium albo-atrum VaMs.102]
  misc_feature (1)..(514): NCBI GI: 256730564 Blast Desc: NECHADRAFT_30336 [Nectria haematococca mpVI 77-13-4]
  misc_feature (117)..(372): NCBI GI: 116199539 Blast Desc: CHGG_07925 [Chaetomium globosum CBS 148.51] gi|88179204|gb|EAQ86672.1| CHGG_07925 [Chaetomium globosum CBS 148.51]
  misc_feature (48)..(294): NCBI GI: 145239019 Blast Desc: An08g00380 [Aspergillus niger] gi|134076659|emb|CAK45190.1| protein product [Aspergillus niger]
  misc_feature (48)..(295): NCBI GI: 212543267 Blast Desc: conserved [Penicillium marneffei ATCC 18224] gi|210066695|gb|EEA20788.1| conserved [Penicillium marneffei ATCC 18224]
MGKTKKKVPAPTHGVAAAHRRAKFERAKQFDDAIWRNLNALKSAPQLKHKSYFEVVDNEDKKSKKLEFQITTDQQPPPGFEFIPIGHPELSTECKELSRERVAMYFIVSTNTDVNELDHHMNRLGYHFRQMITDDARKTLAEQGFDDFTLSVRKPGEPEPIPKTQHEINLQADAVLRDLFPRIPHTDRRQIIEHAFKKDNKFNGQSKVGMAEELTLARRVQLAALAHIRHNLTRYDELLQESDWANARQAVKKPCLDIIIKWRGDEETGRDQLDEILREVIEISDTEGESDDESSSGADISRPQTTRNSAAPHHPGQSALPLGQSSTSQVIVVPSGTTNSAPHTPLRVRKLTKAEKKEVRQKEKRFRRYALAAEALANTSDLVDGALADMTLTSPKRDIRTPSTVHPVGTDTVSRSSTVLLPGKENLQPGKENFHAYRDVDAPLSRPTGHAIFHAPSHSIHRDLASEIIRVPDTQRPKVGPYSAASTRAPQPHLPPVRVGLQDMLVPSIEPRSPNGPIVVHKRVYSDTQRFVDNSHVVTRTMAEATRPTSRLPELRPVSPEENHSKRRCTTFFPEDYQEPRDSDAESHRAIPVTREYSTYQGTAPTNGDNNGQLRRVVIREYPRHETIAREVSPQRRYIVNGPRPESARIRDYPIRSNLANHPPPRQHPSSLGYHDDISTRPLTYHELGSQHSPSHTPLPTARRVVEPSSQYPVSREPEIIRVVEAAPNGSNITYPQSEMTSANSSRFQRYTEAQPREYGHHQDFYVIRSGVPSDRRGNVVIRETRPEVHASTSVEHYRGGQHSYAPAQKFEDPPMTSDHYAPSQMPVDTPMTSGHYLPVQQPFPVHPAPSSHVEIRGPSTHQRMLRNYRDVIYMD

SEQ ID NO: 30382 - DNA, 5034 bp, Muscodor strobelii
  misc_feature: SGI EST ID NO. CUFF.72183.1
  misc_feature: Variant of the nucleotide sequence at SEQ ID NO 30380
aaaccacgctttccggtacttgtccaaaacttggaggccgcgagtgtgagattcagtgaaagatatcgaagcttggagtactccttgaggatattactgttttcaacttcacgttccttttcattgccagcctggtttcaaaggcgcgagccaacctgcaacacaaaagacatccagtcggctccaggtcgcgctgacgcctgtgctgacaggctgaccatccagagcagaggcaactgcggaatatcatctgtgtgcccgtaactcccacatcctactgatctgtctccttccaccggttcactctcatctggacacttcatcctgtgcactcaaccaggcctgacgcaccgtcttttgcctgcatcagtgtggtttgacatccatctttggtgcacgttcaaagatccaagaagatccaagaagatccaaccgttggccaccgcacttgcatccatgtgcacatgacgatgccgtagtgtttgtaccagtgtaaccgcagtctgttcttttccttgtctctttttgtcacatatatcgcctgccaccagtccttccctctagcatggtaagactagaggcatcatcgtgatgggcaaaactaagaaaaaggtgcccgcgcccacccatggcgtggcggccgcccacaggcgagccaagtttgagagagccaaacaatttgatgatgcgatttggcgaaacctcaacgccctcaagagtgctccccagctcaagcacaagtcgtacttcgaggttgttgataacgaggacaaaaagtccaagaagctcgaatttcagatcaccacagaccaacagcctcccccgggctttgagttcattcctatcggacatcccgagctgtccacagaatgcaaagagctatcacgcgagagagttgccatgtactttattgtatcgactaacactgatgtcaacgaactggaccatcatatgaatcgactgggttatcatttccgtcaaatgattactgacgatgcacgcaagactctggcagagcaaggctttgatgatttcaccttgagtgttcgcaaacctggagagcctgagcccatcccgaaaacacagcatgaaattaacctgcaggctgatgccgtcctcagagaccttttccctcgaattcctcatacagaccgacgccaaattatcgagcacgccttcaagaaggataacaaattcaatggccaatcgaaagtgggcatggctgaagaactcacgttggcacgccgagtgcaacttgccgctctcgcccatattcggcacaatctcacgcgctatgacgaactactccaagagagtgactgggctaatgcccgccaagctgtcaagaagccatgcctggacattatcatcaaatggcgcggagatgaagagactggacgtgaccagctcgatgaaattctcagagaagtaattgaaatttccgatactgaaggtgaatccgatgatgaaagcagtagtggtgcggacatcagtcggccacaaaccactagaaactccgcagctcctcaccatccaggccaatctgcgttacccctggggcaatcgtcgacatcacaggttattgtcgttcccagtggcactaccaactcggctcctcacaccccgcttagagtgcgcaaattgaccaaggctgagaagaaagaagttcgccagaaagagaagcgatttagaagatatgctcttgctgctgaagctttggctaacacatctgaccttgttgatggcgcccttgcagacatgaccttgacttcccctaagagggacatccgtacaccaagcacagttcatcctgtaggtaccgatactgtttctcgaagttccactgtacttctaccaggaaaggagaatcttcaaccaggaaaagagaatttccacgcctaccgagatgttgatgcacctctctcacgccccactggtcatgccatctttcatgctccctctcactccatccatcgcgacctcgcaagtgaaatcattcgtgttccggacactcaacggcccaaagttgggccatactcagcagccagcactcgggctccgcagccccatctgccaccggtaagggttggattacaggacatgctcgtaccgtcaattgagcctagatcacccaatggccctattgttgtgcataaaagagtctactcagatacgcagcggtttgtagacaattcgcatgtggtgacacgcaccatggctgaagcgaccagacccacgtcacgtcttcctgagctgcgtcctgtgagtcctgaagagaaccactccaagcgccgttgcaccacgttcttccctgaagactaccaggaaccccgagacagtgatgctgaaagccatcgtgccataccggttactcgggaatactcaacttatcaaggaactgctcctactaatggggataacaatggtcaactacgcagggtagtaattcgggagtatcctcgtcatgagactattgccagagaggtttcgccacagcgaagatacattgtgaatggccctcgtcccgagagtgctcgtattcgagattaccctatcaggtccaatttggcgaatcatcctccacccagacagcatccaagctcgttgggttatcatgatgacatttccacacggccgctcacatatcacgaacttggatcacagcattcaccctcgcacactccgttgccgactgctcgtcgagttgttgagccctcctcgcagtatcctgtttctcgagagccagagattatccgcgtcgttgaggcagcccccaacggatctaacattacctatccgcaaagcgaaatgacttcggctaactcatcgcgttttcaaaggtacacggaggctcaaccacgtgagtacggccaccatcaggatttttatgtcatccgcagtggtgtaccaagcgaccgccgaggaaacgtcgtaattcgggagactcgacctgaggttcacgcatccaccagcgtcgagcactaccgtgggggccagcatagttacgctccagcccagaagtttgaagatccgcctatgacttcggatcactatgcaccatctcagatgcctgtggatacaccgatgacgtctggtcactacctacctgttcagcaacctttcccggttcatcccgccccgagcagccacgtcgagattcgtggcccatctactcaccagcgcatgctgcgcaattacagagatgtcatctatatggattaactgaaaaacttgttttcaattgtaaaaacactctgcatggccatgtctgttcatatggctgcctccgtcgcattgaggcatatatacttgatgtcatggcttggcgttttgtgaggttcctggtatgggattgcattacattacatcggcatcgtttggctttttgataccctttgcattgatctggctggaatcgggttatgtggaagagaagtggatcttgtgtggattcgactcaagcatactaccgtgttgcttcaagcatttgctctgagtatactgccgtatgctctgtgagctgcatgagcttaagggagagaaaatccatgctgagtcagtaggaacaaggagtgaaatgggggaaatgtgagagtaatgtgactggtcgcgtctttggacgttcatcgggttgcagagctcctcatcgatagtaaaatctggcggattccgccaaagcagcaggctagggcacctagtatatactatggagcagtctctctggagcactcttggtggtagtaataccgaaaaggtcccattcaagaagacgcgggctgttggtgatatgcttgagataatactcatatatgcttccgtccttatatctatgtgaaatgctgtagccaatgctgggaaccacccgccctctgcttacgccttgtacacctgtatatgtacaacaaagactccatgatccgctcgaaacatatcaaaccaaacaaaccaaagacaagagcatatcggtcacgaagcgtgcatagcctgtttctccggcctcctaaccagctgcggttctgcttctggggagttgggaagtggctcgtggacaggcgcatccggcgcttttataggcgtagccccaatccccacatccatcgctgtttccggttccttgccgttaacttcggcctccatggcagcgagctcatcctcgacctcgtcctcgtcggcgttggatatgcggccgccgagcatctcggagatttctcgttggtaggcgacggcgtctgcggattcgcccatgagtttctcgacgtgctctattccgcccatttctgcgtggatttcttggaggacttttgtcccttgggatagaccgtatacgatgtctttttggattagggcgaattctacgttgcggactagttgctctagttggaagagttgggtgtctgtcttttcgagaagggattcttgatatttctttcgccggagggcgagaagcgcgcgctttttgtccccctgggagaggagttgccgggctatttcggtttcgcgactggttaggatgaggatgcgcttttggtatctgtggaggctgtcgcgttggttttttaggtctagtattgctctaagagggtatcagttggttgtttgattaaggtatgtgagaaggcatgataggcatggtatgggggtgtaggtcgtattagaggtctcgtatcacgatatcatgtagcaacgaggtattagatagtaaatgatgctcggcaaaggggatcgtacttgtcttgggccgtaacccggctattattgttccccattgtgtaatattatatgatatagttgtattagtagtgatgtgtagcgatctcgagttatgttgcggtgtcgtctagttctagtactcggtggatttggcctttacatcgtctgtgatctcgcggattttggtagtatttgatatttcttaggatagggtattttgagttgttctcctaggttatatcatcgagtagatatcgagtttaggctccggtggtcgcgtgatgcggttgtagtgttggcgtggttgataggatatgataggac

SEQ ID NO: 30383 - DNA, 681 bp, Muscodor strobelii
  misc_feature: SGI cDNA ID NO. 570449
  misc_feature: Encodes the peptide sequence at SEQ ID NO 30384
atgttgtcccgcactgcagtccgctccctccgagctgctgctccccggtccttcgcgcagtccaccgtcaggacatacgctgcggctgctgcgacccaggaagtcaaggccccagtggctgtctacggcctcgatggcacctatgccactgctctgtacacggccgccgtcaagacctcgaccctcgacccgaccgcaaaggccctcggccagcttggtgacctatatgccaaagacaccaagcttgcctccatcctctccacgccgacgttgagcgactcggacaagagccagatcgttgctgagctccagaagaccgtcggcggtgctgccaccaacgagaccgtcaagaacttccttgccacgctggctgagaacaaccgtctgggcctcctgaaggatgtgtgcgacaagtttggtgagattattgctgcctcgcgtggtgaggttgagatgattgtcacgtcggctcagcaactcgacaacaagaccctcaaccgcctcgagaccgccgtctccaagtcccagtacgtcggccagggcaaaaagctcaaggtcaccaacgccgtcaacccagacatcctcggcggcctcgtcgtcgagattggtgaccgaaccatcgacctctctgtctcctccaagattgccaagatgaacaagcttctcaccgacaccttgtaa

SEQ ID NO: 30384 - protein, 226 aa, Muscodor strobelii
  misc_feature: SGI Peptide ID NO. 570449
  misc_feature (44)..(222): Pfam Id: PF00213 Pfam Desc: ATP synthase delta (OSCP) subunit
  misc_feature (3)..(226): NCBI GI: 156056026 Blast Desc: SS1G_05365 [Sclerotinia sclerotiorum 1980] gi|154703149|gb|EDO02888.1| SS1G_05365 [Sclerotinia sclerotiorum 1980]
  misc_feature (3)..(226): NCBI GI: 154310373 Blast Desc: BC1G_07106 [Botryotinia fuckeliana B05.10] gi|150851438|gb|EDN26631.1| BC1G_07106 [Botryotinia fuckeliana B05.10]
  misc_feature (1)..(226): NCBI GI: 85080302 Blast Desc: NCU01606 [Neurospora crassa OR74A] gi|27734221|sp|Q9P602.2|ATPO_NEUCR RecName: Full=ATP synthase subunit 5, mitochondrial; Short=ATP synthase chain 5; AltName:
  misc_feature (1)..(226): NCBI GI: 171689348 Blast Desc: protein product [Podospora anserina] gi|170944636|emb|CAP70747.1| protein product [Podospora anserina]
  misc_feature (23)..(226): NCBI GI: 256734630 Blast Desc: NECHADRAFT_102383 [Nectria haematococca mpVI 77-13-4]
  misc_feature (1)..(226): NCBI GI: 46105344 Blast Desc: FG00300.1 [Gibberella zeae PH-1]
  misc_feature (1)..(226): NCBI GI: 116204663 Blast Desc: CHGG_10215 [Chaetomium globosum CBS 148.51] gi|88176343|gb|EAQ83811.1| CHGG_10215 [Chaetomium globosum CBS 148.51]
  misc_feature (3)..(226): NCBI GI: 225684731 Blast Desc: ATP synthase subunit 5 [Paracoccidioides brasiliensis Pb03] gi|226286709|gb|EEH42222.1| ATP synthase subunit 5 [Paracoccidioides brasiliensis Pb18]
  misc_feature (3)..(226): NCBI GI: 226279593 Blast Desc: ATP synthase subunit 5 [Paracoccidioides brasiliensis Pb01]
  misc_feature (1)..(226): NCBI GI: 212537277 Blast Desc: ATP synthase oligomycin sensitivity conferral protein, [Penicillium marneffei ATCC 18224] gi|210068536|gb|EEA22627.1| ATP synthase oligomycin sensitivity conferral protein, marneffei
MLSRTAVRSLRAAAPRSFAQSTVRTYAAAAATQEVKAPVAVYGLDGTYATALYTAAVKTSTLDPTAKALGQLGDLYAKDTKLASILSTPTLSDSDKSQIVAELQKTVGGAATNETVKNFLATLAENNRLGLLKDVCDKFGEIIAASRGEVEMIVTSAQQLDNKTLNRLETAVSKSQYVGQGKKLKVTNAVNPDILGGLVVEIGDRTIDLSVSSKIAKMNKLLTDTL

SEQ ID NO: 30385 - DNA, 1208 bp, Muscodor strobelii
  misc_feature: SGI EST ID NO. CUFF.71868.0
  misc_feature: Variant of the nucleotide sequence at SEQ ID NO 30383
tgccaattctcgttttcagttggacgactgagcttcagagacagacgcaaccgaccaattcgcaaccaccgcccttcgagcaccaccaccaacacaccctcccgtcctctctcactctctctgcgccatgttgtcccgcactgcagtccgctccctccgagctgctgctccccggtccttcgcgcagtccaccgtcaggacatacgctgcggctgctgcgacccaggaagtcaaggccccagtggctgtctacggcctcgatggcacctatgccactgctctgtacacggccgccgtcaagacctcgaccctcgacccgaccgcaaaggccctcggccagcttggtgacctatatgccaaagacaccaagcttgcctccatcctctccacgccgacgttgagcgactcggacaagagccagatcgttgctgagctccagaagaccgtcggcggtgctgccaccaacgagaccgtcaagaacttccttgccacgctggctgagaacaaccgtctgggcctcctgaaggatgtgtgcgacaagtttggtgagattattgctgcctcgcgtggtgaggttgagatgattgtcacgtcggctcagcaactcgacaacaagaccctcaaccgcctcgagaccgccgtctccaagtcccagtacgtcggccagggcaaaaagctcaaggtcaccaacgccgtcaacccagacatcctcggcggcctcgtcgtcgagattggtgaccgaaccatcgacctctctgtctcctccaagattgccaagatgaacaagcttctcaccgacaccttgtaaattattcccaaaaagcagccagtgtgtctttttctcctccaacttgatatcctgagagagcgggacagatgggtggtagaagcagtatgaggacatgagaaacatgtccaagcccggctgtcaagcttttagcgagagctggcacgccgttgtgtataggagcgctcaaaatagagaaggatggttactcctccagatctaatagcatcaccctttcttttgtgtgaagaatataatacctgtgtactcagcccgtgccaaacaccgccatatgttagttgcatcatgccatggtgatgcccgaaggccttctatgatctctggtccgcaacgaatttcagacgtagctcttcacgcagctgtaaaccggtataatacaactagacgtatttggcgtaga

SEQ ID NO: 30386 - DNA, 3195 bp, Muscodor strobelii
  misc_feature: SGI cDNA ID NO. 570450
  misc_feature: Encodes the peptide sequence at SEQ ID NO 30387
atgactacccaccacgatgacattgcgctccagaagtttgtcgaggattacaatgcgctcgttgacgattattacacagctgatgccctaagtgacaaagaaaactacggtttactggcagaggtactcatagcagagagcaacgacttggttcttgtcgccagacaacttcaagtcctacgattggtatacgatctgaaagaccccaatataggtgattggcaggaggagctacgccaaaaacttccgcccccgctgcgtccgctgatcgacgatgctctatatcaggagtttctggagtttcttcgatggtgttggtacaatgagccccatagtgcactcgaaaagctatctttggtaaagcaaagatgcaataactcaaagcctttttacaaatacctgaacagaggtaacgaacccatgaatccgcctttcatcactggtctacagcgccttctacgcaagtggcttgaagactatcgggaaaagcttctgcctgctatccgaaactggtcgccgcccggccacgacaaaaacgtcgctaggtctaaatcaatctacctagaacagtctgacccgtccatcgatgtacccggcctcaaatttgcctttgctccctctggctccggtaaaacgacatctatcttccgcaatctcacggccgagtacgggcactacatggttgcttcagcccttcatgaatcaggcccaggggttcaacgccggaacataatggacccaaagattcttgagggcgtctcaaacgataccagagagcttttgaagatgctgaagtctttggaacggttggattctgcagctggcggtgacgtaacgtcgcgctttgtttgcgaatgttggtggacctcgatctacgaggcacgatgcttggtatttgaagcttttctcaaagccaaaggccatgaatcaacccctgaaacatggctcttgtttcagatcagttgtaaagattgggatccattcctacacgttttccgtgtaatggccttgtgttcggattcttggctgccattaaccaggctacctacgatcggtaaagacgtaaggctctgtatcgacgaggctcaggaagacttaagatacaagaccgggtcggatgacagtctattcacgcatgcgataaagtcgctatgcattagaggttcacttggccatgtaattccgaaacaattcattttttctggaacatccttcaacatctctgaagccatccgagcaagtgaaaaagaaatcgaacttgatcgttggagtgatctccgtgagacacccatcaacaaaatccagcgtgtcacaaattatcaatacatccggaatgaaacggatgcagaaagaattttgcgagcttgtggtctgaaatcaaacaaagttgttgagaaaggagctcgagaggccagattgctctggggaagagtcaaatggaccgccatgttggctgaacgcatactggacgctatgaaagcgaagcgactgctcaagcccaaagttgcgaacgttgagctctctgacgaggattgcgagagtttagaacttcgcaagcttgcagacgatacctatgagagcatcgtggaacatctgtcgcaaatactactcctcattcggcagcgcaaggacggccaggagcttttgagaatcctcctagaagcagcaatttatgcggatatacggaactcgccttatacattcaaacggaaagaggatcttgaactagtcgaacacggctttgctactgtcgtcgatcggattgacagagcgatgaccaaattggcgcacaatttcgactccaagtctgatggcgagaaaaggtttgagctgaggcttcgcaagcaaaagcagtgcactaccgaagaggggataatagaccttgtcatcaaagcagcggagatcggattctccattgacaactggactctgaatgaagttttgcctgaaatgtggagcaaaggtttcactatcatagattgcctgccatccccatcgtcggacgaggttgaaatggacgccaacaaagaaagtgaagaaagagagtcaagggttcagaagttaattaacacacatggcctcatcagggttgcgaaaccaaactaccaacggcttgtcaacctgaagagaaaaagaccattcaatgaacaggccgccacgaatttcgtaaacgggctgaagaacgcccatttcgtaattgtcaacaagaccattgacgaactagagagacttatgaatgagtggctcactattcgcgagaaggaccctgcaccgattgcagagctaaaagagcgtgtagtcattgaagctatcattcgattttctactcttagcggtctggagagcagcatccttccccaactggagcctttaacgagaagcaaacttggaaacgacgctgagtatttccttgccatgcaacttcgattcttctttcatgaagcgaccgctagagaatcgccgcagcaatctaaggagtggaagaagagacgtgacgacgccgtggcgagcctggctggagctcgaaaccatgtcggtagagaaatccagggcctgactacttctcgcctcatcgttggcgaacaaacagtcaaaaagttcgacacctggaaagcatggatctgcaccttaaaagaatggttaggtgatatccagcgaggtgatagaccatgcgctagctttctcctcccggacaacgattttggccctgatctcattttcgcgctacgaaagaaggatgggaaaataattctctgtagtatccagctgaaactgagcgttattacaagcgaagatgctgtgaacaaatcttcgatatcgtgggcatgcgtagggcgaagaaaagttgacatcagcgagacaaagcacaaagacgaggcaccccaaagacaagacttaggtgcctttgagacactgctgaaatctgatacctggaaggaggagtcgaagctcagcctggttattgtagggaagcaaccaacgggcgaagaaggcccagagggcgtagacctaagagtttcaaggccggatacgagatgcgatgagtcgcacgagtactatagtcttataagcgggaagtcaagggacaacctgtttggcgatggcttttgtgcgttgccttctgaagttaaggctagaaacaagcgggagttggacaaacaacaggatctcatagttaacgaagctaggctatag

SEQ ID NO: 30387 - protein, 1064 aa, Muscodor strobelii
  misc_feature: SGI Peptide ID NO. 570450
MTTHHDDIALQKFVEDYNALVDDYYTADALSDKENYGLLAEVLIAESNDLVLVARQLQVLRLVYDLKDPNIGDWQEELRQKLPPPLRPLIDDALYQEFLEFLRWCWYNEPHSALEKLSLVKQRCNNSKPFYKYLNRGNEPMNPPFITGLQRLLRKWLEDYREKLLPAIRNWSPPGHDKNVARSKSIYLEQSDPSIDVPGLKFAFAPSGSGKTTSIFRNLTAEYGHYMVASALHESGPGVQRRNIMDPKILEGVSNDTRELLKMLKSLERLDSAAGGDVTSRFVCECWWTSIYEARCLVFEAFLKAKGHESTPETWLLFQISCKDWDPFLHVFRVMALCSDSWLPLTRLPTIGKDVRLCIDEAQEDLRYKTGSDDSLFTHAIKSLCIRGSLGHVIPKQFIFSGTSFNISEAIRASEKEIELDRWSDLRETPINKIQRVTNYQYIRNETDAERILRACGLKSNKVVEKGAREARLLWGRVKWTAMLAERILDAMKAKRLLKPKVANVELSDEDCESLELRKLADDTYESIVEHLSQILLLIRQRKDGQELLRILLEAAIYADIRNSPYTFKRKEDLELVEHGFATVVDRIDRAMTKLAHNFDSKSDGEKRFELRLRKQKQCTTEEGIIDLVIKAAEIGFSIDNWTLNEVLPEMWSKGFTIIDCLPSPSSDEVEMDANKESEERESRVQKLINTHGLIRVAKPNYQRLVNLKRKRPFNEQAATNFVNGLKNAHFVIVNKTIDELERLMNEWLTIREKDPAPIAELKERVVIEAIIRFSTLSGLESSILPQLEPLTRSKLGNDAEYFLAMQLRFFFHEATARESPQQSKEWKKRRDDAVASLAGARNHVGREIQGLTTSRLIVGEQTVKKFDTWKAWICTLKEWLGDIQRGDRPCASFLLPDNDFGPDLIFALRKKDGKIILCSIQLKLSVITSEDAVNKSSISWACVGRRKVDISETKHKDEAPQRQDLGAFETLLKSDTWKEESKLSLVIVGKQPTGEEGPEGVDLRVSRPDTRCDESHEYYSLISGKSRDNLFGDGFCALPSEVKARNKRELDKQQDLIVNEARL

SEQ ID NO: 30388 - DNA, 3060 bp, Muscodor strobelii
  misc_feature: SGI cDNA ID NO. 570451
  misc_feature: Reduced expression when VOC is produced
  misc_feature: Encodes the peptide sequence at SEQ ID NO 30389
atggttgtcgtcgacaaccacgagtatctgacggaggaagagaagcgtctcgaacaagaccgcgagcgcaccaaatactggaagcaatggggttcttacgttgccgagcgacaatgggctacagtacgagaggattacagcgctgatggtgatgcttggagtcactttacccacgaccacgcccgatccagagctttccgttggggcgaagatggtatcgccggagtttccgacactcacgggcttcagaacatagcattttcgttttggaacgaagaagatccgttcctgaaagagcgtctattcggtctatccaaccctcaaggcaaccatggcgagagtatcaaggaagctcatttccatttagataacactcctcactcttacatgaaatatctctacaaatatcctcagaaggccttcccctatgaagatcttctgaagcaaaacgcgagcaggtcgaaaacggacaaagaataccagattgtggataccggcatattcgaagaagacagatattgggacatcatcattgagactgccaaagaaggcgacgatcctcaagaactcctttttcgagtaactgcttggaacagaggtcccgacccagctcctttacatatcattccacaagtctggttccggaacacgtgggcttggggtcgccagtctgaagacaagaagccctcgatctcgcaagtggacgaaaatctagtagggtcgaagcactataaattgggcgatcgctatgttctcctgtcgccctcccccggtgtcggttccagcggtgaagatgtgcagccagagatgatcttcacggacaatgacacaaacacagagcttctatacaagcaaaagaaccagactccatacgtgaaggatgccttccatcgttacatcgtggaaggagaaaaaggagcggtaaatcctgctaagaccggtaccaagtccgcggcttggtatgcattcaatgagtctgggggtgttgcccctggtgaatgcgcagtcgtccgtttccgattttcccgaaagcccgagacatacctcgacgaagaggagtttgacgatgtcattgagaagaggaaagatgaagcagatgaattctactatagaatcagccctctgcccatgtccgaagatctgcgcaatattcaacggcaggcattctctggcatgatgtggtgcaagcaatactaccagttcatctgggatcagtgggccaatggtgatccatctcaaccgccgccaccgcccgacaggaaggcggttagaaattcgcaatggaaacatctgcacattgatgatatcctctctatgcccgattcctgggagtatccattcttcgccgcttgggattcggcattccactgtattccgcttgccatgattgaccctgaattcgccaagaagcagattgatcttttcacaagggaatggtactgccatcctaatggccaactccctgcatatgagtggaattttggagatgtcaatcctcctgttcatgcttgggcgacgttccgtgtcttcaaaattgagcgcaagatgtacggccggcaagatcttgatttccttgagagagtattccagaaattgctcttgaacttcacgtggtgggtaaaccgaaaggacgtggatggcaagaacgtcttcgaaggtggtttcttggggctggacaacatcggtcttttcaaccgttctgagcccttacccactggtggcgttctcgagcaagctgacagcacggggtggatgggattctattgtctttccatgctgaacatcgccctcgagctggccaagcataggcgcatctatgaggacattgcgtcgaaattcttcgaacattttatcttcatcagtgatgccatgactttcaagtctggtcaaagtgagaaatcactctggaatgatgaggatggattctactacgacgccatctcttatgggggcccttggatccagcaacttccggttcgatcacttgtagggttgatcccgttgtatgccactctaactctcgaaccagagttgatcgagaagcttccatcattcaagaagcgagtcacatggttcatggagaacagatgcgatgtagcagagagaaatatggcaagtattgcaaagagaggtaaaggaaaccgtatcttacttgcgatggtgggccaagaccgacttgaaaagattctcaagcgtatgcttgacgaaagcgagttcttcagtgaacacggtatccgatctctctcaaaataccacaaggaaaatccgtactccatggatgtcaatggacagaaattcactgttgggtatgtcccaggcgactctgacagtggattgtttggaggaaactcgaactggcgaggaccgatctggctttgcgtcaatttcttgcttgtcgaatctctccagcgcttctacctgttctatggacccaaattccaggtggaatgccctactggatctggcgaatacatgcatctaggacatgtttctgaggagatccagcatcgcttgcaacacttgtttgctcgcggtgatgatggacgcagaagtatcaatgcaggaaacgatttgctcgactttgatccgcactggaaggacaacatgtggttctatgagttcttcgacggagatagtggacgtggtctaggggcaagtcaccagtgcggctggactggtctcattgcacgcatgattcacgacacaggaataagctgtcgtctccctcagactccccggacgccatcgattggaatgtcccactacttcgacgacattctccacagacatgtccacgacaaaaacaccaagccggtgaagcctcacatgcggagatcgtctacggctagatcgataggcgcgaggagcgactttgacacctcggtcaacggtgatgagtataagaatagcgtggcgcctgaggacccagagcgagaggcggagagaattgaggcggataagcatttgcattcgtatatctctgatcagctgcagagagtcaaagatcacgatgaacatattggggttgttgatcaggaggagtttgagactcatgcttag

SEQ ID NO: 30389 - protein, 1019 aa, Muscodor strobelii
  misc_feature: SGI Peptide ID NO. 570451
  misc_feature (1)..(1004): NCBI GI: 156056024 Blast Desc: conserved [Sclerotinia sclerotiorum 1980] gi|154703148|gb|EDO02887.1| conserved [Sclerotinia sclerotiorum 1980]
  misc_feature (1)..(1019): NCBI GI: 256735355 Blast Desc: glycoside hydrolase family 63 [Nectria haematococca mpVI 77-13-4]
  misc_feature (1)..(1019): NCBI GI: 171689350 Blast Desc: protein product [Podospora anserina] gi|170944637|emb|CAP70748.1| protein product [Podospora anserina]
  misc_feature (1)..(1001): NCBI GI: 7800868 Blast Desc: conserved [Neurospora crassa]
  misc_feature (1)..(1019): NCBI GI: 46105342 Blast Desc: FG00299.1 [Gibberella zeae PH-1]
  misc_feature (1)..(1001): NCBI GI: 116204665 Blast Desc: CHGG_10216 [Chaetomium globosum CBS 148.51] gi|88176344|gb|EAQ83812.1| CHGG_10216 [Chaetomium globosum CBS 148.51]
  misc_feature (1)..(1018): NCBI GI: 154310371 Blast Desc: conserved [Botryotinia fuckeliana B05.10] gi|150851437|gb|EDN26630.1| conserved [Botryotinia fuckeliana B05.10]
  misc_feature (1)..(1019): NCBI GI: 261358617 Blast Desc: cytoplasm protein [Verticillium albo-atrum VaMs.102]
  misc_feature (56)..(1019): NCBI GI: 164428177 Blast Desc: NCU01768 [Neurospora crassa OR74A] gi|157072043|gb|EAA27955.2| NCU01768 [Neurospora crassa OR74A]
  misc_feature (1)..(1019): NCBI GI: 119481335 Blast Desc: NFIA_087550 [Neosartorya fischeri NRRL 181] gi|119408850|gb|EAW18799.1| conserved [Neosartorya fischeri NRRL 181]
  misc_feature: Useful for introducing or modulating the production of volatile compounds
MVVVDNHEYLTEEEKRLEQDRERTKYWKQWGSYVAERQWATVREDYSADGDAWSHFTHDHARSRAFRWGEDGIAGVSDTHGLQNIAFSFWNEEDPFLKERLFGLSNPQGNHGESIKEAHFHLDNTPHSYMKYLYKYPQKAFPYEDLLKQNASRSKTDKEYQIVDTGIFEEDRYWDIIIETAKEGDDPQELLFRVTAWNRGPDPAPLHIIPQVWFRNTWAWGRQSEDKKPSISQVDENLVGSKHYKLGDRYVLLSPSPGVGSSGEDVQPEMIFTDNDTNTELLYKQKNQTPYVKDAFHRYIVEGEKGAVNPAKTGTKSAAWYAFNESGGVAPGECAVVRFRFSRKPETYLDEEEFDDVIEKRKDEADEFYYRISPLPMSEDLRNIQRQAFSGMMWCKQYYQFIWDQWANGDPSQPPPPPDRKAVRNSQWKHLHIDDILSMPDSWEYPFFAAWDSAFHCIPLAMIDPEFAKKQIDLFTREWYCHPNGQLPAYEWNFGDVNPPVHAWATFRVFKIERKMYGRQDLDFLERVFQKLLLNFTWWVNRKDVDGKNVFEGGFLGLDNIGLFNRSEPLPTGGVLEQADSTGWMGFYCLSMLNIALELAKHRRIYEDIASKFFEHFIFISDAMTFKSGQSEKSLWNDEDGFYYDAISYGGPWIQQLPVRSLVGLIPLYATLTLEPELIEKLPSFKKRVTWFMENRCDVAERNMASIAKRGKGNRILLAMVGQDRLEKILKRMLDESEFFSEHGIRSLSKYHKENPYSMDVNGQKFTVGYVPGDSDSGLFGGNSNWRGPIWLCVNFLLVESLQRFYLFYGPKFQVECPTGSGEYMHLGHVSEEIQHRLQHLFARGDDGRRSINAGNDLLDFDPHWKDNMWFYEFFDGDSGRGLGASHQCGWTGLIARMIHDTGISCRLPQTPRTPSIGMSHYFDDILHRHVHDKNTKPVKPHMRRSSTARSIGARSDFDTSVNGDEYKNSVAPEDPEREAERIEADKHLHSYISDQLQRVKDHDEHIGVVDQEEFETHA

SEQ ID NO: 30390 - DNA, 2901 bp, Muscodor strobelii
  misc_feature: SGI EST ID NO. CUFF.72187.0
  misc_feature: Variant of the nucleotide sequence at SEQ ID NO 30388
agcactcttacatgaaatatctctacaaatatcctcagaaggccttcccctatgaagatcttctgaagcaaaacgcgagcaggtcgaaaacggacaaagaataccagattgtggataccggcatattcgaagaagacagatattgggacatcatcattgagactgccaaagaaggcgacgatcctcaagaactcctttttcgagtaactgcttggaacagaggtcccgacccagctcctttacatatcattccacaagtctggttccggaacacgtgggcttggggtcgccagtctgaagacaagaagccctcgatctcgcaagtggacgaaaatctagtagggtcgaagcactataaattgggcgatcgctatgttctcctgtcgccctcccccggtgtcggttccagcggtgaagatgtgcagccagagatgatcttcacggacaatgacacaaacacagagcttctatacaagcaaaagaaccagactccatacgtgaaggatgccttccatcgttacatcgtggaaggagaaaaaggagcggtaaatcctgctaagaccggtaccaagtccgcggcttggtatgcattcaatgagtctgggggtgttgcccctggtgaatgcgcagtcgtccgtttccgattttcccgaaagcccgagacatacctcgacgaagaggagtttgacgatgtcattgagaagaggaaagatgaagcagatgaattctactatagaatcagccctctgcccatgtccgaagatctgcgcaatattcaacggcaggcattctctggcatgatgtggtgcaagcaatactaccagttcatctgggatcagtgggccaatggtgatccatctcaaccgccgccaccgcccgacaggaaggcggttagaaattcgcaatggaaacatctgcacattgatgatatcctctctatgcccgattcctgggagtatccattcttcgccgcttgggattcggcattccactgtattccgcttgccatgattgaccctgaattcgccaagaagcagattgatcttttcacaagggaatggtactgccatcctaatggccaactccctgcatatgagtggaattttggagatgtcaatcctcctgttcatgcttgggcgacgttccgtgtcttcaaaattgagcgcaagatgtacggccggcaagatcttgatttccttgagagagtattccagaaattgctcttgaacttcacgtggtgggtaaaccgaaaggacgtggatggcaagaacgtcttcgaaggtggtttcttggggctggacaacatcggtcttttcaaccgttctgagcccttacccactggtggcgttctcgagcaagctgacagcacggggtggatgggattctattgtctttccatgctgaacatcgccctcgagctggccaagcataggcgcatctatgaggacattgcgtcgaaattcttcgaacattttatcttcatcagtgatgccatgactttcaagtctggtcaaagtgagaaatcactctggaatgatgaggatggattctactacgacgccatctcttatgggggcccttggatccagcaacttccggttcgatcacttgtagggttgatcccgttgtatgccactctaactctcgaaccagagttgatcgagaagcttccatcattcaagaagcgagtcacatggttcatggagaacagatgcgatgtagcagagagaaatatggcaagtattgcaaagagaggtaaaggaaaccgtatcttacttgcgatggtgggccaagaccgacttgaaaagattctcaagcgtatgcttgacgaaagcgagttcttcagtgaacacggtatccgatctctctcaaaataccacaaggaaaatccgtactccatggatgtcaatggacagaaattcactgttgggtatgtcccaggcgactctgacagtggattgtttggaggaaactcgaactggcgaggaccgatctggctttgcgtcaatttcttgcttgtcgaatctctccagcgcttctacctgttctatggacccaaattccaggtggaatgccctactggatctggcgaatacatgcatctaggacatgtttctgaggagatccagcatcgcttgcaacacttgtttgctcgcggtgatgatggacgcagaagtatcaatgcaggaaacgatttgctcgactttgatccgcactggaaggacaacatgtggttctatgagttcttcgacggagatagtggacgtggtctaggggcaagtcaccagtgcggctggactggtctcattgcacgcatgattcacgacacaggaataagctgtcgtctccctcagactccccggacgccatcgattggaatgtcccactacttcgacgacattctccacagacatgtccacgacaaaaacaccaagccggtgaagcctcacatgcggagatcgtctacggctagatcgataggcgcgaggagcgactttgacacctcggtcaacggtgatgagtataagaatagcgtggcgcctgaggacccagagcgagaggcggagagaattgaggcggataagcatttgcattcgtatatctctgatcagctgcagagagtcaaagatcacgatgaacatattggggttgttgatcaggaggagtttgagactcatgcttagatgggcttagaattggggattttgggatgtcttggaagggttggaagttatcattaaatgctacatgaaaagatagattgggagtatacggttatcttttggggtttggtagatattaaggcattttagattgaatcagtccttgagggattgacatgaggtgtttgttcatgtgtgatgatgggtatgtgctgtgaagtgatatgatcgaaatgtg

SEQ ID NO: 30391 - DNA, 2373 bp, Muscodor strobelii
  misc_feature: SGI cDNA ID NO. 570452
  misc_feature: Encodes the peptide sequence at SEQ ID NO 30392
atggacaaccgcgatgtgagcctgaatattgccgtcatcggcgccaatggcgttggcaaatcccacttcatccaaagggccatgagtctgaaacacccgcccggccccgaaccgacctcggcgcgcattagtatcgagggcatattctgcaccctcaccttattcgagctggatcttgagtacttcgacatagacctcaaccgccaggtcctgtggcccaagcagatgggcggcaccatcctccctcgtgtgaatggtgtcctttttctctatgatgtgatgaaccgggacagtatcatcgaactacctcagacactgaatgccctcgtaaactcgtccctccccgccgttctcgtagctacaaagtgcgataaccccgaatcttcgcgacacatcgataccgacgccgtggcggctgcgtgccagtcttgccttgctaccttcaaaacctcggccaatgtcccagataccgccagaatggcactctctaccttactgaaggccatgatcctgaagactcaggaatatgaaaactcggaagtctcaggtatgaggcgtcgtgcagcttccgaggcccatctcgatgctccaccagagacacactctcgtcccctgagccagcagagtagacacagtcgagctagctctgacatgtccctattacgtaattacatagctacagctcaggcgaaccataacctacggcattcgcaagcgccacgagtagatctgttgggcggtcagattccagacgaggacgaaacgacgcaaactgtctcaagcatgcttcgaagcccaggagtcaggctggaccgaactcagcatctcaacggcattgagatagaagactcggacatggactctatcaggtattccgatgacataccactgctacagcgaggcgacgagagcctgttcgatcgcaacgcgaggaaaccgggagtcgttttcgatgagttagttgatcgcttactagcccagaaactgacgagagcggatcataactttggagacgtttttttgtgcctataccgcaagttcgcgacgcctttggagctatttacagctatcctgacacggatggatgctgtaaaggacgacaaagccatacattatctcatgaagacctctacacagcttcggataatagaggccatagccaaatgggttggaacataccctaatgattttgcgaagcctgccacgaggaaaaaactagatgattttattgcgcatctgtcaaccgagcccatattctcagctgcggccatgcaaatgcgcagaacgttggccgacagcattatcgaggatgatgatatggggtgggttaagtcagaagctgaggaaagtcaaagtagcgacgagatggcttcgaatgttgcgagagaaggcgggagacaaggtgatgaactccatgagagcatcagtaacttgagtatagacagtggggtggatcgccggccctctgccacctcttcgttcgatccaacaggccaacctatcaagacgcattcctttcaattccatacatatcaggactacgagcgagaagcagctacgatggttccctcgcacacattacctctcaccaagtttcgctaccacattttcatggatacagccaatgacgacgtagcggacgagatgacgaggatcgattgggtcatgttctcgtctatccgcatacgcgacctggtccgccatgtcagcttatctccggagcagagagaacaacggaagtcgatgaggaacgtgaaccgcatgatatctcattttaaccacatcgcatcctgggtgtcaaatatgattctcatgcgagacaaggccaaacatcgagcgcagatgctcgagaagttcatgcatattgcactgaagctgagagtgctaaacaattacaatggccttgcagctgttctcgctggtatcaatggcactgcgattcaccggctctctcaaacgcgggctctagtccctcccgatgtgcagaagcgattcgcccggttggtgcttctgatgggcactcaaaagggtcatttcgcctaccgcttagcgtgggagaattcgccattgccacgtatcccgtttatcccgttgcatcgtagagatctcgtctcggcggaagaaggtagtattacgtttgtcgggccacagggggatcgtctaaactggaagaaatttgaggtcttaggcgaggtcatcctacccatcatgaggagtcaaaccactccttatcccaacttgtcgaaacacgacactgcgagagagctcattttggattgcctaatgccaacagacgaagaggacattttccaacgaagtcttcaagtagagagcacttcagtcccagggcgagcatggcgttcccaccgttaa

SEQ ID NO: 30392 - protein, 790 aa, Muscodor strobelii
  misc_feature: SGI Peptide ID NO. 570452
  misc_feature (9)..(124): Pfam Id: PF08477 Pfam Desc: Miro-like protein
  misc_feature (9)..(167): Pfam Id: PF00071 Pfam Desc: Ras family
  misc_feature (538)..(728): Pfam Id: PF00617 Pfam Desc: RasGEF domain
  misc_feature (314)..(409): Pfam Id: PF00618 Pfam Desc: Guanine nucleotide exchange factor for Ras-like GTPases; N-terminal motif
  misc_feature (538)..(709): Pfam Id: PF00617 Pfam Desc: RasGEF domain
  misc_feature (317)..(409): Pfam Id: PF00618 Pfam Desc: Guanine nucleotide exchange factor for Ras-like GTPases; N-terminal motif
  misc_feature (5)..(780): NCBI GI: 256734652 Blast Desc: NECHADRAFT_31776 [Nectria haematococca mpVI 77-13-4]
  misc_feature (7)..(781): NCBI GI: 46107536 Blast Desc: FG00651.1 [Gibberella zeae PH-1]
  misc_feature (8)..(780): NCBI GI: 156044796 Blast Desc: SS1G_10502 [Sclerotinia sclerotiorum 1980] gi|154694890|gb|EDN94628.1| SS1G_10502 [Sclerotinia sclerotiorum 1980]
  misc_feature (4)..(780): NCBI GI: 261358616 Blast Desc: aimless RasGEF [Verticillium albo-atrum VaMs.102]
  misc_feature (7)..(768): NCBI GI: 145605631 Blast Desc: MGG_11784 [Magnaporthe grisea 70-15] gi|145013434|gb|EDJ98075.1| MGG_11784 [Magnaporthe grisea 70-15]
  misc_feature (8)..(769): NCBI GI: 154291181 Blast Desc: BC1G_15362 [Botryotinia fuckeliana B05.10] gi|150847078|gb|EDN22271.1| BC1G_15362 [Botryotinia fuckeliana B05.10]
  misc_feature (6)..(780): NCBI GI: 85083858 Blast Desc: NCU01782 [Neurospora crassa OR74A] gi|28918292|gb|EAA27969.1| [Neurospora crassa OR74A]
  misc_feature (8)..(787): NCBI GI: 116199409 Blast Desc: CHGG_07860 [Chaetomium globosum CBS 148.51] gi|88179139|gb|EAQ86607.1| CHGG_07860 [Chaetomium globosum CBS 148.51]
  misc_feature (7)..(776): NCBI GI: 171689566 Blast Desc: protein product [Podospora anserina] gi|170944745|emb|CAP70856.1| protein product [Podospora anserina]
  misc_feature (263)..(780): NCBI GI: 18376134 Blast Desc: related to aimless RasGEF (aleA) [Neurospora crassa]
MDNRDVSLNIAVIGANGVGKSHFIQRAMSLKHPPGPEPTSARISIEGIFCTLTLFELDLEYFDIDLNRQVLWPKQMGGTILPRVNGVLFLYDVMNRDSIIELPQTLNALVNSSLPAVLVATKCDNPESSRHIDTDAVAAACQSCLATFKTSANVPDTARMALSTLLKAMILKTQEYENSEVSGMRRRAASEAHLDAPPETHSRPLSQQSRHSRASSDMSLLRNYIATAQANHNLRHSQAPRVDLLGGQIPDEDETTQTVSSMLRSPGVRLDRTQHLNGIEIEDSDMDSIRYSDDIPLLQRGDESLFDRNARKPGVVFDELVDRLLAQKLTRADHNFGDVFLCLYRKFATPLELFTAILTRMDAVKDDKAIHYLMKTSTQLRIIEAIAKWVGTYPNDFAKPATRKKLDDFIAHLSTEPIFSAAAMQMRRTLADSIIEDDDMGWVKSEAEESQSSDEMASNVAREGGRQGDELHESISNLSIDSGVDRRPSATSSFDPTGQPIKTHSFQFHTYQDYEREAATMVPSHTLPLTKFRYHIFMDTANDDVADEMTRIDWVMFSSIRIRDLVRHVSLSPEQREQRKSMRNVNRMISHFNHIASWVSNMILMRDKAKHRAQMLEKFMHIALKLRVLNNYNGLAAVLAGINGTAIHRLSQTRALVPPDVQKRFARLVLLMGTQKGHFAYRLAWENSPLPRIPFIPLHRRDLVSAEEGSITFVGPQGDRLNWKKFEVLGEVILPIMRSQTTPYPNLSKHDTARELILDCLMPTDEEDIFQRSLQVESTSVPGRAWRSHR

SEQ ID NO: 30393 - DNA, 3613 bp, Muscodor strobelii
  misc_feature: SGI EST ID NO. CUFF.72643.0
  misc_feature: Variant of the nucleotide sequence at SEQ ID NO 30391
ctcaattccaacccgatttccattgccaattattaccaatttactctctcgcgtagcggtgccggtcccaccatctggacagacgatatttagggagtctagcgagtctagtatataacccacaaggaacatcctgcctggtgccagtctctggccagtgtgccgcccagcatcccacacccttgccgccggtacgccgccaataatcccctactccagtcccctagagccgccagccgcatcgccgcactccgcgccgcactctccgcaataccaataccaatacccataccaacaacgcatacccgtttgctcccctcgtctcgcctcttttccacgtcgtcggcaaccatcatggaccgggttctcatttgactgttaaccccctttacggtcgcgcgcccttctcccgatgcctatgatcgaaacgaccccttactgcgtttctacgttccgtctcagcctgatctagctgcctcccgcgctcaaccacatgcattatccgcctaaagcgcaatctctctgacgacaactcctctccggctgtctcctgtctgtgctcgaccacctgactcgacacccctcgacgactatcatgctcgattccatgtcccttccagcttgagccccctcaacggtcccttcgatacacccgatatactcgacgagcctttgcattcctttactcctcctcctctctctctagcgatcggcgcaagtggcaaaactgtcgcccacacccatcaccgccatggacaaccgcgatgtgagcctgaatattgccgtcatcggcgccaatggcgttggcaaatcccacttcatccaaagggccatgagtctgaaacacccgcccggccccgaaccgacctcggcgcgcattagtatcgagggcatattctgcaccctcaccttattcgagctggatcttgagtacttcgacatagacctcaaccgccaggtcctgtggcccaagcagatgggcggcaccatcctccctcgtgtgaatggtgtcctttttctctatgatgtgatgaaccgggacagtatcatcgaactacctcagacactgaatgccctcgtaaactcgtccctccccgccgttctcgtagctacaaagtgcgataaccccgaatcttcgcgacacatcgataccgacgccgtggcggctgcgtgccagtcttgccttgctaccttcaaaacctcggccaatgtcccagataccgccagaatggcactctctaccttactgaaggccatgatcctgaagactcaggaatatgaaaactcggaagtctcaggtatgaggcgtcgtgcagcttccgaggcccatctcgatgctccaccagagacacactctcgtcccctgagccagcagagtagacacagtcgagctagctctgacatgtccctattacgtaattacatagctacagctcaggcgaaccataacctacggcattcgcaagcgccacgagtagatctgttgggcggtcagattccagacgaggacgaaacgacgcaaactgtctcaagcatgcttcgaagcccaggagtcaggctggaccgaactcagcatctcaacggcattgagatagaagactcggacatggactctatcaggtattccgatgacataccactgctacagcgaggcgacgagagcctgttcgatcgcaacgcgaggaaaccgggagtcgttttcgatgagttagttgatcgcttactagcccagaaactgacgagagcggatcataactttggagacgtttttttgtgcctataccgcaagttcgcgacgcctttggagctatttacagctatcctgacacggatggatgctgtaaaggacgacaaagccatacattatctcatgaagacctctacacagcttcggataatagaggccatagccaaatgggttggaacataccctaatgattttgcgaagcctgccacgaggaaaaaactagatgattttattgcgcatctgtcaaccgagcccatattctcagctgcggccatgcaaatgcgcagaacgttggccgacagcattatcgaggatgatgatatggggtgggttaagtcagaagctgaggaaagtcaaagtagcgacgagatggcttcgaatgttgcgagagaaggcgggagacaaggtgatgaactccatgagagcatcagtaacttgagtatagacagtggggtggatcgccggccctctgccacctcttcgttcgatccaacaggccaacctatcaagacgcattcctttcaattccatacatatcaggactacgagcgagaagcagctacgatggttccctcgcacacattacctctcaccaagtttcgctaccacattttcatggatacagccaatgacgacgtagcggacgagatgacgaggatcgattgggtcatgttctcgtctatccgcatacgcgacctggtccgccatgtcagcttatctccggagcagagagaacaacggaagtcgatgaggaacgtgaaccgcatgatatctcattttaaccacatcgcatcctgggtgtcaaatatgattctcatgcgagacaaggccaaacatcgagcgcagatgctcgagaagttcatgcatattgcactgaagctgagagtgctaaacaattacaatggccttgcagctgttctcgctggtatcaatggcactgcgattcaccggctctctcaaacgcgggctctagtccctcccgatgtgcagaagcgattcgcccggttggtgcttctgatgggcactcaaaagggtcatttcgcctaccgcttagcgtgggagaattcgccattgccacgtatcccgtttatcccgttgcatcgtagagatctcgtctcggcggaagaaggtagtattacgtttgtcgggccacagggggatcgtctaaactggaagaaatttgaggtcttaggcgaggtcatcctacccatcatgaggagtcaaaccactccttatcccaacttgtcgaaacacgacactgcgagagagctcattttggattgcctaatgccaacagacgaagaggtaggagactagcgtatttcccctggtctaggcttttgagtgactaacaaagaaacaggacattttccaacgaagtcttcaagtagagagcacttcaggtactgcattcgatccgtccagaaagaagttcccgtggttttcaggcaataaaccctaataacgattatttagtcccagggcgagcatggcgttcccaccgttaatagacattactgcaggcgttcggcatttggaaagcgtttctcgtggcaggataaccacttttgaagaatgtgcaacatttcgcacatgaccatattcacatgatggcgggcggatccggatagtattgacaactgggatggaatctttctagggaatatcttcaatcgacctacacacgtgtatgttgcatgtggaggattagtactcgtttaggtacatacactctgtgaatcgtgatagctacgatttcatatcgtgctctgctttcgaagctactcgtacatttatgtcattctgtcttaatactgattatgagagctatctttggtgtggaggggtaaaaacttagcacccccg

SEQ ID NO: 30394 - DNA, 5838 bp, Muscodor strobelii
  misc_feature: SGI cDNA ID NO. 570453
  misc_feature: Encodes the peptide sequence at SEQ ID NO 30395
atgagcagcgctgccaccatcagaaagccttgctttcaattcaagacaggcaagtgcaagtttggagctcgatgcaaattctcgcacgatgtcaccgttacaacgcacgacagagtcgcggggaagagagaggacaacgacttacgagagtggaagcgactactttatcaaggtcgtcacgctccccatcggacgacttgtgagcgtttcttcgagctggctgccaaactggttgattgcgatccaggcatatctcaagagctcgtcaagctactggccgacgaagatggtcttgcattcattaagttcctaaccgacacaaatatccctaatgcttcgaactatcggacgaaaaaggatctgtgggccaaacaagtgagaccacttttcgctgtggtcacgcacccttgtgttgcagattccgcagtacttgaacagcacgtagcgaccatttacaacttcatgcagggcattgcaagccgacgaatgaagatcttgttcaattttgttatcgatttggctgcgtccacgataattactggcgatgtaactactgtagacgacgaaataagcaagccagtactcgtcgagtcttcgctgatagtcttgtccaagatgctcgattgcaatacgagtaacatcatcgacgaagggttcaagaacatctgccagcagctcagtacggttcttcaaactttccaacaatcgcaggatgggtacttgtctcagaaatgcattagctacattaatcgtcgacttggagtgggagatgaactggcgatatcccaaactcccacgaaacaaaatgttggatcccgcgcccagttctcaatgccgaaaactcttccaggtcgccgtcatgataatgatcatgttaatattgccgatatcagtatcctgccaacccataacgaggtcgtttcgactcaaggagaatatctacccacgaatgacccatcgtcttttcaccatcctggcataattggacgtatcgatcgagagttccgtttgctccgtgaagatacaattggacagctccgtgatgttgttcacgatcagctgaagattctacaaggtcagggcgtcgacgcgcgtcccggtgaccgacacagtcttcgcacctacacgtatcatgatgctgaggtggccggtgtttcattcgaacaaatcgctggcttggatcttttggtgagattcacccaacccttccaaaaaggcaatctgcacaggcgtacagattggtggacgcagtccaagcgactgcagccaggtgcacttgtttgtgttataagccagaatggatctgttctcttctgtgtagtttccaatgcgaccacggtcaccaaggaccaacctccccaatggaggcgcactgagcggcctgataacgatcagaagaaagacatcaactcactagctgatgatacttcgttctcgtatgttcatctgaacattgctgagaccaaggatagcgccatccaacaagctcttcgctggtatcagaacattggacccagtcatcgacattgtatcattgaatttcctggggtgttacttgcctcttttcaccacactttggaggcactcaaaacgatgtctgaatctccagatgttccattcatcaatttgattgctccgacaacacgaaattctagcatcgcggatatttcgcctccccgctactcaactaaagcaggttttgacttcgacctcacatgtctaacaaataatgacacccagttaaaattctcatcgacccagcatctaagccctcaggtgctcacgaagcattctggccttgatgagacgcagtctttagcacttctcaatagtctgtcacgtgagcttgccctagttcaaggaccgcccggaacaggtaaaagcttcacaggcgaaaagataatcaaagtcttacttgcaaacaagaaaaagggagatattggccccatactatgtgtttgctacacaaatcatgccctcgaccagctactagagcacctactagacgaaggtgtcaaacaaatcatacgcatcggttctcgctccaagtctgagcggcttgaaaaggtcaatcttcgatgcgttgctgcatccgccgatcgtacttggttcgaaagaaatactttgcggaatacgaagaatgacctcactgagcatcaaataaacttatctgggtctctgcaggaacttcggaattgcataggccagtcggctttgcaagcgtatcttgaggaaaatcatccgggtcaccaccatgcgttatttggaacctcagtggatgacgaaggctgggaagaagtacgacgccgtcctcatcggctgctcgatcagtggctgaaaggtggcaataacctcgctatcaatcttgctcctcgtcgacctgaggcgctattcgaagcagatatctggtccctaacatcgacggagcgtcagagactgtacatctactggcaaagacaaattcgtgatcctattatcaacaattttattcgtgagtaccactcgtatattcggaccaagtcgagtcgcgagcgggtagttcaagaagtggatctgcgatgtttattggccgcagacgtcgttggcgttacgactactggtttggccagaaaattggatcttttgagaaaaatgagatgcaaagtcttgatgtgtgaagaggctggggaggtccttgaagcccacaatctcactgctctacttcctaccatcgagcattgtatcctcattggcgaccatttgcaacttcgaccacaaattcagaactacgacctgaactctacaaacccccgcggcgctcagttctctttggatgtgtcattgtttgagcgcttagtcaacccatttcgagatgaggatcagaaaatcccctatgatactcttgagacacaacgtcgcatgcatcccagcatatccgaattgatccgttccactctttatccttcactgcaagatgacgatactgtgggacagtatcctgaagttattggtatgaagcagcgtctcttctggttacatcacattgagaaagaggatcgagtcgccgctggcaagacccaagacccaacttccacatctcataccaattcattcgaagtcgcgattaccatgtctctggtacaacacctaattcgtcaaggcacatacgcccctgatgatatagcagtcattacgccgtatcttggacagcttcatcgacttcgtcgggagatgcaggcttctttccagatttccgtcggggagagggatctcgaagacttagccgcaatagacgcaggcaatattgggcagcaggatatgcccgatattctcacaattagcgcacctaatcgtacaactctattgaaatccgtgcgtctagctactgtggacaacttccaaggcgaggaagccaaagtggttgttatctctctggttcgaagcaatgatgaacagcgctgcggctttctcagtacaccgaatcgcattaacgtgctactatcacgagcgaagcacgggatgtatctcattgggaacgcggatacatatcgcaacgttccaatgtgggcgaaagtcatcgagattctcgagaaaagaaacaacatcgggtctcgtttgctacttcagtgcccccgtcatcccgatcatcctatcggggtttcgacgccggaccattttctgcaattttctccagagggtggatgccatcggcattgcgatcggcgattgtcttgcgggcacgcctgcatcaatcgatgccattcacaaatactgcatagtgccgtaaagtgtctggagagatgccctcgccagaagaaaggatgcgatcatccttgtagattatcatgtggagatgcatgcgagccgaaatgcacagagcgactgaaaggtctgaacattatgctcccatgcggccacatcgtgacgcaggcgctgtgctggcagtctcaagaactttcagccattatttgcaaggagcgagttgcaaaaactgtgcctggctgtagacatactgtcacggttccttgtcatgtagatgtgacaacaagtaaataccggtgcacagctgtctgcggcgatcctcaaccttgtggtcacgattgccgaagtcagtgccagttttgcaaagataaaaaggatggtagtgtggtggcagaacaccatggagtctgcaaacaacgttgcgaccgctcatacacggcctgccgtcatacttgtcagaaatcttgtcacgggcaagagggctgtccaccgtgttcgagtccttgtgagatacgctgcagccattcaaaatgcagcaaacaatgccacgagccttgcgcgccatgtgctgagcagcattgctcatcggcctgttctcaccagcaatgtaatatgccatgtgcagcaccttgtgattgggttccatgctcccgaagatgcgaaaagcttctgaaatgtggtcatcaatgtccttctatatgtggcgaagcatgtcctccgcccgaatattgtcattcgtgttgttctgaagacgtgaaagcaacggtcgtcgacttcattatggcaacggaatatagagatgtcattcttgacgaagacccatgtatcttccctgactgtgggcattttctaaccaaaagtaatatggacggcttgatggacctcaaggctcactataagatgtctgctgaagacagcccaagcccagtcgcgctgagcagcagctccatgccattttcgatggatgagatcaaatcatgtccgacttgccgggggtctttacgcagcatcgctcgatatggcagaatcattcgccgcgccaccttggatgaggccacgaaaaaattcattgcatggtcgcatactgaattcatgaagctggcagataaactaatagatattcaaaaggatttatcgcaagctgatgcaccatcactgaagcccaatcagactaggccatctaaactcgtcttagcaacatctcgccttcaacagctgcgaaagatcggagagtggtgtggtggttccagatataacgccgcaattcggctttggcatgagatcagcgcatttcttggcagcgtccgcaaggaagagcaacctcttcagcgcgttgcaaacttcgtccgacatgctatgcgagagcgaaagtcgactggcgagttcgtctttgacgagtctgtccttcaagtcaagggcgtcttacaggccacttcgttgttgttaagatgtgaggttataatgcttactgacttcatgactattcgacaaccccttctcactacacggccagagctcagactggacttcacacttgggatgaaagaatgcgaaaagctggtcaacatggccgcagaggctaagtatcctcgagaagaagttgaaggccacatctactatgcgcaattctgcgccttcgcccgcaatctcataagtgaaacttctgaggaagacccaacgacgcaagaggcaaatgccctggagatcaggactcatttgagagatcaagcaaccgagcatataaactctgcacggagactctttgtcaaatatcaatctactcgtgtcctggagccagaacttgaagttgccgagaagatgcttcgtgacgctatcttctacaccaaagtatcagaagaggagatgaaagccgtgtatcgcgcaatgtctagagagttcctaggcacagggcattggtacacatgtgagaacggccacccgtttactgttggtgaatgtggcatgcccatgcagcaagccagatgccctgaatgtaatgccccagttggaggagcacatcatcaagcagccgatggtgtcagacgtgcggatgagatcgaggagatggcgcgggatatgggtcggatggatatctga

SEQ ID NO: 30395 - protein, 1945 aa, Muscodor strobelii
  misc_feature: SGI Peptide ID NO. 570453
  misc_feature (11)..(31): Pfam Id: PF00642 Pfam Desc: Zinc finger C-x8-C-x5-C-x3-H type (and similar)
  misc_feature (9)..(1945): NCBI GI: 70989597 Blast Desc: NF-X1 finger and helicase domain protein [Aspergillus fumigatus Af293] gi|66847279|gb|EAL87610.1| NF-X1 finger and helicase domain protein, [Aspergillus fumigatus Af293]
  misc_feature (9)..(1945): NCBI GI: 159129055 Blast Desc: NF-X1 finger and helicase domain protein, [Aspergillus fumigatus A1163]
  misc_feature (7)..(1934): NCBI GI: 119480227 Blast Desc: NF-X1 finger and helicase protein, [Neosartorya fischeri NRRL 181] gi|119408296|gb|EAW18245.1| NF-X1 finger and helicase protein, [Neosartorya fischeri NRRL 181]
  misc_feature (70)..(1945): NCBI GI: 121710124 Blast Desc: NF-X1 finger and helicase domain protein, [Aspergillus clavatus NRRL 1] gi|119400828|gb|EAW11252.1| NF-X1 finger and helicase domain protein, [Aspergillus clavatus NRRL 1]
  misc_feature (11)..(1935): NCBI GI: 255936813 Blast Desc: Pc13g10110 [Penicillium chrysogenum Wisconsin 54-1255] gi|211584053|emb|CAP92080.1| Pc13g10110 [Penicillium chrysogenum Wisconsin 54-1255]
  misc_feature (4)..(1945): NCBI GI: 258564538 Blast Desc: [Uncinocarpus reesii 1704] gi|237908521|gb|EEP82922.1| [Uncinocarpus reesii 1704]
  misc_feature (410)..(1935): NCBI GI: 242803834 Blast Desc: DNA-binding protein smubp-2, [Talaromyces stipitatus ATCC 10500] gi|218717598|gb|EED17019.1| DNA-binding protein smubp-2, [Talaromyces stipitatus ATCC 10500]
  misc_feature (11)..(1225): NCBI GI: 46110813 Blast Desc: FG02288.1 [Gibberella zeae PH-1]
  misc_feature (8)..(1349): NCBI GI: 145247690 Blast Desc: An12g10480 [Aspergillus niger] gi|134080835|emb|CAK41395.1| protein product [Aspergillus niger]
  misc_feature (8)..(1313): NCBI GI: 212539724 Blast Desc: NF-X1 finger and helicase domain protein, [Penicillium marneffei ATCC 18224] gi|210067316|gb|EEA21408.1| NF-X1 finger and helicase domain protein, [Penicillium marneffei ATCC 18224]
MSSAATIRKPCFQFKTGKCKFGARCKFSHDVTVTTHDRVAGKREDNDLREWKRLLYQGRHAPHRTTCERFFELAAKLVDCDPGISQELVKLLADEDGLAFIKFLTDTNIPNASNYRTKKDLWAKQVRPLFAVVTHPCVADSAVLEQHVATIYNFMQGIASRRMKILFNFVIDLAASTIITGDVTTVDDEISKPVLVESSLIVLSKMLDCNTSNIIDEGFKNICQQLSTVLQTFQQSQDGYLSQKCISYINRRLGVGDELAISQTPTKQNVGSRAQFSMPKTLPGRRHDNDHVNIADISILPTHNEVVSTQGEYLPTNDPSSFHHPGIIGRIDREFRLLREDTIGQLRDVVHDQLKILQGQGVDARPGDRHSLRTYTYHDAEVAGVSFEQIAGLDLLVRFTQPFQKGNLHRRTDWWTQSKRLQPGALVCVISQNGSVLFCVVSNATTVTKDQPPQWRRTERPDNDQKKDINSLADDTSFSYVHLNIAETKDSAIQQALRWYQNIGPSHRHCIIEFPGVLLASFHHTLEALKTMSESPDVPFINLIAPTTRNSSIADISPPRYSTKAGFDFDLTCLTNNDTQLKFSSTQHLSPQVLTKHSGLDETQSLALLNSLSRELALVQGPPGTGKSFTGEKIIKVLLANKKKGDIGPILCVCYTNHALDQLLEHLLDEGVKQIIRIGSRSKSERLEKVNLRCVAASADRTWFERNTLRNTKNDLTEHQINLSGSLQELRNCIGQSALQAYLEENHPGHHHALFGTSVDDEGWEEVRRRPHRLLDQWLKGGNNLAINLAPRRPEALFEADIWSLTSTERQRLYIYWQRQIRDPIINNFIREYHSYIRTKSSRERVVQEVDLRCLLAADVVGVTTTGLARKLDLLRKMRCKVLMCEEAGEVLEAHNLTALLPTIEHCILIGDHLQLRPQIQNYDLNSTNPRGAQFSLDVSLFERLVNPFRDEDQKIPYDTLETQRRMHPSISELIRSTLYPSLQDDDTVGQYPEVIGMKQRLFWLHHIEKEDRVAAGKTQDPTSTSHTNSFEVAITMSLVQHLIRQGTYAPDDIAVITPYLGQLHRLRREMQASFQISVGERDLEDLAAIDAGNIGQQDMPDILTISAPNRTTLLKSVRLATVDNFQGEEAKVVVISLVRSNDEQRCGFLSTPNRINVLLSRAKHGMYLIGNADTYRNVPMWAKVIEILEKRNNIGSRLLLQCPRHPDHPIGVSTPDHFLQFSPEGGCHRHCDRRLSCGHACINRCHSQILHSAVKCLERCPRQKKGCDHPCRLSCGDACEPKCTERLKGLNIMLPCGHIVTQALCWQSQELSAIICKERVAKTVPGCRHTVTVPCHVDVTTSKYRCTAVCGDPQPCGHDCRSQCQFCKDKKDGSVVAEHHGVCKQRCDRSYTACRHTCQKSCHGQEGCPPCSSPCEIRCSHSKCSKQCHEPCAPCAEQHCSSACSHQQCNMPCAAPCDWVPCSRRCEKLLKCGHQCPSICGEACPPPEYCHSCCSEDVKATVVDFIMATEYRDVILDEDPCIFPDCGHFLTKSNMDGLMDLKAHYKMSAEDSPSPVALSSSSMPFSMDEIKSCPTCRGSLRSIARYGRIIRRATLDEATKKFIAWSHTEFMKLADKLIDIQKDLSQADAPSLKPNQTRPSKLVLATSRLQQLRKIGEWCGGSRYNAAIRLWHEISAFLGSVRKEEQPLQRVANFVRHAMRERKSTGEFVFDESVLQVKGVLQATSLLLRCEVIMLTDFMTIRQPLLTTRPELRLDFTLGMKECEKLVNMAAEAKYPREEVEGHIYYAQFCAFARNLISETSEEDPTTQEANALEIRTHLRDQATEHINSARRLFVKYQSTRVLEPELEVAEKMLRDAIFYTKVSEEEMKAVYRAMSREFLGTGHWYTCENGHPFTVGECGMPMQQARCPECNAPVGGAHHQAADGVRRADEIEEMARDMGRMDI

SEQ ID NO: 30396 - DNA, 387 bp, Muscodor strobelii
  misc_feature: SGI EST ID NO. CUFF.71905.0
  misc_feature: Variant of the nucleotide sequence at SEQ ID NO 30394
ccgctactcaactaaagcaggttttgacttcgacctcacatgtctaacaaataatgacacccagttaaaattctcatcgacccagcatctaagccctcaggtgctcacgaagcattctggccttgatgagacgcagtctttagcacttctcaatagtctgtcacgtgagcttgccctagttcaaggaccgcccggaacaggtaaaagcttcacaggcgaaaagataatcaaagtcttacttgcaaacaagaaaaagggagatattggccccatactatgtgtttgctacacaaatcatgccctcgaccagctactagagcacctactagacgaaggtgtcaaacaaatcatacgcatcggttctcgctccaagtctgagcggcttga

SEQ ID NO: 30397 - DNA, 1833 bp, Muscodor strobelii
  misc_feature: SGI cDNA ID NO. 570454
  misc_feature: Encodes the peptide sequence at SEQ ID NO 30398
atggagcacgagaaggttattgtcgctgatggcgaccctagatctccggatcatgctggctcggatttgtcgaatgatcacgatgcgaggcccgtgtccaatggcacagaagctacacaggacggagtcaaaggcatggaagccatttctatggcatggtctaaatggggtttgattgcagcctacgtaggcatttttctcatggcatttgcgacttcgctggagggacaggtgacatactcggtttctgtcttcgcaacgagtgcattcagtagccattcgctcatcgccacggtctacgtgattcagggtgtcgttaacgccgtaataaagccgccaatggctaaaattgccgacgttttcgggcgtctcgaggcattcaccatttgcattttcatctatgtgcttggatatatccaacaggctgcatcgaagaacgtgcagaccttcgcggcggcgcagatcttctactcggccggctccacgggcctgcaaattctccagcaggtcttcattgccgacacaagcgatatgccgaaccgtgccctgttctctagcctaccggacacgcctttcctcgtcaccgtctggatcggccctatcatcggcgcgatgatcatcgctacatccacatggcgctgggcttatggtctttgggccattgttctaccggccgtcttcctcccacttgccctgacgctcttcctgaacggccgtcgcgccaagcgcatgggtctccaaccacctaagcgcaactatgccgcgggtctcagtcccttcggcctcgtcaagaagctctggaatgatctcgacatcggcggcattatcttgctcagcgccgcattcgctttgatcctcatcccgctaacattgaccaagactactcctggcggttggcggagtcctaaaattatcgcattgattgtgctaggtttcgtgttgctagtagtgtttccattctgggagggtagcaagaaacttgcgcctcaccctctcattcctctcgaattgctgaagtctcggactttctctgctggttgcgcgatcggatttttctattttttcgtcttctacctatcggtgcagccatacttttactcttatctcatggtagtccagcaccaaggcattacagcggcaggccatatcacgcagacattcagcttcacatcaacagtgacatcggtcgtagtttcgcttttgatcaaatacactaaacactacaaatacttcgtgacatccggttccctcatctatcttttgggtgtgggtcttatgatccgataccgcacggagaacacgaccgttgggtcactggtgggaacccagattgctgttggcatcggtggtggtatgttaaacgtaccggcgcagttaggcgtccaggcgtcggcgagtcaccaacaggtcgcaaccgccactgccgtcttcctaaccttagtcgagattggcggcgcagttggcgctgcagtctcgggagccgtgtggacacaactggttccggcaaagctggagtcatacctaccttcttctgcccaagctgatgctaaaactatatttggcgacgtcagtgttgcaggcaactataccatgtaccccctcggcagtccagaacgcaccgccatcaaccgtagctaccaggagactatgcaagtgctcctcactatagctatctcgctctgcgtgccgcttgtgctattgtcattcctcatgcggaattacaagcttgacaccgtagagcaaggcgtaaagggcaaggtcattggtggcgaagttgatgaggatgaaaagataaggacggctgaagaaacaccaccggtggatcgaggataa

SEQ ID NO: 30398 - protein, 610 aa, Muscodor strobelii
  misc_feature: SGI Peptide ID NO. 570454
  misc_feature (65)..(489): Pfam Id: PF07690 Pfam Desc: Major Facilitator Superfamily
  misc_feature (65)..(292): Pfam Id: PF07690 Pfam Desc: Major Facilitator Superfamily
  misc_feature (297)..(489): Pfam Id: PF07690 Pfam Desc: Major Facilitator Superfamily
  misc_feature (12)..(597): NCBI GI: 154290097 Blast Desc: BC1G_15828 [Botryotinia fuckeliana B05.10] gi|150848462|gb|EDN23655.1| BC1G_15828 [Botryotinia fuckeliana B05.10]
  misc_feature (10)..(608): NCBI GI: 256721592 Blast Desc: NECHADRAFT_78541 [Nectria haematococca mpVI 77-13-4]
  misc_feature (10)..(582): NCBI GI: 121715300 Blast Desc: siderochrome-iron transporter (MirC), [Aspergillus clavatus NRRL 1] gi|119403416|gb|EAW13833.1| siderochrome-iron transporter (MirC), [Aspergillus clavatus NRRL 1]
  misc_feature (1)..(610): NCBI GI: 255948288 Blast Desc: Pc22g08990 [Penicillium chrysogenum Wisconsin 54-1255] gi|211591928|emb|CAP98187.1| Pc22g08990 [Penicillium chrysogenum Wisconsin 54-1255]
  misc_feature (10)..(580): NCBI GI: 169769428 Blast Desc: [Aspergillus oryzae RIB40] gi|238501898|ref|XP_002382183.1| siderochrome-iron transporter MirC [Aspergillus flavus NRRL3357] gi|83767042|dbj|BAE57182.1|
  misc_feature (12)..(581): NCBI GI: 119480333 Blast Desc: siderochrome-iron transporter MirC [Neosartorya fischeri NRRL 181] gi|119408349|gb|EAW18298.1| siderochrome-iron transporter MirC [Neosartorya fischeri NRRL 181]
  misc_feature (28)..(597): NCBI GI: 145611774 Blast Desc: MGG_00133 [Magnaporthe grisea 70-15] gi|145019022|gb|EDK03301.1| MGG_00133 [Magnaporthe grisea 70-15]
  misc_feature (37)..(604): NCBI GI: 146322832 Blast Desc: siderochrome-iron transporter MirC [Aspergillus fumigatus Af293] gi|129556824|gb|EAL87664.2| siderochrome-iron transporter MirC [Aspergillus fumigatus Af293] siderochrome-iron
  misc_feature (13)..(586): NCBI GI: 212532889 Blast Desc: siderochrome-iron transporter MirC [Penicillium marneffei ATCC 18224] gi|210071965|gb|EEA26054.1| siderochrome-iron transporter MirC [Penicillium marneffei ATCC
  misc_feature (10)..(589): NCBI GI: 169615308 Blast Desc: SNOG_10811 [Phaeosphaeria nodorum SN15] gi|111061085|gb|EAT82205.1| SNOG_10811 [Phaeosphaeria nodorum SN15]
MEHEKVIVADGDPRSPDHAGSDLSNDHDARPVSNGTEATQDGVKGMEAISMAWSKWGLIAAYVGIFLMAFATSLEGQVTYSVSVFATSAFSSHSLIATVYVIQGVVNAVIKPPMAKIADVFGRLEAFTICIFIYVLGYIQQAASKNVQTFAAAQIFYSAGSTGLQILQQVFIADTSDMPNRALFSSLPDTPFLVTVWIGPIIGAMIIATSTWRWAYGLWAIVLPAVFLPLALTLFLNGRRAKRMGLQPPKRNYAAGLSPFGLVKKLWNDLDIGGIILLSAAFALILIPLTLTKTTPGGWRSPKIIALIVLGFVLLVVFPFWEGSKKLAPHPLIPLELLKSRTFSAGCAIGFFYFFVFYLSVQPYFYSYLMVVQHQGITAAGHITQTFSFTSTVTSVVVSLLIKYTKHYKYFVTSGSLIYLLGVGLMIRYRTENTTVGSLVGTQIAVGIGGGMLNVPAQLGVQASASHQQVATATAVFLTLVEIGGAVGAAVSGAVWTQLVPAKLESYLPSSAQADAKTIFGDVSVAGNYTMYPLGSPERTAINRSYQETMQVLLTIAISLCVPLVLLSFLMRNYKLDTVEQGVKGKVIGGEVDEDEKIRTAEETPPVDRG

SEQ ID NO: 30399 - DNA, 2759 bp, Muscodor strobelii
  misc_feature: SGI EST ID NO. CUFF.71998.0
  misc_feature: Variant of the nucleotide sequence at SEQ ID NO 30397
agcagatctaatctgataaaatccattccctcgtctaccatcggcgtgagcgcatgaggctctgcatatacttccttaagtattgacatcttgtcaacctgggtttccggctcaaggtctccatcccgtttgtttgcctggcagtttttggcctgtgctattcgatgttttggtcgtgccgttctatatcgtccctcgtgccctctttcctggactcacggcaacaaactgacgaataccacctccaacatcgagcctcgttcgctcaagatggagcacgagaaggttattgtcgctgatggcgaccctagatctccggatcatgctggctcggatttgtcgaatgatcacgatgcgaggcccgtgtccaatggcacagaagctacacaggacggagtcaaaggcatggaagccatttctatggcatggtctaaatggggtttgattgcagcctacgtaggcatttttctcatggcatttgcgacttcgctggagggacaggtgacatactcggtttctgtcttcgcaacgagtgcattcagtagccattcgctcatcgccacggtctacgtgattcagggtgtcgttaacggtaagccaaaatccatgaatgagagcccaggatgtttggaacgcaagagctgcgaataatgtgtcgtgctgatatttctatcactccgcagccgtaataaagccgccaatggctaaaattgccgacgttttcgggcgtctcgaggcattcaccatttgcattttcatctatgtgcttggatatatccaacaggctgcatcgaagaacgtgcagaccttcgcggcggcgcagatcttctactcggccggctccacgggcctgcaaattctccagcaggtcttcattgccgacacaagcgatatgccgaaccgtgccctgttctctagcctaccggacacgcctttcctcgtcaccgtctggatcggccctatcatcggcgcgatgatcatcgctacatccacatggcgctgggcttatggtctttgggccattgttctaccggccgtcttcctcccacttgccctgacgctcttcctgaacggccgtcgcgccaagcgcatgggtctccaaccacctaagcgcaactatgccgcgggtctcagtcccttcggcctcgtcaagaagctctggaatgatctcgacatcggcggcattatcttgctcagcgccgcattcgctttgatcctcatcccgctaacattgaccaagactactcctggcggttggcggagtcctaaaattatcgcattgattgtgctaggtttcgtgttgctagtagtgtttccattctgggagggtagcaagaaacttgcgcctcaccctctcattcctctcgaattgctgaagtctcggactttctctgctggttgcgcgatcggatttttctattttttcgtcttctacctatcggtgcagccatacttttactcttatctcatggtagtccagcaccaaggcattacagcggcaggccatatcacgcagacattcagcttcacatcaacagtgacatcggtcgtagtttcgcttttgatcaaatacactaaacactacaaatacttcgtgacatccggttccctcatctatcttttgggtgtgggtcttatgatccgataccgcacggagaacacgaccgttgggtcactggtgggaacccagattgctgttggcatcggtggtggtatgttaaacgtaccggcgcagttaggcgtccaggcgtcggcgagtcaccaacaggtcgcaaccgccactgccgtcttcctaaccttagtcgagattggcggcgcagttggcgctgcagtctcgggagccgtgtggacacaactggttccggcaaagctggagtcatacctaccttcttctgcccaagctgatgctaaaactatatttggcgacgtcagtgttgcaggcaactataccatgtaccccctcggcagtccagaacgcaccgccatcaaccgtagctaccaggagactatgcaagtgctcctcactatagctatctcgctctgcgtgccgcttgtgctattgtcattcctcatgcggaattacaagcttgacaccgtagagcaaggcgtaaagggcaaggtcattggtggcgaagttgatgaggatgaaaagataaggacggctgaagaaacaccaccggtggatcgaggataacaaatcacgtaatctctgggatagataatagtattgtctcggatagacgatagtaccgtctttcgggacgacacaccggggacaaaggtgcgcaacacaccgcaatatttgtattctatgcgattacgtgtccgccagggtttggactaatatctaggcgaagacgccagtcccttatcatattgtacataattaactatatcctttgaagctgcgcctatgacgaagaaaacctgcctgaggttgttccatttgcttttgtccctgatcaggattcagttgaacggacgtagctgttgttcgccctctctttcctttgctgtctctctggaataatcatacgacaatcgccatctccactgagtcaatcgtaatctataactagtggcttaaagcagagacagtctaggagtgggttgaactccagagcagatgtataaagcacaggtatcgctggactcattcatcaagtacaagtggattcacaagacatttgcaaagactctgtcttgtccactcaagaatcttttaatgacgcgatttggttcagtgggctttagtttcc

SEQ ID NO: 30400 - DNA, 2178 bp, Muscodor strobelii
  misc_feature: SGI cDNA ID NO. 570455
  misc_feature: Encodes the peptide sequence at SEQ ID NO 30401
atgtcaggtgtagttgtgcagcgatcatgtgatgactgcagagccagaaaagtgaggtgcgatcgtggctcaccctgctctcattgtcgagctgcaggcttagtatgccgtaccaccgcgcaacgcgcaaaggagccaagagaccggatacagattacgaaacaatatgagtctaaaatcgatcgcattgaaagccgattggcaaatatcgaagaattgctgaggtcctcgagcggacaatctgggcaagtatgtgttcgttctcatacaaagcacacacctccggatctcgatatcgattcaatttctgatcacaatgacgatttgaacacttccacaccgccagccggcgatctcggcctccatgtagagtctttggctgcaaaagctgttctggagcagactgtcgatcgcgaccttgccattcggcatgatgcagaacttatgtcggttttgcaaactttgcgtagcataaccaaacgcacacagctcgatgaatcggaattaccacacctaaatgttacattcgtaggtacagctcctgagaaagaattgcttccacgctgggcgcaggtcaagccattattggaaagagcagagagaatgaagcccatgtcttttaacatgttgacatcttcagtcttcgataatttttgcaatgcatgccggtctctatttggacagaatcaaggagggacgacgatagacaagattctagtctatgccgggatgtctaatctttgctacgaaatgagtggtatagacgatggaacatcagccttctattatcatgacctgggcaggcgattctgttctttattgctactagccctggagaagttttccgtgatggtgcccccgtcactgaagactgtcgaggccctacaagtcgcaacgttggcggctgtcggcatgtgcaagccgtctctatcgtggtccttatcttgtaccgctgctcgaatgtgccaaatgcttggctataatcgtatgtcgcacgttaaccccgactcggaccctatgtatagtcgtaaaatcatggtcttctggagtatatatgccttggaccgaaacaattcgcttcgtcttggtcatgcacctgctatccaggattatgacatcaacacaccaatgatgacagtgggaaatggagacctaccggcaataatcgctttaatcacatactgggtagaatgtgggagagttcaaggcaaaatatgcacacaactgtatgggcccgccgtctctaaacttgaatctggagagagagctcgacttgcagagaagttcgcacaagaactcggcgaggtatacgaaggcatgatgaaagtgcgtatcaatccaacaatcttaaaaatcagcgacattaacggattttgtcttcaggcagactcactcgccactgtgctgccgcgtgcgggatacggaccaaatataaaacatgctcagctttggataggagggaacgagatgacgtacttaaccactttgacaacggctctatgtgccattcctctggatcatcctcgcagatttcgcgccatcgatagcgctcgagagtatcttcgccttacccgagatctcagcaagacttatagtagcaacgtatataattggacagcgttctgtcactggatcatcttgcgcgcgcctctgactccgtttacgggcatattctgcaatgtcctggccaatcaacagacttccaaagacgacttgcagctgcttgacgacttcgttgcttcgcttcgaccagcaagtgaggtctctgatggtgtcgagaaactctgccagctctgttcgatcttcgtcaaagctgcacacgcatacgtgaaagctaaagcacgacaacagtccacattgaacagcgatagctcagtcgctcaatttcccgagcaagttctgcaaccggctataggtgaattcaatggccacttgtctgcactaggtttcttcagccagccatctgctatttctcaaaacggacagactatgacagacaactttagtctaaatagtatagtctttagtggcatagaaggtcaagatcagtcttttgatgttacgcaatggcaagactggtatacagggaatgtatcaatgtatggattgctggaacaagacttcggagatcttccagactttacgtttgggtcctccaccgaccatcatgcaacatag

SEQ ID NO: 30401 - protein, 725 aa, Muscodor strobelii
  misc_feature: SGI Peptide ID NO. 570455
  misc_feature (8)..(46): Pfam Id: PF00172 Pfam Desc: Fungal Zn(2)-Cys(6) binuclear cluster domain
  misc_feature (288)..(385): Pfam Id: PF04082 Pfam Desc: Fungal specific transcription factor domain
  misc_feature (7)..(708): NCBI GI: 121718950 Blast Desc: fungal specific transcription factor domain protein [Aspergillus clavatus NRRL 1] gi|119404441|gb|EAW14817.1| fungal specific transcription factor domain protein [Aspergillus NRRL 1]
  misc_feature (6)..(711): NCBI GI: 261353371 Blast Desc: fungal specific transcription factor domain-containing protein [Verticillium albo-atrum VaMs.102]
  misc_feature (10)..(708): NCBI GI: 70985098 Blast Desc: C6 transcription factor [Aspergillus fumigatus Af293] gi|66845683|gb|EAL86017.1| C6 transcription factor, [Aspergillus fumigatus Af293]
  misc_feature (10)..(708): NCBI GI: 159126022 Blast Desc: C6 transcription factor, [Aspergillus fumigatus A1163]
  misc_feature (9)..(711): NCBI GI: 255955827 Blast Desc: Pc21g16600 [Penicillium chrysogenum Wisconsin 54-1255] gi|211590377|emb|CAP96557.1| Pc21g16600 [Penicillium chrysogenum Wisconsin 54-1255]
  misc_feature (16)..(711): NCBI GI: 212539508 Blast Desc: C6 transcription factor, [Penicillium marneffei ATCC 18224] gi|210067208|gb|EEA21300.1| C6 transcription factor, [Penicillium marneffei ATCC 18224]
  misc_feature (40)..(705): NCBI GI: 189198215 Blast Desc: fungal specific transcription factor domain containing protein [Pyrenophora tritici-repentis Pt-1C-BFP] gi|187981393|gb|EDU48019.1| fungal specific transcription factor
  misc_feature (15)..(708): NCBI GI: 258568362 Blast Desc: [Uncinocarpus reesii 1704] gi|237906371|gb|EEP80772.1| [Uncinocarpus reesii 1704]
  misc_feature (14)..(711): NCBI GI: 242804326 Blast Desc: C6 transcription factor, [Talaromyces stipitatus ATCC 10500] gi|218717697|gb|EED17118.1| C6 transcription factor, [Talaromyces stipitatus ATCC 10500]
  misc_feature (17)..(708): NCBI GI: 116193987 Blast Desc: CHGG_06711 [Chaetomium globosum CBS 148.51] gi|88182624|gb|EAQ90092.1| CHGG_06711 [Chaetomium globosum CBS 148.51]
MSGVVVQRSCDDCRARKVRCDRGSPCSHCRAAGLVCRTTAQRAKEPRDRIQITKQYESKIDRIESRLANIEELLRSSSGQSGQVCVRSHTKHTPPDLDIDSISDHNDDLNTSTPPAGDLGLHVESLAAKAVLEQTVDRDLAIRHDAELMSVLQTLRSITKRTQLDESELPHLNVTFVGTAPEKELLPRWAQVKPLLERAERMKPMSFNMLTSSVFDNFCNACRSLFGQNQGGTTIDKILVYAGMSNLCYEMSGIDDGTSAFYYHDLGRRFCSLLLLALEKFSVMVPPSLKTVEALQVATLAAVGMCKPSLSWSLSCTAARMCQMLGYNRMSHVNPDSDPMYSRKIMVFWSIYALDRNNSLRLGHAPAIQDYDINTPMMTVGNGDLPAIIALITYWVECGRVQGKICTQLYGPAVSKLESGERARLAEKFAQELGEVYEGMMKVRINPTILKISDINGFCLQADSLATVLPRAGYGPNIKHAQLWIGGNEMTYLTTLTTALCAIPLDHPRRFRAIDSAREYLRLTRDLSKTYSSNVYNWTAFCHWIILRAPLTPFTGIFCNVLANQQTSKDDLQLLDDFVASLRPASEVSDGVEKLCQLCSIFVKAAHAYVKAKARQQSTLNSDSSVAQFPEQVLQPAIGEFNGHLSALGFFSQPSAISQNGQTMTDNFSLNSIVFSGIEGQDQSFDVTQWQDWYTGNVSMYGLLEQDFGDLPDFTFGSSTDHHAT

SEQ ID NO: 30402 - DNA, 2181 bp, Muscodor strobelii
  misc_feature: SGI EST ID NO. CUFF.71925.2
  misc_feature: Variant of the nucleotide sequence at SEQ ID NO 30400
ttacgaaacaatatgagtctaaaatcgatcgcattgaaagccgattggcaaatatcgaagaattgctgaggtcctcgagcggacaatctgggcaagtatgtgttcgttctcatacaaagcacacacctccggatctcgatatcgattcaatttctgatcacaatgacgatttgaacacttccacaccgccagccggcgatctcggcctccatgtagagtctttggctgcaaaagctgttctggagcagactgtcgatcgcgaccttgccattcggcatgatgcagaacttatgtcggttttgcaaactttgcgtagcataaccaaacgcacacagctcgatgaatcggaattaccacacctaaatgttacattcgtaggtacagctcctgagaaagaattgcttccacgctgggcgcaggtcaagccattattggaaagagcagagagaatgaagcccatgtcttttaacatgttgacatcttcagtcttcgataatttttgcaatgcatgccggtctctatttggacagaatcaaggagggacgacgatagacaagattctagtctatgccgggatgtctaatctttgctacgaaatgagtggtatagacgatggaacatcagccttctattatcatgacctgggcaggcgattctgttctttattgctactagccctggagaagttttccgtgatggtgcccccgtcactgaagactgtcgaggccctacaagtcgcaacgttggcggctgtcggcatgtgcaagccgtctctatcgtggtccttatcttgtaccgctgctcgaatgtgccaaatgcttggctataatcgtatgtcgcacgttaaccccgactcggaccctatgtatagtcgtaaagtaagtaatcgtgagagagaaaacatttataaagacacataactcctatgaagatgatataagatcggggcgaaaaaacaacttatcgttaactgacctgccctccgtgtgttgattgaagaatcagacatcacgcacactcggaagaaactaatactcattcttcactcagatcatggtcttctggagtatatatgccttggaccgaaacaattcgcttcgtcttggtcatgcacctgctatccaggattatgacatcaacacaccaatgatgacagtgggaaatggagacctaccggcaataatcgctttaatcacatactgggtagaatgtgggagagttcaaggcaaaatatgcacacaactgtatgggcccgccgtctctaaacttgaatctggagagagagctcgacttgcagagaagttcgcacaagaactcggcgaggtatacgaaggcatgatgaaagcagactcactcgccactgtgctgccgcgtgcgggatacggaccaaatataaaacatgctcagctttggataggagggaacgagatgacgtacttaaccactttgacaacggctctatgtgccattcctctggatcatcctcgcagatttcgcgccatcgatagcgctcgagagtatcttcgccttacccgagatctcagcaagacttatagtagcaacgtatataattggacagcgttctgtcactggatcatcttgcgcgcgcctctgactccgtttacgggcatattctgcaatgtcctggccaatcaacagacttccaaagacgacttgcagctgcttgacgacttcgttgcttcgcttcgaccagcaagtgaggtctctgatggtgtcgagaaactctgccagctctgttcgatcttcgtcaaagctgcacacgcatacgtgaaagctaaagcacgacaacagtccacattgaacagcgatagctcagtcgctcaatttcccgagcaagttctgcaaccggctataggtgaattcaatggccacttgtctgcactaggtttcttcagccagccatctgctatttctcaaaacggacagactatgacagacaactttagtctaaatagtatagtctttagtggcatagaaggtcaagatcagtcttttgatgttacgcaatggcaagactggtatacagggaatgtatcaatgtatggattgctggaacaagacttcggagatcttccagactttacgtttgggtcctccaccgaccatcatgcaacatagatcgagcaaaataagctagttcaattttcatccgtgaagaaa

SEQ ID NO: 30403 - DNA, 2121 bp, Muscodor strobelii
  misc_feature: SGI cDNA ID NO. 570456
  misc_feature: Encodes the peptide sequence at SEQ ID NO 30404
atgtcaggtgtagttgtgcagcgatcatgtgatgactgcagagccagaaaagtgaggtgcgatcgtggctcaccctgctctcattgtcgagctgcaggcttagtatgccgtaccaccgcgcaacgcgcaaaggagccaagagaccggatacagattacgaaacaatatgagtctaaaatcgatcgcattgaaagccgattggcaaatatcgaagaattgctgaggtcctcgagcggacaatctgggcaagtatgtgttcgttctcatacaaagcacacacctccggatctcgatatcgattcaatttctgatcacaatgacgatttgaacacttccacaccgccagccggcgatctcggcctccatgtagagtctttggctgcaaaagctgttctggagcagactgtcgatcgcgaccttgccattcggcatgatgcagaacttatgtcggttttgcaaactttgcgtagcataaccaaacgcacacagctcgatgaatcggaattaccacacctaaatgttacattcgtaggtacagctcctgagaaagaattgcttccacgctgggcgcaggtcaagccattattggaaagagcagagagaatgaagcccatgtcttttaacatgttgacatcttcagtcttcgataatttttgcaatgcatgccggtctctatttggacagaatcaaggagggacgacgatagacaagattctagtctatgccgggatgtctaatctttgctacgaaatgagtggtatagacgatggaacatcagccttctattatcatgacctgggcaggcgattctgttctttattgctactagccctggagaagttttccgtgatggtgcccccgtcactgaagactgtcgaggccctacaagtcgcaacgttggcggctgtcggcatgtgcaagccgtctctatcgtggtccttatcttgtaccgctgctcgaatgtgccaaatgcttggctataatcgtatgtcgcacgttaaccccgactcggaccctatgtatagtcgtaaaatcatggtcttctggagtatatatgccttggaccgaaacaattcgcttcgtcttggtcatgcacctgctatccaggattatgacatcaacacaccaatgatgacagtgggaaatggagacctaccggcaataatcgctttaatcacatactgggtagaatgtgggagagttcaaggcaaaatatgcacacaactgtatgggcccgccgtctctaaacttgaatctggagagagagctcgacttgcagagaagttcgcacaagaactcggcgaggtatacgaaggcatgatgaaagcagactcactcgccactgtgctgccgcgtgcgggatacggaccaaatataaaacatgctcagctttggataggagggaacgagatgacgtacttaaccactttgacaacggctctatgtgccattcctctggatcatcctcgcagatttcgcgccatcgatagcgctcgagagtatcttcgccttacccgagatctcagcaagacttatagtagcaacgtatataattggacagcgttctgtcactggatcatcttgcgcgcgcctctgactccgtttacgggcatattctgcaatgtcctggccaatcaacagacttccaaagacgacttgcagctgcttgacgacttcgttgcttcgcttcgaccagcaagtgaggtctctgatggtgtcgagaaactctgccagctctgttcgatcttcgtcaaagctgcacacgcatacgtgaaagctaaagcacgacaacagtccacattgaacagcgatagctcagtcgctcaatttcccgagcaagttctgcaaccggctataggtgaattcaatggccacttgtctgcactaggtttcttcagccagccatctgctatttctcaaaacggacagactatgacagacaactttagtctaaatagtatagtctttagtggcatagaaggtcaagatcagtcttttgatgttacgcaatggcaagactggtatacagggaatgtatcaatgtatggattgctggaacaagacttcggagatcttccagactttacgtttgggtcctccaccgaccatcatgcaacatag

SEQ ID NO: 30404 - protein, 706 aa, Muscodor strobelii
  misc_feature: SGI Peptide ID NO. 570456
  misc_feature (8)..(46): Pfam Id: PF00172 Pfam Desc: Fungal Zn(2)-Cys(6) binuclear cluster domain
  misc_feature (288)..(385): Pfam Id: PF04082 Pfam Desc: Fungal specific transcription factor domain
  misc_feature (7)..(689): NCBI GI: 121718950 Blast Desc: fungal specific transcription factor domain protein [Aspergillus clavatus NRRL 1] gi|119404441|gb|EAW14817.1| fungal specific transcription factor domain protein [Aspergillus NRRL 1]
  misc_feature (6)..(692): NCBI GI: 261353371 Blast Desc: fungal specific transcription factor domain-containing protein [Verticillium albo-atrum VaMs.102]
  misc_feature (10)..(689): NCBI GI: 70985098 Blast Desc: C6 transcription factor [Aspergillus fumigatus Af293] gi|66845683|gb|EAL86017.1| C6 transcription factor, [Aspergillus fumigatus Af293]
  misc_feature (10)..(689): NCBI GI: 159126022 Blast Desc: C6 transcription factor, [Aspergillus fumigatus A1163]
  misc_feature (16)..(692): NCBI GI: 212539508 Blast Desc: C6 transcription factor, [Penicillium marneffei ATCC 18224] gi|210067208|gb|EEA21300.1| C6 transcription factor, [Penicillium marneffei ATCC 18224]
  misc_feature (9)..(692): NCBI GI: 255955827 Blast Desc: Pc21g16600 [Penicillium chrysogenum Wisconsin 54-1255] gi|211590377|emb|CAP96557.1| Pc21g16600 [Penicillium chrysogenum Wisconsin 54-1255]
  misc_feature (15)..(689): NCBI GI: 258568362 Blast Desc: [Uncinocarpus reesii 1704] gi|237906371|gb|EEP80772.1| [Uncinocarpus reesii 1704]
  misc_feature (14)..(692): NCBI GI: 242804326 Blast Desc: C6 transcription factor, [Talaromyces stipitatus ATCC 10500] gi|218717697|gb|EED17118.1| C6 transcription factor, [Talaromyces stipitatus ATCC 10500]
  misc_feature (57)..(692): NCBI GI: 256722215 Blast Desc: NECHADRAFT_52369 [Nectria haematococca mpVI 77-13-4]
  misc_feature (34)..(689): NCBI GI: 145242366 Blast Desc: An09g04860 [Aspergillus niger] gi|134078348|emb|CAK40340.1| protein product [Aspergillus niger]
MSGVVVQRSCDDCRARKVRCDRGSPCSHCRAAGLVCRTTAQRAKEPRDRIQITKQYESKIDRIESRLANIEELLRSSSGQSGQVCVRSHTKHTPPDLDIDSISDHNDDLNTSTPPAGDLGLHVESLAAKAVLEQTVDRDLAIRHDAELMSVLQTLRSITKRTQLDESELPHLNVTFVGTAPEKELLPRWAQVKPLLERAERMKPMSFNMLTSSVFDNFCNACRSLFGQNQGGTTIDKILVYAGMSNLCYEMSGIDDGTSAFYYHDLGRRFCSLLLLALEKFSVMVPPSLKTVEALQVATLAAVGMCKPSLSWSLSCTAARMCQMLGYNRMSHVNPDSDPMYSRKIMVFWSIYALDRNNSLRLGHAPAIQDYDINTPMMTVGNGDLPAIIALITYWVECGRVQGKICTQLYGPAVSKLESGERARLAEKFAQELGEVYEGMMKADSLATVLPRAGYGPNIKHAQLWIGGNEMTYLTTLTTALCAIPLDHPRRFRAIDSAREYLRLTRDLSKTYSSNVYNWTAFCHWIILRAPLTPFTGIFCNVLANQQTSKDDLQLLDDFVASLRPASEVSDGVEKLCQLCSIFVKAAHAYVKAKARQQSTLNSDSSVAQFPEQVLQPAIGEFNGHLSALGFFSQPSAISQNGQTMTDNFSLNSIVFSGIEGQDQSFDVTQWQDWYTGNVSMYGLLEQDFGDLPDFTFGSSTDHHAT

SEQ ID NO: 30405 - DNA, 2181 bp, Muscodor strobelii; identical to SEQ ID NO: 30402
  misc_feature: SGI EST ID NO. CUFF.71925.2
  misc_feature: Variant of the nucleotide sequence at SEQ ID NO 30403

SEQ ID NO: 30406 - DNA, 3957 bp, Muscodor strobelii
  misc_feature: SGI cDNA ID NO. 570457
  misc_feature: Encodes the peptide sequence at SEQ ID NO 30407
atgtcccaaaaatgtcccagctgggtcgctcttctagaaacactaggaggattcgcagccaaagtcatgtcaccgcaagtttgctcagaaaagccagccgataaggaaaataggttggatggtactcggtcaagtccgaatccaagtacacgaagtctccagatccatgataagaccgaagagccttcagccggaaatgcaaaaaacgcagcaccaccagacggcgagaagaagggaagcttgcgagactactttagagttttccgatacgcggattgcctcgactgcgtattgtatgtggtcgcgctcactggtgctgtggccgctggagctgctctaccactgatgacattggtcttcggttcgtcggtctcttcttttagcaactttggcacgagccacgataatacagccagctttcgaagtgatatcaatcagttagtgctatacttcgtctatatctttgtcggtcgattcgccatcggctatgtagctaccctatccatatgtgttgcagcggccaggacaacaaactcgctaagaaaggcattcttggagagtttactcaggcaggaaatctctcatttcgacaaacaaggtaacggatctgtggcgactcaggtcacgactaatggcaatcgtgtgaatcaaggaatcgcagagaaactatacacctgtgtaatgggaatctctctgttcttctctgcgtttattgtcgctctaactgtacagtggaagcttgctctcattacgctgagtatagtgccagcaaatcttctagctgtgggtggttgctttgctctcgttaccccaattgagactcgcattggtaagatatattctgatgcggcaacaatcgctcaagatgcactcgcttctatcaaaaccattcacgcattcggagcgcaacggaagattgtcgacatttatgatgaatatttgcaaaaagcttataaggaaggcaagaaagagtcaatcttctatggaattctcttcagttctcagactttcttgacgatatctggcacggcgcttgcattctgggaaggacatcgattatttcaaagtgaagagattccaaatgtcggaactgttttcaccgtagtgctaagtgtcacgcttggggccacatctgtcttatactttcttcccacattttcggctttcaccaatgcttcttcggctgcttttgaattgttctccacgatcgacaaaccgtctgagcttgatccactctcgtctgaaggccgagaaccaatgagctgtaaaggagagatagaattccgcaatgtatccttcgcgtatcctacgcgaccaacagcacctgttctcaacaatctgagcctttgtatacctgctggaaagaccactgctctcgtcgggccaagtgggtgtggcaagtcaacgttggtcggcttgcttgaacgatggtaccagccttcatcagggcaaatcagccttgacggtgaggatattgcggcattaaatacaaaatggctacgcagcaggatcagacttgtacaacaagaaccgaccctctttcaagggactgtattccagaacgtcgccaaaggcttagttggcgcccagaggacgttatctgaagaagagcagatgcgactcgttcaagaggcatgcaaagctgccgacgcacaccaatttattgagacactacccttgggatatcacacgcaacttggagaaggtgcccgtatgcttagcggcggacagcggcaaaggatttcgatcgctagaagcattatttcgaaccctagagtcctactctgcgatgaagctactagtgcacttgatcctcgagcggagaaagttgtccaagacgcccttgatcgcgtttctcacaacaagacaacattagtgattgcacataagctcgcaaccgttatagcggctgacaatattgctgtaatgtcaggtggcagagttattgagcaaggtacacattctcaattgcttgagcttgatggtttatatgccgccatggtaagagcacaggacttgggtaatgaacctaagaatcaggattctactgaatcatctgatgagcgatccgataaggataattccgatgagagccatgatcaggcagtagctcttgaacgaacacaatcagaggcgatgcaggccgattcggcgtgcgacgctgagcagctgaccgccggcactcttggatattctctcatcaactgcatcgtcatcatgctaaaggaacactccgacctttataagctgtattccgttgttgcattggcgtacttgctcctaggtggcacttacccggcacaagctttgatcttctctcgtcttatcaaagtcttttctttacagggatcagaggcagtaaaacaagccaatttctattctctcctgttcttcatagtcgcgattgcaaatttgatcgggttcttttgcatcggtctcgctaccaatggaattgggcaggcactcacgtaccgctatcgacgtgagttgctggatcgaatggtaaaccaggatcaggactttttcgaccacccagagaactcatctggcgccttgacttcgaagctcacctccgtcccttcagcaatacaggaactgatgtctgccaatgctgggttgattgccaatgtagtggtcaatattctagctactggtattttgggcatcgcatttggttggaaactaggtcttactctagtcttcaccgggcttccgctcattgctggaagtggatacattcgcattcgattagatcaaaagctggagtcttctgtagacaagcaattcgcgagcagtgctagtctggctgcggaaacagttgcatcaattcgaacagtcagtcttctcacacttgaaagctcggttctcgatgagtatacgaaaaccctagatggcattgttgctagagtcatccgaaacttgataccgactctcataccgtattccttctcacaatctgctgatttcctcgtgctggcgctcgggttctggtacggatcgcggctagtcgccagtggcgaatatacagtcacacagtttttcgtcatatttatttcgatagtattcggcaatcaagctgctgctcaattcttcacttacacaacctcgattacgaaggcagaagggggtgcgaactacctgctatggctaaggaccttacaagctagtattcgcgagacagatgataatcgagatttgggtccaactggtgacgatatgtctgttggactggaaaaagtcgagtttcgatacaagcaacggaggtccacaaaggtcatacgagatatgactctcagtatcgagcccggaacgcatgctgcctttgtcggaccgtctggatgcggcaaaagcacaatcatatcactcatccagcggttttacgatcctacttctggtcgcatcacgttgaatggcaaggacctatctgagatgtcaccactgtcattccgccggtacttgtcgcttgttcagcaagaaccccctttgtatctcggatccgttcgtgacaatatcgcgatcggtttggagtacgagccatctgaagaagaaatccgcgaagcttgcagacaagccaacgttcttgaatttgtgtcttctttgccggaaggtctgaacacgccttgcggttcaaaaggattaagtttctccggcggtcagcgccaaaggatagctcttgcgagagcgctaattcgcaagccgcgtgtattgttgctcgacgaggcaacttctgcactcgacacccagaacgaacaaatcgtacgaaaggctctcgacgaggccgcatctactagaaccaccattgctgtggctcaccggcttagtactatccgccatgcggatgtgatctttgtaattgaagatggaaaaattgcagagatggggaagcacgaggagttgcaacggcacaggggcagatatcacgccatgtgtcttgcgcagtccctagatcaagcatag

SEQ ID NO: 30407 - protein, 1318 aa, Muscodor strobelii
  misc_feature: SGI Peptide ID NO. 570457
  misc_feature (97)..(379): Pfam Id: PF00664 Pfam Desc: ABC transporter transmembrane region
  misc_feature (751)..(1030): Pfam Id: PF00664 Pfam Desc: ABC transporter transmembrane region
  misc_feature (1103)..(1288): Pfam Id: PF00005 Pfam Desc: ABC transporter
  misc_feature (454)..(646): Pfam Id: PF00005 Pfam Desc: ABC transporter
  misc_feature (60)..(1317): NCBI GI: 225560423 Blast Desc: multidrug resistance protein [Ajellomyces capsulatus G186AR]
  misc_feature (62)..(1317): NCBI GI: 261193236 Blast Desc: multidrug resistance protein 3 [Ajellomyces dermatitidis SLH14081] gi|239589159|gb|EEQ71802.1| multidrug resistance protein 3 [Ajellomyces dermatitidis SLH14081]
  misc_feature (62)..(1317): NCBI GI: 239606565 Blast Desc: multidrug resistance protein 3 [Ajellomyces dermatitidis ER-3]
  misc_feature (76)..(1318): NCBI GI: 189198217 Blast Desc: multidrug resistance protein 1 [Pyrenophora tritici-repentis Pt-1C-BFP] gi|187981394|gb|EDU48020.1| multidrug resistance protein 1 [Pyrenophora tritici-repentis Pt-1C-BFP]
  misc_feature (45)..(1318): NCBI GI: 238485254 Blast Desc: ABC multidrug transporter, [Aspergillus flavus NRRL3357] gi|220698744|gb|EED55083.1| ABC multidrug transporter, [Aspergillus flavus NRRL3357]
  misc_feature (57)..(1318): NCBI GI: 119467388 Blast Desc: multidrug resistance protein 1, 2, 3 (p glycoprotein 1, 2, 3) [Neosartorya fischeri NRRL 181] gi|119405652|gb|EAW15603.1| multidrug resistance protein 1, 2, 3
  misc_feature (57)..(1318): NCBI GI: 70984523 Blast Desc: ABC multidrug transporter [Aspergillus fumigatus Af293] gi|66845395|gb|EAL85730.1| ABC multidrug transporter, [Aspergillus fumigatus Af293]
  misc_feature (86)..(1316): NCBI GI: 119474187 Blast Desc: multidrug resistance protein 1, 2, 3 (p glycoprotein 1, 2, 3) [Neosartorya fischeri NRRL 181] gi|119407122|gb|EAW17072.1| multidrug resistance protein 1, 2, 3
  misc_feature (74)..(1315): NCBI GI: 261361045 Blast Desc: multidrug resistance protein [Verticillium albo-atrum VaMs.102]
  misc_feature (86)..(1318): NCBI GI: 256733676 Blast Desc: NECHADRAFT_92084 [Nectria haematococca mpVI 77-13-4]
  misc_feature (150)..(1314): SWISSPROT Homolog: EC 3.6.3.44 Xenobiotic-transporting ATPase
MSQKCPSWVALLETLGGFAAKVMSPQVCSEKPADKENRLDGTRSSPNPSTRSLQIHDKTEEPSAGNAKNAAPPDGEKKGSLRDYFRVFRYADCLDCVLYVVALTGAVAAGAALPLMTLVFGSSVSSFSNFGTSHDNTASFRSDINQLVLYFVYIFVGRFAIGYVATLSICVAAARTTNSLRKAFLESLLRQEISHFDKQGNGSVATQVTTNGNRVNQGIAEKLYTCVMGISLFFSAFIVALTVQWKLALITLSIVPANLLAVGGCFALVTPIETRIGKIYSDAATIAQDALASIKTIHAFGAQRKIVDIYDEYLQKAYKEGKKESIFYGILFSSQTFLTISGTALAFWEGHRLFQSEEIPNVGTVFTVVLSVTLGATSVLYFLPTFSAFTNASSAAFELFSTIDKPSELDPLSSEGREPMSCKGEIEFRNVSFAYPTRPTAPVLNNLSLCIPAGKTTALVGPSGCGKSTLVGLLERWYQPSSGQISLDGEDIAALNTKWLRSRIRLVQQEPTLFQGTVFQNVAKGLVGAQRTLSEEEQMRLVQEACKAADAHQFIETLPLGYHTQLGEGARMLSGGQRQRISIARSIISNPRVLLCDEATSALDPRAEKVVQDALDRVSHNKTTLVIAHKLATVIAADNIAVMSGGRVIEQGTHSQLLELDGLYAAMVRAQDLGNEPKNQDSTESSDERSDKDNSDESHDQAVALERTQSEAMQADSACDAEQLTAGTLGYSLINCIVIMLKEHSDLYKLYSVVALAYLLLGGTYPAQALIFSRLIKVFSLQGSEAVKQANFYSLLFFIVAIANLIGFFCIGLATNGIGQALTYRYRRELLDRMVNQDQDFFDHPENSSGALTSKLTSVPSAIQELMSANAGLIANVVVNILATGILGIAFGWKLGLTLVFTGLPLIAGSGYIRIRLDQKLESSVDKQFASSASLAAETVASIRTVSLLTLESSVLDEYTKTLDGIVARVIRNLIPTLIPYSFSQSADFLVLALGFWYGSRLVASGEYTVTQFFVIFISIVFGNQAAAQFFTYTTSITKAEGGANYLLWLRTLQASIRETDDNRDLGPTGDDMSVGLEKVEFRYKQRRSTKVIRDMTLSIEPGTHAAFVGPSGCGKSTIISLIQRFYDPTSGRITLNGKDLSEMSPLSFRRYLSLVQQEPPLYLGSVRDNIAIGLEYEPSEEEIREACRQANVLEFVSSLPEGLNTPCGSKGLSFSGGQRQRIALARALIRKPRVLLLDEATSALDTQNEQIVRKALDEAASTRTTIAVAHRLSTIRHADVIFVIEDGKIAEMGKHEELQRHRGRYHAMCLAQSLDQA

SEQ ID NO: 30408 - DNA, 1234 bp, Muscodor strobelii
  misc_feature: SGI EST ID NO. CUFF.71932.0
  misc_feature: Variant of the nucleotide sequence at SEQ ID NO 30406
aaaaacgcagcaccaccagacggcgagaagaagggaagcttgcgagactactttagagttttccgatacgcggattgcctcgactgcgtattgtatgtggtcgcgctcactggtgctgtggccgctggagctgctctaccactgatgacattggtcttcggttcgtcggtctcttcttttagcaactttggcacgagccacgataatacagccagctttcgaagtgatatcaatcagttagtgctatacttcgtctatatctttgtcggtcgattcgccatcggctatgtagctaccctatccatatgtgttgcagcggccaggacaacaaactcgctaagaaaggcattcttggagagtttactcaggcaggaaatctctcatttcgacaaacaaggtaacggatctgtggcgactcaggtcacgactaatggcaatcgtgtgaatcaaggaatcgcagagaaactatacacctgtgtaatgggaatctctctgttcttctctgcgtttattgtcgctctaactgtacagtggaagcttgctctcattacgctgagtatagtgccagcaaatcttctagctgtgggtggttgctttgctctcgttaccccaattgagactcgcattgtaagtcgggaactccaatgatgcaattacgaagatactaaactccaaatctcttagggtaagatatattctgatgcggcaacaatcgctcaagatgcactcgcttctatcaaaaccattcacgcattcggagcgcaacggaagattgtcgacatttatgatgaatatttgcaaaaagcttataaggaaggcaagaaagagtcaatcttctatggaattctcttcagttctcagactttcttgacgatatctggcacggcgcttgcattctgggaaggacatcgattatttcaaagtgaagagattccaaatgtcggaactgttttcaccgtagtgctaagtgtcacgcttggggccacatctgtcttatactttcttcccacattttcggctttcaccaatgcttcttcggctgcttttgaattgttctccacgatcgacaaaccgtctgagcttgatccactctcgtctgaaggccgagaaccaatgagctgtaaaggagagatagaattccgcaatgtatccttcgcgtatcctacgcgaccaacagcacctgttctcaacaatctgagcctttgtatacctgctggaaagaccactgctctcg

SEQ ID NO: 30409 - DNA, 792 bp, Muscodor strobelii
  misc_feature: SGI cDNA ID NO. 570458
  misc_feature: Reduced expression when VOC is produced
  misc_feature: Encodes the peptide sequence at SEQ ID NO 30410
atggcttcgtctccctttaaattacccggagttgcaatcgttactggcgcggcagggacaggaatcggtgcagcggtcgcaaaggggtttgtacaatcaggatgccttgacattgtgatcacagacatcaaggatctcacctcgactagtgttgcactggtagagatcaatcctaacgtgcgcatcactctccgtcagggtgacatgacgagagactactttatcaataacctcgtcaaagatgcaattaaaaagtacggccgcatagactatcttgtcaactgcgccggtgcgtttggggagccgttgctctcgcatgaaacacctatatctgaattcgaccgcatcatcgacatcaacctcaaagccacatgggtcatgtctcgtgccgtgctggctcagatgttaaaacagcagtttcgacctcatccgaagcaaagaggcgccattgtgaatgtcgcaagtcagctcggcttggtagcgcggccgacagcagccccattttgtgcgtctaaggcagccgttattaatatgacgaaagcggatgcgattgattactcacgtaataagattagagtgaactgcgtatgcccggggattataaaaccacctgacacaattagctcagcagagttcgaaggtacatatatggagactgtagatattgcgcccatgtacaggatgggaacaccttctgaagtggctgacgcggttttgttcctgtgctcagagcaggcatcctttatccagggacatgcgctggtggtcgatggaggatacactatcaattag

SEQ ID NO: 30410 - protein, 263 aa, Muscodor strobelii
  misc_feature: SGI Peptide ID NO. 570458
  misc_feature (10)..(187): Pfam Id: PF00106 Pfam Desc: short chain dehydrogenase
  misc_feature (10)..(181): Pfam Id: PF00106 Pfam Desc: short chain dehydrogenase
  misc_feature (6)..(263): NCBI GI: 238505200 Blast Desc: oxidoreductase, short-chain dehydrogenase/reductase family [Aspergillus flavus NRRL3357] gi|220689943|gb|EED46293.1| oxidoreductase, short-chain dehydrogenase/reductase family flavus
  misc_feature (8)..(263): NCBI GI: 261353978 Blast Desc: 2-(S)-hydroxypropyl-CoM dehydrogenase [Verticillium albo-atrum VaMs.102]
  misc_feature (21)..(263): NCBI GI: 169780624 Blast Desc: [Aspergillus oryzae RIB40] gi|83773516|dbj|BAE63643.1| protein product [Aspergillus oryzae]
  misc_feature (8)..(263): NCBI GI: 189192875 Blast Desc: bacilysin biosynthesis oxidoreductase bacC [Pyrenophora tritici-repentis Pt-1C-BFP] gi|187978340|gb|EDU44966.1| bacilysin biosynthesis oxidoreductase
  misc_feature (6)..(263): NCBI GI: 121713060 Blast Desc: oxidoreductase, short-chain dehydrogenase/reductase family [Aspergillus clavatus NRRL 1] gi|119402294|gb|EAW12715.1| oxidoreductase, short-chain dehydrogenase/reductase family NRRL
  misc_feature (1)..(263): NCBI GI: 256735677 Blast Desc: NECHADRAFT_90579 [Nectria haematococca mpVI 77-13-4]
  misc_feature (6)..(263): NCBI GI: 145237660 Blast Desc: An07g03950 [Aspergillus niger] gi|134075951|emb|CAK48145.1| protein product [Aspergillus niger]
  misc_feature (4)..(263): NCBI GI: 46126247 Blast Desc: FG07501.1 [Gibberella zeae PH-1]
  misc_feature (69)..(263): NCBI GI: 119479491 Blast Desc: oxidoreductase, short-chain dehydrogenase/reductase family [Neosartorya fischeri NRRL 181] gi|119407928|gb|EAW17877.1| oxidoreductase, short-chain family
  misc_feature (69)..(263): NCBI GI: 70997982 Blast Desc: oxidoreductase, short-chain dehydrogenase/reductase family [Aspergillus fumigatus Af293] gi|66851359|gb|EAL91685.1| oxidoreductase, short-chain dehydrogenase/reductase family Af293]
  misc_feature (66)..(261): SWISSPROT Homolog: EC 1.1.1.268 2-(R)-hydroxypropyl-CoM dehydrogenase
  misc_feature: Useful for introducing or modulating the production of volatile compounds
MASSPFKLPGVAIVTGAAGTGIGAAVAKGFVQSGCLDIVITDIKDLTSTSVALVEINPNVRITLRQGDMTRDYFINNLVKDAIKKYGRIDYLVNCAGAFGEPLLSHETPISEFDRIIDINLKATWVMSRAVLAQMLKQQFRPHPKQRGAIVNVASQLGLVARPTAAPFCASKAAVINMTKADAIDYSRNKIRVNCVCPGIIKPPDTISSAEFEGTYMETVDIAPMYRMGTPSEVADAVLFLCSEQASFIQGHALVVDGGYTIN

SEQ ID NO: 30411 - DNA, 1886 bp, Muscodor strobelii
  misc_feature: SGI EST ID NO. CUFF.71970.2
  misc_feature: Variant of the nucleotide sequence at SEQ ID NO 30409
gcggaattcaagtatataaatctaataagagaacgaattttcactcggattggtttggcctagcggttcttcctcctacaattaattctaaatattattacttacgctaggccctagggttcgattccctagccgagtaatttttttcctctttttctttttcccccttttaaccttcccgtcgacacccccttttcctattaagtgcgtacacaagaccacctaatcgaagaagagcctcatttcgaaaatttctttttaccattcaagatcaatctgtctgatgttaggctttacatcacttcgaaatcacttgaactacaaaaatctaaggattcgaagccgagtttcccgtgatctactgatgaattgaaatgtataaagcgaggattcacgatggtgtattttctaccctcactgggttaaagcaatctgcagggtgtggggttcttcaaggatctagccggatgtgcaggcgacaaattgatacacacgctagatcaggaactcttcccgttcgcaatagatgcagacttgtaaatatcacgacatggcttcgtctccctttaaattacccggagttgcaatcgttactggcgcggcagggacaggaatcggtgcagcggtcgcaaaggggtttgtacaatcaggatgccttgacattgtgatcacagacatcaaggatctcacctcgactagtgttgcactggtagagatcaatcctaacgtgcgcatcactctccgtcagggtgacatgacgagagactactttatcaataacctcgtcaaagatgcaattaaaaagtacggccgcatagactatcttgtcaactgcgccggtgcgtttggggagccgttgctctcgcatgaaacacctatatctgaattcgaccgcatcatcgacatcaacctcaaagccacatgggtcatgtctcgtgccgtgctggctcagatgttaaaacagcagtttcgacctcatccgaagcaaagaggcgccattgtgaatgtcgcaagtcagctcggcttggtagcgcggccgacagcagccccattttgtgcgtctaaggcagccgttattaatatgacgaaagcggatgcgattgattactcacgtaataagattagagtgaactgcgtatgcccggggattataaaaccacctgacacaattagctcagcagagttcgaaggtacatatatggagactgtagatattgcgcccatgtacaggatgggaacaccttctgaagtggctgacgcggttttgttcctgtgctcagagcaggcatcctttatccagggacatgcgctggtggtcgatggaggatacactatcaattagacaagatttaggaatgaagggtttctaaacattaaaattgtgtgctatatcctgatatacctactcgatactcaggggtgctagaacattctggaaactagacatattaggggtatagatgaactgccggcgattccacgcatgccacaagcaaaataaatgatacatttttcatataccaacatctaattgtaccagcaatacggccttcagactatatatagtaagattcacagctatgtgttatagaacttctcgaattaatcccgtttaaatgttgacaggtaatcatgacattattcgctgttcgattcggagttgtatacattgcggtattcgatgatgctatttgttttgactcctatctgctatgtgaggtgaaacgccttttgatgggtctgccagccatgaagatggctgctatgcttgatctagggactgcgcaagacacatggcgtgatatctgcccctgtgccgttgcaactcctcgtgcttccccatctctgcaatttttccatcttcaattacaaagatcacatccgca

SEQ ID NO: 30412 - DNA, 1623 bp, Muscodor strobelii
  misc_feature: SGI cDNA ID NO. 570459
  misc_feature: Encodes the peptide sequence at SEQ ID NO 30413
atgaagtccatgatcttggctctcctagctttaggaatcggtgctataacgagccaagcgggcgatctcacggtaaaaacgtcctcagggacctttacaggtctgattgaccccgaatatcccaatacgcgacaatttcgtgccatacccttcgcggaaccaccagtcgggaaacggcgatggctaccgccgcaaaagctttcggcggccgacagtgacacgcatacctggtcgaccaagttcccgccatcgtgttcgcagttcgtgtcgggcattgagatgttctataatatctatctgagtaagggcaatacgatctacaatggtgcacaaaacgacacctccgggttgaccggcgaagcaacttccgaagactgcctgtatctcgccgtgtggactccgccggttgagaagataccggaagaaggcctgcctgtactattcttcatgacgggaggcggcttcactattggcggtattgagctaccttggcaaatcccagtatcatgggtcgagcggtcacagtctcatatcgtcgttagtatcaactaccgggtgagcatttttggctttcccaacgcgcgtggtttggcagacggagaacagaacttggggattctagaccagcgtgcggcactcgaatggacccgcgataacatcgctgctttcggcggcgactcaacccgtataacacaatggggacgatctgcgggtgctgtcagtacagacgtgcacgcctacgcgtatcgtgacgatcctatcgcacaggcctattatatggaatctggtctggcgttggcagctgcatacatcaatgatactacgcattctcagttcagctttgtagcaagcaaggtaggatgcgcggagccctgtgggccgggggtgacatgcgacgacgacggcaaggcggaactcgattgcatgcgacaggtgtctatgattcaaataacgaattttatcggagactggactgatcgcgcagagacgcctgctattcgcttcgcgttgactccggacgaccgtatcgttttcagcaattataccgcacggtctgaggcaggattgatcgcagctcgccctgctatgatatcctatacagctaatgaggctggagcgtcagtaataccatggccagagcacccggaaacctacgtgccggacgaagccgcgaatattgcttcagacgtcctagtattcgtatgcccaacgtacaattcgactgtgtataggaatcggctcggagccggggttgcacccatatttcgatttcagtatgctgccgagtttcccaatttcaatgtatacgactggctcggcgcgtatcacaatagcgagacggcgttgatctttgggacatactggtggttggatttcatcgccaattcaaccgagtatgaagatcaagttagccactcaatgcaagaccatattttgacttttgcaaaagatccctacaatggcccccagaagttgggttggcagccgatgaatacaagtgagcctaatggaggtgatttgcttcgctttggaggcagcaccgggaaagtggctattcatgttgatggtatcgaaacagacggtgtttgtcaagggcttggtgattatgatccgtttccataa

SEQ ID NO: 30413 - protein, 540 aa, Muscodor strobelii
  misc_feature: SGI Peptide ID NO. 570459
  misc_feature (1)..(524): Pfam Id: PF00135 Pfam Desc: Carboxylesterase
  misc_feature (178)..(245): Pfam Id: PF00135 Pfam Desc: Carboxylesterase
  misc_feature (1)..(159): Pfam Id: PF00135 Pfam Desc: Carboxylesterase
  misc_feature (400)..(524): Pfam Id: PF00135 Pfam Desc: Carboxylesterase
  misc_feature (4)..(540): NCBI GI: 39946934 Blast Desc: MGG_08468 [Magnaporthe grisea 70-15] gi|145012297|gb|EDJ96953.1| MGG_08468 [Magnaporthe grisea 70-15]
  misc_feature (1)..(467): NCBI GI: 46114340 Blast Desc: FG03012.1 [Gibberella zeae PH-1]
  misc_feature (1)..(540): NCBI GI: 145234847 Blast Desc: An03g01700 [Aspergillus niger] gi|134057746|emb|CAK38143.1| protein product [Aspergillus niger]
  misc_feature (23)..(540): NCBI GI: 145236451 Blast Desc: An06g00460 [Aspergillus niger] gi|134075327|emb|CAK44961.1| protein product [Aspergillus niger]
  misc_feature (5)..(355): NCBI GI: 261356245 Blast Desc: acetylcholinesterase [Verticillium albo-atrum VaMs.102]
  misc_feature (34)..(530): NCBI GI: 39970109 Blast Desc: MGG_10663 [Magnaporthe grisea 70-15] gi|145013105|gb|EDJ97746.1| MGG_10663 [Magnaporthe grisea 70-15]
  misc_feature (5)..(518): NCBI GI: 116201443 Blast Desc: CHGG_08606 [Chaetomium globosum CBS 148.51] gi|88177124|gb|EAQ84592.1| CHGG_08606 [Chaetomium globosum CBS 148.51]
  misc_feature (23)..(533): NCBI GI: 189198429 Blast Desc: para-nitrobenzyl esterase [Pyrenophora tritici-repentis Pt-1C-BFP] gi|187981500|gb|EDU48126.1| para-nitrobenzyl esterase [Pyrenophora tritici-repentis
  misc_feature (20)..(509): NCBI GI: 145612811 Blast Desc: MGG_12436 [Magnaporthe grisea 70-15] gi|145019922|gb|EDK04150.1| MGG_12436 [Magnaporthe grisea 70-15]
  misc_feature (3)..(530): NCBI GI: 154301528 Blast Desc: BC1G_10091 [Botryotinia fuckeliana B05.10] gi|150855753|gb|EDN30945.1| BC1G_10091 [Botryotinia fuckeliana B05.10]
  misc_feature (22)..(483): SWISSPROT Homolog: EC 3.1.1.7 Acetylcholinesterase
MKSMILALLALGIGAITSQAGDLTVKTSSGTFTGLIDPEYPNTRQFRAIPFAEPPVGKRRWLPPQKLSAADSDTHTWSTKFPPSCSQFVSGIEMFYNIYLSKGNTIYNGAQNDTSGLTGEATSEDCLYLAVWTPPVEKIPEEGLPVLFFMTGGGFTIGGIELPWQIPVSWVERSQSHIVVSINYRVSIFGFPNARGLADGEQNLGILDQRAALEWTRDNIAAFGGDSTRITQWGRSAGAVSTDVHAYAYRDDPIAQAYYMESGLALAAAYINDTTHSQFSFVASKVGCAEPCGPGVTCDDDGKAELDCMRQVSMIQITNFIGDWTDRAETPAIRFALTPDDRIVFSNYTARSEAGLIAARPAMISYTANEAGASVIPWPEHPETYVPDEAANIASDVLVFVCPTYNSTVYRNRLGAGVAPIFRFQYAAEFPNFNVYDWLGAYHNSETALIFGTYWWLDFIANSTEYEDQVSHSMQDHILTFAKDPYNGPQKLGWQPMNTSEPNGGDLLRFGGSTGKVAIHVDGIETDGVCQGLGDYDPFP

SEQ ID NO: 30414 - DNA, 1580 bp, Muscodor strobelii
  misc_feature: SGI EST ID NO. CUFF.71960.0
  misc_feature: Variant of the nucleotide sequence at SEQ ID NO 30412
gcaaatcccagtatcatgggtcgagcggtcacagtctcatatcgtcgttagtatcaactaccgggtgagcatttttggctttcccaacgcgcgtggtttggcagacggagaacagaacttggggattctagaccagcgtgcggcactcgaatggacccgcgataacatcgctgctttcggcggcgactcaacccgtataacacaatggggacgatctgcgggtgctgtcagtacagacgtgcacgcctacgcgtatcgtgacgatcctatcgcacaggcctattatatggaatctggtctggcgttggcagctgcatacatcaatgatactacgcattctcagttcagctttgtagcaagcaaggtaggatgcgcggagccctgtgggccgggggtgacatgcgacgacgacggcaaggcggaactcgattgcatgcgacaggtgtctatgattcaaataacgaattttatcggagactggactgatcgcgcagagacgcctgctattcgcttcgcgttgactccggacgaccgtatcgttttcagcaattataccgcacggtctgaggcaggattgatcgcagctcgccctgctatgatatcctatacagctaatgaggctggagcgtcagtaataccatggccagagcacccggaaacctacgtgccggacgaagccgcgaatattgcttcagacgtcctagtattcgtatgcccaacgtacaattcgactgtgtataggaatcggctcggagccggggttgcacccatatttcgatttcagtatgctgccgagtttcccaatttcaatgtatacgactggctcggcgcgtatcacaatagcgagacggcgttgatctttgggacatactggtggttggatttcatcgccaattcaaccgagtatgaagatcaagttagccactcaatgcaagaccatattttgacttttgcaaaagatccctacaatggcccccagaagttgggttggcagccgatgaatacaagtgagcctaatggaggtgatttgcttcgctttggaggcagcaccgggaaagtggctattcatgttgatggtatcgaaacagacggtgtttgtcaagggcttggtgattatgatccgtttccataaaggaaatattcagtaaccatccacgctcctacatatcagacctcttgatcttccctgcgattgcttattgccataaactatcgctctgcattcactctctatagtaccagatgttgttcaaacgaggccgaccagaaatgtagccattgataggcgtcataggcatcctccttataaactggtagacttatgagaagattgtactggtgttaaacgggtttcaggtctaagtcgggtgcaaattcacaacactttgcaggtaaagaaccatggcactaacatttgaatttttcaaagtgcatttgagttcacaaaacggccgaggactgcacagcagtgacgatcattatcaaggcgcattcctgcctcacataaacacctagattcaattcaagcgttgtgtggaagtaactaagagagctttggcgcgacatcaacgataagtcgc

SEQ ID NO: 30415 - DNA, 1635 bp, Muscodor strobelii
  misc_feature: SGI cDNA ID NO. 570460
  misc_feature: Encodes the peptide sequence at SEQ ID NO 30416
atggccgcggttctcgacacccaattcgccggcctggcaggcgctgacgacgcgacttataacatggccgtcgagctgatgctcagcgacctccaagagctgaggtccaatgtcaaaggcaagcaacgcgctggcgacgtgaccgacgccgaagtctcattcagcatcttcgagcaggaacttcgccgagcctcgacgctggctgccgatcgccgactcactgccagcatccaacgcgctgtccacaccgatgctcgtgccattgctaaggccaatcgacaggagctgatggcccaacatgatcgcgcagtcgccctagcaatctcccgcaatcaacccatcccccctatgcccgatttccccgccgtccctgccgatacaccgaccaatgatgacgtccacttccattcctccagatcctctcctcaacgaccgagcaagagatccagagagacaacccaagccgaagaccctgctgccaaagaagatggtgctggcggtgctggaatcacaccctcggaagcgaaacgtcgcaagggagacgcctcagacaaggagcccacggaggagaccaaagccaaagacacggcatctccattcaagttctttcccagcggtgacgatgaagatgatatgtgtattgccattggacttcaagcagcccgtgatcaacttcgtgaggaagcgagcgagaacgagagaggcacagaggacgaggaagatgacgtctgtggagctatgggcattcagcagtcacgcaagggtgagagctcggcgtgggcagcttcgcgaccccaggtccaaactcgacgaccatgcacgtcttgtatggacgacaagctggccaacgagctagccaaggccccttgcgagcacgagtactgtcacgactgtatccgaagactcttcaatagcgctatcgacgacgagtcgctgttccctgcacgttgctgctcgaaagagatccctccggacgacttgcagcctgtgctcggtgtggacaaggtgcagcagtaccacgagaaggccatagaatacggaacagtcaacaggacctactgccacatccccaagtgtggagcgttcatccctcttggctttatcgaagatgaccgagctctctgcccaaagtgtcacgaagagacgtgcatccactgcaagaagcaagcacacccaggcgactgtccagaggaccacgagctccagagggttaacgatatgggcgagcagaaaggctggaagcactgcgccaaatgcaagagtctcattgagctgaccatcggttgttaccatatcacctgccgatgcaaacacgagttctgttacctatgcggcgtcgactggaagaattgtggatgcccccagtgggaagaagctcggctctataacagggcccaacaagtccaccagagggacaacccgaacaacggcgcccaacaagccgacgcccaaaaccgtgtcaacggcatagttgaccacctacgccaggcccataactgcacccacaacacctggcgccgtagacgaggccgaaacacgtgtgagggttgcgatgttgaactgccattcttcatcttcgaatgtgcgcagtgccatatcatggcttgcaaagcttgcaggttcaatcgattctag

SEQ ID NO: 30416 - protein, 544 aa, Muscodor strobelii
  misc_feature: SGI Peptide ID NO. 570460
  misc_feature (419)..(448): Pfam Id: PF01485 Pfam Desc: IBR domain
  misc_feature (372)..(395): Pfam Id: PF01485 Pfam Desc: IBR domain
  misc_feature (255)..(544): NCBI GI: 256726657 Blast Desc: NECHADRAFT_75881 [Nectria haematococca mpVI 77-13-4]
  misc_feature (252)..(544): NCBI GI: 171679767 Blast Desc: protein product [Podospora anserina] gi|170939509|emb|CAP64737.1| protein product [Podospora anserina]
  misc_feature (256)..(544): NCBI GI: 116199065 Blast Desc: CHGG_07688 [Chaetomium globosum CBS 148.51] gi|88178967|gb|EAQ86435.1| CHGG_07688 [Chaetomium globosum CBS 148.51]
  misc_feature (246)..(544): NCBI GI: 261198206 Blast Desc: IBR domain-containing protein [Ajellomyces dermatitidis SLH14081] gi|239595468|gb|EEQ78049.1| IBR domain-containing protein [Ajellomyces dermatitidis SLH14081] IBR
  misc_feature (189)..(544): NCBI GI: 258566591 Blast Desc: [Uncinocarpus reesii 1704] gi|237907741|gb|EEP82142.1| [Uncinocarpus reesii 1704]
  misc_feature (245)..(544): NCBI GI: 159125691 Blast Desc: RING finger protein [Aspergillus fumigatus A1163]
  misc_feature (249)..(533): NCBI GI: 212547187 Blast Desc: IBR finger domain protein [Penicillium marneffei ATCC 18224] gi|210064402|gb|EEA18499.1| IBR finger domain protein [Penicillium marneffei ATCC 18224]
  misc_feature (245)..(544): NCBI GI: 70989836 Blast Desc: IBR finger domain protein [Aspergillus fumigatus Af293] gi|66847399|gb|EAL87729.1| IBR finger domain protein [Aspergillus fumigatus Af293]
  misc_feature (229)..(541): NCBI GI: 169767748 Blast Desc: [Aspergillus oryzae RIB40] gi|83766200|dbj|BAE56343.1| protein product [Aspergillus oryzae]
  misc_feature (243)..(544): NCBI GI: 159123432 Blast Desc: RING finger protein [Aspergillus fumigatus A1163]
MAAVLDTQFAGLAGADDATYNMAVELMLSDLQELRSNVKGKQRAGDVTDAEVSFSIFEQELRRASTLAADRRLTASIQRAVHTDARAIAKANRQELMAQHDRAVALAISRNQPIPPMPDFPAVPADTPTNDDVHFHSSRSSPQRPSKRSRETTQAEDPAAKEDGAGGAGITPSEAKRRKGDASDKEPTEETKAKDTASPFKFFPSGDDEDDMCIAIGLQAARDQLREEASENERGTEDEEDDVCGAMGIQQSRKGESSAWAASRPQVQTRRPCTSCMDDKLANELAKAPCEHEYCHDCIRRLFNSAIDDESLFPARCCSKEIPPDDLQPVLGVDKVQQYHEKAIEYGTVNRTYCHIPKCGAFIPLGFIEDDRALCPKCHEETCIHCKKQAHPGDCPEDHELQRVNDMGEQKGWKHCAKCKSLIELTIGCYHITCRCKHEFCYLCGVDWKNCGCPQWEEARLYNRAQQVHQRDNPNNGAQQADAQNRVNGIVDHLRQAHNCTHNTWRRRRGRNTCEGCDVELPFFIFECAQCHIMACKACRFNRF

SEQ ID NO: 30417 - DNA, 2411 bp, Muscodor strobelii
  misc_feature: SGI EST ID NO. CUFF.71963.0
  misc_feature: Variant of the nucleotide sequence at SEQ ID NO 30415
tagcgaatgtcgctgccatttcagtgattgttacctgtgtgcgactactgcttttggtgccaagcaacccgatgcctcgggtcaaaacatccgagccgtctgtagcttaacggcatccccagacattctacctctacccctggtcctggcttaattacatgtacacaagtgagttgcagaaccaatgcgcacgctcgacggttatttcacaaggttcagacgcaacacaaaaccctccctgttccagatgtaatcacgtcagtaacaaccatccgcagtcctgaaccgaccctcacgatggccgcggttctcgacacccaattcgccggcctggcaggcgctgacgacgcgacttataacatggccgtcgagctgatgctcagcgacctccaagagctgaggtccaatgtcaaaggcaagcaacgcgctggcgacgtgaccgacgccgaagtctcattcagcatcttcgagcaggaacttcgccgagcctcgacgctggctgccgatcgccgactcactgccagcatccaacgcgctgtccacaccgatgctcgtgccattgctaaggccaatcgacaggagctgatggcccaacatgatcgcgcagtcgccctagcaatctcccgcaatcaacccatcccccctatgcccgatttccccgccgtccctgccgatacaccgaccaatgatgacgtccacttccattcctccagatcctctcctcaacgaccgagcaagagatccagagagacaacccaagccgaagaccctgctgccaaagaagatggtgctggcggtgctggaatcacaccctcggaagcgaaacgtcgcaagggagacgcctcagacaaggagcccacggaggagaccaaagccaaagacacggcatctccattcaagttctttcccagcggtgacgatgaagatgatatgtgtattgccattggacttcaagcagcccgtgatcaacttcgtgaggaagcgagcgagaacgagagaggcacagaggacgaggaagatgacgtctgtggagctatgggcattcagcagtcacgcaagggtgagagctcggcgtgggcagcttcgcgaccccaggtccaaactcgacgaccatgcacgtcttgtatggacgacaagctggccaacgagctagccaaggccccttgcgagcacgagtactgtcacgactgtatccgaagactcttcaatagcgctatcgacgacgagtcgctgttccctgcacgttgctgctcgaaagagatccctccggacgacttgcagcctgtgctcggtgtggacaaggtgcagcagtaccacgagaaggccatagaatacggaacagtcaacaggacctactgccacatccccaagtgtggagcgttcatccctcttggctttatcgaagatgaccgagctctctgcccaaagtgtcacgaagagacgtgcatccactgcaagaagcaagcacacccaggcgactgtccagaggaccacgagctccagagggttaacgatatgggcgagcagaaaggctggaagcactgcgccaaatgcaagagtctcattgagctgaccatcggttgttaccatatcacctgccgatgcaaacacgagttctgttacctatgcggcgtcgactggaagaattgtggatgcccccagtgggaagaagctcggctctataacagggcccaacaagtccaccagagggacaacccgaacaacggcgcccaacaagccgacgcccaaaaccgtgtcaacggcatagttgaccacctacgccaggcccataactgcacccacaacacctggcgccgtagacgaggccgaaacacgtgtgagggttgcgatgttgaactgccattcttcatcttcgaatgtgcgcagtgccatatcatggcttgcaaagcttgcaggttcaatcgattctagtagggatgcgatacaatcataggttgtagagaagcattgcctgcgtgtacagtgcttaccatacggcgtttctataagatagtgtgagtgctgatcaggttcacacaaaggtagtgagtctattgcctggagttcagaggtcgaccaggttggagcttctaaaatggatcaagggggaaagcatgtgatccagcacgtgtacaataatattgactctcgaggtagctcgtacctcacatgtattagacttagagtgacgcctcaaggcgtatatacggtcggcacagactgctggcaagggaaatgtgggagcttacatgtcacaaaaacgttacaggcgttaacaaaaagaaaggagaggggactgagacgctggctgcgtatcccggaaaatgtaatactacttccatgaaaattcagttgtgtatatggtgaaggcttttagagctattacacgatgattgtctatgacaatgctt

SEQ ID NO: 30418 - DNA, 375 bp, Muscodor strobelii
  misc_feature: SGI cDNA ID NO. 570461
  misc_feature: Encodes the peptide sequence at SEQ ID NO 30419
atgtctgacaaccctgttctatcgactgaagcaatcgacatcctcgcaaaggttcaagccttgcaaggttatcttgatgactatctgtcgatcgagacccacaagctcgaggtcctcacaaaatacattagaactctggaaaaagtttggggcgaagacaatcccatagattggaaagatctcagcgcaaaggtagaccgagcacttgaagttgcgattgagcaggacaccgcattggttttgcttgaaaattcgttctttcccgtggtatctgacccaaagcgtgtgcagcaaactgaggaactgttcattgagcgcgctaatggattcccagatatattcgatgtctctatcaagccccgtgcggatacgtga

SEQ ID NO: 30419 - protein, 124 aa, Muscodor strobelii
  misc_feature: SGI Peptide ID NO. 570461
MSDNPVLSTEAIDILAKVQALQGYLDDYLSIETHKLEVLTKYIRTLEKVWGEDNPIDWKDLSAKVDRALEVAIEQDTALVLLENSFFPVVSDPKRVQQTEELFIERANGFPDIFDVSIKPRADT

SEQ ID NO: 30420 - DNA, 675 bp, Muscodor strobelii
  misc_feature: SGI cDNA ID NO. 570462
  misc_feature: Elevated expression when VOC is produced
  misc_feature: Encodes the peptide sequence at SEQ ID NO 30421
atgaaagtcattatcactggcgcaactggtttcgtgggcggtgaagtagtgcgacaagccatcgccagcgacaagatcacgcaggcgcttgtgcttactcggaaaccgctacctgatgagttcgcaaaaagcgagaaggtcaaaatacttaccattgaagatttctccgcgccctactctgaagatctcctcgagcagctgagcggttccgaagcgtgcatatgggcgattggaggtcgcgcgcctcaattcccagatgtcgaaacagcgaggaaagtgtctgtggactacacattaaacgccgcaaaagccttcgtcacacacctgactagcaatccccctgcaaatcaaaagttccgatttatcttctgcagcgggaaatttgcagaatgggacgacaataagtctctcacattcatgagcgatacaagacacatcaagggtcaagtcgaaaaggccctttgtagtctcgccgatgacaacaaggacaagttcgaagttcttatcgcgcgtccaagtggaatactccccactgggggtagtcggctgaagaaaatcgcagcaaattcgcttggctttatactcgtggaccaccttgctcgcgacttcattcgcttagctattgaaggacactctcaaaaaatccttgaggctggagagcttatcaagatgtaa

SEQ ID NO: 30421 - protein, 224 aa, Muscodor strobelii
  misc_feature: SGI Peptide ID NO. 570462
  misc_feature (1)..(222): NCBI GI: 121709657 Blast Desc: nucleoside-diphosphate-sugar epimerase, [Aspergillus clavatus NRRL 1] gi|119400630|gb|EAW11055.1| nucleoside-diphosphate-sugar epimerase, [Aspergillus clavatus 1]
  misc_feature (1)..(224): NCBI GI: 256725981 Blast Desc: NECHADRAFT_70035 [Nectria haematococca mpVI 77-13-4]
  misc_feature (1)..(223): NCBI GI: 115402317 Blast Desc: [Aspergillus terreus NIH2624] gi|114189081|gb|EAU30781.1| [Aspergillus terreus NIH2624]
  misc_feature (3)..(210): NCBI GI: 67539342 Blast Desc: AN5841.2 [Aspergillus nidulans FGSC A4] gi|40739160|gb|EAA58350.1| AN5841.2 [Aspergillus nidulans FGSC A4] gi|259479999|tpe|CBF70730.1| TPA: epimerase, (AFU_orthologue;
  misc_feature (1)..(221): NCBI GI: 255956831 Blast Desc: Pc21g21970 [Penicillium chrysogenum Wisconsin 54-1255] gi|211590879|emb|CAP97094.1| Pc21g21970 [Penicillium chrysogenum Wisconsin 54-1255]
  misc_feature (1)..(221): NCBI GI: 119485873 Blast Desc: nucleoside-diphosphate-sugar epimerase, [Neosartorya fischeri NRRL 181] gi|119410435|gb|EAW20382.1| nucleoside-diphosphate-sugar epimerase, [Neosartorya fischeri
  misc_feature (1)..(224): NCBI GI: 46116770 Blast Desc: FG04227.1 [Gibberella zeae PH-1]
  misc_feature (1)..(175): NCBI GI: 66811958 Blast Desc: DDB_G0282619 [Dictyostelium discoideum AX4] gi|60468159|gb|EAL66169.1| DDB_G0282619 [Dictyostelium discoideum AX4]
  misc_feature (2)..(221): NCBI GI: 70984016 Blast Desc: nucleoside-diphosphate-sugar epimerase [Aspergillus fumigatus Af293] gi|66845159|gb|EAL85495.1| nucleoside-diphosphate-sugar epimerase, [Aspergillus fumigatus
  misc_feature (1)..(224): NCBI GI: 259483149 Blast Desc: TPA: nucleoside-diphosphate-sugar epimerase, (AFU_orthologue; AFUA_8G07320) [Aspergillus nidulans FGSC A4]
  misc_feature: Useful for introducing or modulating the production of volatile compounds
MKVIITGATGFVGGEVVRQAIASDKITQALVLTRKPLPDEFAKSEKVKILTIEDFSAPYSEDLLEQLSGSEACIWAIGGRAPQFPDVETARKVSVDYTLNAAKAFVTHLTSNPPANQKFRFIFCSGKFAEWDDNKSLTFMSDTRHIKGQVEKALCSLADDNKDKFEVLIARPSGILPTGGSRLKKIAANSLGFILVDHLARDFIRLAIEGHSQKILEAGELIKM

SEQ ID NO: 30422 - DNA, 1740 bp, Muscodor strobelii
  misc_feature: SGI EST ID NO. CUFF.72052.1
  misc_feature: Variant of the nucleotide sequence at SEQ ID NO 30420
tacagccgtgactatatccggggtagtagggggttctatgtggggaattatataggtgccccatgtttgacagctcgtcttcctaactcgatcaaccatatttttcactagcagcttcctcacaccgctccctcgaggtcggatcgttttagcgattagactgacaacaagctctaagatgaaagtcattatcactggcgcaactggtttcgtgggcggtgaagtagtgcgacaagccatcgccagcgacaagatcacgcaggcgcttgtgcttactcggaaaccgctacctgatgagttcgcaaaaagcgagaaggtcaaaatacttaccattgaagatttctccgcgccctactctgaagatctcctcgagcagctgagcggttccgaagcgtgcatatgggcgattggaggtcgcgcgcctcaattcccagatgtcgaaacagcgaggaaagtgtctgtggactacacattaaacgccgcaaaagccttcgtcacacacctgactagcaatccccctgcaaatcaaaagttccgatttatcttctgcagcgggaaatttgcagaatgggacgacaataagtctctcacattcatgagcgatacaagacacatcaagggtcaagtcgaaaaggccctttgtagtctcgccgatgacaacaaggacaagttcgaagttcttatcgcgcgtccaagtggaatactccccactgggggtagtcggctgaagaaaatcgcagcaaattcgcttggctttatactcgtggaccaccttgctcgcgacttcattcgcttagctattgaaggacactctcaaaaaatccttgaggctggagagcttatcaagatgtaacacgtgatatttatctccaagtacttagcctgatcatatcatgaaccaagacaactttgtatcaggggcccaacgatgtctttgcttcacgcgattggtacaagtacggcagaatctctcatcgccgattaccctttacggagacgctagcaataaactgcctgtggttcttttgcggttctgtcaaacaagacaaggacacaagaactttgtgaccgagatactcatcacgtgtagttcgcagtgggggccgaaaagaaaggggccgggaggatccgctgacgcgtctcggcattgctattgtagtatttgtgtgaccataaggtaaaacagatagcacggaaatttggatgagagacatctcaatggagcgctctggcagccacgctcaattcaaaaccaatcgcaactcaaataatcgtagtcctagagcgccgagctactctcattgacattgccgttgcattgctgaagtattaatatgcgacgtgagggcgcagccggaagtcagccaccatgagctgccaagtgtagcaatgaaacagatgctgtgaaacaagttagattttcgtaagcatttatcttgaaggctgctcatatgttgcgacttgtccatttcaaacctcctaactctcacctcattctcgtatgaaggcggaactatgctcacatccgtgtcgttgcccgcagcttgcttgacggaaatctggcttggtacggacggaggaattgcattaggcaatcctgatccttcaagtggttgctggcacgacacttcggctacggtgtcgccagcgacgtgtccctcaggttatactcgcgtgaatgatgcgacgccctggacagatgcgtcggaaattgtctgggcttgttgtcctaagtttgtc

SEQ ID NO: 30423 - DNA, 1353 bp, Muscodor strobelii
  misc_feature: SGI cDNA ID NO. 570463
  misc_feature: Encodes the peptide sequence at SEQ ID NO 30424
atgcgcctggaagtggtgccagaggcggccaaaaatgtgttaactgttcacacgtcgtctttgttcaattcgaggcacaaatgtttcgacgtcgacatctcgcttgacctagatcaatccaccgggctcataaccaaggtatacaaacgcagtcatgctttacctcagcatgatgtctccgacgagaagacaattgatcttcggggtttcacggttttgcccggtttagtcgatgcacacacacatatattcttgcacgcatattctgagacaccggctacccatcagatgcgcgacgagagtgtagttgagagggtcgtgcgagcgacaaatcacgcggtggatgcgttgatggcaggatacacaacctatcgcgacttgggtactgagggtctgcgtgacgctgatgttagcttcagggatacgattaatcgaggcatcattcccggcccacgcatgtttgtcgcaacagaatgcattgcgtcaagcagcggatatgaactcagacaagagaacagcctacctggcatgggtctaattgcacctaggatttccgacccagctgatggagtctacggtgcccgcgcagctgtgcgccgacggctcggccagggggcggacatcgtgaagttctatgcagactatagaaaacgccgtctacgttttccagccccagcgtggcctgggcagaaagagattcagtacccgcccgataatgacgtttttgacaacgagcagaaccccaatgttctgctcttcacgcaagaggaaatggatgcaatggtggccgaagccaaggcaagcagagtgccgatcgtcgctcatgcacagagtcccgaggctgtagcgatggctgccaatgcaggcgttacatctatcgagcatggcttcattcccaaccaggaagcattaaatgcaatgaaggcaaacaatacgatttttgttcccacgctttccgtctatgacgaggatcttagaagaaccaaaagccggtccgagagcaagagccgagcgttccagaagatacttggtcacacgaaggcagcgtttgaccagggaatcaaactcgcctgtggtggtgacactggtgctttcccccacggcgagaatgttcgtgaattagagctgatggttgaggccggtatccctctcgttgatgttcttcaggccgccacgctgcacggatgggaggcatgtggagcggacctctgcggtcggaaatttggtgttctggacgaaggctatgcggctgacattgtcgctctcgacggtgatccgaaccaggatctaagcgctttaagaaaagtcgcgtttgtaatgaaggatgctcaggtcttcatgcaccataagtag

SEQ ID NO: 30424 - protein, 450 aa, Muscodor strobelii
  misc_feature: SGI Peptide ID NO. 570463
  misc_feature (71)..(423): Pfam Id: PF01979 Pfam Desc: Amidohydrolase family
  misc_feature (349)..(423): Pfam Id: PF01979 Pfam Desc: Amidohydrolase family
  misc_feature (71)..(218): Pfam Id: PF01979 Pfam Desc: Amidohydrolase family
  misc_feature (16)..(447): NCBI GI: 154315918 Blast Desc: BC1G_04531 [Botryotinia fuckeliana B05.10] gi|150846927|gb|EDN22120.1| BC1G_04531 [Botryotinia fuckeliana B05.10]
  misc_feature (14)..(446): NCBI GI: 212545568 Blast Desc: conserved [Penicillium marneffei ATCC 18224] gi|210065907|gb|EEA20001.1| conserved [Penicillium marneffei ATCC 18224]
  misc_feature (1)..(446): NCBI GI: 85116147 Blast Desc: NCU02597 [Neurospora crassa OR74A] gi|28926800|gb|EAA35764.1| [Neurospora crassa OR74A]
  misc_feature (15)..(445): NCBI GI: 256725521 Blast Desc: NECHADRAFT_55674 [Nectria haematococca mpVI 77-13-4]
  misc_feature (16)..(446): NCBI GI: 171683863 Blast Desc: protein product [Podospora anserina] gi|170941892|emb|CAP67544.1| protein product [Podospora anserina]
  misc_feature (14)..(446): NCBI GI: 145250917 Blast Desc: An15g04370 [Aspergillus niger] gi|134082498|emb|CAK97304.1| protein product [Aspergillus niger]
  misc_feature (11)..(446): NCBI GI: 116193123 Blast Desc: CHGG_06279 [Chaetomium globosum CBS 148.51] gi|88182192|gb|EAQ89660.1| CHGG_06279 [Chaetomium globosum CBS 148.51]
  misc_feature (155)..(446): NCBI GI: 190348594 Blast Desc: PGUG_05172 [Pichia guilliermondii ATCC 6260]
  misc_feature (155)..(446): NCBI GI: 146414493 Blast Desc: PGUG_05172 [Pichia guilliermondii ATCC 6260]
  misc_feature (58)..(446): NCBI GI: 116624571 Blast Desc: amidohydrolase [Solibacter usitatus Ellin6076] gi|116227733|gb|ABJ86442.1| amidohydrolase [Candidatus Solibacter usitatus Ellin6076]
MRLEVVPEAAKNVLTVHTSSLFNSRHKCFDVDISLDLDQSTGLITKVYKRSHALPQHDVSDEKTIDLRGFTVLPGLVDAHTHIFLHAYSETPATHQMRDESVVERVVRATNHAVDALMAGYTTYRDLGTEGLRDADVSFRDTINRGIIPGPRMFVATECIASSSGYELRQENSLPGMGLIAPRISDPADGVYGARAAVRRRLGQGADIVKFYADYRKRRLRFPAPAWPGQKEIQYPPDNDVFDNEQNPNVLLFTQEEMDAMVAEAKASRVPIVAHAQSPEAVAMAANAGVTSIEHGFIPNQEALNAMKANNTIFVPTLSVYDEDLRRTKSRSESKSRAFQKILGHTKAAFDQGIKLACGGDTGAFPHGENVRELELMVEAGIPLVDVLQAATLHGWEACGADLCGRKFGVLDEGYAADIVALDGDPNQDLSALRKVAFVMKDAQVFMHHK

SEQ ID NO: 30425 - DNA, 1823 bp, Muscodor strobelii
  misc_feature: SGI EST ID NO. CUFF.72052.3
  misc_feature: Variant of the nucleotide sequence at SEQ ID NO 30423
ctttttcctcgcagaggaatttattatgtatcgctcgcccctaacctaacttcctcaagtattcgggcggtgatcgagaagtctggtgttaggtacatggtttccccagaaggagcacaaacgaaaagggaaataggccgtattgttgattggccccgcgtcgcattcaacggactaaggtgctcgatcggtgttcgtcatggacaggtttgtcatcctcaattcttcaggtcctggactcataacgcgaaacaactgctctgacagcacactagcacaatgcgcctggaagtggtgccagaggcggccaaaaatgtgttaactgttcacacgtcgtctttgttcaattcgaggcacaaatgtttcgacgtcgacatctcgcttgacctagatcaatccaccgggctcataaccaaggtatacaaacgcagtcatgctttacctcagcatgatgtctccgacgagaagacaattgatcttcggggtttcacggttttgcccggtttagtcgatgcacacacacatatattcttgcacgcatattctgagacaccggctacccatcagatgcgcgacgagagtgtagttgagagggtcgtgcgagcgacaaatcacgcggtggatgcgttgatggcaggatacacaacctatcgcgacttgggtactgagggtctgcgtgacgctgatgttagcttcagggatacgattaatcgaggcatcattcccggcccacgcatgtttgtcgcaacagaatgcattgcgtcaagcagcggatatgaactcagacaagagaacagcctacctggcatgggtctaattgcacctaggatttccgacccagctgatggagtctacggtgcccgcgcagctgtgcgccgacggctcggccagggggcggacatcgtgaagttctatgcagactatagaaaacgccgtctacgttttccagccccagcgtggcctgggcagaaagagattcagtacccgcccgataatgacgtttttgacaacgagcagaaccccaatgttctgctcttcacgcaagaggaaatggatgcaatggtggccgaagccaaggcaagcagagtgccgatcgtcgctcatgcacagagtcccgaggctgtagcgatggctgccaatgcaggcgttacatctatcgagcatggcttcattcccaaccaggaagcattaaatgcaatgaaggcaaacaatacgatttttgttcccacgctttccgtctatgacgaggatcttagaagaaccaaaagccggtccgagagcaagagccgagcgttccagaagatacttggtcacacgaaggcagcgtttgaccagggaatcaaactcgcctgtggtggtgacactggtgctttcccccacggcgagaatgttcgtgaattagagctgatggttgaggccggtatccctctcgttgatgttcttcaggccgccacgctgcacggatgggaggcatgtggagcggacctctgcggtcggaaatttggtgttctggacgaaggctatgcggctgacattgtcgctctcgacggtgatccgaaccaggatctaagcgctttaagaaaagtcgcgtttgtaatgaaggatgctcaggtcttcatgcaccataagtagggcgtgtttttctgctatggttcgttgcatcagaccatttccatcagattcatccagaattcctattaaagcaccagagttggccgcaatcaacaatgatgaacgatagcggtaaagcatcatggaaattgcgatgagtattccgtattatatagacgtccagatacatcgtaattcattccacgtcatag

SEQ ID NO: 30426 - DNA, 1242 bp, Muscodor strobelii
  misc_feature: SGI cDNA ID NO. 570464
  misc_feature: Encodes the peptide sequence at SEQ ID NO 30427
atgtcgaagaagacgaatatgtctgattgggctgtcaatgctttcgagactatttttggagtatcgcatgaggattttgagcgtcaagagtatctaaaaggcggcccatatagttacacgaaccttgagaaaccttcaaagcaaattcgtcttctgcgaattgaacatgaggaggcgagccaaagttggacttttttgaattataaacaagcagagtgcagtattgcgcattacaatatcgaagaagccccgccctttacagctttatcctacacctggggagttggccgcatgccagctaccatgcatatcgggaccaccaatgtcaaagtaacagatcatatcaacaaattcctactcactagatccaatggtgattatatttggatagatcagctgtgcattgatcaggcaaatatacccgaacggaatgctcaagtcttaagcatgtctgagatctacaaacgagctggcgaggtggttgtctggctcgagtcctctcaagataggcaggagtatgtcgagactgggtcttgtcgaagggatattatacgaccagagggaacttttcgaccgaatatatacccacgcgcaatctgggatgaaaatgctgattggatcttcgaagatccatactggaatcgcatatggatcattcaggaagtcatgcttgcaaataatatctcagtgatatacgagggagagggtttgcagtcaaacataataaaatcatattcctgggagcaaatacagtccttgtgggagaaacaaaggccaaagaagaagggcgatccgtatacccgcgtcagttggtttatggaaaacaagcagacacagataagccagcaatactcaactctcagcgccctagtcaatagcttttcgcaaagtggatgtagcgatccacgcgacaaagtctatggtatacaaggtttattagctccgtcctctagaatcgctgtcgactattccaaatcggtcgaaggcgtgtatcttgatgctgtgcgacgaatgatagatgattgggatcagagtccaggtacatccaacgagctcctcaggctgtgcctgaaattaggtgtagagatgttgcccaagacgatggcggtagataggatcttcgacaggatgatgccagtcctcgagatctcacttattcaatcgccactcggtcgggaggagaagtctcggttgaagcaagcttttgagtcgcttctgagggcacctggttcaggtgtttag

SEQ ID NO: 30427 - protein, 413 aa, Muscodor strobelii
  misc_feature: SGI Peptide ID NO. 570464
  misc_feature (86)..(221): Pfam Id: PF06985 Pfam Desc: Heterokaryon incompatibility protein (HET)
  misc_feature (86)..(182): Pfam Id: PF06985 Pfam Desc: Heterokaryon incompatibility protein (HET)
  misc_feature (37)..(348): NCBI GI: 169626186 Blast Desc: SNOG_16372 [Phaeosphaeria nodorum SN15] gi|111055077|gb|EAT76197.1| SNOG_16372 [Phaeosphaeria nodorum SN15]
  misc_feature (34)..(331): NCBI GI: 256726476 Blast Desc: NECHADRAFT_79724 [Nectria haematococca mpVI 77-13-4]
  misc_feature (37)..(340): NCBI GI: 256722966 Blast Desc: NECHADRAFT_86875 [Nectria haematococca mpVI 77-13-4]
  misc_feature (34)..(338): NCBI GI: 256721196 Blast Desc: NECHADRAFT_82325 [Nectria haematococca mpVI 77-13-4]
  misc_feature (30)..(355): NCBI GI: 169604370 Blast Desc: SNOG_05197 [Phaeosphaeria nodorum SN15] gi|111066468|gb|EAT87588.1| SNOG_05197 [Phaeosphaeria nodorum SN15]
  misc_feature (37)..(338): NCBI GI: 169764315 Blast Desc: [Aspergillus oryzae RIB40] gi|83764483|dbj|BAE54627.1| protein product [Aspergillus oryzae]
  misc_feature (37)..(338): NCBI GI: 238504460 Blast Desc: conserved [Aspergillus flavus NRRL3357] gi|220690932|gb|EED47281.1| conserved [Aspergillus flavus NRRL3357]
  misc_feature (42)..(324): NCBI GI: 169619541 Blast Desc: SNOG_12969 [Phaeosphaeria nodorum SN15] gi|111058649|gb|EAT79769.1| SNOG_12969 [Phaeosphaeria nodorum SN15]
  misc_feature (32)..(340): NCBI GI: 46115936 Blast Desc: FG03810.1 [Gibberella zeae PH-1]
  misc_feature (21)..(387): NCBI GI: 46135655 Blast Desc: FG09350.1 [Gibberella zeae PH-1]
MSKKTNMSDWAVNAFETIFGVSHEDFERQEYLKGGPYSYTNLEKPSKQIRLLRIEHEEASQSWTFLNYKQAECSIAHYNIEEAPPFTALSYTWGVGRMPATMHIGTTNVKVTDHINKFLLTRSNGDYIWIDQLCIDQANIPERNAQVLSMSEIYKRAGEVVVWLESSQDRQEYVETGSCRRDIIRPEGTFRPNIYPRAIWDENADWIFEDPYWNRIWIIQEVMLANNISVIYEGEGLQSNIIKSYSWEQIQSLWEKQRPKKKGDPYTRVSWFMENKQTQISQQYSTLSALVNSFSQSGCSDPRDKVYGIQGLLAPSSRIAVDYSKSVEGVYLDAVRRMIDDWDQSPGTSNELLRLCLKLGVEMLPKTMAVDRIFDRMMPVLEISLIQSPLGREEKSRLKQAFESLLRAPGSGV

SEQ ID NO: 30428 - DNA, 237 bp, Muscodor strobelii
  misc_feature: SGI EST ID NO. CUFF.71976.0
  misc_feature: Variant of the nucleotide sequence at SEQ ID NO 30426
ttgcagtcaaacataataaaatcatattcctgggagcaaatacagtccttgtgggagaaacaaaggccaaagaagaagggcgatccgtatacccgcgtcagttggtttatggaaaacaagcagacacagataagccagcaatactcaactctcagcgccctagtcaatagcttttcgcaaagtggatgtagcgatccacgcgacaaagtctatggtatacaaggtttattagctccg

SEQ ID NO: 30429 - DNA, 1107 bp, Muscodor strobelii
  misc_feature: SGI cDNA ID NO. 570465
  misc_feature: Encodes the peptide sequence at SEQ ID NO 30430
atgacaccttcaaacagagcagcctatgttgcaaaggcaaagtctcgcatagccatcgacactgcgccttacaccaaacccggagccagcgagattgttgtccggaacgctgccttagccctcaaccctgtcgactatattttccaagcaaaggggaacttcatatttccttccaagaaatggcccttggtgctaggctgggacgtcgctggcgtcatagaggaagtcggcgctggtgttacacgcttcaagcctggagaccgtgtctttggctatagtgacgcatttgccgatggtaatgcgcatgcgggcttccagctatatacgatactgaaagagaacgtatcatgtccaattcctgagacagtgtcgtttgaacaagcgtcaatgatgccgcttagcatagctactgcgagcgctgccctcttcggcgataagaatctaaatctgaaactgcctcagcttggaaatctcaaggaaggaaaacgcaaagaagtcgttctgatctggggtgggtcgacaagcgtggggtgtagcgcaattcaactcgcagtcgctgcaggttacgaagtagtcacaacttgctcggtaaagaacttcgacatggtgaagtcacttggcgcctctcaagcttttgactaccgcaatgacgatgtagttgataaattggctacggctatcggcaattctaaagtcgtgggagcgttagcgatcggacagaactcagcaacaaagtgcatggaagtactcggccgttgtgagggaagaaaactcaccgccctagtcagctatccttcgcctgaggatcccgacgctggtgcagcagccacaatctgggcaatggcttccggtaccgtgtcgctaattgctaagggcatcaaaactggaacaaagaggacaattgtcactactgatggacaacgtgaaggtcgcagtagtactgtctggagcgactttttgcccgaggctatgagatctggacagtttgtaccggctcctagcccagagattgtcggtaatcaactcgaggatatacaaaagggattggacatattgaagaagggcgtctcagcaaagaaactcgtgatatcgctatcgtccatgtag

SEQ ID NO: 30430 - protein, 368 aa, Muscodor strobelii
  misc_feature: SGI Peptide ID NO. 570465
  misc_feature (29)..(119): Pfam Id: PF08240 Pfam Desc: Alcohol dehydrogenase GroES-like domain
  misc_feature (29)..(92): Pfam Id: PF08240 Pfam Desc: Alcohol dehydrogenase GroES-like domain
  misc_feature (163)..(226): Pfam Id: PF00107 Pfam Desc: Zinc-binding dehydrogenase
  misc_feature (2)..(365): NCBI GI: 212527480 Blast Desc: zinc-binding oxidoreductase CipB [Penicillium marneffei ATCC 18224] gi|210073295|gb|EEA27382.1| zinc-binding oxidoreductase CipB [Penicillium marneffei ATCC 18224]
  misc_feature (3)..(365): NCBI GI: 242783896 Blast Desc: alcohol dehydrogenase, [Talaromyces stipitatus ATCC 10500] gi|242783902|ref|XP_002480279.1| alcohol dehydrogenase, [Talaromyces stipitatus ATCC 10500] gi|218720425|gb|EED19844.1|
  misc_feature (3)..(365): NCBI GI: 242760701 Blast Desc: alcohol dehydrogenase, [Talaromyces stipitatus ATCC 10500] gi|218723239|gb|EED22656.1| alcohol dehydrogenase, [Talaromyces stipitatus ATCC 10500]
  misc_feature (3)..(365): NCBI GI: 212539219 Blast Desc: alcohol dehydrogenase, [Penicillium marneffei ATCC 18224] gi|210069507|gb|EEA23598.1| alcohol dehydrogenase, [Penicillium marneffei ATCC 18224]
  misc_feature (2)..(366): NCBI GI: 154299623 Blast Desc: BC1G_10774 [Botryotinia fuckeliana B05.10] gi|150857266|gb|EDN32458.1| BC1G_10774 [Botryotinia fuckeliana B05.10]
  misc_feature (1)..(366): NCBI GI: 115402341 Blast Desc: [Aspergillus terreus NIH2624] gi|114189093|gb|EAU30793.1| [Aspergillus terreus NIH2624]
  misc_feature (5)..(366): NCBI GI: 156030740 Blast Desc: SS1G_14309 [Sclerotinia sclerotiorum 1980] gi|154700700|gb|EDO00439.1| SS1G_14309 [Sclerotinia sclerotiorum 1980]
  misc_feature (1)..(365): NCBI GI: 145253561 Blast Desc: An17g00640 [Aspergillus niger] gi|134083861|emb|CAK42992.1| protein product [Aspergillus niger]
  misc_feature (1)..(365): NCBI GI: 189188774 Blast Desc: zinc-binding oxidoreductase CipB [Pyrenophora tritici-repentis Pt-1C-BFP] gi|187972332|gb|EDU39831.1| zinc-binding oxidoreductase CipB [Pyrenophora tritici-repentis
  misc_feature (1)..(365): NCBI GI: 115401396 Blast Desc: conserved [Aspergillus terreus NIH2624] gi|114190227|gb|EAU31927.1| conserved [Aspergillus terreus NIH2624]
  misc_feature (27)..(232): SWISSPROT Homolog: EC 1.6.5.5 NADPH:quinone reductase
MTPSNRAAYVAKAKSRIAIDTAPYTKPGASEIVVRNAALALNPVDYIFQAKGNFIFPSKKWPLVLGWDVAGVIEEVGAGVTRFKPGDRVFGYSDAFADGNAHAGFQLYTILKENVSCPIPETVSFEQASMMPLSIATASAALFGDKNLNLKLPQLGNLKEGKRKEVVLIWGGSTSVGCSAIQLAVAAGYEVVTTCSVKNFDMVKSLGASQAFDYRNDDVVDKLATAIGNSKVVGALAIGQNSATKCMEVLGRCEGRKLTALVSYPSPEDPDAGAAATIWAMASGTVSLIAKGIKTGTKRTIVTTDGQREGRSSTVWSDFLPEAMRSGQFVPAPSPEIVGNQLEDIQKGLDILKKGVSAKKLVISLSSM

SEQ ID NO: 30431 - DNA, 699 bp, Muscodor strobelii
  misc_feature: SGI cDNA ID NO. 570466
  misc_feature: Elevated expression when VOC is produced
  misc_feature: Encodes the peptide sequence at SEQ ID NO 30432
atgaatcgccggttgaacgcgctactcttggcgggcgcgccgctgttcctcgtgcggtgcactgcggctgctgctgtgccgtgccttgatgtcccttcttgcgacaatggattcggcactgttcagtatgacaagaccgtaccaaatggcgagaacgaatttccaaaaactcaggtcgatatgtgttatacggacagcaccatcgaaatcacttttactgcctttgacgaggtgaatttctatttcaacgaatctcaggtgacgaatgacccgatctatgaatttgaggtgatggaagcgttcatttacaaaggcaccaatgatccaacgacgtatttcgagtttgaagtctcgcccaataatgttacctggcaagccttcgtctacaacccatcaaagcttcgaaccgcaggtgcgccgttcgacaatggtcagcttcactacccgatctttgatggactcgtggctactacagctctggacaaggacgcacaaatctgggtctccaatgctagcattcccttggctctgttcagtgtcgacaccggcgaagctgagggcactaaatggcggatgaattttctccgaacggtcgtcgcaaacgacacgtttcccgctcagcttctgggtgcttggaatcctacaaatgagtcgaattttcacatgacaccgttctttggcgatgtcacttttgtttag

SEQ ID NO: 30432 - protein, 232 aa, Muscodor strobelii
  misc_feature: SGI Peptide ID NO. 570466
  misc_feature (23)..(232): NCBI GI: 256725494 Blast Desc: NECHADRAFT_45731 [Nectria haematococca mpVI 77-13-4]
  misc_feature (26)..(232): NCBI GI: 46127087 Blast Desc: FG07921.1 [Gibberella zeae PH-1]
  misc_feature (4)..(232): NCBI GI: 212538605 Blast Desc: conserved [Penicillium marneffei ATCC 18224] gi|210069200|gb|EEA23291.1| conserved [Penicillium marneffei ATCC 18224]
  misc_feature (21)..(232): NCBI GI: 225685048 Blast Desc: conserved [Paracoccidioides brasiliensis Pb03]
  misc_feature (27)..(232): NCBI GI: 240106136 Blast Desc: CPC735_056990 [Coccidioides posadasii C735 delta SOWgp]
  misc_feature (21)..(232): NCBI GI: 226281375 Blast Desc: conserved [Paracoccidioides brasiliensis Pb01]
  misc_feature (26)..(232): NCBI GI: 242806321 Blast Desc: conserved [Talaromyces stipitatus ATCC 10500] gi|218715345|gb|EED14767.1| conserved [Talaromyces stipitatus ATCC 10500]
  misc_feature (21)..(232): NCBI GI: 226294359 Blast Desc: conserved [Paracoccidioides brasiliensis Pb18]
  misc_feature (4)..(232): NCBI GI: 240277295 Blast Desc: conserved [Ajellomyces capsulatus H143]
  misc_feature (20)..(232): NCBI GI: 225562208 Blast Desc: conserved [Ajellomyces capsulatus G186AR]
  misc_feature: Useful for introducing or modulating the production of volatile compounds
MNRRLNALLLAGAPLFLVRCTAAAAVPCLDVPSCDNGFGTVQYDKTVPNGENEFPKTQVDMCYTDSTIEITFTAFDEVNFYFNESQVTNDPIYEFEVMEAFIYKGTNDPTTYFEFEVSPNNVTWQAFVYNPSKLRTAGAPFDNGQLHYPIFDGLVATTALDKDAQIWVSNASIPLALFSVDTGEAEGTKWRMNFLRTVVANDTFPAQLLGAWNPTNESNFHMTPFFGDVTFV

SEQ ID NO: 30433 - DNA, 1279 bp, Muscodor strobelii
  misc_feature: SGI EST ID NO. CUFF.71992.0
  misc_feature: Variant of the nucleotide sequence at SEQ ID NO 30431
ggcaattatgactatttcctatgttgccagtcatgtaccagctgtgctattcaccgactgacggaaggattcacctaatgccactttaggaagctgtctatcatctgctgtgaaacattagatctcatgagccgctgtgttgctgctataaatgccatgacagatcatgcttttcgattggttcttattttgaaattctgtaggtcgtcgatagaattgcatgacgctacacagagccggcaacagcacaatatagatctcagaatgaatcgccggttgaacgcgctactcttggcgggcgcgccgctgttcctcgtgcggtgcactgcggctgctgctgtgccgtgccttgatgtcccttcttgcgacaatggattcggcactgttcagtatgacaagaccgtaccaaatggcgagaacgaatttccaaaaactcaggtcgatatgtgttatacggacagcaccatcgaaatcacttttactgcctttgacgaggtgaatttctatttcaacgaatctcaggtgacgaatgacccgatctatgaatttgaggtgatggaagcgttcatttacaaaggcaccaatgatccaacgacgtatttcgagtttgaagtctcgcccaataatgttacctggcaagccttcgtctacaacccatcaaagcttcgaaccgcaggtgcgccgttcgacaatggtcagcttcactacccgatctttgatggactcgtggctactacagctctggacaaggacgcacaaatctgggtctccaatgctagcattcccttggctctgttcagtgtcgacaccggcgaagctgagggcactaaatggcggatgaattttctccgaacggtcgtcgcaaacgacacgtttcccgctcagcttctgggtgcttggaatcctacaaatgagtcgaattttcacatgacaccgttctttggcgatgtcacttttgtttagaaagatcatggggatataagacgttgataattagatctaattcatgatcaacgtattcgattattaatctgcttctcttcgccagaaaatagcgagttgactactaactggaactacgaagcatgcgactcggatatcatgataccatgaaattcatcaattccaattggcatacatacattgttgaatggtagaggtccctttgtccttgatgagctcaaattaaagtaaggccccgagaaaaatgcatagtgccgaggtgcgtcgcaagcctacatggacgatagcgatatcacgagtttctttgctgagacgc

SEQ ID NO: 30434 - DNA, 927 bp, Muscodor strobelii
  misc_feature: SGI cDNA ID NO. 570467
  misc_feature: Elevated expression when VOC is produced
  misc_feature: Encodes the peptide sequence at SEQ ID NO 30435
atgctttccctcaaagccttggccgttctaggggcgtccgtgacgcccgcctttgctttctgcggttctttgacgcatctcgaccgaagacaagaaggcgaggtaccgatatcgacctttggatacaacggagttgtcggtccaacagtttggaatcagctagacgccgccaattcacaatgcgcgaccggaacaactcagtcgcctattgatatggtcgaaggacagttcacagaagttccggcaacagatatccagctcagtatcaacgacgctctagagggcgctacttttgagaatctgggtacgacagtagaggtggtgatggaagaagttgggggctcgatggtacttgatggagtaaactttactcttcaacaattccactttcatcacccaagtgagcacatggatgctggcgttagcttgccaatggaaatgcacatggtcttcgctaatgaagcatccgacatcgccgttattggcacatacatcgatcttgccgactcttcgcctcttcaaatcattcaactcatcagcggccgcgcaacgtcatcactactcgagactatcttcgcttcggttggagagattgcagagcccggcaccgagacgacgacgcaacctcttatcttctcagagctagtcaatttcctcacccaagaaaacagcttccagagatacacgggttcccttactacgccaccttgcagtgaaggggtctcatggctagtatcgacatcgaaactccaattatcgaaatcaacattccagacagttcgagatactatcggtttcaattcaaggttcccgcaaggcaccctcggcgagccaaatgcattggccgctagtgggcaagccggagtcgaggctccgacagaggaggttgccgctgctcgaagactaagacgcacaagaaagttttaa

SEQ ID NO: 30435 - protein, 308 aa, Muscodor strobelii
  misc_feature: SGI Peptide ID NO. 570467
  misc_feature (40)..(285): Pfam Id: PF00194 Pfam Desc: Eukaryotic-type carbonic anhydrase
  misc_feature (227)..(255): Pfam Id: PF00194 Pfam Desc: Eukaryotic-type carbonic anhydrase
  misc_feature (2)..(282): NCBI GI: 46139161 Blast Desc: FG11095.1 [Gibberella zeae PH-1]
  misc_feature (15)..(284): NCBI GI: 116202911 Blast Desc: CHGG_09340 [Chaetomium globosum CBS 148.51] gi|88177858|gb|EAQ85326.1| CHGG_09340 [Chaetomium globosum CBS 148.51]
  misc_feature (1)..(281): NCBI GI: 171682730 Blast Desc: protein product [Podospora anserina] gi|170941324|emb|CAP66974.1| protein product [Podospora anserina]
  misc_feature (9)..(287): NCBI GI: 256729568 Blast Desc: NECHADRAFT_63216 [Nectria haematococca mpVI 77-13-4]
  misc_feature (4)..(282): NCBI GI: 39952099 Blast Desc: MGG_01692 [Magnaporthe grisea 70-15] gi|145020466|gb|EDK04595.1| MGG_01692 [Magnaporthe grisea 70-15]
  misc_feature (17)..(282): NCBI GI: 46117522 Blast Desc: FG04603.1 [Gibberella zeae PH-1]
  misc_feature (22)..(286): NCBI GI: 170098596 Blast Desc: [Laccaria bicolor S238N-H82] gi|164644955|gb|EDR09204.1| [Laccaria bicolor S238N-H82]
  misc_feature (1)..(290): NCBI GI: 238844038 Blast Desc: periplasmic alpha-carbonic anhydrase [Microsporum canis CBS 113480]
  misc_feature (22)..(286): NCBI GI: 170107348 Blast Desc: [Laccaria bicolor S238N-H82] gi|164640098|gb|EDR04365.1| [Laccaria bicolor S238N-H82]
  misc_feature (12)..(168): NCBI GI: 85096174 Blast Desc: NCU05653 [Neurospora crassa OR74A] gi|28921696|gb|EAA30978.1| conserved [Neurospora crassa OR74A]
  misc_feature (40)..(271): SWISSPROT Homolog: EC 4.2.1.1 Carbonate dehydratase
  misc_feature: Useful for introducing or modulating the production of volatile compounds
MLSLKALAVLGASVTPAFAFCGSLTHLDRRQEGEVPISTFGYNGVVGPTVWNQLDAANSQCATGTTQSPIDMVEGQFTEVPATDIQLSINDALEGATFENLGTTVEVVMEEVGGSMVLDGVNFTLQQFHFHHPSEHMDAGVSLPMEMHMVFANEASDIAVIGTYIDLADSSPLQIIQLISGRATSSLLETIFASVGEIAEPGTETTTQPLIFSELVNFLTQENSFQRYTGSLTTPPCSEGVSWLVSTSKLQLSKSTFQTVRDTIGFNSRFPQGTLGEPNALAASGQAGVEAPTEEVAAARRLRRTRKF

SEQ ID NO: 30436 - DNA, 1619 bp, Muscodor strobelii
  misc_feature: SGI EST ID NO. CUFF.72001.0
  misc_feature: Variant of the nucleotide sequence at SEQ ID NO 30434
cgaaaccacaggcgtctcctgaggctgggcgttggccaagaatgcgctgccagatccaatcccaccctcacgtcagaaagcgaggataatatcatatataattaggcactgtcgatccatgtgcattttcgggctttcgactctgtctctataattatcccttctatacggtgtatcctcgctgggcgttggttcatcaagtgattttgcatctgtttaatagagcggtttcctttgttgccatctctaatttctgaaatctgaagacattctctcattatattgtcattatcattctttttgaatctattatcattctattcttctgtatttccacgacatgctttccctcaaagccttggccgttctaggggcgtccgtgacgcccgcctttgctttctgcggttctttgacgcatctcgaccgaagacaagaaggcgaggtaccgatatcgacctttggatacaacggagttgtcggtccaacagtttggaatcagctagacgccgccaattcacaatgcgcgaccggaacaactcagtcgcctattgatatggtcgaaggacagttcacagaagttccggcaacagatatccagctcagtatcaacgacgctctagagggcgctacttttgagaatctgggtacgacagtagaggtggtgatggaagaagttgggggctcgatggtacttgatggagtaaactttactcttcaacaattccactttcatcacccaagtgagcacatggatgctggcgttagcttgccaatggaaatgcacatggtcttcgctaatgaagcatccgacatcgccgttattggcacatacatcgatcttgccgactcttcgcctcttcaaatcattcaactcatcagcggccgcgcaacgtcatcactactcgagactatcttcgcttcggttggagagattgcagagcccggcaccgagacgacgacgcaacctcttatcttctcagagctagtcaatttcctcacccaagaaaacagcttccagagatacacgggttcccttactacgccaccttgcagtgaaggggtctcatggctagtatcgacatcgaaactccaattatcgaaatcaacattccagacagttcgagatactatcggtttcaattcaaggttcccgcaaggcaccctcggcgagccaaatgcattggccgctagtgggcaagccggagtcgaggctccgacagaggaggttgccgctgctcgaagactaagacgcacaagaaagttttaattaaggagacatgccttgtcaagatatgttaaaggcacccaggactggtacgattttatgtttgaggccgagtatcgaacttctagattggcggaaatgttcatcagtcaggcacagcgagcatgcttacgaatgattctgatcggtggaatgcattctgagaggacttctgatacgactagggagagactaagtaacaagatgttagaagtaccgtgtacgctccagacaccctctagctgaggcgctacttcgacagaggatagcaaaactttcccaattctgatatgcggaccagagtatagatctaattgaaaatgacgaacgcaactattcacctaatgcaatagac

SEQ ID NO: 30437 - DNA, 870 bp, Muscodor strobelii
  misc_feature: SGI cDNA ID NO. 570468
  misc_feature: Encodes the peptide sequence at SEQ ID NO 30438
atggctgagttttcaattaaagatgaagactttgcaaatatcaaggggaaagtagtcgttgttaccggcgggtcttcaggtattggtttagccacggtgaagttactgctatcaaacggggcatctgtaatcaacggtgacgtgcagccacccgcagaagcagtggattcggaggctttcattttccagaagaccgatgtgacagtctggtctgaggtattaagtctcttcaagaaagcaaaagaagtatacggtcgcgttgaccatgcctttgcaaatgctggtatctcacctaggggtaattatctggctaccgagctagatgaaaatggggatctgaaagagcccagttcgttgaccatcgacgttaatttaaatggtgtgataaacgctacaactatcgcaatctattatatccgtcaaaatattgagggtggtagtgttgtgatgacggcctcaatcgcttctatgcagcgtttccgagcagtcgattatgctacagccaagcatggtgtactcgggtacatgagagccatgaggcaagtcatacaagaggcgaatctcccgattcgggtcaatgcactcgcaccctcttggacagaaacgggcgttgtgccgtcaaagctgttacatgcctttggagagcccgtacagagtccagatgaagttgcgcctgctgcgttgcttttgatggcagatgcatctcgccagggtcatgtgatacatatcgcgcgcggcaggttcaaggaagtagacgaagcagttttgttacccgcttatgaaaagattttgggagggtttgtaaatgaagacactacactgcagcgcatgttagatgcgatgaatggcgtttacaaagacaaggtgtaa

SEQ ID NO: 30438 - protein, 289 aa, Muscodor strobelii
  misc_feature: SGI Peptide ID NO. 570468
  misc_feature (17)..(184): Pfam Id: PF00106 Pfam Desc: short chain dehydrogenase
  misc_feature (17)..(44): Pfam Id: PF00106 Pfam Desc: short chain dehydrogenase
  misc_feature (1)..(277): NCBI GI: 256734282 Blast Desc: NECHADRAFT_92184 [Nectria haematococca mpVI 77-13-4]
  misc_feature (1)..(277): NCBI GI: 46109900 Blast Desc: FG01832.1 [Gibberella zeae PH-1]
  misc_feature (1)..(278): NCBI GI: 242772400 Blast Desc: hydroxyacyl dehydrogenase, [Talaromyces stipitatus ATCC 10500] gi|218721651|gb|EED21069.1| hydroxyacyl dehydrogenase, [Talaromyces stipitatus ATCC 10500]
  misc_feature (1)..(278): NCBI GI: 212531217 Blast Desc: 15-hydroxyprostaglandin dehydrogenase, [Penicillium marneffei ATCC 18224] gi|210071129|gb|EEA25218.1| 15-hydroxyprostaglandin dehydrogenase, [Penicillium marneffei
  misc_feature (1)..(278): NCBI GI: 156048875 Blast Desc: SS1G_08144 [Sclerotinia sclerotiorum 1980] gi|154692543|gb|EDN92281.1| SS1G_08144 [Sclerotinia sclerotiorum 1980]
  misc_feature (1)..(278): NCBI GI: 189194023 Blast Desc: conserved [Pyrenophora tritici-repentis Pt-1C-BFP] gi|187978914|gb|EDU45540.1| conserved [Pyrenophora tritici-repentis Pt-1C-BFP]
  misc_feature (1)..(278): NCBI GI: 154317200 Blast Desc: BC1G_03502 [Botryotinia fuckeliana B05.10] gi|150844919|gb|EDN20112.1| BC1G_03502 [Botryotinia fuckeliana B05.10]
  misc_feature (1)..(273): NCBI GI: 240110062 Blast Desc: oxidoreductase,short chain dehydrogenase, [Coccidioides posadasii C735 delta SOWgp]
  misc_feature (1)..(278): NCBI GI: 169609050 Blast Desc: SNOG_07609 [Phaeosphaeria nodorum SN15] gi|111063955|gb|EAT85075.1| SNOG_07609 [Phaeosphaeria nodorum SN15]
  misc_feature (1)..(273): NCBI GI: 119179075 Blast Desc: CIMG_08324 [Coccidioides immitis RS]
  misc_feature (31)..(246): SWISSPROT Homolog: EC 1.1.1.100 3-oxoacyl-[acyl-carrier-protein] reductase
MAEFSIKDEDFANIKGKVVVVTGGSSGIGLATVKLLLSNGASVINGDVQPPAEAVDSEAFIFQKTDVTVWSEVLSLFKKAKEVYGRVDHAFANAGISPRGNYLATELDENGDLKEPSSLTIDVNLNGVINATTIAIYYIRQNIEGGSVVMTASIASMQRFRAVDYATAKHGVLGYMRAMRQVIQEANLPIRVNALAPSWTETGVVPSKLLHAFGEPVQSPDEVAPAALLLMADASRQGHVIHIARGRFKEVDEAVLLPAYEKILGGFVNEDTTLQRMLDAMNGVYKDKV

SEQ ID NO: 30439 - DNA, 946 bp, Muscodor strobelii
  misc_feature: SGI EST ID NO. CUFF.72010.0
  misc_feature: Variant of the nucleotide sequence at SEQ ID NO 30437
gcgagacatcggttcgatcatggctgagttttcaattaaagatgaagactttgcaaatatcaaggggaaagtagtcgttgttaccggcgggtcttcaggtattggtttagccacggtgaagttactgctatcaaacggggcatctgtaatcaacggtgacgtgcagccacccgcagaagcagtggattcggaggctttcattttccagaagaccgatgtgacagtctggtctgaggtattaagtctcttcaagaaagcaaaagaagtatacggtcgcgttgaccatgcctttgcaaatgctggtatctcacctaggggtaattatctggctaccgagctagatgaaaatggggatctgaaagagcccagttcgttgaccatcgacgttaatttaaatggtgtgataaacgctacaactatcgcaatctattatatccgtcaaaatattgagggtggtagtgttgtgatgacggcctcaatcgcttctatgcagcgtttccgagcagtcgattatgctacagccaagcatggtgtactcgggtacatgagagccatgaggcaagtcatacaagaggcgaatctcccgattcgggtcaatgcactcgcaccctcttggacagaaacgggcgttgtgccgtcaaagctgttacatgcctttggagagcccgtacagagtccagatgaagttgcgcctgctgcgttgcttttgatggcagatgcatctcgccagggtcatgtgatacatatcgcgcgcggcaggttcaaggaagtagacgaagcagttttgttacccgcttatgaaaagattttgggagggtttgtaaatgaagacactacactgcagcgcatgttagatgcgatgaatggcgtttacaaagacaaggtgtaagcggcgctggtttcccaacgatagctagcgcaataatcgtcatgcacttcacgaatt

SEQ ID NO: 30440 - DNA, 699 bp, Muscodor strobelii
  misc_feature: SGI cDNA ID NO. 570469
  misc_feature: Encodes the peptide sequence at SEQ ID NO 30441
atggcggttgtagggatatcgagcggtgtcgcaatcataatcttgccaacgatttgcaaaccgcttcccgcattatggggtgcagagcacggtgaatgcagctcgacactaaatagtcgtctcggttactttttgtcggccatctccattgtgactgacttcaccctggctgcgctgcccgccctcattcttcgcacagttcaactcaagatacgcttgaaaatctacgtcgccatcattctgtctttaggcgcgtttgcgagctcagcgactatcgtgcggctcaaatacctaacgctctacaacaacccagaagagttcttgtatggagcaggcaagatagccatttggtcaatattggaggagggtattggcattatcgcaggctctttacccacacttcgacccttgcttcggtacgtgccgtttctgggtagtacgtacgggaaggggacgagcggtaacaatggttgcacctaccgtcatcgaactcgcggcgctttccgcatggatacatttgatgcaaccactgaaatcgaaggtgggcccgggaacaaagaccagtctgatggcgatagtacgaaatacatattgaaagagaccgactaccaccttaactctactacgcagaatggggggcatataatcaagcaaacagagttccgtgttacctcagaagatgctccagcagtatggtag

SEQ ID NO: 30441 - protein, 232 aa, Muscodor strobelii
  misc_feature: SGI Peptide ID NO. 570469
  misc_feature (1)..(211): NCBI GI: 154317202 Blast Desc: BC1G_03503 [Botryotinia fuckeliana B05.10] gi|150844920|gb|EDN20113.1| BC1G_03503 [Botryotinia fuckeliana B05.10]
  misc_feature (6)..(202): NCBI GI: 256733780 Blast Desc: NECHADRAFT_36347 [Nectria haematococca mpVI 77-13-4]
  misc_feature (3)..(201): NCBI GI: 46109902 Blast Desc: FG01833.1 [Gibberella zeae PH-1]
  misc_feature (1)..(210): NCBI GI: 156048871 Blast Desc: SS1G_08142 [Sclerotinia sclerotiorum 1980] gi|154692541|gb|EDN92279.1| SS1G_08142 [Sclerotinia sclerotiorum 1980]
  misc_feature (6)..(221): NCBI GI: 189194021 Blast Desc: conserved [Pyrenophora tritici-repentis Pt-1C-BFP] gi|187978913|gb|EDU45539.1| conserved [Pyrenophora tritici-repentis Pt-1C-BFP]
  misc_feature (1)..(208): NCBI GI: 169609048 Blast Desc: SNOG_07608 [Phaeosphaeria nodorum SN15] gi|160701772|gb|EAT85074.2| SNOG_07608 [Phaeosphaeria nodorum SN15]
  misc_feature (15)..(211): NCBI GI: 242772395 Blast Desc: conserved [Talaromyces stipitatus ATCC 10500] gi|218721650|gb|EED21068.1| conserved [Talaromyces stipitatus ATCC 10500]
  misc_feature (1)..(211): NCBI GI: 212531215 Blast Desc: conserved [Penicillium marneffei ATCC 18224] gi|210071128|gb|EEA25217.1| conserved [Penicillium marneffei ATCC 18224]
  misc_feature (1)..(230): NCBI GI: 256732365 Blast Desc: NECHADRAFT_41488 [Nectria haematococca mpVI 77-13-4]
  misc_feature (6)..(222): NCBI GI: 256726131 Blast Desc: NECHADRAFT_81725 [Nectria haematococca mpVI 77-13-4]
MAVVGISSGVAIIILPTICKPLPALWGAEHGECSSTLNSRLGYFLSAISIVTDFTLAALPALILRTVQLKIRLKIYVAIILSLGAFASSATIVRLKYLTLYNNPEEFLYGAGKIAIWSILEEGIGIIAGSLPTLRPLLRYVPFLGSTYGKGTSGNNGCTYRHRTRGAFRMDTFDATTEIEGGPGNKDQSDGDSTKYILKETDYHLNSTTQNGGHIIKQTEFRVTSEDAPAVW

SEQ ID NO: 30442 - DNA, 2666 bp, Muscodor strobelii
  misc_feature: SGI EST ID NO. CUFF.72024.0
  misc_feature: Variant of the nucleotide sequence at SEQ ID NO 30440
cggattcaaaattttagcaatcctctaccaaattcgccgacccgctacagcgggtcaaatgcacggacagccacatcagctagtagcccgaaggaagctaaacagaaactacaatacgagactgatcaaattcatatttcaataaacgcaaatccgacgcggacgatgtcgccaaaagcttagtcggcacaagctgaaatagagtataaatcgtgactggattttgtttcgaacgccaaggtctggccacgttttcgtcaagcgacagacgccaaactcgccgatggaactggcgacatctctcgggagtggtgatgatggcggtagggatcccttggcaagactgacagatggtgcactaggctggcgagctgggctcgtcgatacgactagatagatgatcttctcggtcagctctcgagcctctgaccttgctttgaccttgctcgccttgtcccgcttgctcaacatgaaattgcctgccgaatatactagctggtcgatcatcgctatgtgaagctagattcgaaatcctttcataatcgagattgctcgtggcttgcagtgactatttgggagtaacgagcctaacgacaactgttaactatcattactatgcctggattagaccattagagtaccctgccttacgcatttccccagcttcaaacgacgaggagaatctgtcaaggctgtctaaaaccccaggacgggccacgatcagctttcgctgcatccccattcaaatgcaggggcaacccaagctgttggttccggcattgcgttaacgaaatcttgtctccctaccaactttggtctttgaagtgttacttttaattcaacagaactcttcctaagtgctggcatcgtcaacgattgctcttcatgagcacttgtgcattgcgaccctgatattgctttggccttgcctctcgccagaatcaaggccctcgtcatcgctcatgatcgagtcaaagttgcgctgtcggtgaacaacctgttcgcaggtttcagcatggccgtaacgtaccccctatcaagcgacggcgcggtcacgctcatcgtgtccagcattattctcgccctttgttggatatgcgtggctcttcgaattgtctctcgacattggctgatagattcttttggtgcggatgacttgcttatggtcctcggattgatattgttcactccatgtacactcctagttgttgtcatatgtttctacggtgttggatatcactccgaagaacttgaccaaagctcaatatctttcggtaccaaactatatttcatcagtcaaattttctacattacctccacggtccctattaaatgtagcatttgcatggctctaattcgcattgctggatctcgacgccaatttacgtacaccaattgggcgatcatggcggttgtagggatatcgagcggtgtcgcaatcataatcttgccaacgatttgcaaaccgcttcccgcattatggggtgcagagcacggtgaatgcagctcgacactaaatagtcgtctcggttactttttgtcggccatctccattgtgactgacttcaccctggctgcgctgcccgccctcattcttcgcacagttcaactcaagatacgcttgaaaatctacgtcgccatcattctgtctttaggcgcgtttgcgagctcagcgactatcgtgcggctcaaatacctaacgctctacaacaacccagaagagttcttgtatggagcaggcaagatagccatttggtcaatattggaggagggtattggcattatcgcaggctctttacccacacttcgacccttgcttcggtacgtgccgtttctgggtagtacgtacgggaaggggacgagcggtaacaatggttgcacctaccgtcatcgaactcgcggcgctttccgcatggatacatttgatgcaaccactgaaatcgaaggtgggcccgggaacaaagaccagtctgatggcgatagtacgaaatacatattgaaagagaccgactaccaccttaactctactacgcagaatggggggcatataatcaagcaaacagagttccgtgttacctcagaagatgctccagcagtatggtagaatatacggaaccgaaatgttttcttactataaatacacaagtagcatacctatacccatgaaaatcttattctacgaggagagggaggctatcctccttgcaagacactaaacagaatgttcaatgtctcactatcaatcatattcatgttgtggcgaatgccctatatacctagataccgtctcgttatatatgtagactaatgcctgttgcagcgtaacgagaggtgatatgacttccaggaggacattttccattatatgcctcagtactcatcttctcacggtagaacatgagtgttggtcggcctttcagtggaccagcttaggcggagttttatcaagtcagactcttgccctatattggtacaatgggtacaatgtcgaataacgggtcactgacatcgctaacgcgacttatcggctagcatcccctggagaaagagatttatttcagtttcttctgcattgcgtcttcgcgaagaatcttgtcgatctcgggcatgcggaatacattccatgaagtgagatcaacaagccattcgcccatggtatggccaaa

SEQ ID NO: 30443 - DNA, 867 bp, Muscodor strobelii
  misc_feature: SGI cDNA ID NO. 570470
  misc_feature: Encodes the peptide sequence at SEQ ID NO 30444
atggcgggtcccaagccaggtcaaaagacggtgttggttaccggctgcacacccggaggcatcggtcatagcgtctgtctcgagtattggaagcaaggccttcatgtcatcgcaacggcccgacgcctcgaggtcctcaccgacttggcggagctggggatgagcactgttgagcttgacgtgaccgacgctgagagtatcaagagatgtcacaacgaggttaccaaaatcaccggcggaaagctggacatcctagtgaacaatgctggcaaaacacatactcacccggctctcgacatttcgcttccagacgtacgttcgacgtttgaaacaaatgtcttcgcaatcatggcaatggtccaagcattcatagacctactcattgctgccaaaggcctcatcgtgaacatatcatcactctcatccgtgacaccctacctcttcggctccgtctactgtgccagtaaggctgccgtcagcgcctattctcggacccttcgcttcgagctcgcaccattcgatgtccgtgttatggtctctttgacaggtaccgtgaaaagcaatacggccagccaggccaacagattgctacctgagaacagtctatatcaaaaagtgaagcacatcttcgagtggagggttgtattcagccaaaatagcaacactatggatacaacgactttcgcaaagaaattggtctcggattcgcttcgcccagaacggccggtgtggctgcgaagtatatttggacggtttggccataccatgggcgaatggcttgttgatctcacttcatggaatgtattccgcatgcccgagatcgacaagattcttcgcgaagacgcaatgcagaagaaactgaaataa

SEQ ID NO: 30444 - protein, 288 aa, Muscodor strobelii
  misc_feature: SGI Peptide ID NO. 570470
  misc_feature (9)..(171): Pfam Id: PF00106 Pfam Desc: short chain dehydrogenase
  misc_feature (1)..(287): NCBI GI: 85107683 Blast Desc: NCU07904 [Neurospora crassa OR74A] gi|28924026|gb|EAA33184.1| conserved [Neurospora crassa OR74A]
  misc_feature (3)..(287): NCBI GI: 171681367 Blast Desc: protein product [Podospora anserina] gi|170940642|emb|CAP65870.1| protein product [Podospora anserina]
  misc_feature (3)..(287): NCBI GI: 170940076 Blast Desc: protein product [Podospora anserina]
  misc_feature (5)..(288): NCBI GI: 145605818 Blast Desc: MGG_11816 [Magnaporthe grisea 70-15] gi|145013603|gb|EDJ98244.1| MGG_11816 [Magnaporthe grisea 70-15]
  misc_feature (7)..(285): NCBI GI: 261357889 Blast Desc: NADPH-dependent 1-acyldihydroxyacetone phosphate reductase [Verticillium albo-atrum VaMs.102]
  misc_feature (11)..(240): NCBI GI: 46110731 Blast Desc: FG02247.1 [Gibberella zeae PH-1]
  misc_feature (11)..(250): NCBI GI: 256726637 Blast Desc: [Nectria haematococca mpVI 77-13-4]
  misc_feature (59)..(275): NCBI GI: 212539352 Blast Desc: short-chain dehydrogenase, [Penicillium marneffei ATCC 18224] gi|210067130|gb|EEA21222.1| short-chain dehydrogenase, [Penicillium marneffei ATCC 18224]
  misc_feature (8)..(279): NCBI GI: 154297154 Blast Desc: BC1G_12236 [Botryotinia fuckeliana B05.10] gi|150843065|gb|EDN18258.1| BC1G_12236 [Botryotinia fuckeliana B05.10]
  misc_feature (97)..(287): NCBI GI: 116195022 Blast Desc: CHGG_04109 [Chaetomium globosum CBS 148.51] gi|88180022|gb|EAQ87490.1| CHGG_04109 [Chaetomium globosum CBS 148.51]
  misc_feature (8)..(285): SWISSPROT Homolog: EC 1.1.1.101 Acylglycerone-phosphate reductase
MAGPKPGQKTVLVTGCTPGGIGHSVCLEYWKQGLHVIATARRLEVLTDLAELGMSTVELDVTDAESIKRCHNEVTKITGGKLDILVNNAGKTHTHPALDISLPDVRSTFETNVFAIMAMVQAFIDLLIAAKGLIVNISSLSSVTPYLFGSVYCASKAAVSAYSRTLRFELAPFDVRVMVSLTGTVKSNTASQANRLLPENSLYQKVKHIFEWRVVFSQNSNTMDTTTFAKKLVSDSLRPERPVWLRSIFGRFGHTMGEWLVDLTSWNVFRMPEIDKILREDAMQKKLK

SEQ ID NO: 30445 - DNA, 875 bp, Muscodor strobelii
  misc_feature: SGI EST ID NO. CUFF.72016.0
  misc_feature: Variant of the nucleotide sequence at SEQ ID NO 30443
cagcgagacagatttcacctaactaaaaggaagaacttcatttctcaacggaaaagtgtcaaccattgaaagatggcgggtcccaagccaggtcaaaagacggtgttggttaccggctgcacacccggaggcatcggtcatagcgtctgtctcgagtattggaagcaaggccttcatgtcatcgcaacggcccgacgcctcgaggtcctcaccgacttggcggagctggggatgagcactgttgagcttgacgtgaccgacgctgagagtatcaagagatgtcacaacgaggttaccaaaatcaccggcggaaagctggacatcctagtgaacaatgctggcaaaacacatactcacccggctctcgacatttcgcttccagacgtacgttcgacgtttgaaacaaatgtcttcgcaatcatggcaatggtccaagcattcatagacctactcattgctgccaaaggcctcatcgtgaacatatcatcactctcatccgtgacaccctacctcttcggctccgtctactgtgccagtaaggctgccgtcagcgcctattctcggacccttcgcttcgagctcgcaccattcgatgtccgtgttatggtctctttgacaggtaccgtgaaaagcaatacggccagccaggccaacagattgctacctgagaacagtctatatcaaaaagtgaagcacatcttcgagtggagggttgtattcagccaaaatagcaacactatggatacaacgactttcgcaaagaaattggtctcggattcgcttcgcccagaacggccggtgtggctgcgaagtatatttggacgtccagactggttctggtatggcggaatgtctggcctcgtgtggcatgtata

SEQ ID NO: 30446 - DNA, 1755 bp, Muscodor strobelii
  misc_feature: SGI cDNA ID NO. 570471
  misc_feature: Reduced expression when VOC is produced
  misc_feature: Encodes the peptide sequence at SEQ ID NO 30447
atggctccttcaatcacagcctcgggtccctcgaacgaggagcatgaccccgagaagaatgtgcacacccccatcgatggtgacgttcgagatgcgagtagtgatgatgcttcatctgaacacaaacaagagggtatccgacaagtcgaagccatcacacaagtatgggacaagaaaatgctaattgcaatgttcatcttgctatacctagtgtcttttgtcgacgcccttgcacaatcagtcggcgacagtctcactccatacgtgacctcgtcctttggtcagcacggtcttctctcaactgccaatcttgttgcacgaatcattggcggtgtgatcaatctcgtcattgccaaggtcattgacatctggggtcgaagcgaaggcttcgtgattatggtgctcatcactgtcattggggagatcctgaaggccgtctcgtacgatgtcgaaaccttcgcagccggaactaccctttattgggttggccatatcggcatgaactatattatcagtattatgttggccgatactaccacgctacgcaatcgaatcatactcttcggacttcaaagcacgcctggcatcgtcactgttttcgccggttcaaggatcgcagaacttttttaccaagaagcaaactttcggtggtcgttcggcgctttcgctatcctgctaattgcgtttgcagcgcctgtctgtatcatttttctcctcagcaagcgcaaggctgtaagacaaggtgttattgtgcctcgtaagagtggtcgtactgcttggcagtcattcaagtattatctcgttgagtttgacatcgtgggaatgatactcatcatatttggattcatccttctgcttcttcctttcagtctgattgactacgctccctatggctggcgcacgccttacatcatcgccatgatcattctaggcgctgtgttgctagcagcatttgccgtctgggaaaggttcttcgcaacagtctcatactttcctttcaagtaccttaaggacagaactattttgggagcttgcggattgaatgcagtcatgttcctttctatcttttgctgggatgcgtactatgggtcatacctgcaagttgtacatggcttgagcattaccacatcttactatgtgctcaacgggttgtcccttgcgtcaaacttcatcgggccgttcgtaggactgtttgtgtcgaggactggttcattcaaatgggccgctattataggcattccatttgttgtcttgggcaccgtcctcctcgtcgaataccgtaaaccaagcacgtccgtcgggctcttagtccttttccagattctcaatggaattggtgatggaatttgggctcccatggggcagcttgccatcatggccgctgttccacaccagcaagtcgctgtcggtttggctttctttgggttatttggatccatcggatcagcagttggttacgctattgccggcgccatctggaataatatcctcccggcgaagctagaggaattcctccctcctgacgtcgacgccgctacagtctttggttccattgaggttcagctgtcatatccttttggtactcccgcgcgcgacgcgattgttgctgcgtacgctgatgtgcagcgcaagttggtcattgcaggctctgcattcctgcctctggctatcctgtttatctttgtgtggaagaacattaacgtacgccaattggaggcaacacatggaactcaggccaagggcacgatattttaa

SEQ ID NO: 30447 - protein, 584 aa, Muscodor strobelii
  misc_feature: SGI Peptide ID NO. 570471
  misc_feature (68)..(486): Pfam Id: PF07690 Pfam Desc: Major Facilitator Superfamily
  misc_feature (336)..(486): Pfam Id: PF07690 Pfam Desc: Major Facilitator Superfamily
  misc_feature (10)..(584): NCBI GI: 256733690 Blast Desc: NECHADRAFT_78056 [Nectria haematococca mpVI 77-13-4]
  misc_feature (4)..(584): NCBI GI: 239613552 Blast Desc: siderophore iron transporter mirB [Ajellomyces dermatitidis ER-3]
  misc_feature (4)..(584): NCBI GI: 261194439 Blast Desc: siderophore iron transporter mirB [Ajellomyces dermatitidis SLH14081] gi|239588162|gb|EEQ70805.1| siderophore iron transporter mirB [Ajellomyces dermatitidis SLH14081]
  misc_feature (26)..(584): NCBI GI: 256722144 Blast Desc: NECHADRAFT_55481 [Nectria haematococca mpVI 77-13-4]
  misc_feature (11)..(584): NCBI GI: 225561390 Blast Desc: siderochrome-iron transporter MirB [Ajellomyces capsulatus G186AR]
  misc_feature (11)..(584): NCBI GI: 154282511 Blast Desc: conserved [Ajellomyces capsulatus NAm1] gi|150410231|gb|EDN05619.1| conserved [Ajellomyces capsulatus NAm1]
  misc_feature (3)..(584): NCBI GI: 46136371 Blast Desc: FG09701.1 [Gibberella zeae PH-1]
  misc_feature (14)..(584): NCBI GI: 189191378 Blast Desc: siderophore iron transporter mirB [Pyrenophora tritici-repentis Pt-1C-BFP] gi|187973634|gb|EDU41133.1| siderophore iron transporter mirB [Pyrenophora tritici-repentis
  misc_feature (10)..(584): NCBI GI: 255939482 Blast Desc: Pc16g00920 [Penicillium chrysogenum Wisconsin 54-1255] gi|211585133|emb|CAP92762.1| Pc16g00920 [Penicillium chrysogenum Wisconsin 54-1255]
  misc_feature (11)..(584): NCBI GI: 183604869 Blast Desc: major facilitator superfamily transporter [Ajellomyces capsulatus]
  misc_feature: Useful for introducing or modulating the production of volatile compounds
MAPSITASGPSNEEHDPEKNVHTPIDGDVRDASSDDASSEHKQEGIRQVEAITQVWDKKMLIAMFILLYLVSFVDALAQSVGDSLTPYVTSSFGQHGLLSTANLVARIIGGVINLVIAKVIDIWGRSEGFVIMVLITVIGEILKAVSYDVETFAAGTTLYWVGHIGMNYIISIMLADTTTLRNRIILFGLQSTPGIVTVFAGSRIAELFYQEANFRWSFGAFAILLIAFAAPVCIIFLLSKRKAVRQGVIVPRKSGRTAWQSFKYYLVEFDIVGMILIIFGFILLLLPFSLIDYAPYGWRTPYIIAMIILGAVLLAAFAVWERFFATVSYFPFKYLKDRTILGACGLNAVMFLSIFCWDAYYGSYLQVVHGLSITTSYYVLNGLSLASNFIGPFVGLFVSRTGSFKWAAIIGIPFVVLGTVLLVEYRKPSTSVGLLVLFQILNGIGDGIWAPMGQLAIMAAVPHQQVAVGLAFFGLFGSIGSAVGYAIAGAIWNNILPAKLEEFLPPDVDAATVFGSIEVQLSYPFGTPARDAIVAAYADVQRKLVIAGSAFLPLAILFIFVWKNINVRQLEATHGTQAKGTIF

SEQ ID NO: 30448 - DNA, 2669 bp, Muscodor strobelii
  misc_feature: SGI EST ID NO. CUFF.72418.0
  misc_feature: Variant of the nucleotide sequence at SEQ ID NO 30446
agcatgtcttgtcatacatggtcgtgcagatgggctgaatgtatttgtatattagatcgccgatccgatgctttcgcatgctaagcagtctcttatgcttttatttacactgcaactcgccatcgcgaatggtctggttttcagaattgttactttcattgccaatccttctccgattgaactgtatgtaaggtggacatagaaagctacagattgcttttaacccgactggctgcacgatggctccttcaatcacagcctcgggtccctcgaacgaggagcatgaccccgagaagaatgtgcacacccccatcgatggtgacgttcgagatgcgagtagtgatgatgcttcatctgaacacaaacaagagggtatccgacaagtcgaagccatcacacaagtatgggacaagaaaatgctaattgcaatgttcatcttgctatacctagtgtcttttgtcgacgcccttgcacaatcagtcggcgacagtctcactccatacgtgacctcgtcctttggtcagcacggtcttctctcaactgccaatcttgttgcacgaatcattggcggtgtgatcaatctcgtcattgccaaggtcattgacatctggggtcgaagcgaaggcttcgtgattatggtgctcatcactgtcattggggagatcctgaaggccgtctcgtacgatgtcgaaaccttcgcagccggaactaccctttattgggttggccatatcggcatgaactatattatcagtattatgttggccgatactaccacgctacgcaatcgaatcatactcttcggacttcaaagcacgcctggcatcgtcactgttttcgccggttcaaggatcgcagaacttttttaccaagaagcaaactttcggtggtcgttcggcgctttcgctatcctgctaattgcgtttgcagcgcctgtctgtatcatttttctcctcagcaagcgcaaggctgtaagacaaggtgttattgtgcctcgtaagagtggtcgtactgcttggcagtcattcaagtattatctcgttgagtttgacatcgtgggaatgatactcatcatatttggattcatccttctgcttcttcctttcagtctgattgactacgctccctatggctggcgcacgccttacatcatcgccatgatcattctaggcgctgtgttgctagcagcatttgccgtctgggaaaggttcttcgcaacagtctcatactttcctttcaagtaccttaaggacagaactattttgggagcttgcggattgaatgcagtcatgttcctttctatcttttgctgggatgcgtactatgggtcatacctgcaagttgtacatggcttgagcattaccacatcttactatgtgctcaacgggttgtcccttgcgtcaaacttcatcgggccgttcgtaggactgtgagtagccatcagcaaacccatgaatgcactgtattaacgagaccatacaggtttgtgtcgaggactggttcattcaaatgggccgctattataggcattccatttgttgtcttgggcaccgtcctcctcgtcgaataccgtaaaccaagcacgtccgtcgggctcttagtccttttccagattctcaatggaattggtgatggaatttgggctcccatggggcagcttgccatcatggccgctgttccacaccagcaagtcgctgtcggtttggctttctttgggttatttggatccatcggatcagcagttggttacgctattgccggcgccatctggaataatatcctcccggcgaagctagaggaattcctccctcctgacgtcgacgccgctacagtctttggttccattgaggttcagctgtcatatccttttggtactcccgcgcgcgacgcgattgttgctgcgtacgctgatgtgcagcgcaagttggtcattgcaggctctgcattcctgcctctggctatcctgtttatctttgtgtggaagaacattaacgtacgccaattggaggcaacacatggaactcaggccaagggcacgatattttaagacattgataccctgatatagacctaacatatttccgcttataaataattctgctcatatgactttcccatggggaccaacctcagagcctggaatggagaacaagtttcagcatactggcggagttacctagctcatgagagattgatgacattaagtcgacatatctatgtaattgttgatattaataacaactgtgcatccagcggtaacctccctaagttcaacacctagaacagatgaccttatcatgtcaaatggcgtggctggtcatcactattggtaaaaattgaaatgttgaaaactgtgtttcggtactcgaatagattccgaactgctcattcgactttgaagtattcgcatgatgaatctagtcaatttgattaaagatataatcaaatcagacgcagcgcgatgtttttgaaagtcgaatctatgacgtgaaacaggggtgggttctttgctgaaattgtgaggctggttgctaccgcatagcctgacttgaaaatggatgttgggtcttggggatcttgaagttcgtgacccaaaatctctttccgaacaatgggtttgccgttccagacaactcgatatgccgtttcttgtgtatcaaatgtttcaa

SEQ ID NO: 30449 - DNA, 1899 bp, Muscodor strobelii
  misc_feature: SGI cDNA ID NO. 570472
  misc_feature: Encodes the peptide sequence at SEQ ID NO 30450
atggcatcactacctttgtgttacaacaatcaacctcttgacccaagtagaagaaccatacgagtcttgcggctgctgcccgggacctccgaaagcactcttcgtggaagtcttcaaactgtggcgctagacgataaaccgtcctatgaagccctctcatacacatggggtgcccgagtagagaatcgcactatcaagctggaggacagcaagaagtggttttctgagagcagcgaattgccgataaccgacaatctcttccgcgccctgagaagacttagatggctcgttaccccccgcaccctttgggttgacgcggtctgcatcaatcaagatgaccttgacgagcggagtgcgcaggtagcattgatggcagacatttatactagtgccacggccaccgttatctggcttggtgatgttgctgacactagtatccgtgatgcgaatctgacagcaagtcagaagatgcttcaatacgcgtcctcaattctaccgatggatattttatggaatcgcaactgccttccaatggagcatgcgttgcggaatgctgtaccttcttggcacactcgaggatggatcattcaagagttcgcgctcagtcgcaaccttcacttccgattcggctccaagactcgcgcaattggcgttgcaagtccttcgggtcaagaaggtggtgccattccagacagtggtttacttcttgaaaaaaccttattatttcctacgatcacaaccttatccaatgctttgaaaaagttagacgagatcagacaacagattgagcgtcgcaagccaatgtccttatatcacgctgttcttgctgcggcagcgtcggcaacaactgatcctagggacaaggtatactgtttgctgagttttctcaactccacagaaaaggacatgatcacacctgactatcgcatttcaaccgagttggcgtatagcagagcgacttttgcggcgtttagcgggaacacgaagcttgccatgctcgaattaatcaaatttgatctgtcagaaagctctcgcgctcttccgacttgggcgtacgactttcgcaactcagatccacgggggcgctatcgccgtgaagaagacacagccgggaataaaattcagtcgctgaagttgaatgcagaagggaccgaactcagtttctatggtgtttgcgttgacactgttgtaggaacttcgccatcccttcctggattctgggaggcatgtagtgaccatgcggatcacgacgtcagcacggagtcctgcatcgtcgcccagctagctcgcaaggtagttgacatggtgcagttaacagacgatgtcatcaaacgagagaatgaaaacagtgcaacggaagctcatagctctagcccaagtgagcacatcttcgcagcggatcgtcgtaagtatctcacggacctaatcttcacggcaacaagcgagaagatctttcaggagagcataccgtatgccctttttcatcactggacagctatcacctcacatctttgcatcgcgcgcactcaccctcctccttcaggcgagatacgcattcgcaatgaagcaggcgacatgaacctggaccatccaatggaacaacatacacgctactactgcgaagaagcatctggttccgcggtcctattcacaactatgggcggcggcttaggcatcgccccgaatggtattcgcggaggggacaagctggtgctcccactctccgaagcaagtacgggcggggtagaggctcgcgtagtaccattcactcagcccctggctatgattttgagacgccgctcaagtgataggtggacgtttcacgggcttgcccacttggatggacttggcgatacgtcccggttgattgcggctgctgaagagtatgtaatctgctga

SEQ ID NO: 30450 - protein, 632 aa, Muscodor strobelii
  misc_feature: SGI Peptide ID NO. 570472
  misc_feature (49)..(198): Pfam Id: PF06985 Pfam Desc: Heterokaryon incompatibility protein (HET)
  misc_feature (49)..(145): Pfam Id: PF06985 Pfam Desc: Heterokaryon incompatibility protein (HET)
  misc_feature (13)..(396): NCBI GI: 256724252 Blast Desc: NECHADRAFT_87550 [Nectria haematococca mpVI 77-13-4]
  misc_feature (11)..(354): NCBI GI: 169607951 Blast Desc: SNOG_07040 [Phaeosphaeria nodorum SN15] gi|111064571|gb|EAT85691.1| SNOG_07040 [Phaeosphaeria nodorum SN15]
  misc_feature (13)..(358): NCBI GI: 169617620 Blast Desc: SNOG_11993 [Phaeosphaeria nodorum SN15] gi|111059285|gb|EAT80405.1| SNOG_11993 [Phaeosphaeria nodorum SN15]
  misc_feature (18)..(354): NCBI GI: 256721799 Blast Desc: NECHADRAFT_53281 [Nectria haematococca mpVI 77-13-4]
  misc_feature (12)..(354): NCBI GI: 67538668 Blast Desc: AN5504.2 [Aspergillus nidulans FGSC A4] gi|40743474|gb|EAA62664.1| AN5504.2 [Aspergillus nidulans FGSC A4] gi|259485046|tpe|CBF81783.1| TPA: HET domain protein nidulans
  misc_feature (19)..(355): NCBI GI: 21622379 Blast Desc: related to heterokaryon incompatibility protein het-6 [Neurospora crassa]
  misc_feature (19)..(355): NCBI GI: 85079995 Blast Desc: NCU03354 [Neurospora crassa OR74A] gi|28917528|gb|EAA27227.1| [Neurospora crassa OR74A]
  misc_feature (18)..(354): NCBI GI: 261360716 Blast Desc: ankyrin and HET domain-containing protein [Verticillium albo-atrum VaMs.102]
  misc_feature (10)..(351): NCBI GI: 154312184 Blast Desc: BC1G_06125 [Botryotinia fuckeliana B05.10] gi|150850088|gb|EDN25281.1| BC1G_06125 [Botryotinia fuckeliana B05.10]
  misc_feature (8)..(415): NCBI GI: 238498684 Blast Desc: conserved [Aspergillus flavus NRRL3357] gi|220693851|gb|EED50196.1| conserved [Aspergillus flavus NRRL3357]
MASLPLCYNNQPLDPSRRTIRVLRLLPGTSESTLRGSLQTVALDDKPSYEALSYTWGARVENRTIKLEDSKKWFSESSELPITDNLFRALRRLRWLVTPRTLWVDAVCINQDDLDERSAQVALMADIYTSATATVIWLGDVADTSIRDANLTASQKMLQYASSILPMDILWNRNCLPMEHALRNAVPSWHTRGWIIQEFALSRNLHFRFGSKTRAIGVASPSGQEGGAIPDSGLLLEKTLLFPTITTLSNALKKLDEIRQQIERRKPMSLYHAVLAAAASATTDPRDKVYCLLSFLNSTEKDMITPDYRISTELAYSRATFAAFSGNTKLAMLELIKFDLSESSRALPTWAYDFRNSDPRGRYRREEDTAGNKIQSLKLNAEGTELSFYGVCVDTVVGTSPSLPGFWEACSDHADHDVSTESCIVAQLARKVVDMVQLTDDVIKRENENSATEAHSSSPSEHIFAADRRKYLTDLIFTATSEKIFQESIPYALFHHWTAITSHLCIARTHPPPSGEIRIRNEAGDMNLDHPMEQHTRYYCEEASGSAVLFTTMGGGLGIAPNGIRGGDKLVLPLSEASTGGVEARVVPFTQPLAMILRRRSSDRWTFHGLAHLDGLGDTSRLIAAAEEYVIC

SEQ ID NO: 30451 - DNA, 1247 bp, Muscodor strobelii
  misc_feature: SGI EST ID NO. CUFF.72042.0
  misc_feature: Variant of the nucleotide sequence at SEQ ID NO 30449
ggacaaggtatactgtttgctgagttttctcaactccacagaaaaggacatgatcacacctgactatcgcatttcaaccgagttggcgtatagcagagcgacttttgcggcgtttagcgggaacacgaagcttgccatgctcgaattaatcaaatttgatctgtcagaaagctctcgcgctcttccgacttgggcgtacgactttcgcaactcagatccacgggggcgctatcgccgtgaagaagacacagccgggaataaaattcagtcgctgaagttgaatgcagaagggaccgaactcagtttctatggtgtttgcgttgacactgttgtaggaacttcgccatcccttcctggattctgggaggcatgtagtgaccatgcggatcacgacgtcagcacggagtcctgcatcgtcgcccagctagctcgcaaggtagttgacatggtgcagttaacagacgatgtcatcaaacgagagaatgaaaacagtgcaacggaagctcatagctctagcccaagtgagcacatcttcgcagcggatcgtcgtaagtatctcacggacctaatcttcacggcaacaagcgagaagatctttcaggagagcataccgtatgccctttttcatcactggacagctatcacctcacatctttgcatcgcgcgcactcaccctcctccttcaggcgagatacgcattcgcaatgaagcaggcgacatgaacctggaccatccaatggaacaacatacacgctactactgcgaagaagcatctggttccgcggtcctattcacaactatgggcggcggcttaggcatcgccccgaatggtattcgcggaggggacaagctggtgctcccactctccgaagcaagtacgggcggggtagaggctcgcgtagtaccattcactcagcccctggctatgattttgagacgccgctcaagtgataggtggacgtttcacgggcttgcccacttggatggacttggcgatacgtcccggttgattgcggctgctgaagagtatgtaatctgctgatgttaatcaccaattatagaatgcgttgatccagctatttttttcgtttttgtatctcgatgcatcaaatgagcactatatttatttggagagcagcggaaactataggacaggcaacccattacatgagcagacattgatcattagctcgacttacaattttatcaggtctttagtcttgcgaatgtaagagggcttgtcttta

SEQ ID NO: 30452 - DNA, 2145 bp, Muscodor strobelii
  misc_feature: SGI cDNA ID NO. 570473
  misc_feature: Encodes the peptide sequence at SEQ ID NO 30453
atggacgcctggcaagggctcagagcctccaacgccccgaaagtgcacattggttcttggacgaactggtcgcacggcccaatattcggcgcgacgttgaccttaacccaacgaaacggcaatctcgtcatagcttttctggcggtcttcttggcattcgtcgctacgcggctctggactattgtcgctctcatttgccatcagtctttctcaagtagcaagtctgaagatgcgttttaccatcagcagcaagtgatccttcgaaattctggctctgctgctggtgttctttggcgactgaatcaactggcgttgtcgcgattcaagtggtcgtctaagaggacgtcgttgagatacatcaagcgcgttctgttagctctagttttggctgctctctgtgtcatagggttcactgctgctacatacttcctaccgacaatatcaactgcagttggtgacgaggtcttactagcacggggagcttgcggctcgttagactgggatgcgatactgcaaaactggacagtctacaacgattaccagataccatggtttgctaaaaaggtcaacgatgcgtcaaattatgcacaacagtgctataccaacagctcgggacgtcttgattgtgcagctaatgtgaagactcggatacccactactgtagacagggcagcttcatgtcccttcgatgaacgtgtctgccgcagcagcacagagaacatcttcttagacacaggtctaattgactctcactgggacttcggcgtcaatagccgtccggagcagcgcttgtcctttcgatctacattacaatgtgcaccactagtcacagaaggctatactagcacacatcgaacgcaatctcgtaactacacacgttaccatcatggtggattttttacgagcaatgcgtcgaataagacaaccttggatgccttgtacgaaatcgacgacactgctagccaataccgtgttagtgatgttggtactgacggctacccctggccagcgaggaactaccaagttgatcaatatagtatcttccgatattatgcccagaacggctcattccgtccggagtctgagtttatgcccaaacccgaactatacagatcagatgccgatacctatatcgtatatctcgccggcaacggtgtaacatttgcggcaaaatcgacagacgcctggtatcgcgcatccaactacctctacagtggcctgagcggaacagaggttgacaacacattcgacgtcttcatggccgacgaagcagcttcgccattaggctgtgtacagcagtaccaactttgcctcccaacctcgcttggcttatcagaagaatctagatgcggtccgttgagttctgtcacagacgcattcgataatgcacttgcaatggttggcgatggagatgaatcttcgaagaaacgggccagaggggcaatcgaatggttatcctggcaggtcgttggctctgatgcgtctaacttacccgtcacgctcggcgcatactcattgacttctcagcaaacgctcgtctatggcgtacaaggcgaactcccgcctcatcagtggatgcgtgatgtagagcattggtggtcggcgtcacttgcttacatgcagggtagtttcattgactctgtcgtcggccctgaggaagatatactcaaagattatctcgacttaccctctgatgagtcattttgtgatacccaaaagattcgcagcccggcgcatatgtccttgagtctgttcggcctctatttcctgtttctagccggcggtctcatcactgccgtatcttttgcgctagaacccattctcgggtgccttcaacgtcgccgcagacatggtcgctacgcttattacgagtggatgacaaatgagacattgcagctacatcgacttgctcacgaggccttgggttggggtagctggacaaatggagctggggatataccgcgtacttttaaagatgacgatgttcttgcacgtctagatcttgcaaacgagcaacaccctcggctggaaatgcacgatgatgacggcccccgtcacgtccgaccgactttcagaggtactgatcggactcttgtcgatgaaccgaagatgcaggttgaagtgtccgctcagcaaaaggtctga

SEQ ID NO: 30453 - protein, 714 aa, Muscodor strobelii
  misc_feature: SGI Peptide ID NO. 570473
  misc_feature (9)..(709): NCBI GI: 189194015 Blast Desc: conserved [Pyrenophora tritici-repentis Pt-1C-BFP] gi|187978910|gb|EDU45536.1| conserved [Pyrenophora tritici-repentis Pt-1C-BFP]
  misc_feature (14)..(677): NCBI GI: 169615058 Blast Desc: SNOG_10683 [Phaeosphaeria nodorum SN15] gi|111060957|gb|EAT82077.1| SNOG_10683 [Phaeosphaeria nodorum SN15]
  misc_feature (7)..(681): NCBI GI: 115399382 Blast Desc: [Aspergillus terreus NIH2624] gi|114192163|gb|EAU33863.1| [Aspergillus terreus NIH2624]
  misc_feature (10)..(643): NCBI GI: 121699395 Blast Desc: ACLA_082720 [Aspergillus clavatus NRRL 1] gi|119396149|gb|EAW06581.1| ACLA_082720 [Aspergillus clavatus NRRL 1]
  misc_feature (7)..(674): NCBI GI: 119474227 Blast Desc: NFIA_004500 [Neosartorya fischeri NRRL 181] gi|119407142|gb|EAW17092.1| conserved [Neosartorya fischeri NRRL 181]
  misc_feature (7)..(664): NCBI GI: 70986226 Blast Desc: conserved [Aspergillus fumigatus Af293] gi|66846236|gb|EAL86569.1| conserved [Aspergillus fumigatus Af293]
  misc_feature (10)..(644): NCBI GI: 169772941 Blast Desc: [Aspergillus oryzae RIB40] gi|83768800|dbj|BAE58937.1| protein product [Aspergillus oryzae]
  misc_feature (7)..(664): NCBI GI: 159128250 Blast Desc: conserved [Aspergillus fumigatus A1163]
  misc_feature (10)..(642): NCBI GI: 169618215 Blast Desc: SNOG_12297 [Phaeosphaeria nodorum SN15] gi|160703576|gb|EAT80110.2| SNOG_12297 [Phaeosphaeria nodorum SN15]
  misc_feature (10)..(466): NCBI GI: 115433432 Blast Desc: [Aspergillus terreus NIH2624] gi|114189705|gb|EAU31405.1| [Aspergillus terreus NIH2624]
MDAWQGLRASNAPKVHIGSWTNWSHGPIFGATLTLTQRNGNLVIAFLAVFLAFVATRLWTIVALICHQSFSSSKSEDAFYHQQQVILRNSGSAAGVLWRLNQLALSRFKWSSKRTSLRYIKRVLLALVLAALCVIGFTAATYFLPTISTAVGDEVLLARGACGSLDWDAILQNWTVYNDYQIPWFAKKVNDASNYAQQCYTNSSGRLDCAANVKTRIPTTVDRAASCPFDERVCRSSTENIFLDTGLIDSHWDFGVNSRPEQRLSFRSTLQCAPLVTEGYTSTHRTQSRNYTRYHHGGFFTSNASNKTTLDALYEIDDTASQYRVSDVGTDGYPWPARNYQVDQYSIFRYYAQNGSFRPESEFMPKPELYRSDADTYIVYLAGNGVTFAAKSTDAWYRASNYLYSGLSGTEVDNTFDVFMADEAASPLGCVQQYQLCLPTSLGLSEESRCGPLSSVTDAFDNALAMVGDGDESSKKRARGAIEWLSWQVVGSDASNLPVTLGAYSLTSQQTLVYGVQGELPPHQWMRDVEHWWSASLAYMQGSFIDSVVGPEEDILKDYLDLPSDESFCDTQKIRSPAHMSLSLFGLYFLFLAGGLITAVSFALEPILGCLQRRRRHGRYAYYEWMTNETLQLHRLAHEALGWGSWTNGAGDIPRTFKDDDVLARLDLANEQHPRLEMHDDDGPRHVRPTFRGTDRTLVDEPKMQVEVSAQQKV

SEQ ID NO: 30454 - DNA, 1050 bp, Muscodor strobelii
  misc_feature: SGI cDNA ID NO. 570474
  misc_feature: Encodes the peptide sequence at SEQ ID NO 30455
atggtcaacttaaggactctgagcgttgcagccttgctagcagcgcctctctttgccaaccctactaggcgcgcgcaggatctgctacctactaaggttgtagcacagttgagcgaggatggcacgcctttcgaaagcatcgcagtgcgcgcaaacggcgacctactggtagcgcagcactttccgaatgccactctctacatagtcgagcgacctgcatccgataacccaaaaatatcggctcttcacaccttcgatgaagaatacggcaacggactgagcggtattgttgagacatctcacgataagttcactgtcgttgtcgcccaatttgaggccataactaaaccgccagttgttggcacgaatgctctgtgggaaattagcttcgatagtttggaaaggaccagcttcaccacgcgcaaagtcgccggcatatccgacgctggtcaattgaatggtctcgtgaaagtaccgaactgcaagaaaaacattgtcttggcgaccgacagtggtactggtgtcatttaccgcgtcgacattgaggctggcgactacgccatcgtcttggatgtgcccgagacgaaaatcaccccaaacaccaccaaagtgttcgcattcgccgcaaatggaatcaagatccgcaatggtcatgcttactggtctaactcagaaatggacaacatattcaagactgctatcgatggcaacggatacccgaagtctggcgcgccgatcgagaaggtcgcagatgtaactgcaagctggttcattgacgattttacgttcgataagcacggaaacatctgggcttcgacgaatgtagcaaacactattgtcacaatcaagcccgatggtagccaaaggatcacggtgggcgctgaggaccaactcaccgtcggtggtgtctcatgcgccgaatttggaagaacgaaggtagataaagatgtactctacgccgtgacatttggcgcggttgggaatccaatcaatggtactgttagcgagccgggcaaaattgtggcggttgatactagggcatatcattaa

SEQ ID NO: 30455 - protein, 349 aa, Muscodor strobelii
  misc_feature: SGI Peptide ID NO. 570474
  misc_feature (29)..(346): NCBI GI: 256729493 Blast Desc: NECHADRAFT_47685 [Nectria haematococca mpVI 77-13-4]
  misc_feature (29)..(348): NCBI GI: 171683788 Blast Desc: protein product [Podospora anserina] gi|170941854|emb|CAP67507.1| protein product [Podospora anserina]
  misc_feature (29)..(342): NCBI GI: 46110901 Blast Desc: FG02332.1 [Gibberella zeae PH-1]
  misc_feature (18)..(346): NCBI GI: 256722873 Blast Desc: NECHADRAFT_52990 [Nectria haematococca mpVI 77-13-4]
  misc_feature (142)..(349): NCBI GI: 85095914 Blast Desc: NCU05626 [Neurospora crassa OR74A] gi|28921649|gb|EAA30934.1| [Neurospora crassa OR74A]
  misc_feature (45)..(349): NCBI GI: 156049683 Blast Desc: SS1G_08548 [Sclerotinia sclerotiorum 1980] gi|154692947|gb|EDN92685.1| SS1G_08548 [Sclerotinia sclerotiorum 1980]
  misc_feature (29)..(295): NCBI GI: 238846091 Blast Desc: conserved [Microsporum canis CBS 113480]
  misc_feature (45)..(348): NCBI GI: 154303709 Blast Desc: BC1G_08739 [Botryotinia fuckeliana B05.10] gi|150854533|gb|EDN29725.1| BC1G_08739 [Botryotinia fuckeliana B05.10]
  misc_feature (41)..(345): NCBI GI: 154294557 Blast Desc: BC1G_13881 [Botryotinia fuckeliana B05.10] gi|150844721|gb|EDN19914.1| BC1G_13881 [Botryotinia fuckeliana B05.10]
  misc_feature (34)..(343): NCBI GI: 119482818 Blast Desc: NFIA_026140 [Neosartorya fischeri NRRL 181] gi|119409592|gb|EAW19540.1| conserved [Neosartorya fischeri NRRL 181]
MVNLRTLSVAALLAAPLFANPTRRAQDLLPTKVVAQLSEDGTPFESIAVRANGDLLVAQHFPNATLYIVERPASDNPKISALHTFDEEYGNGLSGIVETSHDKFTVVVAQFEAITKPPVVGTNALWEISFDSLERTSFTTRKVAGISDAGQLNGLVKVPNCKKNIVLATDSGTGVIYRVDIEAGDYAIVLDVPETKITPNTTKVFAFAANGIKIRNGHAYWSNSEMDNIFKTAIDGNGYPKSGAPIEKVADVTASWFIDDFTFDKHGNIWASTNVANTIVTIKPDGSQRITVGAEDQLTVGGVSCAEFGRTKVDKDVLYAVTFGAVGNPINGTVSEPGKIVAVDTRAYH

SEQ ID NO: 30456 - DNA, 1492 bp, Muscodor strobelii
  misc_feature: SGI EST ID NO. CUFF.72055.0
  misc_feature: Variant of the nucleotide sequence at SEQ ID NO 30454
ttttgttaaaatctcacgatgcacatcccgggcgaacattcagccaacgccaacctgccgctttggcgcttaccaacatgtggaattcaagatgttactttgcaatgtctgccaacgtgagatattggagtgtgagtctgaagggcgcatataagtaattgctttgatgcctccatgatgacgagatgagatgcactccaacaagaagagcagtcatatcgcaaagtctgagaatacatcgcgcgatctcaacaacttgaaatactccacacaaaattacaagatggtcaacttaaggactctgagcgttgcagccttgctagcagcgcctctctttgccaaccctactaggcgcgcgcaggatctgctacctactaaggttgtagcacagttgagcgaggatggcacgcctttcgaaagcatcgcagtgcgcgcaaacggcgacctactggtagcgcagcactttccgaatgccactctctacatagtcgagcgacctgcatccgataacccaaaaatatcggctcttcacaccttcgatgaagaatacggcaacggactgagcggtattgttgagacatctcacgataagttcactgtcgttgtcgcccaatttgaggccataactaaaccgccagttgttggcacgaatgctctgtgggaaattagcttcgatagtttggaaaggaccagcttcaccacgcgcaaagtcgccggcatatccgacgctggtcaattgaatggtctcgtgaaagtaccgaactgcaagaaaaacattgtcttggcgaccgacagtggtactggtgtcatttaccgcgtcgacattgaggctggcgactacgccatcgtcttggatgtgcccgagacgaaaatcaccccaaacaccaccaaagtgttcgcattcgccgcaaatggaatcaagatccgcaatggtcatgcttactggtctaactcagaaatggacaacatattcaagactgctatcgatggcaacggatacccgaagtctggcgcgccgatcgagaaggtcgcagatgtaactgcaagctggttcattgacgattttacgttcgataagcacggaaacatctgggcttcgacgaatgtagcaaacactattgtcacaatcaagcccgatggtagccaaaggatcacggtgggcgctgaggaccaactcaccgtcggtggtgtctcatgcgccgaatttggaagaacgaaggtagataaagatgtactctacgccgtgacatttggcgcggttgggaatccaatcaatggtactgttagcgagccgggcaaaattgtggcggttgatactagggcatatcattaaagcgtttgatcctctcaggttctgaggactgcgttatgcattggccagtagtgagccattcctacatcgagcttgttgctatcaaatagatccttcatagagacacaccaagtggtttctatgccttacattgtagtgcttagtgacattagattttga

SEQ ID NO: 30457 - DNA, 363 bp, Muscodor strobelii
  misc_feature: SGI cDNA ID NO. 570475
  misc_feature: Encodes the peptide sequence at SEQ ID NO 30458
atgcgcttcgtcacctccaccgtcgtagtcctcgccggccagctcgtaggagcccagtactgctacggcacgggcgagataggaaacagcttggatttcgatcgagtagctgatatcgcttgcaaaaacgatctcaccggtcatttcaacacaggagaccacaagtattcctgtatcaacggcatccctgatcgatttaactggctttttgatgtacacttcgaggggcaagatatgaacaaaaattccatttcagccgacttaaactacgatgactgtaagagatttttatggggcacctacaacgcctgcgaggacgagaggggcggcatttcgatctgggacaatttttacataaagtga

SEQ ID NO: 30458 - protein, 120 aa, Muscodor strobelii
  misc_feature: SGI Peptide ID NO. 570475
MRFVTSTVVVLAGQLVGAQYCYGTGEIGNSLDFDRVADIACKNDLTGHFNTGDHKYSCINGIPDRFNWLFDVHFEGQDMNKNSISADLNYDDCKRFLWGTYNACEDERGGISIWDNFYIK

SEQ ID NO: 30459 - DNA, 594 bp, Muscodor strobelii
  misc_feature: SGI cDNA ID NO. 570476
  misc_feature: Encodes the peptide sequence at SEQ ID NO 30460
atgccgcaacaactcttgacgcgcctccccacagaggggtttcgctggaccttctccgacacgcgtaagctgcatctcactggcagacagcagcgcgtcatcatgcgcgccttggctcagaactgtcccgtccacgtcgatacccacttcaccgccagcaagttcaaggagctcctcgacgtgggccagcagcatgcctgggacattccaaccaccacccctgcggatttctggcgccgcatgggaggccacgtcgcttggattcgcaactccgaacagatgaaggacgatggcgacatgattcacgcgctcgtcgttcagatcctcgccgcgcgctcgctgcgccgtgaagacatcctcgctgcagagaaggcacagaacgagggagagatgatcaccgatgaaaagatcgccgagttgaagaccgagtcagagctcactgaaagcctccaagtcttcatcgagtcgctcttaattgtctccgaggacaagcccgacgtcgcccgagcctacgtttgccctcacttcacccgcaacgacaccgagcgactggtcaacgttaccgccctccttggcggcttagacatgcattga

SEQ ID NO: 30460 - protein, 197 aa, Muscodor strobelii
  misc_feature: SGI Peptide ID NO. 570476
MPQQLLTRLPTEGFRWTFSDTRKLHLTGRQQRVIMRALAQNCPVHVDTHFTASKFKELLDVGQQHAWDIPTTTPADFWRRMGGHVAWIRNSEQMKDDGDMIHALVVQILAARSLRREDILAAEKAQNEGEMITDEKIAELKTESELTESLQVFIESLLIVSEDKPDVARAYVCPHFTRNDTERLVNVTALLGGLDMH

SEQ ID NO: 30461 - DNA, 1458 bp, Muscodor strobelii
  misc_feature: SGI cDNA ID NO. 570477
  misc_feature: Reduced expression when VOC is produced
  misc_feature: Encodes the peptide sequence at SEQ ID NO 30462
atggatcctttcaataaacttccgcccgagcttcgtctggagattctcatcgccacgaacaccaagcgctggatttggcagctcattcaagcctcgcccaccatgctgtggcagtatatatcatctcaagattacatcgaaagaaaattgcgtgacgttgacgccgatttcgatgacgacatgctaaatgatgcgatagcaatcattcggtttccagtcgacaggatggccaccgctatatcgttacatatatcggactacgaggagatgtggtgcaacgggtggtttgcaaaggcttggaatggcgagaggacccccaagatcatcgaagtcatgccttcccaagatgaaataaatcaactgtatcgccggatcctcgtctttgtagaggactatcttacgaaagcgacgtctgcttgccccgcgagggagtcttggtgcctccctcatcgagacggttatttgacatttagagaccgcgccgtccgcgtgaggcttgatttgacgcagtgtaatcgggcagagcgacgacgacttctgaaagcttttctaagatacgaagtgatccggaagttctgtcccactaacagttatgcgttacattattttcttcatggtcgcggatcctctgggaaattgttgacgagccgactccaacgtagggagaaagaagcaatcgtatgcgttgaggaatacttgaaagatctttatcgagctgctatcatccaatgtggcaattctgagctgccgcaagttcccgctgctcgtcgtatatctcaagctcccaaggacacagcatcgatagattttgagccaattgcggatagatactttgatcccgggccgatcagattcgaaaggctatcattaaatagttctgaggtttgtcaatcgctggtttcctttgggttggagctagcttcaattgtcgtggaaggcgtcaccagtgggccgtatggacggtccatcgtaacaaaatggttcaagagttacgcaaatgcctggcagtgtggatcaggtcgaggagctgatttgggacaaatcatcggctcattgttcaaaggtgattgcaacctttgtatgattcgcgacggctaccttgatgaacccgaccttaaccaagattgttcaggtctctacagaaggctttctcctcatattgaaaatatgagttggtactaccagagaaggtatctcaagttatacaggtcccgagcatgggtatttctcgacgacgacagcctcttcagtatagagggagagggacctctttttccagccgacgatcctgactctcctgacatcgagtttgatgacattatcggttgccggcattccattgagggtagacttagagatccccgtcgccggacttataattggacgccggtgaaggagtgtagacttttatctcggtggctctcgctcggggaggagccatcggaccgagatccgtaa

SEQ ID NO: 30462 - protein, 485 aa, Muscodor strobelii
  misc_feature: SGI Peptide ID NO. 570477
  misc_feature (1)..(426): NCBI GI: 256731205 Blast Desc: NECHADRAFT_85216 [Nectria haematococca mpVI 77-13-4]
  misc_feature (1)..(429): NCBI GI: 46127567 Blast Desc: FG08161.1 [Gibberella zeae PH-1]
  misc_feature (2)..(255): NCBI GI: 46111471 Blast Desc: FG02617.1 [Gibberella zeae PH-1]
  misc_feature (1)..(429): NCBI GI: 256729979 Blast Desc: NECHADRAFT_82510 [Nectria haematococca mpVI 77-13-4]
  misc_feature (1)..(442): NCBI GI: 256726791 Blast Desc: NECHADRAFT_76140 [Nectria haematococca mpVI 77-13-4]
  misc_feature (1)..(482): NCBI GI: 256720277 Blast Desc: NECHADRAFT_56194 [Nectria haematococca mpVI 77-13-4]
  misc_feature (1)..(250): NCBI GI: 256730757 Blast Desc: NECHADRAFT_25455 [Nectria haematococca mpVI 77-13-4]
  misc_feature (1)..(412): NCBI GI: 256721661 Blast Desc: NECHADRAFT_44838 [Nectria haematococca mpVI 77-13-4]
  misc_feature (1)..(246): NCBI GI: 46126703 Blast Desc: FG07729.1 [Gibberella zeae PH-1]
  misc_feature (1)..(191): NCBI GI: 256727530 Blast Desc: NECHADRAFT_76459 [Nectria haematococca mpVI 77-13-4]
  misc_feature: Useful for introducing or modulating the production of volatile compounds
MDPFNKLPPELRLEILIATNTKRWIWQLIQASPTMLWQYISSQDYIERKLRDVDADFDDDMLNDAIAIIRFPVDRMATAISLHISDYEEMWCNGWFAKAWNGERTPKIIEVMPSQDEINQLYRRILVFVEDYLTKATSACPARESWCLPHRDGYLTFRDRAVRVRLDLTQCNRAERRRLLKAFLRYEVIRKFCPTNSYALHYFLHGRGSSGKLLTSRLQRREKEAIVCVEEYLKDLYRAAIIQCGNSELPQVPAARRISQAPKDTASIDFEPIADRYFDPGPIRFERLSLNSSEVCQSLVSFGLELASIVVEGVTSGPYGRSIVTKWFKSYANAWQCGSGRGADLGQIIGSLFKGDCNLCMIRDGYLDEPDLNQDCSGLYRRLSPHIENMSWYYQRRYLKLYRSRAWVFLDDDSLFSIEGEGPLFPADDPDSPDIEFDDIIGCRHSIEGRLRDPRRRTYNWTPVKECRLLSRWLSLGEEPSDRDP

SEQ ID NO: 30463 - DNA, 1032 bp, Muscodor strobelii
  misc_feature: SGI cDNA ID NO. 570478
  misc_feature: Encodes the peptide sequence at SEQ ID NO 30464
atgacgaacatccggacattgactggtctcttggccataactagttgcgtaaaccaagctttgggagctcctgaaccaaagagattgactttcaaaaccttgaagaacatcatcgcattcggagactcctacacagacgtaggatacaaccacacaatctcgcctcaaccaaacccatcgaattacgaggggaaccccgtgccgccggggacgtcaacatgttactcgccgaactacgtacaaatgctctcctcgcaatacaactggacgtttgtcagactgtatgatcttgcgcattctggcgcggtcgtagatggtaatttggtcgatccttatgagagtgtggataatacgttcgtgcatcaggttagcgataagttcttgccgtattttagcgggggcaaggtgccaagggggaatgggacgagaggtgataaagggaaatgggggagggagtggaagggtgaagatacgcttgttgttgcgctttttgggattaatgatattgatcgtgctatgggcgggtattggcctttggatccgatgtgggaggagaaagctcctaagatgctggattcgctttttgatggtcttgaagccgtccgtcaacaaggcgcagagaacttcgcgattctctccgtgccgccttactggctatcaccaagtgtacaggagtacgaaaacgcgacatatacacaattagcgaagaacaggactttactctggatcgatgagctgcattcgcattacgatgcgtggacgaagcagcatagggtaaatgcgaagattgttgatacgtttcagttgtggcttaatatgacgtatgagactgagaattatcccccgttgagccagattactacggattgtgcggcttatattgggggaagttggcctgttggtgatcttgattatgataactcgacttgtgcggcgcctatgaaggagtatttgtggttggactgggttcatccgacgtggactgttcataagtatatggcgagattgattattgatactatggggttatag

SEQ ID NO: 30464 - protein, 343 aa, Muscodor strobelii
  misc_feature: SGI Peptide ID NO. 570478
  misc_feature (7)..(341): NCBI GI: 156057721 Blast Desc: SS1G_04592 [Sclerotinia sclerotiorum 1980] gi|154702377|gb|EDO02116.1| SS1G_04592 [Sclerotinia sclerotiorum 1980]
  misc_feature (34)..(337): NCBI GI: 189192843 Blast Desc: conserved [Pyrenophora tritici-repentis Pt-1C-BFP] gi|187978324|gb|EDU44950.1| conserved [Pyrenophora tritici-repentis Pt-1C-BFP]
  misc_feature (4)..(293): NCBI GI: 169606796 Blast Desc: SNOG_06447 [Phaeosphaeria nodorum SN15] gi|160707080|gb|EAT86278.2| SNOG_06447 [Phaeosphaeria nodorum SN15]
  misc_feature (9)..(337): NCBI GI: 156061131 Blast Desc: SS1G_02708 [Sclerotinia sclerotiorum 1980] gi|154700112|gb|EDN99850.1| SS1G_02708 [Sclerotinia sclerotiorum 1980]
  misc_feature (30)..(337): NCBI GI: 85089887 Blast Desc: NCU09416 [Neurospora crassa OR74A] gi|28919487|gb|EAA28920.1| [Neurospora crassa OR74A]
  misc_feature (8)..(339): NCBI GI: 39975277 Blast Desc: MGG_00215 [Magnaporthe grisea 70-15] gi|145018921|gb|EDK03200.1| MGG_00215 [Magnaporthe grisea 70-15]
  misc_feature (33)..(339): NCBI GI: 116204507 Blast Desc: CHGG_10137 [Chaetomium globosum CBS 148.51] gi|88176265|gb|EAQ83733.1| CHGG_10137 [Chaetomium globosum CBS 148.51]
  misc_feature (35)..(342): NCBI GI: 261354308 Blast Desc: fungal cellulose binding domain-containing protein [Verticillium albo-atrum VaMs.102]
  misc_feature (1)..(241): NCBI GI: 169846160 Blast Desc: CC1G_06005 [Coprinopsis cinerea okayama7#130] gi|116509123|gb|EAU92018.1| CC1G_06005 [Coprinopsis cinerea okayama7#130]
  misc_feature (11)..(335): NCBI GI: 154313577 Blast Desc: BC1G_05638 [Botryotinia fuckeliana B05.10] gi|150849220|gb|EDN24413.1| BC1G_05638 [Botryotinia fuckeliana B05.10]
MTNIRTLTGLLAITSCVNQALGAPEPKRLTFKTLKNIIAFGDSYTDVGYNHTISPQPNPSNYEGNPVPPGTSTCYSPNYVQMLSSQYNWTFVRLYDLAHSGAVVDGNLVDPYESVDNTFVHQVSDKFLPYFSGGKVPRGNGTRGDKGKWGREWKGEDTLVVALFGINDIDRAMGGYWPLDPMWEEKAPKMLDSLFDGLEAVRQQGAENFAILSVPPYWLSPSVQEYENATYTQLAKNRTLLWIDELHSHYDAWTKQHRVNAKIVDTFQLWLNMTYETENYPPLSQITTDCAAYIGGSWPVGDLDYDNSTCAAPMKEYLWLDWVHPTWTVHKYMARLIIDTMGL

SEQ ID NO: 30465 - DNA, 2993 bp, Muscodor strobelii
  misc_feature: SGI EST ID NO. CUFF.72111.0
  misc_feature: Variant of the nucleotide sequence at SEQ ID NO 30463
gcgacatatacacaattagcgaagaacaggactttactctggatcgatgagctgcattcgcattacgatgcgtggacgaagcagcatagggtaaatgcgaagattgttgatacgtttcagttgtggcttaatatgacgtatgagactgagaattatcccccgttgagccagattactacggattgtgcggcttatattgggggaagttggcctgttggtgatcttgattatgataactcgacttgtgcggcgcctatgaaggagtatttgtggttggactgggttcatccgacgtggactgttcataagtatatggcgagattgattattgatactatggggttataggttgggggtgcaaaattcttgtctcacgagttgcatgcatagaaccgagtatgtaggtctctcgttctgaacaaattgctcttcggctttgattgacaagtcccgaaattgctgcatgtcactcatatttggttaaacgcgttgatcgtaaatatcgtggagcatgaaactgctccttgaatagtggactaagatgcttctcaaacattcagtttatgtccaacatcacctgatatcatgtcatattctagatttttctggctgactaatgatgggcggagtgtctgtgcctgagctatctcatacatttcgtctctggcccattgagtcggcatcctcacaagaggttattcggcgtccacccagaagcatgatacgaggactacgggtatatatataccagatatatattccatcgctattcgccagttgttcggtaaacaattagaaacccatcgcaagcgtgccggagatgtggccagctggaacggaataatgcccactatacaaaaacgcgaccgccattcaacgtcgctcctcgtgtcttatcaatgctttgttatgattcgaaagcatgacctatcgaacatccggcattcgcgaatcgccatgttgttgcaaatttaaacatcggtcatttcgtgtttggagggcctgttatgaatctggcgagagatccctggcgatcatgagtattcgagatattaatacagtgtggcctttggtttacggatctcggtccgatggctcctccccgagcgagagccaccgagataaaagtctacactccttcaccggcgtccaattataagtccggcgacggggatctctaagtctaccctcaatggaatgccggcaaccgataatgtcatcaaactcgatgtcaggagagtcaggatcgtcggctggaaaaagaggtccctctccctctatactgaagaggctgtcgtcgtcgagaaatacccatgctcgggacctgtataacttgagataccttctctggtagtaccaactcatattttcaatatgaggagaaagccttctgtagagacctgaacaatcttggttaaggtcgggttcatcaaggtagccgtcgcgaatcatacaaaggttgcaatcacctttgaacaatgagccgatgatttgtcccaaatcagctcctcgacctgatccacactgccaggcatttgcgtaactcttgaaccattttgttacgatggaccgtccatacggcccactggtgacgccttccacgacaattgaagctagctccaacccaaaggaaaccagcgattgacaaacctcagaactatttaatgatagcctttcgaatctgatcggcccgggatcaaagtatctatccgcaattggctcaaaatctatcgatgctgtgtccttgggagcttgagatatacgacgagcagcgggaacttgcggcagctcagaattgccacattggatgatagcagctcgataaagatctttcaagtattcctcaacgcatacgattgcttctttctccctacgttggagtcggctcgtcaacaatttcccagaggatccgcgaccatgaagaaaataatgtaacgcataactgttagtgggacagaacttccggatcacttcgtatcttagaaaagctttcagaagtcgtcgtcgctctgcccgattacactgcgtcaaatcaagcctcacgcggacggcgcggtctctaaatgtcaaataaccgtctcgatgagggaggcaccaagactccctcgcggggcaagcagacgtcgctttcgtaagatagtcctctacaaagacgaggatccggcgatacagttgatttatttcatcttgggaaggcatgacttcgatgatcttgggggtcctctcgccattccaagcctttgcaaaccacccgttgcaccacatctcctcgtagtccgatatatgtaacgatatagcggtggccatcctgtcgactggaaaccgaatgattgctatcgcatcatttagcatgtcgtcatcgaaatcggcgtcaacgtcacgcaattttctttcgatgtaatcttgagatgatatatactgccacagcatggtgggcgaggcttgaatgagctgccaaatccagcgcttggtgttcgtggcgatgagaatctccagacgaagctcgggcggaagtttattgaaaggatccatcgcgacgataccaggattgaaactatcaagccgagccgatatcgagtaggtgttttgttgaagcgaatgagagagcgggagaagttgaatacaaaagtagagagaacttattgttgtttagttggcagtcaaagactttatagctttcgagaccagcaagacgatagccgctagcctcctatttaccaaagtttgcatctttagttgacgttagctgagctagtattcaggcacccaaactttaatgcgccggcgtcctgttcttctcgaatgtagttctagcctattaggtcccacgtgtttatccgtgagattatgtcgcctcctggacgaacgactggaaggcttatcagagattcgccttatatacatcatcaactggtgccatatcgtatgttacatccctttagtcgacctgtaccaacggtgctttagacattgatttctctcacaaggatgag

SEQ ID NO: 30466 - DNA, 1584 bp, Muscodor strobelii
  misc_feature: SGI cDNA ID NO. 570479
  misc_feature: Encodes the peptide sequence at SEQ ID NO 30467
atggaggatgaactctctccagaacagccgccagacttgaaatatcgcggcatcgacttcaagagtatcaagcaaggatatgccgagtcgcaggtgaaatatggcggtgttcacgtgacagacaatgacattggcaccttcgatagcagcaagattgtgacctcgcagcccgagacagctgcttctagtacgggtaaggaagtatgcgacgaatccgggacgccaagcacaactgccggcgacgaaatagaactaggtaacgagagcatatccgacgacacgagaaaacggcgccacaagaaatggcttgccataatcgttgccgctgtggttacgcttgccttgagcttgggtctcggcttgggcataagtgccagagctcacagttcgcatgcgggtacttattcaccaactaccgccaagaccagcgtctgccgaggccagatctgtaatcagatcatggctgcggctaccttcgatgatcagttacacgtttttgcaatagggaacgatacggcaatgtggacgcgggctttcgacggagactcgtggactggagactgggctagtttgggcggctccttcgcaagtcaaccgtcagtggtggtttgggccaatagcagcaggatgacagtgttcggactcaactcagcggctttcgacacggtgagtaaggaacgccgagatggtgaatggtcggacacttggcgcagcatgaacggatcgggcagcagtgccatatcgagttgtcacgtagaagcggatcacgaccgagccgacatctttacacgatcgatatacgcccgcgccaacattgtccacgactggtggcatgttcccctgggcgactggtggggacaacatctgccctgggatccgacgattggcggcacgagtaaatcggcgcctgcggctgtatgtcgaaactcgaccatattccacgacctcgtgaaatacgatgaagcaagtggtagtgtgatgcacgaccagtgggataataaggcccagaaatgggtcggatgggaaaaccgaggcgggtccttcggtacgtttagaaagatcccgcgcgagttatatttgattatattcctaagacatagtactaacttctttacagtgggcaatccggttctcgtgtctccgtccaagtcgcgagttgatttcttcggcattggcactgatggcggaatgtatcatttctcgtgggatgaaaactcgagctattcgaaacttgaggctctcggtgggaatttctccagcatgcctagcgtgattgtcaccacgcctcaaaggctcgatgtggtggccgttggcacagatgacaagctcaagcatcgagctttcatcaattcgacttggatttcagactgggaggacatgggcgtgttcgccaacagtgcacctctgggcattgcctgcggaaacgagacgaacaggcgagtgggtgtgttcgtattggaccaatacaacgaggctcaatatgcatcttggcttgccgacgattcaccaagttggaggggcctggccaaatttgggagcatcggaggaaatctcacgaccagatggcagtgggaaccatattga

SEQ ID NO: 30467 - protein, 527 aa, Muscodor strobelii
  misc_feature: SGI Peptide ID NO. 570479
  misc_feature (144)..(468): NCBI GI: 256726569 Blast Desc: NECHADRAFT_79658 [Nectria haematococca mpVI 77-13-4]
  misc_feature (136)..(519): NCBI GI: 171693397 Blast Desc: protein product [Podospora anserina] gi|170946647|emb|CAP73450.1| protein product [Podospora anserina]
  misc_feature (148)..(505): NCBI GI: 171678901 Blast Desc: protein product [Podospora anserina] gi|170937521|emb|CAP62179.1| protein product [Podospora anserina]
  misc_feature (119)..(461): NCBI GI: 119191936 Blast Desc: CIMG_00345 [Coccidioides immitis RS]
  misc_feature (162)..(498): NCBI GI: 119191936 Blast Desc: CIMG_00345 [Coccidioides immitis RS]
  misc_feature (119)..(520): NCBI GI: 240106288 Blast Desc: Sialidase, [Coccidioides posadasii C735 delta SOWgp]
  misc_feature (119)..(461): NCBI GI: 258573433 Blast Desc: [Uncinocarpus reesii 1704] gi|237901164|gb|EEP75565.1| [Uncinocarpus reesii 1704]
  misc_feature (140)..(520): NCBI GI: 258573433 Blast Desc: [Uncinocarpus reesii 1704] gi|237901164|gb|EEP75565.1| [Uncinocarpus reesii 1704]
  misc_feature (119)..(465): NCBI GI: 209976064 Blast Desc: sialidase [Trichophyton equinum]
  misc_feature (149)..(514): NCBI GI: 238838540 Blast Desc: carbohydrate-binding protein [Microsporum canis CBS 113480]
MEDELSPEQPPDLKYRGIDFKSIKQGYAESQVKYGGVHVTDNDIGTFDSSKIVTSQPETAASSTGKEVCDESGTPSTTAGDEIELGNESISDDTRKRRHKKWLAIIVAAVVTLALSLGLGLGISARAHSSHAGTYSPTTAKTSVCRGQICNQIMAAATFDDQLHVFAIGNDTAMWTRAFDGDSWTGDWASLGGSFASQPSVVVWANSSRMTVFGLNSAAFDTVSKERRDGEWSDTWRSMNGSGSSAISSCHVEADHDRADIFTRSIYARANIVHDWWHVPLGDWWGQHLPWDPTIGGTSKSAPAAVCRNSTIFHDLVKYDEASGSVMHDQWDNKAQKWVGWENRGGSFGTFRKIPRELYLIIFLRHSTNFFTVGNPVLVSPSKSRVDFFGIGTDGGMYHFSWDENSSYSKLEALGGNFSSMPSVIVTTPQRLDVVAVGTDDKLKHRAFINSTWISDWEDMGVFANSAPLGIACGNETNRRVGVFVLDQYNEAQYASWLADDSPSWRGLAKFGSIGGNLTTRWQWEPY

SEQ ID NO: 30468 - DNA, 915 bp, Muscodor strobelii
  misc_feature: SGI cDNA ID NO. 570480
  misc_feature: Encodes the peptide sequence at SEQ ID NO 30469
atggaggatgaactctctccagaacagccgccagacttgaaatatcgcggcatcgacttcaagagtatcaagcaaggatatgccgagtcgcaggtgaaatatggcggtgttcacgtgacagacaatgacattggcaccttcgatagcagcaagattgtgacctcgcagcccgagacagctgcttctagtacgggtaaggaagtatgcgacgaatccgggacgccaagcacaactgccggcgacgaaatagaactaggtaacgagagcatatccgacgacacgagaaaacggcgccacaagaaatggcttgccataatcgttgccgctgtggttacgcttgccttgagcttgggtctcggcttgggcataagtgccagagctcacagttcgcatgcgggtacttattcaccaactaccgccaagaccagcgtctgccgaggccagatctgtaatcagatcatggctgcggctaccttcgatgatcagttacacgtttttgcaatagggaacgatacggcaatgtggacgcgggctttcgacggagactcgtggactggagactgggctagtttgggcggctccttcgcaagtcaaccgtcagtggtggtttgggccaatagcagcaggatgacagtgttcggactcaactcagcggctttcgacacggtgagtaaggaacgccgagatggtgaatggtcggacacttggcgcagcatgaacggatcgggcagcagtgccatatcgagttgtcacgtagaagcggatcacgaccgagccgacatctttacacgatcgatatacgcccgcgccaacattgtccacgactggtggcatgttcccctgggcgactggtggggacaacatctgccctgggatccgacgattggcggcacgagtaaatcggcgcctgcggct

SEQ ID NO: 30469 - protein, 305 aa, Muscodor strobelii
  misc_feature: SGI Peptide ID NO. 570480
  misc_feature (136)..(239): NCBI GI: 171693397 Blast Desc: protein product [Podospora anserina] gi|170946647|emb|CAP73450.1| protein product [Podospora anserina]
  misc_feature (119)..(305): NCBI GI: 119191936 Blast Desc: CIMG_00345 [Coccidioides immitis RS]
  misc_feature (144)..(287): NCBI GI: 256726569 Blast Desc: NECHADRAFT_79658 [Nectria haematococca mpVI 77-13-4]
  misc_feature (119)..(305): NCBI GI: 240106288 Blast Desc: Sialidase, [Coccidioides posadasii C735 delta SOWgp]
  misc_feature (119)..(305): NCBI GI: 258573433 Blast Desc: [Uncinocarpus reesii 1704] gi|237901164|gb|EEP75565.1| [Uncinocarpus reesii 1704]
  misc_feature (143)..(284): NCBI GI: 256725875 Blast Desc: NECHADRAFT_82020 [Nectria haematococca mpVI 77-13-4]
  misc_feature (148)..(251): NCBI GI: 171678901 Blast Desc: protein product [Podospora anserina] gi|170937521|emb|CAP62179.1| protein product [Podospora anserina]
  misc_feature (119)..(262): NCBI GI: 240106288 Blast Desc: Sialidase, [Coccidioides posadasii C735 delta SOWgp]
  misc_feature (119)..(277): NCBI GI: 209976064 Blast Desc: sialidase [Trichophyton equinum]
  misc_feature (147)..(278): NCBI GI: 170759994 Blast Desc: CLK_2769 [Clostridium botulinum A3 str. Loch Maree] gi|169406983|gb|ACA55394.1| conserved [Clostridium botulinum A3 str. Loch Maree]
MEDELSPEQPPDLKYRGIDFKSIKQGYAESQVKYGGVHVTDNDIGTFDSSKIVTSQPETAASSTGKEVCDESGTPSTTAGDEIELGNESISDDTRKRRHKKWLAIIVAAVVTLALSLGLGLGISARAHSSHAGTYSPTTAKTSVCRGQICNQIMAAATFDDQLHVFAIGNDTAMWTRAFDGDSWTGDWASLGGSFASQPSVVVWANSSRMTVFGLNSAAFDTVSKERRDGEWSDTWRSMNGSGSSAISSCHVEADHDRADIFTRSIYARANIVHDWWHVPLGDWWGQHLPWDPTIGGTSKSAPAA

SEQ ID NO: 30470 - DNA, 912 bp, Muscodor strobelii
  misc_feature: SGI cDNA ID NO. 570481
  misc_feature: Reduced expression when VOC is produced
  misc_feature: Encodes the peptide sequence at SEQ ID NO 30471
atggccggcaacagcgttccacgcagcgtcgccgacgccacacgcttcacctccaacactccacacgccgccaccaaatcgacaccctccaatgctactcccaaaactcccagccagacacgtccttctccgccgaggcagctaaggcggccggtcggtgcacctgcaactggtcccaatgtcacccaagaaaccatggaagagcgcgtccgccgcttacgagccgcccatctcgcagccaagcagcacgacgtatccaagatggacaagatcatcgggagttcacggcgcttcttcgacgccgctcacaaagtcaccgtcatggggctgataggattcagtggcctcgccctcctagtcacagtctacgcaacagtcgacatgatgatatacaaccgcaagcggcgcaacgagttcttcgcgcaacaaaagcagttcaaggaagacagtctagaagccgcgcgcctggcctacatgacggggtccgcttccccagaacaaatcgccctcgtcgaagacgccacctcccgcgcaaacgaatccggcatcgcgctcccatctctcctctccgcgccgcgcgccgctatcacagggaccgaggcaagtgtcttcccaggttcgagcatgacagagactgcgctggaaccagagacgaagaagaagggcggatttacgggttggttattcggaggtctgaaaaaggaggagcagagcataagtatgagtgaggaacgctggaaatccacacccacgacttcaacgaccccttcagacgtaacggagaacctgcgcgataaagcaaaagcagcattcgacagcgagcgggataatcagcggaaaggcgggccattagatcagcttggactcgacaagccgacggacgcaggaaagaagaaaggctggttatggtag

SEQ ID NO: 30471 - protein, 303 aa, Muscodor strobelii
  misc_feature: SGI Peptide ID NO. 570481
  misc_feature (8)..(301): NCBI GI: 261360996 Blast Desc: conserved [Verticillium albo-atrum VaMs.102]
  misc_feature (64)..(289): NCBI GI: 85097830 Blast Desc: NCU05551 [Neurospora crassa OR74A] gi|28922006|gb|EAA31277.1| [Neurospora crassa OR74A]
  misc_feature (7)..(301): NCBI GI: 256733420 Blast Desc: NECHADRAFT_67073 [Nectria haematococca mpVI 77-13-4]
  misc_feature (2)..(303): NCBI GI: 39963625 Blast Desc: MGG_13646 [Magnaporthe grisea 70-15] gi|145616635|ref|XP_001402565.1| MGG_09768 [Magnaporthe grisea 70-15] gi|145009215|gb|EDJ93926.1| MGG_09768 [Magnaporthe grisea
  misc_feature (1)..(301): NCBI GI: 46127917 Blast Desc: FG08336.1 [Gibberella zeae PH-1]
  misc_feature (1)..(289): NCBI GI: 171681724 Blast Desc: protein product [Podospora anserina] gi|170940821|emb|CAP66470.1| protein product [Podospora anserina]
  misc_feature (6)..(301): NCBI GI: 156036484 Blast Desc: SS1G_12931 [Sclerotinia sclerotiorum 1980] gi|154698336|gb|EDN98074.1| SS1G_12931 [Sclerotinia sclerotiorum 1980]
  misc_feature (64)..(182): NCBI GI: 116201811 Blast Desc: CHGG_08790 [Chaetomium globosum CBS 148.51] gi|88177308|gb|EAQ84776.1| CHGG_08790 [Chaetomium globosum CBS 148.51]
  misc_feature (6)..(301): NCBI GI: 154297846 Blast Desc: BC1G_11897 [Botryotinia fuckeliana B05.10] gi|150858338|gb|EDN33530.1| BC1G_11897 [Botryotinia fuckeliana B05.10]
  misc_feature (8)..(173): NCBI GI: 70987247 Blast Desc: conserved [Aspergillus fumigatus Af293] gi|66846732|gb|EAL87064.1| conserved [Aspergillus fumigatus Af293] gi|159123125|gb|EDP48245.1| conserved [Aspergillus A1163]
  misc_feature: Useful for introducing or modulating the production of volatile compounds
MAGNSVPRSVADATRFTSNTPHAATKSTPSNATPKTPSQTRPSPPRQLRRPVGAPATGPNVTQETMEERVRRLRAAHLAAKQHDVSKMDKIIGSSRRFFDAAHKVTVMGLIGFSGLALLVTVYATVDMMIYNRKRRNEFFAQQKQFKEDSLEAARLAYMTGSASPEQIALVEDATSRANESGIALPSLLSAPRAAITGTEASVFPGSSMTETALEPETKKKGGFTGWLFGGLKKEEQSISMSEERWKSTPTTSTTPSDVTENLRDKAKAAFDSERDNQRKGGPLDQLGLDKPTDAGKKKGWLW

SEQ ID NO: 30472 - DNA, 2704 bp, Muscodor strobelii
  misc_feature: SGI EST ID NO. CUFF.72222.0
  misc_feature: Variant of the nucleotide sequence at SEQ ID NO 30470
cgaaactcgaccatattccacgacctcgtgaaatacgatgaagcaagtggtagtgtgatgcacgaccagtgggataataaggcccagaaatgggtcggatgggaaaaccgaggcgggtccttcggtacgtttagaaagatcccgcgcgagttatatttgattatattcctaagacatagtactaacttctttacagtaagtggtctgacctgtcaactatcagaaattagcccttttgttttaaaacccgctgccccgcgaaaagtcgtgaaaaataactaacctaatacctttctggctaccaggtgggcaatccggttctcgtgtctccgtccaagtcgcgagttgatttcttcggcattggcactgatggcggaatgtatcatttctcgtgggatgaaaactcgagctattcgaaacttgaggctctcggtgggaatttctccagcatgcctagcgtgattgtcaccacgcctcaaaggctcgatgtggtggccgttggcacagatgacaagctcaagcatcgagctttcatcaattcgacttggatttcagactgggaggacatgggcgtgttcgccaacagtgcacctctgggcattgcctgcggaaacgagacgaacaggcgagtgggtgtgttcgtattggaccaatacaacgaggctcaatatgcatcttggcttgccgacgattcaccaagttggaggggcctggccaaatttgggagcatcggaggaaatctcacgaccagatggcagtgggaaccatattgatgctcatgaattatagcaggagctgcagccccgcgctagaggtagtctgctgatggaggagatctcgggtgatcgttgaaaggatcaaagagatacacgattttgagatctctcgggatgaaggagcatcagactgtataagcgtgtctttcgagttgacggaggcgttaaatgataccttttgtatgtgtagtagcttaagtgactgtcaattgactacctagaaactgatgatcagtgttcttactcgcccatagtatcgagcagccgtccagtcaacatgaaatgaggataaacacatgaatcagcggagatgaaagtaaggtatataagaacattgaagttgaaaagaaaagcgtctgcctgagagctgaaatgatggggttcacggcaatatgtgtgtaacgcgagaccagcggtacgtaccgagtcccctatatcgtgacgcagctcccactaaaaaaacggcccatgcaagctattccatcctatggggaagcatccagtccgacagctccagaaaaaattcagctaggatcatacgtcgtcgactccatcattcctttgacgacgatagcatcagtcaattagataccgacgaccatccgacttaattcccggaacccaatttggtcactgggctctgaatattgtcgttccgcgactccgccctcgcaatggccggcaacagcgttccacgcagcgtcgccgacgccacacgcttcacctccaacactccacacgccgccaccaaatcgacaccctccaatgctactcccaaaactcccagccagacacgtccttctccgccgaggcagctaaggcggccggtcggtgcacctgcaactggtcccaatgtcacccaagaaaccatggaagagcgcgtccgccgcttacgagccgcccatctcgcagccaagcagcacgacgtatccaagatggacaagatcatcgggagttcacggcgcttcttcgacgccgctcacaaagtcaccgtcatggggctgataggattcagtggcctcgccctcctagtcacagtctacgcaacagtcgacatgatgatatacaaccgcaagcggcgcaacgagttcttcgcgcaacaaaagcagttcaaggaagacagtctagaagccgcgcgcctggcctacatgacggggtccgcttccccagaacaaatcgccctcgtcgaagacgccacctcccgcgcaaacgaatccggcatcgcgctcccatctctcctctccgcgccgcgcgccgctatcacagggaccgaggcaagtgtcttcccaggttcgagcatgacagagactgcgctggaaccagagacgaagaagaagggcggatttacgggttggttattcggaggtctgaaaaaggaggagcagagcataagtatgagtgaggaacgctggaaatccacacccacgacttcaacgaccccttcagacgtaacggagaacctgcgcgataaagcaaaagcagcattcgacagcgagcgggataatcagcggaaaggcgggccattagatcagcttggactcgacaagccgacggacgcaggaaagaagaaaggctggttatggtagtctacctatataccgagataagaaggaaggaaaagctattgcatgtacatgtatactaatcccgcttgttccaaatataataccagtgtaggattacgatgggcgagatagatgggatggaaaggagggaatggcatattgtatatatgtatataagagattccgagctcacaagccgcatcttgttcgaacgtcattgcggcattaacaaacatctacatcaacactattaggcaaattttttttggtcaagtatagttcaacggagttatcgactctgacatacgacgggtcgaacagcgttgtgagcattacaaatctgcagcatcattacgagacaaa

SEQ ID NO: 30473 - DNA, 960 bp, Muscodor strobelii
  misc_feature: SGI cDNA ID NO. 570482
  misc_feature: Encodes the peptide sequence at SEQ ID NO 30474
atgtcggagcatcaatggccggaatcagcacggaagcgcgcgcgagacgacgaagagatcgaggccgacgtcgcggcgaacaatagcccgctggggtttacagagcaccgtaataaacgtatacagtctctaccgttccgaacatcgccaacacaaaggcgctggtcaggccctctgaatggcgcatccagcaccatcacgccatccaactccgactccgacccagaagatgcgcaagtctaccagcaacccatggccggcatggatatggaccacgatgccgacatgatggttgatgggcagtcctcgtccgacttcctccagcctgggccctcgcagcccgatcccattgcgccgagcatacatggccgaatgcccactcccatccactgctcattcgcagctcaggtacgaggcaacaactgggcggccatgcaagacgagagcggaagcgccgctatgtcacatgagaatgatgcatttgcgcagtctgaacaatgcccgcatcacgatccttctgtaccccgctctctggaggcggcggagtggacgatggtgcaaaaccgacgcttgccttcaccgattagtgagaatggaggcgaagacagtccgggcatgatgcttgacaactgcacgccggttatggcacagctccagcgaccctatctaccgcatctcccgcactcgacgaatccacacgccatggccatgcatccaaacattcgtacgtctccacagcctgtagagagcgagatgatggatgccgaggatggcgcaacgtcggcacccgccacgccgtcaccgcgtggcaagttcggccacagtcggagcaaacacactctcaacaactggactttgcagcctggcatgaaaaagagcttcagtataggataccgagctgattgtgagaaatgccgtcagaaggttccgggacacttcaaccacatcatcgtctcctag

SEQ ID NO: 30474 - protein, 319 aa, Muscodor strobelii
  misc_feature: SGI Peptide ID NO. 570482
  misc_feature (1)..(319): NCBI GI: 171681726 Blast Desc: protein product [Podospora anserina] gi|170940822|emb|CAP66471.1| protein product [Podospora anserina]
  misc_feature (1)..(319): NCBI GI: 85097826 Blast Desc: NCU05550 [Neurospora crassa OR74A] gi|28922005|gb|EAA31276.1| [Neurospora crassa OR74A]
  misc_feature (11)..(318): NCBI GI: 256733894 Blast Desc: NECHADRAFT_35425 [Nectria haematococca mpVI 77-13-4]
  misc_feature (11)..(319): NCBI GI: 46127919 Blast Desc: FG08337.1 [Gibberella zeae PH-1]
  misc_feature (122)..(319): NCBI GI: 145607986 Blast Desc: MGG_09767 [Magnaporthe grisea 70-15] gi|145015452|gb|EDJ99988.1| MGG_09767 [Magnaporthe grisea 70-15]
  misc_feature (5)..(318): NCBI GI: 154323254 Blast Desc: BC1G_00026 [Botryotinia fuckeliana B05.10] gi|150842255|gb|EDN17448.1| BC1G_00026 [Botryotinia fuckeliana B05.10]
  misc_feature (3)..(142): NCBI GI: 116201813 Blast Desc: CHGG_08791 [Chaetomium globosum CBS 148.51] gi|88177309|gb|EAQ84777.1| CHGG_08791 [Chaetomium globosum CBS 148.51]
  misc_feature (12)..(319): NCBI GI: 119188689 Blast Desc: [Coccidioides immitis RS]
  misc_feature (12)..(319): NCBI GI: 240111511 Blast Desc: CPC735_073460 [Coccidioides posadasii C735 delta SOWgp]
  misc_feature (1)..(297): NCBI GI: 156058017 Blast Desc: [Sclerotinia sclerotiorum 1980] gi|154702525|gb|EDO02264.1| [Sclerotinia sclerotiorum 1980]
MSEHQWPESARKRARDDEEIEADVAANNSPLGFTEHRNKRIQSLPFRTSPTQRRWSGPLNGASSTITPSNSDSDPEDAQVYQQPMAGMDMDHDADMMVDGQSSSDFLQPGPSQPDPIAPSIHGRMPTPIHCSFAAQVRGNNWAAMQDESGSAAMSHENDAFAQSEQCPHHDPSVPRSLEAAEWTMVQNRRLPSPISENGGEDSPGMMLDNCTPVMAQLQRPYLPHLPHSTNPHAMAMHPNIRTSPQPVESEMMDAEDGATSAPATPSPRGKFGHSRSKHTLNNWTLQPGMKKSFSIGYRADCEKCRQKVPGHFNHIIVS

SEQ ID NO: 30475 - DNA, 2671 bp, Muscodor strobelii
  misc_feature: SGI EST ID NO. CUFF.72117.0
  misc_feature: Variant of the nucleotide sequence at SEQ ID NO 30473
gccgtcatcatcgatactggagcccgttcacctaacgagttcagcttctattccccacaatccattcccatcgtcgtgcggtcggatctgcagggtactgacgaatgctccatagctctgagcaggcgaacaggcagaggcagagcttttccctagatacatcaacactcttcatgccagtgtccaacctcacagcgtcttgtctttcgttgcacgtaattattttcttgatagtcccgttcaagccgcacaattccattttgtttctctatagcgcgtttgcttagtctgttttctgcacccaaccacattcctcggggctctgcggccgcacgggagtcccgcgcagtccattctcacctccacttcgtattggggagcagacctcgcaaagggcggagaaagaggacaaaaacatttgcactggtgcattccaaagggttgctgagggattggaattgtgttttcgccgagccgtcctggcggtgttgcacatacttcgtcatcccgaatccgcgttgatcatttcctcttcccatccggtttctggaggagcagagggcgctttggactctggctgtagcccgccccagccccgaccctgacctcacctggaccttcccccctcggcctggaactcatatactaatacgcgcattgcaaaaatttataatcattgcgagcgagagtgattagctgagctttgctacctcaccatttcaaccacctaaagtcgaacagcgttcatttagacggctgctaggtctggtccactttccgtcctccgaaatccagggtcgtcgcccattgcttacgtcgcattcgtcataattgacctggcacgggaattgctcgttgtagagcacactactctctgtgttcaaccatgtcggagcatcaatggccggaatcagcacggaagcgcgcgcgagacgacgaagagatcgaggccgacgtcgcggcgaacaatagcccgctggggtttacagagcaccgtaataaacgtatacagtctctaccgttccgaacatcgccaacacaaaggcgctggtcaggccctctgaatggcgcatccagcaccatcacgccatccaactccgactccgacccagaagatgcgcaagtctaccagcaacccatggccggcatggatatggaccacgatgccgacatgatggttgatgggcagtcctcgtccgacttcctccagcctgggccctcgcagcccgatcccattgcgccgagcatacatggccgaatgcccactcccatccactgctcattcgcagctcaggtacgaggcaacaactgggcggccatgcaagacgagagcggaagcgccgctatgtcacatgagaatgatgcatttgcgcagtctgaacaatgcccgcatcacgatccttctgtaccccgctctctggaggcggcggagtggacgatggtgcaaaaccgacgcttgccttcaccgattagtgagaatggaggcgaagacagtccgggcatgatgcttgacaactgcacgccggttatggcacagctccagcgaccctatctaccgcatctcccgcactcgacgaatccacacgccatggccatgcatccaaacattcgtacgtctccacagcctgtagagagcgagatgatggatgccgaggatggcgcaacgtcggcacccgccacgccgtcaccgcgtggcaagttcggccacagtcggagcaaacacactctcaacaactggactttgcagcctggcatgaaaaagagcttcagtataggataccgagctgattgtgagaaatgccgtcagaaggttccgggacacttcaaccacatcatcgtctcctaggacggacacgatgtcttcctgccgtcctgaccttaggggtatttcgactgggtggaacgtttcagatagctcatgataagttgacatcttaatcggtgtaattcggcggattcaacagaagagggcgaaatgtcggcacctgtaatgcgcgagtctggatgttcaaatctgtcaccgaacggacgactatcgatgttcatcagactgaagggtatcgagcggctcctgtcgacaataatggtcctctcgtcttatctcatcaccttgtcacttcactttcgtgaacctttcttttcctatatatacctataacacgaaagcggctctcgcgcaacaatcgtgtgacagcgactcttgcccttctgcatctatcatctccactcatttactttcctctcagcactcagcatcattgcattcgctcattcattgcatacccgtcccgcgtcactcattcatttacaaaattgttttttcccaatatacccaaccagcaaacacattcttttttgcgagcattttcgagagagggggtggggatatactctgcataaggtagccagcgaggaactcagggactgggtgctatacatacacaaacaaaactcctggactttacggggcgtgtgttttccttgtttaggcgttttatagatcggattgtgctgccgacggcaataaggcggctggttttttgaaaggggggagggggaaagaatgcttatgcagtagcggaattatcagatacacgagcggtctgatagatacctaagttgtcggcacgaactggggataattgataggtttcggccattttgacggtat

SEQ ID NO: 30476 - DNA, 324 bp, Muscodor strobelii
  misc_feature: SGI cDNA ID NO. 570483
  misc_feature: Encodes the peptide sequence at SEQ ID NO 30477
atggcacctcgcaacaaggccaagaaggccgccgatactattcattcacgcctctccctcgtgatgaagtcgggcaaggttcagctagggcacacgcagtctctcaagtccattcgttccggcaaagccaagctggtcctgctggccgcaaacgctccccctctccgcaagtccgagatggagtattacgcaatgctaggcaaagtcccagtccatcatttctctggcgacaacatccaactcggtaccgcttgtggaaagctttttcggtgttctgccatggttgtcctcgatgccggcgattcagacatactggaagagtag

SEQ ID NO: 30477 - protein, 107 aa, Muscodor strobelii
  misc_feature: SGI Peptide ID NO. 570483
  misc_feature (12)..(106): Pfam Id: PF01248 Pfam Desc: Ribosomal protein L7Ae/L30e/S12e/Gadd45 family
  misc_feature (1)..(107): NCBI GI: 71001146 Blast Desc: 60S ribosomal protein L30 [Aspergillus fumigatus Af293] gi|119480779|ref|XP_001260418.1| 60S ribosomal protein L30, [Neosartorya fischeri NRRL 181] gi|66852892|gb|EAL93216.1|
  misc_feature (1)..(105): NCBI GI: 121698901 Blast Desc: 60S ribosomal protein L30, [Aspergillus clavatus NRRL 1] gi|119395985|gb|EAW06417.1| 60S ribosomal protein L30, [Aspergillus clavatus NRRL 1]
  misc_feature (1)..(107): NCBI GI: 256731806 Blast Desc: [Nectria haematococca mpVI 77-13-4]
  misc_feature (1)..(105): NCBI GI: 67539824 Blast Desc: AN6082.2 [Aspergillus nidulans FGSC A4] gi|40738867|gb|EAA58057.1| conserved [Aspergillus nidulans FGSC A4] gi|259479732|tpe|CBF70223.1| TPA: 60S ribosomal protein L30,
  misc_feature (1)..(105): NCBI GI: 115443346 Blast Desc: 60S ribosomal protein L30-2 [Aspergillus terreus NIH2624] gi|114188349|gb|EAU30049.1| 60S ribosomal protein L30-2 [Aspergillus terreus NIH2624]
  misc_feature (1)..(106): NCBI GI: 154281567 Blast Desc: cytosolic large ribosomal subunit protein L30 [Ajellomyces capsulatus NAm1] gi|150411775|gb|EDN07163.1| cytosolic large ribosomal subunit protein L30 [Ajellomyces NAm1]
  misc_feature (1)..(106): NCBI GI: 261195114 Blast Desc: cytosolic large ribosomal subunit protein L30 [Ajellomyces dermatitidis SLH14081] gi|239587833|gb|EEQ70476.1| cytosolic large ribosomal subunit protein L30 [Ajellomyces large
  misc_feature (6)..(107): NCBI GI: 242774528 Blast Desc: 60S ribosomal protein L30, [Talaromyces stipitatus ATCC 10500] gi|218722077|gb|EED21495.1| 60S ribosomal protein L30, [Talaromyces stipitatus ATCC 10500]
  misc_feature (1)..(105): NCBI GI: 145246614 Blast Desc: An12g04860 [Aspergillus niger] gi|134080274|emb|CAK97177.1| protein product [Aspergillus niger]
  misc_feature (1)..(105): NCBI GI: 169783784 Blast Desc: [Aspergillus oryzae RIB40] gi|238493609|ref|XP_002378041.1| 60S ribosomal protein L30, [Aspergillus flavus NRRL3357] gi|83775098|dbj|BAE65221.1| protein
MAPRNKAKKAADTIHSRLSLVMKSGKVQLGHTQSLKSIRSGKAKLVLLAANAPPLRKSEMEYYAMLGKVPVHHFSGDNIQLGTACGKLFRCSAMVVLDAGDSDILEE

SEQ ID NO: 30478 - DNA, 1004 bp, Muscodor strobelii
  misc_feature: SGI EST ID NO. CUFF.72257.1
  misc_feature: Variant of the nucleotide sequence at SEQ ID NO 30476
cctgaaatgcagtccaggcacctgtgatgaggggcatggttttacggcttattccatcttagctgaaatttatcgcgtcacccacgagcagaaccaacttcaaccctctgctcagggtctctactagtacctcaaccatcgttttacgatcacgagcctcggtcgtcctgcacccaaacgccttcgtcgttcccgcgatcagcaacgtaagtcgaaatgctcgtcattagaattgttctctctttttcgagatcagctatgtaaaggatggcggacttcaccgtctgctgtcctcacccagcgaagaagcctttccacgggctttggagggtcatgtaatcggctaacacttcagcccttggaagatggcacctcgcaacaaggccaagaaggccgccgatactattcattcacgcctctccctcgtgatgaagtcgggcaaggttcagctagggcacacgcagtctctcaagtccattcgttccggcaaagccaagctggtcctgctggccgcaaacgctccccctctccgcaagtccgagatggagtattacgcaatgctaggcaaagtcccagtccatcatttctctggcgacaacatccaactcggtaccgcttgtggaaagctttttcggtgttctgccatggttgtcctcgatgccggcgattcagacatactggaagagtagcaagccatccggtatgtgctttgctccatacttgacgctaaacgcggatctcgacagcaccatcacagcaacagatgaatgccttacgacatttcgaggaaatggtattttcttagtacaggaattgggcggatacctcaagaaaattcggtttcgtcattgtactcaagatttgaaatggctactagttgacacagaaatcatctaagcttgcgttcctcaaaccttccgattatgtacgttcccacttattaactacctgcgcccatgtgaatcgttgtgaatcgttccaaaccctcgtacgtgcattgcgtg

SEQ ID NO: 30479 - DNA, 645 bp, Muscodor strobelii
  misc_feature: SGI cDNA ID NO. 570484
  misc_feature: Reduced expression when VOC is produced
  misc_feature: Encodes the peptide sequence at SEQ ID NO 30480
atggcgatctcgcacaacaaccagattcagaagaaccacttccgcaaggattggcagcgtcgggtccgatgccacttcgatcagcccaccaagaagatcgcacgcagagccgcccgtgctgctaaggctgctgctgtcgccccccgtcccgtcgacaagctgagacccattgtccgatgcccttccatcaagtacaaccgccgtgtccgtgccggccgtggcttcaccctccttgagctgaaggaggctggcatcccccgtctcgtggcccctaccatcggtatctccgtcgatcaccgccgccagaacctcagcgaggagtccctctccgtcaacgtcgcccgccttaaggcctacaaggagcgcctcatcgtcttcccccgcaagggtgctaagcacgccaaggctggtgacagcaaggacaccgacctcagcaagacctccaccatctccagcatcgctgcttctctgcccatcacccacgtcgccgagggtatctccgagatcaagaagagcgacgctcccaagcccatcgagggtggtgcttacgtcgccctccgcaaggccagaagcgacgccagactgaagggtgtccgggagaagcgggccaaggacgccgccgaggaggagaaggccaagaaatag

SEQ ID NO: 30480 - protein, 214 aa, Muscodor strobelii
  misc_feature: SGI Peptide ID NO. 570484
  misc_feature (7)..(189): Pfam Id: PF01294 Pfam Desc: Ribosomal protein L13e
  misc_feature (7)..(140): Pfam Id: PF01294 Pfam Desc: Ribosomal protein L13e
  misc_feature (1)..(214): NCBI GI: 116201807 Blast Desc: 60S ribosomal protein L13 [Chaetomium globosum CBS 148.51] gi|88177306|gb|EAQ84774.1| 60S ribosomal protein L13 [Chaetomium globosum CBS 148.51]
  misc_feature (1)..(202): NCBI GI: 156061499 Blast Desc: 60S ribosomal protein L13 [Sclerotinia sclerotiorum 1980] gi|154700296|gb|EDO00035.1| 60S ribosomal protein L13 [Sclerotinia sclerotiorum 1980]
  misc_feature (1)..(202): NCBI GI: 261360995 Blast Desc: 60S ribosomal protein L13 [Verticillium albo-atrum VaMs.102]
  misc_feature (1)..(202): NCBI GI: 154313729 Blast Desc: 60S ribosomal protein L13 [Botryotinia fuckeliana B05.10] gi|150849296|gb|EDN24489.1| 60S ribosomal protein L13 [Botryotinia fuckeliana B05.10]
  misc_feature (1)..(214): NCBI GI: 256733893 Blast Desc: NECHADRAFT_58831 [Nectria haematococca mpVI 77-13-4]
  misc_feature (1)..(214): NCBI GI: 242794282 Blast Desc: 60S ribosomal protein L13 [Talaromyces stipitatus ATCC 10500] gi|218718926|gb|EED18346.1| 60S ribosomal protein L13 [Talaromyces stipitatus ATCC 10500]
  misc_feature (1)..(214): NCBI GI: 212535872 Blast Desc: 60S ribosomal protein L13 [Penicillium marneffei ATCC 18224] gi|210070491|gb|EEA24581.1| 60S ribosomal protein L13 [Penicillium marneffei ATCC 18224]
  misc_feature (5)..(214): NCBI GI: 46127915 Blast Desc: FG08335.1 [Gibberella zeae PH-1]
  misc_feature (14)..(214): NCBI GI: 171681718 Blast Desc: protein product [Podospora anserina] gi|170940818|emb|CAP66467.1| protein product [Podospora anserina]
  misc_feature (1)..(200): NCBI GI: 226279707 Blast Desc: 60S ribosomal protein L13 [Paracoccidioides brasiliensis Pb01]
  misc_feature: Useful for introducing or modulating the production of volatile compounds
MAISHNNQIQKNHFRKDWQRRVRCHFDQPTKKIARRAARAAKAAAVAPRPVDKLRPIVRCPSIKYNRRVRAGRGFTLLELKEAGIPRLVAPTIGISVDHRRQNLSEESLSVNVARLKAYKERLIVFPRKGAKHAKAGDSKDTDLSKTSTISSIAASLPITHVAEGISEIKKSDAPKPIEGGAYVALRKARSDARLKGVREKRAKDAAEEEKAKK

SEQ ID NO: 30481 - DNA, 1290 bp, Muscodor strobelii
  misc_feature: SGI EST ID NO. CUFF.72583.0
  misc_feature: Variant of the nucleotide sequence at SEQ ID NO 30479
aacgcaactcactgctcggaatttctggtgcctcaatctggagacactgacgacccgcgcgacaaccctcttccaccacaccggatcttgatcgcaatcagtcacaatggcgatctcgcacaacaaccagattcagaagaaccacttccgcaaggattggcagcgtcgggtccgatgccacttcgatcagcccaccaagaagatcgcacgcagagccgcccgtgctgctaaggctgctgctgtcgccccccgtcccgtcgacaagctgagacccattgtccgatgcccttccatcaagtacaaccgccgtgtccgtgccggccgtggcttcaccctccttgagctgaaggtacttatctatccgccaacctttcatccccccgatgcccgacaatccacgtagaagcgaagcaatccggagacgaaggacttgtctgcgtcacatgcgatgttggatttggagactcgttgagaattggatgatcattatctaacatattgctgtaggaggctggcatcccccgtctcgtggcccctaccatcggtatctccgtcgatcaccgccgccagaacctcagcgaggagtccctctccgtcaacgtcgcccgccttaaggcctacaaggagcgcctcatcgtcttcccccgcaagggtgctaagcacgccaaggctggtgacagcaaggacaccgacctcagcaagacctccaccatctccagcatcgctgcttctctgcccatcacccacgtcgccgagggtatctccgagatcaagaagagcgacgctcccaagcccatcgagggtggtgcttacgtcgccctccgcaaggccagaagcgacgccagactgaagggtgtccgggagaagcgggccaaggacgccgccgaggaggagaaggccaagaaatagacgaagcgaaacgatggatgagaatatcctcaggggggaccgcacgggagtactacggacgggcattcttaaggggtttctgctttcgtttggtcgtgtttgcgtgctggttgctggatggtcaacggattttcggtcggctctgcggtgtttcccctgttaatgagggaggtgtttgaccacagaccaaaaaaaataaagcaaaaagcacgatacatgaatgatgatctatgatctcattctccagcctcgagggccgcagagaaatcggccccaggactagacccaagcataattgcatcttcccggcccggttttgctttaggcgtctctctcaatggtaaatgaatggacaaaatcttaaagcacaaaacatgacca

SEQ ID NO: 30482 - DNA, 579 bp, Muscodor strobelii
  misc_feature: SGI cDNA ID NO. 570485
  misc_feature: Encodes the peptide sequence at SEQ ID NO 30483
atggtttccctaggtacccaaaccaaatttcccgttctgcggtccgagcttctatttgttttcgcgcttatggcgcggacgccggagggcgctcggatggttgcgcggagcatgcatagatttgagctcgtggcagtcatccaggaagccatcacaggggaaaaactcattccagactcgtataacaacatcgacgccaactccccgtcgtccgaacgttctgattccccagccagcggacgctccagcccaaatatgacagctgtcgcgagactatcgccgtcgacgcctgctagtggcgcaggctcggtgcccccaccagggaagtcacagaagacgatgacggacgttgatcgtgagaatgcgctcgtgcttgtcgctgagctattgcagaagtgtgctagagatttactgccgctgcccaggaggacatttaggaagttgttgaaagaaggtggccagagattattgcgtgataggcagggtcaaggagaagatagtagtgcagcaccagtcaaggatgaagatgatgattgggacgaggaggacaaggagcttgctgaagcggcgatgatgtga

SEQ ID NO: 30483 - protein, 192 aa, Muscodor strobelii
  misc_feature: SGI Peptide ID NO. 570485
  misc_feature (6)..(177): NCBI GI: 156058031 Blast Desc: SS1G_04747 [Sclerotinia sclerotiorum 1980] gi|154702532|gb|EDO02271.1| SS1G_04747 [Sclerotinia sclerotiorum 1980]
  misc_feature (1)..(161): NCBI GI: 261360994 Blast Desc: conserved [Verticillium albo-atrum VaMs.102]
  misc_feature (1)..(163): NCBI GI: 164425560 Blast Desc: NCU05553 [Neurospora crassa OR74A] gi|157070975|gb|EAA31279.2| [Neurospora crassa OR74A]
  misc_feature (4)..(156): NCBI GI: 256733419 Blast Desc: NECHADRAFT_77488 [Nectria haematococca mpVI 77-13-4]
  misc_feature (6)..(138): NCBI GI: 154323548 Blast Desc: BC1G_00173 [Botryotinia fuckeliana B05.10] gi|150842402|gb|EDN17595.1| BC1G_00173 [Botryotinia fuckeliana B05.10]
  misc_feature (4)..(132): NCBI GI: 46127913 Blast Desc: FG08334.1 [Gibberella zeae PH-1]
  misc_feature (6)..(162): NCBI GI: 171681720 Blast Desc: protein product [Podospora anserina] gi|170940819|emb|CAP66468.1| protein product [Podospora anserina]
MVSLGTQTKFPVLRSELLFVFALMARTPEGARMVARSMHRFELVAVIQEAITGEKLIPDSYNNIDANSPSSERSDSPASGRSSPNMTAVARLSPSTPASGAGSVPPPGKSQKTMTDVDRENALVLVAELLQKCARDLLPLPRRTFRKLLKEGGQRLLRDRQGQGEDSSAAPVKDEDDDWDEEDKELAEAAMM

SEQ ID NO: 30484 - DNA, 2661 bp, Muscodor strobelii
  misc_feature: SGI EST ID NO. CUFF.72123.0
  misc_feature: Variant of the nucleotide sequence at SEQ ID NO 30482
cgaaattcaaaccctcatgccgacaattagcgactccctcttttagccaaaatcattccgcgcccatattaggtaaacggacttggaaacattagacgtttcggtgtcagaagggatagctattcggtgcttgagcatccggctgccggccgccagtcattatgttgtcaggcgctatcgacaagctatttgaaaacatccccaacgaggatggactgcaaactgaagtcttccgacgtgtcacccaggtggccaagaatctttgggaatccgacccaaactcacaagaacttgacagtctagcacagaaggttggcgatgttgctcgcgaggagtccaaacgcttacccctcggcgaatctggtgttctcgagttcttctgcggagtcatatcaacccatgagttgagaacatccctagctgtccaatgtctccgtatcattggaaactcgtgtgcggacgaagatgaaaaccgagaaaaggtcgtggccgcaggctgtattccagccattgtcaccttgttaaaccatgatgaaatattagcttttgtcatacccgtcttgttcaacatatgtgtcgattatgagcccgcgcaaaaggccatatttcaagccggcataaaccccgagcttgttgatctcatatccggcgaccgcttggagaatgcggcctcctttatgaattatatctgcaagatcttgggccttgtggccactcaagagcccgaggcgaattttgtacaccctgctacgccatttgttctgctgagcttagccaacaaccaggcgtcacctatcgacattgaggactttataggccaaacctcagtcgctttaacatacctgtctcaggaaactttccagactacctttgtagaaacaccagggtcgattgctctaatcttagaaacttttcagaaagcatgttggagtttagaaacatccgaacgaggttccgatgaacatgaacaacttaaacaagttaataccgcctttacgacatcccttgcagatttgtctgcacatactctctttgcttcttcatataatctcaacagcacagaggtccagacgctacaacgctggatttcaacgccgagcatacctctgcagtcagcagcttgtctaatgcttggaaacatcgcgcgttcagacgagacatgtatcaaactcgtcgggcaattgaatatacacaaaccactcataaataccctgagcgacgcatcaatcacagaccctggtctccttcactctgtactcagtttcatcaaaaaccttgctattgccgcaacgaataaaaaactcatgggcgacgccgggctcttggacgcacatatccttccacgtatatgggacttagacgcacagccccaaattcaattcgatgccgtatcactaactaggctcctccttgtgggctgtctagcgaacgttcgacgtatctgcgcacccctaagtgacgacccagcatcaccagcgcacgatcgttcgaagctccacctactcatggacctccacgaacggagcgaccacgaaccaacacagatggagagtgcacgcgccgtcttgacggtgtgccgagtgctacacacggcaagtctacgaagtccaactgcaccagcagtacggggacgaagatcctcctcaccacgctcttcctcccctcaaacagccacgtcaaacccatctacctctacacctgcaatgacaccctctgcccgcccctcctcaatatccgatactgcacgtacaatgtctccagctcgctcatggggccggggtatcgaaaacttctattcaaatcatctaatgatcacgaattccatggtttccctaggtacccaaaccaaatttcccgttctgcggtccgagcttctatttgttttcgcgcttatggcgcggacgccggagggcgctcggatggttgcgcggagcatgcatagatttgagctcgtggcagtcatccaggaagccatcacaggggaaaaactcattccagactcgtataacaacatcgacgccaactccccgtcgtccgaacgttctgattccccagccagcggacgctccagcccaaatatgacagctgtcgcgagactatcgccgtcgacgcctgctagtggcgcaggctcggtgcccccaccagggaagtcacagaagacgatgacggacgttgatcgtgagaatgcgctcgtgcttgtcgctgagctattgcagaagtgtgctagagatttactgccgctgcccaggaggacatttaggaagttgttgaaagaaggtggccagagattattgcgtgataggcagggtcaaggagaagatagtagtgcagcaccagtcaaggatgaagatgatgattgggacgaggaggacaaggagcttgctgaagcggcgatgatgtgaaatccactgcgtggttgagacgaagacgacgactcatggtttacggtacgcattcatgtcatgggagttacttgcattgagagtttgcattgagtttttcgtttagggtgtggcattggatgtctagattagttgcgtatctgggctgtcctgctatgggcacgtcaagaaagaaacattgccaataagtcctctattgttggctcagtatgattacctacctagaaagcatgacgccgggtattgggctctgctcttg

SEQ ID NO: 30485 - DNA, 669 bp, Muscodor strobelii
  misc_feature: SGI cDNA ID NO. 570486
  misc_feature: Encodes the peptide sequence at SEQ ID NO 30486
atgatcaacatcaggcttctgactgtccttggacttcttggtgcattggccagggccggtacacccatgggttatggatatgcgtcaactgccaccgatgaagccagcagcatgacacagggtatcccgcccgtcagcgtttcgatagttgcgactaccgtaatctcatcagtaactgtcactaagactgtcacaacgactaaagaaggcgaatgcagcgccgaaaccgacacttcgacgtccggcaccctcacaactaccaggaagaccagcgcaacgacaactatcacggtccctccgttttcgccggcatcttccactgagactgcaatggcaaccggtatccccgacacagctgcatcttccatcctaggcaatagcacatcgtcgtgcgaatcgtcattgaccacaacgggtcttgtcgatggtgcaacgggctctagtactccgggcatgacttcaatcggcacaagcaccctcgtcgtccctgttagtccaactggcccaaccgaaggggaaggtaccgcgtcaagcagcaccgccttcaggccaagccctacaacattaccatcaccaatccctaccggcgcctcaaacggtctcgtgtccctgttcgacacgagaattttcgttggctttgtcggtttggtatcattgatggccttctaa

SEQ ID NO: 30486 - protein, 222 aa, Muscodor strobelii
  misc_feature: SGI Peptide ID NO. 570486
MINIRLLTVLGLLGALARAGTPMGYGYASTATDEASSMTQGIPPVSVSIVATTVISSVTVTKTVTTTKEGECSAETDTSTSGTLTTTRKTSATTTITVPPFSPASSTETAMATGIPDTAASSILGNSTSSCESSLTTTGLVDGATGSSTPGMTSIGTSTLVVPVSPTGPTEGEGTASSSTAFRPSPTTLPSPIPTGASNGLVSLFDTRIFVGFVGLVSLMAF

SEQ ID NO: 30487 - DNA, 1533 bp, Muscodor strobelii
  misc_feature: SGI cDNA ID NO. 570487
  misc_feature: Encodes the peptide sequence at SEQ ID NO 30488
atgcgtctcaagtcagttgatagagtgttgttgctgttcctggtgcaggtgaatttaggctcatgccaaaatcacattgtccaggtcccaacaagtggtccggccgagaccttaccaccagtggacttatcgttcacaggctttgcctttgaacaggcctcattttataattactctttcgcctccgggaagccaaatgagttttctcaaaatctcatcaattcggtattgagccgcacgggagggacgcctatattgagagttggagggacatcgggcgatcacggtcgatacgatgcatcgcaagataatgccacgaactatccggcaacgatctacaagccgcgtacgagcatttcggaggaccgcctgagcataggaccatcatttttcgaggccttcaaaaattggccgggagcgaagtttgagttcatgatacctttcagagacacagatttcagtcacagcgtgcaatgggctaccgccggtctcaaccgaattggcattaacaatttgtataccctcgaaattggcaacgagcccaacttctatccatggttctcagtggatgaatatgtcaaaagatacacgcagctccaaaagcgactcatatctgctattccatcgctgagcgacaaacgagttttccaggcctttgacaccgcagcaaatttcgccgacgagttgactgccaaaaaggctttcgaagcaggtctcaacaaaaacgctaccacaatcaaacaggctgcttttcactattatcagggtcacggcatttccctggaaggatttcaggattggattcgccacactaccacaatgcataacttgacaaaattcacacccaacatcaactacttgaacaataaccatcctgctattggatttgcattcacagagactggatacaatgtcggaggcggtggtggaaacgacgtcaagcccaacaacttggctactgcgttgtgggctgtcgatttccagctagctgctatgacagtaggcgtgcgtcgagtgaactggcagcaaattctgcgatccagtctgaatatgtggattcccgtaaagagcacattcagcgaaccgaaggtcaccgccaacttctactcgcagccgttcgtcgctgatttcatcggaaagagtggcgacaccagagtcatggaacttgacgtcggatcgccgaataagggattgtatgtcgcatacgccgcgtacgattctggaaagcttgcgcgtatagctcttctgaatcttgagatttggcgctctggtgagaatcaagatcgtccacagatctcgtgctctcttcaaggactgcctgacaggatcagcaaagcaacgattcatcatttgactgcagacaaaggtgctctggctaaagacaatctgacctacgcgggacttgagtggacatatgaaagtcggggaaaacagagcagagtcaagagtgacagcaaagttctggatgtcaatggtggaaaattcgatgtcatagtcaaggggacgcaggctgttttggtggacctagcatga

SEQ ID NO: 30488 - protein, 510 aa, Muscodor strobelii
  misc_feature: SGI Peptide ID NO. 570487
  misc_feature (30)..(507): NCBI GI: 238507952 Blast Desc: conserved [Aspergillus flavus NRRL3357] gi|220688696|gb|EED45048.1| conserved [Aspergillus flavus NRRL3357]
  misc_feature (27)..(507): NCBI GI: 116208738 Blast Desc: CHGG_03662 [Chaetomium globosum CBS 148.51] gi|88184259|gb|EAQ91727.1| CHGG_03662 [Chaetomium globosum CBS 148.51]
  misc_feature (34)..(483): NCBI GI: 145233889 Blast Desc: An02g11890 [Aspergillus niger] gi|134057255|emb|CAK96418.1| protein product [Aspergillus niger]
  misc_feature (34)..(507): NCBI GI: 169778435 Blast Desc: [Aspergillus oryzae RIB40] gi|83772420|dbj|BAE62550.1| protein product [Aspergillus oryzae]
  misc_feature (300)..(507): NCBI GI: 169784824 Blast Desc: [Aspergillus oryzae RIB40] gi|83775620|dbj|BAE65740.1| protein product [Aspergillus oryzae]
  misc_feature (36)..(509): NCBI GI: 85114813 Blast Desc: NCU00937 [Neurospora crassa OR74A] gi|28926556|gb|EAA35527.1| [Neurospora crassa OR74A] gi|156071386|dbj|BAF75800.1| beta-glucuronidase [Neurospora
  misc_feature (15)..(507): NCBI GI: 145248842 Blast Desc: An14g01330 [Aspergillus niger] gi|134081431|emb|CAK41913.1| protein product [Aspergillus niger]
  misc_feature (30)..(218): NCBI GI: 169784822 Blast Desc: [Aspergillus oryzae RIB40] gi|83775619|dbj|BAE65739.1| protein product [Aspergillus oryzae]
  misc_feature (29)..(509): NCBI GI: 156060939 Blast Desc: SS1G_02612 [Sclerotinia sclerotiorum 1980] gi|154700016|gb|EDN99754.1| SS1G_02612 [Sclerotinia sclerotiorum 1980]
  misc_feature (28)..(509): NCBI GI: 145248900 Blast Desc: An14g01620 [Aspergillus niger] gi|134081462|emb|CAK46475.1| protein product [Aspergillus niger]
MRLKSVDRVLLLFLVQVNLGSCQNHIVQVPTSGPAETLPPVDLSFTGFAFEQASFYNYSFASGKPNEFSQNLINSVLSRTGGTPILRVGGTSGDHGRYDASQDNATNYPATIYKPRTSISEDRLSIGPSFFEAFKNWPGAKFEFMIPFRDTDFSHSVQWATAGLNRIGINNLYTLEIGNEPNFYPWFSVDEYVKRYTQLQKRLISAIPSLSDKRVFQAFDTAANFADELTAKKAFEAGLNKNATTIKQAAFHYYQGHGISLEGFQDWIRHTTTMHNLTKFTPNINYLNNNHPAIGFAFTETGYNVGGGGGNDVKPNNLATALWAVDFQLAAMTVGVRRVNWQQILRSSLNMWIPVKSTFSEPKVTANFYSQPFVADFIGKSGDTRVMELDVGSPNKGLYVAYAAYDSGKLARIALLNLEIWRSGENQDRPQISCSLQGLPDRISKATIHHLTADKGALAKDNLTYAGLEWTYESRGKQSRVKSDSKVLDVNGGKFDVIVKGTQAVLVDLA

SEQ ID NO: 30489 - DNA, 972 bp, Muscodor strobelii
  misc_feature: SGI cDNA ID NO. 570488
  misc_feature: Elevated expression when VOC is produced
  misc_feature: Encodes the peptide sequence at SEQ ID NO 30490
atgcatgctgtacgcatgagtttgaatggcgaggcgcatagcgagtccactcaagacttgattgaagtagtgcaacaaataattcagcccttcatcagaaacatcaactacaaaccagctgccaagcaagattacgagactctccttcgaatttcgtgtacaaagtcacaatcaatgggattacacatcgtcgaaggttcgaacaagtcgaagagactctttgcaggagtccagtatgcaaagctttgctatcccggtcatcctattgacgtgcaaagctacgtcgccgtgttcactttggtggtcctatgccttgacgaccatgctatcgaacaagtagacgccctcgagaactttcacaagcgattctatgcaggagaaacacaacttaccaaggttcttgagagtcttgcgcaactcatacgggaagcctatcaccattggtcccctatcgcggccaatcttatcaccacatccatcctcgcgtttgttacagcaacggccattgaactcaaaaacatcgtgaaaccagaagttcaagtcaagagtggtcatccctgggcctattacaaacgatgtgcggatggactcggcgattgctatactgctttcacatttccttgcgctctgtacccagatgagtcgcaatggatccaggctattcccgatatggcgaagtatctcctactttgcaatgatattatatcattctacaaagaggaagtcgttggagatacagacaattatatacacgcggtggctaggtacacgggaaagaacatcgtgtctgtcttacaagacgttacccgtgaaacggaggatgcagtttggcgcattcgtaaagtactcgcctctggaggcaagcaacaacagccgtatgctcaggcatggcatgctcacgagcaaggctatattgatttccacgtgtccagtgagagatacaaattggcagaattaggtctggaatggtga

SEQ ID NO: 30490 - protein, 323 aa, Muscodor strobelii
  misc_feature: SGI Peptide ID NO. 570488
  misc_feature (14)..(321): NCBI GI: 46124133 Blast Desc: FG06444.1 [Gibberella zeae PH-1]
  misc_feature (24)..(321): NCBI GI: 46137763 Blast Desc: FG10397.1 [Gibberella zeae PH-1]
  misc_feature (24)..(321): NCBI GI: 263199514 Blast Desc: longiborneol synthase [Gibberella zeae]
  misc_feature (76)..(319): NCBI GI: 242218378 Blast Desc: [Postia placenta Mad-698-R] gi|220725848|gb|EED79818.1| [Postia placenta Mad-698-R]
  misc_feature (105)..(319): NCBI GI: 242218396 Blast Desc: [Postia placenta Mad-698-R] gi|220725857|gb|EED79827.1| [Postia placenta Mad-698-R]
  misc_feature (16)..(319): NCBI GI: 242213882 Blast Desc: [Postia placenta Mad-698-R] gi|220728170|gb|EED82070.1| [Postia placenta Mad-698-R]
  misc_feature (6)..(319): NCBI GI: 242220267 Blast Desc: [Postia placenta Mad-698-R] gi|220724888|gb|EED78903.1| [Postia placenta Mad-698-R]
  misc_feature (86)..(319): NCBI GI: 242216687 Blast Desc: [Postia placenta Mad-698-R] gi|220726694|gb|EED80635.1| [Postia placenta Mad-698-R]
  misc_feature (95)..(319): NCBI GI: 242216337 Blast Desc: [Postia placenta Mad-698-R] gi|220726921|gb|EED80856.1| [Postia placenta Mad-698-R]
  misc_feature (86)..(319): NCBI GI: 242216337 Blast Desc: [Postia placenta Mad-698-R] gi|220726921|gb|EED80856.1| [Postia placenta Mad-698-R]
  misc_feature (102)..(320): SWISSPROT Homolog: EC 4.2.3.6 Trichodiene synthase
  misc_feature: Useful for introducing or modulating the production of volatile compounds
MHAVRMSLNGEAHSESTQDLIEVVQQIIQPFIRNINYKPAAKQDYETLLRISCTKSQSMGLHIVEGSNKSKRLFAGVQYAKLCYPGHPIDVQSYVAVFTLVVLCLDDHAIEQVDALENFHKRFYAGETQLTKVLESLAQLIREAYHHWSPIAANLITTSILAFVTATAIELKNIVKPEVQVKSGHPWAYYKRCADGLGDCYTAFTFPCALYPDESQWIQAIPDMAKYLLLCNDIISFYKEEVVGDTDNYIHAVARYTGKNIVSVLQDVTRETEDAVWRIRKVLASGGKQQQPYAQAWHAHEQGYIDFHVSSERYKLAELGLEW

SEQ ID NO: 30491 - DNA, 1266 bp, Muscodor strobelii
  misc_feature: SGI EST ID NO. CUFF.72156.0
  misc_feature: Variant of the nucleotide sequence at SEQ ID NO 30489
ctgattgaccttcaacatctttgaaggagccgaactatccggagacagacgccttattctgcatactgtcgagagtagcaaggctatgtatttcatctacaaatgggtgatgctcagaacatttcgacttgtcactggaagtccactagaaactggtaccagaatcggatacgaggcgatatgcatgctgtacgcatgagtttgaatggcgaggcgcatagcgagtccactcaagacttgattgaagtagtgcaacaaataattcagcccttcatcagaaacatcaactacaaaccagctgccaagcaagattacgagactctccttcgaatttcgtgtacaaagtcacaatcaatgggattacacatcgtcgaaggttcgaacaagtcgaagagactctttgcaggagtccagtatgcaaagctttgctatcccggtcatcctattgacgtgcaaagctacgtcgccgtgttcactttggtggtcctatgccttgacgaccatgctatcgaacaagtagacgccctcgagaactttcacaagcgattctatgcaggagaaacacaacttaccaaggttcttgagagtcttgcgcaactcatacgggaagcctatcaccattggtcccctatcgcggccaatcttatcaccacatccatcctcgcgtttgttacagcaacggccattgaactcaaaaacatcgtgaaaccagaagttcaagtcaagagtggtcatccctgggcctattacaaacgatgtgcggatggactcggcgattgctatactgctttcacatttccttgcgctctgtacccagatgagtcgcaatggatccaggctattcccgatatggcgaagtatctcctactttgcaatgatattatatcattctacaaagaggaagtcgttggagatacagacaattatatacacgcggtggctaggtacacgggaaagaacatcgtgtctgtcttacaagacgttacccgtgaaacggaggatgcagtttggcgcattcgtaaagtactcgcctctggaggcaagcaacaacagccgtatgctcaggcatggcatgctcacgagcaaggctatattgatttccacgtgtccagtgagagatacaaattggcagaattaggtctggaatggtgagtgtacgtcgcacgtacagccgaaagtaagggttcttacggacgtatttgctttagcagccgtacgtagaatcaattttgtccacttatcatcctacatgtgacgaaatttttc

SEQ ID NO: 30492 - DNA, 1122 bp, Muscodor strobelii
  misc_feature: SGI cDNA ID NO. 570489
  misc_feature: Encodes the peptide sequence at SEQ ID NO 30493
atgtctaagaagagctatagcgaatttccagtctatgacaggaaaccatatcatgccctatacttttccgatgaaggcgaagatgatgatgtctgcgtgtggaaagatggacctccagacttgccagatatcgagagcgacgatgagtttctcgctagccatctgagcaaaacgaaaatcgactctcgacataaacgcaccggttctcgtgatacagaatcaagggagcaaaggagttctaaaaaaacgaaagccaatacagacaagccaagagctcgtaaggaggtcaaatttgcagacccagtccacaaagtggcgctaggagaggaacctatgtcgcagtttgaacgtgcgcaagcaataaggtacaggaagaatacagaggccgagcaacgtgccattgacattcaattggacctatctcgaacaaggaagcacctgaccagattgtcacaatacatgttgaaactcgaggctcgtgcgggaaaatgcacaaaagagggcatccgacagactctcgacacgactgtaagggatatgcaatacgagttcgatagatgcggcactaacggaggtcctcctgatgccgatcatcgatcagaaatagaagagattgccctcctcgctagaggactctgcgatcgcatgcatctggtcgatcggcattggcataaggtggcaaaagaaaatcgtgacgctgaaggtcgttctctacccgttttaattcatagcgagccgttttgcaaagattggctcaaaatcgaacttgaccaaaacgaaattgtagccgaagaaacttgctattacacggctgaagatctcgttgcgaatcgtagcattcgcgactggatcacgtatttgcgcaaatctggtaaattccgtgaccatcctctagacgagctaaagttggtagagctggcctggcgatttctagatcgcaatttgcgtggacctagaccgttgaaccccacaccggtagagaagttcattttagatctcgaagagaagaagaagaacggggtatgggctgaggcactgaagaacccaaagaagcaggtgaatgatgatgcggaagcgtggaaatatatgaaacgatgttggtcatctcgccctccattatag

SEQ ID NO: 30493 - protein, 373 aa, Muscodor strobelii
  misc_feature: SGI Peptide ID NO. 570489
MSKKSYSEFPVYDRKPYHALYFSDEGEDDDVCVWKDGPPDLPDIESDDEFLASHLSKTKIDSRHKRTGSRDTESREQRSSKKTKANTDKPRARKEVKFADPVHKVALGEEPMSQFERAQAIRYRKNTEAEQRAIDIQLDLSRTRKHLTRLSQYMLKLEARAGKCTKEGIRQTLDTTVRDMQYEFDRCGTNGGPPDADHRSEIEEIALLARGLCDRMHLVDRHWHKVAKENRDAEGRSLPVLIHSEPFCKDWLKIELDQNEIVAEETCYYTAEDLVANRSIRDWITYLRKSGKFRDHPLDELKLVELAWRFLDRNLRGPRPLNPTPVEKFILDLEEKKKNGVWAEALKNPKKQVNDDAEAWKYMKRCWSSRPPL

SEQ ID NO: 30494 - DNA, 161 bp, Muscodor strobelii
  misc_feature: SGI EST ID NO. CUFF.72158.0
  misc_feature: Variant of the nucleotide sequence at SEQ ID NO 30492
cctgtctcatcatctgtaggctgttgccacaaataaacttcgaaatcaaattgactgtatttaccatacaaatcatgtctaagaagagctatagcgaatttccagtctatgacaggaaaccatatcatgccctatacttttccgatgaaggcgaagatgat

SEQ ID NO: 30495 - DNA, 1422 bp, Muscodor strobelii
  misc_feature: SGI cDNA ID NO. 570490
  misc_feature: Encodes the peptide sequence at SEQ ID NO 30496
atgtcggcttcagcaacgatcgttttagacagaatccagccagttgcagacaacaacgattttagggccaatttcagctcaaaagaaagtttgtcgaatgttcacattctaggcgtccaggacgaatcagagtcagaaatcgaagttcatgatgccggtgttcatggctatctgagaatactgggtgcattctttgttcacttcatcactcttgggctatcagctacttttggcgcgtatcagtcacactatgaggcagacttactctcgggttattcctcgtccgacatctcatggatcggagccattcaagtcttcctcttaagcttcctaggcatcttttccggtgctctatatgatcgcggttatatgagagaggtactcatagcaggattgggcttgttggttcttgctgtgcttctgctcagttttgctcatgagttttggcaaatcttcctaacgcaggggtttagcctaggtctcgggagtggcttgatttacgtaccttcaatctcggcagtttcaaacgactttacaacacatcgcgctttagctcttggcgtagcagcttccggagctgccttcggcggtgttatttggccaattgcctttcgccaactcttaccttcgattggcttcgcatggacgaaccgaatctttgcactcttcgtattaatccttgcagttggatcttacttcagcttggcaagcggaaatgccaaaacgcaacctagtcgccgacgtcttctgggtaaaccgatcagtagttcaaacggcgcaactactcttaaccaagagaaattcaccgcattattcagtgctttcaatggcaagccttacctatttttatgtggcggtgtattttttattctccttggctactggatcccattgttttatattgtaccttatgcgtccgtgacacttggcagctcttcaacctatgcaccctacctgctttcgattttgaatgccggtagtctctttggtcgcgttatccctgcttacctgggacgactatatggcacagcgaatatcctcttactggaagcgactgtgctgggagttttagtgcttctctgggtgattattcgaagcgtcgcagcgatcacagcttggtgtttcctcctaggattcacggcaggcagcgtaatcacaatccccaacgctgtggcttctagactatcgaatccctctaatactggactgcgtctaggtatcatgtggactgcaggtgcatttgcggaactcgtaggtacccctatcgcgggaactttagttacacagcataatggaaagatcaactaccttggctgtcagctgttcggtgggcttagcatcttggtcggtgcatcattgctggtagttcctacatggtccattttcaaagacgaccgaatgagagaagctcgaactgcgtga

SEQ ID NO: 30496 - protein, 473 aa, Muscodor strobelii
  misc_feature: SGI Peptide ID NO. 570490
  misc_feature (63)..(420): Pfam Id: PF07690 Pfam Desc: Major Facilitator Superfamily
  misc_feature (7)..(447): NCBI GI: 145244925 Blast Desc: An11g07630 [Aspergillus niger] gi|134079425|emb|CAK45957.1| protein product [Aspergillus niger]
  misc_feature (51)..(447): NCBI GI: 119497229 Blast Desc: monocarboxylate permease homologue, mch4 [Neosartorya fischeri NRRL 181] gi|119413538|gb|EAW23479.1| monocarboxylate permease homologue, mch4 [Neosartorya fischeri NRRL 181]
  misc_feature (40)..(466): NCBI GI: 169775397 Blast Desc: [Aspergillus oryzae RIB40] gi|83770029|dbj|BAE60164.1| protein product [Aspergillus oryzae]
  misc_feature (40)..(466): NCBI GI: 238495955 Blast Desc: MFS monocarboxylate transporter, [Aspergillus flavus NRRL3357] gi|220694093|gb|EED50437.1| MFS monocarboxylate transporter, [Aspergillus flavus NRRL3357]
  misc_feature (40)..(468): NCBI GI: 255936081 Blast Desc: Pc13g06330 [Penicillium chrysogenum Wisconsin 54-1255] gi|211583687|emb|CAP91702.1| Pc13g06330 [Penicillium chrysogenum Wisconsin 54-1255]
  misc_feature (72)..(471): NCBI GI: 82779923 Blast Desc: monocarboxylate transporter like-protein [Gibberella zeae]
  misc_feature (22)..(468): NCBI GI: 115402443 Blast Desc: [Aspergillus terreus NIH2624] gi|114189144|gb|EAU30844.1| [Aspergillus terreus NIH2624]
  misc_feature (26)..(471): NCBI GI: 119488522 Blast Desc: MFS monocarboxylate transporter, [Neosartorya fischeri NRRL 181] gi|119410869|gb|EAW20814.1| MFS monocarboxylate transporter, [Neosartorya fischeri NRRL 181]
  misc_feature (40)..(456): NCBI GI: 255952965 Blast Desc: Pc21g01690 [Penicillium chrysogenum Wisconsin 54-1255] gi|211588946|emb|CAP95066.1| Pc21g01690 [Penicillium chrysogenum Wisconsin 54-1255]
  misc_feature (16)..(455): NCBI GI: 119474419 Blast Desc: MFS monocarboxylate transporter, [Neosartorya fischeri NRRL 181] gi|119407238|gb|EAW17188.1| MFS monocarboxylate transporter, [Neosartorya fischeri NRRL 181]
MSASATIVLDRIQPVADNNDFRANFSSKESLSNVHILGVQDESESEIEVHDAGVHGYLRILGAFFVHFITLGLSATFGAYQSHYEADLLSGYSSSDISWIGAIQVFLLSFLGIFSGALYDRGYMREVLIAGLGLLVLAVLLLSFAHEFWQIFLTQGFSLGLGSGLIYVPSISAVSNDFTTHRALALGVAASGAAFGGVIWPIAFRQLLPSIGFAWTNRIFALFVLILAVGSYFSLASGNAKTQPSRRRLLGKPISSSNGATTLNQEKFTALFSAFNGKPYLFLCGGVFFILLGYWIPLFYIVPYASVTLGSSSTYAPYLLSILNAGSLFGRVIPAYLGRLYGTANILLLEATVLGVLVLLWVIIRSVAAITAWCFLLGFTAGSVITIPNAVASRLSNPSNTGLRLGIMWTAGAFAELVGTPIAGTLVTQHNGKINYLGCQLFGGLSILVGASLLVVPTWSIFKDDRMREARTA

SEQ ID NO: 30497 - DNA, 2994 bp, Muscodor strobelii
  misc_feature: SGI cDNA ID NO. 570491
  misc_feature: Encodes the peptide sequence at SEQ ID NO 30498
atgcgtctcatcaacctaatactaccgctcctggccttttgggatagagtagtgtgtacttccaacaatttgactgatgatgtgacgtgggacaagtatagtctaagcgtcaagggagagagaacatacatctactctgccgagtttcactaccaacgaatcccagtgccagagctgtggccggatatactgcaaaagttcaaagcgaacggattcaatgcaatcagcgtctactacttctggtcgtatcacagtgcggcgcccggtgtttatgatttcgaaacttcgggcaagaatattcagctgttgttcgactatgcgaaagaggctggtttgtgggtgatcacaagacccgggccgtattgcaacgccgagacaaatggtggtggtctggctctatggggctcggacggtagcttgggagccctgcggactggtgatgaaacctatcatcaagcatggcttccttttgtgaccaaaattggagaaattatcgccagaaatcagattacagagggcgggccggtgattcttaaccaaatcgagaacgagtatcaggaaaccaatcactctccggaagcgacgcaggttattcatatgcaacagctcgagaaggcgttccgcgatgctggtgttattgtaccctttaccagcaatgagaaagggatgagatctcagtcttggtctgtcgactatcaagatgttggtggttctgtcgatgtatatggcttagacagctacccgggtgggctctcttgtacaaatccagatactggcttttcggtggtcagaacgtactaccaatggttccagaattactcatcttctcagcctgagtatgtgcccgagtttcaaggagggtacctactgggttggggtgagagcttttatgacgattgcgagtcacaacatgatcctgcttttccagatgtttactacaagaataatgtaagtttcgcaatcctcttttgggaagtagacactgacaagtccaagattgggcagcgcatgactctccagagtatctacatgacgtacggcggcactaattgggggcattctgctgcaccggtggtctatacttcatacgactataccgcgccactacgagaaacacgccagcagtgggacaagctgttccaaacaaaactgatcgggctcttcacacgagtgtcctctggcctatatcagacagatatgattggcaatggaactggatacaaattgtcgagcacattgggattcagctgggttctcaaaaacccagagtctggcgcgacattcactgtcgtccaacaagataatactcgatcgagaaacaacgttacatttgctgttgaacttgatacaagtgctggcaagataagcgtgccgactgtcgagctcggtgggagacagagcaaaattctagtcaccgactaccatcttggcaatcacactttgctctatgcatcttctgatatcgcagtccatgggtctttcgatgtcgacgtggccgtattttatctacaagaaggtcagactggcgagttcgctttcaaagaaaatacaggcttgacctataagattttcggttccagcactatgtcatcaacgaatatcacaggccacactacattcagatataagcaagcagcaggaataaccgcagttcaattctcaaatggtgtgcttgtctatctactagaccagaagaccgcgtggaggctctgggccccaacaaccactacaaacccagcagttgcactcaaccagcagatattcgtcattggaccatatttggtcagagatgcctctataaaaggctcgcagcttatagtgaatggtgataatgatataaccactacgatcgaagcatacatcggtactccaattgataccatcgtatggaatggcaacccattacaggcaaccaagacggattatggctcttatacagtcgaaattccgggtgctgaatcgagaaagatttctctgccgagcttgacgcagtggcgatccgcagattctttgccagaagtggagccagaatacgatgactcgaattgggttgtatgcaacaagacctccactctgagtcctattgcgccggaatcattgcctgtgctattctcctcggactacggattctacgcgggaacgaagatctaccgtgggtatttcgatggaaataagccgacttcagtatatatctctgcttctggtggtcttggattcggttggaatgcctggctgaatgggcaactgattggtggcaacactgggaatggcactctcacaaacacgaatgctaccttgagactcccatcgtcagcgctgagcacagcgagcaacgtcttgaccgtggtcgtcgactaccacggtcacgatgagacatcaacggcaaaaggcgtcgagaacccgcgtggaattcttggcgcgtatctactgcctggtgggacatcgaaatcgacaggattcaagacttggaagatccaaggtaatgccggaggatcttcgaacattgatcccgtccgaggtcccatgaatgaaggtggcatttatgctgagcgtctgggctggcacttgcctggcttcaacacctctgtattcggagactcgacgccctatcaggggctaaataaatccggtatacaattctacatcaccgacttcgagctcaacatcgacgacgaccttgacgtaccacttggcatcgaattttctgccgctgatgggacaaaagctcgagtgatgctttgggtcaacggctatcagtacggcaagtatgtcccacagctcggaccgcagacgaggttccctatcccaccgggtgtcattaacaataagggcaaaaatacgctggctattagtctctgggctcagactgatgggggtgcaaaactggacgaaatcacactttttacttatggtcagtatcagacgagctttgacttcaaccaggattggagtcaccttcagcctggatggagcagtcgagaacagtataagtag

SEQ ID NO: 30498 - protein, 997 aa, Muscodor strobelii
  misc_feature: SGI Peptide ID NO. 570491
  misc_feature (34)..(389): Pfam Id: PF01301 Pfam Desc: Glycosyl hydrolases family 35
  misc_feature (34)..(321): Pfam Id: PF01301 Pfam Desc: Glycosyl hydrolases family 35
  misc_feature (333)..(389): Pfam Id: PF01301 Pfam Desc: Glycosyl hydrolases family 35
  misc_feature (1)..(990): NCBI GI: 156043677 Blast Desc: SS1G_10842 [Sclerotinia sclerotiorum 1980] gi|154695229|gb|EDN94967.1| SS1G_10842 [Sclerotinia sclerotiorum 1980]
  misc_feature (16)..(996): NCBI GI: 145237754 Blast Desc: An07g04420 [Aspergillus niger] gi|134075998|emb|CAK48192.1| protein product [Aspergillus niger]
  misc_feature (1)..(996): NCBI GI: 255938750 Blast Desc: Pc14g01510 [Penicillium chrysogenum Wisconsin 54-1255] gi|211584766|emb|CAP74292.1| Pc14g01510 [Penicillium chrysogenum Wisconsin 54-1255]
  misc_feature (1)..(996): NCBI GI: 145236419 Blast Desc: An06g00290 [Aspergillus niger] gi|134075311|emb|CAK44945.1| protein product [Aspergillus niger]
  misc_feature (17)..(996): NCBI GI: 119467954 Blast Desc: beta-galactosidase, [Neosartorya fischeri NRRL 181] gi|119405935|gb|EAW15886.1| beta-galactosidase, [Neosartorya fischeri NRRL 181]
  misc_feature (17)..(996): NCBI GI: 70991419 Blast Desc: beta-galactosidase [Aspergillus fumigatus Af293] gi|66848191|gb|EAL88520.1| beta-galactosidase, [Aspergillus fumigatus Af293] gi|159124115|gb|EDP49233.1| beta-galactosidase,
  misc_feature (1)..(996): NCBI GI: 169769625 Blast Desc: [Aspergillus oryzae RIB40] gi|83767141|dbj|BAE57280.1| protein product [Aspergillus oryzae]
  misc_feature (1)..(996): NCBI GI: 238488060 Blast Desc: beta-galactosidase, [Aspergillus flavus NRRL3357] gi|220700147|gb|EED56486.1| beta-galactosidase, [Aspergillus flavus NRRL3357]
  misc_feature (15)..(996): NCBI GI: 121709930 Blast Desc: beta-galactosidase, [Aspergillus clavatus NRRL 1] gi|119400731|gb|EAW11155.1| beta-galactosidase, [Aspergillus clavatus NRRL 1]
  misc_feature (28)..(996): NCBI GI: 242808933 Blast Desc: beta-galactosidase, [Talaromyces stipitatus ATCC 10500] gi|218715889|gb|EED15311.1| beta-galactosidase, [Talaromyces stipitatus ATCC 10500]
  misc_feature (28)..(892): SWISSPROT Homolog: EC 3.2.1.23 Beta-galactosidase
MRLINLILPLLAFWDRVVCTSNNLTDDVTWDKYSLSVKGERTYIYSAEFHYQRIPVPELWPDILQKFKANGFNAISVYYFWSYHSAAPGVYDFETSGKNIQLLFDYAKEAGLWVITRPGPYCNAETNGGGLALWGSDGSLGALRTGDETYHQAWLPFVTKIGEIIARNQITEGGPVILNQIENEYQETNHSPEATQVIHMQQLEKAFRDAGVIVPFTSNEKGMRSQSWSVDYQDVGGSVDVYGLDSYPGGLSCTNPDTGFSVVRTYYQWFQNYSSSQPEYVPEFQGGYLLGWGESFYDDCESQHDPAFPDVYYKNNVSFAILFWEVDTDKSKIGQRMTLQSIYMTYGGTNWGHSAAPVVYTSYDYTAPLRETRQQWDKLFQTKLIGLFTRVSSGLYQTDMIGNGTGYKLSSTLGFSWVLKNPESGATFTVVQQDNTRSRNNVTFAVELDTSAGKISVPTVELGGRQSKILVTDYHLGNHTLLYASSDIAVHGSFDVDVAVFYLQEGQTGEFAFKENTGLTYKIFGSSTMSSTNITGHTTFRYKQAAGITAVQFSNGVLVYLLDQKTAWRLWAPTTTTNPAVALNQQIFVIGPYLVRDASIKGSQLIVNGDNDITTTIEAYIGTPIDTIVWNGNPLQATKTDYGSYTVEIPGAESRKISLPSLTQWRSADSLPEVEPEYDDSNWVVCNKTSTLSPIAPESLPVLFSSDYGFYAGTKIYRGYFDGNKPTSVYISASGGLGFGWNAWLNGQLIGGNTGNGTLTNTNATLRLPSSALSTASNVLTVVVDYHGHDETSTAKGVENPRGILGAYLLPGGTSKSTGFKTWKIQGNAGGSSNIDPVRGPMNEGGIYAERLGWHLPGFNTSVFGDSTPYQGLNKSGIQFYITDFELNIDDDLDVPLGIEFSAADGTKARVMLWVNGYQYGKYVPQLGPQTRFPIPPGVINNKGKNTLAISLWAQTDGGAKLDEITLFTYGQYQTSFDFNQDWSHLQPGWSSREQYK

SEQ ID NO: 30499 - DNA, 75 bp, Muscodor strobelii
  misc_feature: SGI EST ID NO. CUFF.72180.0
  misc_feature: Variant of the nucleotide sequence at SEQ ID NO 30497
gatcacaagacccgggccgtattgcaacgccgagacaaatggtggtggtctggctctatggggctcggacggtag

SEQ ID NO: 30500 - DNA, 819 bp, Muscodor strobelii
  misc_feature: SGI cDNA ID NO. 570492
  misc_feature: Encodes the peptide sequence at SEQ ID NO 30501
atgcctaccgaggatctccaatatcctactcggccctacagcaaggtcaaccgatatgatgttcgagctacatacgcccttgaaactatccatcagctcgtcaatacatgtcccattctccatgtctccttcacagtcccagacacaccatttccaatgatgttgccgatgatcggccaaatgggatcctttgagcgtccaagtgccgacacaggcgatgttctcgacctctacttacacggctacgtctcttcgcgaatcatcaacctctcccgcaagagtgacgggaacgagccatcaggtctacccattaccgtcggtgccagccacatcgacggattagtcctgtcgttgacgcccaactcgcacagctacaactacagatcagcagtactcttcggacacgcagagatagtcacggatatcgaggagaagcaatgggctatggaactcatcaccaacagcgtggtccgtaatcgataccgcaacacgcgcgtcccgcccaacggcgcagagatgcagagcacgagtgtgctgcgtgtcaagatcgcctctggtagcgcgaagatacggagtggcatgccgagtgatgataagagtgatatggaagatcaggagttgttagatagggtctggacgggtgttgtgcctgttcattatacgcttggtgaacctatgccgggaccgtataatagggttgagaaggtgccggagtatttggatgggtttgttaaggagatgaatgcggatgggaaggatattgcgcttgaggcggctacgaagaagatgccgcctaaggctaagaagggtgatgattga

SEQ ID NO: 30501 - protein, 272 aa, Muscodor strobelii
  misc_feature: SGI Peptide ID NO. 570492
  misc_feature (1)..(272): NCBI GI: 261359648 Blast Desc: conserved [Verticillium albo-atrum VaMs.102]
  misc_feature (5)..(259): NCBI GI: 256727832 Blast Desc: NECHADRAFT_83360 [Nectria haematococca mpVI 77-13-4]
  misc_feature (5)..(257): NCBI GI: 256727701 Blast Desc: NECHADRAFT_91296 [Nectria haematococca mpVI 77-13-4]
  misc_feature (1)..(272): NCBI GI: 171682034 Blast Desc: protein product [Podospora anserina] gi|170940976|emb|CAP66626.1| protein product [Podospora anserina]
  misc_feature (1)..(259): NCBI GI: 46130820 Blast Desc: FG08965.1 [Gibberella zeae PH-1]
  misc_feature (4)..(264): NCBI GI: 226292089 Blast Desc: conserved [Paracoccidioides brasiliensis Pb18]
  misc_feature (4)..(268): NCBI GI: 225557431 Blast Desc: conserved [Ajellomyces capsulatus G186AR]
  misc_feature (4)..(264): NCBI GI: 226282745 Blast Desc: conserved [Paracoccidioides brasiliensis Pb01]
  misc_feature (4)..(264): NCBI GI: 119193646 Blast Desc: CIMG_01200 [Coccidioides immitis RS] gi|240105624|gb|EER23817.1| CPC735_051870 [Coccidioides posadasii C735 delta SOWgp]
  misc_feature (4)..(264): NCBI GI: 154274742 Blast Desc: conserved [Ajellomyces capsulatus NAm1] gi|150414662|gb|EDN10024.1| conserved [Ajellomyces capsulatus NAm1]
MPTEDLQYPTRPYSKVNRYDVRATYALETIHQLVNTCPILHVSFTVPDTPFPMMLPMIGQMGSFERPSADTGDVLDLYLHGYVSSRIINLSRKSDGNEPSGLPITVGASHIDGLVLSLTPNSHSYNYRSAVLFGHAEIVTDIEEKQWAMELITNSVVRNRYRNTRVPPNGAEMQSTSVLRVKIASGSAKIRSGMPSDDKSDMEDQELLDRVWTGVVPVHYTLGEPMPGPYNRVEKVPEYLDGFVKEMNADGKDIALEAATKKMPPKAKKGDD

SEQ ID NO: 30502 - DNA, 1308 bp, Muscodor strobelii
  misc_feature: SGI EST ID NO. CUFF.72220.1
  misc_feature: Variant of the nucleotide sequence at SEQ ID NO 30500
gtggacatccttgggcctatgcggatatcactagacagcaatcgcatgctcggtgccgtctaggcgttgcttttgatgactgtgaaggagcatactactaccatggcaggtatcgaaatgatcatgataacggtgcttgatctggtatccagtctttcatccatcctgaagatcccatgaactcgtcttctgagttaggaaagagttgaacgaaccggtaaagggcattagactgactcattccctcctcaaattatataaaaaggcaatattcccttctccttcattagtacttgaagaatacatgatagccttgtcttatttcccttgtcatcatccgattatattccacataataatcatcaactgcagaccacaagatgcctaccgaggatctccaatatcctactcggccctacagcaaggtcaaccgatatgatgttcgagctacatacgcccttgaaactatccatcagctcgtcaatacatgtcccattctccatgtctccttcacagtcccagacacaccatttccaatgatgttgccgatgatcggccaaatgggatcctttgagcgtccaagtgccgacacaggcgatgttctcgacctctacttacacggctacgtctcttcgcgaatcatcaacctctcccgcaagagtgacgggaacgagccatcaggtctacccattaccgtcggtgccagccacatcgacggattagtcctgtcgttgacgcccaactcgcacagctacaactacagatcagcagtactcttcggacacgcagagatagtcacggatatcgaggagaagcaatgggctatggaactcatcaccaacagcgtggtccgtaatcgataccgcaacacgcgcgtcccgcccaacggcgcagagatgcagagcacgagtgtgctgcgtgtcaagatcgcctctggtagcgcgaagatacggagtggcatgccgagtgatgataagagtgatatggaagatcaggagttgttagatagggtctggacgggtgttgtgcctgttcattatacgcttggtgaacctatgccgggaccgtataatagggttgagaaggtgccggagtatttggatgggtttgttaaggagatgaatgcggatgggaaggatattgcgcttgaggcggctacgaagaagatgccgcctaaggctaagaagggtgatgattgatagttgtagtttttcgcggagtgtaatgtgattttgattatcgctgcgtggttctgggtagccgatggatgtgctcctttcagtgattgcaattgcaactgtcgaaaat

SEQ ID NO: 30503 - DNA, 933 bp, Muscodor strobelii
  misc_feature: SGI cDNA ID NO. 570493
  misc_feature: Encodes the peptide sequence at SEQ ID NO 30504
atgacagctaagaagcagcgtttggaggtcgaagcaattaggaaacttgtcgaagaacgtggaggagctgtgccaagtagtcgcttcgaacatcaagtcgagaacgcagattcaccagtccctgatgcatcacaagatgaagtacgtcgcgtctccatcagatctccggcaaatgaggacgggattgacttgccattatcaattgatgaagaacgggacatgcgacggtatgggacagttccgaaaggcatcatgaagcagggctcggacgcgactcagcttgatgaacaggcacaaggggagatggcaagccactcccgaacgcagatggcttcgaaagacagaatggtgcccgccaagcccaaaagaaagactgtcaagcggtcaaaatcaattcacttctcgcgtagtgcgtacaaccggccggttctgggtgccacttccaacgatgcctcgtctgcggatgagatctctcgatcgggcgggtcagggtcgccaatcagggagggaaaacgaaacagatctcagcacgaagaggatccaattgaaagtgttgacgaggagccgccaatgcgacgccgtcgtaagctgagccgcgcccttctcgacttagtgccggctactgcgcatccagaggtagatctctacgctgatgaggaagccccaatgccaagttcctccaaaggtaaaggcaacgcatctcccggcaaggcccagaataaattgacgacttatgcatcacggcctgaccgagcacagcctgatagggcaatcctggctatctcagcagggcggccatcctcatcgagcatttccaataatctacccgacggtccagatccagacgttcatgatggattcgcatccaggttctcatcaggattggacgtgagcgataacttcctttcgccgctgaacatggggattctttga

SEQ ID NO: 30504 - protein, 310 aa, Muscodor strobelii
  misc_feature: SGI Peptide ID NO. 570493
MTAKKQRLEVEAIRKLVEERGGAVPSSRFEHQVENADSPVPDASQDEVRRVSIRSPANEDGIDLPLSIDEERDMRRYGTVPKGIMKQGSDATQLDEQAQGEMASHSRTQMASKDRMVPAKPKRKTVKRSKSIHFSRSAYNRPVLGATSNDASSADEISRSGGSGSPIREGKRNRSQHEEDPIESVDEEPPMRRRRKLSRALLDLVPATAHPEVDLYADEEAPMPSSSKGKGNASPGKAQNKLTTYASRPDRAQPDRAILAISAGRPSSSSISNNLPDGPDPDVHDGFASRFSSGLDVSDNFLSPLNMGIL

SEQ ID NO: 30505 - DNA, 1806 bp, Muscodor strobelii
  misc_feature: SGI cDNA ID NO. 570494
  misc_feature: Encodes the peptide sequence at SEQ ID NO 30506
atgtggctcatccaaaccgacacgctcgaactgaaatatatcacaaacccctccacaacttcatatgctatattatcacacacatggggctcacaggaaatatcctttcaacacctctctgatctcgagactgcgcgggcattatccgggttcgcaaagatcgagaaaacatgcgagctagcaagaagccgtggattggagtacgcatgggtggacacgtgttgtattgacaagacgagcagcgcagagttatcggaggccatcaattcgatgtatacttggtatcaaaatgccaatatctgttttgtctacctttcggaccttgagcacgacaacgacgacccaaagtcagagagtttgcatggcagtttgaagaagtgtcgctggttcggcagaggatggacacttcaagagctcgtagccccagagactgtttcgttcttcgactcatcttggcatcatataggcgataaagcaacaaatcttcttgaaatgatatcttccatcactgggatcgacagcgatgtgctgaaaaacaaagcgagccctagttcaatgcccataggtatccgcatgagatgggctgcgaaaagggagacaacgagaccggaagacatcgcatattgtctgctaggtatattcaatatcaatatgccattgctgtacggagaacgagaaaaggctttccagaggttacaagaagaaatcagcaaacagattaacgatatgtcactcttcgcatgggttgctagaccagatgcagagacatcggtgcgtcacaggtctaggggcatatttgcccttcatccgtcagagttcgtcagtctcccagacgtatatattccacgcgacggcttatcgagagaattcacgataacaaatagaggagtcaaattcgacgacgtcgagctagttccagcgaatggggatatgcttatcttcccgctggacattgaggtgcgtcatgagacgtatagtttagggatatatatcgctcggaccttgaatggatatgtgcgctcagtgccgacactgctcgcgcgaatgaacatgcataaacaacatcatacaccaagtcactgtgtatatctcctaagacacatatgtcatacaaatcctcttatacaaactttcctcgagcgatctcaagacactcttgggtttgatatcagagtcgacgagagcatccagccaagaggaatacatgaggtcgagttagtcggtgccatacctcgtgatgcattcgattacggtatgaaagtcttccttacgggcagtcagagtttcatgggtttcctgcactgccgtgtgctcggcgaggatatagtgatcgccgctttgttgcattttctcggcaagactgcctggccgcaatacaaaatcgcagcaagaagctcatcagacagtcaatctacttatatattctcgcgattccaaagcgacctcgagagcctttggaaaagccaaggtgctcgacgcgaattatttgggttggttttacgacccaatgacctcgaactctggggagagacgatagttactcttggccgatttaaggcgaccttgagaagttccgtagctgatacggggtttgtactactcgttaaaataagccaaaacagcacgaaaatcggagtcaagtcaatcgatagctcaaaaagcctgcgaagggtcgagacgttaccagatgacagaatcagcaagaaggtgaagaagaggaagagtaggcaatcggtgcccacagataatcaagacattcttccatcatctaatcaagccactgctccaaaggacgaggaatcttag

SEQ ID NO: 30506 - protein, 601 aa, Muscodor strobelii
  misc_feature: SGI Peptide ID NO. 570494
  misc_feature (22)..(138): Pfam Id: PF06985 Pfam Desc: Heterokaryon incompatibility protein (HET)
  misc_feature (1)..(437): NCBI GI: 46126619 Blast Desc: FG07687.1 [Gibberella zeae PH-1]
  misc_feature (1)..(437): NCBI GI: 256720984 Blast Desc: NECHADRAFT_82249 [Nectria haematococca mpVI 77-13-4]
  misc_feature (1)..(273): NCBI GI: 256726184 Blast Desc: NECHADRAFT_94537 [Nectria haematococca mpVI 77-13-4]
  misc_feature (1)..(298): NCBI GI: 256722404 Blast Desc: NECHADRAFT_44368 [Nectria haematococca mpVI 77-13-4]
  misc_feature (1)..(298): NCBI GI: 145605569 Blast Desc: MGG_09177 [Magnaporthe grisea 70-15] gi|145013388|gb|EDJ98029.1| MGG_09177 [Magnaporthe grisea 70-15]
  misc_feature (1)..(248): NCBI GI: 256720642 Blast Desc: NECHADRAFT_28132 [Nectria haematococca mpVI 77-13-4]
  misc_feature (9)..(297): NCBI GI: 256734168 Blast Desc: NECHADRAFT_78015 [Nectria haematococca mpVI 77-13-4]
  misc_feature (1)..(299): NCBI GI: 171680496 Blast Desc: protein product [Podospora anserina] gi|170939875|emb|CAP65101.1| protein product [Podospora anserina]
  misc_feature (1)..(273): NCBI GI: 256722053 Blast Desc: NECHADRAFT_16940 [Nectria haematococca mpVI 77-13-4]
  misc_feature (1)..(297): NCBI GI: 85092369 Blast Desc: NCU04912 [Neurospora crassa OR74A] gi|28920765|gb|EAA30124.1| [Neurospora crassa OR74A]
MWLIQTDTLELKYITNPSTTSYAILSHTWGSQEISFQHLSDLETARALSGFAKIEKTCELARSRGLEYAWVDTCCIDKTSSAELSEAINSMYTWYQNANICFVYLSDLEHDNDDPKSESLHGSLKKCRWFGRGWTLQELVAPETVSFFDSSWHHIGDKATNLLEMISSITGIDSDVLKNKASPSSMPIGIRMRWAAKRETTRPEDIAYCLLGIFNINMPLLYGEREKAFQRLQEEISKQINDMSLFAWVARPDAETSVRHRSRGIFALHPSEFVSLPDVYIPRDGLSREFTITNRGVKFDDVELVPANGDMLIFPLDIEVRHETYSLGIYIARTLNGYVRSVPTLLARMNMHKQHHTPSHCVYLLRHICHTNPLIQTFLERSQDTLGFDIRVDESIQPRGIHEVELVGAIPRDAFDYGMKVFLTGSQSFMGFLHCRVLGEDIVIAALLHFLGKTAWPQYKIAARSSSDSQSTYIFSRFQSDLESLWKSQGARRELFGLVLRPNDLELWGETIVTLGRFKATLRSSVADTGFVLLVKISQNSTKIGVKSIDSSKSLRRVETLPDDRISKKVKKRKSRQSVPTDNQDILPSSNQATAPKDEES

SEQ ID NO: 30507 - DNA, 615 bp, Muscodor strobelii
  misc_feature: SGI EST ID NO. CUFF.72204.0
  misc_feature: Variant of the nucleotide sequence at SEQ ID NO 30505
gggcatgcagtatgttacgaagccatctcatatagcaatcgggactcaagacatccagttatcattgtgactaggtaattaccgcctcaacggtgtaccctacaacttcagcagcggttttacacgttaaagcttccaacgcaatcatgtggctcatccaaaccgacacgctcgaactgaaatatatcacaaacccctccacaacttcatatgctatattatcacacacatggggctcacaggaaatatcctttcaacacctctctgatctcgagactgcgcgggcattatccgggttcgcaaagatcgagaaaacatgcgagctagcaagaagccgtggattggagtacgcatgggtggacacgtgttgtattgacaagacgagcagcgcagagttatcggaggccatcaattcgatgtatacttggtatcaaaatgccaatatctgttttgtctacctttcggaccttgagcacgacaacgacgacccaaagtcagagagtttgcatggcagtttgaagaagtgtcgctggttcggcagaggatggacacttcaagagctcgtagccccagagactgtttcgttcttcgactcatcttggcatcatataggcg

SEQ ID NO: 30508 - DNA, 450 bp, Muscodor strobelii
  misc_feature: SGI cDNA ID NO. 570495
  misc_feature: Elevated expression when VOC is produced
  misc_feature: Encodes the peptide sequence at SEQ ID NO 30509
atggctcccactccaacagattccttcccactggcgaccgggtcgcccgactcaggcggcgcgatcaacgatgacgcaggagcctctggctcaagtcccggggcctaccagctctctcaaagtgctttgattgctattattgttgttgtcgccggtgtcgctgtcttagggatctcgaccgcaatcttattctacctagcaaagaagagggagtggaaggttcgagagacaatcagacgatctgctcggagagttgcgacggcgttgacgccccgccgctcggaattcccgaagtctgtcaaggaatccggacgatcatctaaaggtcgcgttcgtctagacgatgtgccaccaacacctagacttcggccggaagacgtcgaaaagggtcttgccaaacaaacgaccaagcaaaagcaggggcggagcatgaagtggacgaggaaatag

SEQ ID NO: 30509 - protein, 149 aa, Muscodor strobelii
  misc_feature: SGI Peptide ID NO. 570495
  misc_feature (1)..(149): NCBI GI: 261359432 Blast Desc: conserved [Verticillium albo-atrum VaMs.102]
  misc_feature (31)..(138): NCBI GI: 145608624 Blast Desc: MGG_12820 [Magnaporthe grisea 70-15] gi|145016071|gb|EDK00561.1| MGG_12820 [Magnaporthe grisea 70-15]
  misc_feature (1)..(145): NCBI GI: 171682454 Blast Desc: protein product [Podospora anserina] gi|170941186|emb|CAP66836.1| protein product [Podospora anserina]
  misc_feature (7)..(149): NCBI GI: 85085906 Blast Desc: NCU03960 [Neurospora crassa OR74A] gi|28918692|gb|EAA28363.1| [Neurospora crassa OR74A] gi|40882325|emb|CAF06147.1| [Neurospora crassa]
  misc_feature (6)..(149): NCBI GI: 46128125 Blast Desc: FG08440.1 [Gibberella zeae PH-1]
  misc_feature (4)..(149): NCBI GI: 256733561 Blast Desc: NECHADRAFT_36669 [Nectria haematococca mpVI 77-13-4]
  misc_feature (6)..(138): NCBI GI: 116202609 Blast Desc: CHGG_09189 [Chaetomium globosum CBS 148.51] gi|88177707|gb|EAQ85175.1| CHGG_09189 [Chaetomium globosum CBS 148.51]
  misc_feature (31)..(149): NCBI GI: 154315539 Blast Desc: BC1G_04342 [Botryotinia fuckeliana B05.10] gi|150847282|gb|EDN22475.1| BC1G_04342 [Botryotinia fuckeliana B05.10]
  misc_feature (16)..(142): NCBI GI: 261205486 Blast Desc: [Ajellomyces dermatitidis SLH14081] gi|239592539|gb|EEQ75120.1| [Ajellomyces dermatitidis SLH14081] gi|239611308|gb|EEQ88295.1| [Ajellomyces dermatitidis ER-3]
  misc_feature (8)..(131): NCBI GI: 119470481 Blast Desc: NFIA_054950 [Neosartorya fischeri NRRL 181] gi|119406196|gb|EAW16147.1| conserved [Neosartorya fischeri NRRL 181]
  misc_feature: Useful for introducing or modulating the production of volatile compounds
MAPTPTDSFPLATGSPDSGGAINDDAGASGSSPGAYQLSQSALIAIIVVVAGVAVLGISTAILFYLAKKREWKVRETIRRSARRVATALTPRRSEFPKSVKESGRSSKGRVRLDDVPPTPRLRPEDVEKGLAKQTTKQKQGRSMKWTRK

SEQ ID NO: 30510 - DNA, 3903 bp, Muscodor strobelii
  misc_feature: SGI EST ID NO. CUFF.72373.1
  misc_feature: Variant of the nucleotide sequence at SEQ ID NO 30508
tcaagccactgctccaaaggacgaggaatcttagtacgcgtattagcccggagtcggtaccgtcaccagcaactcaaattgaagatgtcagtccatcatccgaagcaatatgggccacccacaatgaggcacgaatcccacaagaagatacggaaaaggcacatacagacataaagacacatcaatcttgcaacacaaccggttatacaatcaccaaagaagtctcaaagaagaagaaccaatccatgatgaatactcaggcgtatgttctgaagcagactagatgcgtcggactaccaagacgacaatcaagcggaggcatacgaggcgatgagaaggtagagtaagagaatcaagtagcagagcaaaaacacgccctgaagaatcgccgcctggccgtagctccttcgactcgtctgacaacggcaataaggagaaacaaccattgtctcttatggatgtcccctttgagagtcccaacctacctcgcgttctcaatccatttcaaccccaaagatctatctacagcgacctcggaacacaccacctccgtggccgaggcccgcacgtttcggcagcccaagatagcccaaaatagcccataccagaatattacgcagacacgttccaatgaaccgataaagataccagacagaggccaatcagccaatgcttgaaaactcgcataatgactctctgcgacgacagtttgggtctcaattcgggtctcgacatcttcagctgacaccagcatgagagtatcgtatcctcatcgcatcctcagtaaaaagtcgaaccgcttaattgagacaacaccaagagcgcaacgacctacaacgctgcaaattcgcaatgcggtctagattctgatcaccgcaagcaaaaccgaggacgataggttctttctttctttctttccaactaccgattaatcacccacgtttaccaattcccacagtgataaaaaaccacaccattccccatcacactttcaacctattggtttctaccaaacaaagtggatgcataacgccccagtgatacctcgcgacaaatgtgacaatcgtgacgcacattctcggcactctcatctcgtacatgtctggcttcgcgccaagtccctccacccccaacccacccccagtcccctccctctaattggccacaccacccaggaacaagccatggaagcgcctctattaagcgcctagcaacccacaaccaccaataaagcgacacgacgatagaaatagaatacatcttattacttagtttcagactgccgtccctgcatacctattcagtacctggcgattggggggtcgtaaccccatagtattggggccgtcgacaactagcacttgcatgaagcacttgatatcaactgcatcgttcccgactttttcttcgccatgcacaactcatcacattttcaccagatggcttgtttgggcgcttgagattgataatcgtcttaaggtgtagccggcgctcgtagatcggtcgcacggactccttttctccttcttttactatctatcaaactccgaacctaagcaatactatctcgcgacgtgtttgtgcgaattcttagtgtcacaaacaactccactagacaaccttacgccggctcgtaagacctatctataatggctcccactccaacagattccttcccactggcgaccgggtcgcccgactcaggcggcgcgatcaacgatgacgcaggagcctctggctcaagtcccggggcctaccagctctctcaaagtgctttgattgctattattgttgttgtcgccggtgtcgctgtcttagggatctcgaccgcaatcttattctacctagcaaagaagagggagtggaaggttcgagagacaatcagacgatctgctcggagagttgcgacggcgttgacgccccgccgctcggaattcccgaagtctgtcaaggaatccggacgatcatctaaaggtcgcgttcgtctagacgatgtgccaccaacacctagacttcggccggaagacgtcgaaaagggtcttgccaaacaaacgaccaagcaaaagcaggggcggagcatgaagtggacgaggaaatagcgttggctgagactcattctccggatcctgtgtgaggaggccgttggttatggaagatctcgtacttgtacagattgagacacgtcgctaaattgatcggttacaggcgatctagaaagggtgtccggcgctcgaccttgtatgataattggtgtacatcctgcggataaatgataatgagaatcaaagacctcttagaacgttagagctagcgctccgccttgcgtcttttcgtttcggtttgggtgcggattctacggactcctccatttgtgacttgttcttcctggattctggtacgaatgtcacttctttctccccagcaatgtcgccacctctgggcttcgtcgtacgagtttgtctgtgcgtccttgagccaaatgcggtatctcgttctgacatccgtcctttctggctggatgaactgatctgcatcttcacagaatctcctgtcttcttaggagggctgtctgattcgttgtcatcgctatcatcgctactactactgctgttaacgctttcatctgaagcatatcgagtagcagaagcagcagtggctttgccggactcgggatcaactctggtgctcggattgagtgacctgaattcgaaactattctcgtcaatctggaattccgcattctcgaacatccgactgaaacggtcgtcaccaagaatgcctgcttttgtatcgacctcggctcgcctctgttgtcgttgaagtagtttgtcgacgaggttttgattaaccttgaccttcttattgccacgtatacgactagcgcgttctttctcaaccttctccttgacacgcttagctcgttcctcatcgaaagcatatgggttggcaatgagtcgggcttgttcataaagtttcgaggcaacgaaatacccgtgcatgtagggtcgcagcaggttggtcttgccgatcagatgatccatgctcagagatctcagctcggcaagggtcaagaacttgtagttgtcatagttagtagttgtaacttcacttgccatctcctccgttaatgagtcaagatgtgatgcccagcgtggtgcattgccaagttgagggatcaagaaagcatgctgggcagatccttcattcgcggttagaatcataccagtgcccttgacccaagttgtaaagttgatgtccactgtcggctcgatagatgtccacgtttcgccggtagactcgtcgaatattttgattaattgcttatcactagacataatctttcgctcggatgaagatgtagtcatgtgcgttaggttcttgatcgggaagccggagccgtgatccttttgaagtagaggcctaggacttctcatgtcgaataatttgacaacgcctgtggaacttccagtgcatagtgtaagaccggaatcgctaaaatcaagagcagtgatttcaccctcctgacccccgagtatagcaatacgagagcgtgagcgagagtcccagaactccactgagcctactgatgtgccgaatgcgaggaggttatgtgtagtctcaccgatggcggccacattaacagcgggagcatagactatgacagtcgttaacagtgtctggaatgcgcagtcatcgcgacggttcgatagcccggccatagagtagttgatcagatgttgacttactgctgccctgaaggccgatctcatcaccactatcggcaccaacgtcgattttgtatggctgcaagaaacgtccagattcaagattgactcgaaatacttctcctgagccttcggaccctaatcctacagcaggaatcaatgcctcagtggctaaacg

SEQ ID NO: 30511 - DNA, 1962 bp, Muscodor strobelii
  misc_feature: SGI cDNA ID NO. 570496
  misc_feature: Reduced expression when VOC is produced
  misc_feature: Encodes the peptide sequence at SEQ ID NO 30512
atgcaggttcagcagggcgacgtgccggtgtacaccgtcgccggagcagagaccgcgcgaccccttcctgaatggcttgccaggaggcggaagcgtagcctgaaagctgacgcggaatatcaaaatcgtatagaagtattacaagacttctcttttgaggaagcaagttcgtgtgtcaggatttccgaggacaatgactggatcatgtccactgggacttataagccccaaatccacgtgcactacttaccacacttatcgctatcatatgcgagacatacctcgagtttgaatatcacattcacgctcttagggcgagatgcgtcgaaatctcttcacttgcagagcgaccgtaggatcgaattccacacacctgctgggcttctagagactatgagacttccgagatacggaagggatcttgtttatgaccgtttagccactgaggcattgattcctgctgtaggattagggtccgaaggctcaggagaagtatttcgagtcaatcttgaatctggacgtttcttgcagccatacaaaatcgacgttggtgccgatagtggtgatgagatcggccttcagggcagcatctatgctcccgctgttaatgtggccgccatcggtgagactacacataacctcctcgcattcggcacatcagtaggctcagtggagttctgggactctcgctcacgctctcgtattgctatactcgggggtcaggagggtgaaatcactgctcttgattttagcgattccggtcttacactatgcactggaagttccacaggcgttgtcaaattattcgacatgagaagtcctaggcctctacttcaaaaggatcacggctccggcttcccgatcaagaacctaacgcacatgactacatcttcatccgagcgaaagattatgtctagtgataagcaattaatcaaaatattcgacgagtctaccggcgaaacgtggacatctatcgagccgacagtggacatcaactttacaacttgggtcaagggcactggtatgattctaaccgcgaatgaaggatctgcccagcatgctttcttgatccctcaacttggcaatgcaccacgctgggcatcacatcttgactcattaacggaggagatggcaagtgaagttacaactactaactatgacaactacaagttcttgacccttgccgagctgagatctctgagcatggatcatctgatcggcaagaccaacctgctgcgaccctacatgcacgggtatttcgttgcctcgaaactttatgaacaagcccgactcattgccaacccatatgctttcgatgaggaacgagctaagcgtgtcaaggagaaggttgagaaagaacgcgctagtcgtatacgtggcaataagaaggtcaaggttaatcaaaacctcgtcgacaaactacttcaacgacaacagaggcgagccgaggtcgatacaaaagcaggcattcttggtgacgaccgtttcagtcggatgttcgagaatgcggaattccagattgacgagaatagtttcgaattcaggtcactcaatccgagcaccagagttgatcccgagtccggcaaagccactgctgcttctgctactcgatatgcttcagatgaaagcgttaacagcagtagtagtagcgatgatagcgatgacaacgaatcagacagccctcctaagaagacaggagattctgtgaagatgcagatcagttcatccagccagaaaggacggatgtcagaacgagataccgcatttggctcaaggacgcacagacaaactcgtacgacgaagcccagaggtggcgacattgctggggagaaagaagtgacattcgtaccagaatccaggaagaacaagtcacaaatggaggagtccgtagaatccgcacccaaaccgaaacgaaaagacgcaaggcggagcgctagctctaacgttctaagaggtctttga

SEQ ID NO: 30512 - protein, 653 aa, Muscodor strobelii
  misc_feature: SGI Peptide ID NO. 570496
  misc_feature (232)..(270): Pfam Id: PF00400 Pfam Desc: WD domain, G-beta repeat
  misc_feature (493)..(522): Pfam Id: PF08159 Pfam Desc: NUC153 domain
  misc_feature (6)..(651): NCBI GI: 46128123 Blast Desc: FG08439.1 [Gibberella zeae PH-1]
  misc_feature (1)..(653): NCBI GI: 39977195 Blast Desc: MGG_06500 [Magnaporthe grisea 70-15] gi|145016072|gb|EDK00562.1| MGG_06500 [Magnaporthe grisea 70-15]
  misc_feature (7)..(653): NCBI GI: 154315537 Blast Desc: BC1G_04341 [Botryotinia fuckeliana B05.10] gi|150847281|gb|EDN22474.1| BC1G_04341 [Botryotinia fuckeliana B05.10]
  misc_feature (7)..(653): NCBI GI: 156060193 Blast Desc: SS1G_02235 [Sclerotinia sclerotiorum 1980] gi|154699643|gb|EDN99381.1| SS1G_02235 [Sclerotinia sclerotiorum 1980]
  misc_feature (6)..(653): NCBI GI: 261359433 Blast Desc: WD repeat-containing protein [Verticillium albo-atrum VaMs.102]
  misc_feature (6)..(653): NCBI GI: 116202611 Blast Desc: CHGG_09190 [Chaetomium globosum CBS 148.51] gi|88177708|gb|EAQ85176.1| CHGG_09190 [Chaetomium globosum CBS 148.51]
  misc_feature (6)..(653): NCBI GI: 85085910 Blast Desc: NCU03961 [Neurospora crassa OR74A] gi|28918693|gb|EAA28364.1| conserved [Neurospora crassa OR74A] gi|40882324|emb|CAF06146.1| conserved [Neurospora crassa]
  misc_feature (5)..(651): NCBI GI: 212529142 Blast Desc: WD repeat protein [Penicillium marneffei ATCC 18224] gi|210074126|gb|EEA28213.1| WD repeat protein [Penicillium marneffei ATCC 18224]
  misc_feature (8)..(653): NCBI GI: 119193686 Blast Desc: CIMG_01220 [Coccidioides immitis RS]
  misc_feature (5)..(651): NCBI GI: 242764361 Blast Desc: WD repeat protein [Talaromyces stipitatus ATCC 10500] gi|218723951|gb|EED23368.1| WD repeat protein [Talaromyces stipitatus ATCC 10500]
  misc_feature: Useful for introducing or modulating the production of volatile compounds
MQVQQGDVPVYTVAGAETARPLPEWLARRRKRSLKADAEYQNRIEVLQDFSFEEASSCVRISEDNDWIMSTGTYKPQIHVHYLPHLSLSYARHTSSLNITFTLLGRDASKSLHLQSDRRIEFHTPAGLLETMRLPRYGRDLVYDRLATEALIPAVGLGSEGSGEVFRVNLESGRFLQPYKIDVGADSGDEIGLQGSIYAPAVNVAAIGETTHNLLAFGTSVGSVEFWDSRSRSRIAILGGQEGEITALDFSDSGLTLCTGSSTGVVKLFDMRSPRPLLQKDHGSGFPIKNLTHMTTSSSERKIMSSDKQLIKIFDESTGETWTSIEPTVDINFTTWVKGTGMILTANEGSAQHAFLIPQLGNAPRWASHLDSLTEEMASEVTTTNYDNYKFLTLAELRSLSMDHLIGKTNLLRPYMHGYFVASKLYEQARLIANPYAFDEERAKRVKEKVEKERASRIRGNKKVKVNQNLVDKLLQRQQRRAEVDTKAGILGDDRFSRMFENAEFQIDENSFEFRSLNPSTRVDPESGKATAASATRYASDESVNSSSSSDDSDDNESDSPPKKTGDSVKMQISSSSQKGRMSERDTAFGSRTHRQTRTTKPRGGDIAGEKEVTFVPESRKNKSQMEESVESAPKPKRKDARRSASSNVLRGL

SEQ ID NO: 30513 - DNA, 4356 bp, Muscodor strobelii
  misc_feature: SGI EST ID NO. CUFF.72374.2
  misc_feature: Variant of the nucleotide sequence at SEQ ID NO 30511
ccttgttccctggagcatattggatttgtcagacagcgaatctgcttttagtccaaaatgcaggttcagcagggcgacgtgccggtgtacaccgtcgccggagcagagaccgcgcgaccccttcctgaatggcttgccaggaggcggaagcgtagcctgaaagctgacgcggaatatcaaaatcgtatagaagtattacaagacttctcttttgaggaagcaagttcgtgtgtcaggatttccgaggacaatgactggatcatgtccactgggacttataagccccaaatccacgtgcactacttaccacacttatcgctatcatatgcgagacatacctcgagtttgaatatcacattcacgctcttagggcgagatgcgtcgaaatctcttcacttgcagagcgaccgtaggatcgaattccacacacctgctgggcttctagagactatgagacttccgagatacggaagggatcttgtttatgaccgtttagccactgaggcattgattcctgctgtaggattagggtccgaaggctcaggagaagtatttcgagtcaatcttgaatctggacgtttcttgcagccatacaaaatcgacgttggtgccgatagtggtgatgagatcggccttcagggcagcatctatgctcccgctgttaatgtggccgccatcggtgagactacacataacctcctcgcattcggcacatcagtaggctcagtggagttctgggactctcgctcacgctctcgtattgctatactcgggggtcaggagggtgaaatcactgctcttgattttagcgattccggtcttacactatgcactggaagttccacaggcgttgtcaaattattcgacatgagaagtcctaggcctctacttcaaaaggatcacggctccggcttcccgatcaagaacctaacgcacatgactacatcttcatccgagcgaaagattatgtctagtgataagcaattaatcaaaatattcgacgagtctaccggcgaaacgtggacatctatcgagccgacagtggacatcaactttacaacttgggtcaagggcactggtatgattctaaccgcgaatgaaggatctgcccagcatgctttcttgatccctcaacttggcaatgcaccacgctgggcatcacatcttgactcattaacggaggagatggcaagtgaagttacaactactaactatgacaactacaagttcttgacccttgccgagctgagatctctgagcatggatcatctgatcggcaagaccaacctgctgcgaccctacatgcacgggtatttcgttgcctcgaaactttatgaacaagcccgactcattgccaacccatatgctttcgatgaggaacgagctaagcgtgtcaaggagaaggttgagaaagaacgcgctagtcgtatacgtggcaataagaaggtcaaggttaatcaaaacctcgtcgacaaactacttcaacgacaacagaggcgagccgaggtcgatacaaaagcaggcattcttggtgacgaccgtttcagtcggatgttcgagaatgcggaattccagattgacgagaatagtttcgaattcaggtcactcaatccgagcaccagagttgatcccgagtccggcaaagccactgctgcttctgctactcgatatgcttcagatgaaagcgttaacagcagtagtagtagcgatgatagcgatgacaacgaatcagacagccctcctaagaagacaggagattctgtgaagatgcagatcagttcatccagccagaaaggacggatgtcagaacgagataccgcatttggctcaaggacgcacagacaaactcgtacgacgaagcccagaggtggcgacattgctggggagaaagaagtgacattcgtaccagaatccaggaagaacaagtcacaaatggaggagtccgtagaatccgcacccaaaccgaaacgaaaagacgcaaggcggagcgctagctctaacgttctaagaggtctttgattctcattatcatttatccgcaggatgtacaccaattatcatacaaggtcgagcgccggacaccctttctagatcgcctgtaaccgatcaatttagcgacgtgtctcaatctgtacaagtacgagatcttccataaccaacggcctcctcacacaggatccggagaatgagtctcagccaacgctatttcctcgtccacttcatgctccgcccctgcttttgcttggtcgtttgtttggcaagacccttttcgacgtcttccggccgaagtctaggtgttggtggcacatcgtctagacgaacgcgacctttagatgatcgtccggattccttgacagacttcgggaattccgagcggcggggcgtcaacgccgtcgcaactctccgagcagatcgtctgattgtctctcgaaccttccactccctcttctttgctaggtagaataagattgcggtcgagactagatgatattagcatccgaatcttgaggatgtggtttctcggaagaaagttactccctaagacagcgacaccggcgacaacaacaataatagcaatcaaagcactttgagagagctggtaggccccgggacttgagccagaggctcctgcgtcatcgttgatcgcgccgcctgagtcgggcgacccggtcgccagtgggaaggaatctgttggagtgggagccattatagataggtcttacgagccggcgtaaggttgtctagtggagttgtttgtgacactaagaattcgcacaaacacgtcgcgagatagtattgcttaggttcggagtttgatagatagtaaaagaaggagaaaaggagtccgtgcgaccgatctacgagcgccggctacaccttaagacgattatcaatctcaagcgcccaaacaagccatctggtgaaaatgtgatgagttgtgcatggcgaagaaaaagtcgggaacgatgcagttgatatcaagtgcttcatgcaagtgctagttgtcgacggccccaatactatggggttacgaccccccaatcgccaggtactgaataggtatgcagggacggcagtctgaaactaagtaataagatgtattctatttctatcgtcgtgtcgctttattggtggttgtgggttgctaggcgcttaatagaggcgcttccatggcttgttcctgggtggtgtggccaattagagggaggggactgggggtgggttgggggtggagggacttggcgcgaagccagacatgtacgagatgagagtgccgagaatgtgcgtcacgattgtcacatttgtcgcgaggtatcactggggcgttatgcatccactttgtttggtagaaaccaataggttgaaagtgtgatggggaatggtgtggttttttatcactgtgggaattggtaaacgtgggtgattaatcggtagttggaaagaaagaaagaaagaacctatcgtcctcggttttgcttgcggtgatcagaatctagaccgcattgcgaatttgcagcgttgtaggtcgttgcgctcttggtgttgtctcaattaagcggttcgactttttactgaggatgcgatgaggatacgatactctcatgctggtgtcagctgaagatgtcgagacccgaattgagacccaaactgtcgtcgcagagagtcattatgcgagttttcaagcattggctgattggcctctgtctggtatctttatcggttcattggaacgtgtctgcgtaatattctggtatgggctattttgggctatcttgggctgccgaaacgtgcgggcctcggccacggaggtggtgtgttccgaggtcgctgtagatagatctttggggttgaaatggattgagaacgcgaggtaggttgggactctcaaaggggacatccataagagacaatggttgtttctccttattgccgttgtcagacgagtcgaaggagctacggccaggcggcgattcttcagggcgtgtttttgctctgctacttgattctcttactctaccttctcatcgcctcgtatgcctccgcttgattgtcgtcttggtagtccgacgcatctagtctgcttcagaacatacgcctgagtattcatcatggattggttcttcttctttgagacttctttggtgattgtataaccggttgtgttgcaagattgatgtgtctttatgtctgtatgtgccttttccgtatcttcttgtgggattcgtgcctcattgtgggtggcccatattgcttcggatgatggactgacatcttcaatttgagttgctggtgacggtaccgactccgggctaatacgcgtactaagattcctcgtcctttggagcagtggcttga

SEQ ID NO: 30514 - DNA, 4521 bp, Muscodor strobelii
  misc_feature: SGI cDNA ID NO. 570497
  misc_feature: Reduced expression when VOC is produced
  misc_feature: Encodes the peptide sequence at SEQ ID NO 30515
atggacactggcgactacgacactaatgccttagtatttaataacatctcctccgtcagcttcgccttctacgagcccgccccctcgtcggccgccctgttcgcctcggccgccagcgacgtcgaagccgccctccgcaaagatggccaccttgtctgcctcgacgccaacaggcgtggcttctggttcttcagcctcgtcgccaaggggcagccctctgccgagcccagtcctgctgcacccaagttcgagagaagtgtcgagtgcgccgggtgcacgttgtgcgtcgccgacgagggatccttcgagccagccgcactggtgaaactgcgcttccacggccccaatgcggtcaacacgcccagcagctcttcctcgagcgcctcctccgctctcgaccccgtctttcgcagcgcccactccgccactgccccctcggtgccgacgccgacggccgagcacgacaccaaaactctcggccttccagacgcaaagccgagctcgatcgcatctaccaaggtcgtctacgagtactttctctccgccgcatactccactgtctcgtcctgcttcagctcccgcaccggtgctattcccctgagctcccggacattgctgctgcccaagccgactcagcgtcactgtgcggcctggccgcccgtgcttgcaaccattcgaatctaccttactaccactggtagtctcgtactcagcctgacccactcccttgcgctgaatctcatcacattgtccgagagcgtcgcgagccaactacctcccttcggattcaccgttcttgcggcccccttgggcttgtttgcgacatgtcaatcatttgctctgaccgacacgaccactacggatggcagccttggccagtctccagacacgcaggtgatgaggctcaggtcggaaagaggcgatgccccctggaagaatatctgctcgaaactattgcagtcccggatgatatcgttgcctagtatgaagaggactcaaaaatgggtcggccttcagcgcatacgccgaagattggcggagcagggccctgacgggaagcggacacccatgatgggcttctccccaaacattttctggccgacgagcctgttattctgtagagctttgtcaaatctgagcatcagcgacgactctgacgacttccatcggcctcggcacgcccagagtttcgatcctctgagcaatgcaaaagactggtttttgagagcggcggatcggaagaaggcgatggaacagaagaagagcgagagagatgctgctgccagccaggaatctatgcttgctgagggacacactcaatcttctcagaatctgtctcccctcgtcttacaccgcccagggcaagcagccgcttcggggagcgccatatatccaacaccgccggatggtgttcagaataatgtcgggattacaccttcgatggacggcaacctatctagtcctggaatgatcccgaatgccccggaagggacagatacgatgcatttacaagcttcgacagaagcttatgctgagaattgggagaacagagaaaccaagcggtcctcgtttgacacggagaatttattcggcgagctgggtccagatatgttcggggacaacgacatcacggaagcggatttcagttttttcgatgaacaaccaggaggagtcggcctcggcgctcttgatctgcctatcgtctcagacatggatcgaagcgcaaccgtccggagcactttgggcgctgtgcaagttccgcagatcaaaaaagcagagccatcggctgtcccagcacccagttctgcccctcctctaacgtttgcaaagcccgagctacgccatgctcgtagttcattgttggacgaggctcggcgtcagctgccaccggattcaagccagcacgggagtagcaatattaatactaagagggcagcaagcccttttaacccagatacggtatacaagaggattcgggcttcgctcgacaaccacaaggctgtccagcaaaactcgcaggtctatgccaaccaccatgggagcatcttcgacaaagtagacttcgggccaggcttgtctatggttaacaggaaatacgaaggcagtggacggtttgacttctctgcggaccagtctaaaggtgtcagatcttccaatctcgatacgcccccaacgacagattatctccgacgccatggaaaagggcgcaagcagccgaaagagttgccttccacatatggcgagctctttttccgtttgtatagtagtcagaattccggctcaaatcgcccgagtcctcaaaacaacgaaggcgcccattccgacgctgatgaactcagccttatatctgatcaagacgattcgagctgtgatagcgatgagcctctgtccccagtcaaatctttaagtgtaagacgaagacgtgcagatgacgatggcgactccctagcaacatcgttcagagacttagagtcaatggatgcatcatcaccatttctccctcttgagttttcgaggagcttcaagtcggaggttgacttgccgctcgcaaaatactttgcggatcccgaaccaccctggattcagtactccctaccagatgaccaattcatcatggcagcccaactgttgacggatcaagtcacggctagtacgcttcccctaagtgtcctcaatcaatcatctctctactcgggtctggatcgacgcaggcatctctcgaacacagcacgcaactccatacgggaactgcaacaaggactaccgtcttgcttccagctctcggctggctgtctgttccgttctctagtcgacatccaagatgttcctctcttgggccagcccaatcgctttcagccgagagttccaggttctgatcagatgagacctagcaacttgttccatatccctccccctcgattcgagatgcgtcgatacgagaacaagctatctgttctcccgtctgcggtgtctttttgggagagtctaggtctcagtcccacacacggtcccaaggatgtcaatgtcctctgccttttccccgactatgacggcttatcagacaacatattggtatttacagacaagatacgcagtgcttacgaatctctcaaattaggttcgttcaatcgcttttcctcgccgccagcatcagaagacggcctctttgcttttgaagtggagcgagatctcgtctcatttggtaaatcgacatcttttctcgggtcttcccttcgcgactgtgcatctaaagtttgcaaagcattgtctaccacttcagtcgaacaaaccactttcgtattgttctttgtttactcgcctgatgtgccaggctcaatagttgaatgttgcgctgcattcaatgagattttcgaagggtataggaaaatgctcgcgagcaaaaggcttccggtcatcaacgagatcgctctgcaactgattccgcagaatctactagcctccacgacgtcggttcccatgcccacccccgccgatttgtccagattggcacttgaaatatatgaccgatgctctactttcggtggtccatcgccatcgccggcagtcattctggaacagccgccgcctcggatcatagacttcaagctgattgcaaacccctccgcgtcggtcttgcacgagaacatgtgccttcatgtggcttacgcgcagagcgtagacgagagatggattacagcggcctggactgacaacaggggtagccagcagctgacgtcgtcgtactgcttgggaagaaaagggaagccgttagcgacatcgatggccgaggtcatccatgagatatgggctactaccgttgagctcatatcttcatggaaagtccactggcgtattatcgtcgccaaatgcggtgcgatggacgcccacgagacagaaacatggtcaagtgtggttacaccagatacgaaaacgtcgctcactttaaccctggtgacggttgacaccgatccctccctccaactattacctcctgcagccaaggttcctaataccgcgacatccgtcttctatacaactccggtctctacgccacaaggagctgtcgtttctcccgaacagagcggaaacgcggctacctccatacgagagaacactgcggcaagcgcagcgactccaggcgatagcagtagcacgatggatccagagtccgatgtcaccctaaccgacgtagcagaccagacatggggcgcagttctttcccacagattacatagctcgacctcgcccaccgatgccagcccagctcttgctagcgggtacttagtcaagaagagcagcccacgggtcgaagatccgcccttggtcatggaggtcaacatagtacacagcgaagggaatccgcgggcctacgagcccctgttacgcgagatgcttatgtactatcgcgggttaggcacgctggcacgggcgagaggcatggtggataaagataacgatgtccggccgtggcacattgctgctgcggagaagggcgttagggcattgtatatgcttatgtga

SEQ ID NO: 30515 - protein, 1506 aa, Muscodor strobelii
  misc_feature: SGI Peptide ID NO. 570497
  misc_feature (14)..(1506): NCBI GI: 39977193 Blast Desc: MGG_06499 [Magnaporthe grisea 70-15] gi|145016073|gb|EDK00563.1| MGG_06499 [Magnaporthe grisea 70-15]
  misc_feature (1)..(1506): NCBI GI: 46128121 Blast Desc: FG08438.1 [Gibberella zeae PH-1]
  misc_feature (1)..(1506): NCBI GI: 116202613 Blast Desc: CHGG_09191 [Chaetomium globosum CBS 148.51] gi|88177709|gb|EAQ85177.1| CHGG_09191 [Chaetomium globosum CBS 148.51]
  misc_feature (96)..(1506): NCBI GI: 256733562 Blast Desc: NECHADRAFT_59159 [Nectria haematococca mpVI 77-13-4]
  misc_feature (87)..(1506): NCBI GI: 85085914 Blast Desc: NCU03962 [Neurospora crassa OR74A] gi|28918694|gb|EAA28365.1| NCU03962 [Neurospora crassa OR74A] gi|40882323|emb|CAF06145.1| [Neurospora crassa]
  misc_feature (1)..(1506): NCBI GI: 156060191 Blast Desc: SS1G_02234 [Sclerotinia sclerotiorum 1980] gi|154699642|gb|EDN99380.1| SS1G_02234 [Sclerotinia sclerotiorum 1980]
  misc_feature (87)..(1433): NCBI GI: 171682458 Blast Desc: protein product [Podospora anserina] gi|170941188|emb|CAP66838.1| protein product [Podospora anserina]
  misc_feature (841)..(1461): NCBI GI: 154315531 Blast Desc: BC1G_04338 [Botryotinia fuckeliana B05.10] gi|150847278|gb|EDN22471.1| BC1G_04338 [Botryotinia fuckeliana B05.10]
  misc_feature (463)..(1136): NCBI GI: 261359434 Blast Desc: conserved [Verticillium albo-atrum VaMs.102]
  misc_feature (8)..(1506): NCBI GI: 115399220 Blast Desc: conserved [Aspergillus terreus NIH2624] gi|114192082|gb|EAU33782.1| conserved [Aspergillus terreus NIH2624]
  misc_feature: Useful for introducing or modulating the production of volatile compounds
MDTGDYDTNALVFNNISSVSFAFYEPAPSSAALFASAASDVEAALRKDGHLVCLDANRRGFWFFSLVAKGQPSAEPSPAAPKFERSVECAGCTLCVADEGSFEPAALVKLRFHGPNAVNTPSSSSSSASSALDPVFRSAHSATAPSVPTPTAEHDTKTLGLPDAKPSSIASTKVVYEYFLSAAYSTVSSCFSSRTGAIPLSSRTLLLPKPTQRHCAAWPPVLATIRIYLTTTGSLVLSLTHSLALNLITLSESVASQLPPFGFTVLAAPLGLFATCQSFALTDTTTTDGSLGQSPDTQVMRLRSERGDAPWKNICSKLLQSRMISLPSMKRTQKWVGLQRIRRRLAEQGPDGKRTPMMGFSPNIFWPTSLLFCRALSNLSISDDSDDFHRPRHAQSFDPLSNAKDWFLRAADRKKAMEQKKSERDAAASQESMLAEGHTQSSQNLSPLVLHRPGQAAASGSAIYPTPPDGVQNNVGITPSMDGNLSSPGMIPNAPEGTDTMHLQASTEAYAENWENRETKRSSFDTENLFGELGPDMFGDNDITEADFSFFDEQPGGVGLGALDLPIVSDMDRSATVRSTLGAVQVPQIKKAEPSAVPAPSSAPPLTFAKPELRHARSSLLDEARRQLPPDSSQHGSSNINTKRAASPFNPDTVYKRIRASLDNHKAVQQNSQVYANHHGSIFDKVDFGPGLSMVNRKYEGSGRFDFSADQSKGVRSSNLDTPPTTDYLRRHGKGRKQPKELPSTYGELFFRLYSSQNSGSNRPSPQNNEGAHSDADELSLISDQDDSSCDSDEPLSPVKSLSVRRRRADDDGDSLATSFRDLESMDASSPFLPLEFSRSFKSEVDLPLAKYFADPEPPWIQYSLPDDQFIMAAQLLTDQVTASTLPLSVLNQSSLYSGLDRRRHLSNTARNSIRELQQGLPSCFQLSAGCLFRSLVDIQDVPLLGQPNRFQPRVPGSDQMRPSNLFHIPPPRFEMRRYENKLSVLPSAVSFWESLGLSPTHGPKDVNVLCLFPDYDGLSDNILVFTDKIRSAYESLKLGSFNRFSSPPASEDGLFAFEVERDLVSFGKSTSFLGSSLRDCASKVCKALSTTSVEQTTFVLFFVYSPDVPGSIVECCAAFNEIFEGYRKMLASKRLPVINEIALQLIPQNLLASTTSVPMPTPADLSRLALEIYDRCSTFGGPSPSPAVILEQPPPRIIDFKLIANPSASVLHENMCLHVAYAQSVDERWITAAWTDNRGSQQLTSSYCLGRKGKPLATSMAEVIHEIWATTVELISSWKVHWRIIVAKCGAMDAHETETWSSVVTPDTKTSLTLTLVTVDTDPSLQLLPPAAKVPNTATSVFYTTPVSTPQGAVVSPEQSGNAATSIRENTAASAATPGDSSSTMDPESDVTLTDVADQTWGAVLSHRLHSSTSPTDASPALASGYLVKKSSPRVEDPPLVMEVNIVHSEGNPRAYEPLLREMLMYYRGLGTLARARGMVDKDNDVRPWHIAAAEKGVRALYMLM

SEQ ID NO: 30516 - DNA, 915 bp, Muscodor strobelii
  misc_feature: SGI cDNA ID NO. 570498
  misc_feature: Encodes the peptide sequence at SEQ ID NO 30517
atggcggccctgccaacaacatttgaccgtccggtcaaaatcgccgtcataggcggcacaggcctctacaaaatcgacggctacaagcccatcgcgcgcgtgaaccccctgacaccatggggctggccatcagacccaatccagatcctcgagcacaacggcacacctgtcgccttcctagctcgacacggcgagaaccaccaatacacaccccacgagattcccacacgcgccaacatcgccgccctacgctctctcggcgtccgttccgtcattagtttctccgccgtcggatctctgcgagcagacatcaagcctaaggacttcgtcatcccgaacgatgtcattgatcgcaccaagggcatccggccattcacgttctttgaggatggaatcgtggtccatgttcccttcgccaagccgtacgacgacaagatcgcggatatcgtgaagaagtgcgcaagtgctatgcaaggcgagggtgtcgttttacacacgaacaagactggtatctgcatcgagggcccccaattctccacccgcgccgaatcacacctctaccgcaattggggcgcagacataatctccatgtccctcctcccggaagcgaaactcgcccgcgaagccgagctttccttccaagtaatctgcatggcaaccgactacgactgctggaaagaagacgaagagcccgtcgacgtacccacggtcttaaatcgcatgggcgagaacgcggacaacgcgcgtcgtctcgtcggcgccgtgctcgatgaactcgcgaaagaggaaaacgagaacgtcgtgaacgctacacatctggaaggtaaaacgctagagatgctttgcacgaagccagagggtcgcggtaaggacgccgtcgccaaggcgaggtttttgtttcctggcgcgctgtaa

SEQ ID NO: 30517 - protein, 304 aa, Muscodor strobelii
  misc_feature: SGI Peptide ID NO. 570498
  misc_feature (11)..(277): Pfam Id: PF00896 Pfam Desc: Phosphorylase family 2
  misc_feature (11)..(263): Pfam Id: PF00896 Pfam Desc: Phosphorylase family 2
  misc_feature (1)..(302): NCBI GI: 171682460 Blast Desc: protein product [Podospora anserina] gi|170941189|emb|CAP66839.1| protein product [Podospora anserina]
  misc_feature (3)..(302): NCBI GI: 116202615 Blast Desc: conserved [Chaetomium globosum CBS 148.51] gi|88177710|gb|EAQ85178.1| conserved [Chaetomium globosum CBS 148.51]
  misc_feature (1)..(302): NCBI GI: 85085919 Blast Desc: NCU03963 [Neurospora crassa OR74A] gi|28918695|gb|EAA28366.1| NCU03963 [Neurospora crassa OR74A] gi|40882322|emb|CAF06144.1| conserved [Neurospora crassa]
  misc_feature (1)..(302): NCBI GI: 261359439 Blast Desc: phosphorylase family protein [Verticillium albo-atrum VaMs.102]
  misc_feature (1)..(302): NCBI GI: 46128161 Blast Desc: FG08458.1 [Gibberella zeae PH-1]
  misc_feature (1)..(302): NCBI GI: 256733963 Blast Desc: [Nectria haematococca mpVI 77-13-4]
  misc_feature (1)..(304): NCBI GI: 39977191 Blast Desc: MGG_06498 [Magnaporthe grisea 70-15] gi|145016074|gb|EDK00564.1| MGG_06498 [Magnaporthe grisea 70-15]
  misc_feature (1)..(302): NCBI GI: 145244186 Blast Desc: An11g06110 [Aspergillus niger] gi|134079285|emb|CAK96914.1| protein product [Aspergillus niger]
  misc_feature (1)..(302): NCBI GI: 70991825 Blast Desc: 5'-methylthioadenosine phosphorylase (Meu1) [Aspergillus fumigatus Af293] gi|66848394|gb|EAL88723.1| 5'-methylthioadenosine phosphorylase (Meu1), [Aspergillus Af293]
  misc_feature (1)..(302): NCBI GI: 169618353 Blast Desc: SNOG_12368 [Phaeosphaeria nodorum SN15] gi|160703600|gb|EAT80181.2| SNOG_12368 [Phaeosphaeria nodorum SN15]
  misc_feature (12)..(301): SWISSPROT Homolog: EC 2.4.2.28 S-methyl-5'-thioadenosine phosphorylase
MAALPTTFDRPVKIAVIGGTGLYKIDGYKPIARVNPLTPWGWPSDPIQILEHNGTPVAFLARHGENHQYTPHEIPTRANIAALRSLGVRSVISFSAVGSLRADIKPKDFVIPNDVIDRTKGIRPFTFFEDGIVVHVPFAKPYDDKIADIVKKCASAMQGEGVVLHTNKTGICIEGPQFSTRAESHLYRNWGADIISMSLLPEAKLAREAELSFQVICMATDYDCWKEDEEPVDVPTVLNRMGENADNARRLVGAVLDELAKEENENVVNATHLEGKTLEMLCTKPEGRGKDAVAKARFLFPGAL

SEQ ID NO: 30518 - DNA, 6691 bp, Muscodor strobelii
  misc_feature: SGI EST ID NO. CUFF.72251.0
  misc_feature: Variant of the nucleotide sequence at SEQ ID NO 30516
ccaccactcattgatcattcttgactatacatatttgatcctgtctatacacgcttcccgatataagcttttattgctagatttgtagactagaaatacggaatacggaatacaccaatagacacaagagagcatcactatttcttcgacgcacagcgatggcggccctgccaacaacatttgaccgtccggtcaaaatcgccgtcataggcggcacaggcctctacaaaatcgacggctacaagcccatcgcgcgcgtgaaccccctgacaccatggggctggccatcagacccaatccagatcctcgagcacaacggcacacctgtcgccttcctagctcgacacggcgagaaccaccaatacacaccccacgagattcccacacgcgccaacatcgccgccctacgctctctcggcgtccgttccgtcattagtttctccgccgtcggatctctgcgagcagacatcaagcctaaggacttcgtcatcccgaacgatgtcattgatcgcaccaagggcatccggccattcacgttctttgaggatggaatcgtggtccatgttcccttcgccaagccgtacgacgacaagatcgcggatatcgtgaagaagtgcgcaagtgctatgcaaggcgagggtgtcgttttacacacgaacaagactggtatctgcatcgagggcccccaattctccacccgcgccgaatcacacctctaccgcaattggggcgcagacataatctccatgtccctcctcccggaagcgaaactcgcccgcgaagccgagctttccttccaagtaatctgcatggcaaccgactacgactgctggaaagaagacgaagagcccgtcgacgtacccacggtcttaaatcgcatgggcgagaacgcggacaacgcgcgtcgtctcgtcggcgccgtgctcgatgaactcgcgaaagaggaaaacgagaacgtcgtgaacgctacacatctggaaggtaaaacgctagagatgctttgcacgaagccagagggtcgcggtaaggacgccgtcgccaaggcgaggtttttgtttcctggcgcgctgtaagttgggcgttggggtatggaggctttggattgctatgatatgggaccttcggagtgggatagacggtgattttgtagagatgaaatcatagaccggtattgatcgagaatgtgtaaagatggtggtgaggggcatcacgcattggagctttgcaaagctttcaattgggggaaaaaaaggacttagccttttttttcgaactatggtattcgaacagggtacttcaaagatacattctagtattgaaatacgaccttcaatcataccgttaaataatcccactacgggtgataagcgaccatgttatatagtcgcgtcgtttccggggtggtgttacgggagaccgcgaggttgccgtgaggtagtcatggcaccatgcgtcattcaacatcaaacctcaaagtcactttcaaacacgttccattctacaaccacgctaatgctatgcagcccgactaaaaacataaaaacgccatgtccattatacacaagaaaaaccccccttccaaaaataatcacataagcatatacaatgccctaacgcccttctccgcagcagcaatgtgccacggccggacatcgttatctttatccaccatgcctctcgcccgtgccagcgtgcctaacccgcgatagtacataagcatctcgcgtaacaggggctcgtaggcccgcggattcccttcgctgtgtactatgttgacctccatgaccaagggcggatcttcgacccgtgggctgctcttcttgactaagtacccgctagcaagagctgggctggcatcggtgggcgaggtcgagctatgtaatctgtgggaaagaactgcgccccatgtctggtctgctacgtcggttagggtgacatcggactctggatccatcgtgctactgctatcgcctggagtcgctgcgcttgccgcagtgttctctcgtatggaggtagccgcgtttccgctctgttcgggagaaacgacagctccttgtggcgtagagaccggagttgtatagaagacggatgtcgcggtattaggaaccttggctgcaggaggtaatagttggagggagggatcggtgtcaaccgtcaccagggttaaagtgagcgacgttttcgtatctggtgtaaccacacttgaccatgtttctgtctcgtgggcgtccatcgcaccgcatttggcgacgataatacgccagtggactttccatgaagatatgagctcaacggtagtagcccatatctcatggatgacctcggccatcgatgtcgctaacggcttcccttttcttcccaagcagtacgacgacgtcagctgctggctacccctgttgtcagtccaggccgctgtaatccatctctcgtctacgctctgcgcgtaagccacatgaaggcacatgttctcgtgcaagaccgacgcggaggggtttgcaatcagcttgaagtctatgatccgaggcggcggctgttccagaatgactgccggcgatggcgatggaccaccgaaagtagagcatcggtcatatatttcaagtgccaatctggacaaatcggcgggggtgggcatgggaaccgacgtcgtggaggctagtagattctgcggaatcagttgcagagcgatctcgttgatgaccggaagccttttgctcgcgagcattttcctatacccttcgaaaatctcattgaatgcagcgcaacattcaactattgagcctggcacatcaggcgagtaaacaaagaacaatacgaaagtggtttgttcgactgaagtggtagacaatgctttgcaaactttagatgcacagtcgcgaagggaagacccgagaaaagatgtcgatttaccaaatgagacgagatctcgctccacttcaaaagcaaagaggccgtcttctgatgctggcggcgaggaaaagcgattgaacgaacctaatttgagagattcgtaagcactgcgtatcttgtctgtaaataccaatatgttgtctgataagccgtcatagtcggggaaaaggcagaggacattgacatccttgggaccgtgtgtgggactgagacctagactctcccaaaaagacaccgcagacgggagaacagatagcttgttctcgtatcgacgcatctcgaatcgagggggagggatatggaacaagttgctaggtctcatctgatcagaacctggaactctcggctgaaagcgattgggctggcccaagagaggaacatcttggatgtcgactagagaacggaacagacagccagccgagagctggaagcaagacggtagtccttgttgcagttcccgtatggagttgcgtgctgtgttcgagagatgcctgcgtcgatccagacccgagtagagagatgattgattgaggacacttaggggaagcgtactagccgtgacttgatccgtcaacagttgggctgccatgatgaattggtcatctggtagggagtactgaatccagggtggttcgggatccgcaaagtattttgcgagcggcaagtcaacctccgacttgaagctcctcgaaaactcaagagggagaaatggtgatgatgcatccattgactctaagtctctgaacgatgttgctagggagtcgccatcgtcatctgcacgtcttcgtcttacacttaaagatttgactggggacagaggctcatcgctatcacagctcgaatcgtcttgatcagatataaggctgagttcatcagcgtcggaatgggcgccttcgttgttttgaggactcgggcgatttgagccggaattctgactactatacaaacggaaaaagagctcgccatatgtggaaggcaactctttcggctgcttgcgcccttttccatggcgtcggagataatctgtcgttgggggcgtatcgagattggaagatctgacacctttagactggtccgcagagaagtcaaaccgtccactgccttcgtatttcctgttaaccatagacaagcctggcccgaagtctactttgtcgaagatgctcccatggtggttggcatagacctgcgagttttgctggacagccttgtggttgtcgagcgaagcccgaatcctcttgtataccgtatctgggttaaaagggcttgctgccctcttagtattaatattgctactcccgtgctggcttgaatccggtggcagctgacgccgagcctcgtccaacaatgaactacgagcatggcgtagctcgggctttgcaaacgttagaggaggggcagaactgggtgctgggacagccgatggctctgcttttttgatctgcggaacttgcacagcgcccaaagtgctccggacggttgcgcttcgatccatgtctgagacgataggcagatcaagagcgccgaggccgactcctcctggttgttcatcgaaaaaactgaaatccgcttccgtgatgtcgttgtccccgaacatatctggacccagctcgccgaataaattctccgtgtcaaacgaggaccgcttggtttctctgttctcccaattctcagcataagcttctgtcgaagcttgtaaatgcatcgtatctgtcccttccggggcattcgggatcattccaggactagataggttgccgtccatcgaaggtgtaatcccgacattattctgaacaccatccggcggtgttggatatatggcgctccccgaagcggctgcttgccctgggcggtgtaagacgaggggagacagattctgagaagattgagtgtgtccctcagcaagcatagattcctggctggcagcagcatctctctcgctcttcttctgttccatcgccttcttccgatccgccgctctcaaaaaccagtcttttgcattgctcagaggatcgaaactctgggcgtgccgaggccgatggaagtcgtcagagtcgtcgctgatgctcagatttgacaaagctctacagaataacaggctcgtcggccagaaaatgtttggggagaagcccatcatgggtgtccgcttcccgtcagggccctgctccgccaatcttcggcgtatgcgctgaaggccgacccatttttgagtcctcttcatactaggcaacgatatcatccgggactgcaatagtttcgagcagatattcttccagggggcatcgcctctttccgacctgagcctcatcacctgcgtgtctggagactggccaaggctgccatccgtagtggtcgtgtcggtcagagcaaatgattgacatgtcgcaaacaagcccaagggggccgcaagaacggtgaatccgaagggaggtagttggctcgcgacgctctcggacaatgtgatgagattcagcgcaagggagtgggtcaggctgagtacgagactaccagtggtagtaaggtagattcgaatggttgcaagcacgggcggccaggccgcacagtgacgctgagtcggcttgggcagcagcaatgtccgggagctcaggggaatagcaccggtgcgggagctgaagcaggacgagacagtggagtatgcggcggagagaaagtactcgtagacgaccttggtagatgcgatcgagctcggctttgcgtctggaaggccgagagttttggtgtcgtgctcggccgtcggcgtcggcaccgagggggcagtggcggagtgggcgctgcgaaagacggggtcgagagcggaggaggcgctcgaggaagagctgctgggcgtgttgaccgcattggggccgtggaagcgcagtttcaccagtgcggctggctcgaaggatccctcgtcggcgacgcacaacgtgcacccggcgcactcgacacttctctcgaacttgggtgcagcaggactgggctcggcagagggctgccccttggcgacgaggctgaagaaccagaagccacgcctgttggcgtcgaggcagacaaggtggccatctttgcggagggcggcttcgacgtcgctggcggccgaggcgaacagggcggccgacgagggggcgggctcgtagaaggcgaagctgacggaggagatgttattaaatactaaggcattagtgtcgtagtcgccagtgtccatagcgtccgggccgcaagcacggggctggagtcgtgggcccggctgcgacgcctgcagccggacagagggcgagggagggcgggaggacgaggatcagtagggcgaggggcgggagagggcggcgtattcgaggtcgttcgtgtccaacacctgcctaaactccatgtcggtagtctggcagaccgttgggcaggacaacgggcgatgatgccggggcgagtcgcgacaaaatccaaaaccgggggcgagatggtgttgtgatgcgacggaccgcaaagggtgggagatcggattaaccttggaggacggggatgcttcaggtgtgcaggtgtgcgattagatcttggacagattgccgaactgccacttagacggaacccattctcaacaggattcaggtattagtcttaagattaggagggatgttgagatcgtgaggtgttttccttcagcctcattccgtcgtcgtttgtctaactctaatcaagcgactgggggagacgacgtttcggcaagtgtagcgaagggaatgtcgtgatcgcggccaatcacagccggccctgcatcccaactgcgaggtaa

SEQ ID NO: 30519 - DNA, 1134 bp, Muscodor strobelii
  misc_feature: SGI cDNA ID NO. 570499
  misc_feature: Encodes the peptide sequence at SEQ ID NO 30520
atggtcactcggaatttgagcagagccggcttcggactggtgtttctggtggcatcggcattgagccagacgattgtcgtgaataatcaggttctccccgccaatgcacatacagttgcgcctgcgtacgccgttgttgatgcatcttcctccaatgcaacggcggctctgttcccgggagagacaaaacaacttactccggctgtcctggcaaacctcaccggtttgagcctgactaacgtggtgttgttcaagtatcctgatccgaaagcttctatcaggtcgaactggacatgcaagacatttcccggggacgttctatatcctggaactgtgaccaataatgtcttcaacttgctactaggtggttctttgattcataccataccttttgccgcaccgtgtttcgatgattatggtgtccaagaccctgccaaatgtagcttcatcaataacaactggttcaacgactcttatatacatacagatgatcctacctccataaatgcgattctcttccaaggaacaacatgtgtaccagctagtgtcaatcctgacgcgcaaacatgtacgctaggttcctatccaaatttctctgtcaacgtcagcactgtcgcccaggtacaattggctataaatctcgcaagaaatctaaatgtgcgacttgtcattaagaacactggtcatgatttcggcgcaaagtcaaccggtgcgggcgccatatcactttggacacatagcttgaaagatatccggttctacgagacttacgaagagggatcatataaaggaccggcattcaagatgggtgctggtgtacaggcttttgaagcgtacgctgctgctcgtgatgccgatgtaacgatcgttggcggagaaggcagaacggtagggctctttggaggctacatgctcggaggtggtcattctcccttgtcgagcatttatggcatgggttcggatcaagttttatcaatggaggtcgtaacggccgatggtacctttttgaccgcgagtagcacttcaaacccggacctcttctgggctctacggggtggaggtggctcgacctacggagttgtgacgtacgtggccattttatacgatctcgaaacgaaagtggtacttgactaa

SEQ ID NO: 30520 - protein, 377 aa, Muscodor strobelii
  misc_feature: SGI Peptide ID NO. 570499
  misc_feature (196)..(339): Pfam Id: PF01565 Pfam Desc: FAD binding domain
  misc_feature (11)..(351): NCBI GI: 256731016 Blast Desc: NECHADRAFT_48452 [Nectria haematococca mpVI 77-13-4]
  misc_feature (26)..(366): NCBI GI: 212526020 Blast Desc: conserved [Penicillium marneffei ATCC 18224] gi|210072565|gb|EEA26652.1| conserved [Penicillium marneffei ATCC 18224]
  misc_feature (39)..(366): NCBI GI: 242779826 Blast Desc: conserved [Talaromyces stipitatus ATCC 10500] gi|218719614|gb|EED19033.1| conserved [Talaromyces stipitatus ATCC 10500]
  misc_feature (23)..(362): NCBI GI: 256720434 Blast Desc: NECHADRAFT_44551 [Nectria haematococca mpVI 77-13-4]
  misc_feature (41)..(374): NCBI GI: 238505715 Blast Desc: conserved [Aspergillus flavus NRRL3357] gi|220690182|gb|EED46532.1| conserved [Aspergillus flavus NRRL3357]
  misc_feature (7)..(366): NCBI GI: 46114930 Blast Desc: FG03307.1 [Gibberella zeae PH-1]
  misc_feature (41)..(374): NCBI GI: 169780200 Blast Desc: [Aspergillus oryzae RIB40] gi|83773304|dbj|BAE63431.1| protein product [Aspergillus oryzae]
  misc_feature (1)..(366): NCBI GI: 116197240 Blast Desc: CHGG_05218 [Chaetomium globosum CBS 148.51] gi|88181131|gb|EAQ88599.1| CHGG_05218 [Chaetomium globosum CBS 148.51]
  misc_feature (46)..(351): NCBI GI: 119492963 Blast Desc: FAD binding domain protein [Neosartorya fischeri NRRL 181] gi|119411897|gb|EAW21840.1| FAD binding domain protein [Neosartorya fischeri NRRL 181]
  misc_feature (22)..(376): NCBI GI: 256731513 Blast Desc: NECHADRAFT_85037 [Nectria haematococca mpVI 77-13-4]
MVTRNLSRAGFGLVFLVASALSQTIVVNNQVLPANAHTVAPAYAVVDASSSNATAALFPGETKQLTPAVLANLTGLSLTNVVLFKYPDPKASIRSNWTCKTFPGDVLYPGTVTNNVFNLLLGGSLIHTIPFAAPCFDDYGVQDPAKCSFINNNWFNDSYIHTDDPTSINAILFQGTTCVPASVNPDAQTCTLGSYPNFSVNVSTVAQVQLAINLARNLNVRLVIKNTGHDFGAKSTGAGAISLWTHSLKDIRFYETYEEGSYKGPAFKMGAGVQAFEAYAAARDADVTIVGGEGRTVGLFGGYMLGGGHSPLSSIYGMGSDQVLSMEVVTADGTFLTASSTSNPDLFWALRGGGGSTYGVVTYVAILYDLETKVVLD

SEQ ID NO: 30521 - DNA, 1562 bp, Muscodor strobelii
  misc_feature: SGI EST ID NO. CUFF.72226.0
  misc_feature: Variant of the nucleotide sequence at SEQ ID NO 30519
ctttggacacatagcttgaaagatatccggttctacgagacttacgaagagggatcatataaaggaccggcattcaagatgggtgctggtgtacaggcttttgaagcgtacgctgctgctcgtgatgccgatgtaacgatcgttggcggagaaggcagaacggtagggctctttggaggctacatgctcggaggtggtcattctcccttgtcgagcatttatggcatgggttcggatcaagttttatcaatggaggtcgtaacggccgatggtacctttttgaccgcgagtagcacttcaaacccggacctcttctgggctctacggggtggaggtggctcgacctacggagttgtgacggtatgttgacagctttgagtgactgaacgctggactatcgatttataaagctaacttgagtcgtagtacgtggccattttatacgatctcgaaacgaaagtggtacttgactaacacgattttgcacattaggtccatggtgatcaaggcttatcctaaaatcccagtcacaacaatgactttcgtgttgaacagctcaaacacgacatcattcaaccaatggtggcaagtcgtacgcgcatatttcaacgatttcatcacgtatgcagatgctgggatgtactcgtacttcagtttgagcgcctttaatggagactacatctttactatgcagccttggtttgcgccgaatttgacgaaggcccaatttcagaacatcactgctccattctggggaagagtgaaggatgctggcgttaagttagaaccactgtattccgagtacgataacttttacgacgcatggaatgagaactttccgttggagtcctggggcagcaatctccagcgtccaggcagtcgactttttccacgtgagaactgggaagattccgacaagctgaataatactttcgacgccatccgctatgttgttgattcaggcggctatattctcggattcaacatccagccaaatccacagggaaagggaaactacccagatagcgcggtcaaccctgcgtggaggaaagctgttctacatgccgttgacgctgttacgtggacacaagatatgcgcacggagatcatagagatctggagcagcgtattgacgaaggattggggaccacgctggaaagcagccgcacccgattctggggcttatctctctgagtctgactatatcgagcccgacttccagcaatcattctggggtgacaagtatgagagattgtacgcgatgaagaaacggctagatccttgggatgtgttctatgctcagaatgcagtaggttccgaagactttgagatgacggattacgtatttggcattttgccatcgcagaatagtctattatgtcgcaagcagccaagtccgccggagaagaaaacccagcgactgttaatgaggagatcgatgggatctaggtgatgggaacttggatggcgaaggtatgcataagaagttcttaaagcttggagtgagagcacatatctatagtactacgaggaaagaatacagacagcttcctttacgcgtg

SEQ ID NO: 30522 - DNA, 852 bp, Muscodor strobelii
  misc_feature: SGI cDNA ID NO. 570500
  misc_feature: Encodes the peptide sequence at SEQ ID NO 30523
atgactttcgtgttgaacagctcaaacacgacatcattcaaccaatggtggcaagtcgtacgcgcatatttcaacgatttcatcacgtatgcagatgctgggatgtactcgtacttcagtttgagcgcctttaatggagactacatctttactatgcagccttggtttgcgccgaatttgacgaaggcccaatttcagaacatcactgctccattctggggaagagtgaaggatgctggcgttaagttagaaccactgtattccgagtacgataacttttacgacgcatggaatgagaactttccgttggagtcctggggcagcaatctccagcgtccaggcagtcgactttttccacgtgagaactgggaagattccgacaagctgaataatactttcgacgccatccgctatgttgttgattcaggcggctatattctcggattcaacatccagccaaatccacagggaaagggaaactacccagatagcgcggtcaaccctgcgtggaggaaagctgttctacatgccgttgacgctgttacgtggacacaagatatgcgcacggagatcatagagatctggagcagcgtattgacgaaggattggggaccacgctggaaagcagccgcacccgattctggggcttatctctctgagtctgactatatcgagcccgacttccagcaatcattctggggtgacaagtatgagagattgtacgcgatgaagaaacggctagatccttgggatgtgttctatgctcagaatgcatctattatgtcgcaagcagccaagtccgccggagaagaaaacccagcgactgttaatgaggagatcgatgggatctag

SEQ ID NO: 30523 - protein, 283 aa, Muscodor strobelii
  misc_feature: SGI Peptide ID NO. 570500
  misc_feature (216)..(259): Pfam Id: PF08031 Pfam Desc: Berberine and berberine like
  misc_feature (16)..(258): NCBI GI: 256731016 Blast Desc: NECHADRAFT_48452 [Nectria haematococca mpVI 77-13-4]
  misc_feature (1)..(258): NCBI GI: 154302893 Blast Desc: BC1G_09190 [Botryotinia fuckeliana B05.10] gi|150855114|gb|EDN30306.1| BC1G_09190 [Botryotinia fuckeliana B05.10]
  misc_feature (11)..(255): NCBI GI: 115385156 Blast Desc: conserved [Aspergillus terreus NIH2624] gi|114196817|gb|EAU38517.1| conserved [Aspergillus terreus NIH2624]
  misc_feature (5)..(258): NCBI GI: 119492963 Blast Desc: FAD binding domain protein [Neosartorya fischeri NRRL 181] gi|119411897|gb|EAW21840.1| FAD binding domain protein [Neosartorya fischeri NRRL 181]
  misc_feature (1)..(255): NCBI GI: 46126861 Blast Desc: FG07808.1 [Gibberella zeae PH-1]
  misc_feature (1)..(258): NCBI GI: 256724459 Blast Desc: NECHADRAFT_88288 [Nectria haematococca mpVI 77-13-4]
  misc_feature (2)..(255): NCBI GI: 169780200 Blast Desc: [Aspergillus oryzae RIB40] gi|83773304|dbj|BAE63431.1| protein product [Aspergillus oryzae]
  misc_feature (2)..(255): NCBI GI: 238505715 Blast Desc: conserved [Aspergillus flavus NRRL3357] gi|220690182|gb|EED46532.1| conserved [Aspergillus flavus NRRL3357]
  misc_feature (1)..(258): NCBI GI: 256731513 Blast Desc: NECHADRAFT_85037 [Nectria haematococca mpVI 77-13-4]
  misc_feature (10)..(256): NCBI GI: 256720434 Blast Desc: NECHADRAFT_44551 [Nectria haematococca mpVI 77-13-4]
MTFVLNSSNTTSFNQWWQVVRAYFNDFITYADAGMYSYFSLSAFNGDYIFTMQPWFAPNLTKAQFQNITAPFWGRVKDAGVKLEPLYSEYDNFYDAWNENFPLESWGSNLQRPGSRLFPRENWEDSDKLNNTFDAIRYVVDSGGYILGFNIQPNPQGKGNYPDSAVNPAWRKAVLHAVDAVTWTQDMRTEIIEIWSSVLTKDWGPRWKAAAPDSGAYLSESDYIEPDFQQSFWGDKYERLYAMKKRLDPWDVFYAQNASIMSQAAKSAGEENPATVNEEIDGI

SEQ ID NO: 30524 - DNA, 1562 bp, Muscodor strobelii; identical to SEQ ID NO: 30521
  misc_feature: SGI EST ID NO. CUFF.72226.0
  misc_feature: Variant of the nucleotide sequence at SEQ ID NO 30522

SEQ ID NO: 30525 - DNA, 1950 bp, Muscodor strobelii
  misc_feature: SGI cDNA ID NO. 570501
  misc_feature: Encodes the peptide sequence at SEQ ID NO 30526
atgccgtctcccgctgagctttactctgactattatggtcgtcgtggggttgttgtgcctccggctgctcctcgccaacctgctatgcagatgccacctcataaccaaccctataccaactctcatatgcccggaaatgcaaactcccacgcccacttcaatgttccttctccaagtcacttcaaccctcctcctttgagtgcacaagaggacgagattcgccagcctaccatacagatgccgcctcacaatcaaccctacgccggcttctatacgccgcaaaacgacagtttctacgcccgatttaactatcctcccttggaccccaacgaggatgagattcgtctgctacatatcgacttgtccggtagtggtaggcataaaatgcaacaccgcgttcttgtctccagcgcgccacggtactctgccctatcatatttctccggcagcccagacgagactgagatcatcactgtggatgacgtccccttcagagcgttcgcaaatctgcacaaggccttagtaaatctgatcagcttctggagacgccgttttcctgatcgtcctctcattctctgggtcgaccagctctgcataaatcagaaagacacaaaagaaaagggacaacaggtcaactacatgggtgaaatctacaggcgtgcagatcaagtgttcgtgtccatgccgatagaggcttcggttgatgttgtgcgtgttttgcaattcatcaatcgcatcgccaaagagaacacaagatcggggcgctcaatgctgaaggagctccaccaattcgatgctgaatctccggccaagggccactctttgatcattgaccttatagaaaacccttggttcgagcgcgcatgggtttttcaagagttcatctttgcatcgcgcgcctttttcctgttctcagatcagcacgatatggagttagatcaattctcaaaagcactgttgacattccttgagatgccccttgaagagcacgtacagctatgcaataaatattgccggaacacggagtggattgcaaagaaccacacgaaatgtatgcagccttgctacggatgggattgtagttttccccagttctgtcaatttggcgaaaaagacgaacaggccgaagactccgaagcttgctacaggctgatacgcggagcttccaacattcgcgctcgggctcgagtccactacgtgctgagcaaaaagcgcgagtggcgaggccagggcatggtgctgtctgatgtcctgcggcacgccaggaacacacggacatcggagcccaaggataagatatatgcattcctgggtgtagcaaaccaggtatacaatatccctatcaagtatgagaagacctatggcataaacgcagttctggtagacacggcctgcgccatctttcaacacgaggccaatggacttgatattttactagatgctggaacttctgctgaaagccgtcggctagcctcaggggaagacggattgccgtcctggataccagattggaccaaacatcatgatcaacatagtgcaaacttcgtcagagccttacagctaccaggagactgctgcgcagggggacgagatcaacctgagcaccacttatcgcccgatgacaaaggtaaccccaatcgaaggctgacgctatgggggcatcgagttggtaccgtacaggatatgggccctgatacgtacgagaatttcagattggcgtatatttcgagcagtcagcagatcgtcacgacagatctcgcacagagaggcgatgaggtttggatttttcatggtataaactggccgtttgccgttcgaaagacgcgaaatgctggacagtatatcctactcagcgccgctaccattcaagagcgaacagcgttggcgacgatttcaccgctgatgtttggacagggtagtcggtcttgggagtcgattactcttgtctga

SEQ ID NO: 30526 - protein, 649 aa, Muscodor strobelii
  misc_feature: SGI Peptide ID NO. 570501
  misc_feature (141)..(293): Pfam Id: PF06985 Pfam Desc: Heterokaryon incompatibility protein (HET)
  misc_feature (189)..(226): Pfam Id: PF06985 Pfam Desc: Heterokaryon incompatibility protein (HET)
  misc_feature (90)..(643): NCBI GI: 256728309 Blast Desc: NECHADRAFT_87610 [Nectria haematococca mpVI 77-13-4]
  misc_feature (87)..(601): NCBI GI: 189194575 Blast Desc: conserved [Pyrenophora tritici-repentis Pt-1C-BFP] gi|187979190|gb|EDU45816.1| conserved [Pyrenophora tritici-repentis Pt-1C-BFP]
  misc_feature (90)..(505): NCBI GI: 171692575 Blast Desc: protein product [Podospora anserina] gi|170946236|emb|CAP73037.1| protein product [Podospora anserina]
  misc_feature (401)..(649): NCBI GI: 169611739 Blast Desc: SNOG_08984 [Phaeosphaeria nodorum SN15] gi|111062056|gb|EAT83176.1| SNOG_08984 [Phaeosphaeria nodorum SN15]
  misc_feature (101)..(505): NCBI GI: 168037338 Blast Desc: [Physcomitrella patens subsp. patens] gi|162677541|gb|EDQ64010.1| [Physcomitrella patens subsp. patens]
  misc_feature (104)..(534): NCBI GI: 145234110 Blast Desc: An02g12950 [Aspergillus niger] gi|134057368|emb|CAK37923.1| protein product [Aspergillus niger]
  misc_feature (102)..(568): NCBI GI: 115401102 Blast Desc: [Aspergillus terreus NIH2624] gi|114190080|gb|EAU31780.1| [Aspergillus terreus NIH2624]
  misc_feature (136)..(506): NCBI GI: 171679799 Blast Desc: protein product [Podospora anserina] gi|170939525|emb|CAP64753.1| protein product [Podospora anserina]
  misc_feature (66)..(577): NCBI GI: 119179507 Blast Desc: CIMG_08498 [Coccidioides immitis RS]
  misc_feature (104)..(504): NCBI GI: 256733343 Blast Desc: NECHADRAFT_77319 [Nectria haematococca mpVI 77-13-4]
MPSPAELYSDYYGRRGVVVPPAAPRQPAMQMPPHNQPYTNSHMPGNANSHAHFNVPSPSHFNPPPLSAQEDEIRQPTIQMPPHNQPYAGFYTPQNDSFYARFNYPPLDPNEDEIRLLHIDLSGSGRHKMQHRVLVSSAPRYSALSYFSGSPDETEIITVDDVPFRAFANLHKALVNLISFWRRRFPDRPLILWVDQLCINQKDTKEKGQQVNYMGEIYRRADQVFVSMPIEASVDVVRVLQFINRIAKENTRSGRSMLKELHQFDAESPAKGHSLIIDLIENPWFERAWVFQEFIFASRAFFLFSDQHDMELDQFSKALLTFLEMPLEEHVQLCNKYCRNTEWIAKNHTKCMQPCYGWDCSFPQFCQFGEKDEQAEDSEACYRLIRGASNIRARARVHYVLSKKREWRGQGMVLSDVLRHARNTRTSEPKDKIYAFLGVANQVYNIPIKYEKTYGINAVLVDTACAIFQHEANGLDILLDAGTSAESRRLASGEDGLPSWIPDWTKHHDQHSANFVRALQLPGDCCAGGRDQPEHHLSPDDKGNPNRRLTLWGHRVGTVQDMGPDTYENFRLAYISSSQQIVTTDLAQRGDEVWIFHGINWPFAVRKTRNAGQYILLSAATIQERTALATISPLMFGQGSRSWESITLV

SEQ ID NO: 30527 - DNA, 2055 bp, Muscodor strobelii
  misc_feature: SGI EST ID NO. CUFF.72230.0
  misc_feature: Variant of the nucleotide sequence at SEQ ID NO 30525
tcgacttgtccggtagtggtaggcataaaatgcaacaccgcgttcttgtctccagcgcgccacggtactctgccctatcatatttctccggcagcccagacgagactgagatcatcactgtggatgacgtccccttcagagcgttcgcaaatctgcacaaggccttagtaaatctgatcagcttctggagacgccgttttcctgatcgtcctctcattctctgggtcgaccagctctgcataaatcagaaagacacaaaagaaaagggacaacaggtcaactacatgggtgaaatctacaggcgtgcagatcaagtgttcgtgtccatgccgatagaggcttcggttgatgttgtgcgtgttttgcaattcatcaatcgcatcgccaaagagaacacaagatcggggcgctcaatgctgaaggagctccaccaattcgatgctgaatctccggccaagggccactctttgatcattgaccttatagaaaacccttggttcgagcgcgcatgggtttttcaagagttcatctttgcatcgcgcgcctttttcctgttctcagatcagcacgatatggagttagatcaattctcaaaagcactgttgacattccttgagatgccccttgaagagcacgtacagctatgcaataaatattgccggaacacggagtggattgcaaagaaccacacgaaatgtatgcagccttgctacggatgggattgtagttttccccagttctgtcaatttggcgaaaaagacgaacaggccgaagactccgaagcttgctacaggctggtaacttgctatcgtccggattgccgtcttagtcacagttggttggaatgcgttattctcattgagttaccctgggtcatcgcatacatgctgtacagatgcctggactttttggtttgtaagctccgattctgtattggcaaatgtggtccttgtgcctctctggggattcttgaaattgatatccccagcacggagcaccatattagtcagatacgcggagcttccaacattcgcgctcgggctcgagtccactacgtgctgagcaaaaagcgcgagtggcgaggccagggcatggtgctgtctgatgtcctgcggcacgccaggaacacacggacatcggagcccaaggataagatatatgcattcctgggtgtagcaaaccaggtatacaatatccctatcaagtatgagaagacctatggcataaacgcagttctggtagacacggcctgcgccatctttcaacacgaggccaatggacttgatattttactagatgctggaacttctgctgaaagccgtcggctagcctcaggggaagacggattgccgtcctggataccagattggaccaaacatcatgatcaacatagtgcaaacttcgtcagagccttacagctaccaggagactgctgcgcagggggacgagatcaacctgagcaccacttatcgcccgatgacaaaggtaaccccaatcgaaggctgacgctatgggggcatcgagttggtaccgtacaggatatgggccctgatacgtacgagaatttcagattggcgtatatttcgagcagtcagcagatcgtcacgacagatctcgcacagagaggcgatgaggtttggatttttcatggtataaactggccgtttgccgttcgaaagacgcgaaatgctggacagtatatcctactcagcgccgctaccattcaagagcgaacagcgttggcgacgatttcaccgctgatgtttggacagggtagtcggtcttgggagtcgattactcttgtctgagcttgctcttatcgtgcttctacactagagagaaagatacatggagtctccccggttctaccagaaatcgagggaaattccagaagcatagatagttggttatgaagtaattcgtcgagaaactcatcaatgggtgtttcggggtcttgctttgggtaatattatcatgttgattaaacaggtgtcaattaaaaacgagaaggaatcgattccagattaagatcttttgccgatgggcttaggctgc

SEQ ID NO: 30528 - DNA, 3318 bp, Muscodor strobelii
  misc_feature: SGI cDNA ID NO. 570502
  misc_feature: Encodes the peptide sequence at SEQ ID NO 30529
atggcggtgcccggggccagcttggacagggaccctccccatccatggaagaatgactccatcgaagagcgcggctttgctgctgcgttgatgtgcctcgaaggccattatatccagtcacctgtcatgggtccacagtcgatagtgaaagttatgggcatcgtcaccaagactcttgagaagacacatacgtataaagacgtgagggaagtactgtccaagaatcttcgtatatggatatggcttcggagagccatctcagcagcgatatgtgatctgaacgagaagtctctcggcgttcgatcccagccatttattccgaccaggttcatcgacatcactactcctgaggtcacggccttgatcataaaaaactacgcaccgctcaaagaggcacttcagatgctgaacaagttgatgcacatagctagaaatcttcttgtcacgacggatcctgagataccacaaaacttgtctgccaccattaacttcgatcgcgaggtcattgaagccatctgtctttgcgtcaatgtcctcagtaaaggcatcgatggcgaaatgccggacgacgatgcttcgagagtcaaactcaacgagatcacagagctgtacaagaaggttttggtcacctctttacaaaaagctcacaattggatcgctaaaaacgaccgaaacaagatgaccttcttctaccgggtgttcatacagtctcccgatgtcgacttggacccaggacctgaagatcgatatgagttgatttcatcacatccttcccccaggtgtatgtatcttcgggatgagacattcaactggatcagaaggaacacatacatgtgcgagactgcggcttccatctgtaaagagtattacaatgcgaaggaccgtgataagtgggatatgtcatttccgcacgacgatgattccgcttttgtgacgaggagttccgatgagcgcgaatggaccgaggacgagccagatttcgatccagaagaaacggacaagttcgtccaagattggaaatatggacgggtgtcccatgaacttgacgaatggtgggaatccgctcgtttccccaacaaggacaaccttgacactccgcagtttccagctagtcagatgcttgacagagtcgagcagtgcaaagaaaatttgctatcgcgttacgcaccgccagaatcgccagaggagccacccgatgctgtcgagcaccatatggagcaccatacggatgatcctgcggtacatgagtggccgacagacgcgcctaattcaggtcactatgctcctgagtatgatgagtacgaggaggaagctgatgacgacgactcgtatggcgaggggccgatgacgggtctcctcaccgaggttccaaatatcttagatcccaagcaaatcgaggctttacatatgatcattaaagcatgtatactcgattctgctggctctggaccaactcgctacggtgagagtctccaaaatgctcgatgtcgcatcctcgtggctacggaatgcggtcgaaaccttctaagggaaatgcttgtgttcatcgctgtctgggagaaaagtgaggagtctcttattttccagatcagcagccaaattgttctggcccttcacgagaattctctcattcaatatgcctgggaagctgtcagaagccccaaagacatcatgtcacccgcacagacggtgctactgcgcctaattacacatctggctcgtactgaactcatgccacccgtcgtggactataaccctgatcctgatcctcagggagatcccgaaagtcgtatcaacaaccctgatttccgcctgagccgcatgttgcatggtctctacactaatttccgtttccgtatcgtgcccgagtgtatcgcgttgatgcgaatccagggccaagtgcgggaaggcaagaccgatcccgccgactttcccgttgataattgggatctagagcgagccaaggacggtttggtgcagttcctcgatttcctttacaccattgccgatatctataacctgcgtcagcatttaattgactatgatgccgttcatgatctgctcaagttgctcgagggtctcgaatacgcagttgagcgtgcaccgttccccgctgccagaggagcaaatggcagtaacaccgcctcgtcctcaatcccagcagcccagccctcttcatcttcaaatccaccgcctccaccacctcctccacctccgcctctatccgagccaccacacgagtttgcctgggccggcattaaaggccaagtgctcagtattcttgccgcccttttgcaaccaccccctggccaatcttccccaggaaatccaacagtccaactccagatagtccgccataacggcatagtcttattactcaattgctgtctatacgatgacaataaccgcttctgccgcgagcgcactcagctctgtctcaagtggctcatggacgggtctcccgacgcggcagcattccttcaaaatcttgtgtcggcaaatcaagcccaagctgccgccggccaaggaggtccagtcgttcgccccgccccaggaactcagacagtacgcgtcgacggcgtaccaggcgaggtcaaggtccaagtccgatccgctagcgccccgtcagacaataggaccgagacggagctacgtttcgaagcaaatctcgcagcctcccgtagccaggcagcggctcttgcgagacgactcgaagagaataagaaccgaagcgaggagctcgttaatgacctgatcgcgcttaccgtcgctggcgaggcgggtagcaagacttcgacgtctgtcgatgctgcgctggatgctctaaatgccttcaacaagaacaatgacacgaaattagcccgggatggggctgtagtgacccccaagactgcctctgatattaagttggaggctgccctggagcaagatctcattgacaagattgtaaagctcgtcaagacgtccatgaacgtcatcgttaccgcgaagcaacctatcagagatgccgtgatagtcgctttaaaggctcacctgttagctatacttgctaaaactatgaaagatcgtgcctttaagaagaatatggctcaaagagcggtctatcttgctatgtccgctatatccaaggagcaagccagggagacggtgttgaaggctgtaatgtcgatcaagggtgccctggacaaagttgctaaaatggagggaaagtgcaggggtagagccatatttgctgtgaagactgtcattaatgtcatcaagatcgataccagagcagagaaaaaggtcccgttggtaaaaagaagtgtgtatgattga

SEQ ID NO: 30529 - protein, 1105 aa, Muscodor strobelii
  misc_feature: SGI Peptide ID NO. 570502
  misc_feature (18)..(864): NCBI GI: 261359440 Blast Desc: conserved [Verticillium albo-atrum VaMs.102]
  misc_feature (18)..(880): NCBI GI: 256733470 Blast Desc: [Nectria haematococca mpVI 77-13-4]
  misc_feature (20)..(872): NCBI GI: 171682462 Blast Desc: protein product [Podospora anserina] gi|170941190|emb|CAP66840.1| protein product [Podospora anserina]
  misc_feature (8)..(902): NCBI GI: 145608626 Blast Desc: MGG_06497 [Magnaporthe grisea 70-15] gi|145016075|gb|EDK00565.1| MGG_06497 [Magnaporthe grisea 70-15]
  misc_feature (20)..(875): NCBI GI: 85085924 Blast Desc: NCU03964 [Neurospora crassa OR74A] gi|28918696|gb|EAA28367.1| conserved [Neurospora crassa OR74A] gi|40882321|emb|CAF06143.1| [Neurospora crassa]
  misc_feature (20)..(871): NCBI GI: 116202617 Blast Desc: CHGG_09193 [Chaetomium globosum CBS 148.51] gi|88177711|gb|EAQ85179.1| CHGG_09193 [Chaetomium globosum CBS 148.51]
  misc_feature (20)..(846): NCBI GI: 156034388 Blast Desc: SS1G_13497 [Sclerotinia sclerotiorum 1980] gi|154698900|gb|EDN98638.1| SS1G_13497 [Sclerotinia sclerotiorum 1980]
  misc_feature (20)..(804): NCBI GI: 154292968 Blast Desc: BC1G_14381 [Botryotinia fuckeliana B05.10] gi|150845722|gb|EDN20915.1| BC1G_14381 [Botryotinia fuckeliana B05.10]
  misc_feature (18)..(402): NCBI GI: 46128159 Blast Desc: FG08457.1 [Gibberella zeae PH-1]
  misc_feature (451)..(830): NCBI GI: 258575043 Blast Desc: conserved [Uncinocarpus reesii 1704] gi|237901969|gb|EEP76370.1| conserved [Uncinocarpus reesii 1704]
MAVPGASLDRDPPHPWKNDSIEERGFAAALMCLEGHYIQSPVMGPQSIVKVMGIVTKTLEKTHTYKDVREVLSKNLRIWIWLRRAISAAICDLNEKSLGVRSQPFIPTRFIDITTPEVTALIIKNYAPLKEALQMLNKLMHIARNLLVTTDPEIPQNLSATINFDREVIEAICLCVNVLSKGIDGEMPDDDASRVKLNEITELYKKVLVTSLQKAHNWIAKNDRNKMTFFYRVFIQSPDVDLDPGPEDRYELISSHPSPRCMYLRDETFNWIRRNTYMCETAASICKEYYNAKDRDKWDMSFPHDDDSAFVTRSSDEREWTEDEPDFDPEETDKFVQDWKYGRVSHELDEWWESARFPNKDNLDTPQFPASQMLDRVEQCKENLLSRYAPPESPEEPPDAVEHHMEHHTDDPAVHEWPTDAPNSGHYAPEYDEYEEEADDDDSYGEGPMTGLLTEVPNILDPKQIEALHMIIKACILDSAGSGPTRYGESLQNARCRILVATECGRNLLREMLVFIAVWEKSEESLIFQISSQIVLALHENSLIQYAWEAVRSPKDIMSPAQTVLLRLITHLARTELMPPVVDYNPDPDPQGDPESRINNPDFRLSRMLHGLYTNFRFRIVPECIALMRIQGQVREGKTDPADFPVDNWDLERAKDGLVQFLDFLYTIADIYNLRQHLIDYDAVHDLLKLLEGLEYAVERAPFPAARGANGSNTASSSIPAAQPSSSSNPPPPPPPPPPPLSEPPHEFAWAGIKGQVLSILAALLQPPPGQSSPGNPTVQLQIVRHNGIVLLLNCCLYDDNNRFCRERTQLCLKWLMDGSPDAAAFLQNLVSANQAQAAAGQGGPVVRPAPGTQTVRVDGVPGEVKVQVRSASAPSDNRTETELRFEANLAASRSQAAALARRLEENKNRSEELVNDLIALTVAGEAGSKTSTSVDAALDALNAFNKNNDTKLARDGAVVTPKTASDIKLEAALEQDLIDKIVKLVKTSMNVIVTAKQPIRDAVIVALKAHLLAILAKTMKDRAFKKNMAQRAVYLAMSAISKEQARETVLKAVMSIKGALDKVAKMEGKCRGRAIFAVKTVINVIKIDTRAEKKVPLVKRSVYD

SEQ ID NO: 30530 - DNA, 3819 bp, Muscodor strobelii
  misc_feature: SGI EST ID NO. CUFF.72236.0
  misc_feature: Variant of the nucleotide sequence at SEQ ID NO 30528
gcaaattgcatacacaactacttacgccttttcttcgccagaatcacgtatgaagcacagattctacttttcttaggcagtattggtagatctccgctatcaatatcatcacaacagatcttttaagcctgatcaactgagccccaccatcaccgaaccgcccatcaaaaacctttggtggggcacaacaggctacctgctgagtaccttcaagcaccgctttgctgccgcatctgttatttctgagtcgtacccaggccgcatgagctagaaccagtgacagaggatagataatcatggcggtgcccggggccagcttggacagggaccctccccatccatggaagaatgactccatcgaagagcgcggctttgctgctgcgttgatgtgcctcgaaggccattatatccagtcacctgtcatgggtccacagtcgatagtgaaagttatgggcatcgtcaccaagactcttgagaagacacatacgtataaagacgtgagtactgtccaagaatcttcgtatatggatatggcttcggagagccatctcagcagcgatatgtgatctgaacgagaagtctctcggcgttcgatcccagccatttattccgaccaggttcatcgacatcactactcctgaggtcacggccttgatcataaaaaactacgcaccgctcaaagaggcacttcagatgctgaacaagttgatgcacatagctagaaatcttcttgtcacgacggatcctgagataccacaaaacttgtctgccaccattaacttcgatcgcgaggtcattgaagccatctgtctttgcgtcaatgtcctcagtaaaggcatcgatggcgaaatgccggacgacgatgcttcgagagtcaaactcaacgagatcacagagctgtacaagaaggttttggtcacctctttacaaaaagctcacaattggatcgctaaaaacgaccgaaacaagatgaccttcttctaccgggtgttcatacagtctcccgatgtcgacttggacccaggacctgaagatcgatatgagttgatttcatcacatccttcccccaggtgtatgtatcttcgggatgagacattcaactggatcagaaggaacacatacatgtgcgagactgcggcttccatctgtaaagagtattacaatgcgaaggaccgtgataagtgggatatgtcatttccgcacgacgatgattccgcttttgtgacgaggagttccgatgagcgcgaatggaccgaggacgagccagatttcgatccagaagaaacggacaagttcgtccaagattggaaatatggacgggtgtcccatgaacttgacgaatggtgggaatccgctcgtttccccaacaaggacaaccttgacactccgcagtttccagctagtcagatgcttgacagagtcgagcagtgcaaagaaaatttgctatcgcgttacgcaccgccagaatcgccagaggagccacccgatgctgtcgagcaccatatggagcaccatacggatgatcctgcggtacatgagtggccgacagacgcgcctaattcaggtcactatgctcctgagtatgatgagtacgaggaggaagctgatgacgacgactcgtatggcgaggggccgatgacgggtctcctcaccgaggttccaaatatcttagatcccaagcaaatcgaggctttacatatgatcattaaagcatgtatactcgattctgctggctctggaccaactcgctacggtgagagtctccaaaatgctcgatgtcgcatcctcgtggctacggaatgcggtcgaaaccttctaagggaaatgcttgtgttcatcgctgtctgggagaaaagtgaggagtctcttattttccagatcagcagccaaattgttctggcccttcacgagaattctctcattcaatatgcctgggaagctgtcagaagccccaaagacatcatgtcacccgcacagacggtgctactgcgcctaattacacatctggctcgtactgaactcatgccacccgtcgtggactataaccctgatcctgatcctcagggagatcccgaaagtcgtatcaacaaccctgatttccgcctgagccgcatgttgcatggtctctacactaatttccgtttccgtatcgtgcccgagtgtatcgcgttgatgcgaatccagggccaagtgcgggaaggcaagaccgatcccgccgactttcccgttgataattgggatctagagcgagccaaggacggtttggtgcagttcctcgatttcctttacaccattgccgatatctataacctgcgtcagcatttaattgactatgatgccgttcatgatctgctcaagttgctcgagggtctcgaatacgcagttgagcgtgcaccgttccccgctgccagaggagcaaatggcagtaacaccgcctcgtcctcaatcccagcagcccagccctcttcatcttcaaatccaccgcctccaccacctcctccacctccgcctctatccgagccaccacacgagtttgcctgggccggcattaaaggccaagtgctcagtattcttgccgcccttttgcaaccaccccctggccaatcttccccaggaaatccaacagtccaactccagatagtccgccataacggcatagtcttattactcaattgctgtctatacgatgacaataaccgcttctgccgcgagcgcactcagctctgtctcaagtggctcatggacgggtctcccgacgcggcagcattccttcaaaatcttgtgtcggcaaatcaagcccaagctgccgccggccaaggaggtccagtcgttcgccccgccccaggaactcagacagtacgcgtcgacggcgtaccaggcgaggtcaaggtccaagtccgatccgctagcgccccgtcagacaataggaccgagacggagctacgtttcgaagcaaatctcgcagcctcccgtagccaggcagcggctcttgcgagacgactcgaagagaataagaaccgaagcgaggagctcgttaatgacctgatcgcgcttaccgtcgctggcgaggcgggtagtgagcacgccgtgttagacgcggatgaaacggaggacgatgatgactttatgtaggtgccaaatcacatccctcgttcaatttccggaaataccatcgacgatgctgcaggcaagacttcgacgtctgtcgatgctgcgctggatgctctaaatgccttcaacaagaacaatgacacgaaattagcccgggatggggctgtagtgacccccaagactgcctctgatattaagttggaggctgccctggagcaagatctcattgacaagattgtaaagctcgtcaagacgtccatgaacgtcatcgttaccgcgaagcaacctatcagagatgccgtgatagtcgctttaaaggctcacctgttagctatacttgctaaaactatgaaagatcgtgcctttaagaagaatatggctcaaagagcggtctatcttgctatgtccgctatatccaaggagcaagccagggagacggtgttgaaggctgtaatgtcgatcaagggtgccctggacaaagttgctaaaatggagggaaagtgcaggggtagagccatatttgctgtgaagactgtcattaatgtcatcaagatcgataccagagcagagaaaaaggtcccgttggtaaaaagaagtgtgtatgattgacgctgagttcatggtgctctgaatgtatgaatagcattagggaataataggtcgcttaagcaatcgattaatagagcgtctaactctttgaatcgtcga

SEQ ID NO: 30531 - DNA, 1101 bp, Muscodor strobelii
  misc_feature: SGI cDNA ID NO. 570503
  misc_feature: Encodes the peptide sequence at SEQ ID NO 30532
atgcgtccagcatctaatccttcattctccaccctgacttctagatattctctgagatcagataaaatatcagaaccttcatcttcacagcaaagcgtgaccgcacacactgcttatctgttagaacctcccgatgtcgaaggcctgaccgacgatgatgagatcaatggtcaactggaagacgaagcgttaggcatacgcgaccctcggcataccaaatctatcgtctctgcacatagcaaagcaataactgccaacacaggaagcaccatcagaggtaaatatctgaaacgctcacatgaatccgtaactggcaaaaccccaacttcaaaacgagccagaggatcgtggcaggaaatagcagcaagataccctcaacaaccggaagatcatgttactcggaagtcacaaggatctactgaagctatattaccggcgcatcggaagcacgatagctattctatgagtcaagaagaaaaagaactggagaactgtcgtgaggttgttaataaggccttatttgatcgtgatgatgcgggagtgcacctcacggagtccggctcttatccccgatccacaaactacattagttctgtttggaggactgagaatgatctcaagagcgagagttcccagccaacgcctttgaataaccaacgagaacagtctatacaaccggcaaaagcagcctacacaagtggattcacccagacggacagtagctccaaaagagaaagatttactcagacagacgtcctcggtgagatggacaagtcggctcaggtagacattgttaccagaacagataagtatacccagacaacatcttcgttacacaatagccataacgtcctggaagcttcggcgcacccgccggggaatccaaacagccctctattggaggaggaaacctctaaacccaagctgaatatcgatgtggatttcgctacgagcgtagacctggatacactaataacggctcggctgcgaactggtaaccccaacgttctagacacgctgaatgctgaaatcgtgctcaatttgttgcataaagaagaaaatgacgatattcgcgacgatatactgaagatgttccgctga

SEQ ID NO: 30532 - protein, 366 aa, Muscodor strobelii
  misc_feature: SGI Peptide ID NO. 570503
MRPASNPSFSTLTSRYSLRSDKISEPSSSQQSVTAHTAYLLEPPDVEGLTDDDEINGQLEDEALGIRDPRHTKSIVSAHSKAITANTGSTIRGKYLKRSHESVTGKTPTSKRARGSWQEIAARYPQQPEDHVTRKSQGSTEAILPAHRKHDSYSMSQEEKELENCREVVNKALFDRDDAGVHLTESGSYPRSTNYISSVWRTENDLKSESSQPTPLNNQREQSIQPAKAAYTSGFTQTDSSSKRERFTQTDVLGEMDKSAQVDIVTRTDKYTQTTSSLHNSHNVLEASAHPPGNPNSPLLEEETSKPKLNIDVDFATSVDLDTLITARLRTGNPNVLDTLNAEIVLNLLHKEENDDIRDDILKMFR

SEQ ID NO: 30533 - DNA, 373 bp, Muscodor strobelii
  misc_feature: SGI EST ID NO. CUFF.72241.0
  misc_feature: Variant of the nucleotide sequence at SEQ ID NO 30531
ggaagacgaagcgttaggcatacgcgaccctcggcataccaaatctatcgtctctgcacatagcaaagcaataactgccaacacaggaagcaccatcagaggtaaatatctgaaacgctcacatgaatccgtaactggcaaaaccccaacttcaaaacgagccagaggatcgtggcaggaaatagcagcaagataccctcaacaaccggaagatcatgttactcggaagtcacaaggatctactgaagctatattaccggcgcatcggaagcacgatagctattctatgagtcaagaagaaaaagaactggagaactgtcgtgaggttgttaataaggccttatttgatcgtgatgatgcgggagtgcacctc

SEQ ID NO: 30534 - DNA, 2898 bp, Muscodor strobelii
  misc_feature: SGI cDNA ID NO. 570504
  misc_feature: Reduced expression when VOC is produced
  misc_feature: Encodes the peptide sequence at SEQ ID NO 30535
atgcctctcgctcgtgggccgggcggcaaagaggtcatggtccacgagatcgagcgcacgcaggaatggaccgacttcatcgcgaagctgacagccttccacgagaagcgcggcacccagttcgacccggagccgcgcctgcccaccatgcacggccacgtcaacgtcgacctcctgcgcctctacaagaccgtcatcgaccacggcggctacgacgaggtctccaaggtgcagaaggcctggtctgatcttgcgacagagctgggcatgtactacacagacaacaagggcatgggacagctcgcattccagctcaagaccttcttctaccgcttcctcggcgcctactggatccaggaccagtacaaccgcgaacctcccccgaaggagatcctcgagagccagactgcagctagtaaacacggcccgctgctcacgcgaagcctcgacaccttcaagctgcccgctaaaccctccgcgatggattcccccgcgccgagcgagcgacccgtcgacaccaccagcacgcccacctccgccaacagagcctccggtcgtctgcgagaggcgccgccccagcgagtccccttccagcccgagacgggccccagccgccagagcagacaggcctcttcccagcactcgaccccctctgccagcaacacgacatcccagatgtcgacccatagctcccagccgcagcagaaccaccaccatctctcccaacagtacaacccaaacaaccctctgcacgtggtccaggcccagcaggctgcccttcgcggtgtttctagctccttcacccccggaaaccctgacacggcctcgcgtctctctgatcccttcgagccccgtcctcccatcacagtgccccttcgccccgtcaacactcccggcaacaaccccgtcgagtttgccaagcgacagcgccagctcaagttgcagaacggtggccctagagatgcccctgctgcagcacgtccggtgctcccagctgcgggatttgatggtcccaatatatatacaagatgcctccaagctctccgatctggtatccctgccgaacaggcctttgctcttaatcacctcgtgaagatatcatatgaacgtggcgacaagtataagtttgagtcgttcgtggggcttgccgaaggcctcgttgagaaagctctcgagatcggtaacctcttctacgatgtgaactggcagatctcttatgacggcgaagagacgtcagacccgaacatcctagaaggggtggatggcactcgtgacatcttgcgccgcgtcagtcagctcacacgcaagcctgtgctggaatacatccagcccgcagaattctccgacagtcttctccgcatcactgaagcagtgctgaccctgagaaatatggtcatgctccatgataatgccgtctacatgggagagcactatcccctccgagacctcctctgcatcattctctccctgccgcactacgagatgctagtggagattaaacactttgcgctcgacattgccgccgagctcacccctttcataatcctagattcaggagatcccctctaccagatcttgctggcccaattgcactccactgaccgtggtactatcttgactgccctgcgagccgtcagtcgcatttcaatgcatctcgacgccacgaataaactgcagaatgttgagcctgcagtgcttcagaacatcatgaattggcttttgctgaatgatgaggagctgatggatgcttgtctggatttcctttaccaatacaccgctgtcgtggcaaatcttgaaactctgctcacggccgtcaacatggagcatgtcgtgcctcatctagtgagactcctggctcacggtgcgaagcggacgaaagaggaaagaattctagagccggagaagaagacgccatgctctgaagaagtctgtccattgcctctcgacctccatgagaagcttagcaacacagaccagcctcagagatgtttcaactggctgcagagcttgtttgaggaagacgcggactcgcacatcacccagatagcaatctggcaggcttaccaagggtccttcaatggaccctccggcggagttagaaatacgcttagtgcggcggattttatcagaaacgtcagccatgtgttcgccaacgctcgagcgcagatcatccgtggcccgggagaagtacaacgctttattatagagggtattcgtgcccgaactgctccgatcaactacgagacgaaggaagaatactccaagtgtcagtggcaggtagccaacccaccttttggcgccgccagacagtgtaatcagttcttcctcaccggtgagcagatgtggcgccacattgtcacatcacacttgaaggttgcctttaccgaggatggcaaactccgcaacacagacgttgtcatggcctgcgaatggctaaattgcatgaaatatcctacgcccacacccctccagctcgtagagctttgcaaccacatcaaggtccacataccgaagaaacggccggctggggcacaggaggcctacgaagcgatggttagaaaacaacgcaagacgttcatcacgccggccaagaccatgtcgatcacctgggagcaaaccatgacgacgcgcgacgagcgaaaccctaagcaggagcagcccgccggcatcccactgagtgccgtactggttcttcgcaatatcgcgcgcaatgtcgtcaagactgagtctgaggaggagctcctcaagagccacgagacaggtggcgagacaggcggctggaacgagagattgttccgtcctgtaatggctagactctttgaagtcttgacggagaataaggcaatggccccctacgtcacttcgctcttgcagctcatcgagcggcaagatgactaa

SEQ ID NO: 30535 - protein, 965 aa, Muscodor strobelii
  misc_feature: SGI Peptide ID NO. 570504
  misc_feature (17)..(133): Pfam Id: PF01388 Pfam Desc: ARID/BRIGHT DNA binding domain
  misc_feature (17)..(89): Pfam Id: PF01388 Pfam Desc: ARID/BRIGHT DNA binding domain
  misc_feature (7)..(959): NCBI GI: 39968801 Blast Desc: MGG_02493 [Magnaporthe grisea 70-15] gi|145013894|gb|EDJ98535.1| MGG_02493 [Magnaporthe grisea 70-15]
  misc_feature (10)..(963): NCBI GI: 116202625 Blast Desc: CHGG_09197 [Chaetomium globosum CBS 148.51] gi|88177715|gb|EAQ85183.1| CHGG_09197 [Chaetomium globosum CBS 148.51]
  misc_feature (6)..(965): NCBI GI: 256727690 Blast Desc: [Nectria haematococca mpVI 77-13-4]
  misc_feature (15)..(961): NCBI GI: 164426594 Blast Desc: NCU03892 [Neurospora crassa OR74A] gi|157071399|gb|EAA28295.2| conserved [Neurospora crassa OR74A]
  misc_feature (6)..(960): NCBI GI: 46135959 Blast Desc: FG09495.1 [Gibberella zeae PH-1]
  misc_feature (17)..(961): NCBI GI: 156060591 Blast Desc: SS1G_02435 [Sclerotinia sclerotiorum 1980] gi|154699842|gb|EDN99580.1| SS1G_02435 [Sclerotinia sclerotiorum 1980]
  misc_feature (15)..(965): NCBI GI: 261359419 Blast Desc: conserved [Verticillium albo-atrum VaMs.102]
  misc_feature (17)..(961): NCBI GI: 154314160 Blast Desc: BC1G_05023 [Botryotinia fuckeliana B05.10] gi|150849169|gb|EDN24362.1| BC1G_05023 [Botryotinia fuckeliana B05.10]
  misc_feature (10)..(963): NCBI GI: 171682388 Blast Desc: protein product [Podospora anserina] gi|170941153|emb|CAP66803.1| protein product [Podospora anserina]
  misc_feature (17)..(960): NCBI GI: 189190962 Blast Desc: RSC complex subunit Rsc9 [Pyrenophora tritici-repentis Pt-1C-BFP] gi|187973426|gb|EDU40925.1| RSC complex subunit Rsc9 [Pyrenophora tritici-repentis Pt-1C-BFP]
  misc_feature: Useful for introducing or modulating the production of volatile compounds
MPLARGPGGKEVMVHEIERTQEWTDFIAKLTAFHEKRGTQFDPEPRLPTMHGHVNVDLLRLYKTVIDHGGYDEVSKVQKAWSDLATELGMYYTDNKGMGQLAFQLKTFFYRFLGAYWIQDQYNREPPPKEILESQTAASKHGPLLTRSLDTFKLPAKPSAMDSPAPSERPVDTTSTPTSANRASGRLREAPPQRVPFQPETGPSRQSRQASSQHSTPSASNTTSQMSTHSSQPQQNHHHLSQQYNPNNPLHVVQAQQAALRGVSSSFTPGNPDTASRLSDPFEPRPPITVPLRPVNTPGNNPVEFAKRQRQLKLQNGGPRDAPAAARPVLPAAGFDGPNIYTRCLQALRSGIPAEQAFALNHLVKISYERGDKYKFESFVGLAEGLVEKALEIGNLFYDVNWQISYDGEETSDPNILEGVDGTRDILRRVSQLTRKPVLEYIQPAEFSDSLLRITEAVLTLRNMVMLHDNAVYMGEHYPLRDLLCIILSLPHYEMLVEIKHFALDIAAELTPFIILDSGDPLYQILLAQLHSTDRGTILTALRAVSRISMHLDATNKLQNVEPAVLQNIMNWLLLNDEELMDACLDFLYQYTAVVANLETLLTAVNMEHVVPHLVRLLAHGAKRTKEERILEPEKKTPCSEEVCPLPLDLHEKLSNTDQPQRCFNWLQSLFEEDADSHITQIAIWQAYQGSFNGPSGGVRNTLSAADFIRNVSHVFANARAQIIRGPGEVQRFIIEGIRARTAPINYETKEEYSKCQWQVANPPFGAARQCNQFFLTGEQMWRHIVTSHLKVAFTEDGKLRNTDVVMACEWLNCMKYPTPTPLQLVELCNHIKVHIPKKRPAGAQEAYEAMVRKQRKTFITPAKTMSITWEQTMTTRDERNPKQEQPAGIPLSAVLVLRNIARNVVKTESEEELLKSHETGGETGGWNERLFRPVMARLFEVLTENKAMAPYVTSLLQLIERQDD

SEQ ID NO: 30536 - DNA, 3962 bp, Muscodor strobelii
  misc_feature: SGI EST ID NO. CUFF.72262.0
  misc_feature: Variant of the nucleotide sequence at SEQ ID NO 30534
cctcaggcaaggtaggcgtgtacataggtacgtacctagaatagctaggggccgggcccactcgccaagaattcaattggctgcgaattgatttgcagctcgacacgactgcacctcgttttccgcgacccttgagaaggtccatgtccgccaacagcaagactactatggtagcttccacgagtcgtcggcgcacacctcacttcaccacaacaaagcagtacttaacattgttgtcgtcgcaagcacataactaacattgcgccctacaccttaacacgtgcacgcaagccgccgactgtccctggtctggcgttgctctggcgttcctgccatctcccctacttgtacttgcgctcgccgcgcgcgcacaatcgctacatctagtacagctgtctgcccaagtcgcccaagatgcctctcgctcgtgggccgggcggcaaagaggtcatggtccacgagatcgagcgcacgcaggaatggaccgacttcatcgcgaagctgacagccttccacgagaagcgcggcacccagttcgacccggagccgcgcctgcccaccatgcacggccacgtcaacgtcgacctcctgcgcctctacaagaccgtcatcgaccacggcggctacgacgaggtctccaaggtgcagaaggcctggtctgatcttgcgacagagctgggcatgtactacacagacaacaagggcatgggacagctcgcattccagctcaagaccttcttctaccgcttcctcggcgcctactggatccaggaccagtacaaccgcgaacctcccccgaaggagatcctcgagagccagactgcagctagtaaacacggcccgctgctcacgcgaagcctcgacaccttcaagctgcccgctaaaccctccgcgatggattcccccgcgccgagcgagcgacccgtcgacaccaccagcacgcccacctccgccaacagagcctccggtcgtctgcgagaggcgccgccccagcgagtccccttccagcccgagacgggccccagccgccagagcagacaggcctcttcccagcactcgaccccctctgccagcaacacgacatcccagatgtcgacccatagctcccagccgcagcagaaccaccaccatctctcccaacagtacaacccaaacaaccctctgcacgtggtccaggcccagcaggctgcccttcgcggtgtttctagctccttcacccccggaaaccctgacacggcctcgcgtctctctgatcccttcgagccccgtcctcccatcacagtgccccttcgccccgtcaacactcccggcaacaaccccgtcgagtttgccaagcgacagcgccagctcaagttgcagaacggtggccctagagatgcccctgctgcagcacgtccggtgctcccagctgcgggatttgatggtcccaatatatatacaagatgcctccaagctctccgatctggtatccctgccgaacaggcctttgctcttaatcacctcgtgaagatatcatatgaacgtggcgacaagtataagtttgagtcgttcgtggggcttgccgaaggcctcgttgagaaagctctcgagatcggtaacctcttctacgatgtgaactggcagatctcttatgacggcgaagagacgtcagacccgaacatcctagaaggggtggatggcactcgtgacatcttgcgccgcgtcagtcagctcacacgcaagcctgtgctggaatacatccagcccgcagaattctccgacagtcttctccgcatcactgaagcagtgctgaccctgagaaatatggtcatgctccatgataatgccgtctacatgggagagcactatcccctccgagacctcctctgcatcattctctccctgccgcactacgagatgctagtggagattaaacactttgcgctcgacattgccgccgagctcacccctttcataatcctagattcaggagatcccctctaccagatcttgctggcccaattgcactccactgaccgtggtactatcttgactgccctgcgagccgtcagtcgcatttcaatgcatctcgacgccacgaataaactgcagaatgttgagcctgcagtgcttcagaacatcatgaattggcttttgctgaatgatgaggagctgatggatgcttgtctggatttcctttaccaatacaccgctgtcgtggcaaatcttgaaactctgctcacggccgtcaacatggagcatgtcgtgcctcatctagtgagactcctggctcacggtgcgaagcggacgaaagaggaaagaattctagagccggagaagaagacgccatgctctgaagaagtctgtccattgcctctcgacctccatgagaagcttagcaacacagaccagcctcagagatgtttcaactggctgcagagcttgtttgaggaagacgcggactcgcacatcacccagatagcaatctggcaggcttaccaagggtccttcaatggaccctccggcggagttagaaatacgcttagtgcggcggattttatcagaaacgtcagccatgtgttcgccaacgctcgagcgcagatcatccgtggcccgggagaagtacaacgctttattatagagggtattcgtgcccgaactgctccgatcaactacgagacgaaggaagaatactccaagtgtcagtggcaggtagccaacccaccttttggcgccgccagacagtgtaatcagttcttcctcaccggtgagcagatgtggcgccacattgtcacatcacacttgaaggttgcctttaccgaggatggcaaactccgcaacacagacgttgtcatggcctgcgaatggctaaattgcatgaaatatcctacgcccacacccctccagctcgtagagctttgcaaccacatcaaggtccacataccgaagaaacggccggctggggcacaggaggcctacgaagcgatggttagaaaacaacgcaagacgttcatcacgccggccaagaccatgtcgatcacctgggagcaaaccatgacgacgcgcgacgagcgaaaccctaagcaggagcagcccgccggcatcccactgagtgccgtactggttcttcgcaatatcgcgcgcaatgtcgtcaagactgagtctgaggaggagctcctcaagagccacgagacaggtggcgagacaggcggctggaacgagagattgttccgtcctgtaatggctagactctttgaagtcttgacggagaataaggcaatggccccctacgtcacttcgctcttgcagctcatcgagcggcaagatgactaaatgcattgcttgcactctacgtgctacacgactgctaaaagcaaagaaggtggcgccgatggtcctcactaattgtcgaggcagaaaaggagtttttcatcgtgtttgcccttgttcgatccgcaaaccgggcaaggctatagagagtttcgttttcgtttcttcccggtgcgcacgaggttggatgagagaaagggagttttgctttttttgatgcaccaatctgtcttcttcctgcagagaacgaaggcagatgtggtgtatgttcaatgtaatcaatcttgtaggaatacccaggatggcgttttcactcggggaaagcagggcaaaaaaggtgttttagggtttcggagggacgaggggaactgtattgtgtgagttatccacctgaccatgagagaaatggggggatacggataaggtgtgcggtgcctacatgtacctacctgcgtctttgcaaagaggtaataagacgaggatgggggccattttgcgtgccagcacaggttctatacaaaaggtgttaagtaggtagataggtagatatctacctacgtttccaccataccttaatcacgttgtggcgtatcacattgtactatccatattttcttggtatgacagtgatttgatttcatgattgattattc

SEQ ID NO: 30537 - DNA, 3867 bp, Muscodor strobelii
  misc_feature: SGI cDNA ID NO. 570505
  misc_feature: Reduced expression when VOC is produced
  misc_feature: Encodes the peptide sequence at SEQ ID NO 30538
atggcctccgaagaatcctctgccgcagctcggctgctccagaagcacaaccagaacccccttcaggccactgtcgaagacgtccccgacgacgagattaagcccacccccgcgcctgctgctgacgctgacgcttccaacgactcgacctgggcacccaccatgtctgccaaggctgccgggaagcaggctgctcaggcctcgtctctcgacacccaggaccacgacgctttccccgagctcggcccttccaagcctgccgcctccaaggccaacttcgccccgatctgggctggcggcaaggtcgcgaacggcaccaacggcacctcatggtccgccaacggcactccgcgaacctcgactcctacctcggggatcgccacgcccaccggccaggcaccgtccatggccattcccggccgcaatgtcgagaccatcgtcgtgcctcctgcctcgctcctgccacgtacccagctgaagcgccccattcctgacattctcaaggacatcaatcgcaagtcacgggctcagatcaccatgtccactgctcccaacggtcatctcaggttcgaagccactgggccccaagacaaggcccagcaggcactgcgcgacctggtatcgcagattggtcgcaaggaaaccgtgaccctttcgatcccccactcatcccgggctcacatcatcggcaagcaaggtgccaccatcaaggctatccaggagaaatccggcgccaaggtgcaaatgcccaagatggacgccaccacggctaacctcgacgacgatgacgacaccaccatcgacttgcagatcgagggcaacactcacaccgccgccatggcgcgccagatgatcgagaagattattggggagcgctcagccaacacgagcagcaggatgagaactgtccccgccgagttttaccccttcattgccggtaaagggaacgatctggcgcaagccctggagcgggagcatggcatccagcttcgtgtgccacctcacctgccctggtcaaccgatgtgccgcggatgcctgcgtccggagagagacccaccttcgcgccggcttccgacgacaaccacattcagctggccggtgaccgactcgctgtccaggctgccaaagccgctatcgagcgccaagtgctggaactccagaaccagcttcagatggaccagatcgatattcgccagggcgcccatcagttcatcattggtgatcgcggtattccctcggaagacttctttgctcagaccaactgtgtggtgattcttccgagcgaaaccggtactgacacggttaccgtcattggcagagccgatgatctgagcaccggcttggacaaggcgatggagctggccacgacggtccaccagtctgtgttcgatgccgcaagacttcaccaacatgcccctggcggcggctctgtctacacccgtgacttggctcgctacctccgtcagagaaaggagttggagcgaatcgagaagttgtacagcatcaacatcaacaccccatacactaagggtgtcaacaatctgtgggagctgtatgcccgcgaaggaaagaatgctctgaaggctcagaaagagatgagctcgatagtcagcgggcaccccccctcgcgcctggtcaccatccctgtggatcctttcttccattcttacttgcgaagcaccgttcgaccccaggtgcaggagtcttacggcgtccacgttgttgttcctgaggctgccgaagctgacacgcctctgttgttggtgtatgaagggcctgagattggagagtcataccagattccccagaaggctcctagcgctgctgagcttcgcactttccagcagggccttgctgaggcaagacaacacattctagatctgatcaacaaacaagagcagatcgagtctgctactctcgatgtgcccaacgtgttccaagaaagattgcgccggtacatcaaaaaagagcaagacatgactgcccgtgctgctggcgacattccggtccggatgagtgttaagggcacgactctgaccatgcgcggaccagctacgagcgtcaagtctcttcacgagaaggctagcgcctttttggcgcaggagaaggaagacgagaaggagcgcggtcacatcacgaagttcgactttccacaacaacaggccaaccatctcattggtaagggtggaagccatatcaacgaactacgcgaaaaattcaacgtcgacatccaggttcaaaatggcgaggtcgagctcaagggccccaaggcaaaggccgagaaagccaagtcccatattcttgcactttcccgacagtgggctgatgaagtcaccttcacgctcaagatggagccccaattccacagagagctcatcggcgctgccggaagcaacatcataagaatggagaagcgctatcagggagttcacatcaatttccccaagtcagccaaacccgctcgagatgacgaatcagttgcggacgccagtgaggccgggaagcctcgacgtcagcaggcagccgatgaggtcgtcatccggggtcccaaaaagaacgccgaagcaactcgtgatgaactcttcaagtactattcctaccttaaggagactggcttcaccgacactatttccgtgcagcagaagcagctcccatccttgattggttctggcggcgctgctatggaagacctccgccaacaaactggggccaagatcgacgttcccaacgaccgaaaccaggcacctgatgccatggttgagctgaccatcaagggcaccaaggcccaagttgcagcggctaagaagctcttggaggagaagagggccgtgtttgaggataccatcacgaagaccatggacgtagacagaaaatggcacaagactttaatcgggcccggcggttcaactctgcgcgatcttgtcatcaaggctggtggacctgaaaacccgcgtcttcaggctcgcaccattcaattccccaaatcagatgcagatgacactggtatcaagattgagggacggcaggaagttgtgaacaagatcgttgcagccatcgaggctctagtgtccgaacgtgagagccaggtgaccgaggtgctcgatgtaccaatcgaaaagcatagaactctcattggccgtggtggtgaagccaagcggcaactagagtctcagttcaaggtgtccattgacattcctcgtcaaggaagcgggtcgacggaagtgaagattgttggtctgcctgcagatgtcgagaatgccaagcagcacattgcttcctcaactaaagagacgcccggcgaaaccatgcagattccgagaaagtaccatcatgctatctcggacaacggccagttgttccgcaagctccggaatgatcacaaagttacggttgaccatgcaggccagaacactccacccaagcctaaagctgccaacactcgaggcaacaccggcgctctgcctctgatcaccgatgacgcagaaactactgccgatgcccactcctggaccattgtagacgttggatcatctgaggagggcgatattccttgggtcctgcggggcaaccaggacaacatcgaaagggccaagcgaaccattgccgctgcactcgagcaggctcagaagaataacagcactggctatctcgttctgcccgacccgtccacttaccgattcatcattggtcctgggggctccaaggtcagcgccatccgtaaggagagcggatgcagaatcaacgtgccacgcaaccaggacaaggaagaggccattgagattctgggcaccaaagagggctgcgagacagccaaggatctcatcctcgaggcggtacgtgatgggcagtcaggacgccgggactag

SEQ ID NO: 30538 - protein, 1288 aa, Muscodor strobelii
  misc_feature: SGI Peptide ID NO. 570505
  misc_feature (1214)..(1275): Pfam Id: PF00013 Pfam Desc: KH domain
  misc_feature (215)..(285): Pfam Id: PF00013 Pfam Desc: KH domain
  misc_feature (1031)..(1091): Pfam Id: PF00013 Pfam Desc: KH domain
  misc_feature (712)..(767): Pfam Id: PF00013 Pfam Desc: KH domain
  misc_feature (874)..(938): Pfam Id: PF00013 Pfam Desc: KH domain
  misc_feature (779)..(861): Pfam Id: PF00013 Pfam Desc: KH domain
  misc_feature (298)..(379): Pfam Id: PF00013 Pfam Desc: KH domain
  misc_feature (7)..(1285): NCBI GI: 226285441 Blast Desc: conserved [Paracoccidioides brasiliensis Pb01]
  misc_feature (69)..(1285): NCBI GI: 238842403 Blast Desc: lysine-rich arabinogalactan protein 19 [Microsporum canis CBS 113480]
  misc_feature (7)..(1285): NCBI GI: 226289530 Blast Desc: conserved [Paracoccidioides brasiliensis Pb18]
  misc_feature (136)..(1279): NCBI GI: 225561269 Blast Desc: conserved [Ajellomyces capsulatus G186AR]
  misc_feature (1)..(1149): NCBI GI: 145243838 Blast Desc: An11g04360 [Aspergillus niger] gi|134079113|emb|CAK40668.1| protein product [Aspergillus niger]
  misc_feature (1)..(1286): NCBI GI: 70720927 Blast Desc: [Epichloe festucae]
  misc_feature (3)..(1287): NCBI GI: 85085640 Blast Desc: NCU03897 [Neurospora crassa OR74A] gi|7899383|emb|CAB91673.1| related to SCP160 protein [Neurospora crassa] gi|28918629|gb|EAA28300.1| conserved [Neurospora crassa
  misc_feature (5)..(1288): NCBI GI: 256727687 Blast Desc: [Nectria haematococca mpVI 77-13-4]
  misc_feature (1)..(1288): NCBI GI: 46135951 Blast Desc: FG09491.1 [Gibberella zeae PH-1]
  misc_feature (4)..(1285): NCBI GI: 39977187 Blast Desc: MGG_06496 [Magnaporthe grisea 70-15] gi|145016076|gb|EDK00566.1| MGG_06496 [Magnaporthe grisea 70-15]
  misc_feature: Useful for introducing or modulating the production of volatile compounds
MASEESSAAARLLQKHNQNPLQATVEDVPDDEIKPTPAPAADADASNDSTWAPTMSAKAAGKQAAQASSLDTQDHDAFPELGPSKPAASKANFAPIWAGGKVANGTNGTSWSANGTPRTSTPTSGIATPTGQAPSMAIPGRNVETIVVPPASLLPRTQLKRPIPDILKDINRKSRAQITMSTAPNGHLRFEATGPQDKAQQALRDLVSQIGRKETVTLSIPHSSRAHIIGKQGATIKAIQEKSGAKVQMPKMDATTANLDDDDDTTIDLQIEGNTHTAAMARQMIEKIIGERSANTSSRMRTVPAEFYPFIAGKGNDLAQALEREHGIQLRVPPHLPWSTDVPRMPASGERPTFAPASDDNHIQLAGDRLAVQAAKAAIERQVLELQNQLQMDQIDIRQGAHQFIIGDRGIPSEDFFAQTNCVVILPSETGTDTVTVIGRADDLSTGLDKAMELATTVHQSVFDAARLHQHAPGGGSVYTRDLARYLRQRKELERIEKLYSININTPYTKGVNNLWELYAREGKNALKAQKEMSSIVSGHPPSRLVTIPVDPFFHSYLRSTVRPQVQESYGVHVVVPEAAEADTPLLLVYEGPEIGESYQIPQKAPSAAELRTFQQGLAEARQHILDLINKQEQIESATLDVPNVFQERLRRYIKKEQDMTARAAGDIPVRMSVKGTTLTMRGPATSVKSLHEKASAFLAQEKEDEKERGHITKFDFPQQQANHLIGKGGSHINELREKFNVDIQVQNGEVELKGPKAKAEKAKSHILALSRQWADEVTFTLKMEPQFHRELIGAAGSNIIRMEKRYQGVHINFPKSAKPARDDESVADASEAGKPRRQQAADEVVIRGPKKNAEATRDELFKYYSYLKETGFTDTISVQQKQLPSLIGSGGAAMEDLRQQTGAKIDVPNDRNQAPDAMVELTIKGTKAQVAAAKKLLEEKRAVFEDTITKTMDVDRKWHKTLIGPGGSTLRDLVIKAGGPENPRLQARTIQFPKSDADDTGIKIEGRQEVVNKIVAAIEALVSERESQVTEVLDVPIEKHRTLIGRGGEAKRQLESQFKVSIDIPRQGSGSTEVKIVGLPADVENAKQHIASSTKETPGETMQIPRKYHHAISDNGQLFRKLRNDHKVTVDHAGQNTPPKPKAANTRGNTGALPLITDDAETTADAHSWTIVDVGSSEEGDIPWVLRGNQDNIERAKRTIAAALEQAQKNNSTGYLVLPDPSTYRFIIGPGGSKVSAIRKESGCRINVPRNQDKEEAIEILGTKEGCETAKDLILEAVRDGQSGRRD

SEQ ID NO: 30539 - DNA, 5112 bp, Muscodor strobelii
  misc_feature: SGI EST ID NO. CUFF.72838.0
  misc_feature: Variant of the nucleotide sequence at SEQ ID NO 30537
cggggaactgcggggcaggggatttggagcttaaggccaaccaattttcttaggttggaacctttgactggggcagtggaagctctatcgagatttgacaaacttcgtgagagaaccacctcgactccatatcatccaactttctgtcaatgtggtcaagttgatcgcactgacgactccttgatcagttccatcgaatatctctgatggtctaggccattgatgactttcagagtaatttaccgccattcagaaataagtacctaagggagttgcgttagggatagcatcaagggttaaaaacggcctcgacggccccaacggcacctgtcagagtggagctcgggtgggacttggggttctggaccagctttgccgacggagcgcagctgcagctaggatggttctggtagaaagtagaaggcacgttactatcatattattattattgacaattggcaactggccggaatttggaaatagtctctcgtcgaccttgacttcatcccgactcctgacgtccacccgtctactcgtccatccaccacctgcctctcaccatcgagtctcgctcgtcgacctcgttcactcgtctcaacacctcccctggtgcacaccccgtcccttctccggatcgtcaagcagcagcacgcccaagagcatcatgttctagcttggtctcgcagcttcatcgcatctatctggcatccctatccctatcggtattatctgtcacgtcgaactgtccacctgtaacccccgttcttgctcaacttggctgttgagtgaagtcaattggaatctgataaccttgaccattgaatctgactgttgatcccatcatctttcgcaacaatggcctccgaagaatcctctgccgcagctcggctgctccagaagcacaaccagaacccccttcaggccactgtcgaagacgtccccgacgacgagattaagcccacccccgcgcctgctgctgacgctgacgcttccaacgactcgacctgggcacccaccatgtctgccaaggctgccgggaagcaggctgctcaggcctcgtctctcgacacccaggaccacgacgctttccccgagctcggcccttccaagcctgccgcctccaaggccaacttcgccccgatctgggctggcggcaaggtcgcgaacggcaccaacggcacctcatggtccgccaacggcactccgcgaacctcgactcctacctcggggatcgccacgcccaccggccaggcaccgtccatggccattcccggccgcaatgtcgagaccatcgtcgtgcctcctgcctcgctcctgccacgtacccagctgaagcgccccattcctgacattctcaaggacatcaatcgcaagtcacgggctcagatcaccatgtccactgctcccaacggtcatctcaggttcgaagccactgggccccaagacaaggcccagcaggcactgcgcgacctggtatcgcagattggtcgcaaggaaaccgtgaccctttcgatcccccactcatcccgggctcacatcatcggcaagcaaggtgccaccatcaaggctatccaggagaaatccggcgccaaggtgcaaatgcccaagatggacgccaccacggctaacctcgacgacgatgacgacaccaccatcgacttgcagatcgagggcaacactcacaccgccgccatggcgcgccagatgatcgagaagattattggggagcgctcagccaacacgagcagcaggatgagaactgtccccgccgagttttaccccttcattgccggtaaagggaacgatctggcgcaagccctggagcgggagcatggcatccagcttcgtgtgccacctcacctgccctggtcaaccgatgtgccgcggatgcctgcgtccggagagagacccaccttcgcgccggcttccgacgacaaccacattcagctggccggtgaccgactcgctgtccaggctgccaaagccgctatcgagcgccaagtgctggaactccagaaccagcttcagatggaccagatcgatattcgccagggcgcccatcagttcatcattggtgatcgcggtattccctcggaagacttctttgctcagaccaactgtgtggtgattcttccgagcgaaaccggtactgacacggttaccgtcattggcagagccgatgatctgagcaccggcttggacaaggcgatggagctggccacgacggtccaccagtctgtgttcgatgccgcaagacttcaccaacatgcccctggcggcggctctgtctacacccgtgacttggctcgctacctccgtcagagaaaggagttggagcgaatcgagaagttgtacagcatcaacatcaacaccccatacactaagggtgtcaacaatctgtgggagctgtatgcccgcgaaggaaagaatgctctgaaggctcagaaagagatgagctcgatagtcagcgggcaccccccctcgcgcctggtcaccatccctgtggatcctttcttccattcttacttgcgaagcaccgttcgaccccaggtgcaggagtcttacggcgtccacgttgttgttcctgaggctgccgaagctgacacgcctctgttgttggtgtatgaagggcctgagattggagagtcataccagattccccagaaggctcctagcgctgctgagcttcgcactttccagcagggccttgctgaggcaagacaacacattctagatctgatcaacaaacaagagcagatcgagtctgctactctcgatgtgcccaacgtgttccaagaaagattgcgccggtacatcaaaaaagagcaagacatgactgcccgtgctgctggcgacattccggtccggatgagtgttaagggcacgactctgaccatgcgcggaccagctacgagcgtcaagtctcttcacgagaaggctagcgcctttttggcgcaggagaaggaagacgagaaggagcgcggtcacatcacgaagttcgactttccacaacaacaggccaaccatctcattggtaagggtggaagccatatcaacgaactacgcgaaaaattcaacgtcgacatccaggttcaaaatggcgaggtcgagctcaagggccccaaggcaaaggccgagaaagccaagtcccatattcttgcactttcccgacagtgggctgatgaagtcaccttcacgctcaagatggagccccaattccacagagagctcatcggcgctgccggaagcaacatcataagaatggagaagcgctatcagggagttcacatcaatttccccaagtcagccaaacccgctcgagatgacgaatcagttgcggacgccagtgaggccgggaagcctcgacgtcagcaggcagccgatgaggtcgtcatccggggtcccaaaaagaacgccgaagcaactcgtgatgaactcttcaagtactattcctaccttaaggagactggcttcaccgacactatttccgtgcagcagaagcagctcccatccttgattggttctggcggcgctgctatggaagacctccgccaacaaactggggccaagatcgacgttcccaacgaccgaaaccaggcacctgatgccatggttgagctgaccatcaagggcaccaaggcccaagttgcagcggctaagaagctcttggaggagaagagggccgtgtttgaggataccatcacgaagaccatggacgtagacagaaaatggcacaagactttaatcgggcccggcggttcaactctgcgcgatcttgtcatcaaggctggtggacctgaaaacccgcgtcttcaggctcgcaccattcaattccccaaatcagatgcagatgacactggtatcaagattgagggacggcaggaagttgtgaacaagatcgttgcagccatcgaggctctagtgtccgaacgtgagagccaggtgaccgaggtgctcgatgtaccaatcgaaaagcatagaactctcattggccgtggtggtgaagccaagcggcaactagagtctcagttcaaggtgtccattgacattcctcgtcaaggaagcgggtcgacggaagtgaagattgttggtctgcctgcagatgtcgagaatgccaagcagcacattgcttcctcaactaaagagacgcccggcgaaaccatgcagattccgagaaagtaccatcatgctatctcggacaacggccagttgttccgcaagctccggaatgatcacaaagttacggttgaccatgcaggccagaacactccacccaagcctaaagctgccaacactcgaggcaacaccggcgctctgcctctgatcaccgatgacgcagaaactactgccgatgcccactcctggaccattgtagacgttggatcatctgaggagggcgatattccttgggtcctgcggggcaaccaggacaacatcgaaagggccaagcgaaccattgccgctgcactcgagcaggctcagaagaataacagcactggctatctcgttctgcccgacccgtccacttaccgattcatcattggtcctgggggctccaaggtcagcgccatccgtaaggagagcggatgcagaatcaacgtgccacgcaaccaggacaaggaagaggccattgagattctgggcaccaaagagggctgcgagacagccaaggatctcatcctcgaggcggtacgtgatgggcagtcaggacgccgggactagaagccccgctcctctcttgaacattcctctatttggtgaattcgcccgaagccgatgatgaggttcttccttttagaagagcataaagttgtatgatcagatccttttctacctcggctgggtgggtttggacgggtatggaggactgtaatggggttggggaagctgcggtccattaaccaaaaatcaggagagatacggctaggttctgaaaaaaaatgcatatcatatatcctacctacctacaggccgtatctagtattaccaactacactgggtggttacctaaaaataaaatttactgatatccatgtaaattccatgagcatggtttttatagtcacttggagcatcgccgactcaaagtgtgtattcttaactgtattctta

SEQ ID NO: 30540 - DNA, 2826 bp, Muscodor strobelii
  misc_feature: SGI cDNA ID NO. 570506
  misc_feature: Reduced expression when VOC is produced
  misc_feature: Encodes the peptide sequence at SEQ ID NO 30541
atggatctggacctggacaggaatcgcaccaacacggccgagccctcgattgcgtcgtcgaccacgtcctcgcagcgccgccggctcaccaagagaccgccgatgaccgcgcagctctcgcaggtgtcgccgcaagtgtcgcagttccagcacgcgcacagctactcgaccacggcggacgggcgctttgacgcccagtcgctggacagcaaacggagctccacgagcctgaggcgagctcccagcgctccactccagcaccggtcgtcccacgcgtcaaacaactcatcgccccgtcatctgccatcctcgtcgtccaacaacagcaactttacccgcacttctcccgccctcctgcccggcgagtttctgccgccgaccagctacaccacctcctacgccgcacacgcatcacccactaattacgctgcacatcccgcacatcctgcacacgccgcactcactcccgtcggcgccgcaggttcaggcactggcgctggcgctgctgctgccggcattggctctggctcctccatcccctcgtcgcccgcttatctgaacaatcagaactacagttacaactaccaccagaccagcgacctcccgctccgtttgtccggcccgacactgccgcccctcaacactaagaatcccgaggacttcgtcggcgcccccttcaacccggagaccctactcagccatctcgacaaggccgccacgcaatcgcccgctgcttaccaggccgcccgcgacatccgcccccagcggcccccacagcacggccacgagcccgccgccgctggccgtatcgtgagcccgcagctccgccattccctcagcttttctgccggcacgcccataatgtcggagaagtcccccattcagcgcagcgatggccccgtggtcacgacgaagcgctactcggatgagtccaaagagaacaccagggctggcgtactacgcaagaagtctggcttctcaggcctcatgagcactctagtcggatcacagaagaagcccgtcatctcagcacccgaaaacccagtccatgtcacgcacgtcggctacgacagtagcacgggtcaattcacgggcctaccgaaagaatggcagcggctcataaacgagagcggcatccccgagaatgcccaacgggagaacccccagatgattgccgacatcgtcacgttctataaggagacgacggagaagccacacgaggatcaggttcttgagaagttccacgacgtgagggctcgcgtcccctcgggaggcatggccacatccccaggcacttattcgcccaactatgctggcaccttcgagaacccccgcgcacccccgcccgttcctctcccggggaaggggcccgcgctgcacacggccaaagaccacccgaacctgcagcccagccgcccggccccgaaaccaccggtctccatgcagtcccgcgtgcagcagccgcagtctccctacccggccaaagactctggcatcggcatgtcgcagcccggcgacgacctgcccgccgtcgcctacactccgcccgtcaaggacattggctctcccatgctgcccgaagaacaccgatcgaggtccaactcgcgggtcaacggatcctcgccctactctccgcaaatccctcccagtcaaccctctccggcgatgcaagcagcttaccagcagcaactgatgcagcaacagcaggaacaggccatgtcacaggcccaggctgccatgaagggacaactcggtagatcacagagcaacaggcaaccaccagcgcaacccatgccccaaagtacacagcaacaacacccagtcggtcgccctcctgaggccaatggcaacggtgttggtccaaggacaggcccagcagcagctcaggcccgcccccgaaacaggcaacgacagagcgccagtatcgacgtcgcggccgccctgaagcgaatctgctccgagggtgacccacgagagatctacagagggttcactaagattggtcagggtgcgtcaggcggtgtgtacaccggtcacgagagaggctcaaatcgcctggtagccatcaagcagatgaatttggaacagcaacccaagaaagacctcatcattaacgagatattggtcatgaaggagagcgtacaccccaacattgtcaacttcatcgacagctatctctgtggcggcgagctatgggtcatcatggaatacatggagggcggcagtcttacggacgtcgttaccttcaatatcatgactgaaggtcagattgcatccgtgtgcagggagactctcaaaggtctccagcacttgcattccaagggtgttatccaccgagatatcaagtccgacaacatcctactatcgttggagggtagcatcaagctgaccgatttcggtttctgtgcccaaatcaacgaagcacacaataagcgaacgacaatggtcggcacaccctactggatggcaccagaggtagttacgaggaaggagtacggacgcaaggtcgatatctggtcactcggcatcatggccatcgagatgattgagggagaaccaccctacctgacggaatctccacttcgcgctctatggctcatcgctacgaacggtacgccacagatcaaggacgagcagaacctatctgccgtatttcgagacttcctctacttcgctctgaaagtagatccagagaagagagcaagcgcacacgacctcctccggcatgatttcatgaaaatgtgcgtcgatctagggtcattatcgccgctagtccgagctgctagggaagctcgacagcaggagaaagctcggaaaggccaataa

SEQ ID NO: 30541 - protein, 941 aa, Muscodor strobelii
  misc_feature: SGI Peptide ID NO. 570506
  misc_feature (341)..(399): Pfam Id: PF00786 Pfam Desc: P21-Rho-binding domain
  misc_feature (661)..(912): Pfam Id: PF00069 Pfam Desc: Protein kinase domain
  misc_feature (660)..(912): Pfam Id: PF07714 Pfam Desc: Protein tyrosine kinase
  misc_feature (666)..(855): Pfam Id: PF07714 Pfam Desc: Protein tyrosine kinase
  misc_feature (204)..(941): NCBI GI: 256727111 Blast Desc: NECHADRAFT_33582 [Nectria haematococca mpVI 77-13-4]
  misc_feature (26)..(908): NCBI GI: 148910828 Blast Desc: ste20-like protein [Fusarium oxysporum f. sp. phaseoli]
  misc_feature (213)..(941): NCBI GI: 33089285 Blast Desc: PAK kinase [Magnaporthe grisea]
  misc_feature (213)..(941): NCBI GI: 148887437 Blast Desc: PAK kinase [Magnaporthe grisea]
  misc_feature (26)..(941): NCBI GI: 85085626 Blast Desc: NCU03894 [Neurospora crassa OR74A] gi|74696222|sp|Q7RZD3.1|STE20_NEUCR RecName: Full=Serine/threonine-protein kinase ste-20 NCU03894 [Neurospora
  misc_feature (212)..(941): NCBI GI: 171682392 Blast Desc: protein product [Podospora anserina] gi|170941155|emb|CAP66805.1| protein product [Podospora anserina]
  misc_feature (219)..(908): NCBI GI: 261359417 Blast Desc: serine/threonine-protein kinase MST20 [Verticillium albo-atrum VaMs.102]
  misc_feature (288)..(939): NCBI GI: 154314114 Blast Desc: conserved [Botryotinia fuckeliana B05.10] gi|150849146|gb|EDN24339.1| conserved [Botryotinia fuckeliana B05.10]
  misc_feature (334)..(940): NCBI GI: 156060619 Blast Desc: conserved [Sclerotinia sclerotiorum 1980] gi|154699856|gb|EDN99594.1| conserved [Sclerotinia sclerotiorum 1980]
  misc_feature (213)..(940): NCBI GI: 240105595 Blast Desc: PAK kinase, [Coccidioides posadasii C735 delta SOWgp]
  misc_feature (275)..(941): SWISSPROT Homolog: EC 2.7.11.1 Non-specific serine/threonine protein kinase
  misc_feature: Useful for introducing or modulating the production of volatile compounds
MDLDLDRNRTNTAEPSIASSTTSSQRRRLTKRPPMTAQLSQVSPQVSQFQHAHSYSTTADGRFDAQSLDSKRSSTSLRRAPSAPLQHRSSHASNNSSPRHLPSSSSNNSNFTRTSPALLPGEFLPPTSYTTSYAAHASPTNYAAHPAHPAHAALTPVGAAGSGTGAGAAAAGIGSGSSIPSSPAYLNNQNYSYNYHQTSDLPLRLSGPTLPPLNTKNPEDFVGAPFNPETLLSHLDKAATQSPAAYQAARDIRPQRPPQHGHEPAAAGRIVSPQLRHSLSFSAGTPIMSEKSPIQRSDGPVVTTKRYSDESKENTRAGVLRKKSGFSGLMSTLVGSQKKPVISAPENPVHVTHVGYDSSTGQFTGLPKEWQRLINESGIPENAQRENPQMIADIVTFYKETTEKPHEDQVLEKFHDVRARVPSGGMATSPGTYSPNYAGTFENPRAPPPVPLPGKGPALHTAKDHPNLQPSRPAPKPPVSMQSRVQQPQSPYPAKDSGIGMSQPGDDLPAVAYTPPVKDIGSPMLPEEHRSRSNSRVNGSSPYSPQIPPSQPSPAMQAAYQQQLMQQQQEQAMSQAQAAMKGQLGRSQSNRQPPAQPMPQSTQQQHPVGRPPEANGNGVGPRTGPAAAQARPRNRQRQSASIDVAAALKRICSEGDPREIYRGFTKIGQGASGGVYTGHERGSNRLVAIKQMNLEQQPKKDLIINEILVMKESVHPNIVNFIDSYLCGGELWVIMEYMEGGSLTDVVTFNIMTEGQIASVCRETLKGLQHLHSKGVIHRDIKSDNILLSLEGSIKLTDFGFCAQINEAHNKRTTMVGTPYWMAPEVVTRKEYGRKVDIWSLGIMAIEMIEGEPPYLTESPLRALWLIATNGTPQIKDEQNLSAVFRDFLYFALKVDPEKRASAHDLLRHDFMKMCVDLGSLSPLVRAAREARQQEKARKGQ

SEQ ID NO: 30542 - DNA, 3958 bp, Muscodor strobelii
  misc_feature: SGI EST ID NO. CUFF.72480.1
  misc_feature: Variant of the nucleotide sequence at SEQ ID NO 30540
gattgaatttttgggtgaggacgagacgaatgatagcgtgacttatcgtgccgactcgtacacacctgctaacttacgaagtggcctctaagtctgttctacatgtgcaccgcttccgctgccgctgctaccgttactgcaactctcctgctgccgtactgacatgaccttacatgagctggctgacctgactcttgacttcgtgcctcccgcatacagcatacagcatacggcgttgtcgtgagagtgccccccgtggtcagtcgcgggacatattcagttgctcgctcctggcccgttcccctcatcccctcggtactgctgctgtcctctccccgccttttgtggcagcggataatttacctgcacacctggctgcggtatacatctactagtacatccccccgaggtagtcgcggcactatcatggatctggacctggacaggaatcgcaccaacacggccgagccctcgattgcgtcgtcgaccacgtcctcgcagcgccgccggctcaccaagagaccgccgatgaccgcgcagctctcgcaggtgtcgccgcaagtgtcgcagttccagcacgcgcacagctactcgaccacggcggacgggcgctttgacgcccagtcgctggacagcaaacggagctccacgagcctgaggcgagctcccagcgctccactccagcaccggtcgtcccacgcgtcaaacaactcatcgccccgtcatctgccatcctcgtcgtccaacaacagcaactttacccgcacttctcccgccctcctgcccggcgagtttctgccgccgaccagctacaccacctcctacgccgcacacgcatcacccactaattacgctgcacatcccgcacatcctgcacacgccgcactcactcccgtcggcgccgcaggttcaggcactggcgctggcgctgctgctgccggcattggctctggctcctccatcccctcgtcgcccgcttatctgaacaatcagaactacagttacaactaccaccagaccagcgacctcccgctccgtttgtccggcccgacactgccgcccctcaacactaagaatcccgaggacttcgtcggcgcccccttcaacccggagaccctactcagccatctcgacaaggccgccacgcaatcgcccgctgcttaccaggccgcccgcgacatccgcccccagcggcccccacagcacggccacgagcccgccgccgctggccgtatcgtgagcccgcagctccgccattccctcagcttttctgccggcacgcccataatgtcggagaagtcccccattcagcgcagcgatggccccgtggtcacgacgaagcgctactcggatgagtccaaagagaacaccagggctggcgtactacgcaagaagtctggcttctcaggcctcatgagcactctagtcggatcacagaagaagcccgtcatctcagcacccgaaaacccagtccatgtcacgcacgtcggctacgacagtagcacgggtcaattcacgggcctaccgaaagaatggcagcggctcataaacgagagcggcatccccgagaatgcccaacgggagaacccccagatgattgccgacatcgtcacgttctataaggagacgacggagaagccacacgaggatcaggttcttgagaagttccacgacgtgagggctcgcgtcccctcgggaggcatggccacatccccaggcacttattcgcccaactatgctggtatgtcacctgtaatcagtccaccagcaagtccgagatttccaatcgtgaataatgaaggcaccttcgagaacccccgcgcacccccgcccgttcctctcccggggaaggggcccgcgctgcacacggccaaagaccacccgaacctgcagcccagccgcccggccccgaaaccaccggtctccatgcagtcccgcgtgcagcagccgcagtctccctacccggccaaagactctggcatcggcatgtcgcagcccggcgacgacctgcccgccgtcgcctacactccgcccgtcaaggacattggctctcccatgctgcccgaagaacaccgatcgaggtccaactcgcgggtcaacggatcctcgccctactctccgcaaatccctcccagtcaaccctctccggcgatgcaagcagcttaccagcagcaactgatgcagcaacagcaggaacaggccatgtcacaggcccaggctgccatgaagggacaactcggtagatcacagagcaacaggcaaccaccagcgcaacccatgccccaaagtacacagcaacaacacccagtcggtcgccctcctgaggccaatggcaacggtgttggtccaaggacaggcccagcagcagctcaggcccgcccccgaaacaggcaacgacagagcgccagtatcgacgtcgcggccgccctgaagcgaatctgctccgagggtgacccacgagagatctacagagggttcactaagattggtcagggtgcgtcaggcggtgtgtacaccggtcacgagagaggctcaaatcgcctggtagccatcaagcagatgaatttggaacagcaacccaagaaagacctcatcattaacgagatattggtcatgaaggagagcgtacaccccaacattgtcaacttcatcgacagctatctctgtggcggcgagctatgggtcatcatggaatacatggagggcggcagtcttacggacgtcgttaccttcaatatcatgactgaaggtcagattgcatccgtgtgcagggagactctcaaaggtctccagcacttgcattccaagggtgttatccaccgagatatcaagtccgacaacatcctactatcgttggagggtagcatcaagctgaccgatttcggtttctgtgcccaaatcaacgaagcacacaataagcgaacgacaatggtcggcacaccctactggatggcaccagaggtagttacgaggaaggagtacggacgcaaggtcgatatctggtcactcggcatcatggccatcgagatgattgagggagaaccaccctacctgacggaatctccacttcgcgctctatggctcatcgctacgaacggtacgccacagatcaaggacgagcagaacctatctgccgtatttcgagacttcctctacttcgctctgaaagtagatccagagaagagagcaagcgcacacgacctcctccggcatgatttcatgaaaatgtgcgtcgatctagggtcattatcgccgctagtccgagctgctagggaagctcgacagcaggagaaagctcggaaaggccaataacgtgaccaagatcggggtcgatccccaaccccaacgcaaatcatgaaaaacaggatacgacaggagaagcaaacgtacaagtctccggagacttgtatattggagatgaattagatcggaagcgaagcattcagcctcgatgtttgaggctacagggaggagcaaacacatatgcatatatgcagccctgcctgatgaaaggaactggacgaacgatgactggtttggattaatcgcatggcgaggtcccaggttatcaacactatgagaaagaaggcgattcgcagatttactacttgtttttcttcgttcaatcctcttttcttcacaccaatactccaaaaaagaaagacaaatttgagaatttggggggcgattcccagattatggatctactaccaaagatttgacccttttttaaaaacttgtacatagcaagacgataccactttcacacttttcttcccaatgcccccccttgcctgcctacctacctacctacatttagctgatgcccccatttgcgaggcgaataaagagcttgttcgtctgattctaattctgctcgtcaaattgtgttcgccgtagttttgtgtgagtcgccgaggtgatggtatgcgaatttgtgcagattggtgaagcggag

SEQ ID NO: 30543 - DNA, 2886 bp, Muscodor strobelii
  misc_feature: SGI cDNA ID NO. 570507
  misc_feature: Encodes the peptide sequence at SEQ ID NO 30544
atggatctggacctggacaggaatcgcaccaacacggccgagccctcgattgcgtcgtcgaccacgtcctcgcagcgccgccggctcaccaagagaccgccgatgaccgcgcagctctcgcaggtgtcgccgcaagtgtcgcagttccagcacgcgcacagctactcgaccacggcggacgggcgctttgacgcccagtcgctggacagcaaacggagctccacgagcctgaggcgagctcccagcgctccactccagcaccggtcgtcccacgcgtcaaacaactcatcgccccgtcatctgccatcctcgtcgtccaacaacagcaactttacccgcacttctcccgccctcctgcccggcgagtttctgccgccgaccagctacaccacctcctacgccgcacacgcatcacccactaattacgctgcacatcccgcacatcctgcacacgccgcactcactcccgtcggcgccgcaggttcaggcactggcgctggcgctgctgctgccggcattggctctggctcctccatcccctcgtcgcccgcttatctgaacaatcagaactacagttacaactaccaccagaccagcgacctcccgctccgtttgtccggcccgacactgccgcccctcaacactaagaatcccgaggacttcgtcggcgcccccttcaacccggagaccctactcagccatctcgacaaggccgccacgcaatcgcccgctgcttaccaggccgcccgcgacatccgcccccagcggcccccacagcacggccacgagcccgccgccgctggccgtatcgtgagcccgcagctccgccattccctcagcttttctgccggcacgcccataatgtcggagaagtcccccattcagcgcagcgatggccccgtggtcacgacgaagcgctactcggatgagtccaaagagaacaccagggctggcgtactacgcaagaagtctggcttctcaggcctcatgagcactctagtcggatcacagaagaagcccgtcatctcagcacccgaaaacccagtccatgtcacgcacgtcggctacgacagtagcacgggtcaattcacgggcctaccgaaagaatggcagcggctcataaacgagagcggcatccccgagaatgcccaacgggagaacccccagatgattgccgacatcgtcacgttctataaggagacgacggagaagccacacgaggatcaggttcttgagaagttccacgacgtgagggctcgcgtcccctcgggaggcatggccacatccccaggcacttattcgcccaactatgctggtatgtcacctgtaatcagtccaccagcaagtccgagatttccaatcgtgaataatgaaggcaccttcgagaacccccgcgcacccccgcccgttcctctcccggggaaggggcccgcgctgcacacggccaaagaccacccgaacctgcagcccagccgcccggccccgaaaccaccggtctccatgcagtcccgcgtgcagcagccgcagtctccctacccggccaaagactctggcatcggcatgtcgcagcccggcgacgacctgcccgccgtcgcctacactccgcccgtcaaggacattggctctcccatgctgcccgaagaacaccgatcgaggtccaactcgcgggtcaacggatcctcgccctactctccgcaaatccctcccagtcaaccctctccggcgatgcaagcagcttaccagcagcaactgatgcagcaacagcaggaacaggccatgtcacaggcccaggctgccatgaagggacaactcggtagatcacagagcaacaggcaaccaccagcgcaacccatgccccaaagtacacagcaacaacacccagtcggtcgccctcctgaggccaatggcaacggtgttggtccaaggacaggcccagcagcagctcaggcccgcccccgaaacaggcaacgacagagcgccagtatcgacgtcgcggccgccctgaagcgaatctgctccgagggtgacccacgagagatctacagagggttcactaagattggtcagggtgcgtcaggcggtgtgtacaccggtcacgagagaggctcaaatcgcctggtagccatcaagcagatgaatttggaacagcaacccaagaaagacctcatcattaacgagatattggtcatgaaggagagcgtacaccccaacattgtcaacttcatcgacagctatctctgtggcggcgagctatgggtcatcatggaatacatggagggcggcagtcttacggacgtcgttaccttcaatatcatgactgaaggtcagattgcatccgtgtgcagggagactctcaaaggtctccagcacttgcattccaagggtgttatccaccgagatatcaagtccgacaacatcctactatcgttggagggtagcatcaagctgaccgatttcggtttctgtgcccaaatcaacgaagcacacaataagcgaacgacaatggtcggcacaccctactggatggcaccagaggtagttacgaggaaggagtacggacgcaaggtcgatatctggtcactcggcatcatggccatcgagatgattgagggagaaccaccctacctgacggaatctccacttcgcgctctatggctcatcgctacgaacggtacgccacagatcaaggacgagcagaacctatctgccgtatttcgagacttcctctacttcgctctgaaagtagatccagagaagagagcaagcgcacacgacctcctccggcatgatttcatgaaaatgtgcgtcgatctagggtcattatcgccgctagtccgagctgctagggaagctcgacagcaggagaaagctcggaaaggccaataa

SEQ ID NO: 30544 - protein, 961 aa, Muscodor strobelii
  misc_feature: SGI Peptide ID NO. 570507
  misc_feature (341)..(399): Pfam Id: PF00786 Pfam Desc: P21-Rho-binding domain
  misc_feature (681)..(932): Pfam Id: PF00069 Pfam Desc: Protein kinase domain
  misc_feature (680)..(932): Pfam Id: PF07714 Pfam Desc: Protein tyrosine kinase
  misc_feature (686)..(875): Pfam Id: PF07714 Pfam Desc: Protein tyrosine kinase
  misc_feature (204)..(961): NCBI GI: 256727111 Blast Desc: NECHADRAFT_33582 [Nectria haematococca mpVI 77-13-4]
  misc_feature (213)..(961): NCBI GI: 33089285 Blast Desc: PAK kinase [Magnaporthe grisea]
  misc_feature (213)..(961): NCBI GI: 148887437 Blast Desc: PAK kinase [Magnaporthe grisea]
  misc_feature (212)..(961): NCBI GI: 171682392 Blast Desc: protein product [Podospora anserina] gi|170941155|emb|CAP66805.1| protein product [Podospora anserina]
  misc_feature (26)..(961): NCBI GI: 85085626 Blast Desc: NCU03894 [Neurospora crassa OR74A] gi|74696222|sp|Q7RZD3.1|STE20_NEUCR RecName: Full=Serine/threonine-protein kinase ste-20 NCU03894 [Neurospora
  misc_feature (26)..(928): NCBI GI: 148910828 Blast Desc: ste20-like protein [Fusarium oxysporum f. sp. phaseoli]
  misc_feature (219)..(928): NCBI GI: 261359417 Blast Desc: serine/threonine-protein kinase MST20 [Verticillium albo-atrum VaMs.102]
  misc_feature (288)..(959): NCBI GI: 154314114 Blast Desc: conserved [Botryotinia fuckeliana B05.10] gi|150849146|gb|EDN24339.1| conserved [Botryotinia fuckeliana B05.10]
  misc_feature (334)..(960): NCBI GI: 156060619 Blast Desc: conserved [Sclerotinia sclerotiorum 1980] gi|154699856|gb|EDN99594.1| conserved [Sclerotinia sclerotiorum 1980]
  misc_feature (213)..(960): NCBI GI: 240105595 Blast Desc: PAK kinase, [Coccidioides posadasii C735 delta SOWgp]
  misc_feature (275)..(961): SWISSPROT Homolog: EC 2.7.11.1 Non-specific serine/threonine protein kinase
MDLDLDRNRTNTAEPSIASSTTSSQRRRLTKRPPMTAQLSQVSPQVSQFQHAHSYSTTADGRFDAQSLDSKRSSTSLRRAPSAPLQHRSSHASNNSSPRHLPSSSSNNSNFTRTSPALLPGEFLPPTSYTTSYAAHASPTNYAAHPAHPAHAALTPVGAAGSGTGAGAAAAGIGSGSSIPSSPAYLNNQNYSYNYHQTSDLPLRLSGPTLPPLNTKNPEDFVGAPFNPETLLSHLDKAATQSPAAYQAARDIRPQRPPQHGHEPAAAGRIVSPQLRHSLSFSAGTPIMSEKSPIQRSDGPVVTTKRYSDESKENTRAGVLRKKSGFSGLMSTLVGSQKKPVISAPENPVHVTHVGYDSSTGQFTGLPKEWQRLINESGIPENAQRENPQMIADIVTFYKETTEKPHEDQVLEKFHDVRARVPSGGMATSPGTYSPNYAGMSPVISPPASPRFPIVNNEGTFENPRAPPPVPLPGKGPALHTAKDHPNLQPSRPAPKPPVSMQSRVQQPQSPYPAKDSGIGMSQPGDDLPAVAYTPPVKDIGSPMLPEEHRSRSNSRVNGSSPYSPQIPPSQPSPAMQAAYQQQLMQQQQEQAMSQAQAAMKGQLGRSQSNRQPPAQPMPQSTQQQHPVGRPPEANGNGVGPRTGPAAAQARPRNRQRQSASIDVAAALKRICSEGDPREIYRGFTKIGQGASGGVYTGHERGSNRLVAIKQMNLEQQPKKDLIINEILVMKESVHPNIVNFIDSYLCGGELWVIMEYMEGGSLTDVVTFNIMTEGQIASVCRETLKGLQHLHSKGVIHRDIKSDNILLSLEGSIKLTDFGFCAQINEAHNKRTTMVGTPYWMAPEVVTRKEYGRKVDIWSLGIMAIEMIEGEPPYLTESPLRALWLIATNGTPQIKDEQNLSAVFRDFLYFALKVDPEKRASAHDLLRHDFMKMCVDLGSLSPLVRAAREARQQEKARKGQ

SEQ ID NO: 30545 - DNA, 3958 bp, Muscodor strobelii; identical to SEQ ID NO: 30542
  misc_feature: SGI EST ID NO. CUFF.72480.1
  misc_feature: Variant of the nucleotide sequence at SEQ ID NO 30543

SEQ ID NO: 30546 - DNA, 1098 bp, Muscodor strobelii
  misc_feature: SGI cDNA ID NO. 570508
  misc_feature: Encodes the peptide sequence at SEQ ID NO 30547
atgtctggccggtcagcacttcgtgcaacacgagctgttgctccccttctttccagcacatctcgtgctcccatctccagaactttccctgccgcccgggcattttctgcttcgtccgtccgatccaagagcgatgttgtgcgtgagaccgaaattcccgtctccgtgtactctccagactccaagggcgccgctggctcaacaagcgaccactacagcatccccgtcaaccgcgatgaggccaagcccaagcctttccctcccaccgaggagaccgatgtgatcccattgaccaagaaagtctggcgcgatatgccaccgatgatgcagaagatgtccattatggacaaggttgtcgttgtcactggcggtgctcgtggtctaggaaattacatggcccgtgcctgtgccgaggctggtgctaaggctcttgtcattttcgacgttaaccaggagcttggtgacgagtctgctgccgagcttcaccagaagaccggtctccctgtctcgttcttcaaggttgacgtccgtgacggtgccgctatcaatgccgctgttgatgcttgcgtcgaggcttacggcgtccctgatgttctcatcaactctgctggtattgccgattccaacattaaggctgagcaatacgatcctgctatgttcagacgcctcatcgacatcaacctgactggttcgttcctgatgagccagtctgttggccgtgctatgattagtgctggcaagcctggctctatcatcctcgttgcttccatgagtggtagcattgtcaactaccctcaagagcagtcttgctacaacgcctccaaggctggtgtcatccaattcggcaagtccctcgctgctgagtgggctaagtacaatatccgtgtaaactgcatctccccaggttacatggacactgctctgaaccgtgttcctgctctcgaggcccagaagaagatctggagatctatgactcctcagaaccgcctgggaagcgttgatgacctgaacggtctctgcgttttcctggccagtgatgctagcggcttcatgactggtgccaacgttgctatcgatggcgggtacacctgctactag

SEQ ID NO: 30547 - protein, 365 aa, Muscodor strobelii
  misc_feature: SGI Peptide ID NO. 570508
  misc_feature (117)..(290): Pfam Id: PF00106 Pfam Desc: short chain dehydrogenase
  misc_feature (31)..(365): NCBI GI: 39977183 Blast Desc: MGG_06494 [Magnaporthe grisea 70-15] gi|145016079|gb|EDK00569.1| MGG_06494 [Magnaporthe grisea 70-15]
  misc_feature (6)..(365): NCBI GI: 116202623 Blast Desc: conserved [Chaetomium globosum CBS 148.51] gi|88177714|gb|EAQ85182.1| conserved [Chaetomium globosum CBS 148.51]
  misc_feature (9)..(365): NCBI GI: 85085621 Blast Desc: NCU03893 [Neurospora crassa OR74A] gi|28918625|gb|EAA28296.1| conserved [Neurospora crassa OR74A]
  misc_feature (5)..(365): NCBI GI: 171682390 Blast Desc: protein product [Podospora anserina] gi|170941154|emb|CAP66804.1| protein product [Podospora anserina]
  misc_feature (1)..(365): NCBI GI: 46135957 Blast Desc: FG09494.1 [Gibberella zeae PH-1]
  misc_feature (1)..(365): NCBI GI: 256727689 Blast Desc: [Nectria haematococca mpVI 77-13-4]
  misc_feature (9)..(365): NCBI GI: 261359418 Blast Desc: bacilysin biosynthesis oxidoreductase bacC [Verticillium albo-atrum VaMs.102]
  misc_feature (5)..(365): NCBI GI: 154314122 Blast Desc: BC1G_05004 [Botryotinia fuckeliana B05.10] gi|150849150|gb|EDN24343.1| BC1G_05004 [Botryotinia fuckeliana B05.10]
  misc_feature (4)..(365): NCBI GI: 156060613 Blast Desc: SS1G_02446 [Sclerotinia sclerotiorum 1980] gi|154699853|gb|EDN99591.1| SS1G_02446 [Sclerotinia sclerotiorum 1980]
  misc_feature (108)..(363): NCBI GI: 50552368 Blast Desc: YALI0E05643p [Yarrowia lipolytica] gi|49649463|emb|CAG79175.1| YALI0E05643p [Yarrowia lipolytica]
  misc_feature (108)..(363): SWISSPROT Homolog: EC 1.1.1.10 L-xylulose reductase
MSGRSALRATRAVAPLLSSTSRAPISRTFPAARAFSASSVRSKSDVVRETEIPVSVYSPDSKGAAGSTSDHYSIPVNRDEAKPKPFPPTEETDVIPLTKKVWRDMPPMMQKMSIMDKVVVVTGGARGLGNYMARACAEAGAKALVIFDVNQELGDESAAELHQKTGLPVSFFKVDVRDGAAINAAVDACVEAYGVPDVLINSAGIADSNIKAEQYDPAMFRRLIDINLTGSFLMSQSVGRAMISAGKPGSIILVASMSGSIVNYPQEQSCYNASKAGVIQFGKSLAAEWAKYNIRVNCISPGYMDTALNRVPALEAQKKIWRSMTPQNRLGSVDDLNGLCVFLASDASGFMTGANVAIDGGYTCY

SEQ ID NO: 30548 - DNA, 4188 bp, Muscodor strobelii
  misc_feature: SGI EST ID NO. CUFF.72275.0
  misc_feature: Variant of the nucleotide sequence at SEQ ID NO 30546
ggacttctgggtgtaaggtcatattatgtgatatggctcgatcaaatgattgtttaattacttggttgcttaacggtcgcaaactatcttatgtataagatgtctcgaattcgtttctttctcgacacagtctctgcaactctgctcggccacaattaacaaaactgccgtgcatgctgcccaaatgtgtgggaaatagcctaatgtaattgttgagacattgtggctacggctttgacgcaactgtgtaaggtaggtatttaaacgatagcattgggcaattgctatcaggtcctgactccttgaaagagagagcctcattccttattgttgtggatcttcccgttccagttggtgtctcggcacggccagaataggtcacatcaattcgtaggggtccccgaggtccatctatcgcgtattatacttattcgacgtccagacgaggagatgtccccgggacaccccacgcttcttcaacaagccttgcggcctcagcgggcatgtatgagcttgaggaggggaagtgaaagaacagtcatgttgcaatttggtcaactcggcatccacctcagagttataattcataatctatcattagtactggtggacaccacggagcagcccgatatagatggcagaatgtctaggattgcccgaatatgaatcgttgagcttgccatctctcctggcctacgggtcaccgaaaccagccaattttatcttttgattcagcgcgtgcctttggagccgataagacgctgtgagctgagagtaggcgagtatgtaccttatgtagggaattggtgtcgcatgaatcgcagacatgacaggggagctcatgcggagttgcttcgtcacagcatcgctcgtattcttccgggccctagcttggtttaactcgccagcaaattcgacaaattctagatgccaagcagctggcagcaaaaagatgtctcggatgtttccaacttgcttcaagaatattgacagaattgcgttgcagtcaccgaccctgctagcggggctaggtgtgggtagaatggggggcacgaagtgggcgcgaggcgggctatgacttgatggtgtctctagattctgaatatactgggacaaacgtggatctggcgacaaaattgtttttgataggggtcctggatgacggatcttgaagttcgcacaagcgcaattgagaaaagaataggtggaacagtgatagacactgctaagctgagagcaacgctcaacaaatcgacattgcagaggacatggggaattgtcatatgtagcatacgagctccgccgggcgccgtagccttgctgtctgacttgactgctcacgcgtccgagcagagattttctctatcgtccgtgccgggaccacccccgagcaattccaactaccctttcttctccatgccaggctcgctcttacccagagtcgcccactttgcccactcacccatctcgcgtgaatccaagtgtcaagctccggcgctcgctgagtcggtcgccactcttcattgtactagtatggtgcaaacctctagatttataaggtatccgcaggaagcccggtggcccacaaccatcatgcaaccgtaccgccggagtcagcgagcgactttggtgtttgccacgcgtgggccagctccagaagcttgacgacactgatcagccagattctccatcgttgatgtccagagctatgacggtcacgatacgagtctgagcaaacctcgcaaaagatggacatgactaggcaatggcggaggatcaatccacaattagataacagcacaaggtagaaaaggagcatcttgacttcaaaactgagcgcgcgtccgttccatctctctctcgcgctctatcaaaaaacagcttcgttcaacttgtgctactgcaacttcacgttcagcctttccgagtgacccgacgcatcagtttccaatttttcagcgtggccacaacttctacccccacgacaaaagagattgatttccaggacccagcctcttgtctgtcctactacaactgtcttcgagcacacgttcctcgagtccctggttggaaacgattcacgagacactccatccccaccacggcaagcggatctatcagcccgtaggcgactaacgagaaaagcggcaaagcctttagtctctcgggaattgttaggcccagtccacgatacccattctcatcaaacagcactctcgtgacctgtttgcaatctcagcatccttccaagctctcaccggtctcgtttgctacttaagctcgccagtttgctcgtcagcgaaccggtctcctggaaccttccccctcttgtatcgtatttgctttgccatacccagaactcttcatctctgcttctgaatacaaattgaggatcttcatccctcaattgattactcttctcctcctcagaaaccctccatcccacatccataatgtctggccggtcagcacttcgtgcaacacgagctgttgctccccttctttccagcacatctcgtgctcccatctccagaactttccctgccgcccgggcattttctgcttcgtccgtccgatccaagagcgatgttgtgcgtgagaccgaaattcccgtctccgtgtactctccagactccaagggcgccgctggctcaacaagcgaccactacagcatccccgtcaaccgcgatgaggccaagcccaagcctttccctcccaccgaggagaccgatgtgatcccattgaccaagaaagtctggcgcgatatgccaccgatgatgcagaagatgtccattatggacaaggttgtcgttgtcactggcggtgctcgtggtctaggaaattacatggcccgtgcctgtgccgaggctggtgctaaggctcttgtcattttcgacgttaaccaggagcttggtgacgagtctgctgccgagcttcaccagaagaccggtctccctgtctcgttcttcaaggttgacgtccgtgacggtgccgctatcaatgccgctgttgatgcttgcgtcgaggcttacggcgtccctgatgttctcatcaactctgctggtattgccgattccaacattaaggctgagcaatacgatcctgctatgttcagacgcctcatcgacatcaacctgactggttcgttcctgatgagccagtctgttggccgtgctatgattagtgctggcaagcctggctctatcatcctcgttgcttccatgagtggtagcattgtcaactaccctcaagagcagtcttgctacaacgcctccaaggctggtgtcatccaattcggcaagtccctcgctgctgagtgggctaagtacaatatccgtgtaaactgcatctccccaggttacatggacactgctctgaaccgtgttcctgctctcgaggcccagaagaagatctggagatctatgactcctcagaaccgcctgggaagcgttgatgacctgaacggtctctgcgttttcctggccagtgatgctagcggcttcatgactggtgccaacgttgctatcgatggcgggtacacctgctactagacattaagacggaaattgaccaattcatctggtaccagcacttcaccatacacacatctaacaatcggcatttgatagatccttctatcggttaacgaaggctatcccgctatcacaggagtgcaaagctattgttgatatggcgcccaatcgagatttcgcaaattatcttccatgtacctttttcttcagcaccaccacatacataagcacacgcgacaatcgtcgaatcctctactattttagacactagacacagggcatatcaaaaaactcatcgcaacggcgcaagaaggggttcattccgatagaaccaaaaaaaattcaggggtttccgtgtccgggacaaacaatctcgttttctaattcattttccggggaatcatagactatctagcgaagagttttctaccgtcagtattgtatcatcgagcgtttgaagggcaaccttagaaaagagataaaaatggggactagataccatggcagagacggttgcatgggtaacttgcgaagcatagacggacagcttagccaagttggcttgcatgtctggatcaggacattagattcatagatggatacatcgtcaatcgcgatgattaatatcagcaattccaactatttaacgccacca

SEQ ID NO: 30549 - DNA, 1329 bp, Muscodor strobelii
  misc_feature: SGI cDNA ID NO. 570509
  misc_feature: Encodes the peptide sequence at SEQ ID NO 30550
atggccaaggtttacagaaacgcaactttgacagtcgttgggggacgatcgtcagatagtcgaaacggattcctagagaacaagctcctgcccgaagttgaaccagtttctttacccttttacgatcaaatgaaaacccaagacctttcggaagaaacggaaagtcaaaatagcgacacatcagacgatagtggggatgatagtgaccaggccgatgatgagagcaccgaacaggcggcggatcagagcagcacaacgacatgcgaaatttgggcatcgttaccacgcggaagggcggatggtgccgtgtcggatcgcggctggtgttttcaagaagcagttttgtgctcaagggcaatcgtattcggcaccgagcagctaaactttcgctgtcgtgagttcaacgtctgggaagatgggacagcagggagaccacctccatatcaagtccagaatcagtattccaaggtctatctctcggcttcgacatcgacatcgtcacaggaatcgccgacttcggaagttatccgcaagcatgaagaagtgcaacgacgcacgttgatatattggtatcgcactatccttgccgaatacacgcgacgttccttgagcagtgaaggtgatatattcgctgctgtaagcgggttggctcaagatttcaagcctcggatgcggtcgcgttatttagctggacattgggaaatcgatatggtccgaagtctactctggtatccctggaaaaacaaacgaggagctgttaggtctttactcaaaccccaatgctcccgaaggcagaaaacaaaagtcccctcctggagctgggccacggtcataggccagatccacgtcgagactacagatagataccaagctcgatatgacccgtcccagtacctagttcgccccgcgtacccccagggatggactcggaatatggtctgccacgctgccgaagtgagtatcgagagctgcaggcttgagttgatcggtagacccggtcgtgttcaatgtgggtggccggaaggattgcctgcacctaagctgccctcgcatattacccaacaagctctagccgagcaggctgaaactccggctgcgcataatactgttgttgcaattgagggcaacactaccaacgcggtcggtgtcggatgcttcgatattccagaggagatggctatggactgttggtgcctcccattgaccaaacaggagggtctgatactacatcgagacgaagatggtaggttccagcgcttggggatgatggttgtggcggatttggcttgggttatgtccaatccggagactgaggttgatatgatatga

SEQ ID NO: 30550 - protein, 442 aa, Muscodor strobelii
  misc_feature: SGI Peptide ID NO. 570509
  misc_feature (1)..(442): NCBI GI: 256723439 Blast Desc: NECHADRAFT_42339 [Nectria haematococca mpVI 77-13-4]
  misc_feature (1)..(442): NCBI GI: 85109145 Blast Desc: NCU08526 [Neurospora crassa OR74A] gi|28924394|gb|EAA33528.1| [Neurospora crassa OR74A]
  misc_feature (1)..(439): NCBI GI: 46119779 Blast Desc: FG04794.1 [Gibberella zeae PH-1]
  misc_feature (1)..(442): NCBI GI: 256728315 Blast Desc: NECHADRAFT_97740 [Nectria haematococca mpVI 77-13-4]
  misc_feature (1)..(433): NCBI GI: 116192297 Blast Desc: CHGG_05866 [Chaetomium globosum CBS 148.51] gi|88181779|gb|EAQ89247.1| CHGG_05866 [Chaetomium globosum CBS 148.51]
  misc_feature (93)..(441): NCBI GI: 121710086 Blast Desc: HET domain protein [Aspergillus clavatus NRRL 1] gi|119400809|gb|EAW11233.1| HET domain protein [Aspergillus clavatus NRRL 1]
  misc_feature (1)..(279): NCBI GI: 256722409 Blast Desc: NECHADRAFT_62329 [Nectria haematococca mpVI 77-13-4]
  misc_feature (1)..(281): NCBI GI: 171678559 Blast Desc: protein product [Podospora anserina] gi|170937349|emb|CAP62007.1| protein product [Podospora anserina]
  misc_feature (1)..(442): NCBI GI: 171686078 Blast Desc: protein product [Podospora anserina] gi|170943000|emb|CAP68653.1| protein product [Podospora anserina]
  misc_feature (1)..(282): NCBI GI: 116214435 Blast Desc: CHGG_11058 [Chaetomium globosum CBS 148.51] gi|88175413|gb|EAQ82882.1| CHGG_11058 [Chaetomium globosum CBS 148.51]
MAKVYRNATLTVVGGRSSDSRNGFLENKLLPEVEPVSLPFYDQMKTQDLSEETESQNSDTSDDSGDDSDQADDESTEQAADQSSTTTCEIWASLPRGRADGAVSDRGWCFQEAVLCSRAIVFGTEQLNFRCREFNVWEDGTAGRPPPYQVQNQYSKVYLSASTSTSSQESPTSEVIRKHEEVQRRTLIYWYRTILAEYTRRSLSSEGDIFAAVSGLAQDFKPRMRSRYLAGHWEIDMVRSLLWYPWKNKRGAVRSLLKPQCSRRQKTKVPSWSWATVIGQIHVETTDRYQARYDPSQYLVRPAYPQGWTRNMVCHAAEVSIESCRLELIGRPGRVQCGWPEGLPAPKLPSHITQQALAEQAETPAAHNTVVAIEGNTTNAVGVGCFDIPEEMAMDCWCLPLTKQEGLILHRDEDGRFQRLGMMVVADLAWVMSNPETEVDMI

SEQ ID NO: 30551 - DNA, 2449 bp, Muscodor strobelii
  misc_feature: SGI EST ID NO. CUFF.72278.0
  misc_feature: Variant of the nucleotide sequence at SEQ ID NO 30549
atcgaatttgccagacaatggcttgaacaatgtcagagtagacataagctctgcgcatcacctcctgaaatcgctgactttacgcctacacgacttgtcgacgttaggtccccgaaaggcgcccgtctcgttgtcacacgggaaacagaactacgagaaccctacattgctctttcttattgctggggacctcctggtgctggtacaatacttctagaagacaacatcaatgatatgttattgaacatcccagaggcgtctctctcaaagacccatacagaggcctttcaattaactcgcgcccttgggtataggtacatatggattgatgcactgtgtatcattcaaagatgtcgcgaggactgggagagcgaatccaaaagtatggccaaggtttacagaaacgcaactttgacagtcgttgggggacgatcgtcagatagtcgaaacggattcctagagaacaagctcctgcccgaagttgaaccagtttctttacccttttacgatcaaatgaaaacccaagacctttcggaagaaacggaaagtcaaaatagcgacacatcagacgatagtggggatgatagtgaccaggccgatgatgagagcaccgaacaggcggcggatcagagcagcacaacgacatgcgaaatttgggcatcgttaccacgcggaagggcggatggtgccgtgtcggatcgcggctggtgttttcaagaagcagttttgtgctcaagggcaatcgtattcggcaccgagcagctaaactttcgctgtcgtgagttcaacgtctgggaagatgggacagcagggagaccacctccatatcaagtccagaatcagtattccaaggtctatctctcggcttcgacatcgacatcgtcacaggaatcgccgacttcggaagttatccgcaagcatgaagaagtgcaacgacgcacgttgatatattggtatcgcactatccttgccgaatacacgcgacgttccttgagcagtgaaggtgatatattcgctgctgtaagcgggttggctcaagatttcaagcctcggatgcggtcgcgttatttagctggacattgggaaatcgatatggtccgaagtctactctggtatccctggaaaaacaaacgaggagctgttaggtctttactcaaaccccaatgctcccgaaggcagaaaacaaaagtcccctcctggagctgggccacggtcataggccagatccacgtcgagactacagatagataccaagctcgatatgacccgtcccagtacctagttcgccccgcgtacccccagggatggactcggaatatggtctgccacgctgccgaagtgagtatcgagagctgcaggcttgagttgatcggtagacccggtcgtgttcaatgtgggtggccggaaggattgcctgcacctaagctgccctcgcatagtaagtgatttatcaatttacctattgctcatccatcgtccctctatgccgaggggagtgatcgttggcctacgttcaccgatcattggcgatacgatacccgatattgaaaggcacgctggaactaaattctgaaaatctatggacaaagcttttgcaaatcccattattctcacagttacccaacaagctctagccgagcaggctgaaactccggctgcgcataatactgttgttgcaattgagggcaacactaccaacgcggtcggtgtcggatgcttcgatattccagaggagatggctatggactgttggtgcctcccattgaccaaacaggagggtctgatactacatcgagacgaagatggtaggttccagcgcttggggatgatggttgtggcggatttggcttgggttatgtccaatccggagactgaggttgatatgatatgatttatggattaggcgggagattagttgagataatctcctggtttcatgcagaaagaggacagagagaaagaatacatcttggtaaagccttaatgatagggagaactctgatgggcgttagatacactgctctagtggctcggcattaagtacataaaacttgaacccgcgcttccggcgagtgcagcacgtcgtttagtctaatacgcacatgtataccccgcgcaacggagcctgactatcgaccgcttagctctttaatgcaactaaaggactcttgacatttggtcccgtaacaatcgtagctacacgtatagtaatgtgtgaaacaggtatcataatatgcatctataggtacagatgtcctggccaattagggcgacgacctgaactaagaacctgaatgccgcaaaatagtgctgacctacagaggcgaggcgtgacgcgcatgataaaccctggtccgaaagtcctctccagataagcggattacttgcagctcaaacttgactaacatcaccaatcgcagacataacatcatcattatgaggagtggtg

SEQ ID NO: 30552 - DNA, 405 bp, Muscodor strobelii
  misc_feature: SGI cDNA ID NO. 570510
  misc_feature: Encodes the peptide sequence at SEQ ID NO 30553
atgaaaagcctcgacttcgatgatatcgggcatctcaatgtcttggagcgggaagcagaagaggtcattgagcaagactttactcggctcaaggaagttggacataggctcattgcgacttcgtttttcttcgagaaggactcaaaatctacgagacatacgaaaagtgggtatttctgcaaagtatttcaatctacagaatcggctctactaaatgcgccaactgggccgggtcctaacgctgaggccgagtcactaaccttgaataccaaagcccacgtgctgctcacgaagcttccatcaaatccgacgggtatttcagagcttcccgaaaccaccgcgccgacaccagagctgcagggaacgccaaccgagatacgcagaactattgctgaattggattga

SEQ ID NO: 30553 - protein, 134 aa, Muscodor strobelii
  misc_feature: SGI Peptide ID NO. 570510
MKSLDFDDIGHLNVLEREAEEVIEQDFTRLKEVGHRLIATSFFFEKDSKSTRHTKSGYFCKVFQSTESALLNAPTGPGPNAEAESLTLNTKAHVLLTKLPSNPTGISELPETTAPTPELQGTPTEIRRTIAELD

SEQ ID NO: 30554 - DNA, 1455 bp, Muscodor strobelii
  misc_feature: SGI cDNA ID NO. 570511
  misc_feature: Encodes the peptide sequence at SEQ ID NO 30555
atggcatcgcagaggattgagacagtcctagtggaagcgcgaaagaggcaagttctactgaatgcttcggagtttgccaaagagagtcgtctagaagctctccctcccgagttgaagatggagattgccagcttcttggtagatcctactagacttgcgcttactggtcctaacttatacgactttatcgctccgaacgaagctacacttgctgcaaagatggtcttccaacaaattgacgaccagtcgttgccgattgctattgctcgccagtcgcttctcaattcgagttggatgatccttcgagacgaagatggcattcctcaagcaacaaccactgcttatcaagattcttcgatcccatttatgcaacaaagactgatgcgcaactacgagaattataagcagatacgcgatgtcatcccatctttcaaggtagcgactcgttgcctgcagttggatagcgtcgtcacatattatgcccgccacttggcactacagatgatggaggttgcaccgagcaacatcaagtttcctgcgtcgccgacaggaacgataatgcggcgattgaggaaggctctttacatattccagctcctttcagacctctgtccctatgatgaccttcattggcgacctagagacctcccggagagtgcttggaaggatggctccaacgaaaattcacatttcgaaatccatgctcaagtgtggcactatttggcaccatgggaaatggagcaagttagaagcttacaatatctgcttgaagaacatatcaagtccatttgtaacgacggtcacaatcctgatgatatcgattctgagaatgtccagcctgttgagatcggttatttcgacggttacgctgacatcgacatcaatttcgacgacatctacgatcactacccgacttcttggtttttgatgttcttcgcgttccatgaaggcctcgagaggctgcatgcgcttgaaacaagcccagcagtatccgccaagaaagcggtgtgggatttcgcgaaagcttgcactagccgtcgttatgagcatttcgaccttcgtacacagatcgttccggtctgttttggcgtgccgctcttgagtaatccgccccccgactttaaaatatctctagacttgatcgaagttttcgacaaattctcagccgaagagcctggaactatcgaggtctggtatcatcatctcctccaaaaccaagctgacaacccaatattccgacatgggatggataatcaatttcaatgcgacatttgctattgtcaagctggctgtattttctgggatcacatcaactatgtggacccgacacattcgatgccgacaatcaacgagatgcgaaccatcggcgcgggaatctgggttgacatatacactgatttgacacattcaggtgacatcaatcccatcaatcctcactatcacgagtgtgactaa

SEQ ID NO: 30555 - protein, 484 aa, Muscodor strobelii
  misc_feature: SGI Peptide ID NO. 570511
MASQRIETVLVEARKRQVLLNASEFAKESRLEALPPELKMEIASFLVDPTRLALTGPNLYDFIAPNEATLAAKMVFQQIDDQSLPIAIARQSLLNSSWMILRDEDGIPQATTTAYQDSSIPFMQQRLMRNYENYKQIRDVIPSFKVATRCLQLDSVVTYYARHLALQMMEVAPSNIKFPASPTGTIMRRLRKALYIFQLLSDLCPYDDLHWRPRDLPESAWKDGSNENSHFEIHAQVWHYLAPWEMEQVRSLQYLLEEHIKSICNDGHNPDDIDSENVQPVEIGYFDGYADIDINFDDIYDHYPTSWFLMFFAFHEGLERLHALETSPAVSAKKAVWDFAKACTSRRYEHFDLRTQIVPVCFGVPLLSNPPPDFKISLDLIEVFDKFSAEEPGTIEVWYHHLLQNQADNPIFRHGMDNQFQCDICYCQAGCIFWDHINYVDPTHSMPTINEMRTIGAGIWVDIYTDLTHSGDINPINPHYHECD

SEQ ID NO: 30556 - DNA, 5763 bp, Muscodor strobelii
  misc_feature: SGI cDNA ID NO. 570512
  misc_feature: Encodes the peptide sequence at SEQ ID NO 30557
atggctgtgcctggaaccatccaggctctaattgcttccttttcatttggcattttgttcaacgcagctttggcagctctggtcctctatgggaagagccatggctcagcgatatatcgggacgggctgaggctggtcctcattttgttcctcttgtcatcttcgttatgggccttagttgaatttctttcgactctgatcgatccgagcgctggctcggtttgccaagttgccgttgtcttctcctcccttttcgaccagtttggcagggtgtttattgagcagtatttggcttgggcagttcagaagggagatgtgaaatcggcctttgctcttgtaccacaaatactagtgtggggacgccttttcgttgggattgctttcgttgctgttactcgacctggcttcaatcccacgtgtgtccctgtgtcaagcgtacgcgcagtatctgtgacggctcttgggttggatgcagtgattattggcctgttgtcaatacgagcttttaccaaagggccggctaagactaccccaaatggcacttcaacctcacttcagacaatgactgtacgcatcgtgtctgtaggctcagctatatggatgggaacaagtgtgactctgttacttggacttgagagccttgatttattttacaaaaccgctctacctggtgttggactgacacttttagttctcttctttcagactcttggtgtccctagagtgcctttgcaaagaccagattctccattcacccaggtcattgagaacagtagagatctatcctcatcggattcggcagcctacccaccttcgcgatatgaagatctaaaagccggtgaggttttatcggtttccacgatcatggcaagacgagagacgggtcgagcaataaagcgcaacgaagacggcacatttcctacgatctcaagacccatgacggctgaatcggactcaaacaagatgcaggatcaaggacaaaacttcccacaagcactgttgtcagacgagtcatatacacaggtaatggcggtaccagcacttcctctagattggaaagcgaaagtacacaaggggaaaaagagcttggaatcaaaacaaaacaagggaagattaaacatctcccatccaatcattaacgaggacgcaatgggggaaaatccgcttagaaagataccaacgattgaccttgctgaagccgcaaaccaggaaagaatgagacgagagaaatataaccaacgtaactcggcactggtggcatcacgtccagccccacaacctccaagcgctcctgcaaggtctgatattcccatcactaggcgagcaatccccgaaaatctaggaagatccgaatcgctcaagacggcgcaaagtcagatatctggtgggctttcagttgaaggccaggcaaactcgacaggtgcgcaactttcgcctggcgtcgaggcaattcgacggcgatctccgcgagaaccagattcaggttcgatgcagacaccattcagaataataaggcctggcgaaccaatacgtatcccgattccaagacccatagagccatcgcaagatatccctgcgccaatgccagaaccaacaaaaacaccccttcaacgtcgcccaacaacaggtctaccgtccaatccgcgtgctcaagctatgaaatcactagcacaagaagtccagaaccagaggcaacaaaccgtcatgtttgttaacaacattgtgtatgaggatcctcatatagtacaggacatcgtacaagatgcgggcaaggcatggccgccagactcagcagactcagtcgtgaataggcctcggcctatcccccgaaaaattgacaaagaccgtcaagttttccctgcggagattgcccaagagcatggccatagaagatcaagatcagctggatcactgatgagtcgaaaatcaattctgaaatccacgccaggaagtccaggcaggctgccttcgctacctccattaccgccaactgtaggttcaacacacagaccgctaccaaatgacaccacaagcatgactttcgatgaaaagatgaagattttctatgctgcaccgacaagtgcgccgtcggatacgagattctctacaaatgtgcgctctccgatacctgaaatacccccgatgcttgaggctctcgaaaaacttgattcgcatatcttgaaagacgattcggctcggtacccgcctgctagtgccataagagcctccgaagctagcaaaatgagcacatcacggacctcgaccatcttcgaagcaatgggatctccggagcgtcatgctcaaaacattggattggaggtcgtttccactcaatctaatcctgcggacgaattgggcaagtcttggctacctggtatatcattcggtgctcgagcaagtgatcgcttgttgtcaggagaagtcaaacgcagatcatcacaggtaattcccttgagcaggaatgtgagcatgtcgacaacacggagcgatgcacggacaggcgacgatgatgttgcatcgaattgggcatcagtgcactcaccaatcgcgcctgttctgcgtcagaatgctcggtcgacatatattagaaaagacgcacagaatcctgagtcatttggcgaaatccaaataatgatgccggatctgtctttcgaagacactggcgggcatcttgagtcgaggtatatcgaggacgatgagtcgcactatgatgtgctagcaacgcctcgacagcatcctgaacagagcctggtcaattttcaccatcgtgtgggcgataagtgcccgacattttcaaccaggaaagatcaggcgcgatctcgaaagactccccctactcccctattcttaagcaagcagaccccaaaacgtgcaataatcatccagaccacagagccgtcacctatagagcctccagaggaagcctacaacatgattcaggctcaacttaagaaactcgatcaagcagaccgccaatccatgggaacaccaggtcaacggctcgcgctcctcgataacctggagcaggagatgggacagctgcaaagcaaatggcaatcagcccatgataacgtcgaccgtgactcgatgtcgctcttaagctccaacaactcgcggccggtttcatctgtagttacactatctgcattctcttcgcaacgctcctcggttgcatctatcatcgctgaacggcgtgcatctagaagagctcgtatggaaagtagtagtgaggatcgtgcccttactccctcttcgcaaacctcgtctcgaagttctgcaagtacgcaaggaactctttggcaaacaagattggccgaggcacagctgaaatacatggaacaagcgccggaacttcttgtaaagcgcaacaacgtgaatttcttgtctgtgtcgaaagcagctctcggaagtccaagtccgccagaaagcgatgagtctgatgaagagacacaatccagccgtgaaaatccacgtcaaaggcaacaaataattggtccaaatcacaaactgtggacagcaagtgtaccaattcaacggttcacagtctctctgctctgggatgcgcaggtcagagaaacaccacaatcgaccgaatcctaccaactaccagggctttctgtgcgaccatccccgagaaagtttgctagtgctttatctatcacgagctctcgcctctggcagaaaccggtcaaaacatctttgccgcaacccaggggattatggaagaaggagcagatccaaaaaaccaatattcgcccgaccactattcggcctcctcggaaaaataaacggatgacgattttgcctgatataattgagaatcccgagccgctaccaaataagcgaggtactttaggtatcttccagtttccctggggtgagaaaagtgaccacgcaactttttaccggcccagtcaagcattcatagcactgcctgggacaatgacaaccggacggactttagaacatactcccgctacgcgcgagcaacaagatgtctctgagtacgcgtcttcgttttttgacgagtacgaagaggaagaagaaggcgataacttttcggacttcgacgaaagcgatggagacgatggcgatgatgatttcgacgagacaacgctttgggaaattgcaagcctactaaagacggaccaattgctacctatgccatcacaatatccatcttcggagaataattctgtactcgcagattatgttgaagatttgccgtctgatgaggaccgaaacaacgctagtctttcagacgcagttttcctgccagaagatccggtaccacttacaagaccagtctcgtcggagcccgcatcatcggagtcgttgctttggacattccgtgaggctacccaaaacccgtcgcatagtttcggcttgccacaagctgcggcaagttggtcgatacactcgttaggatcagcgagatcaataatcagagccagaccacggttaccaattgcaggactcgagatctttggaagccattctcataatctctggcagccatcagagcgatactcagtcaagagagagggcatttcactctggattccacctgttcgcatcagttctgtttcatgcggcctctgggctcggccgaagcagattgctgaatcccaaggtatcagtctgtatgaccccacgcaaacgaggcacactttcaggagaacatcaaagcttccggcagctatcggtaccgtcggcaggcctcggtttttgaaagaacctgtgccggccctatcgagcaacagattgtgggctccgcagtcttcgcatcgctcagtccctaatggcaaccaagttgctttactatggcaaaatcggaatgttcgaaagtctggcgtgccccagcttttcatgccgaatcagaaacgaaaggagtttcgcactacatccgccgagcccgctgctttgaacatgacaaggaaagtgcggatctcgagacagtcgttacaatcattaggatcaaatcatctgtggagtaaggaaagccaacagcccagtggtgatctgaactggattgcaatttccaccatccgatttatcgatccgtcagtatcgatgtgctcatcaacggatacctcgacagtcccactaagtactgttgcttcatcggagaaacccaaccaaatagaaacagcagccaacgccactgcgaaaaagacggcaggcggaatatttggcggttggtttagtaagaaggtcaggaaagagatgccttccgtcccagcttcacacgaaacacaggtcaaatcaagtattgagtccgacgctcctgcaaacatacctcagagcgcaacggccaaagagacaagtaacgtacagcaacatgaccttggggcgacgactactcgagttggtaatcgcacaagattgacgcattccgatgattgggataccgctctagctgacgcgattgctgcgagttaccccaatctcacagtcggagttaggcctgcactgattcgccagcaggcgacgccccgagactgcgttcttcggatcattggaaagttctgcagcaactatccatccagccctgacaggctatcggatcaacccaaagaggtcttcaatagccctctggacacaggcttcattttcagccgatgcccccttgagagggctgtgggctcctcgcaaacactctggcttggtctcaaatacaaattccgaggttttgagttgccatgcacgaattcgacgctatccgaaagattcaagtccttcatcacatcgatccgtgactga

SEQ ID NO: 30557 - protein, 1920 aa, Muscodor strobelii
  misc_feature: SGI Peptide ID NO. 570512
  misc_feature (1)..(1413): NCBI GI: 116202231 Blast Desc: CHGG_09000 [Chaetomium globosum CBS 148.51] gi|88177518|gb|EAQ84986.1| CHGG_09000 [Chaetomium globosum CBS 148.51]
  misc_feature (6)..(1678): NCBI GI: 171682032 Blast Desc: protein product [Podospora anserina] gi|170940975|emb|CAP66625.1| protein product [Podospora anserina]
  misc_feature (1)..(1621): NCBI GI: 145613872 Blast Desc: MGG_01299 [Magnaporthe grisea 70-15] gi|145020887|gb|EDK05016.1| MGG_01299 [Magnaporthe grisea 70-15]
  misc_feature (1)..(1667): NCBI GI: 154324090 Blast Desc: BC1G_00444 [Botryotinia fuckeliana B05.10] gi|150842673|gb|EDN17866.1| BC1G_00444 [Botryotinia fuckeliana B05.10]
  misc_feature (521)..(1678): NCBI GI: 261359647 Blast Desc: conserved [Verticillium albo-atrum VaMs.102]
  misc_feature (372)..(1668): NCBI GI: 156057493 Blast Desc: SS1G_04478 [Sclerotinia sclerotiorum 1980] gi|154702263|gb|EDO02002.1| SS1G_04478 [Sclerotinia sclerotiorum 1980]
  misc_feature (129)..(769): NCBI GI: 164425961 Blast Desc: NCU04692 [Neurospora crassa OR74A] gi|157071141|gb|EAA30894.2| [Neurospora crassa OR74A]
  misc_feature (1)..(220): NCBI GI: 261359647 Blast Desc: conserved [Verticillium albo-atrum VaMs.102]
  misc_feature (8)..(639): NCBI GI: 256727126 Blast Desc: NECHADRAFT_103549 [Nectria haematococca mpVI 77-13-4]
  misc_feature (1)..(231): NCBI GI: 156057493 Blast Desc: SS1G_04478 [Sclerotinia sclerotiorum 1980] gi|154702263|gb|EDO02002.1| SS1G_04478 [Sclerotinia sclerotiorum 1980]
MAVPGTIQALIASFSFGILFNAALAALVLYGKSHGSAIYRDGLRLVLILFLLSSSLWALVEFLSTLIDPSAGSVCQVAVVFSSLFDQFGRVFIEQYLAWAVQKGDVKSAFALVPQILVWGRLFVGIAFVAVTRPGFNPTCVPVSSVRAVSVTALGLDAVIIGLLSIRAFTKGPAKTTPNGTSTSLQTMTVRIVSVGSAIWMGTSVTLLLGLESLDLFYKTALPGVGLTLLVLFFQTLGVPRVPLQRPDSPFTQVIENSRDLSSSDSAAYPPSRYEDLKAGEVLSVSTIMARRETGRAIKRNEDGTFPTISRPMTAESDSNKMQDQGQNFPQALLSDESYTQVMAVPALPLDWKAKVHKGKKSLESKQNKGRLNISHPIINEDAMGENPLRKIPTIDLAEAANQERMRREKYNQRNSALVASRPAPQPPSAPARSDIPITRRAIPENLGRSESLKTAQSQISGGLSVEGQANSTGAQLSPGVEAIRRRSPREPDSGSMQTPFRIIRPGEPIRIPIPRPIEPSQDIPAPMPEPTKTPLQRRPTTGLPSNPRAQAMKSLAQEVQNQRQQTVMFVNNIVYEDPHIVQDIVQDAGKAWPPDSADSVVNRPRPIPRKIDKDRQVFPAEIAQEHGHRRSRSAGSLMSRKSILKSTPGSPGRLPSLPPLPPTVGSTHRPLPNDTTSMTFDEKMKIFYAAPTSAPSDTRFSTNVRSPIPEIPPMLEALEKLDSHILKDDSARYPPASAIRASEASKMSTSRTSTIFEAMGSPERHAQNIGLEVVSTQSNPADELGKSWLPGISFGARASDRLLSGEVKRRSSQVIPLSRNVSMSTTRSDARTGDDDVASNWASVHSPIAPVLRQNARSTYIRKDAQNPESFGEIQIMMPDLSFEDTGGHLESRYIEDDESHYDVLATPRQHPEQSLVNFHHRVGDKCPTFSTRKDQARSRKTPPTPLFLSKQTPKRAIIIQTTEPSPIEPPEEAYNMIQAQLKKLDQADRQSMGTPGQRLALLDNLEQEMGQLQSKWQSAHDNVDRDSMSLLSSNNSRPVSSVVTLSAFSSQRSSVASIIAERRASRRARMESSSEDRALTPSSQTSSRSSASTQGTLWQTRLAEAQLKYMEQAPELLVKRNNVNFLSVSKAALGSPSPPESDESDEETQSSRENPRQRQQIIGPNHKLWTASVPIQRFTVSLLWDAQVRETPQSTESYQLPGLSVRPSPRKFASALSITSSRLWQKPVKTSLPQPRGLWKKEQIQKTNIRPTTIRPPRKNKRMTILPDIIENPEPLPNKRGTLGIFQFPWGEKSDHATFYRPSQAFIALPGTMTTGRTLEHTPATREQQDVSEYASSFFDEYEEEEEGDNFSDFDESDGDDGDDDFDETTLWEIASLLKTDQLLPMPSQYPSSENNSVLADYVEDLPSDEDRNNASLSDAVFLPEDPVPLTRPVSSEPASSESLLWTFREATQNPSHSFGLPQAAASWSIHSLGSARSIIRARPRLPIAGLEIFGSHSHNLWQPSERYSVKREGISLWIPPVRISSVSCGLWARPKQIAESQGISLYDPTQTRHTFRRTSKLPAAIGTVGRPRFLKEPVPALSSNRLWAPQSSHRSVPNGNQVALLWQNRNVRKSGVPQLFMPNQKRKEFRTTSAEPAALNMTRKVRISRQSLQSLGSNHLWSKESQQPSGDLNWIAISTIRFIDPSVSMCSSTDTSTVPLSTVASSEKPNQIETAANATAKKTAGGIFGGWFSKKVRKEMPSVPASHETQVKSSIESDAPANIPQSATAKETSNVQQHDLGATTTRVGNRTRLTHSDDWDTALADAIAASYPNLTVGVRPALIRQQATPRDCVLRIIGKFCSNYPSSPDRLSDQPKEVFNSPLDTGFIFSRCPLERAVGSSQTLWLGLKYKFRGFELPCTNSTLSERFKSFITSIRD

SEQ ID NO: 30558 - DNA, 979 bp, Muscodor strobelii
  misc_feature: SGI EST ID NO. CUFF.72316.0
  misc_feature: Variant of the nucleotide sequence at SEQ ID NO 30556
gaaccatcttcacaatagtccaggttcacggggatgtgtgagtgcagatggcccagcttctcgaaccgaagccttcggtggctcccgaatgggaggagagcaatcgagaccaccaacgttctctgatcccactgctttgtttcttcgttctcgaacttcagattccacggacacgttgtgacactatcgccaaccatggcattgtgaggagccgtctggatacgacattatgatttaactacttcgttaattatctcaatagcccgcagtgtgggtattgactttcattctacctcccgtgctctaatcgctgccaccatggctgtgcctggaaccatccaggctctaattgcttccttttcatttggcattttgttcaacgcagctttggcagctctggtcctctatgggaagagccatggctcagcgatatatcgggacgggctgaggctggtcctcattttgttcctcttgtcatcttcgttatgggccttagttgaatttctttcgactctgatcgatccgagcgctggctcggtttgccaagttgccgttgtcttctcctcccttttcgaccagtttggcagggtgtttattgagcagtatttggcttgggcagttcagaagggagatgtgaaatcggcctttgctcttgtaccacaaatactagtgtggggacgccttttcgttgggattgctttcgttgctgttactcgacctggcttcaatcccacgtgtgtccctgtgtcaagcgtacgcgcagtatctgtgacggctcttgggttggatgcagtgattattggcctgttgtcaatacgagcttttaccaaagggccggctaagactaccccaaatggcacttcaacctcacttcagacaatgactgtacgcatcgtgtctgtaggctcagctatatggatgggaacaagtgtgactctgttacttggacttgagagccttgatttattttacaaaaccg

SEQ ID NO: 30559 - DNA, 1935 bp, Muscodor strobelii
  misc_feature: SGI cDNA ID NO. 570513
  misc_feature: Encodes the peptide sequence at SEQ ID NO 30560
atgaagttccgcgacggcatgtggcttactgccgagggcatgagggtggaatacgctgaggatgtactcaacattgcggaaacggagaatggattaagccttttgtgcccgactcgaaagatcatgagcagaggagatactctaaatcagagtacagtgacaatcgacatagaagcggcttctgatggaattatatccgtcgagacgacacactggtctggagcagcaagaaagccacctcacttcgatttatttcctagcggtccaacaaaagtcgagccccaagttagtaaaggagacgatgggacgactcttagagctggaacgttatcggcaacgatccacccagatcaacacacctttgatatacgatttcacagctcggacggatcaaaggccttgacctctttgctatcgcgaagcgttggcctggcatataaccctgccccaagtaatcccctacaaacgggtgatatgcgagatttcaaacactacatattcacacagacaactctaggagttggcgaaactgttcatggactgggcgaacgattcggggcgttcaacaaggcttttacctggacggactttgttttcgactcagagcgattccccgatccaaaagcgcaaatatcgcggctcaaagattcaggtctcgtgaaaaaagtttgtgtatggataaatccctacattgcacaacacggggcggcctttaaaacggcagcagagaatgggtatctactgaaacgaaaaaacggagatgtttggcagtgggatttatggcaagctggtatgggactggttgacttcaccaaccccgaggccgtgaagtggtatgttgaatgcctcaatggtttgttcgataagggtgtcgactgtataaagaccgattttggcgaaaggatccccacactcgacgttgagtggcacgataaatcagttgacccccacaagatgcataactactacgcatttatctacaacaaaacagtttatgaagcgctgcaagcccgctatggaaccaacgaagccgtgctgttcgcacgctcagcttgcgcgggtacgcaaagattccctcttgtttggggtggtgactgcgaatctacacctgaggccatggcagaatcggttcgcggtggtctaggactgggcttgtgtggctacgccttctggtccaacgatatcggtggctttgagggatatcctgcaccgtggatctataaacgatgggtttcattcgggctcctgtgttcgcacagtcgtctacacggtagtagttcatatcgagtgccttggacaatcgataatgatgataaaagcgaagaaggctgttcacgcaccctggcaagatggactgcgcttaagacacggctcatgccgtacctctatgcgcaggctgctaatgccattgcaaatggcttgccactatctctccgggctatgtgtctagaatttcccgaagatcccacgtcatggtatctcgatcgccagttcatggttggtgacagtctgcttgcggctccaattttcgatgaatccggcgaggtcgaattttacttaccgaggggtaagtggacatcattcttcacaaacgacatccgcgatgggcccggttggttcaaggagaagcacggctttgggagtttgcctttgtacgtgcgagagaacacaatattagtcttaggtaagccaggggttagaggtgcagtatatgattacgtagaggacgttgaggtctgtctttaccatactaaagagggtgtgaaagcagagctagttgatcagtcaggggaggctttggggactttggaagcaggcgtggatggtgagcttcatggcaaggagttgctcaagggttcctgggtaacgagcaaagatggtcgcaagatcgaggaatcgttcttgacgaccatagtggatctaaacgatacatga

SEQ ID NO: 30560 - protein, 644 aa, Muscodor strobelii
  misc_feature: SGI Peptide ID NO. 570513
  misc_feature (82)..(559): Pfam Id: PF01055 Pfam Desc: Glycosyl hydrolases family 31
  misc_feature (194)..(559): Pfam Id: PF01055 Pfam Desc: Glycosyl hydrolases family 31
  misc_feature (190)..(625): NCBI GI: 261359470 Blast Desc: alpha-xylosidase [Verticillium albo-atrum VaMs.102]
  misc_feature (190)..(631): NCBI GI: 256734049 Blast Desc: glycoside hydrolase family 31 [Nectria haematococca mpVI 77-13-4]
  misc_feature (190)..(631): NCBI GI: 46128465 Blast Desc: FG08610.1 [Gibberella zeae PH-1]
  misc_feature (190)..(625): NCBI GI: 156046200 Blast Desc: SS1G_09367 [Sclerotinia sclerotiorum 1980] gi|154693762|gb|EDN93500.1| SS1G_09367 [Sclerotinia sclerotiorum 1980]
  misc_feature (190)..(625): NCBI GI: 154319764 Blast Desc: BC1G_02363 [Botryotinia fuckeliana B05.10] gi|150856021|gb|EDN31213.1| BC1G_02363 [Botryotinia fuckeliana B05.10]
  misc_feature (190)..(622): NCBI GI: 116194218 Blast Desc: CHGG_03707 [Chaetomium globosum CBS 148.51] gi|88179620|gb|EAQ87088.1| CHGG_03707 [Chaetomium globosum CBS 148.51]
  misc_feature (190)..(640): NCBI GI: 145611140 Blast Desc: MGG_11536 [Magnaporthe grisea 70-15] gi|145018459|gb|EDK02738.1| MGG_11536 [Magnaporthe grisea 70-15]
  misc_feature (190)..(625): NCBI GI: 189198283 Blast Desc: alpha-xylosidase [Pyrenophora tritici-repentis Pt-1C-BFP] gi|187981427|gb|EDU48053.1| alpha-xylosidase [Pyrenophora tritici-repentis Pt-1C-BFP]
  misc_feature (202)..(627): NCBI GI: 169620147 Blast Desc: SNOG_13276 [Phaeosphaeria nodorum SN15] gi|160703971|gb|EAT79160.2| SNOG_13276 [Phaeosphaeria nodorum SN15]
  misc_feature (174)..(605): NCBI GI: 283845411 Blast Desc: glycoside hydrolase family 31 [Bacillus cellulosilyticus DSM 2522] gi|283566875|gb|EFC17307.1| glycoside hydrolase family 31 [Bacillus cellulosilyticus DSM 2522]
  misc_feature (197)..(562): SWISSPROT Homolog: EC 3.2.1.20 Alpha-glucosidase
MKFRDGMWLTAEGMRVEYAEDVLNIAETENGLSLLCPTRKIMSRGDTLNQSTVTIDIEAASDGIISVETTHWSGAARKPPHFDLFPSGPTKVEPQVSKGDDGTTLRAGTLSATIHPDQHTFDIRFHSSDGSKALTSLLSRSVGLAYNPAPSNPLQTGDMRDFKHYIFTQTTLGVGETVHGLGERFGAFNKAFTWTDFVFDSERFPDPKAQISRLKDSGLVKKVCVWINPYIAQHGAAFKTAAENGYLLKRKNGDVWQWDLWQAGMGLVDFTNPEAVKWYVECLNGLFDKGVDCIKTDFGERIPTLDVEWHDKSVDPHKMHNYYAFIYNKTVYEALQARYGTNEAVLFARSACAGTQRFPLVWGGDCESTPEAMAESVRGGLGLGLCGYAFWSNDIGGFEGYPAPWIYKRWVSFGLLCSHSRLHGSSSYRVPWTIDNDDKSEEGCSRTLARWTALKTRLMPYLYAQAANAIANGLPLSLRAMCLEFPEDPTSWYLDRQFMVGDSLLAAPIFDESGEVEFYLPRGKWTSFFTNDIRDGPGWFKEKHGFGSLPLYVRENTILVLGKPGVRGAVYDYVEDVEVCLYHTKEGVKAELVDQSGEALGTLEAGVDGELHGKELLKGSWVTSKDGRKIEESFLTTIVDLNDT

SEQ ID NO: 30561 - DNA, 302 bp, Muscodor strobelii
  misc_feature: SGI EST ID NO. CUFF.72338.0
  misc_feature: Variant of the nucleotide sequence at SEQ ID NO 30559
agagaatgggtatctactgaaacgaaaaaacggagatgtttggcagtgggatttatggcaagctggtatgggactggttgacttcaccaaccccgaggccgtgaagtggtatgttgaatgcctcaatggtttgttcgataagggtgtcgactgtataaagaccgattttggcgaaaggatccccacactcgacgttgagtggcacgataaatcagttgacccccacaagatgcataactactacgcatttatctacaacaaaacagtttatgaagcgctgcaagcccgctatggaaccaacg

SEQ ID NO: 30562 - DNA, 2325 bp, Muscodor strobelii
  misc_feature: SGI cDNA ID NO. 570514
  misc_feature: Encodes the peptide sequence at SEQ ID NO 30563
atgagacagcctgttacagtcgcgttcgcggccttagctgctcttacgcagtttgcctacggccaaaatgcaacagcagtctataaaaatcccaatgctccagtcgagagccgtgttgccgacttgctgtcgagaatgaccataaaggacaaaacatcacagttaattcaaggcgacgtaaggaactggttcgacccggacgattactcatttaatgcgtccggtctggtgttcaatatgcagaaccgtgcagggcagttctatgtcggagtgcctgtgccatgggaagagctcagtcaagccattaaaacgggacaagactatctactgcacaacacgacattaggcattccagctttcgtgcagactgaagggatccacgggttcttgatgcctaacgccacaatcttcaactctccgatcgctcaagcgtgttcattcaatccagatctagttaagaagatgggtatcgctatcgctcaagagtctcgtgccttgggggtaaaccaaatattcgggccattgggcgatctggctcgtgagctacgtttcggtagagtagaagaaacatatggggaggacggatatctttcaggagaaatggcatattcatacgtaaagggcctccaaagtctaaatgtgacggcaatggtgaaacactttgcagcatttgctacaccagaacagggcatcaaccttgcacctgtacatggcggtgaacgagaacgtcttaccacatacctgcctcctttcaaacgagccattatcgacggtggcgcattctcgatcatggcagcttaccactcatatgacggcatcccagccgttgccgacaagcacttattgactgatattctgcgggatcaatggggttataagtattttgtatctagcgacgcaggcggtacagacagactgtgtgccgctttcaacatgtgcgagagtgatccgattgatatgcacgcggttgtcaactatgcactcccagctggccttgacgttgagatgggcggaggctcattcaactacgagacgatcccggaattggttgaagctgggaagttatccatcgacgttgtagatgaagctgtgaagcggcttttgcgtgcaaaattcgaggccggacttttcgagacaccttttacaggtgtcgctgaggatcagcaatccaaatacatcaacacacctgaaagcatcgcattggcccgccaactcgatggagagtcgattgtgctgctcgagaaccacgataatgtcctccctctaaaagcagacgcgaatgtcgccgtgatcggcccaatggctgactggatgaacgtgagttttccgacagtactaacagagaagcgtttaggcacaacaccattggatggcatcaagaatgccacaactggaaccgtcacatatgccctgggctgtgaacggtggtcaaatgatcagtcgggattcgacgaagccatcgcagcagccaactcggccgacgttgcagtcgtagtcgtcggcacatggtctcgagaccagaacgaactctgggcgggcctcaatgccaccactggcgagcacgttgatgtttcgaacttcaacctagttggcgccatgccgcacttggtcaaagccatcatcgataccggcaagccaacaatcgtggtgtatagttccggcaagcctattaccgagccgtggatttccacagaggcatccgcactcgtacagcagttttacccctcggagcagggaggcaacgcacttgcggacgttcttttcggtgctgtgaacccttctggtcgactctccgtatcatttccatgggatgtcggcacaacaccaatctactatgactacctgaattccgctcgagagagtccagatccagggacgatatcttcagacggcagcatccatttcggacatgcttacgtgatcggaagtccgttaccgatgtatccatttggctatggtctatcgtactcaaagttcacctattctaatattgccctttcccaaactacagcctcggcggacgacacagtgacggtaacagtagacgtaacgaacgaatctgccgtcgatggtagcgaagtcgtccagctatacgtcacggacgtgattagcagcgtggttgtgccgaacaaacagcttaaaggctttagcaaagtttcggtagcgtctggggcaactgaaaaagtcagcatcgatatcaacgtagctgacctaggtctctgggatctgtcgttgaaatatgtcgttgaaccgggcgcattcacaatcgccgttggaagttcaagtactgacttgcgacaaaatgcgacccttacggtcagctag

SEQ ID NO: 30563 - protein, 774 aa, Muscodor strobelii
  misc_feature: SGI Peptide ID NO. 570514
  misc_feature (109)..(337): Pfam Id: PF00933 Pfam Desc: Glycosyl hydrolase family 3 N terminal domain
  misc_feature (410)..(658): Pfam Id: PF01915 Pfam Desc: Glycosyl hydrolase family 3 C terminal domain
  misc_feature (1)..(773): NCBI GI: 154319766 Blast Desc: BC1G_02364 [Botryotinia fuckeliana B05.10] gi|150856022|gb|EDN31214.1| BC1G_02364 [Botryotinia fuckeliana B05.10]
  misc_feature (6)..(773): NCBI GI: 156046198 Blast Desc: SS1G_09366 [Sclerotinia sclerotiorum 1980] gi|154693761|gb|EDN93499.1| SS1G_09366 [Sclerotinia sclerotiorum 1980]
  misc_feature (24)..(773): NCBI GI: 121712846 Blast Desc: beta-glucosidase, [Aspergillus clavatus NRRL 1] gi|119402187|gb|EAW12608.1| beta-glucosidase, [Aspergillus clavatus NRRL 1]
  misc_feature (1)..(774): NCBI GI: 256733537 Blast Desc: glycoside hydrolase family 3 [Nectria haematococca mpVI 77-13-4]
  misc_feature (19)..(774): NCBI GI: 212530612 Blast Desc: beta-glucosidase, [Penicillium marneffei ATCC 18224] gi|210074861|gb|EEA28948.1| beta-glucosidase, [Penicillium marneffei ATCC 18224]
  misc_feature (21)..(773): NCBI GI: 119479889 Blast Desc: beta-glucosidase, [Neosartorya fischeri NRRL 181] gi|119408127|gb|EAW18076.1| beta-glucosidase, [Neosartorya fischeri NRRL 181]
  misc_feature (27)..(773): NCBI GI: 255949250 Blast Desc: Pc22g14710 [Penicillium chrysogenum Wisconsin 54-1255] gi|211592409|emb|CAP98759.1| Pc22g14710 [Penicillium chrysogenum Wisconsin 54-1255]
  misc_feature (23)..(774): NCBI GI: 242818171 Blast Desc: beta-glucosidase, [Talaromyces stipitatus ATCC 10500] gi|218713530|gb|EED12954.1| beta-glucosidase, [Talaromyces stipitatus ATCC 10500]
  misc_feature (21)..(773): NCBI GI: 159126340 Blast Desc: beta-glucosidase, [Aspergillus fumigatus A1163]
  misc_feature (21)..(773): NCBI GI: 70998408 Blast Desc: beta-glucosidase [Aspergillus fumigatus Af293] gi|66851562|gb|EAL91888.1| beta-glucosidase, [Aspergillus fumigatus Af293]
  misc_feature (39)..(767): SWISSPROT Homolog: EC 3.2.1.21 Beta-glucosidase
MRQPVTVAFAALAALTQFAYGQNATAVYKNPNAPVESRVADLLSRMTIKDKTSQLIQGDVRNWFDPDDYSFNASGLVFNMQNRAGQFYVGVPVPWEELSQAIKTGQDYLLHNTTLGIPAFVQTEGIHGFLMPNATIFNSPIAQACSFNPDLVKKMGIAIAQESRALGVNQIFGPLGDLARELRFGRVEETYGEDGYLSGEMAYSYVKGLQSLNVTAMVKHFAAFATPEQGINLAPVHGGERERLTTYLPPFKRAIIDGGAFSIMAAYHSYDGIPAVADKHLLTDILRDQWGYKYFVSSDAGGTDRLCAAFNMCESDPIDMHAVVNYALPAGLDVEMGGGSFNYETIPELVEAGKLSIDVVDEAVKRLLRAKFEAGLFETPFTGVAEDQQSKYINTPESIALARQLDGESIVLLENHDNVLPLKADANVAVIGPMADWMNVSFPTVLTEKRLGTTPLDGIKNATTGTVTYALGCERWSNDQSGFDEAIAAANSADVAVVVVGTWSRDQNELWAGLNATTGEHVDVSNFNLVGAMPHLVKAIIDTGKPTIVVYSSGKPITEPWISTEASALVQQFYPSEQGGNALADVLFGAVNPSGRLSVSFPWDVGTTPIYYDYLNSARESPDPGTISSDGSIHFGHAYVIGSPLPMYPFGYGLSYSKFTYSNIALSQTTASADDTVTVTVDVTNESAVDGSEVVQLYVTDVISSVVVPNKQLKGFSKVSVASGATEKVSIDINVADLGLWDLSLKYVVEPGAFTIAVGSSSTDLRQNATLTVS

SEQ ID NO: 30564 - DNA, 856 bp, Muscodor strobelii
  misc_feature: SGI EST ID NO. CUFF.72346.0
  misc_feature: Variant of the nucleotide sequence at SEQ ID NO 30562
atccgattgatatgcacgcggttgtcaactatgcactcccagctggccttgacgttgagatgggcggaggctcattcaactacgagacgatcccggaattggttgaagctgggaagttatccatcgacgttgtagatgaagctgtgaagcggcttttgcgtgcaaaattcgaggccggacttttcgagacaccttttacaggtgtcgctgaggatcagcaatccaaatacatcaacacacctgaaagcatcgcattggcccgccaactcgatggagagtcgattgtgctgctcgagaaccacgataatgtcctccctctaaaagcagacgcgaatgtcgccgtgatcggcccaatggctgactggatgaactacggcgactatgtgccctacttttcgcaatatcgagggtaagtataagactcgttccgtttggcttgtaatgttgagaacctaatttgtgttctagtatgataaatgaggccatatttacgcgctgtccgaaatcgcgttcgatctagcagtactaacagagaagcgtttaggcacaacaccattggatggcatcaagaatgccacaactggaaccgtcacatatgccctgggctgtgaacggtggtcaaatgatcagtcgggattcgacgaagccatcgcagcagccaactcggccgacgttgcagtcgtagtcgtcggcacatggtctcgagaccagaacgaactctgggcgggcctcaatgccaccactggcgagcacgttgatgtttcgaacttcaacctagttggcgccatgccgcacttggtcaaagccatcatcgataccggcaagccaacaatcgtggtgtatagttccggcaagc

SEQ ID NO: 30565 - DNA, 2355 bp, Muscodor strobelii
  misc_feature: SGI cDNA ID NO. 570515
  misc_feature: Encodes the peptide sequence at SEQ ID NO 30566
atgagacagcctgttacagtcgcgttcgcggccttagctgctcttacgcagtttgcctacggccaaaatgcaacagcagtctataaaaatcccaatgctccagtcgagagccgtgttgccgacttgctgtcgagaatgaccataaaggacaaaacatcacagttaattcaaggcgacgtaaggaactggttcgacccggacgattactcatttaatgcgtccggtctggtgttcaatatgcagaaccgtgcagggcagttctatgtcggagtgcctgtgccatgggaagagctcagtcaagccattaaaacgggacaagactatctactgcacaacacgacattaggcattccagctttcgtgcagactgaagggatccacgggttcttgatgcctaacgccacaatcttcaactctccgatcgctcaagcgtgttcattcaatccagatctagttaagaagatgggtatcgctatcgctcaagagtctcgtgccttgggggtaaaccaaatattcgggccattgggcgatctggctcgtgagctacgtttcggtagagtagaagaaacatatggggaggacggatatctttcaggagaaatggcatattcatacgtaaagggcctccaaagtctaaatgtgacggcaatggtgaaacactttgcagcatttgctacaccagaacagggcatcaaccttgcacctgtacatggcggtgaacgagaacgtcttaccacatacctgcctcctttcaaacgagccattatcgacggtggcgcattctcgatcatggcagcttaccactcatatgacggcatcccagccgttgccgacaagcacttattgactgatattctgcgggatcaatggggttataagtattttgtatctagcgacgcaggcggtacagacagactgtgtgccgctttcaacatgtgcgagagtgatccgattgatatgcacgcggttgtcaactatgcactcccagctggccttgacgttgagatgggcggaggctcattcaactacgagacgatcccggaattggttgaagctgggaagttatccatcgacgttgtagatgaagctgtgaagcggcttttgcgtgcaaaattcgaggccggacttttcgagacaccttttacaggtgtcgctgaggatcagcaatccaaatacatcaacacacctgaaagcatcgcattggcccgccaactcgatggagagtcgattgtgctgctcgagaaccacgataatgtcctccctctaaaagcagacgcgaatgtcgccgtgatcggcccaatggctgactggatgaactacggcgactatgtgccctacttttcgcaatatcgaggtatgataaatgaggccatatttacgcgctgcacaacaccattggatggcatcaagaatgccacaactggaaccgtcacatatgccctgggctgtgaacggtggtcaaatgatcagtcgggattcgacgaagccatcgcagcagccaactcggccgacgttgcagtcgtagtcgtcggcacatggtctcgagaccagaacgaactctgggcgggcctcaatgccaccactggcgagcacgttgatgtttcgaacttcaacctagttggcgccatgccgcacttggtcaaagccatcatcgataccggcaagccaacaatcgtggtgtatagttccggcaagcctattaccgagccgtggatttccacagaggcatccgcactcgtacagcagttttacccctcggagcagggaggcaacgcacttgcggacgttcttttcggtgctgtgaacccttctggtcgactctccgtatcatttccatgggatgtcggcacaacaccaatctactatgactacctgaattccgctcgagagagtccagatccagggacgatatcttcagacggcagcatccatttcggacatgcttacgtgatcggaagtccgttaccgatgtatccatttggctatggtctatcgtactcaaagttcacctattctaatattgccctttcccaaactacagcctcggcggacgacacagtgacggtaacagtagacgtaacgaacgaatctgccgtcgatggtagcgaagtcgtccagctatacgtcacggacgtgattagcagcgtggttgtgccgaacaaacagcttaaaggctttagcaaagtttcggtagcgtctggggcaactgaaaaagtcagcatcgatatcaacgtagctgacctaggtctctgggatctgtcgttgaaatatgtcgttgaaccgggcgcattcacaatcgccgttggaagttcaagtactgacttgcgacaaaatgcgacccttacggtcagctag

SEQ ID NO: 30566 - protein, 784 aa, Muscodor strobelii
  misc_feature: SGI Peptide ID NO. 570515
  misc_feature (109)..(337): Pfam Id: PF00933 Pfam Desc: Glycosyl hydrolase family 3 N terminal domain
  misc_feature (410)..(668): Pfam Id: PF01915 Pfam Desc: Glycosyl hydrolase family 3 C terminal domain
  misc_feature (1)..(783): NCBI GI: 154319766 Blast Desc: BC1G_02364 [Botryotinia fuckeliana B05.10] gi|150856022|gb|EDN31214.1| BC1G_02364 [Botryotinia fuckeliana B05.10]
  misc_feature (6)..(783): NCBI GI: 156046198 Blast Desc: SS1G_09366 [Sclerotinia sclerotiorum 1980] gi|154693761|gb|EDN93499.1| SS1G_09366 [Sclerotinia sclerotiorum 1980]
  misc_feature (24)..(783): NCBI GI: 121712846 Blast Desc: beta-glucosidase, [Aspergillus clavatus NRRL 1] gi|119402187|gb|EAW12608.1| beta-glucosidase, [Aspergillus clavatus NRRL 1]
  misc_feature (19)..(784): NCBI GI: 212530612 Blast Desc: beta-glucosidase, [Penicillium marneffei ATCC 18224] gi|210074861|gb|EEA28948.1| beta-glucosidase, [Penicillium marneffei ATCC 18224]
  misc_feature (21)..(783): NCBI GI: 119479889 Blast Desc: beta-glucosidase, [Neosartorya fischeri NRRL 181] gi|119408127|gb|EAW18076.1| beta-glucosidase, [Neosartorya fischeri NRRL 181]
  misc_feature (27)..(783): NCBI GI: 255949250 Blast Desc: Pc22g14710 [Penicillium chrysogenum Wisconsin 54-1255] gi|211592409|emb|CAP98759.1| Pc22g14710 [Penicillium chrysogenum Wisconsin 54-1255]
  misc_feature (1)..(784): NCBI GI: 256733537 Blast Desc: glycoside hydrolase family 3 [Nectria haematococca mpVI 77-13-4]
  misc_feature (23)..(784): NCBI GI: 242818171 Blast Desc: beta-glucosidase, [Talaromyces stipitatus ATCC 10500] gi|218713530|gb|EED12954.1| beta-glucosidase, [Talaromyces stipitatus ATCC 10500]
  misc_feature (21)..(783): NCBI GI: 159126340 Blast Desc: beta-glucosidase, [Aspergillus fumigatus A1163]
  misc_feature (21)..(783): NCBI GI: 70998408 Blast Desc: beta-glucosidase [Aspergillus fumigatus Af293] gi|66851562|gb|EAL91888.1| beta-glucosidase, [Aspergillus fumigatus Af293]
  misc_feature (39)..(779): SWISSPROT Homolog: EC 3.2.1.21 Beta-glucosidase
MRQPVTVAFAALAALTQFAYGQNATAVYKNPNAPVESRVADLLSRMTIKDKTSQLIQGDVRNWFDPDDYSFNASGLVFNMQNRAGQFYVGVPVPWEELSQAIKTGQDYLLHNTTLGIPAFVQTEGIHGFLMPNATIFNSPIAQACSFNPDLVKKMGIAIAQESRALGVNQIFGPLGDLARELRFGRVEETYGEDGYLSGEMAYSYVKGLQSLNVTAMVKHFAAFATPEQGINLAPVHGGERERLTTYLPPFKRAIIDGGAFSIMAAYHSYDGIPAVADKHLLTDILRDQWGYKYFVSSDAGGTDRLCAAFNMCESDPIDMHAVVNYALPAGLDVEMGGGSFNYETIPELVEAGKLSIDVVDEAVKRLLRAKFEAGLFETPFTGVAEDQQSKYINTPESIALARQLDGESIVLLENHDNVLPLKADANVAVIGPMADWMNYGDYVPYFSQYRGMINEAIFTRCTTPLDGIKNATTGTVTYALGCERWSNDQSGFDEAIAAANSADVAVVVVGTWSRDQNELWAGLNATTGEHVDVSNFNLVGAMPHLVKAIIDTGKPTIVVYSSGKPITEPWISTEASALVQQFYPSEQGGNALADVLFGAVNPSGRLSVSFPWDVGTTPIYYDYLNSARESPDPGTISSDGSIHFGHAYVIGSPLPMYPFGYGLSYSKFTYSNIALSQTTASADDTVTVTVDVTNESAVDGSEVVQLYVTDVISSVVVPNKQLKGFSKVSVASGATEKVSIDINVADLGLWDLSLKYVVEPGAFTIAVGSSSTDLRQNATLTVS

SEQ ID NO: 30567 - DNA, 856 bp, Muscodor strobelii; identical to SEQ ID NO: 30564
  misc_feature: SGI EST ID NO. CUFF.72346.0
  misc_feature: Variant of the nucleotide sequence at SEQ ID NO 30565

SEQ ID NO: 30568 - DNA, 2292 bp, Muscodor strobelii
  misc_feature: SGI cDNA ID NO. 570516
  misc_feature: Encodes the peptide sequence at SEQ ID NO 30569
atgggtgtaaattctcgtgatcgagctccggcgcgcaggaggaccggattcgtcgtgttttctatcgtatcattcctggttctcggtgtgttcttcgcatctacgctaggaggcggccaggcgaatagacagaatttccgcggtgcacacaagaagtcatcgaagacgacgcatggggattcattctcatcctcaaatgcgcgcgcgagcgcgacgggcgacaaatatctcatcggagtgggcaaagctgatataactggacctgttgtcgagatcaatttcgccggatatgccgacctaagccaggttggcaccggcgtgcgacagaggattttcgcccgttctttcattgtcggagatgtgaacaatcccaatgatcgcttcgtctatgtcaacatcgacacccaaggcggagatactgctgtccgatatggcattctcaacgccattgcagcacttggtgacgactactcaatgtacggacagagcaatattgctgttgttggaacacattcacattccggacctggcgcctggttcaattaccttctaccgcaaattacgagtctgggctttgacaagcaaagttggcaagccattgtcgacggtgccgtcctctccatcaagagggcccatgagtctttaacagagggctacctcgactacggaactgtcgatgttgaggattccaatctgagtcgtagtctgtacgcctacatgaacaacccagctgcagagcgagaccagtattccgataccgtcgacaaggaaatgactgttcttagattccagcgagcctcagatagcaaggatattggtatcttgacatggttccctgtccacggcacatccgtttaccagaacaacacccatgtgaccggtgacaacaagggtgtcgctgcactcatgttcgagaaggcgatggttggagttgatacggctgcggatggatttgttgctggattctcacaggcgaacgtcggtgacacgactcccaacactcttggagcatggtgtgatgatggttctggcgagatgtgcacgtatgagaacagtacctgcaacggcacttcgcaggcttgccacggacgtggaccccaattcgcgaaacttgatcttggtatctcgagctgcttagaaatcggaactaatcagtataacggggctcgatccgtatatgattcattcagcagctcaggaacacccgtcgttgggtccagcgttaaagcgttccattttttccagaatatgaccttctggaacttccaattacccgacggcactcaagcgcagacatgtcccgctgcccttggttacagttttgcagccggcacgactgatggccctggagcatttgacttcacacaagctgattctggccatccaagtgcgagccctgtgtgggctgtcgttagctctttgctgagagcaccttcacctgcgcagaaagcctgccaaggatcgaaacccgtccttcttgacgtgggtgagatcgataccccgtacgcatggtctccaaatatcgtcgatatccaaatgttccgggtgggccaattcgtgatgattgttgcccccggcgaagcaacgacgatggctggccgaagatggcgtagcgccattgccgacgcggctgcagatatcacagacgcaacgccaaaggttgttatcggtgggccggccaacacttatgcgcactacattaccacgccggaggagtatgagatccagcggtacgagggcgcgagcacgctctatggcccacatgagctaccagcctatatcaatctcacggtcagcaacattggctacctcgcaccagattccacgagctctccgccgccgggtcccagtccgccagataatcatgataacagtctctcgttcatcacgcccgtggtacaggataatgcacctctggggaagaagttcggccaggtgacaacccagccatcagcaacttacgcccgtggtgctgttgtgaacacgacattcgttggtgctaatccgcggaacaacctgcgactggaaggcacatttgccgctattgagcaactaggctctgatggtacgacctggacccgggtccgtgacgatacggattggagcttggtgtacacgtggacccgaacaaacaccgcactcgggtacagcgatgttgtgatcagctgggaaacagagagtaccgcagctcctgggacgtaccgaaccgtttactatggtgatagtaaggcgcttcttacaggaactgtttcggcatttacggggacaagtaatagcttcaagctcacataa

SEQ ID NO: 30569 - protein, 763 aa, Muscodor strobelii
  misc_feature: SGI Peptide ID NO. 570516
  misc_feature (75)..(763): Pfam Id: PF04734 Pfam Desc: Neutral/alkaline non-lysosomal ceramidase
  misc_feature (317)..(763): Pfam Id: PF04734 Pfam Desc: Neutral/alkaline non-lysosomal ceramidase
  misc_feature (75)..(306): Pfam Id: PF04734 Pfam Desc: Neutral/alkaline non-lysosomal ceramidase
  misc_feature (28)..(762): NCBI GI: 145255556 Blast Desc: An18g05500 [Aspergillus niger] gi|134084592|emb|CAK97468.1| protein product [Aspergillus niger]
  misc_feature (74)..(762): NCBI GI: 240280814 Blast Desc: neutral ceramidase [Ajellomyces capsulatus H143]
  misc_feature (76)..(744): NCBI GI: 169597859 Blast Desc: SNOG_01721 [Phaeosphaeria nodorum SN15] gi|160707604|gb|EAT91370.2| SNOG_01721 [Phaeosphaeria nodorum SN15]
  misc_feature (14)..(762): NCBI GI: 238844156 Blast Desc: neutral ceramidase [Microsporum canis CBS 113480]
  misc_feature (4)..(632): NCBI GI: 116202247 Blast Desc: CHGG_09008 [Chaetomium globosum CBS 148.51] gi|88177526|gb|EAQ84994.1| CHGG_09008 [Chaetomium globosum CBS 148.51]
  misc_feature (53)..(762): NCBI GI: 261206216 Blast Desc: neutral/alkaline nonlysosomal ceramidase [Ajellomyces dermatitidis SLH14081] gi|239592904|gb|EEQ75485.1| neutral/alkaline nonlysosomal ceramidase [Ajellomyces SLH14081]
  misc_feature (14)..(762): NCBI GI: 110339265 Blast Desc: ceramidase [Trichophyton rubrum]
  misc_feature (14)..(762): NCBI GI: 209976058 Blast Desc: ceramidase [Trichophyton equinum] gi|219816462|gb|ACL37333.1| ceramidase [Trichophyton tonsurans]
  misc_feature (88)..(762): NCBI GI: 239610925 Blast Desc: neutral/alkaline nonlysosomal ceramidase [Ajellomyces dermatitidis ER-3]
  misc_feature (18)..(763): NCBI GI: 119187867 Blast Desc: CIMG_03981 [Coccidioides immitis RS]
  misc_feature (76)..(745): SWISSPROT Homolog: EC 3.5.1.23 Ceramidase
MGVNSRDRAPARRRTGFVVFSIVSFLVLGVFFASTLGGGQANRQNFRGAHKKSSKTTHGDSFSSSNARASATGDKYLIGVGKADITGPVVEINFAGYADLSQVGTGVRQRIFARSFIVGDVNNPNDRFVYVNIDTQGGDTAVRYGILNAIAALGDDYSMYGQSNIAVVGTHSHSGPGAWFNYLLPQITSLGFDKQSWQAIVDGAVLSIKRAHESLTEGYLDYGTVDVEDSNLSRSLYAYMNNPAAERDQYSDTVDKEMTVLRFQRASDSKDIGILTWFPVHGTSVYQNNTHVTGDNKGVAALMFEKAMVGVDTAADGFVAGFSQANVGDTTPNTLGAWCDDGSGEMCTYENSTCNGTSQACHGRGPQFAKLDLGISSCLEIGTNQYNGARSVYDSFSSSGTPVVGSSVKAFHFFQNMTFWNFQLPDGTQAQTCPAALGYSFAAGTTDGPGAFDFTQADSGHPSASPVWAVVSSLLRAPSPAQKACQGSKPVLLDVGEIDTPYAWSPNIVDIQMFRVGQFVMIVAPGEATTMAGRRWRSAIADAAADITDATPKVVIGGPANTYAHYITTPEEYEIQRYEGASTLYGPHELPAYINLTVSNIGYLAPDSTSSPPPGPSPPDNHDNSLSFITPVVQDNAPLGKKFGQVTTQPSATYARGAVVNTTFVGANPRNNLRLEGTFAAIEQLGSDGTTWTRVRDDTDWSLVYTWTRTNTALGYSDVVISWETESTAAPGTYRTVYYGDSKALLTGTVSAFTGTSNSFKLT

SEQ ID NO: 30570 - DNA, 2815 bp, Muscodor strobelii
  misc_feature: SGI EST ID NO. CUFF.72352.0
  misc_feature: Variant of the nucleotide sequence at SEQ ID NO 30568
tttgagtaaaacaaaagtatggatttggcatccgttccccgcgaattgcacggtcgcctgcctctcctagagacggcagcaggcacacccgtatgcaattcatggtcgtaaagcttggtcgcgacgtcgtcgtggcctccaacctgctttcttgtgcagaaatcgcaattaaaccccctgtcactgcaacctcatacctgagaggacccccagctagtatgaacgagtgaccatttatatatcgcaagataaggaccacgttgatttgtctactttatgatcttgtacttctgttgtaaacataaatctacaacccgaagtgaccggacacgaattgtgcccgccgtgtcttgttgaccaacattgagactgaggttgttggagggcactcgctctctgtgagcatagcggaataatgggtgtaaattctcgtgatcgagctccggcgcgcaggaggaccggattcgtcgtgttttctatcgtatcattcctggttctcggtgtgttcttcgcatctacgctaggaggcggccaggcgaatagacagaatttccgcggtgcacacaagaagtcatcgaagacgacgcatggggattcattctcatcctcaaatgcgcgcgcgagcgcgacgggcgacaaatatctcatcggagtgggcaaagctgatataactggacctgttgtcgagatcaatttcgccggatatgccgacctaagccaggttggcaccggcgtgcgacagaggattttcgcccgttctttcattgtcggagatgtgaacaatcccaatgatcgcttcgtctatgtcaacatcgacacccaaggcggagatactgctgtccgatatggcattctcaacgccattgcagcacttggtgacgactactcaatgtacggacagagcaatattgctgttgttggaacacattcacattccggacctggcgcctggttcaattaccttctaccgcaaattacgagtctgggctttgacaagcaaagttggcaagccattgtcgacggtgccgtcctctccatcaagagggcccatgagtctttaacagagggctacctcgactacggaactgtcgatgttgaggattccaatctgagtcgtagtctgtacgcctacatgaacaacccagctgcagagcgagaccagtattccgataccgtcgacaaggaaatgactgttcttagattccagcgagcctcagatagcaaggatattggtatcttgacatggttccctgtccacggcacatccgtttaccagaacaacacccatgtgaccggtgacaacaagggtgtcgctgcactcatgttcgagaaggcgatggttggagttgatacggctgcggatggatttgttgctggattctcacaggcgaacgtcggtgacacgactcccaacactcttggagcatggtgtgatgatggttctggcgagatgtgcacgtatgagaacagtacctgcaacggcacttcgcaggcttgccacggacgtggaccccaattcgcgaaacttgatcttggtatctcgagctgcttagaaatcggaactaatcagtataacggggctcgatccgtatatgattcattcagcagctcaggaacacccgtcgttgggtccagcgttaaagcgttccattttttccagaatatgaccttctggaacttccaattacccgacggcactcaagcgcagacatgtcccgctgcccttggttacagttttgcagccggcacgactgatggccctggagcatttgacttcacacaagctgattctggccatccaagtgcgagccctgtgtgggctgtcgttagctctttgctgagagcaccttcacctgcgcagaaagcctgccaaggatcgaaacccgtccttcttgacgtgggtgagatcgataccccgtacgcatggtctccaaatatcgtcgatatccaaatgttccgggtgggccaattcgtgatgattgttgcccccggcgaagcaacgacgatggctggccgaagatggcgtagcgccattgccgacgcggctgcagatatcacagacgcaacgccaaaggttgttatcggtgggccggccaacacttatgcgcactacattaccacgccggaggagtatgagatccagcggtacgagggcgcgagcacgctctatggcccacatgagctaccagcctatatcaatctcacggtcagcaacattggctacctcgcaccagattccacgagctctccgccgccgggtcccagtccgccagataatcatgataacagtctctcgttcatcacgcccgtggtacaggataatgcacctctggggaagaagttcggccaggtgacaacccagccatcagcaacttacgcccgtggtgctgttgtgaacacgacattcgttggtgctaatccgcggaacaacctgcgactggaaggcacatttgccgctattgagcaactaggctctgatggtacgacctggacccgggtccgtgacgatacggattggagcttggtgtacacgtggacccgaacaaacaccgcactcgggtacagcgatgttgtgatcagctgggaaacagagagtaccgcagctcctgggacgtaccgaaccgtttactatggtgatagtaaggcgcttcttacaggaactgtttcggcatttacggggacaagtaatagcttcaagctcacataatggacgaaaagacggtcgatatcatcgacatgatggtaatatcacttcgggctcttaatatatggtgtacatctccattttaatgaagtatgactagcgataccgatg

SEQ ID NO: 30571 - DNA, 1074 bp, Muscodor strobelii
  misc_feature: SGI cDNA ID NO. 570517
  misc_feature: Reduced expression when VOC is produced
  misc_feature: Encodes the peptide sequence at SEQ ID NO 30572
atgaggctcatcattcgcgacgacgctgagactgccagctcctatgtagccaattacatcattgatcgcattcagcacttcaaccccacccctacacatcccttcgtgcttggtctaccaacaggctcaagtcctcttggtgtttacaagattttagttgagaaatacaaggccggcttgatctcttttgagaatgtcgttactttcaacatggatgaatacgtgggcattccccgggaccatcccgagagctaccactcgttcatgtggaaaaacttcttttctcacgtcaacgtgaagcccaataacgtacacattctcaatggcaatgctccaaatttagaggctgagtgcgtcgagtacgaagctagcatcaagcgtgctggtggcattgatctcttcctgggtggcattggtgaggatggccacatcgccttcaatgagcctggctcgagcttggcatccagaactcgtgtcaagaccttggcatatgatacaattctcgcaaactctcgattcttcgacaatgacgtggcgaaggtcccacgaatggccttgacggtcggtgtgcaaaccgttctggaggcgagagaagtcgtcgtcatcattctcggtgcccgcaaatctctagccttgcagaaatgtattgaacaaggtgtgaaccacatgtggacactctcaagtcttcagctgcaccctcatcctatgattgtgtgtgacgaggatgccacgttggagttgcaagtgaagactgttaagtacttcaagagtattgagaaggttgcgctggagcagggctttgaacagattctaccttcaagcatccgcactggtccaggaccaatccctcagactgtagtagatgaagttcaatcccctacgattctggccccgcagcccatgacatcgcaactacttcgtgcagtccctgctactgagtatcctgttcggtctgtgtcacccgatcttgtgccggaccgtatggccgaccgtgtcggggtgcctgatcttgctcggagactgacgcccaatcccgagcagcaggcgcaacgagtggccagtgttggcgcgtaa

SEQ ID NO: 30572 - protein, 357 aa, Muscodor strobelii
  misc_feature: SGI Peptide ID NO. 570517
  misc_feature (15)..(250): Pfam Id: PF01182 Pfam Desc: Glucosamine-6-phosphate isomerases/6-phosphogluconolactonase
  misc_feature (1)..(348): NCBI GI: 39974457 Blast Desc: MGG_00625 [Magnaporthe grisea 70-15] gi|145018466|gb|EDK02745.1| MGG_00625 [Magnaporthe grisea 70-15]
  misc_feature (1)..(350): NCBI GI: 256734051 Blast Desc: [Nectria haematococca mpVI 77-13-4]
  misc_feature (1)..(348): NCBI GI: 46128041 Blast Desc: FG08398.1 [Gibberella zeae PH-1]
  misc_feature (1)..(332): NCBI GI: 154314459 Blast Desc: BC1G_05323 [Botryotinia fuckeliana B05.10] gi|150848968|gb|EDN24161.1| BC1G_05323 [Botryotinia fuckeliana B05.10]
  misc_feature (1)..(332): NCBI GI: 156036292 Blast Desc: SS1G_12835 [Sclerotinia sclerotiorum 1980] gi|154698240|gb|EDN97978.1| SS1G_12835 [Sclerotinia sclerotiorum 1980]
  misc_feature (1)..(357): NCBI GI: 261359464 Blast Desc: glucosamine-6-phosphate isomerase [Verticillium albo-atrum VaMs.102]
  misc_feature (1)..(338): NCBI GI: 189204306 Blast Desc: glucosamine-6-phosphate deaminase [Pyrenophora tritici-repentis Pt-1C-BFP] gi|187985587|gb|EDU51075.1| glucosamine-6-phosphate deaminase [Pyrenophora tritici-repentis
  misc_feature (1)..(332): NCBI GI: 171682028 Blast Desc: protein product [Podospora anserina] gi|170940973|emb|CAP66623.1| protein product [Podospora anserina]
  misc_feature (1)..(333): NCBI GI: 169615342 Blast Desc: SNOG_10828 [Phaeosphaeria nodorum SN15] gi|160702940|gb|EAT82222.2| SNOG_10828 [Phaeosphaeria nodorum SN15]
  misc_feature (1)..(333): NCBI GI: 261361336 Blast Desc: glucosamine-6-phosphate deaminase [Verticillium albo-atrum VaMs.102]
  misc_feature (1)..(258): SWISSPROT Homolog: EC 3.5.99.6 Glucosamine-6-phosphate deaminase
  misc_feature: Useful for introducing or modulating the production of volatile compounds
MRLIIRDDAETASSYVANYIIDRIQHFNPTPTHPFVLGLPTGSSPLGVYKILVEKYKAGLISFENVVTFNMDEYVGIPRDHPESYHSFMWKNFFSHVNVKPNNVHILNGNAPNLEAECVEYEASIKRAGGIDLFLGGIGEDGHIAFNEPGSSLASRTRVKTLAYDTILANSRFFDNDVAKVPRMALTVGVQTVLEAREVVVIILGARKSLALQKCIEQGVNHMWTLSSLQLHPHPMIVCDEDATLELQVKTVKYFKSIEKVALEQGFEQILPSSIRTGPGPIPQTVVDEVQSPTILAPQPMTSQLLRAVPATEYPVRSVSPDLVPDRMADRVGVPDLARRLTPNPEQQAQRVASVGA

SEQ ID NO: 30573 - DNA, 1611 bp, Muscodor strobelii
  misc_feature: SGI EST ID NO. CUFF.72356.0
  misc_feature: Variant of the nucleotide sequence at SEQ ID NO 30571
catcgaagcaccctggtgtcatcaagatgaaatcgaccatccctcactgccagcggcatctgcccctcataaccgttatgaagccatatttcctgactgtttcctatattccctcttctttgctacaggcaagaaaacagtagatacattacatcttaccttttactccaatatcgtgtccggtacctcgatttgtattcctttttgatctccacgcttttcctcttcagatactagtcaacatgaggctcatcattcgcgacgacgctgagactgccagctcctatgtagccaattacatcattgatcgcattcagcacttcaaccccacccctacacatcccttcgtgcttggtctaccaacaggctcaagtcctcttggtgtttacaagattttagttgagaaatacaaggccggcttgatctcttttgagaatgtcgttactttcaacatggatgaatacgtgggcattccccgggaccatcccgagagctaccactcgttcatgtggaaaaacttcttttctcacgtcaacgtgaagcccaataacgtacacattctcaatggcaatgctccaaatttagaggctgagtgcgtcgagtacgaagctagcatcaagcgtgctggtggcattgatctcttcctgggtggcattggtgaggatggccacatcgccttcaatgagcctggctcgagcttggcatccagaactcgtgtcaagaccttggcatatgatacaattctcgcaaactctcgattcttcgacaatgacgtggcgaaggtcccacgaatggccttgacggtcggtgtgcaaaccgttctggaggcgagagaagtcgtcgtcatcattctcggtgcccgcaaatctctagccttgcagaaatgtattgaacaaggtgtgaaccacatgtggacactctcaagtcttcagctgcaccctcatcctatgattgtgtgtgacgaggatgccacgttggagttgcaagtgaagactgttaagtacttcaagagtattgagaaggttgcgctggagcagggctttgaacagattctaccttcaagcatccgcactggtccaggaccaatccctcagactgtagtagatgaagttcaatcccctacgattctggccccgcagcccatgacatcgcaactacttcgtgcagtccctgctactgagtatcctgttcggtctgtgtcacccgatcttgtgccggaccgtatggccgaccgtgtcggggtgcctgatcttgctcggagactgacgcccaatcccgagcagcaggcgcaacgagtggccagtgttggcgcgtaaatgcccatttcacaaattcgcgaccattatgactccctgggacgagtacgtgttgggataacaaatggacaattgtgtatccaacatacgacattttggagttgaaaatcagttatggaaatttctaagcatagcaattgtattttagttattggcagcacgaaaccgtgatggtatgaacaggtataccgaaattatgactggccatttgaaatatagatatcagcacaagcatagactggcgtgttgcagaattaagatacccaaatatcacgattacaataataatattttc

SEQ ID NO: 30574 - DNA, 1602 bp, Muscodor strobelii
  misc_feature: SGI cDNA ID NO. 570518
  misc_feature: Reduced expression when VOC is produced
  misc_feature: Encodes the peptide sequence at SEQ ID NO 30575
atggcaacaataagaaaatcgttgttggcggcgttgaagtccttcctccgcggcaagtccttcttgcaggcgttgtttgcgttctggattagcccccaaaaattaaaggatcaacatgtcggcaataagataaccagtccctcccaaacacttgaagagtttttgagggaagtggaggaacgactattaggccccatcgcaggggataagctacgggtattctcatcagatctcaaggcacaatttaaggaaaggctgcaaacacatcccgaatgtatgctcccgtctttcaaccatctcttgcccactggcaaggaaattggccagttcctagccctcgacgttggaggatcgacgttgcgtgtggctttggtcgaactacgtggacgtgagactacaggaagggaaaacgagattgtgcgtatgagtagcttcaaaattacgccggaaatcaagcaactgaagggtcttgccttttttgactggatggcaatgcggataaacgaagttatcaacaaagatggtgcttcggatgcagcaaaacaaacgatacctatgggcttagcatggagttttcctgtcgatcaagtttccttgggtggtggtctcctgatgggcatgggcaaaggcttcctcgctacggaaggtctgttaggtcaggaccttggagagatcatcaagttcgcttgctcgaagcaagggctcaatgtacagcttgagtcaatcatcaatgatagcagtgcaacgctactatctcaagcttacacacacgccgggacgagattcgggctaatattgggcactggtacgaacatcgcagtacatctccctgtgtctgccatcggccgagccaagtttggtgctcgacccgagtcgtggtttgatactgcgagccatgtgatagtgaacacagaactaggcatgttcgggcatgacatccttcccttaactcggtgggatgagcttcttaatgcctcacacccaagaccggattttcaacctctcgagcacttgctcagcggctattacctgggcgagatctgccgtcttgctattgttgaggctgtcgaatgcacgggattacttggcggcgtactaccaccatcgctcgccaacccatactctctcgacaccgaaattctctcacgaatggaagccgatacatcatcctctctcgaagtagccacaacaatattcacatctgcccatgaatgccctatacccgctacacacgccgatattgccgccatctgcaagattgcctggtgcgtctcgcagcgctccgccgcgctattggcagcttgcgtcttctctctttgggaactacgatacgaggctactgccgaggacgttttagaagagaagacctcggcagtgatagaagacatctcaacaccaccccacaccaaagtcgctttcaacggttcagtcatcgagcattatccaggctacttagcaaactgccagaaccacatccaaacgctagtctcaggtgccacaaatactgttctagcctctgggtcgattgatctcgtgccagccatcgagagctcgatcatcggcgctgccgtcgctttaggatgcgcagttgctgaggcataa

SEQ ID NO: 30575 - protein, 533 aa, Muscodor strobelii
  misc_feature: SGI Peptide ID NO. 570518
  misc_feature (52)..(257): Pfam Id: PF00349 Pfam Desc: Hexokinase
  misc_feature (259)..(529): Pfam Id: PF03727 Pfam Desc: Hexokinase
  misc_feature (93)..(257): Pfam Id: PF00349 Pfam Desc: Hexokinase
  misc_feature (298)..(434): Pfam Id: PF03727 Pfam Desc: Hexokinase
  misc_feature (1)..(528): NCBI GI: 39974461 Blast Desc: MGG_00623 [Magnaporthe grisea 70-15] gi|145018468|gb|EDK02747.1| MGG_00623 [Magnaporthe grisea 70-15]
  misc_feature (1)..(530): NCBI GI: 261359462 Blast Desc: hexokinase-1 [Verticillium albo-atrum VaMs.102]
  misc_feature (1)..(532): NCBI GI: 85097008 Blast Desc: NCU04728 [Neurospora crassa OR74A] gi|28921852|gb|EAA31127.1| [Neurospora crassa OR74A] gi|39979178|emb|CAE85550.1| related to hexokinase [Neurospora
  misc_feature (1)..(526): NCBI GI: 46128043 Blast Desc: FG08399.1 [Gibberella zeae PH-1]
  misc_feature (1)..(526): NCBI GI: 256733540 Blast Desc: NECHADRAFT_91891 [Nectria haematococca mpVI 77-13-4]
  misc_feature (1)..(521): NCBI GI: 156036290 Blast Desc: SS1G_12834 [Sclerotinia sclerotiorum 1980] gi|154698239|gb|EDN97977.1| SS1G_12834 [Sclerotinia sclerotiorum 1980]
  misc_feature (1)..(521): NCBI GI: 154314457 Blast Desc: BC1G_05322 [Botryotinia fuckeliana B05.10] gi|150848967|gb|EDN24160.1| BC1G_05322 [Botryotinia fuckeliana B05.10]
  misc_feature (6)..(528): NCBI GI: 189204302 Blast Desc: hexokinase-1 [Pyrenophora tritici-repentis Pt-1C-BFP] gi|187985585|gb|EDU51073.1| hexokinase-1 [Pyrenophora tritici-repentis Pt-1C-BFP]
  misc_feature (49)..(521): NCBI GI: 212532381 Blast Desc: hexokinase, [Penicillium marneffei ATCC 18224] gi|210071711|gb|EEA25800.1| hexokinase, [Penicillium marneffei ATCC 18224]
  misc_feature (22)..(521): NCBI GI: 238842121 Blast Desc: hexokinase-1 [Microsporum canis CBS 113480]
  misc_feature (65)..(495): SWISSPROT Homolog: EC 2.7.1.1 Hexokinase
  misc_feature: Useful for introducing or modulating the production of volatile compounds
MATIRKSLLAALKSFLRGKSFLQALFAFWISPQKLKDQHVGNKITSPSQTLEEFLREVEERLLGPIAGDKLRVFSSDLKAQFKERLQTHPECMLPSFNHLLPTGKEIGQFLALDVGGSTLRVALVELRGRETTGRENEIVRMSSFKITPEIKQLKGLAFFDWMAMRINEVINKDGASDAAKQTIPMGLAWSFPVDQVSLGGGLLMGMGKGFLATEGLLGQDLGEIIKFACSKQGLNVQLESIINDSSATLLSQAYTHAGTRFGLILGTGTNIAVHLPVSAIGRAKFGARPESWFDTASHVIVNTELGMFGHDILPLTRWDELLNASHPRPDFQPLEHLLSGYYLGEICRLAIVEAVECTGLLGGVLPPSLANPYSLDTEILSRMEADTSSSLEVATTIFTSAHECPIPATHADIAAICKIAWCVSQRSAALLAACVFSLWELRYEATAEDVLEEKTSAVIEDISTPPHTKVAFNGSVIEHYPGYLANCQNHIQTLVSGATNTVLASGSIDLVPAIESSIIGAAVALGCAVAEA

SEQ ID NO: 30576 - DNA, 2949 bp, Muscodor strobelii
  misc_feature: SGI EST ID NO. CUFF.72364.0
  misc_feature: Variant of the nucleotide sequence at SEQ ID NO 30574
cgcaacctcagtgacacagcccacgaccaagcacacaccagtagaagtcacctgcctaggccagcgtcgtcggtctcagagatcttctcttcccgccccgtcctgcagggtcctagtcgccttattccgtgccattcggccctcccctttctctccagacatcgagatacaggcgatcaccgcctagtaaatctgctctagctgaaagcttgagaggcctgtagcccatcgcgtgcctgtccgttgaccgtagcttcgggagatatggcccatctttattcgtaacagcagggatctctgccaaactagcaacatcgtatatgcgcatctgtgtttgttggcgttgattgatctctttcatcgtcgttgcttgtctgcttcccattcgttgcgacttgctgctactgtcttagaggccggcccgttattgaacatctgctctatctatcgtacattcagttgcctgtttcaaagcaacatctcctgctggccttagcaaatgtccagctattgtatctaattacagctgccgacccattcgctcatattgcatcactcgctcgcgttgcaacttacctctttcgttacccgtgttactttgtgcatattgcatctaagccctgtggttggttcgtcagttgttgtttgtacggatcgtacacggccagatcgaaccccagggccacaccatcaattctcagacactacaggaattgtaccggcaggtttcattcttcccggcccagctcttttgccgccaatacgagtatcaccttggctgtatagacaccgtgcaacataacgtttgcgggatgtggcaagcatctctggagtagcaaattgtttctcaaattagcactgtttgttgttttcgttgacggcctatactgtcgcaacgtaaatgacttacatataccaccccacctccagccctcgaactcagtattacctctggtcatgccgccgtttactaccgcaatggcaacaataagaaaatcgttgttggcggcgttgaagtccttcctccgcggcaagtccttcttgcaggcgttgtttgcgttctggattagcccccaaaaattaaaggatcaacatgtcggcaataagataaccagtccctcccaaacacttgaagagtttttgagggaagtggaggaacgactattaggccccatcgcaggggataagctacgggtattctcatcagatctcaaggcacaatttaaggaaaggctgcaaacacatcccgaatgtatgctcccgtctttcaaccatctcttgcccactggcaaggaaattggccagttcctagccctcgacgttggaggatcgacgttgcgtgtggctttggtcgaactacgtggacgtgagactacaggaagggaaaacgagattgtgcgtatgagtagcttcaaaattacgccggaaatcaagcaactgaagggtcttgccttttttgactggatggcaatgcggataaacgaagttatcaacaaagatggtgcttcggatgcagcaaaacaaacgatacctatgggcttagcatggagttttcctgtcgatcaagtttccttgggtggtggtctcctgatgggcatgggcaaaggcttcctcgctacggaaggtctgttaggtcaggaccttggagagatcatcaagttcgcttgctcgaagcaagggctcaatgtacagcttgagtcaatcatcaatgatagcagtgcaacgctactatctcaagcttacacacacgccgggacgagattcgggctaatattgggcactggtacgaacatcgcagtacatctccctgtgtctgccatcggccgagccaagtttggtgctcgacccgagtcgtggtttgatactgcgagccatgtgatagtgaacacagaactaggcatgttcgggcatgacatccttcccttaactcggtgggatgagcttcttaatgcctcacacccaagaccggattttcaacctctcgagcacttgctcagcggctattacctgggcgagatctgccgtcttgctattgttgaggctgtcgaatgcacgggattacttggcggcgtactaccaccatcgctcgccaacccatactctctcgacaccgaaattctctcacgaatggaagccgatacatcatcctctctcgaagtagccacaacaatattcacatctgcccatgaatgccctatacccgctacacacgccgatattgccgccatctgcaagattgcctggtgcgtctcgcagcgctccgccgcgctattggcagcttgcgtcttctctctttgggaactacgatacgaggctactgccgaggacgttttagaagagaagacctcggcagtgatagaagacatctcaacaccaccccacaccaaagtcgctttcaacggttcagtcatcgagcattatccaggctacttagcaaactgccagaaccacatccaaacgctagtctcaggtgccacaaatactgttctagcctctgggtcgattgatctcgtgccagccatcgagagctcgatcatcggcgctgccgtcgctttaggatgcgcagttgctgaggcataagcacttgacgcctttctgtcaccatttaatcaacattgcacaccgaaatatgtatatactgcattctattattcgttgatttactagcatagcgcccgtactagagcttgctctagaggcttactccaagcattgttggaaacggagtggttgggagcgatatggattcattggtttagagaaacccaggggaagcggcagataggacacgatctcaggagatcttcgtggtccgggagctttgtacatagtggatggcagatttggatttattggagtataatgaataacgcgatggattctacaacaatgttgcccatggctcatgtgttcaatccatatctggcgatttgaagctgaatcgatcgc

SEQ ID NO: 30577 - DNA, 1572 bp, Muscodor strobelii
  misc_feature: SGI cDNA ID NO. 570519
  misc_feature: Encodes the peptide sequence at SEQ ID NO 30578
atggccgcctataactcgatgccggcgcctagtcccggcgaagctatggcgatgaatgctgccatcgccggcccgggcttggggatcgacgtttttgacccggacctaaactttgacgagtccatgttagacccctccaatggcgtcctacctgcattaccatacacaccagggtacgacttcgagttcaccaccaccttcgaagaccccttcaactaccagagaccctacgagacacagcagaatgccgaagacgcacaggacgaaggctcctcgccccagcagcccgacgacaagctgctgggcttctccgccgttgtccccaaggcaacgcccttcgacgatgcccttggcagttactccgagctgaacatgaccgccgaactctacggcatgttcttcgttgccgaagatgtctttggcggcgagacgacgggccgccctctggaacttacctgctatcggcggaatttatggcaatgctccggaagtattaccatgccgagacactgcacccaagtcatgaacgaacagggccgtcaggtccccatagtcgagttttacgcctccatttctgcagccgagagcatcgagggcaaagcgaccgagatcatcagcatcccatggaagagtagcaacccagccatgggcgagggtcaagaaacaaaagtggccggtgcgccacccaagattttgttagatctcagcgccggccaagagttagatggccaccgtgtcagctacccagtgtcgtggaaacggttgcaattcaaaagcgctactgcgaacaacggccgccgcaagggtcttcaacagcattatgtcgttcagatcagcttgttagggaagttaaaggcaaacggagaactaatgaagatcgccgagatccaaagtggtccggtcattgtccgtggacgcagtccccggaatttcgacagcagaaaagatgtacagctcacaggggagaagaaagtcaccaacaacggcgaaagacctcggacacagagcgatgcaagcgcggcgcccacacccaacctaaagaccgagaggacggactcgctcggcgtttcttcattccctgcggtcaataataatacatcacaacaaagtaactgggtcgcacctgcgacaccggcaaatacgaacggacacaatgggcagcaacatcccgcgaaaaggatggctatctcaccaaacttaagcaagccgcccatccccaaatggggacaggaccatagtccgaataagatagcgaagaaccacacaaccgctgcatcaggtccgattaacctatccctctcggaagacgaacgcagtccgaataacaggtcgactacggactcgcttactagcccacgaatgcaccgaacgtcgacagcacatactaccggtgccagccctcaggaagaagaggaggagctgtatgaatacttcccgttacgagttggcgattggacaccgttaatcgacacggtctaccgtccgcatatattgcatcacatatccccaccgcaagaaatcaaggcgcagcagattaggagcaagtcgaagagatatttctcggctgattga

SEQ ID NO: 30578 - protein, 523 aa, Muscodor strobelii
  misc_feature: SGI Peptide ID NO. 570519
  misc_feature (150)..(314): Pfam Id: PF05224 Pfam Desc: NDT80 / PhoG like DNA-binding family
  misc_feature (1)..(521): NCBI GI: 256733539 Blast Desc: NECHADRAFT_35170 [Nectria haematococca mpVI 77-13-4]
  misc_feature (1)..(523): NCBI GI: 46128039 Blast Desc: FG08397.1 [Gibberella zeae PH-1]
  misc_feature (69)..(523): NCBI GI: 39974463 Blast Desc: MGG_00622 [Magnaporthe grisea 70-15] gi|145018469|gb|EDK02748.1| MGG_00622 [Magnaporthe grisea 70-15]
  misc_feature (29)..(523): NCBI GI: 154323868 Blast Desc: BC1G_00333 [Botryotinia fuckeliana B05.10] gi|150842562|gb|EDN17755.1| BC1G_00333 [Botryotinia fuckeliana B05.10]
  misc_feature (27)..(484): NCBI GI: 156056657 Blast Desc: SS1G_04059 [Sclerotinia sclerotiorum 1980] gi|154701845|gb|EDO01584.1| SS1G_04059 [Sclerotinia sclerotiorum 1980]
  misc_feature (49)..(343): NCBI GI: 171682022 Blast Desc: protein product [Podospora anserina] gi|170940970|emb|CAP66620.1| protein product [Podospora anserina]
  misc_feature (1)..(465): NCBI GI: 85097012 Blast Desc: NCU04729 [Neurospora crassa OR74A] gi|28921853|gb|EAA31128.1| [Neurospora crassa OR74A] gi|39979179|emb|CAE85551.1| related to acid phosphatase crassa]
  misc_feature (182)..(523): NCBI GI: 261359465 Blast Desc: phosphate-non-repressible acid phosphatase [Verticillium albo-atrum VaMs.102]
  misc_feature (53)..(521): NCBI GI: 169599454 Blast Desc: SNOG_02548 [Phaeosphaeria nodorum SN15] gi|111069640|gb|EAT90760.1| SNOG_02548 [Phaeosphaeria nodorum SN15]
  misc_feature (7)..(521): NCBI GI: 189204300 Blast Desc: acid phosphatase (PhoG) [Pyrenophora tritici-repentis Pt-1C-BFP] gi|187985584|gb|EDU51072.1| acid phosphatase (PhoG) [Pyrenophora tritici-repentis Pt-1C-BFP]
MAAYNSMPAPSPGEAMAMNAAIAGPGLGIDVFDPDLNFDESMLDPSNGVLPALPYTPGYDFEFTTTFEDPFNYQRPYETQQNAEDAQDEGSSPQQPDDKLLGFSAVVPKATPFDDALGSYSELNMTAELYGMFFVAEDVFGGETTGRPLELTCYRRNLWQCSGSITMPRHCTQVMNEQGRQVPIVEFYASISAAESIEGKATEIISIPWKSSNPAMGEGQETKVAGAPPKILLDLSAGQELDGHRVSYPVSWKRLQFKSATANNGRRKGLQQHYVVQISLLGKLKANGELMKIAEIQSGPVIVRGRSPRNFDSRKDVQLTGEKKVTNNGERPRTQSDASAAPTPNLKTERTDSLGVSSFPAVNNNTSQQSNWVAPATPANTNGHNGQQHPAKRMAISPNLSKPPIPKWGQDHSPNKIAKNHTTAASGPINLSLSEDERSPNNRSTTDSLTSPRMHRTSTAHTTGASPQEEEEELYEYFPLRVGDWTPLIDTVYRPHILHHISPPQEIKAQQIRSKSKRYFSAD

SEQ ID NO: 30579 - DNA, 2889 bp, Muscodor strobelii
  misc_feature: SGI EST ID NO. CUFF.72376.0
  misc_feature: Variant of the nucleotide sequence at SEQ ID NO 30577
ctggcactgacatctctaaaccgcatcataatcgtctgtttccatcgcgacactaagtatcaagtcgagcgggctagaatagcggaagtacactgcaggtccgagagtcgcctccacacaggagctggaggagagaggagtgtccactttcagcgtccccgattcccgcctgtgtgcaccctgcgcgggcaggagccgctgctgttggctgttgctggctgttggctgcgtgcggctggttctggctcccgcttctcgaccctcgacttcgacctcgactgcaactcatgtcaatattcgacgacactgctgctgccgccgacgaccccgatcgatatcgctttcagcaggcttgagagcgcggactcgccgtcgaatttgacagcacgcggagtgtgtattgctggaaagcagagaaacatcgcctgtttcatccgtttcaaccgatcgaacatccctcggcccagcctttccacttctgtcctccgccgcgacatcctgaccgtcgctcctctcgcctcgtccgatcttttttgcgtgcagcgaattgaggcgagaacaccaccggatctccttatctgcagcgaactatacagcgagctatacaacgaactatatactgctttcgtcccgttcaccgctgctgctccgagctactgcgacctcgccatcggacaagctgtcctcgcccaccatccaccggccgctgcccgccgcctgcacactcgcgcgcccagcccgagcaccacacacggggcctgctggcccctacaatgcaatggccgcctataactcgatgccggcgcctagtcccggcgaagctatggcgatgaatgctgccatcgccggcccgggcttggggatcgacgtttttgacccggacctaaactttgacgagtccatgttagacccctccaatggcgtcctacctgcattaccatacacaccagggtacgacttcgagttcaccaccaccttcgaagaccccttcaactaccagagaccctacgagacacagcagaatgccgaagacgcacaggacgaaggctcctcgccccagcagcccgacgacaagctgctgggcttctccgccgttgtccccaaggcaacgcccttcgacgatgcccttggcagttactccgagctgaacatgaccgccgaactctacggcatgttcttcgttgccgaagatgtctttggcggcgagacgacgggccgccctctggaacttacctgctatcggcggaatttatggcaatgctccggaagtattaccatgccgagacactgcacccaagtcatgaacgaacagggccgtcaggtccccatagtcgagttttacgcctccatttctgcagccgagagcatcgagggcaaagcgaccgagatcatcagcatcccatggaagagtagcaacccagccatgggcgagggtcaagaaacaaaagtggccggtgcgccacccaagattttgttagatctcagcgccggccaagagttagatggccaccgtgtcagctacccagtgtcgtggaaacggttgcaattcaaaagcgctactgcgaacaacggccgccgcaagggtcttcaacagcattatgtcgttcagatcagcttgttagggaagttaaaggcaaacggagaactaatgaagatcgccgagatccaaagtggtccggtcattgtccgtggacgcagtccccggaatttcgacagcagaaaagatgtacagctcacaggggagaagaaagtcaccaacaacggcgaaagacctcggacacagagcgatgcaagcgcggcgcccacacccaacctaaagaccgagaggacggactcgctcggcgtttcttcattccctgcggtcaataataatacatcacaacaaagtaactgggtcgcacctgcgacaccggcaaatacgaacggacacaatgggcagcaacatcccgcgaaaaggatggctatctcaccaaacttaagcaagccgcccatccccaaatggggacaggaccatagtccgaataagatagcgaagaaccacacaaccgctgcatcaggtccgattaacctatccctctcggaagacgaacgcagtccgaataacaggtcgactacggactcgcttactagcccacgaatgcaccgaacgtcgacagcacatactaccggtgccagccctcaggaagaagaggaggagctgtatgaatacttcccgttacgagttggcgattggacaccgttaatcgacacggtctaccgtccgcatatattgcatcacatatccccaccgcaagaaatcaaggcgcagcagattaggagcaagtcgaagagatatttctcggctgattgatatatctctgtctgcgtactaaagccatacatgactatatcaccaattttggacaaggcaaagggtgtttcgttaagacaccatttgctaagctcctgacgaattatatgagaccatggcgcgttttcgtcttttcgtgtttcctttgggaatatcatcttgtatctgttaggattgcataggtgctgtatctatagttaagatgggcgggatggggtgatatggtataggagggtgttgaacaggataggagtaaagtccaacggatagttacgtagtgaggagaggcagagtacggaggaaagataaaggtttccttcggtggcttttttgaatatacccctgttgtatcttttcacgtctgtctcttgatgctatgttctgtggattatgtaatgtgtaggcagcatggatggtccgggatgagccaggaccgtcctggacttgcacttgccttttgatgttgtttttgactgtccttgtaaattcttcgtgacagtcttgctccgtcttaaaagtaaatacaaaatatacttctg

SEQ ID NO: 30580 - DNA, 2769 bp, Muscodor strobelii
  misc_feature: SGI cDNA ID NO. 570520
  misc_feature: Encodes the peptide sequence at SEQ ID NO 30581
atggccaaggcagatggcgagttcgatccgctatggcaggaccttgactgggccattggccaaatgctgattatgggatgggacggaaccgaaatcacacctcccatcagaaacctcattgaaaaccaccatcttggttccatcatattgactgccaagaacctcaaatccgccgaacaaacaaccaacctggttcgagaccttcagtcgattgctcacaacgctggtcatccacagcctcttctgatagccatcgaccaagaaaatggtggcgtcaacagcatattcgatgaggattatatatgccaattccccagtgccatgggcattgttgccacgggcagtccagatttggcatacaaagtggccaaagctaccgctaccgaaatatcagccgtcggcgtgaatctcattctcgggccagttttggacgtattgaccaatgctcggcatcagccccttggcgtacggacaaacggcgacgatccgcaggaagcctcgcagtttggtatcgctaccatcaatggttataaggatgccggaatagcaacgtgtggtaaacatttcccgtcatatgggaacttggactttttggggtctagcctagatatgcccattatcacgcaaacactagaggaacttagtctcagcgctctggtacccttcagaaacgccgttactgctggtcgtctggacgctatgttcgtcggcggttgcggtatccaaaatgctggtatgaatgtcacgcacgcgtgtctgtcggatcaggtagtagatgatttactgaggaatgaccttggattcaaaggcgttgctatctcagaatgcttagaaatgcagtctctcatccaagattatggtgttaaagaaggtactgtcatggccgtcgaagcgggcaacgacctgatccttctttgtcggtctcatgatattcagttggaagccatctcaggtctgaagcttggtatagaagacggtattatatccaaagagcgaatattcacgtcgctgcggcgggtgctcaaattgaaaagcgtctgcacgtcgtgggaaaaggctcttaacccgcccggactaccgctattatcacaaattcatccaggtcaccttgctctttcacaaaaagcttatgaccaatctatcaccatagtcagagacactgacgggcttcttccccttgcgaacagcctacaacaatcagaggaactcttattgttgacgcctttggtaaagcctttaccagcatccgctgcaacgaagaagatgatggagaaaaacggcaacaaacaagcgtctttacacgataaattcatccaccacgagcgagaagccataatgagtggagagggcgtatttcgagagtttgggaggacactcgcacgtacacgcaatggaaaactccttcatgcgtcctacacagccaacggattagaccaagtacatgaaaatcttatcaacagggcatcaactgtggtgattgtcacggcggacgcgaatcgaaacggatttcagaacgggtttaccaagcacgtgagcatgatgtgtaatatgctgaggtcaacgggacagaagaaatcacttattgtggttgccgtcagctccccctacgactttgctatggacaagacgataggcacatacatttgcactttcgatttcaccgaaaccgcattagcctcgcttgcgcgcgccttatatggcgaattcgtgccgcagggctcgatgcccggtacaatgcggaagacgaagaaagtaatgaaaacgagacaacgatggcttgttgaaaactacgagcaggagagagaccagcatggacttaacgagctgcttaagacgcttgctagatcgagtacaccaagtctaccgtactctgctgctactgccacttcatttaacctcaatattcagggggttgagcaatttcacttcgtggttcgaaacagcagtaccaacatgctgtatggcttcattgctacctactacgtcaaaggaacgggcataataggagccatcttcgttgatcctatgaagcgcaacgtgtccgttggacggtctcttcatcgtcgtgccgtgcgagcactactacagaaaccaggtattaagaagctccaattaggatgtgctttccctgggatatttcctggcgtgccggttgaggagagtggcggcattaagagctggtttaataacgtcggctgggacacacaatttcccaagcgattgtcaaatttggtgattgaagatcttgcatcttggacccagccagaaggcttgacgcagattatccagcgagcgagtatcagctttgacctgatcaaaatgctcgataacgccgagtctgttctgactctagtagctacccacgcagggcctgagattaccgagctttacagatttgctctaaacgatccaagctgtggcgtagtcagggccaaggctgcgtcaacagatgctctcttagggactatcatcattgttacacctcagagtcagctggccaaatttataccatcgctacaaagtaatgatacctacatcgggggtatcgtggcacccgtagtcccgctttcgccgcagtcccatctagtcctacaggggctcgctttcatgggcgtacgacagaacaagagccacaaatctactaagagcgtgttgagctgggtcccttcggaaatgtatgaactcttcgcggccatgggctttgaggtgcagcagacatttgatgaagtgactaattctcctgagcattggtccaatgtccaggcttaa

SEQ ID NO: 30581 - protein, 922 aa, Muscodor strobelii
  misc_feature: SGI Peptide ID NO. 570520
  misc_feature (76)..(305): Pfam Id: PF00933 Pfam Desc: Glycosyl hydrolase family 3 N terminal domain
  misc_feature (76)..(193): Pfam Id: PF00933 Pfam Desc: Glycosyl hydrolase family 3 N terminal domain
  misc_feature (249)..(305): Pfam Id: PF00933 Pfam Desc: Glycosyl hydrolase family 3 N terminal domain
  misc_feature (5)..(919): NCBI GI: 256734050 Blast Desc: glycoside hydrolase family 3 [Nectria haematococca mpVI 77-13-4]
  misc_feature (7)..(915): NCBI GI: 197709105 Blast Desc: beta-N-acetylglucosaminidase [Hypocrea virens]
  misc_feature (1)..(920): NCBI GI: 46128035 Blast Desc: FG08395.1 [Gibberella zeae PH-1]
  misc_feature (1)..(866): NCBI GI: 145611154 Blast Desc: MGG_00621 [Magnaporthe grisea 70-15] gi|145018470|gb|EDK02749.1| MGG_00621 [Magnaporthe grisea 70-15]
  misc_feature (18)..(918): NCBI GI: 171682018 Blast Desc: protein product [Podospora anserina] gi|170940968|emb|CAP66618.1| protein product [Podospora anserina]
  misc_feature (21)..(920): NCBI GI: 154314465 Blast Desc: BC1G_05326 [Botryotinia fuckeliana B05.10] gi|150848971|gb|EDN24164.1| BC1G_05326 [Botryotinia fuckeliana B05.10]
  misc_feature (5)..(801): NCBI GI: 39979176 Blast Desc: related to beta-N-acetylglucosaminidase [Neurospora crassa]
  misc_feature (1)..(920): NCBI GI: 156036296 Blast Desc: SS1G_12837 [Sclerotinia sclerotiorum 1980] gi|154698242|gb|EDN97980.1| SS1G_12837 [Sclerotinia sclerotiorum 1980]
  misc_feature (1)..(918): NCBI GI: 146324731 Blast Desc: beta-N-acetylglucosaminidase [Aspergillus fumigatus Af293] gi|129556126|gb|EAL85175.2| beta-N-acetylglucosaminidase, [Aspergillus fumigatus Af293]
  misc_feature (1)..(918): NCBI GI: 119484098 Blast Desc: beta-N-acetylglucosaminidase, [Neosartorya fischeri NRRL 181] gi|119410108|gb|EAW20055.1| beta-N-acetylglucosaminidase, [Neosartorya fischeri NRRL 181]
MAKADGEFDPLWQDLDWAIGQMLIMGWDGTEITPPIRNLIENHHLGSIILTAKNLKSAEQTTNLVRDLQSIAHNAGHPQPLLIAIDQENGGVNSIFDEDYICQFPSAMGIVATGSPDLAYKVAKATATEISAVGVNLILGPVLDVLTNARHQPLGVRTNGDDPQEASQFGIATINGYKDAGIATCGKHFPSYGNLDFLGSSLDMPIITQTLEELSLSALVPFRNAVTAGRLDAMFVGGCGIQNAGMNVTHACLSDQVVDDLLRNDLGFKGVAISECLEMQSLIQDYGVKEGTVMAVEAGNDLILLCRSHDIQLEAISGLKLGIEDGIISKERIFTSLRRVLKLKSVCTSWEKALNPPGLPLLSQIHPGHLALSQKAYDQSITIVRDTDGLLPLANSLQQSEELLLLTPLVKPLPASAATKKMMEKNGNKQASLHDKFIHHEREAIMSGEGVFREFGRTLARTRNGKLLHASYTANGLDQVHENLINRASTVVIVTADANRNGFQNGFTKHVSMMCNMLRSTGQKKSLIVVAVSSPYDFAMDKTIGTYICTFDFTETALASLARALYGEFVPQGSMPGTMRKTKKVMKTRQRWLVENYEQERDQHGLNELLKTLARSSTPSLPYSAATATSFNLNIQGVEQFHFVVRNSSTNMLYGFIATYYVKGTGIIGAIFVDPMKRNVSVGRSLHRRAVRALLQKPGIKKLQLGCAFPGIFPGVPVEESGGIKSWFNNVGWDTQFPKRLSNLVIEDLASWTQPEGLTQIIQRASISFDLIKMLDNAESVLTLVATHAGPEITELYRFALNDPSCGVVRAKAASTDALLGTIIIVTPQSQLAKFIPSLQSNDTYIGGIVAPVVPLSPQSHLVLQGLAFMGVRQNKSHKSTKSVLSWVPSEMYELFAAMGFEVQQTFDEVTNSPEHWSNVQA

SEQ ID NO: 30582 - DNA, 4599 bp, Muscodor strobelii
  misc_feature: SGI EST ID NO. CUFF.72390.1
  misc_feature: Variant of the nucleotide sequence at SEQ ID NO 30580
ttgcgcccacacgcccacacgcccatccacctgtctgtcctgtctcgctgggtcgagagaggtaacgttgtaggtaggagtagtactgtagggaggtatccataggcgacatatgtcatcgcagtggcgcctctgagcaacaaaggtaggtcagaggcaacgaaaggaagcacaccattggaattggaccccaaattggaataattcaaccgagaccattccagtcctcctgtcgagctgtcaggttctacgaaatgctgggggatgacaacatgtctctcaacccttggacctcacctgtcgccagtgtgggattgccaagaatggaatggcctgtgaggtgaaataccggggtcgcagctacttaggtcaccaaagccaaacatcataaagtgctcagccagaggctcagcgtccggcagctccggcgaaatccccggcgtttgcccagacgctgcagctgccatcagcgtgttggcggttgtctgtcttaacccctctgcggccatggcatctttcctgacgaggaaggctgtcggcgggctcttagtacagggaagtggcatacccagccttcttacattgcaagtgaggatttcaaagtgaatccagtccgctagctttcacgatacctgtctcaggactagctaatcgatagtgggaatactgtgtcctcacggtgtcgcgaagcccatcccagcctaatattcacaatttttatacgcaattgattgatgtcgtgcatttgctgtcactgtcgcactagtcgtatttggcttatgttcgtatcgtagcctattcccatctgcactgtctgccttgtcattctgagccgtcagctctggaacctaccccgccgacaagggaatcgtgacaccacttgatactttctggccctcatcaagaccgtggcatcatggccaaggcagatggcgagttcgatccgctatggcaggaccttgactgggccattggccaaatgctgattatgggatgggacggaaccgaaatcacacctcccatcagaaacctcattgaaaaccaccatcttggttccatcatattgactgccaagaacctcaaatccgccgaacaaacaaccaacctggttcgagaccttcagtcgattgctcacaacgctggtcatccacagcctcttctgatagccatcgaccaagaaaatggtggcgtcaacagcatattcgatgaggattatatatgccaattccccagtgccatgggcattgttgccacgggcagtccagatttggcatacaaagtggccaaagctaccgctaccgaaatatcagccgtcggcgtgaatctcattctcgggccagttttggacgtattgaccaatgctcggcatcagccccttggcgtacggacaaacggcgacgatccgcaggaagcctcgcagtttggtatcgctaccatcaatggttataaggatgccggaatagcaacgtgtggtaaacatttcccgtcatatgggaacttggactttttggggtctagcctagatatgcccattatcacgcaaacactagaggaacttagtctcagcgctctggtacccttcagaaacgccgttactgctggtcgtctggacgctatgttcgtcggcggttgcggtatccaaaatgctggtatgaatgtcacgcacgcgtgtctgtcggatcaggtagtagatgatttactgaggaatgaccttggattcaaaggcgttgctatctcagaatgcttagaaatgcagtctctcatccaagattatggtgttaaagaaggtactgtcatggccgtcgaagcgggcaacgacctgatccttctttgtcggtctcatgatattcagttggaagccatctcaggtctgaagcttggtatagaagacggtattatatccaaagagcgaatattcacgtcgctgcggcgggtgctcaaattgaaaagcgtctgcacgtcgtgggaaaaggctcttaacccgcccggactaccgctattatcacaaattcatccaggtcaccttgctctttcacaaaaagcttatgaccaatctatcaccatagtcagagacactgacgggcttcttccccttgcgaacagcctacaacaatcagaggaactcttattgttgacgcctttggtaaagcctttaccagcatccgctgcaacgaagaagatgatggagaaaaacggcaacaaacaagcgtctttacacgataaattcatccaccacgagcgagaagccataatgagtggagagggcgtatttcgagagtttgggaggacactcgcacgtacacgcaatggaaaactccttcatgcgtcctacacagccaacggattagaccaagtacatgaaaatcttatcaacagggcatcaactgtggtgattgtcacggcggacgcgaatcgaaacggatttcagaacgggtttaccaagcacgtgagcatgatgtgtaatatgctgaggtcaacgggacagaagaaatcacttattgtggttgccgtcagctccccctacgactttgctatggacaagacgataggcacatacatttgcactttcgatttcaccgaaaccgcattagcctcgcttgcgcgcgccttatatggcgaattcgtgccgcagggctcgatgcccggtacaatgcggaagacgaagaaagtaatgaaaacgagacaacgatggcttgttgaaaactacgagcaggagagagaccagcatggacttaacgagctgcttaagacgcttgctagatcgagtacaccaagtctaccgtactctgctgctactgccacttcatttaacctcaatattcagggggttgagcaatttcacttcgtggttcgaaacagcagtaccaacatgctgtatggcttcattgctacctactacgtcaaaggaacgggcataataggagccatcttcgttgatcctatgaagcgcaacgtgtccgttggacggtctcttcatcgtcgtgccgtgcgagcactactacagaaaccaggtattaagaagctccaattaggatgtgctttccctgggatatttcctggcgtgccggttgaggagagtggcggcattaagagctggtttaataacgtcggctgggacacacaatttcccaagcgattgtcaaatttggtgattgaagatcttgcatcttggacccagccagaaggcttgacgcagattatccagcgagcgagtatcagctttgacctgatcaaaatgctcgataacgccgagtctgttctgactctagtagctacccacgcagggcctgagattaccgagctttacagatttgctctaaacgatccaagctgtggcgtagtcagggccaaggctgcgtcaacagatgctctcttagggactatcatcattgttacacctcagagtcagctggccaaatttataccatcgctacaaagtaatgatacctacatcgggggtatcgtggcacccgtagtcccgctttcgccgcagtcccatctagtcctacaggggctcgctttcatgggcgtacgacagaacaagagccacaaatctactaagagcgtgttgagctgggtcccttcggaaatgtatgaactcttcgcggccatgggctttgaggtgcagcagacatttgatgaagtgactaattctcctgagcattggtccaatgtccaggcttaatgttaaagccgaattcattcaattgtattgccagagataagttctcccgacaatcgtgcagaagtctcgacttgcaaatgtcttgaatacgcgtatcttgggcaggactttgacgtagtacgactatacttggattttggaaaaggggcaaaccaattgaggctcagattgaggagccgcggagccgcgtgctatgtatagatatttgaatttgtgaacgtaggatccagccagcgacaggtgtttcggaggtcaagccatggacacaactttcctaaatataccatgcattttgtcatgccattgaaaccgtattcttccttccgcctctacagcccggtgttgccacattgtgccgatagaaagggaagctgctgttgctgcatgagactcccttgcactgccggctttgcaggcatttgtgtaaggttaggtaggtgaggtcaatgaatgacgtgcagtccagcaagcctgtccacttttcgcaggcccggacaggaccgaaaatgctggggaacacagcttgtagcacagctgtctctatcgtctaggccaagggcaagaatgagaatcttggagggcatcgtgaccactgagcagaggactccggcgcaactcatgcgagaataggaccgaagccacaggcattgactaatgtgtgacacaagttttttttgcagcaaaaccgctgctcattagacatgcgcatgcagcagtctactgcctgtccagtgcaggtggcattgagtttctaggggcgacagtccatggcggggcatttccccagcatacactaagcccagttctgtagctatcccctcagtgtcctaacccagaggggtgcgtgccacgagaccacggacgactcagcgtcgacccaattaccaagaactgtggacttcagaatcccgacg

SEQ ID NO: 30583 - DNA, 1311 bp, Muscodor strobelii
  misc_feature: SGI cDNA ID NO. 570521
  misc_feature: Reduced expression when VOC is produced
  misc_feature: Encodes the peptide sequence at SEQ ID NO 30584
atgcctcactcccttccttcgtcacctaagtcgacgtccaaagttggccgaaatggcatcaccaaattcaccaactgccgcatcctgaaaggtgacagattggtcgaggaagatctttgggtgaactctgttaccggaaagatcattcgaagccaagccacgttctacgatgatctcagtcttcctgatgaggttgtcaacctcggcgggcgaatcttggcgccgggcatgatcgattgccaactgaatggagccttcggtttcaacttttccacgctcctcgacaatgcttcctatgccaagaaagtgaaagaggtgaacaggaggatggcgacaactggtgtcacatcctacctacccaccatcaccagtcagcaaagcgaaatatacaagtgtgccttgccgcatctggggccatcaggcgatttacaagtggcagaggacggagccgagtcccttggggcacacgtcgaagggccattcttgagcccaacgaagaatggctgccacaacgttgatgtgttgcgccaggccgagacattcgaagatctcgagaacacttatggtcgcgccaatttgaacgagactatctaccgatcatccgcagtcaagatgatcacagctgctccggaaataggtcgaatgactgaactcattcctgagataacgagtcgcggcataatcttctccattgggcactcggaggcaacgtatgaggacgcgtccgcagcagtcggcgccggcgcgaccatgatcacgcacttgttcaacgcaatgcgccccctacatcaccggaacccgggcgtttttggcgtcttgggaatcgccgagagcctaccgcgaccatacttcggcatcattgctgatggcgagcatctacacccaacatcgatcaaaatcgctttcaacgcacacccggacggtttcattctcgtcaccgatgccatgcacttggtaggagtaccagatggtacatacgagtggaccaacggtgaaaccaaaagcgctatagtcaagacggggtcaaagcttatgctcgaaggatccgatcgcattgcaggaagttccatcaccttgatcgaatgcgtcaacaatttcctgaattggacaggtgcctctatcccgcaagcgctcaacgccgtcacagcaacaccggccacgatgttgggcatccaggacacaaaaggccatctagtgcccggtgctgacgctgatttaatcgtcttctcggaggcacccggtgcgcatggcagttcgcaattggccattgatgaagtttggaagttcggaacaaaagttttcagccaatag

SEQ ID NO: 30584 - protein, 436 aa, Muscodor strobelii
  misc_feature: SGI Peptide ID NO. 570521
  misc_feature (72)..(410): Pfam Id: PF01979 Pfam Desc: Amidohydrolase family
  misc_feature (376)..(410): Pfam Id: PF01979 Pfam Desc: Amidohydrolase family
  misc_feature (365)..(408): Pfam Id: PF07969 Pfam Desc: Amidohydrolase family
  misc_feature (17)..(433): NCBI GI: 145611156 Blast Desc: MGG_00620 [Magnaporthe grisea 70-15] gi|145018471|gb|EDK02750.1| MGG_00620 [Magnaporthe grisea 70-15]
  misc_feature (19)..(433): NCBI GI: 256733538 Blast Desc: carbohydrate esterase family 9 [Nectria haematococca mpVI 77-13-4]
  misc_feature (17)..(436): NCBI GI: 261359466 Blast Desc: N-acetylglucosamine-6-phosphate deacetylase [Verticillium albo-atrum VaMs.102]
  misc_feature (17)..(435): NCBI GI: 46128037 Blast Desc: FG08396.1 [Gibberella zeae PH-1]
  misc_feature (13)..(434): NCBI GI: 256733879 Blast Desc: NECHADRAFT_122417 [Nectria haematococca mpVI 77-13-4]
  misc_feature (20)..(434): NCBI GI: 169784364 Blast Desc: [Aspergillus oryzae RIB40] gi|238508516|ref|XP_002385450.1| N-acetylglucosamine-6-phosphate deacetylase (NagA), [Aspergillus flavus NRRL3357] protein product
  misc_feature (20)..(433): NCBI GI: 121719629 Blast Desc: n-acetylglucosamine-6-phosphate deacetylase [Aspergillus clavatus NRRL 1] gi|119404725|gb|EAW15087.1| n-acetylglucosamine-6-phosphate deacetylase [Aspergillus clavatus
  misc_feature (20)..(434): NCBI GI: 67521942 Blast Desc: AN1428.2 [Aspergillus nidulans FGSC A4] gi|40745402|gb|EAA64558.1| AN1428.2 [Aspergillus nidulans FGSC A4] gi|259486738|tpe|CBF84838.1| TPA: deacetylase (NagA), FGSC
  misc_feature (20)..(433): NCBI GI: 159123778 Blast Desc: N-acetylglucosamine-6-phosphate deacetylase (NagA), [Aspergillus fumigatus A1163]
  misc_feature (20)..(433): NCBI GI: 70983380 Blast Desc: N-acetylglucosamine-6-phosphate deacetylase (NagA) [Aspergillus fumigatus Af293] gi|66844843|gb|EAL85179.1| N-acetylglucosamine-6-phosphate deacetylase (NagA), [Aspergillus
  misc_feature (20)..(412): SWISSPROT Homolog: EC 3.5.1.25 N-acetylglucosamine-6-phosphate deacetylase
  misc_feature: Useful for introducing or modulating the production of volatile compounds
MPHSLPSSPKSTSKVGRNGITKFTNCRILKGDRLVEEDLWVNSVTGKIIRSQATFYDDLSLPDEVVNLGGRILAPGMIDCQLNGAFGFNFSTLLDNASYAKKVKEVNRRMATTGVTSYLPTITSQQSEIYKCALPHLGPSGDLQVAEDGAESLGAHVEGPFLSPTKNGCHNVDVLRQAETFEDLENTYGRANLNETIYRSSAVKMITAAPEIGRMTELIPEITSRGIIFSIGHSEATYEDASAAVGAGATMITHLFNAMRPLHHRNPGVFGVLGIAESLPRPYFGIIADGEHLHPTSIKIAFNAHPDGFILVTDAMHLVGVPDGTYEWTNGETKSAIVKTGSKLMLEGSDRIAGSSITLIECVNNFLNWTGASIPQALNAVTATPATMLGIQDTKGHLVPGADADLIVFSEAPGAHGSSQLAIDEVWKFGTKVFSQ

SEQ ID NO: 30585 - DNA, 1762 bp, Muscodor strobelii
  misc_feature: SGI EST ID NO. CUFF.72383.0
  misc_feature: Variant of the nucleotide sequence at SEQ ID NO 30583
caatgccgttggagttctgatatcatgaataagtatcagtaggtacgcagttttctctgcggtatggtatcattcatgatgtccaaaatactaccaaacgggacagcggtccaaagtttaggcgaaactctacaaaccctgtcgtatttgttcgatattcattaatatactatatctgaagtattagttctcatattaacttaccatgcctcactcccttccttcgtcacctaagtcgacgtccaaagttggccgaaatggcatcaccaaattcaccaactgccgcatcctgaaaggtgacagattggtcgaggaagatctttgggtgaactctgttaccggaaagatcattcgaagccaagccacgttctacgatgatctcagtcttcctgatgaggttgtcaacctcggcgggcgaatcttggcgccgggcatgatcgattgccaactgaatggagccttcggtttcaacttttccacgctcctcgacaatgcttcctatgccaagaaagtgaaagaggtgaacaggaggatggcgacaactggtgtcacatcctacctacccaccatcaccagtcagcaaagcgaaatatacaagtgtgccttgccgcatctggggccatcaggcgatttacaagtggcagaggacggagccgagtcccttggggcacacgtcgaagggccattcttgagcccaacgaagaatggctgccacaacgttgatgtgttgcgccaggccgagacattcgaagatctcgagaacacttatggtcgcgccaatttgaacgagactatctaccgatcatccgcagtcaagatgatcacagctgctccggaaataggtcgaatgactgaactcattcctgagataacgagtcgcggcataatcttctccattgggcactcggaggcaacgtatgaggacgcgtccgcagcagtcggcgccggcgcgaccatgatcacgcacttgttcaacgcaatgcgccccctacatcaccggaacccgggcgtttttggcgtcttgggaatcgccgagagcctaccgcgaccatacttcggcatcattgctgatggcgagcatctacacccaacatcgatcaaaatcgctttcaacgcacacccggacggtttcattctcgtcaccgatgccatgcacttggtaggagtaccagatggtacatacgagtggaccaacggtgaaaccaaaagcgctatagtcaagacggggtcaaagcttatgctcgaaggatccgatcgcattgcaggaagttccatcaccttgatcgaatgcgtcaacaatttcctgaattggacaggtgcctctatcccgcaagcgctcaacgccgtcacagcaacaccggccacgatgttgggcatccaggacacaaaaggccatctagtgcccggtgctgacgctgatttaatcgtcttctcggaggcacccggtgcgcatggcagttcgcaattggccattgatgaagtttggaagttcggaacaaaagttttcagccaatagaagactaaaccgtgagaacgtaaagagagagatatgatatttattcaaaatactttagtgaggaggatataccacaaagattgtttacaggtggagcgcacttgctgcagatgcgtaagtttggatctttgaggtttgatatgataatgaccatctcgagatatttgtatacactgcattgcatatatcggcgttcgaatcatagaccttgaatatgagataaaagcaatagactttgatacccat

SEQ ID NO: 30586 - DNA, 3021 bp, Muscodor strobelii
  misc_feature: SGI cDNA ID NO. 570522
  misc_feature: Encodes the peptide sequence at SEQ ID NO 30587
atgacaagcgagaaccgtgtcgatgtcttcaagtccctaaataaggcgcagcatcgtgcagtcagctccgatgcctcaacagttgctatcctggccggaccaggtagcggaaagacgcacaccttgacttcgcgggttgtctggctaattgaccatgtggggataaatccgcgcaatgttcttgtcgcgactttcacagtcaaggcatcgaatgaaatgaaagcacggattggacaagcactcggcgatggacgcgaaaaacagattgttctcggtactttccacagcatcgctcgtcgctatctggctgcatatggcaaacgcatcggattggacccaaaatttggcatcgcagatgattcagattcacgaggaattctcgctcgcatctgtaaaagattggacacaaagattgaggttccgatagcacgggcatggatcagcaagcgcaaagcaaagggaacgtcagatgaacgcaccataaagagcaaaaatggccaaaatgttgagtcacaagctctcgagctctgtttccaggagtatcaaagccagctcgaacgctccaacctgcttgattacgatgatctgcttgttcgctgtgtcgagcttctccgtaaatttccgaattgtgtctccaacgtcgagacagtcttgatagacgagtatcaagatacaaatggcgttcagtacgacctgatgagactatttgctcagagacaccggagaattactgttgtaggggacccggaccagagtatctacggctggcgatcagcagaaataagaaatctgcatcgcctgttgcgtgattacccggggactgacgagatctctctcgaagagaactataggtcttcaagctcaatcctcgatacctcattgaaagttatccaacaagatgaagaaagatataagaaagtgctactacctgtccatgagaaaggaacccggcctgtccttcgaatgttgagaaatgcaactgaagaagcagattggatcatttctgaaataaagcgcatccgactgctgtcggggaatatgatagatttcgacgacgttgctatcttacttcggtctgcgtctctttctcgacagatcgagggagtattggggcgagaaggcatcccttatcgaatggttggtggcttcaagttctacgatcgcactgagattaagattctactggactacatgcgagtcatacaccaacctcacaacaacgatgccttcgcacgtattgttaatgttcccaagcgaggcatcggagatgcgactatcaaagcactggtagaagaggctgagaggtcgtctatgagtctgtggcaactgcttgagaggcactgccgaggcgaccgcagagcaaaaacgaacatacggaagcaaacagaaatctcgctcagtggtggtctgatgcgaccacttgagaatttgcggaatcgaatacgtccgaccaccaatcctggagtacccattaaactgacggacctcatccaacagcttatcagagatcttcgatttgaggactttcttcaaaccacgtttggccctgaatatgaactgaggtgggccaatgttcaagaactcgtaaccctagcagaagaattcatgaactcaagccaaggagacgaggatagccttcctgcaatggaaggcgttgagcagtcttccgatgacgattcactagcaaagtttctttcgaacgtgtctttggcgtcagagaagcaaacagaaaattctgagcaggaaggaaaacctcttgttaccatttccactatacacgctgctaagggcttggagtggcccgtcgtgtttattcctggtgtgtacagaggatccatcccacacgcgcgagcggaagatcaggacgaagagcgtcgtctcctctatgtcgctatgacgagagctaaagctcttctgtccctcagctacccaaggtattcgtcaggtgggagtgagggtagtaatcaactatcgccattcatcacaggactatcgtcttctgcattccttcaaaaagggccatcctacgatcgacctgtaatgtctcaaattgcaaagattctacgtagagtgcttcctcctgacaatgttacttacaaagggatgccgtcaatgacggcaccagaggacaatatcttcccagtcgactttgagaaatcaaatcagcatcgtggactatctcaccagttggactctgatttggggcctcgtaaaaggcagaaacttcagaactccgggaagagtatccaggttgcaaaggagtctgttgagggttgggctgcaccttacaagaccaccatgcaaaaaggatcatctttcacggtacctcaaaatactgagtctggctttactacagccggcaaacatatggcacatgtggcagcggcggaagccaagagcgctgcaagcaagccacccgcacaaggtctttcgagaagaacaacgactagcaaccgtccgcccaatcagagaagcttgctcggctacgggtacggcgtgacaaatcacgacaactcgaagcatggagttatcgatctcactaatgtgacggattcatcgctcaagcgaacagtatcggctacagcgccatatgcccgacgtgctttaggggtcagaccgacttatcagcttcccgaatcaaaagtttctgcagttcctgcaattaagcccgaacttgctgcacatcagctcgggaagaataagctaccgaccaaaccgatcagccgtcgtgagaaccagcctgatgccacaaaacaatactcctgtttctcaagctcgccgccgcgagctgaacctaagccttctgtctctaccgccccaggagaagcaaaatcattagaaaaagaaaacatcttgccagatgacgtaacgcggccagctgctagttttcatgccacaactgtcacaggtcagatggggtcgcgcggcggcattaaaagaccaatcggattggggcgaagtggcataaggcctatggagaaactaaataaaccatacaagctcacgatcaaaaggccctga

SEQ ID NO: 30587 - protein, 1006 aa, Muscodor strobelii
  misc_feature: SGI Peptide ID NO. 570522
  misc_feature (13)..(496): Pfam Id: PF00580 Pfam Desc: UvrD/REP helicase
  misc_feature (13)..(447): Pfam Id: PF00580 Pfam Desc: UvrD/REP helicase
  misc_feature (9)..(1005): NCBI GI: 39979183 Blast Desc: related to ATP-dependent DNA helicase [Neurospora crassa] gi|54633283|dbj|BAD66822.1| ATP-dependent DNA helicase [Neurospora crassa]
  misc_feature (9)..(1006): NCBI GI: 171682312 Blast Desc: protein product [Podospora anserina] gi|170941115|emb|CAP66765.1| protein product [Podospora anserina]
  misc_feature (9)..(1005): NCBI GI: 116202273 Blast Desc: CHGG_09021 [Chaetomium globosum CBS 148.51] gi|88177539|gb|EAQ85007.1| CHGG_09021 [Chaetomium globosum CBS 148.51]
  misc_feature (9)..(789): NCBI GI: 164425999 Blast Desc: NCU04733 [Neurospora crassa OR74A] gi|157071159|gb|EAA31132.2| conserved [Neurospora crassa OR74A]
  misc_feature (3)..(978): NCBI GI: 256733543 Blast Desc: NECHADRAFT_36498 [Nectria haematococca mpVI 77-13-4]
  misc_feature (10)..(1005): NCBI GI: 261359525 Blast Desc: ATP-dependent DNA helicase srs2 [Verticillium albo-atrum VaMs.102]
  misc_feature (1)..(923): NCBI GI: 46128055 Blast Desc: FG08405.1 [Gibberella zeae PH-1]
  misc_feature (3)..(719): NCBI GI: 145611136 Blast Desc: MGG_00630 [Magnaporthe grisea 70-15] gi|145018457|gb|EDK02736.1| MGG_00630 [Magnaporthe grisea 70-15]
  misc_feature (1)..(987): NCBI GI: 156036288 Blast Desc: SS1G_12833 [Sclerotinia sclerotiorum 1980] gi|154698238|gb|EDN97976.1| SS1G_12833 [Sclerotinia sclerotiorum 1980]
  misc_feature (9)..(987): NCBI GI: 154314455 Blast Desc: BC1G_05321 [Botryotinia fuckeliana B05.10] gi|150848966|gb|EDN24159.1| BC1G_05321 [Botryotinia fuckeliana B05.10]
MTSENRVDVFKSLNKAQHRAVSSDASTVAILAGPGSGKTHTLTSRVVWLIDHVGINPRNVLVATFTVKASNEMKARIGQALGDGREKQIVLGTFHSIARRYLAAYGKRIGLDPKFGIADDSDSRGILARICKRLDTKIEVPIARAWISKRKAKGTSDERTIKSKNGQNVESQALELCFQEYQSQLERSNLLDYDDLLVRCVELLRKFPNCVSNVETVLIDEYQDTNGVQYDLMRLFAQRHRRITVVGDPDQSIYGWRSAEIRNLHRLLRDYPGTDEISLEENYRSSSSILDTSLKVIQQDEERYKKVLLPVHEKGTRPVLRMLRNATEEADWIISEIKRIRLLSGNMIDFDDVAILLRSASLSRQIEGVLGREGIPYRMVGGFKFYDRTEIKILLDYMRVIHQPHNNDAFARIVNVPKRGIGDATIKALVEEAERSSMSLWQLLERHCRGDRRAKTNIRKQTEISLSGGLMRPLENLRNRIRPTTNPGVPIKLTDLIQQLIRDLRFEDFLQTTFGPEYELRWANVQELVTLAEEFMNSSQGDEDSLPAMEGVEQSSDDDSLAKFLSNVSLASEKQTENSEQEGKPLVTISTIHAAKGLEWPVVFIPGVYRGSIPHARAEDQDEERRLLYVAMTRAKALLSLSYPRYSSGGSEGSNQLSPFITGLSSSAFLQKGPSYDRPVMSQIAKILRRVLPPDNVTYKGMPSMTAPEDNIFPVDFEKSNQHRGLSHQLDSDLGPRKRQKLQNSGKSIQVAKESVEGWAAPYKTTMQKGSSFTVPQNTESGFTTAGKHMAHVAAAEAKSAASKPPAQGLSRRTTTSNRPPNQRSLLGYGYGVTNHDNSKHGVIDLTNVTDSSLKRTVSATAPYARRALGVRPTYQLPESKVSAVPAIKPELAAHQLGKNKLPTKPISRRENQPDATKQYSCFSSSPPRAEPKPSVSTAPGEAKSLEKENILPDDVTRPAASFHATTVTGQMGSRGGIKRPIGLGRSGIRPMEKLNKPYKLTIKRP

SEQ ID NO: 30588 - DNA, 4328 bp, Muscodor strobelii
  misc_feature: SGI EST ID NO. CUFF.72387.0
  misc_feature: Variant of the nucleotide sequence at SEQ ID NO 30586
ataattatgagttgaaaacagtctatatgatttgttactgaggggacacttgaaggtgatttgattgttcacgatctttatggtcattatcaccactagttgcatttccatcacattcatctgcctaccagactcttcaaaaacaccgctcgaagtgtgatttcaaggatgtactgcatcgtgggatatgtgataaagctaacgtatggtagacggtgattacatggctgaataagatatgtatctgcaggtagattcaatgaatcctcaagtctgggtcggcgagttggtaatgagacggaggcatagccgcaaggcacttcgatcacgacgttgacaaggtcattcatatcaatggcagcgtgtcaccgaatccatcctgtttggatgtagtggctgattgtcacaaattggggcagaaacatttgggggttggaattgaactaggtatggggtcgtgcagtcttgactcaagacaaggtgatagtcaaagacctcgtttcattcaagaagatcataactatatggaaacaattcggagctgataccgtgttgcgggtaccattgtcaagattaatggaatgtcagaattggaacctacctcattatgtgagtctgcctttcgtcccttccactgcccgccataggtggtggggacgggatcgggttgtaaagccacacagactggaacggggacgaccgatcagccacagcactatccacaagttgttctgtgaagtctctagacaacaatagaaaggacgaagatcttctaggagctggaagcaatttagccaattgagacgttagtcttcattttgttttgaaggcaggtttggggctcctttttgccattgctattttgatcatcgcgactgaaaatggtccgagagttaacctgttgagacgtcacatgatcccgtgtttgaaccagtcccaggcagcgcgtcatagcatttcacgacgcgtctagatcttgcacaacgatcaaccattgcacttggtcaatgcatcaacttcttgcaacataatagagctatgaactctaccaaagatgacaagcgagaaccgtgtcgatgtcttcaagtccctaaataaggcgcagcatcgtgcagtcagctccgatgcctcaacagttgctatcctggccggaccaggtagcggaaagacgcacaccttgacttcgcgggttgtctggctaattgaccatgtggggataaatccgcgcaatgttcttgtcgcgactttcacagtcaaggcatcgaatgaaatgaaagcacggattggacaagcactcggcgatggacgcgaaaaacagattgttctcggtactttccacagcatcgctcgtcgctatctggctgcatatggcaaacgcatcggattggacccaaaatttggcatcgcagatgattcagattcacgaggaattctcgctcgcatctgtaaaagattggacacaaagattgaggttccgatagcacgggcatggatcagcaagcgcaaagcaaagggaacgtcagatgaacgcaccataaagagcaaaaatggccaaaatgttgagtcacaagctctcgagctctgtttccaggagtatcaaagccagctcgaacgctccaacctgcttgattacgatgatctgcttgttcgctgtgtcgagcttctccgtaaatttccgaattgtgtctccaacgtcgagacagtcttgatagacgagtatcaagatacaaatggcgttcagtacgacctgatgagactatttgctcagagacaccggagaattactgttgtaggggacccggaccagagtatctacggctggcgatcagcagaaataagaaatctgcatcgcctgttgcgtgattacccggggactgacgagatctctctcgaagagaactataggtcttcaagctcaatcctcgatacctcattgaaagttatccaacaagatgaagaaagatataagaaagtgctactacctgtccatgagaaaggaacccggcctgtccttcgaatgttgagaaatgcaactgaagaagcagattggatcatttctgaaataaagcgcatccgactgctgtcggggaatatgatagatttcgacgacgttgctatcttacttcggtctgcgtctctttctcgacagatcgagggagtattggggcgagaaggcatcccttatcgaatggttggtggcttcaagttctacgatcgcactgagattaagattctactggactacatgcgagtcatacaccaacctcacaacaacgatgccttcgcacgtattgttaatgttcccaagcgaggcatcggagatgcgactatcaaagcactggtagaagaggctgagaggtcgtctatgagtctgtggcaactgcttgagaggcactgccgaggcgaccgcagagcaaaaacgaacatacggaagcaaacagaaatctcgctcagtggtggtctgatgcgaccacttgagaatttgcggaatcgaatacgtccgaccaccaatcctggagtacccattaaactgacggacctcatccaacagcttatcagagatcttcgatttgaggactttcttcaaaccacgtttggccctgaatatgaactgaggtgggccaatgttcaagaactcgtaaccctagcagaagaattcatgaactcaagccaaggagacgaggatagccttcctgcaatggaaggcgttgagcagtcttccgatgacgattcactagcaaagtttctttcgaacgtgtctttggcgtcagagaagcaaacagaaaattctgagcaggaaggaaaacctcttgttaccatttccactatacacgctgctaagggcttggagtggcccgtcgtgtttattcctggtgtgtacagaggatccatcccacacgcgcgagcggaagatcaggacgaagagcgtcgtctcctctatgtcgctatgacgagagctaaagctcttctgtccctcagctacccaaggtattcgtcaggtgggagtgagggtagtaatcaactatcgccattcatcacaggactatcgtcttctgcattccttcaaaaagggccatcctacgatcgacctgtaatgtctcaaattgcaaagattctacgtagagtgcttcctcctgacaatgttacttacaaagggatgccgtcaatgacggcaccagaggacaatatcttcccagtcgactttgagaaatcaaatcagcatcgtggactatctcaccagttggactctgatttggggcctcgtaaaaggcagaaacttcagaactccgggaagagtatccaggttgcaaaggagtctgttgagggttgggctgcaccttacaagaccaccatgcaaaaaggatcatctttcacggtacctcaaaatactgagtctggctttactacagccggcaaacatatggcacatgtggcagcggcggaagccaagagcgctgcaagcaagccacccgcacaaggtctttcgagaagaacaacgactagcaaccgtccgcccaatcagagaagcttgctcggctacgggtacggcgtgacaaatcacgacaactcgaagcatggagttatcgatctcactaatgtgacggattcatcgctcaagcgaacagtatcggctacagcgccatatgcccgacgtgctttaggggtcagaccgacttatcagcttcccgaatcaaaagtttctgcagttcctgcaattaagcccgaacttgctgcacatcagctcgggaagaataagctaccgaccaaaccgatcagccgtcgtgagaaccagcctgatgccacaaaacaatactcctgtttctcaagctcgccgccgcgagctgaacctaagccttctgtctctaccgccccaggagaagcaaaatcattagaaaaagaaaacatcttgccagatgacgtaacgcggccagctgctagttttcatgccacaactgtcacaggtcagatggggtcgcgcggcggcattaaaagaccaatcggattggggcgaagtggcataaggcctatggagaaactaaataaaccatacaagctcacgatcaaaaggccctgaccaaagtcgtcgctcggcttggtaatcagcgtgcatgtttgggtgctggtgtcaggtcgcctgtgtccagaatagactacctatatactagagattcagattcagtcggttagatgtgttgttatccatacttgaatacatagcgtgtagcgatgaattatgaaatcagttgagaaaacttaaatcgcctacttgaagcaggttctgtgaactgtcacgctagctagcgcctacgtgtcaggttgttgtttgg

SEQ ID NO: 30589 - DNA, 1611 bp, Muscodor strobelii
  misc_feature: SGI cDNA ID NO. 570523
  misc_feature: Encodes the peptide sequence at SEQ ID NO 30590
atgcacccaacggtttatagcaaaccctctctgctcttgactttggcgaccattcctttctgttccgcctcactgctcaagattgtcagagacagccagactgctctgactctctattcaaactacttcgacccgacaccgtcaccagaggacggccctccgatttctgcgggagcaattcggaatccagcctatcttccggcgcaagttggaggcatcgttggcgcatacgctttctccctcgttgtcgttgctactattttactgttgcttgcaaagaaacgtcgagatcacctcaccgcaggagaagacggcccgcacgcatattggtacgacggaaactacggcttttcctttcctgaaagcggcgagggcttcaattccatcgacaagacgcttgaatatcagtatcccgaggcaccaaagtctcctatcaagaacttttcatatcccacccctacttccccatcagtagaccaagcacctgctctctacattctacctccgtcccaatcaacaagcaccctgggtgtcaatccatttgtcgaccagagagtcgtcgcagctgatcgcgagatggcccaacaacagttagaagaaatgtacaagtatgtgatggaacacgaggctgccaaagaagctggttctcctatcgaggggcctccggcacctttggcaaaacgagacccgcctccaccaacggcagccccaagacagagtatactgaagaaagggagaaataaacctgccaacctagacctatcatcgggtcagcccgaaaaacaatccagggcatcttcgatattgtctgttcttaagtctccgagaaagaagaacaatacgaaggctctcaacatctcatcgcccatcatgactccgatgtctggcacgtttccacgacaggagggcgaagagatgaacgtgattcctccacgtcactacgccccggcttcacctccccccatccccaatgatcaacatccctacttgggtggtggcaggaggcaaccaagtcacatggcgcctttgactcctcccgacgacatgtcgccagagagcacacaaagcatcgatgagcgcctgggggcccaatatggccactcacggatggcttcaatggcatcgtcggaggtcgatccgatctctgcaacatccgagaaatcaacaacaccgttagttgggcttccaagctcaccgaaacctggtgttagtcgtttcccttcacttccggcgtcaccaaagcctggcgcaacattttcggctccgttcccgatttcgcctaaacctagtgcatcgttttcccggccaaacccaccttctgcagtccgtacgggaggcgcactaccgcttcgtgcctatgagcctgctttaagctcaccatcggcacagaccactaaacagacgacctttgaaaggtcccagccactgtcgccaggaatgcgaacgccatggactggtgctcctcagccttacacaccataccagccattttctcctgtggtaccagtaacaccatcgctggtgaccaaggctgatcgtaagaggatgaagcagctgcaaccaaagacacctactgttgaaatggttcaaagttccgatgagatgtggtaa

SEQ ID NO: 30590 - protein, 536 aa, Muscodor strobelii
  misc_feature: SGI Peptide ID NO. 570523
  misc_feature (54)..(536): NCBI GI: 46128053 Blast Desc: FG08404.1 [Gibberella zeae PH-1]
  misc_feature (65)..(536): NCBI GI: 39974445 Blast Desc: MGG_00631 [Magnaporthe grisea 70-15] gi|145018456|gb|EDK02735.1| MGG_00631 [Magnaporthe grisea 70-15]
  misc_feature (43)..(536): NCBI GI: 85097024 Blast Desc: NCU04732 [Neurospora crassa OR74A] gi|28921856|gb|EAA31131.1| [Neurospora crassa OR74A] gi|39979182|emb|CAE85554.1| [Neurospora crassa]
  misc_feature (153)..(536): NCBI GI: 171682310 Blast Desc: protein product [Podospora anserina] gi|170941114|emb|CAP66764.1| protein product [Podospora anserina]
  misc_feature (54)..(536): NCBI GI: 256734054 Blast Desc: NECHADRAFT_59139 [Nectria haematococca mpVI 77-13-4]
  misc_feature (279)..(536): NCBI GI: 261359523 Blast Desc: conserved [Verticillium albo-atrum VaMs.102]
  misc_feature (55)..(536): NCBI GI: 156036442 Blast Desc: SS1G_12910 [Sclerotinia sclerotiorum 1980] gi|154698315|gb|EDN98053.1| SS1G_12910 [Sclerotinia sclerotiorum 1980]
  misc_feature (5)..(328): NCBI GI: 116202261 Blast Desc: CHGG_09015 [Chaetomium globosum CBS 148.51] gi|88177533|gb|EAQ85001.1| CHGG_09015 [Chaetomium globosum CBS 148.51]
  misc_feature (243)..(536): NCBI GI: 154308498 Blast Desc: BC1G_08309 [Botryotinia fuckeliana B05.10] gi|150852850|gb|EDN28042.1| BC1G_08309 [Botryotinia fuckeliana B05.10]
  misc_feature (43)..(153): NCBI GI: 261359523 Blast Desc: conserved [Verticillium albo-atrum VaMs.102]
MHPTVYSKPSLLLTLATIPFCSASLLKIVRDSQTALTLYSNYFDPTPSPEDGPPISAGAIRNPAYLPAQVGGIVGAYAFSLVVVATILLLLAKKRRDHLTAGEDGPHAYWYDGNYGFSFPESGEGFNSIDKTLEYQYPEAPKSPIKNFSYPTPTSPSVDQAPALYILPPSQSTSTLGVNPFVDQRVVAADREMAQQQLEEMYKYVMEHEAAKEAGSPIEGPPAPLAKRDPPPPTAAPRQSILKKGRNKPANLDLSSGQPEKQSRASSILSVLKSPRKKNNTKALNISSPIMTPMSGTFPRQEGEEMNVIPPRHYAPASPPPIPNDQHPYLGGGRRQPSHMAPLTPPDDMSPESTQSIDERLGAQYGHSRMASMASSEVDPISATSEKSTTPLVGLPSSPKPGVSRFPSLPASPKPGATFSAPFPISPKPSASFSRPNPPSAVRTGGALPLRAYEPALSSPSAQTTKQTTFERSQPLSPGMRTPWTGAPQPYTPYQPFSPVVPVTPSLVTKADRKRMKQLQPKTPTVEMVQSSDEMW

SEQ ID NO: 30591 - DNA, 2260 bp, Muscodor strobelii
  misc_feature: SGI EST ID NO. CUFF.72486.0
  misc_feature: Variant of the nucleotide sequence at SEQ ID NO 30589
cgcagcgtcagccgtgatatgttggtgccgttgccatggcccacctcgacacactgccgaacatcaccagccgctatataccctttgttctcccttactatgtctgaaattgtatcaaattgtgtttcgattgtacggtcaggaggtaaggaatactaggaactgtgatatgggaattttctatgacgatccgcaacgcacaccatgcacccaacggtttatagcaaaccctctctgctcttgactttggcgaccattcctttctgttccgcctcactgctcaagattgtcagagacagccagactgctctgactctctattcaaactacttcgacccgacaccgtcaccagaggacggccctccgatttctgcgggagcaattcggaatccagcctatcttccggcgcaagttggaggcatcgttggcgcatacgctttctccctcgttgtcgttgctactattttactgttgcttgcaaagaaacgtcgagatcacctcaccgcaggagaagacggcccgcacgcatattggtacgacggaaactacggcttttcctttcctgaaagcggcgagggcttcaattccatcgacaagacgcttgaatatcagtatcccgaggcaccaaagtctcctatcaagaacttttcatatcccacccctacttccccatcagtagaccaagcacctgctctctacattctacctccgtcccaatcaacaagcaccctgggtgtcaatccatttgtcgaccagagagtcgtcgcagctgatcgcgagatggcccaacaacagttagaagaaatgtacaagtatgtgatggaacacgaggctgccaaagaagctggttctcctatcgaggggcctccggcacctttggcaaaacgagacccgcctccaccaacggcagccccaagacagagtatactgaagaaagggagaaataaacctgccaacctagacctatcatcgggtcagcccgaaaaacaatccagggcatcttcgatattgtctgttcttaagtctccgagaaagaagaacaatacgaaggctctcaacatctcatcgcccatcatgactccgatgtctggcacgtttccacgacaggagggcgaagagatgaacgtgattcctccacgtcactacgccccggcttcacctccccccatccccaatgatcaacatccctacttgggtggtggcaggaggcaaccaagtcacatggcgcctttgactcctcccgacgacatgtcgccagagagcacacaaagcatcgatgagcgcctgggggcccaatatggccactcacggatggcttcaatggcatcgtcggaggtcgatccgatctctgcaacatccgagaaatcaacaacaccgttagttgggcttccaagctcaccgaaacctggtgttagtcgtttcccttcacttccggcgtcaccaaagcctggcgcaacattttcggctccgttcccgatttcgcctaaacctagtgcatcgttttcccggccaaacccaccttctgcagtccgtacgggaggcgcactaccgcttcgtgcctatgagcctgctttaagctcaccatcggcacagaccactaaacagacgacctttgaaaggtcccagccactgtcgccaggaatgcgaacgccatggactggtgctcctcagccttacacaccataccagccattttctcctgtggtaccagtaacaccatcgctggtgaccaaggctgatcgtaagaggatgaagcagctgcaaccaaagacacctactgttgaaatggttcaaagttccgatgagatgtggtaagaaggagcagccatgatggtgttctctaagcaacgatattgtaatatggatagaaacgacggtcaacgagagtgaccgggtgacgacaactttatcaatacttctttcatgatcggcgaagtgtcgtccatggcttaatagggaaagggggtttaatgccggatccacggtttcggatttcagggggcttgcttcgtcattttttataccacgcagcatcaaatagcggacttgggtgtacctagctggaatctggtcttctacctgtcgcattagaggtgccgtctacattagacctttgttcttcagctcactttgcattttggaatgaaatcttacgcttacctgcactctcattcctgtcacagtcccatttagaaaatgatatacgaatgcgcctcacaaagtgcgctatccagcatgttccactctgccacaaaagact

SEQ ID NO: 30592 - DNA, 1035 bp, Muscodor strobelii
  misc_feature: SGI cDNA ID NO. 570524
  misc_feature: Elevated expression when VOC is produced
  misc_feature: Encodes the peptide sequence at SEQ ID NO 30593
atggcccaacaacagttagaagaaatgtacaagtatgtgatggaacacgaggctgccaaagaagctggttctcctatcgaggggcctccggcacctttggcaaaacgagacccgcctccaccaacggcagccccaagacagagtatactgaagaaagggagaaataaacctgccaacctagacctatcatcgggtcagcccgaaaaacaatccagggcatcttcgatattgtctgttcttaagtctccgagaaagaagaacaatacgaaggctctcaacatctcatcgcccatcatgactccgatgtctggcacgtttccacgacaggagggcgaagagatgaacgtgattcctccacgtcactacgccccggcttcacctccccccatccccaatgatcaacatccctacttgggtggtggcaggaggcaaccaagtcacatggcgcctttgactcctcccgacgacatgtcgccagagagcacacaaagcatcgatgagcgcctgggggcccaatatggccactcacggatggcttcaatggcatcgtcggaggtcgatccgatctctgcaacatccgagaaatcaacaacaccgttagttgggcttccaagctcaccgaaacctggtgttagtcgtttcccttcacttccggcgtcaccaaagcctggcgcaacattttcggctccgttcccgatttcgcctaaacctagtgcatcgttttcccggccaaacccaccttctgcagtccgtacgggaggcgcactaccgcttcgtgcctatgagcctgctttaagctcaccatcggcacagaccactaaacagacgacctttgaaaggtcccagccactgtcgccaggaatgcgaacgccatggactggtgctcctcagccttacacaccataccagccattttctcctgtggtaccagtaacaccatcgctggtgaccaaggctgatcgtaagaggatgaagcagctgcaaccaaagacacctactgttgaaatggttcaaagttccgatgagatgtggtaa

SEQ ID NO: 30593 - protein, 344 aa, Muscodor strobelii
  misc_feature: SGI Peptide ID NO. 570524
  misc_feature (1)..(344): NCBI GI: 46128053 Blast Desc: FG08404.1 [Gibberella zeae PH-1]
  misc_feature (1)..(344): NCBI GI: 39974445 Blast Desc: MGG_00631 [Magnaporthe grisea 70-15] gi|145018456|gb|EDK02735.1| MGG_00631 [Magnaporthe grisea 70-15]
  misc_feature (1)..(344): NCBI GI: 171682310 Blast Desc: protein product [Podospora anserina] gi|170941114|emb|CAP66764.1| protein product [Podospora anserina]
  misc_feature (1)..(344): NCBI GI: 85097024 Blast Desc: NCU04732 [Neurospora crassa OR74A] gi|28921856|gb|EAA31131.1| [Neurospora crassa OR74A] gi|39979182|emb|CAE85554.1| [Neurospora crassa]
  misc_feature (1)..(344): NCBI GI: 256734054 Blast Desc: NECHADRAFT_59139 [Nectria haematococca mpVI 77-13-4]
  misc_feature (87)..(344): NCBI GI: 261359523 Blast Desc: conserved [Verticillium albo-atrum VaMs.102]
  misc_feature (1)..(344): NCBI GI: 156036442 Blast Desc: SS1G_12910 [Sclerotinia sclerotiorum 1980] gi|154698315|gb|EDN98053.1| SS1G_12910 [Sclerotinia sclerotiorum 1980]
  misc_feature (1)..(136): NCBI GI: 116202261 Blast Desc: CHGG_09015 [Chaetomium globosum CBS 148.51] gi|88177533|gb|EAQ85001.1| CHGG_09015 [Chaetomium globosum CBS 148.51]
  misc_feature (51)..(344): NCBI GI: 154308498 Blast Desc: BC1G_08309 [Botryotinia fuckeliana B05.10] gi|150852850|gb|EDN28042.1| BC1G_08309 [Botryotinia fuckeliana B05.10]
  misc_feature (232)..(344): NCBI GI: 242802588 Blast Desc: conserved [Talaromyces stipitatus ATCC 10500] gi|218717346|gb|EED16767.1| conserved [Talaromyces stipitatus ATCC 10500]
  misc_feature: Useful for introducing or modulating the production of volatile compounds
MAQQQLEEMYKYVMEHEAAKEAGSPIEGPPAPLAKRDPPPPTAAPRQSILKKGRNKPANLDLSSGQPEKQSRASSILSVLKSPRKKNNTKALNISSPIMTPMSGTFPRQEGEEMNVIPPRHYAPASPPPIPNDQHPYLGGGRRQPSHMAPLTPPDDMSPESTQSIDERLGAQYGHSRMASMASSEVDPISATSEKSTTPLVGLPSSPKPGVSRFPSLPASPKPGATFSAPFPISPKPSASFSRPNPPSAVRTGGALPLRAYEPALSSPSAQTTKQTTFERSQPLSPGMRTPWTGAPQPYTPYQPFSPVVPVTPSLVTKADRKRMKQLQPKTPTVEMVQSSDEMW

SEQ ID NO: 30594 - DNA, 2260 bp, Muscodor strobelii; identical to SEQ ID NO: 30591
  misc_feature: SGI EST ID NO. CUFF.72486.0
  misc_feature: Variant of the nucleotide sequence at SEQ ID NO 30592

SEQ ID NO: 30595 - DNA, 3033 bp, Muscodor strobelii
  misc_feature: SGI cDNA ID NO. 570525
  misc_feature: Reduced expression when VOC is produced
  misc_feature: Encodes the peptide sequence at SEQ ID NO 30596
atgacggctcgtcaggactcgtcgagtctgtatggctttgacgacaccgactcatcgtactaccatgctaccagcctagctggcgacggcgccaacaatgaagctcgcgacgatcaacaactctttggcggttcaaactgggctttccaggacacccctccatatgagcagtatgattcaaactcgttctatccagaggaatggaatttgaacggccaaattgcgatgcaagatggcttgcccctacagcagcctacgtcccagcctgtgaccttaccgccatcctctatcgaacctgtaccctgtagtacgctgccaactacagcacctatcatctcaccagatgtcttacaatcgcatccttcagcaccgccgacaactgtgaatttactgagcgcagagcaacgccaaaagttacagcagattgccatgccgtcaaccaatccataccggtctcctcggagcgaatctagccctgattcagcaggcggtatgggtaagtcttcttcaatatcttcatcgcctgaaggtttaagagacccggggaaattgaatgcgcgcaaacgtaaatcttcggaggacgaggatgatgacgatgatgacgatgacggtcaacccattaagaaaacggctcacaacatgattgaaaaaagatatcgcaccaatctcaacgataagatagcggctttgagagatagtgtgcccagcttacgaatcatgtcgaagagtgcgcgaggcgaggatactaccgaggaccgggaagagctgcacgggctgactcctgcgcacaaactgaacaaggcgacggttctaagtaaagctaccgaatatattcggcatctagagaaacggaattcacggctcatgaatgacaatgcgatcatgcagcagcggatagctgcctttgagaagctattcatgtctggtgctatgaatggcgcgatcagccctcagcaagcccaacatcctcagcctccaacacccgcacagtatacacaaggaccgactggatatgcagcctcccccatgcccacgcctggtcggactgatcctcaaggcctgattcaggttccagaggacatgaaacgtatcattgccgcgcagatggccagtggacaaccttatgcagtgcctcagcaacaattcaggccgaacccagcattagtacgccagcaacagattcaacagcaacaacagcaaatacatggcagaggctggcagaatgcaggtccctactttggtaagcttatggttggctctttagctggcctaatgcttctcgaggcagtccgcgagaacgagcaaagcaatgatactccagatggccgaggtctctttgctgtacctgttcagttgctccgactcctcacttcccatctcagcatcaactttatgggctattccatccaaggtactcgagtgatttactccatcaaaatagtcttgctgctatgcagtctttggtgggcactcatgacctcgctcactgatacaaccccaacaaacccgaaacaagctagacaagtcagtactccgctgagggcagcgccgtctctagcatctccgatacatgtgcgtcgccaggcatggctcactgctattcagaccgtatgggtgccacgccacaattttttccttgaggcagctgcccttggtctcaagactctaaagctcagcctgagaaatctcattggcatgcatggttatcagataatcactggtctcactgaagagcaggagattgcccgagtcaaggcctggaccatcgccctcgatgctcagttagctggtggggacgtagaaatcagcaagagccggttaactctcaccctcctagcttctagcacacttcccacgacgcctttgcgactaatgctcaaggcacttcatatcagagttttgttatgggaggctggcttgacaggcgttcacacaggcttttttgatgtgattgcaacaaaggtcgcgagatccaagtggaatgaagctaaacacttacaccgtctccttacacagctacgcaaaaatgggcaggagttatccgacgaagatttgcctgatcacttggcagttttattagaacaagagtgtgacgaagtcttgaaccctagcatcatccaacgagctcataacttggcttggaatcggcctacggagcacaacgctatcggcagcactgatggcctcgccgcggtcgtcgatgatcctgcagtccgttcccctatggacgcggtagctgcttggtggtcgaatttaacactccagagcgcactcacgtccagtctacttgattcccgcgaccaacagaatgaaccatctctattgatagagcatgatgtatccttagcaattcgaactgctccgattggttcaatagcccaacaacgcgccctggttgcacgagcacttttgttcgaagagaaacgaagtattaacatcatagctgcattacaagccataggccccgtgacatccgtcctgactcaaaatgatggctcaagcacgccgaacaatgcatccccgcctgttccgcctagggaattaccatcttcccttatcactacaactgaattccgcacttcactgctgtgtgccatggccattgcgcatctccaaaaattctgtccgcccgaggagccggtaaatatttatggagtcataaatcagattcagcctgtttgtgacatgggtcttcttggttatactgccacatttaagttgatggaccgtcttgcaagacacgagttcgcagctgaggcatgtgccagcactctcgagcgtctttccggtaccctcagaatctggacagggaaggaatgtgctcttgagcccgaagtcaggaaccaaatagtggagcgttgcatcgccgtgactcgcggaattgtcgggatggatttcgacaccgatactggatacggtagtatgagcgacagcgaggagaccgatcacgaaaacttttctgagaccgaggaaaacacagaacagagcacgaccgaagatgctggggcctcgtgtgcatgctgctcagactaa

SEQ ID NO: 30596 - protein, 1010 aa, Muscodor strobelii
  misc_feature: SGI Peptide ID NO. 570525
  misc_feature (554)..(825): Pfam Id: PF09427 Pfam Desc: Domain of function (DUF2014)
  misc_feature (208)..(282): Pfam Id: PF00010 Pfam Desc: Helix-loop-helix DNA-binding domain
  misc_feature (5)..(980): NCBI GI: 261359522 Blast Desc: sterol regulatory element binding protein Sre1 [Verticillium albo-atrum VaMs.102]
  misc_feature (144)..(980): NCBI GI: 256734053 Blast Desc: [Nectria haematococca mpVI 77-13-4]
  misc_feature (144)..(985): NCBI GI: 46128051 Blast Desc: FG08403.1 [Gibberella zeae PH-1]
  misc_feature (45)..(988): NCBI GI: 145611134 Blast Desc: MGG_11534 [Magnaporthe grisea 70-15] gi|145018455|gb|EDK02734.1| MGG_11534 [Magnaporthe grisea 70-15]
  misc_feature (37)..(1005): NCBI GI: 171682308 Blast Desc: protein product [Podospora anserina] gi|170941113|emb|CAP66763.1| protein product [Podospora anserina]
  misc_feature (131)..(982): NCBI GI: 154324080 Blast Desc: BC1G_00439 [Botryotinia fuckeliana B05.10] gi|150842668|gb|EDN17861.1| BC1G_00439 [Botryotinia fuckeliana B05.10]
  misc_feature (45)..(892): NCBI GI: 85097020 Blast Desc: NCU04731 [Neurospora crassa OR74A] gi|28921855|gb|EAA31130.1| conserved [Neurospora crassa OR74A] gi|39979181|emb|CAE85553.1| related to myc-type bHLH factor
  misc_feature (44)..(985): NCBI GI: 116202257 Blast Desc: CHGG_09013 [Chaetomium globosum CBS 148.51] gi|88177531|gb|EAQ84999.1| CHGG_09013 [Chaetomium globosum CBS 148.51]
  misc_feature (131)..(982): NCBI GI: 156057497 Blast Desc: SS1G_04480 [Sclerotinia sclerotiorum 1980] gi|154702265|gb|EDO02004.1| SS1G_04480 [Sclerotinia sclerotiorum 1980]
  misc_feature (149)..(976): NCBI GI: 189207771 Blast Desc: conserved [Pyrenophora tritici-repentis Pt-1C-BFP] gi|187976312|gb|EDU42938.1| conserved [Pyrenophora tritici-repentis Pt-1C-BFP]
  misc_feature: Useful for introducing or modulating the production of volatile compounds
MTARQDSSSLYGFDDTDSSYYHATSLAGDGANNEARDDQQLFGGSNWAFQDTPPYEQYDSNSFYPEEWNLNGQIAMQDGLPLQQPTSQPVTLPPSSIEPVPCSTLPTTAPIISPDVLQSHPSAPPTTVNLLSAEQRQKLQQIAMPSTNPYRSPRSESSPDSAGGMGKSSSISSSPEGLRDPGKLNARKRKSSEDEDDDDDDDDGQPIKKTAHNMIEKRYRTNLNDKIAALRDSVPSLRIMSKSARGEDTTEDREELHGLTPAHKLNKATVLSKATEYIRHLEKRNSRLMNDNAIMQQRIAAFEKLFMSGAMNGAISPQQAQHPQPPTPAQYTQGPTGYAASPMPTPGRTDPQGLIQVPEDMKRIIAAQMASGQPYAVPQQQFRPNPALVRQQQIQQQQQQIHGRGWQNAGPYFGKLMVGSLAGLMLLEAVRENEQSNDTPDGRGLFAVPVQLLRLLTSHLSINFMGYSIQGTRVIYSIKIVLLLCSLWWALMTSLTDTTPTNPKQARQVSTPLRAAPSLASPIHVRRQAWLTAIQTVWVPRHNFFLEAAALGLKTLKLSLRNLIGMHGYQIITGLTEEQEIARVKAWTIALDAQLAGGDVEISKSRLTLTLLASSTLPTTPLRLMLKALHIRVLLWEAGLTGVHTGFFDVIATKVARSKWNEAKHLHRLLTQLRKNGQELSDEDLPDHLAVLLEQECDEVLNPSIIQRAHNLAWNRPTEHNAIGSTDGLAAVVDDPAVRSPMDAVAAWWSNLTLQSALTSSLLDSRDQQNEPSLLIEHDVSLAIRTAPIGSIAQQRALVARALLFEEKRSINIIAALQAIGPVTSVLTQNDGSSTPNNASPPVPPRELPSSLITTTEFRTSLLCAMAIAHLQKFCPPEEPVNIYGVINQIQPVCDMGLLGYTATFKLMDRLARHEFAAEACASTLERLSGTLRIWTGKECALEPEVRNQIVERCIAVTRGIVGMDFDTDTGYGSMSDSEETDHENFSETEENTEQSTTEDAGASCACCSD

SEQ ID NO: 30597 - DNA, 5126 bp, Muscodor strobelii
  misc_feature: SGI EST ID NO. CUFF.72859.0
  misc_feature: Variant of the nucleotide sequence at SEQ ID NO 30595
tcggtcccgtctgcgttggaagctgtcgcgtttgcaaattcgctgcagaccggtcgtgcacactcgtacagtaagaagcgagcgaacacctgcagactccatcttcgattgctcgctacatccgtacatgctccattctctccctcacacatctcagtttgccctctcacgccttaggtatcgacccaactaaggtagcccgatccgacggaccctggcgacactacccgagccatcatcacacttgctgcatcccatcccataggctctcccatacttcgtccctccactcacctcttcatcacccacgactcatcgcgaggccctgattgtgctgtgaaggcatagcgcttgaatgccctggctcaattaaaaccaattcgcgacgtgaacactgtagtcatcgagtatgatcttgcgtggcctgggctggaaaaactgagacttacacaacattagtccttgaggcacctggcgtcacataacaagcttcttgtcccatcagcttgaccaccgcccgagtttttaccccgattcaaacatttcggattaattctcctgttctctctgtcagactcttgttctaatacccaggcttttcaacaaatttcggccgctgcgtatccccataatctgtggcccatccccttccacatacatatctctactctctcatcaggcgaggcgggacatcaggccactgaccacaaatcacgagtctacccccgtcgagatctatccaatccgcaccaccccctcttctggtctgccaacgtattgagaactgcggccaagagcccctgcttgactattgacttcagattacctatgtcgaaccacctctgcatctagtgattcgatccgatcaccatgacggctcgtcaggactcgtcgagtctgtatggctttgacgacaccgactcatcgtactaccatgctaccagcctagctggcgacggcgccaacaatgaagctcgcgacgatcaacaactctttggcggttcaaactgggctttccaggacacccctccatatgagcagtatgattcaaactcgttctatccagaggaatggaatttgaacggccaaattgcgatgcaagatggcttgcccctacagcagcctacgtcccagcctgtgaccttaccgccatcctctatcgaacctgtaccctgtagtacgctgccaactacagcacctatcatctcaccagatgtcttacaatcgcatccttcagcaccgccgacaactgtgaatttactgagcgcagagcaacgccaaaagttacagcagattgccatgccgtcaaccaatccataccggtctcctcggagcgaatctagccctgattcagcaggcggtatgggtaagtcttcttcaatatcttcatcgcctgaaggtttaagagacccggggaaattgaatgcgcgcaaacgtaaatcttcggaggacgaggatgatgacgatgatgacgatgacggtcaacccattaagaaaacggctcacaacatgattgaaaaaagatatcgcaccaatctcaacgataagatagcggctttgagagatagtgtgcccagcttacgaatcatgtcgaagagtgcgcgaggcgaggatactaccgaggaccgggaagagctgcacgggctgactcctgcgcacaaactgaacaaggcgacggttctaagtaaagctaccgaatatattcggcatctagagaaacggaattcacggctcatgaatgacaatgcgatcatgcagcagcggatagctgcctttgagaagctattcatgtctggtgctatgaatggcgcgatcagccctcagcaagcccaacatcctcagcctccaacacccgcacagtatacacaaggaccgactggatatgcagcctcccccatgcccacgcctggtcggactgatcctcaaggcctgattcaggttccagaggacatgaaacgtatcattgccgcgcagatggccagtggacaaccttatgcagtgcctcagcaacaattcaggccgaacccagcattagtacgccagcaacagattcaacagcaacaacagcaaatacatggcagaggctggcagaatgcaggtccctactttggtaagcttatggttggctctttagctggcctaatgcttctcgaggcagtccgcgagaacgagcaaagcaatgatactccagatggccgaggtctctttgctgtacctgttcagttgctccgactcctcacttcccatctcagcatcaactttatgggctattccatccaaggtactcgagtgatttactccatcaaaatagtcttgctgctatgcagtctttggtgggcactcatgacctcgctcactgatacaaccccaacaaacccgaaacaagctagacaagtcagtactccgctgagggcagcgccgtctctagcatctccgatacatgtgcgtcgccaggcatggctcactgctattcagaccgtatgggtgccacgccacaattttttccttgaggcagctgcccttggtctcaagactctaaagctcagcctgagaaatctcattggcatgcatggttatcagataatcactggtctcactgaagagcaggagattgcccgagtcaaggcctggaccatcgccctcgatgctcagttagctggtggggacgtagaaatcagcaagagccggttaactctcaccctcctagcttctagcacacttcccacgacgcctttgcgactaatgctcaaggcacttcatatcagagttttgttatgggaggctggcttgacaggcgttcacacaggcttttttgatgtgattgcaacaaaggtcgcgagatccaagtggaatgaagctaaacacttacaccgtctccttacacagctacgcaaaaatgggcaggagttatccgacgaagatttgcctgatcacttggcagttttattagaacaagagtgtgacgaagtcttgaaccctagcatcatccaacgagctcataacttggcttggaatcggcctacggagcacaacgctatcggcagcactgatggcctcgccgcggtcgtcgatgatcctgcagtccgttcccctatggacgcggtagctgcttggtggtcgaatttaacactccagagcgcactcacgtccagtctacttgattcccgcgaccaacagaatgaaccatctctattgatagagcatgatgtatccttagcaattcgaactgctccgattggttcaatagcccaacaacgcgccctggttgcacgagcacttttgttcgaagagaaacgaagtattaacatcatagctgcattacaagccataggccccgtgacatccgtcctgactcaaaatgatggctcaagcacgccgaacaatgcatccccgcctgttccgcctagggaattaccatcttcccttatcactacaactgaattccgcacttcactgctgtgtgccatggccattgcgcatctccaaaaattctgtccgcccgaggagccggtaaatatttatggagtcataaatcagattcagcctgtttgtgacatgggtcttcttggttatactgccacatttaagttgatggaccgtcttgcaagacacgagttcgcagctgaggcatgtgccagcactctcgagcgtctttccggtaccctcagaatctggacagggaaggaatgtgctcttgagcccgaagtcaggaaccaaatagtggagcgttgcatcgccgtgactcgcggaattgtcgggatggatttcgacaccgatactggatacggtagtatgagcgacagcgaggagaccgatcacgaaaacttttctgagaccgaggaaaacacagaacagagcacgaccgaagatgctggggcctcgtgtgcatgctgctcagactaattaccctatttcatgttcaacgcaattcgatttatcagagctatccttcattggcattccttttttttactccaataggctactttgaggcctggagcacattatgatcatttatctacacgatatcttttctttagtgttacagttttatgtccatccgagtacatctcatctgcatcgacgaccgcatttccatgttctacatcacttacgaacttgggggagtggtgctctcattgagcagtatacaaatcatacacggggcgaatcaggcgtttgaccggggcgacagcttcatctgtctcatgcatggatattgggggaaaactggaaatggtgggaaaaggtagattatgggttgattcgcggcacggtcgacctgaatggtcagagtcagcgtttgctatttaagaaacactctcaaggtaaggtgtcctagtcttggaattcatgggatattctatagaaagaaatctgtattccactccatgccactacatagactaggcgtccttgacctgttttcacgtgagacgctttcttgacatatacaaccatcatgtcaacctagaacacctcaagctcaagacttcgaaatgtactggatacacaatagacttcacagctttgatatatctagttattttccagaaacccgcaaaaagatcgagcaaagagaggaaccaccaacatcccatggaacttccttccgttttttctcgcagcattacaatttcagttcgtcgggacggacttaactgcttatgcccgccagagatatacgcctgatcgttgtctctcttccggtttcctgctacctgtgtcccaaaactctatctcaggttgattcagtccctaacggggtcccgaaagcctaatggaggaggaattgatatcaatcggagggcgtagctcgcgggtctggctaaacggctaagaggtagttgttaaaaggggttgtgcaactctgttggcatgaaaggttacttgaaccttattttgaattggcgtccttcgcgcgactcaggtgacgggtcgttgtgggggtagaaatgatggtggtcacgtcttgttaagagtactggatttttaccatggggtcggcaacgatatattccatgatgcggattttcacggctgcgcaacgggatctttgattttgaaataaaagggtgaactctatatctttcacaagtatcaatattcaaaatatttcaaagttg

SEQ ID NO: 30598 - DNA, 576 bp, Muscodor strobelii
  misc_feature: SGI cDNA ID NO. 570526
  misc_feature: Encodes the peptide sequence at SEQ ID NO 30599
atggcccttcccaaacctagcgtctatctctttggaggaaccaaaccatggctggttcaatcctggatcacttcagatgatcgggtaagaggcggtgcaagtaaaagctacctagatgacatctcgaactcgccaggtgcagtgtgttttcatggagaattagatatcaaagctcttggcggcgcgggtttcgcttcgcaacgttccccagatctactacattgggatctctctagcttcgtaggtttatatttgaaaataaagggaggcgatgcgaaacggtacactttaatcgtcaaggatgaggttttgcctaaacaatcagatgggcgcgaacagagcactatcagttttgaatacgattttacaggttcaacaggtgatctagttattgcgtgggaagaattcaagccaacatatcgaggcaaaccggcgcccgattcgaagcccttgaatctcgcaaatatcaagagactcagtgttatgatgcgcagcttttttggggatcaagaaggcggcagtttcaatcttgagctcgagtacattgctgtcgttaaaactcaagcaagagcctag

SEQ ID NO: 30599 - protein, 191 aa, Muscodor strobelii
  misc_feature: SGI Peptide ID NO. 570526
  misc_feature (9)..(184): Pfam Id: PF08547 Pfam Desc: Complex I intermediate-associated protein 30 (CIA30)
  misc_feature (8)..(188): NCBI GI: 226496677 Blast Desc: LOC100275245 [Zea mays] gi|195610512|gb|ACG27086.1| [Zea mays]
  misc_feature (8)..(188): NCBI GI: 121719396 Blast Desc: conserved [Aspergillus clavatus NRRL 1] gi|119404595|gb|EAW14971.1| conserved [Aspergillus clavatus NRRL 1]
  misc_feature (8)..(184): NCBI GI: 261359674 Blast Desc: CIA30 family protein [Verticillium albo-atrum VaMs.102]
  misc_feature (4)..(186): NCBI GI: 119499271 Blast Desc: NFIA_040720 [Neosartorya fischeri NRRL 181] gi|119414557|gb|EAW24496.1| conserved [Neosartorya fischeri NRRL 181]
  misc_feature (5)..(185): NCBI GI: 189189802 Blast Desc: CIA30 family protein [Pyrenophora tritici-repentis Pt-1C-BFP] gi|187972846|gb|EDU40345.1| CIA30 family protein [Pyrenophora tritici-repentis Pt-1C-BFP]
  misc_feature (4)..(183): NCBI GI: 70985396 Blast Desc: conserved [Aspergillus fumigatus Af293] gi|66845832|gb|EAL86166.1| conserved [Aspergillus fumigatus Af293] gi|159125871|gb|EDP50987.1| conserved [Aspergillus A1163]
  misc_feature (10)..(186): NCBI GI: 238494906 Blast Desc: conserved [Aspergillus flavus NRRL3357] gi|220695339|gb|EED51682.1| conserved [Aspergillus flavus NRRL3357]
  misc_feature (8)..(189): NCBI GI: 169608067 Blast Desc: SNOG_07100 [Phaeosphaeria nodorum SN15] gi|160701552|gb|EAT85751.2| SNOG_07100 [Phaeosphaeria nodorum SN15]
  misc_feature (4)..(188): NCBI GI: 145251770 Blast Desc: An16g00850 [Aspergillus niger] gi|134082935|emb|CAK46771.1| protein product [Aspergillus niger]
  misc_feature (10)..(186): NCBI GI: 169777705 Blast Desc: [Aspergillus oryzae RIB40] gi|83772055|dbj|BAE62185.1| protein product [Aspergillus oryzae]
MALPKPSVYLFGGTKPWLVQSWITSDDRVRGGASKSYLDDISNSPGAVCFHGELDIKALGGAGFASQRSPDLLHWDLSSFVGLYLKIKGGDAKRYTLIVKDEVLPKQSDGREQSTISFEYDFTGSTGDLVIAWEEFKPTYRGKPAPDSKPLNLANIKRLSVMMRSFFGDQEGGSFNLELEYIAVVKTQARA

SEQ ID NO: 30600 - DNA, 1177 bp, Muscodor strobelii
  misc_feature: SGI EST ID NO. CUFF.72408.1
  misc_feature: Variant of the nucleotide sequence at SEQ ID NO 30598
gtgctaaggtctaaagccacgggtttcatgatgctcgttaactaagctggatctggtagctcatttgagtttcggtgctttcggcctggaagccttcgttgagcatttgaccaagcttgacccgaaacgcccttccgttgacaatcctcctgcaccgctagcaagtgtcaaagccggagcatcccaacacgacagggtttagctgcgattgagccacgagcttaatgaatctaggctttggaggaagattgcctaccctcgccgtcgctggacgcgcaacaatccaccacattaaagcaaactgcagccgagattgcagcggaccggatatctaacagactaccttcatcggagcgtcatggcccttcccaaacctagcgtctatctctttggaggaaccaaaccatggctggttcaatcctggatcacttcagatgatcgggtaagaggcggtgcaagtaaaagctacctagatgacatctcgaactcgccaggtgcagtgtgttttcatggagaattagatatcaaagctcttggcggcgcgggtttcgcttcgcaacgttccccagatctactacattgggatctctctagcttcgtaggtttatatttgaaaataaagggaggcgatgcgaaacggtacactttaatcgtcaaggatgaggttttgcctaaacaatcagatgggcgcgaacagagcactatcagttttgaatacgattttacaggttcaacaggtgatctagttattgcgtgggaagaattcaagccaacatatcgaggcaaaccggcgcccgattcgaagcccttgaatctcgcaaatatcaagagactcagtgttatgatgcgcagcttttttggggatcaagaaggcggcagtttcaatcttgagctcgagtacattgctgtcgttaaaactcaagcaagagcctagatttccttattgtctgcttcgggcaacgcatgctataaaccccgacccctggaagagccggaaatcctgagagagcaaatgataatcgttgtggaatgctctaatggcagtgatgtcaagtgttaattaactcttttcttttctgcaaagcttctgaggaatatgaaggtcttaccaatttgagtcttgttcacattaacgttctcagacactatcttcactgagagccatacagcaccgtca

SEQ ID NO: 30601 - DNA, 840 bp, Muscodor strobelii
  misc_feature: SGI cDNA ID NO. 570527
  misc_feature: Encodes the peptide sequence at SEQ ID NO 30602
atgtcggctccgatatacgccatgtctcaacatcagtactatgctgccgccccggcacccaggcaatacgcagcacacggtacaagctctgctttctccagctcggccaacccagacgaggattggaccaagatctcagatctagctgagcgccggaggatacaaaacagaattgcgcaacgaaactatcgtaagaagcttaagagacgtctggaagacttggagaggagagccggttcatccgacgaaggttcatcgccaaccaacgtttctgagaagcaatcacaatcaaacagccggggtaccaagaagacagcgtccaagagttcaaaatcctcgaatgccccaaagcaagcacatcctccgcaatttacaccgcctatgactcacgatgacgagcttctcttcccatcaacatatgaagatcgggagcgctcacacacgcctccattcgtctactctgcctatcctcctcctgatgagatgatggtagctccctacagctcagcacagtcctaccacgctatcacagccagcgaagggtatccaaattacatcgcaaattctgtcccctgcacgctaccgcccatgacacatttcagcgacgcaattaagagggaaacataccaccaagaggagcctatgtcaccttacatgaattattacatgcccagtatggaagtcaacgctcccggcccctacgatcaccattcgaaccctcatacaccaccgctatctcactctttcgaccattctgccaattgttccgaagttggctacgattatccaacaactccattatctttaccaggatcaccggggatggtacaacacgcatga

SEQ ID NO: 30602 - protein, 279 aa, Muscodor strobelii
  misc_feature: SGI Peptide ID NO. 570527
  misc_feature (21)..(276): NCBI GI: 256727728 Blast Desc: NECHADRAFT_66814 [Nectria haematococca mpVI 77-13-4]
  misc_feature (21)..(278): NCBI GI: 46134275 Blast Desc: FG09277.1 [Gibberella zeae PH-1]
  misc_feature (8)..(278): NCBI GI: 156057847 Blast Desc: SS1G_04655 [Sclerotinia sclerotiorum 1980] gi|154702440|gb|EDO02179.1| SS1G_04655 [Sclerotinia sclerotiorum 1980]
  misc_feature (2)..(278): NCBI GI: 39979245 Blast Desc: [Neurospora crassa]
  misc_feature (5)..(278): NCBI GI: 164426722 Blast Desc: NCU04058 [Neurospora crassa OR74A] gi|157071448|gb|EAA28437.2| NCU04058 [Neurospora crassa OR74A]
  misc_feature (8)..(278): NCBI GI: 154323438 Blast Desc: BC1G_00118 [Botryotinia fuckeliana B05.10] gi|150842347|gb|EDN17540.1| BC1G_00118 [Botryotinia fuckeliana B05.10]
  misc_feature (5)..(279): NCBI GI: 116202301 Blast Desc: CHGG_09035 [Chaetomium globosum CBS 148.51] gi|88177553|gb|EAQ85021.1| CHGG_09035 [Chaetomium globosum CBS 148.51]
  misc_feature (21)..(242): NCBI GI: 145611206 Blast Desc: MGG_00587 [Magnaporthe grisea 70-15] gi|145018512|gb|EDK02791.1| MGG_00587 [Magnaporthe grisea 70-15]
  misc_feature (3)..(274): NCBI GI: 171682334 Blast Desc: protein product [Podospora anserina] gi|170941126|emb|CAP66776.1| protein product [Podospora anserina]
  misc_feature (13)..(275): NCBI GI: 189189864 Blast Desc: PTRG_00938 [Pyrenophora tritici-repentis Pt-1C-BFP] gi|187972877|gb|EDU40376.1| PTRG_00938 [Pyrenophora tritici-repentis Pt-1C-BFP]
MSAPIYAMSQHQYYAAAPAPRQYAAHGTSSAFSSSANPDEDWTKISDLAERRRIQNRIAQRNYRKKLKRRLEDLERRAGSSDEGSSPTNVSEKQSQSNSRGTKKTASKSSKSSNAPKQAHPPQFTPPMTHDDELLFPSTYEDRERSHTPPFVYSAYPPPDEMMVAPYSSAQSYHAITASEGYPNYIANSVPCTLPPMTHFSDAIKRETYHQEEPMSPYMNYYMPSMEVNAPGPYDHHSNPHTPPLSHSFDHSANCSEVGYDYPTTPLSLPGSPGMVQHA

SEQ ID NO: 30603 - DNA, 1562 bp, Muscodor strobelii
  misc_feature: SGI EST ID NO. CUFF.72717.0
  misc_feature: Variant of the nucleotide sequence at SEQ ID NO 30601
ggccccagcctgaatgttgccggtgtatcgtaggtagcgaacgagcctaccttagctcaagaggcgtcttcatggctgaacgaagctctggtttctatatattccattccttcctccctctcactcgtcttatgtcccaccaccacggtttcgacaccagtttcagtagtgctgaagtcatcttcactaacaaagatacacttcttaaatcttcattactgcttaccttcctgtcaactactatagctcttagctcatcgataaagagttgagcttcataacatagtctcgatgtcggctccgatatacgccatgtctcaacatcagtactatgctgccgccccggcacccaggcaatacgcagcacacggtacaagctctgctttctccagctcggccaacccagacgaggattggaccaagatctcagatctagctgagcgccggaggatacaaaacagaattgcgcaacgaaactatcgtaagaagcttaagagacgtctggaagacttggagaggagagccggttcatccgacgaaggttcatcgccaaccaacgtttctgagaagcaatcacaatcaaacagccggggtaccaagaagacagcgtccaagagttcaaaatcctcgaatgccccaaagcaagcacatcctccgcaatttacaccgcctatgactcacgatgacgagcttctcttcccatcaacatatgaagatcgggagcgctcacacacgcctccattcgtctactctgcctatcctcctcctgatgagatgatggtagctccctacagctcagcacagtcctaccacgctatcacagccagcgaagggtatccaaattacatcgcaaattctgtcccctgcacgctaccgcccatgacacatttcagcgacgcaattaagagggaaacataccaccaagaggagcctatgtcaccttacatgaattattacatgcccagtatggaagtcaacgctcccggcccctacgatcaccattcgaaccctcatgtgagtcatgtgcgcgatcatcctcaccatcacccacgtagctgatcggtgcttgctatcagacaccaccgctatctcactctttcgaccattctgccaattgttccgaagttggctacgattatccaacaactccattatctttaccaggatcaccggggatggtacaacacgcatgaagagacggaagagggcattcaatggagggaggctagaatggccgaattcaggacattattatatacgactgtgcatgactaggctgcatctttggttgggacattatggaagagcaaactcattcgatttcttggggattgggagtgccggcgcaaatttgcttgtataaaggcgaagtgctcgaccttgattgaattggacttggttttccagcgaaggatatccgaacgtcgatgaattactattttgctaggaacactctacacatatatacattatagatggtacttggatctcccacgggatctgtatcatttcccatttcaatgataaaaagttcacccaaacatgaaaggatacaaactcca

SEQ ID NO: 30604 - DNA, 2655 bp, Muscodor strobelii
  misc_feature: SGI cDNA ID NO. 570528
  misc_feature: Encodes the peptide sequence at SEQ ID NO 30605
atggccaccgttacggccacggtgacaactgcggtgttgtccaccgtcactaaaacgattacttccgctagtcccacagcgacaggtgctgctccccagggtgggattctcgagggcgtccttcctaatactttctccaaatccaacccgattaatctattcatcatccaggccgtaatcatcataatcttctgccgattgctgcattatcctctgtccctattgggtcaaccacgtgtcatcgccgaagtcatcggagggattttgctaggcccgtctgtgctttcgcgcattccaggcttcaccaatgacatattcccgaccgactctatgcccatattgaacaatgttgcaaaccttgggcttatattgttcctcttcctcatcggtctcgaagttgatctacgcctgtttgtagacaactggcgtgtagccgtcagtgtcagcgccttaggcctaatactaccattcggtctaggatatggtgtagcttggggcatctaccaccagttccaagatgagatgaccaaacaggtcagctttggcgtttttggtcttttcgtcgggactgctttgtcgatcaccgcgtttcctgtgctttgtcgtatcctctctgagctcaacctgctgagtaacccagtcggtgccctcgttcttgctgctggtgttggcaatgatgttgttggctggatactcttagctctcagtgtcgctctcgtcaacaatgcgaatggtttgaccgcactctatgttcttcttactgctgtagcctggctgctctttttgacatttgctgtcagaccagccttttattgggtttgtcgaagaacgggtagtattcagaatggcccaacccaaggaatcatggctataacaatgctcatcgtcttggcatcatcatggttcactagcattattggcgttcacgctatttttggtgcctttctcgctgggctaataatgccaagagagggtggttttgctatcaaggtaactgagaagctcgaagatctaatcacggtgctttttattcccttatacttcgcgctttcgggtttgagcaccaatctcggtcttttgaacgacggtatcacatgggcgtacgtgattgctattatcgcaattgcgttctcaggcaaaattgctggcggtaccattgcagccaaacttaacggtcttgtgtggagagaaagttttacgattggcgttctgatgagttgcaagggcttggttgaattgatcgttcttaacgttggtttatcggcccatattctttcccaaaagacatttaccatgtttgttgtcatggctctagtcaccactgttgcaaccacaccgcttgtgaaggctttatatccaccgtggtacagacagaagcttgatcaatggaagcgtggagaaatagactgggacggcaaaccgctcaagggcgataactccaacgcatctacttcagccgaaaagctggtagattcaagcgttcgacgtctcttagtttaccttcgtttggacagtcttccgagccttttcaccttcatttcgctcctaggtgaagagcaacagaaacatgtcgtcacagaaacagcagacgagagcgctgatcagaggccattgatcaagagacgacctcttgaagtccatgctctgcgtattcttgaattgacagaacgcacgtcgacggtgatgagggtgacagaaggcgaagatgcttcgcgacgagatcctgtagtaaacgcagttcgaaccttttcacaacttcacgacgtcgcggtttcaggcaacgtcgttgttgcgtccgaagagtcgtatgctgagacggtagcaacgcaagcatcagaacagaaatccgatttcgtgctcatcccgtggagcaccattggcagtaataccgaagaccaatctatcccgtttcaggtttcatcagatgatcgcttcgctggaagatctcatcttgatttcatccgaaatactctcaacaaagccgtctgcacaactggtatcttcatcagcaatggattcagcggtgttgcgcccgagggcaggcaacgtccttctcgcactctatctatgacttctatgcatagtcacagggaggcggcgcttcctccgatcgctaacaagacacatcacttgtttcttccgtatattggcggggccgatgatagagccgctctgtccttcctgctccagctggcaaagaatcccaacgtgacagctaccatcgtgcacattacatggtctgatgtcgatgacgagatcacagccgtcaatgaaagcaccctggaagacccggtggtagtgaaacaatccatcaacacggagatcacggcagaggacagctctttcctagccactgcccagtcaaaacttccatctgaaatcagtggccgcattagcttcatcgaggcgactgtatcgagtatctcggccgccaaacgtgtgatcgaactcgcgtctgaagttgttgggcagaatcgccaaaacgctggagacatagtcatcgtagggcgcagacacccaaaattgccggccttgagcagagatccagagcagagcaacaccgcctatgacttgcagaagactattggagtacttggtgagaaggtcgccatgagttcactgaggacaagtgtgctcgtcatccaagccgcctga

SEQ ID NO: 30605 - protein, 884 aa, Muscodor strobelii
  misc_feature: SGI Peptide ID NO. 570528
  misc_feature (59)..(449): Pfam Id: PF00999 Pfam Desc: Sodium/hydrogen exchanger family
  misc_feature (27)..(884): NCBI GI: 171682408 Blast Desc: protein product [Podospora anserina] gi|170941163|emb|CAP66813.1| protein product [Podospora anserina]
  misc_feature (30)..(884): NCBI GI: 154323458 Blast Desc: BC1G_00128 [Botryotinia fuckeliana B05.10] gi|150842357|gb|EDN17550.1| BC1G_00128 [Botryotinia fuckeliana B05.10]
  misc_feature (1)..(884): NCBI GI: 156057833 Blast Desc: SS1G_04648 [Sclerotinia sclerotiorum 1980] gi|154702433|gb|EDO02172.1| SS1G_04648 [Sclerotinia sclerotiorum 1980]
  misc_feature (4)..(806): NCBI GI: 85096848 Blast Desc: NCU07068 [Neurospora crassa OR74A] gi|28921821|gb|EAA31097.1| [Neurospora crassa OR74A]
  misc_feature (111)..(884): NCBI GI: 116202235 Blast Desc: CHGG_09002 [Chaetomium globosum CBS 148.51] gi|88177520|gb|EAQ84988.1| CHGG_09002 [Chaetomium globosum CBS 148.51]
  misc_feature (32)..(882): NCBI GI: 256723892 Blast Desc: [Nectria haematococca mpVI 77-13-4]
  misc_feature (23)..(884): NCBI GI: 261198535 Blast Desc: K+ homeostasis protein Kha1 [Ajellomyces dermatitidis SLH14081] gi|239594821|gb|EEQ77402.1| K+ homeostasis protein Kha1 [Ajellomyces dermatitidis SLH14081]
  misc_feature (23)..(884): NCBI GI: 239610057 Blast Desc: K+ homeostasis protein Kha1 [Ajellomyces dermatitidis ER-3]
  misc_feature (30)..(884): NCBI GI: 258572206 Blast Desc: conserved [Uncinocarpus reesii 1704] gi|237905135|gb|EEP79536.1| conserved [Uncinocarpus reesii 1704]
  misc_feature (15)..(884): NCBI GI: 240109060 Blast Desc: Sodium/hydrogen exchanger family protein [Coccidioides posadasii C735 delta SOWgp]
MATVTATVTTAVLSTVTKTITSASPTATGAAPQGGILEGVLPNTFSKSNPINLFIIQAVIIIIFCRLLHYPLSLLGQPRVIAEVIGGILLGPSVLSRIPGFTNDIFPTDSMPILNNVANLGLILFLFLIGLEVDLRLFVDNWRVAVSVSALGLILPFGLGYGVAWGIYHQFQDEMTKQVSFGVFGLFVGTALSITAFPVLCRILSELNLLSNPVGALVLAAGVGNDVVGWILLALSVALVNNANGLTALYVLLTAVAWLLFLTFAVRPAFYWVCRRTGSIQNGPTQGIMAITMLIVLASSWFTSIIGVHAIFGAFLAGLIMPREGGFAIKVTEKLEDLITVLFIPLYFALSGLSTNLGLLNDGITWAYVIAIIAIAFSGKIAGGTIAAKLNGLVWRESFTIGVLMSCKGLVELIVLNVGLSAHILSQKTFTMFVVMALVTTVATTPLVKALYPPWYRQKLDQWKRGEIDWDGKPLKGDNSNASTSAEKLVDSSVRRLLVYLRLDSLPSLFTFISLLGEEQQKHVVTETADESADQRPLIKRRPLEVHALRILELTERTSTVMRVTEGEDASRRDPVVNAVRTFSQLHDVAVSGNVVVASEESYAETVATQASEQKSDFVLIPWSTIGSNTEDQSIPFQVSSDDRFAGRSHLDFIRNTLNKAVCTTGIFISNGFSGVAPEGRQRPSRTLSMTSMHSHREAALPPIANKTHHLFLPYIGGADDRAALSFLLQLAKNPNVTATIVHITWSDVDDEITAVNESTLEDPVVVKQSINTEITAEDSSFLATAQSKLPSEISGRISFIEATVSSISAAKRVIELASEVVGQNRQNAGDIVIVGRRHPKLPALSRDPEQSNTAYDLQKTIGVLGEKVAMSSLRTSVLVIQAA

SEQ ID NO: 30606 - DNA, 3672 bp, Muscodor strobelii
  misc_feature: SGI EST ID NO. CUFF.72508.0
  misc_feature: Variant of the nucleotide sequence at SEQ ID NO 30604
gctattagctcaccagatcctcgcgtattgtgctcagaaatcgcagacacataggcttctacgagctgctcgtgctcgtgtttgaccaggagcccggtccagctgcaaatgtccgtaagtgggtggattgagagaatgtcggttagctacctacgaatagatacagatgagcaatcgcctgaatgcgaagggatcaagaagtcgtccaacttgctcggccttcgaattcatttgttatgtcaggaatatagaacgggcgttaaataatagtctaatgtgtctccacagatgatcacgtacgtgctgaagcttgatgctcctacattccatggcggtatctcacgtggtggtggttcaccttgtccatggcatgcttggcttaccttattattcaaatcgataaagaccctagttgtctcttccgttcccatctcacccttgcgtccgttcgttcgaccttgcgtttgcttatcaatagtgtttgttcatattcccgcagtcgtgattttcacaattaagcacgaggttcgggagttgcatcgagccacaaacaccacatcatggccaccgttacggccacggtgacaactgcggtgttgtccaccgtcactaaaacgattacttccgctagtcccacagcgacaggtgctgctccccagggtgggattctcgagggcgtccttcctaatactttctccaaatccaacccgattaatctattcatcatccagggccgtaatcatcataatcttctgccgattgctgcattatcctctgtccctattgggtcaaccacgtgtcatcgccgaagtcatcggagggattttgctaggcccgtctgtgctttcgcgcattccaggcttcaccaatgacatattcccgaccgactctatgcccatattgaacaatgttgcaaaccttgggcttatattgttcctcttcctcatcggtctcgaagttgatctacgcctgtttgtagacaactggcgtgtagccgtcagtgtcagcgccttaggcctaatactaccattcggtctaggatatggtgtagcttggggcatctaccaccagttccaagatgagatgaccaaacaggtcagctttggcgtttttggtcttttcgtcgggactgctttgtcgatcaccgcgtttcctgtgctttgtcgtatcctctctgagctcaacctgctgagtaacccagtcggtgccctcgttcttgctgctggtgttggcaatgatgttgttggctggatactcttagctctcagtgtcgctctcgtcaacaatgcgaatggtttgaccgcactctatgttcttcttactgctgtagcctggctgctctttttgacatttgctgtcagaccagccttttattgggtttgtcgaagaacgggtagtattcagaatggcccaacccaaggaatcatggctataacaatgctcatcgtcttggcatcatcatggttcactagcattattggcgttcacgctatttttggtgcctttctcgctgggctaataatgccaagagagggtggttttgctatcaaggtaactgagaagctcgaagatctaatcacggtgctttttattcccttatacttcgcgctttcgggtttgagcaccaatctcggtcttttgaacgacggtatcacatgggcgtacgtgattgctattatcgcaattgcgttctcaggcaaaattgctggcggtaccattgcagccaaacttaacggtcttgtgtggagagaaagttttacgattggcgttctgatgagttgcaagggcttggttgaattgatcgttcttaacgttggtttatcggcccatattctttcccaaaagacatttaccatgtttgttgtcatggctctagtcaccactgttgcaaccacaccgcttgtgaaggctttatatccaccgtggtacagacagaagcttgatcaatggaagcgtggagaaatagactgggacggcaaaccgctcaagggcgataactccaacgcatctacttcagccgaaaagctggtagattcaagcgttcgacgtctcttagtttaccttcgtttggacagtcttccgagccttttcaccttcatttcgctcctaggtgaagagcaacagaaacatgtcgtcacagaaacagcagacgagagcgctgatcagaggccattgatcaagagacgacctcttgaagtccatgctctgcgtattcttgaattgacagaacgcacgtcgacggtgatgagggtgacagaaggcgaagatgcttcgcgacgagatcctgtagtaaacgcagttcgaaccttttcacaacttcacgacgtcgcggtttcaggcaacgtcgttgttgcgtccgaagagtcgtatgctgagacggtagcaacgcaagcatcagaacagaaatccgatttcgtgctcatcccgtggagcaccattggcagtaataccgaagaccaatctatcccgtttcaggtttcatcagatgatcgcttcgctggaagatctcatcttgatttcatccgaaatactctcaacaaagccgtctgcacaactggtatcttcatcagcaatggattcagcggtgttgcgcccgagggcaggcaacgtccttctcgcactctatctatgacttctatgcatagtcacagggaggcggcgcttcctccgatcgctaacaagacacatcacttgtttcttccgtatattggcggggccgatgatagagccgctctgtccttcctgctccagctggcaaagaatcccaacgtgacagctaccatcgtgcacattacatggtctgatgtcgatgacgagatcacagccgtcaatgaaagcaccctggaagacccggtggtagtgaaacaatccatcaacacggagatcacggcagaggacagctctttcctagccactgcccagtcaaaacttccatctgaaatcagtggccgcattagcttcatcgaggcgactgtatcgagtatctcggccgccaaacgtgtgatcgaactcgcgtctgaagttgttgggcagaatcgccaaaacgctggagacatagtcatcgtagggcgcagacacccaaaattgccggccttgagcagagatccagagcagagcaacaccgcctatgacttgcagaagactattggagtacttggtgagaaggtcgccatgagttcactgaggacaagtgtgctcgtcatccaagccgcctgatgagatggcaatggatttatcacttgctgttctcctgtcttactcaatcttcgcgctgcaggcgtttaggtctttctcttccttctcttacagcgcgataagtcacacttggtcatcgtacatactacatagtgctcgcgagagaaccgggcaaattgcatatcagagtttgttggatacgtgcgagctggatatagctcacggtttacaagtatacttaatcaaacagcgtcttttcacgattcttatgatcatcatcgatcggtgactgtcacaaatacggcgctcgccaccgtgtgaatatagcttccagttgtaattttttaagcatatccaagtctcaggatgagtgtcaaacgtataaatacgtcagaataaagaggcgcccgaagatgtccgtagagttcgcttctatgctcatacatatgatattaggattcaactcgtcactcattt

SEQ ID NO: 30607 - DNA, 999 bp, Muscodor strobelii
  misc_feature: SGI cDNA ID NO. 570529
  misc_feature: Encodes the peptide sequence at SEQ ID NO 30608
atgacctcgacggagagccgaagcccagcaagtccccaaactccaccgacatctgattgcgtctcggagaggacatctctgacttgggattcgtttgaagaacgatatacatgggatggtgggcggaggtatcacgcctatagagaggggcgctacagcttacccaatgacgagacggagcagcaacgagaagaacttctgcacatcctcgtcatggatattctagagcacgagcttttcttggcaccaatggctgagacgcccaaaaaggtcctcgacattgctacgggcacagggctgtgggcgatcgagatgggagaccgatatcccgatgcagagatattaggtcttgatcttagccccatccaaccaacatctgttccaccaaacgtatcgttccagatagatgatatcgaagacacatgggtgcatgatgatgactacgatttcattcatatgcgtgaatcttcgggctacatggtctccacaccgaaagtaattgaaagctcgctcaaacacttaaaacctggtggctggttcgagttgcaggaatttcactgggtagcggaacatgaggatggcacgatagatccaaagaacccagtcaaccagtacatggatggaatgtgtgaggttggacggatggaagggcgatttatctgcatcgtaccgtcagtcggggatatcatgaaggaatgcgggttcgtggatgtgcaaaggcacacagtcagggttccctacggacaatggcatcccgatgaaaaccaacggaagcgaggcgcttgtttcacgattacttgcgagctgcttatgccgccaactcatggcttacttgcaaagctcgattggtcgccagaacggatcgaaaccttattcgccagcatgtcggacatgtttcgcagtgaatctatgcattgctatgcgacctactacgtctggtcgggacggcgaccttatgaggatgaagatgtggaagtaaaagctggccggaataattag

SEQ ID NO: 30608 - protein, 332 aa, Muscodor strobelii
  misc_feature: SGI Peptide ID NO. 570529
  misc_feature (92)..(182): Pfam Id: PF08241 Pfam Desc: Methyltransferase domain
  misc_feature (92)..(180): Pfam Id: PF08242 Pfam Desc: Methyltransferase domain
  misc_feature (22)..(329): NCBI GI: 171691374 Blast Desc: protein product [Podospora anserina] gi|170945635|emb|CAP71748.1| protein product [Podospora anserina]
  misc_feature (16)..(318): NCBI GI: 256722890 Blast Desc: NECHADRAFT_64568 [Nectria haematococca mpVI 77-13-4]
  misc_feature (18)..(318): NCBI GI: 225684266 Blast Desc: conserved [Paracoccidioides brasiliensis Pb03]
  misc_feature (2)..(322): NCBI GI: 256722355 Blast Desc: NECHADRAFT_94758 [Nectria haematococca mpVI 77-13-4]
  misc_feature (35)..(318): NCBI GI: 116178882 Blast Desc: CHGG_00069 [Chaetomium globosum CBS 148.51] gi|88184366|gb|EAQ91834.1| CHGG_00069 [Chaetomium globosum CBS 148.51]
  misc_feature (35)..(318): NCBI GI: 46115988 Blast Desc: FG03836.1 [Gibberella zeae PH-1]
  misc_feature (35)..(318): NCBI GI: 256723275 Blast Desc: NECHADRAFT_105613 [Nectria haematococca mpVI 77-13-4]
  misc_feature (18)..(318): NCBI GI: 116196574 Blast Desc: CHGG_04885 [Chaetomium globosum CBS 148.51] gi|88180798|gb|EAQ88266.1| CHGG_04885 [Chaetomium globosum CBS 148.51]
  misc_feature (41)..(318): NCBI GI: 256720428 Blast Desc: NECHADRAFT_94808 [Nectria haematococca mpVI 77-13-4]
  misc_feature (11)..(318): NCBI GI: 256725462 Blast Desc: NECHADRAFT_45772 [Nectria haematococca mpVI 77-13-4]
MTSTESRSPASPQTPPTSDCVSERTSLTWDSFEERYTWDGGRRYHAYREGRYSLPNDETEQQREELLHILVMDILEHELFLAPMAETPKKVLDIATGTGLWAIEMGDRYPDAEILGLDLSPIQPTSVPPNVSFQIDDIEDTWVHDDDYDFIHMRESSGYMVSTPKVIESSLKHLKPGGWFELQEFHWVAEHEDGTIDPKNPVNQYMDGMCEVGRMEGRFICIVPSVGDIMKECGFVDVQRHTVRVPYGQWHPDENQRKRGACFTITCELLMPPTHGLLAKLDWSPERIETLFASMSDMFRSESMHCYATYYVWSGRRPYEDEDVEVKAGRNN

SEQ ID NO: 30609 - DNA, 1980 bp, Muscodor strobelii
  misc_feature: SGI EST ID NO. CUFF.72492.0
  misc_feature: Variant of the nucleotide sequence at SEQ ID NO 30607
tgggtcatttcacagacatgcagaacatcgtatcattatagtcatacacaatctaggccggtggtatatatgatctttgggataggccaaatttatggcagtcttcgatctccatctgtcttgaccaggtcaggcaggtcagtgcattctcgtccccaatgaaaaaggtttgctggccacctggtccatagaatccgactaggtcaagcggtatcaccaccgaccattttgtgtcttctgcagctaatagaccacctgcatggtaataagtacaagtcattctaactggatgacgggctacgggttcgtcagcatccccgacgagaaccaagttcagttaagctcggtgacccgagagaacggctcaccaataacggtcggcagcacccagcagcatcgtctagttcgaatcagccctggtatcgaacagtactgtgcagcactacgcttgtcttcgtttgcggatggtgctgactgagtttttgcccggtctcttttggcggctcagcgcattcattctccttttttcttctctcattgcgggatactctcacttttcgatcttcctcatcgtcacatcacaagtgcaagacgatatacctacgagggatcacgactcgaaaacccacatcggattttggaggatctacgaataactccatccccaacgcccagaactatcgtcgttattttcagtgtaaccagccgaacaacgttttgccgcttcttgtctaatatctcatacgtcgcgcgactgcgcacgccaattgcacactctagactctcttgcgttacagacgcttctctttaattcatcattatcccatgcagtgtctagcacctcttcagaccatgacctcgacggagagccgaagcccagcaagtccccaaactccaccgacatctgattgcgtctcggagaggacatctctgacttgggattcgtttgaagaacgatatacatgggatggtgggcggaggtatcacgcctatagagaggggcgctacagcttacccaatgacgagacggagcagcaacgagaagaacttctgcacatcctcgtcatggatattctagagcacgagcttttcttggcaccaatggctgagacgcccaaaaaggtcctcgacattgctacgggcacagggctgtgggcgatcgagatgggagaccgatatcccgatgcagagatattaggtcttgatcttagccccatccaaccaacatctgttccaccaaacgtatcgttccagatagatgatatcgaagacacatgggtgcatgatgatgactacgatttcattcatatgcgtgaatcttcgggctacatggtctccacaccgaaagtaattgaaagctcgctcaaacacttaaaacctggtggctggttcgagttgcaggaatttcactgggtagcggaacatgaggatggcacgatagatccaaagaacccagtcaaccagtacatggatggaatgtgtgaggttggacggatggaagggcgatttatctgcatcgtaccgtcagtcggggatatcatgaaggaatgcgggttcgtggatgtgcaaaggcacacagtcagggttccctacggacaatggcatcccgatgaaaaccaacggaagcgaggcgcttgtttcacgattacttgcgagctgcttatgccgccaactcatggcttacttgcaaagctcgattggtcgccagaacggatcgaaaccttattcgccagcatgtcggacatgtttcgcagtgaatctatgcattgctatgcgacctactacgtctggtcgggacggcgaccttatgaggatgaagatgtggaagtaaaagctggccggaataattagatggaatagcgtgtgggaaaaggaagatgaagacgagtttgtgcctacctatttatgaccttatgactaactagcgatttgcttttcagccacggacacctatctagttttattgataattgaaccacg

SEQ ID NO: 30610 - DNA, 2178 bp, Muscodor strobelii
  misc_feature: SGI cDNA ID NO. 570530
  misc_feature: Reduced expression when VOC is produced
  misc_feature: Encodes the peptide sequence at SEQ ID NO 30611
atgtcatacaaacgcacgcgcgcgcaattcgaagccgacctccaagcccagcaatcgccctatgtcctcttcggcaccccgctgccgcctctcgatcccgaggtccgcgatgacggctcctacgtgcctgcctggaagcaggaggtgagggatgaacagggccgaaagcggctgcatggcgccttcaccgggggatggagcgccggctatttcaacactgtcggctccaaggaggggtggacgcccgcgaccttcgtgtcttcccggacgaatcgccacaagtccgaggagaagacttctcagcagcgcatcgaggacttcatggacgacgaagatctggccgatgctgcagaagccgagaagctacaaacggccgacgactacgccgggcttggttccactgaggatgatggcgttcggaggagtggactttcggacctcttcaagagtcagggcgataccatgggtgtgaagctgctcaggaggatgggttggaaagatggccaaggcatcgggcctaaagtccgtcgaaccgcccgcctaggaacagccgcgaaaccagatgcagcgcaagagaacgacggaacacacctcttcgccccggacaatgtcatgatgatcgccttcacacgtaagacggaccgcaaaggtcttggctttgaaggagaagcgagactagcgccactgagatctttgtcgaaacgggaagctggtgagagctccgatgacgacgatgcagcccatgcgccattgcgacgacccggtgtcttgaaaaaggagaagaagaacaggttcggtaagggtggcatagggataggtattctgaatgacacgggctccgacgacgaggatccgtttgagataggtccgaagatatcgtataatcgcgtaatagggggtgataaaaagaagaaaaagagcaccacgacaacatcgacagcaaacccatccgcggccatcacaccagtcttcaagtcacgcaagaacaacatcttagcgagagcaagccgactactcaaaaaatgccacgatggccgcctgcccctggatggttttgtcttcggcacagaaccagactcactaacaacatcgataaatacatccggcaaatatcctcctcctcaaatcccaccaggctgggtctcatccaaatccaaatccgcaccctcaacggcaactactactacaaccgcctaccaatccacagccgacgccgcaaaactctcaaccctcgaccccaaatcccgcgccgccctactcggcgaggcacaactacccgggaaatccatcttcgacttcctatcccccgaagcacgcgatcgcctagcgaccgcaacaggcaaaaccaacctcccacgcgcccttggcgaaatccccgccgaatacgccctaaccgaagcagagcgccaacgcgaactcttcaattccctcccctccctcgacaagcccaccgccatcgcagcactatcccgcacaaccggtccagcaccctacctagacgacgacgcaaagcgacaacgctaccgttcatttctcgaacacgccgcgggattcatgacagttctcccgtcgagacctgttggtatgaaaacccaagattggacaagggaattacatgagtttgttagctgtgcgaggatcttcaaaccgatgactggacttatggcgagtcggtttacgacggcgtccagtacgaaatctgcggatgtgcgtgcggtggaggcggaacgaccaaaggatcctgctgaggaggcggcgagactgggtatgtatgggggtatgacgaggagttcgaaggatttccaccctacgaggttgttgtgtaagaggttcaatgtcccgccgccgaaaatggtgcagcctgagggcgaggaggatggggggaatagagggaatgagtatagtaggaatatggggatgggtgcagatgcgggtctgtatgcggaggctgcggttacgctggatgagcttatgaggcaggctcagggttcggctgccgctgaagatagggtgaagaatgaggctgaggagcggccaagggggttgctggaaggctctcctgctaagggggtgagtgaggttgtgaagcccgatgttaatgaggcgcttgaggggaagagagcgcaggataatgtgcttagggctatttttggcgatagcagtgatgaggaggactaa

SEQ ID NO: 30611 - protein, 725 aa, Muscodor strobelii
  misc_feature: SGI Peptide ID NO. 570530
  misc_feature (39)..(129): Pfam Id: PF07713 Pfam Desc: Domain of function (DUF1604)
  misc_feature (1)..(725): NCBI GI: 171682316 Blast Desc: protein product [Podospora anserina] gi|170941117|emb|CAP66767.1| protein product [Podospora anserina]
  misc_feature (1)..(724): NCBI GI: 164426008 Blast Desc: NCU10519 [Neurospora crassa OR74A] gi|40882310|emb|CAF06133.1| conserved [Neurospora crassa] gi|157071162|gb|EDO65204.1| conserved [Neurospora crassa OR74A]
  misc_feature (1)..(725): NCBI GI: 145613896 Blast Desc: MGG_11240 [Magnaporthe grisea 70-15] gi|145020909|gb|EDK05038.1| MGG_11240 [Magnaporthe grisea 70-15]
  misc_feature (1)..(724): NCBI GI: 116202279 Blast Desc: CHGG_09024 [Chaetomium globosum CBS 148.51] gi|88177542|gb|EAQ85010.1| CHGG_09024 [Chaetomium globosum CBS 148.51]
  misc_feature (1)..(725): NCBI GI: 154319548 Blast Desc: BC1G_02255 [Botryotinia fuckeliana B05.10] gi|150855913|gb|EDN31105.1| BC1G_02255 [Botryotinia fuckeliana B05.10]
  misc_feature (1)..(725): NCBI GI: 156061593 Blast Desc: SS1G_02942 [Sclerotinia sclerotiorum 1980] gi|154700343|gb|EDO00082.1| SS1G_02942 [Sclerotinia sclerotiorum 1980]
  misc_feature (1)..(725): NCBI GI: 119495769 Blast Desc: NFIA_014560 [Neosartorya fischeri NRRL 181] gi|119412824|gb|EAW22765.1| conserved [Neosartorya fischeri NRRL 181]
  misc_feature (1)..(718): NCBI GI: 145239607 Blast Desc: An08g03340 [Aspergillus niger] gi|134076961|emb|CAK45370.1| protein product [Aspergillus niger]
  misc_feature (1)..(725): NCBI GI: 242768334 Blast Desc: G-patch domain protein, [Talaromyces stipitatus ATCC 10500] gi|218724744|gb|EED24161.1| G-patch domain protein, [Talaromyces stipitatus ATCC 10500]
  misc_feature (1)..(725): NCBI GI: 212542555 Blast Desc: G-patch domain protein, [Penicillium marneffei ATCC 18224] gi|210066339|gb|EEA20432.1| G-patch domain protein, [Penicillium marneffei ATCC 18224]
  misc_feature: Useful for introducing or modulating the production of volatile compounds
MSYKRTRAQFEADLQAQQSPYVLFGTPLPPLDPEVRDDGSYVPAWKQEVRDEQGRKRLHGAFTGGWSAGYFNTVGSKEGWTPATFVSSRTNRHKSEEKTSQQRIEDFMDDEDLADAAEAEKLQTADDYAGLGSTEDDGVRRSGLSDLFKSQGDTMGVKLLRRMGWKDGQGIGPKVRRTARLGTAAKPDAAQENDGTHLFAPDNVMMIAFTRKTDRKGLGFEGEARLAPLRSLSKREAGESSDDDDAAHAPLRRPGVLKKEKKNRFGKGGIGIGILNDTGSDDEDPFEIGPKISYNRVIGGDKKKKKSTTTTSTANPSAAITPVFKSRKNNILARASRLLKKCHDGRLPLDGFVFGTEPDSLTTSINTSGKYPPPQIPPGWVSSKSKSAPSTATTTTTAYQSTADAAKLSTLDPKSRAALLGEAQLPGKSIFDFLSPEARDRLATATGKTNLPRALGEIPAEYALTEAERQRELFNSLPSLDKPTAIAALSRTTGPAPYLDDDAKRQRYRSFLEHAAGFMTVLPSRPVGMKTQDWTRELHEFVSCARIFKPMTGLMASRFTTASSTKSADVRAVEAERPKDPAEEAARLGMYGGMTRSSKDFHPTRLLCKRFNVPPPKMVQPEGEEDGGNRGNEYSRNMGMGADAGLYAEAAVTLDELMRQAQGSAAAEDRVKNEAEERPRGLLEGSPAKGVSEVVKPDVNEALEGKRAQDNVLRAIFGDSSDEED

SEQ ID NO: 30612 - DNA, 2409 bp, Muscodor strobelii
  misc_feature: SGI EST ID NO. CUFF.72495.0
  misc_feature: Variant of the nucleotide sequence at SEQ ID NO 30610
cagcgtcatctctcagcattacctcctccgaatgcatcctcctccgtaagaccatcgcctatcctccgacacgaaggcaactgctccctacgatacatatgacaccagattcagcgcgcacagcagccccatgtcatacaaacgcacgcgcgcgcaattcgaagccgacctccaagcccagcaatcgccctatgtcctcttcggcaccccgctgccgcctctcgatcccgaggtccgcgatgacggctcctacgtgcctgcctggaagcaggaggtgagggatgaacagggccgaaagcggctgcatggcgccttcaccgggggatggagcgccggctatttcaacactgtcggctccaaggaggggtggacgcccgcgaccttcgtgtcttcccggacgaatcgccacaagtccgaggagaagacttctcagcagcgcatcgaggacttcatggacgacgaagatctggccgatgctgcagaagccgagaagctacaaacggccgacgactacgccgggcttggttccactgaggatgatggcgttcggaggagtggactttcggacctcttcaagagtcagggcgataccatgggtgtgaagctgctcaggaggatgggttggaaagatggccaaggcatcgggcctaaagtccgtcgaaccgcccgcctaggaacagccgcgaaaccagatgcagcgcaagagaacgacggaacacacctcttcgccccggacaatgtcatgatgatcgccttcacacgtaagacggaccgcaaaggtcttggctttgaaggagaagcgagactagcgccactgagatctttgtcgaaacgggaagctggtgagagctccgatgacgacgatgcagcccatgcgccattgcgacgacccggtgtcttgaaaaaggagaagaagaacaggttcggtaagggtggcatagggataggtattctgaatgacacgggctccgacgacgaggatccgtttgagataggtccgaagatatcgtataatcgcgtaatagggggtgataaaaagaagaaaaagagcaccacgacaacatcgacagcaaacccatccgcggccatcacaccagtcttcaagtcacgcaagaacaacatcttagcgagagcaagccgactactcaaaaaatgccacgatggccgcctgcccctggatggttttgtcttcggcacagaaccagactcactaacaacatcgataaatacatccggcaaatatcctcctcctcaaatcccaccaggctgggtctcatccaaatccaaatccgcaccctcaacggcaactactactacaaccgcctaccaatccacagccgacgccgcaaaactctcaaccctcgaccccaaatcccgcgccgccctactcggcgaggcacaactacccgggaaatccatcttcgacttcctatcccccgaagcacgcgatcgcctagcgaccgcaacaggcaaaaccaacctcccacgcgcccttggcgaaatccccgccgaatacgccctaaccgaagcagagcgccaacgcgaactcttcaattccctcccctccctcgacaagcccaccgccatcgcagcactatcccgcacaaccggtccagcaccctacctagacgacgacgcaaagcgacaacgctaccgttcatttctcgaacacgccgcgggattcatgacagttctcccgtcgagacctgttggtatgaaaacccaagattggacaagggaattacatgagtttgttagctgtgcgaggatcttcaaaccgatgactggacttatggcgagtcggtttacgacggcgtccagtacgaaatctgcggatgtgcgtgcggtggaggcggaacgaccaaaggatcctgctgaggaggcggcgagactgggtatgtatgggggtatgacgaggagttcgaaggatttccaccctacgaggttgttgtgtaagaggttcaatgtcccgccgccgaaaatggtgcagcctgagggcgaggaggatggggggaatagagggaatgagtatagtaggaatatggggatgggtgcagatgcgggtctgtatgcggaggctgcggttacgctggatgagcttatgaggcaggctcagggttcggctgccgctgaagatagggtgaagaatgaggctgaggagcggccaagggggttgctggaaggctctcctgctaagggggtgagtgaggttgtgaagcccgatgttaatgaggcgcttgaggggaagagagcgcaggataatgtgcttagggctatttttggcgatagcagtgatgaggaggactaaatgaataaagtgtcattactacctctaattatgtgtctatctatgtgaggtatatggatgatgtttgtgtttgtatttagtagttgagtattatgatatct

SEQ ID NO: 30613 - DNA, 1563 bp, Muscodor strobelii
  misc_feature: SGI cDNA ID NO. 570531
  misc_feature: Reduced expression when VOC is produced
  misc_feature: Encodes the peptide sequence at SEQ ID NO 30614
atgatcgccttcacacgtaagacggaccgcaaaggtcttggctttgaaggagaagcgagactagcgccactgagatctttgtcgaaacgggaagctggtgagagctccgatgacgacgatgcagcccatgcgccattgcgacgacccggtgtcttgaaaaaggagaagaagaacaggttcggtaagggtggcatagggataggtattctgaatgacacgggctccgacgacgaggatccgtttgagataggtccgaagatatcgtataatcgcgtaatagggggtgataaaaagaagaaaaagagcaccacgacaacatcgacagcaaacccatccgcggccatcacaccagtcttcaagtcacgcaagaacaacatcttagcgagagcaagccgactactcaaaaaatgccacgatggccgcctgcccctggatggttttgtcttcggcacagaaccagactcactaacaacatcgataaatacatccggcaaatatcctcctcctcaaatcccaccaggctgggtctcatccaaatccaaatccgcaccctcaacggcaactactactacaaccgcctaccaatccacagccgacgccgcaaaactctcaaccctcgaccccaaatcccgcgccgccctactcggcgaggcacaactacccgggaaatccatcttcgacttcctatcccccgaagcacgcgatcgcctagcgaccgcaacaggcaaaaccaacctcccacgcgcccttggcgaaatccccgccgaatacgccctaaccgaagcagagcgccaacgcgaactcttcaattccctcccctccctcgacaagcccaccgccatcgcagcactatcccgcacaaccggtccagcaccctacctagacgacgacgcaaagcgacaacgctaccgttcatttctcgaacacgccgcgggattcatgacagttctcccgtcgagacctgttggtatgaaaacccaagattggacaagggaattacatgagtttgttagctgtgcgaggatcttcaaaccgatgactggacttatggcgagtcggtttacgacggcgtccagtacgaaatctgcggatgtgcgtgcggtggaggcggaacgaccaaaggatcctgctgaggaggcggcgagactgggtatgtatgggggtatgacgaggagttcgaaggatttccaccctacgaggttgttgtgtaagaggttcaatgtcccgccgccgaaaatggtgcagcctgagggcgaggaggatggggggaatagagggaatgagtatagtaggaatatggggatgggtgcagatgcgggtctgtatgcggaggctgcggttacgctggatgagcttatgaggcaggctcagggttcggctgccgctgaagatagggtgaagaatgaggctgaggagcggccaagggggttgctggaaggctctcctgctaagggggtgagtgaggttgtgaagcccgatgttaatgaggcgcttgaggggaagagagcgcaggataatgtgcttagggctatttttggcgatagcagtgatgaggaggactaa

SEQ ID NO: 30614 - protein, 520 aa, Muscodor strobelii
  misc_feature: SGI Peptide ID NO. 570531
  misc_feature (1)..(520): NCBI GI: 171682316 Blast Desc: protein product [Podospora anserina] gi|170941117|emb|CAP66767.1| protein product [Podospora anserina]
  misc_feature (1)..(519): NCBI GI: 164426008 Blast Desc: NCU10519 [Neurospora crassa OR74A] gi|40882310|emb|CAF06133.1| conserved [Neurospora crassa] gi|157071162|gb|EDO65204.1| conserved [Neurospora crassa OR74A]
  misc_feature (1)..(520): NCBI GI: 145613896 Blast Desc: MGG_11240 [Magnaporthe grisea 70-15] gi|145020909|gb|EDK05038.1| MGG_11240 [Magnaporthe grisea 70-15]
  misc_feature (1)..(519): NCBI GI: 116202279 Blast Desc: CHGG_09024 [Chaetomium globosum CBS 148.51] gi|88177542|gb|EAQ85010.1| CHGG_09024 [Chaetomium globosum CBS 148.51]
  misc_feature (1)..(520): NCBI GI: 154319548 Blast Desc: BC1G_02255 [Botryotinia fuckeliana B05.10] gi|150855913|gb|EDN31105.1| BC1G_02255 [Botryotinia fuckeliana B05.10]
  misc_feature (1)..(520): NCBI GI: 156061593 Blast Desc: SS1G_02942 [Sclerotinia sclerotiorum 1980] gi|154700343|gb|EDO00082.1| SS1G_02942 [Sclerotinia sclerotiorum 1980]
  misc_feature (1)..(520): NCBI GI: 119495769 Blast Desc: NFIA_014560 [Neosartorya fischeri NRRL 181] gi|119412824|gb|EAW22765.1| conserved [Neosartorya fischeri NRRL 181]
  misc_feature (1)..(513): NCBI GI: 145239607 Blast Desc: An08g03340 [Aspergillus niger] gi|134076961|emb|CAK45370.1| protein product [Aspergillus niger]
  misc_feature (11)..(520): NCBI GI: 70995434 Blast Desc: G-patch domain protein [Aspergillus fumigatus Af293] gi|66850107|gb|EAL90434.1| G-patch domain protein, [Aspergillus fumigatus Af293]
  misc_feature (11)..(520): NCBI GI: 159131227 Blast Desc: G-patch domain protein, [Aspergillus fumigatus A1163]
  misc_feature: Useful for introducing or modulating the production of volatile compounds
MIAFTRKTDRKGLGFEGEARLAPLRSLSKREAGESSDDDDAAHAPLRRPGVLKKEKKNRFGKGGIGIGILNDTGSDDEDPFEIGPKISYNRVIGGDKKKKKSTTTTSTANPSAAITPVFKSRKNNILARASRLLKKCHDGRLPLDGFVFGTEPDSLTTSINTSGKYPPPQIPPGWVSSKSKSAPSTATTTTTAYQSTADAAKLSTLDPKSRAALLGEAQLPGKSIFDFLSPEARDRLATATGKTNLPRALGEIPAEYALTEAERQRELFNSLPSLDKPTAIAALSRTTGPAPYLDDDAKRQRYRSFLEHAAGFMTVLPSRPVGMKTQDWTRELHEFVSCARIFKPMTGLMASRFTTASSTKSADVRAVEAERPKDPAEEAARLGMYGGMTRSSKDFHPTRLLCKRFNVPPPKMVQPEGEEDGGNRGNEYSRNMGMGADAGLYAEAAVTLDELMRQAQGSAAAEDRVKNEAEERPRGLLEGSPAKGVSEVVKPDVNEALEGKRAQDNVLRAIFGDSSDEED

SEQ ID NO: 30615 - DNA, 2409 bp, Muscodor strobelii; identical to SEQ ID NO: 30612
  misc_feature: SGI EST ID NO. CUFF.72495.0
  misc_feature: Variant of the nucleotide sequence at SEQ ID NO 30613

SEQ ID NO: 30616 - DNA, 1620 bp, Muscodor strobelii
  misc_feature: SGI cDNA ID NO. 570532
  misc_feature: Encodes the peptide sequence at SEQ ID NO 30617
atgtacatccgccgcttctccgtcgccctgctctccagcatcgtcggctacggcgcctggtacacgtacaagggcaacgccactaccccatcctcgctcgacggcgccctcggcaagccctactcgaccacctcgaacaccctcgccgccgccacggccgccacgactaggaatgtgctggtcgtcggcgcggacgagctgcacacgggcaccttcgtcggcgacgggcccatctccaagaacatggacggctccggccgcgacgtcctcgagatgctgaccccggaccaggccaccgccaagctgcgcgagcacgaggcctccttcatggtcaacaggggccacggcgtcctgcgctacgacgtcgtccaggtcgccagcaataaccccatcgaggacgaccacgccgagaagatcgtcgagctgccctcgccccacgacaagtccagcaccgactggatgttctggggcgtcttcgacggccatgcaggctggacgacctcggcaaagctgcgacagacactgatcagctacgtcgctcgagagctgaattccacctaccaggccgcgggcactctgggcaccacgccgttacccgaggccatcgacgccgccatgaagacaggcttcgtgcgcctagaccacgagatcgtgcacgagagcgtcgacaaggtcctcaagtcgggctccaagagggtggctgccgagctgctggggcctgctctgtcgggatcctgcgccctgctctccttctacgacaccagctccaagactctacgggttgcctgcacgggtgactcgcgcgcagtccttggccggcgcagtgactctggaaagtggactgctaccgccttgtccgaagaccagactggcagcaaccccaaagaagctgcccgcatgcgaaaagcccacccgggcgaagaccgtgtagtccacaatggccgtgtccttggtggcttggaacccacccgggccttcggcgacgccagctacaagtggagcaaagagatctcagaccgactcagagcttcattcttcggccgcagctcttcgccgtacctccgtactcccccatacgtcacggccgagcctgtcgtcaccaccaccaagatcagtcccgaaaggggcgattttctagtcatggccactgatgggctgtgggagatgttgaccaacgaggaagtggtaggactggtgggcaaatggatcgagtcgcaggccgtggagcagtcgtcttctcagctcagctccgtatggtccaagatcttcggctccagccagcagagcctgccggtcgaagctggcgcgcacggcggtcccgatggccagaagactccgatccgtctgcgccagtggggcatctctccggatgagaaggagcgatttgttgtcaaggacaagaacgtggccacgcatctcatccgcaacgctctcggcggaaagaacgaagagcaggtttgcgccttgctgactttggtgtctccattttctcgcagatacagggatgatctaacggtacaagtgatattcttcggccagggccagaagacaggcgaagtcatagtgaactcagaggcttcgagtgcaccgccacaacccgcgatcaaaccgaagctatag

SEQ ID NO: 30617 - protein, 539 aa, Muscodor strobelii
  misc_feature: SGI Peptide ID NO. 570532
  misc_feature (107)..(435): Pfam Id: PF00481 Pfam Desc: Protein phosphatase 2C
  misc_feature (152)..(405): Pfam Id: PF00481 Pfam Desc: Protein phosphatase 2C
  misc_feature (1)..(539): NCBI GI: 46121653 Blast Desc: FG05205.1 [Gibberella zeae PH-1]
  misc_feature (1)..(539): NCBI GI: 154316959 Blast Desc: BC1G_03897 [Botryotinia fuckeliana B05.10] gi|150845509|gb|EDN20702.1| BC1G_03897 [Botryotinia fuckeliana B05.10]
  misc_feature (1)..(539): NCBI GI: 156043765 Blast Desc: SS1G_10886 [Sclerotinia sclerotiorum 1980] gi|154695273|gb|EDN95011.1| SS1G_10886 [Sclerotinia sclerotiorum 1980]
  misc_feature (1)..(539): NCBI GI: 116204667 Blast Desc: CHGG_10217 [Chaetomium globosum CBS 148.51] gi|88176345|gb|EAQ83813.1| CHGG_10217 [Chaetomium globosum CBS 148.51]
  misc_feature (1)..(539): NCBI GI: 261206310 Blast Desc: protein phosphatase 2C [Ajellomyces dermatitidis SLH14081] gi|239592951|gb|EEQ75532.1| protein phosphatase 2C [Ajellomyces dermatitidis SLH14081]
  misc_feature (12)..(525): NCBI GI: 164428175 Blast Desc: NCU01767 [Neurospora crassa OR74A] gi|16416087|emb|CAB91227.2| related to Type 2C Protein Phosphatase [Neurospora crassa] gi|157072042|gb|EAA27954.2|
  misc_feature (1)..(539): NCBI GI: 239610874 Blast Desc: protein phosphatase 2C [Ajellomyces dermatitidis ER-3]
  misc_feature (1)..(528): NCBI GI: 154278511 Blast Desc: [Ajellomyces capsulatus NAm1] gi|150413654|gb|EDN09037.1| [Ajellomyces capsulatus NAm1]
  misc_feature (1)..(528): NCBI GI: 240280157 Blast Desc: pyruvate dehydrogenase phosphatase [Ajellomyces capsulatus H143]
  misc_feature (1)..(528): NCBI GI: 225560590 Blast Desc: pyruvate dehydrogenase phosphatase [Ajellomyces capsulatus G186AR]
  misc_feature (96)..(513): SWISSPROT Homolog: EC 3.1.3.16 Phosphoprotein phosphatase
MYIRRFSVALLSSIVGYGAWYTYKGNATTPSSLDGALGKPYSTTSNTLAAATAATTRNVLVVGADELHTGTFVGDGPISKNMDGSGRDVLEMLTPDQATAKLREHEASFMVNRGHGVLRYDVVQVASNNPIEDDHAEKIVELPSPHDKSSTDWMFWGVFDGHAGWTTSAKLRQTLISYVARELNSTYQAAGTLGTTPLPEAIDAAMKTGFVRLDHEIVHESVDKVLKSGSKRVAAELLGPALSGSCALLSFYDTSSKTLRVACTGDSRAVLGRRSDSGKWTATALSEDQTGSNPKEAARMRKAHPGEDRVVHNGRVLGGLEPTRAFGDASYKWSKEISDRLRASFFGRSSSPYLRTPPYVTAEPVVTTTKISPERGDFLVMATDGLWEMLTNEEVVGLVGKWIESQAVEQSSSQLSSVWSKIFGSSQQSLPVEAGAHGGPDGQKTPIRLRQWGISPDEKERFVVKDKNVATHLIRNALGGKNEEQVCALLTLVSPFSRRYRDDLTVQVIFFGQGQKTGEVIVNSEASSAPPQPAIKPKL

SEQ ID NO: 30618 - DNA, 2017 bp, Muscodor strobelii
  misc_feature: SGI EST ID NO. CUFF.72565.0
  misc_feature: Variant of the nucleotide sequence at SEQ ID NO 30616
ctcctcgatgtacatccgccgcttctccgtcgccctgctctccagcatcgtcggctacggcgcctggtacacgtacaagggcaacgccactaccccatcctcgctcgacggcgccctcggcaagccctactcgaccacctcgaacaccctcgccgccgccacggccgccacgactaggaatgtgctggtcgtcggcgcggacgagctgcacacgggcaccttcgtcggcgacgggcccatctccaagaacatggacggctccggccgcgacgtcctcgagatgctgaccccggaccaggccaccgccaagctgcgcgagcacgaggcctccttcatggtcaacaggggccacggcgtcctgcgctacgacgtcgtccaggtcgccagcaataaccccatcgaggacgaccacgccgagaagatcgtcgagctgccctcgccccacgacaagtccagcaccgactggatgttctggggcgtcttcgacggccatgcaggctggacgacctcggcaaagctgcgacagacactgatcagctacgtcgctcgagagctgaattccacctaccaggccgcgggcactctgggcaccacgccgttacccgaggccatcgacgccgccatgaagacaggcttcgtgcgcctagaccacgagatcgtgcacgagagcgtcgacaaggtcctcaagtcgggctccaagagggtggctgccgagctgctggggcctgctctgtcgggatcctgcgccctgctctccttctacgacaccagctccaagactctacgggttgcctgcacgggtgactcgcgcgcagtccttggccggcgcagtgactctggaaagtggactgctaccgccttgtccgaagaccagactggcagcaaccccaaagaagctgcccgcatgcgaaaagcccacccgggcgaagaccgtgtagtccacaatggccgtgtccttggtggcttggaacccacccgggccttcggcgacgccagctacaagtggagcaaagagatctcagaccgactcagagcttcattcttcggccgcagctcttcgccgtacctccgtactcccccatacgtcacggccgagcctgtcgtcaccaccaccaagatcagtcccgaaaggggcgattttctagtcatggccactgatgggctgtgggagatgttgaccaacgaggaagtggtaggactggtgggcaaatggatcgagtcgcaggccgtggagcagtcgtcttctcagctcagctccgtatggtccaagatcttcggctccagccagcagagcctgccggtcgaagctggcgcgcacggcggtcccgatggccagaagactccgatccgtctgcgccagtggggcatctctccggatgagaaggagcgatttgttgtcaaggacaagaacgtggccacgcatctcatccgcaacgctctcggcggaaagaacgaagagcaggtttgcgccttgctgactttggtgtctccattttctcgcagatacagggatgatctaacggtacaagtgatattcttcggccagggccagaagacaggcgaagtcatagtgaactcagaggcttcgagtgcaccgccacaacccgcgatcaaaccgaagctatagaaatatttttcacttcttattgatgacttggtcagagacacatgggactgactcccttaaatctaggaatgcttgtcttcaagcttgcaaacatagcgaaagcgaggaaaaggcttttccttacgaggaagagggaaagagctgtataagcgaggtgttccaacatatccagacatgccttgttgtacatttggtagattttcggactataggaactacagaggcataagagagagcgcgaaagagagcgtgagaggaagagatccaacatcagacatacaacaaagataccttggtagcgaaattgacaatcctgactgagtagcacgacattgctttgattctgtgtggtaaagatttccgtgtctttgtctgttctcttccaaggat

SEQ ID NO: 30619 - DNA, 4587 bp, Muscodor strobelii
  misc_feature: SGI cDNA ID NO. 570533
  misc_feature: Encodes the peptide sequence at SEQ ID NO 30620
atgactgacgatcctaatgacgttaacacgggcccatggctggccgctaaagaacggttcatcgagaacctttcggacgaagacaaagctcagtttcgagaatggttcaaagacaaaaacagcactacgaggattcgacaggaagttcaagcacttgaacaaaaacataccaacctcactaagctgaagccgattctagacggcatgaatagtctagactcaatcatctcgcctttgaccggactcgatagccatggaattgcggcgctgatttggggcagtgtcaagctcctaatgtcatgggctatgaaagcgatcgactttctcgagaaaatcgccgaatttctcgatactataggatatcaactcggtctactcaaagaatatcagtcgttatttagcaagtacggcagcgagcggttcaactcgtatctgcagggtgtattctccaaatatctcttcttctgctcagccgccaagaactatttcgacgatttccactggtacaatagctttcgatccaaatacaaagccgaagtttctctagctgtcgaggagctggaagttgcttgtgcccgtaccgtggaggaggttgccctcgttgaccgaaagtctcgggccacagcggatgagcaaattgcgcagggggtcgaccaagcaaacgacaacatatatgcggtaactgaagatgtcggcaaggtcaatatggctttggaaagcctcaagcaacagacggcagctcagagcacgaatgcaagcagacaagcagctgacaacctacacgcggtgacagaagacatcagcaaggtcaacatagccgtagaaagcctcaaggaagagatagcaatgcatagtactaaagcaagtactcaggcaattgacaacctacatgcggttactgaaaatattaacaatatcaatctggcggtggaaagtctgaagcaagagacggcggctcagagcgctgattcaagcaaacaagcacatcaaaatctccacgccttgactggatatatcaacaaggtcaaaatggacatagaaagcctcaagcaagtggtagatttgagaaacttcaggagttggattagggtggacaagcttgatatagaggcttccctaagaagaaacctcgctaagagggcagaactgccgcacacagggacctggttattctcgaatgataaggttcgaagatggatatcctcgtcaacggactcatctcgagcgctctggattaaggccgatgctggttttggcaagtctatcctctgctcatatctcgtttcggagatgcagaaactttaccccacaggtgttgcgtacttcttttgtcgctacgattcggatactcagaggtccccaaccaatatccttcgaacctggatctggcagctagtgtccgagcagatgataggtggacagaccgtgcagagccatctcacagtcacgccttccgcactcatcgactttcaaaaccaagcagaaccatcaatttattcaatgaaacgcctattagaagttctattctcgcagaacaaaccgacaagactcattgttgatggtctagacgagtgtgagcttccaacagaaagcgagaaacaagactgggatgtcttttttaagctattgggacagcttccttctcaatggaaagtcctcatagtcagtcgtcctaacaactggttcaatgaaaagctccatatttctctcgatagtatcctcgaagagaagcctattacgatcgatgataaccgagaggaccttcatgactttgctaattatcaagttgggtcctacgctgagaaaaataaatggaaaccggatctgaaagataagacgttgcaactcatctttgacaaagcagatggcaacatgatgtgggtgtctctgctctgcatggcattcaacgatgctgccgccgacgagattgaagagattctcaatgatcccccggaaggcgtggaaggactatacggacgcgcactgaagagcttgtcacgcgagaaccgacgactagcagacaaggtacggcgtgctctgaagtggatactgtgtgcgtatcgcccattacgaatgagcgaactggaggccgtcttggggatctcgctagacaacgtgatgaagtatgtgggcctactcgtcaagattgaaggggaccagaagcagattcggttggtgcatgcttccgccagagattatcttctatctcctaacgcgaggatctttgaggacactacagtccctgatgccactcatctggcagacatccacgctatgatgcttgagaagtgtcttgactatctgatggacgacgagcggtccttcactcacgtaggcccaaatgaacaggcttcggtggaacgcttccatggtcatttcgacagcgactctcaaacattgctcgagtatatctgtaacgggtggctgaaccacttcatggaagcctttaaatcctcccaggcgatttcgaaagtccagccaagactggagaagtttttctcctcggacgatgcagtggtgaaatggcttcaggcgttccacttcctctggaatgtacgggcacctttcgaaccagctcgacgatatattggcagcatagtctatcaccctcgcggccatgcggaatggtcagactatctgcttgatcatttcccatccttcaatcaacacctaggatgggaagatggcggaagatacactcgctggaataggtttatgcacaaacagcatcattacaatactgcacaccctttcagcaagtatcaatcgccgcgagtcttaccggcactgtcggtggccgcgttttttaattatcgaggaattgttgagaagctgttggccgaagggacagatgtcaacggccagggacctttcagaggtactgccctgcattgggctgccgctggaggctcttgcgaagctatgcggttcttgatagatgccggagctaataaagaggcacagtatggaaggcacaatgaaacaccaatcttccgcgctattcgggtgccaaataacgtggctaagcgttctggatcctgcccagcagctaggctcttattcgacgagaaagtgtcattgaggcacgagccgcaactcccaaatggcttctccctttcgacggcacttgtcacgctggtagaagaaggaccagattgtcccgcatcagccgacttcgccctcgatattttgctccgtgacaacagccagttcggcttttacgatgcacatggctctataatccacgtagccgcgtggcacaatagggcggtgattctgaagaaactccttgaagtcgatggtttgcagccattattaaattggcaacaatcatcaaatcgattaatgggggtcctgcacttggcttgtatacgtgacaattccgatattgtcaaggttctcgtcgatgctggggccgatccgaacctgccttgcgacctaaactcattcagtcctcttcacttcgctgttctcgccggcaacagggccgttgaggcgctattggaccatacgccctcagcaaacacaatgcagacggatctgagacctcgcgagagagaaaaccacaggccttgccatgaggctaagcaaatgcctcttcacttagcagctcggtataactgtatagtcaacatcaagaaattcgtcgacaagggtttcaagatcgattccgtcgatggcaatggcgacacatgcttgaccatagctcttgagaatagtcattttgaaatggcgcgaaggcttcttgatctgggcgccgaccctaccgagatccctcgcaagcttcgagtatacttgcaaagccaggagacggatgagcgacttgtgaagattcagagggaacactggaagcccatcgaggcttatgcttttgtgttctacctccgccacctgtcaaagaagaggctaccgataccgattgtcgacctcatactgcgatttgcagggcatactgaacttctggagatcacaaggaaaggccgcatgaacgtcgatgaccacctcacgcagcaactccccagaccgtacctcatgagcccgcccatgatcggcaacgccgactcacctgtcaaggtcatcgacatggtcgcgcatagtcgcgaccagggctacgcgaacgttggcctagactattctctatccaagttggtgactgtggaccgagggctgaagatggtccactggcagcctgaacacaactttggcaagaatttgcgcgaatggcgagaccatcggacgaccgtcagcacgcagaacgccgccgcgcgcatcgccaaggtccgaacgggcgagcgcgtcgccatcttcccctgggctttagcacccgccttcgagaacgtgatggacagggcagaggtcaaagtgcgccagcttgtcctgcgcggctacttcaccaggaccgaccaggcgcaggtctggggccagcatcaagacggcaccccggctggcctcacttgcaaacgtggccagtgcccgcgatgcgccgctgcgaagctcctcaaggaccgagtgctcccggacgtcaacggcgggaaattggacaggaaggaagtaatggggtttttggatttctttgggctatggtga

SEQ ID NO: 30620 - protein, 1528 aa, Muscodor strobelii
  misc_feature: SGI Peptide ID NO. 570533
  misc_feature (1114)..(1146): Pfam Id: PF00023 Pfam Desc: Ankyrin repeat
  misc_feature (1119)..(1146): Pfam Id: PF00023 Pfam Desc: Ankyrin repeat
  misc_feature (1228)..(1260): Pfam Id: PF00023 Pfam Desc: Ankyrin repeat
  misc_feature (961)..(990): Pfam Id: PF00023 Pfam Desc: Ankyrin repeat
  misc_feature (378)..(1253): NCBI GI: 238505400 Blast Desc: ankyrin repeat domain protein, [Aspergillus flavus NRRL3357] gi|220690043|gb|EED46393.1| ankyrin repeat domain protein, [Aspergillus flavus NRRL3357]
  misc_feature (386)..(1002): NCBI GI: 225681098 Blast Desc: conserved [Paracoccidioides brasiliensis Pb03]
  misc_feature (378)..(1253): NCBI GI: 169780448 Blast Desc: [Aspergillus oryzae RIB40] gi|83773428|dbj|BAE63555.1| protein product [Aspergillus oryzae]
  misc_feature (386)..(1002): NCBI GI: 239614996 Blast Desc: ankyrin repeat protein [Ajellomyces dermatitidis ER-3]
  misc_feature (386)..(1002): NCBI GI: 226292201 Blast Desc: conserved [Paracoccidioides brasiliensis Pb18]
  misc_feature (386)..(1002): NCBI GI: 261187964 Blast Desc: ankyrin repeat-containing protein [Ajellomyces dermatitidis SLH14081] gi|239593410|gb|EEQ75991.1| ankyrin repeat-containing protein [Ajellomyces dermatitidis SLH14081]
  misc_feature (386)..(1048): NCBI GI: 238841880 Blast Desc: ankyrin repeat protein [Microsporum canis CBS 113480]
  misc_feature (379)..(860): NCBI GI: 258565149 Blast Desc: [Uncinocarpus reesii 1704] gi|237907020|gb|EEP81421.1| [Uncinocarpus reesii 1704]
  misc_feature (321)..(1282): NCBI GI: 46126459 Blast Desc: FG07607.1 [Gibberella zeae PH-1]
  misc_feature (386)..(1002): NCBI GI: 226282641 Blast Desc: ankyrin repeat protein [Paracoccidioides brasiliensis Pb01]
MTDDPNDVNTGPWLAAKERFIENLSDEDKAQFREWFKDKNSTTRIRQEVQALEQKHTNLTKLKPILDGMNSLDSIISPLTGLDSHGIAALIWGSVKLLMSWAMKAIDFLEKIAEFLDTIGYQLGLLKEYQSLFSKYGSERFNSYLQGVFSKYLFFCSAAKNYFDDFHWYNSFRSKYKAEVSLAVEELEVACARTVEEVALVDRKSRATADEQIAQGVDQANDNIYAVTEDVGKVNMALESLKQQTAAQSTNASRQAADNLHAVTEDISKVNIAVESLKEEIAMHSTKASTQAIDNLHAVTENINNINLAVESLKQETAAQSADSSKQAHQNLHALTGYINKVKMDIESLKQVVDLRNFRSWIRVDKLDIEASLRRNLAKRAELPHTGTWLFSNDKVRRWISSSTDSSRALWIKADAGFGKSILCSYLVSEMQKLYPTGVAYFFCRYDSDTQRSPTNILRTWIWQLVSEQMIGGQTVQSHLTVTPSALIDFQNQAEPSIYSMKRLLEVLFSQNKPTRLIVDGLDECELPTESEKQDWDVFFKLLGQLPSQWKVLIVSRPNNWFNEKLHISLDSILEEKPITIDDNREDLHDFANYQVGSYAEKNKWKPDLKDKTLQLIFDKADGNMMWVSLLCMAFNDAAADEIEEILNDPPEGVEGLYGRALKSLSRENRRLADKVRRALKWILCAYRPLRMSELEAVLGISLDNVMKYVGLLVKIEGDQKQIRLVHASARDYLLSPNARIFEDTTVPDATHLADIHAMMLEKCLDYLMDDERSFTHVGPNEQASVERFHGHFDSDSQTLLEYICNGWLNHFMEAFKSSQAISKVQPRLEKFFSSDDAVVKWLQAFHFLWNVRAPFEPARRYIGSIVYHPRGHAEWSDYLLDHFPSFNQHLGWEDGGRYTRWNRFMHKQHHYNTAHPFSKYQSPRVLPALSVAAFFNYRGIVEKLLAEGTDVNGQGPFRGTALHWAAAGGSCEAMRFLIDAGANKEAQYGRHNETPIFRAIRVPNNVAKRSGSCPAARLLFDEKVSLRHEPQLPNGFSLSTALVTLVEEGPDCPASADFALDILLRDNSQFGFYDAHGSIIHVAAWHNRAVILKKLLEVDGLQPLLNWQQSSNRLMGVLHLACIRDNSDIVKVLVDAGADPNLPCDLNSFSPLHFAVLAGNRAVEALLDHTPSANTMQTDLRPRERENHRPCHEAKQMPLHLAARYNCIVNIKKFVDKGFKIDSVDGNGDTCLTIALENSHFEMARRLLDLGADPTEIPRKLRVYLQSQETDERLVKIQREHWKPIEAYAFVFYLRHLSKKRLPIPIVDLILRFAGHTELLEITRKGRMNVDDHLTQQLPRPYLMSPPMIGNADSPVKVIDMVAHSRDQGYANVGLDYSLSKLVTVDRGLKMVHWQPEHNFGKNLREWRDHRTTVSTQNAAARIAKVRTGERVAIFPWALAPAFENVMDRAEVKVRQLVLRGYFTRTDQAQVWGQHQDGTPAGLTCKRGQCPRCAAAKLLKDRVLPDVNGGKLDRKEVMGFLDFFGLW

SEQ ID NO: 30621 - DNA, 2891 bp, Muscodor strobelii
  misc_feature: SGI EST ID NO. CUFF.72511.0
  misc_feature: Variant of the nucleotide sequence at SEQ ID NO 30619
gaaaccggatctgaaagataagacgttgcaactcatctttgacaaagcagatggcaacatgatgtgggtgtctctgctctgcatggcattcaacgatgctgccgccgacgagattgaagagattctcaatgatcccccggaaggcgtggaaggactatacggacgcgcactgaagagcttgtcacgcgagaaccgacgactagcagacaaggtacggcgtgctctgaagtggatactgtgtgcgtatcgcccattacgaatgagcgaactggaggccgtcttggggatctcgctagacaacgtgatgaagtatgtgggcctactcgtcaagattgaaggggaccagaagcagattcggttggtgcatgcttccgccagagattatcttctatctcctaacgcgaggatctttgaggacactacagtccctgatgccactcatctggcagacatccacgctatgatgcttgagaagtgtcttgactatctgatggacgacgagcggtccttcactcacgtaggcccaaatgaacaggcttcggtggaacgcttccatggtcatttcgacagcgactctcaaacattgctcgagtatatctgtaacgggtggctgaaccacttcatggaagcctttaaatcctcccaggcgatttcgaaagtccagccaagactggagaagtttttctcctcggacgatgcagtggtgaaatggcttcaggcgttccacttcctctggaatgtacgggcacctttcgaaccagctcgacgatatattggcagcatagtctatcaccctcgcggccatgcggaatggtcagactatctgcttgatcatttcccatccttcaatcaacacctaggatgggaagatggcggaagatacactcgctggaataggtttatgcacaaacagcatcattacaatactgcacaccctttcagcaagtatcaatcgccgcgagtcttaccggcactgtcggtggccgcgttttttaattatcgaggaattgttgagaagctgttggccgaagggacagatgtcaacggccagggacctttcagaggtactgccctgcattgggctgccgctggaggctcttgcgaagctatgcggttcttgatagatgccggagctaataaagaggcacagtatggaaggcacaatgaaacaccaatcttccgcgctattcgggtgccaaataacgtggctaagcgttctggatcctgcccagcagctaggctcttattcgacgagaaagtgtcattgaggcacgagccgcaactcccaaatggcttctccctttcgacggcacttgtcacgctggtagaagaaggaccagattgtcccgcatcagccgacttcgccctcgatattttgctccgtgacaacagccagttcggcttttacgatgcacatggctctataatccacgtagccgcgtggcacaatagggcggtgattctgaagaaactccttgaagtcgatggtttgcagccattattaaattggcaacaatcatcaaatcgattaatgggggtcctgcacttggcttgtatacgtgacaattccgatattgtcaaggttctcgtcgatgctggggccgatccgaacctgccttgcgacctaaactcattcagtcctcttcacttcgctgttctcgccggcaacagggccgttgaggcgctattggaccatacgccctcagcaaacacaatgcagacggatctgagacctcgcgagagagaaaaccacaggccttgccatgaggctaagcaaatgcctcttcacttagcagctcggtataactgtatagtcaacatcaagaaattcgtcgacaagggtttcaagatcgattccgtcgatggcaatggcgacacatgcttgaccatagctcttgagaatagtcattttgaaatggcgcgaaggcttcttgatctgggcgccgaccctaccgagatccctcgcaagcttcgagtatacttgcaaagccaggagacggatgagcgacttgtgaagattcagagggaacactggaagcccatcgaggcttatgcttttgtgttctacctccgccacctgtcaaagaagaggctaccgataccgattgtcgacctcatactgcgatttgcagggcatactgaacttctggagatcacaaggaaaggccgcatgaacgtcgatgaccacctcacgcagcaactccccagaccgtacctcatgagcccgcccatgatcggcaacgccgactcacctgtcaaggtcatcgacatggtcgcgcatagtcgcgaccagggctacgcgaacgttggcctagactattctctatccaagttggtgactgtggaccgagggctgaagatggtccactggcagcctgaacacaactttggcaagaatttgcgcgaatggcgagaccatcggacgaccgtcagcacgcagaacgccgccgcgcgcatcgccaaggtccgaacgggcgagcgcgtcgccatcttcccctgggctttagcacccgccttcgagaacgtgatggacagggcagaggtcaaagtgcgccagcttgtcctgcgcggctacttcaccaggaccgaccaggcgcaggtctggggccagcatcaagacggcaccccggctggcctcacttgcaaacgtggccagtgcccgcgatgcgccgctgcgaagctcctcaaggaccgagtgctcccggacgtcaacggcgggaaattggacaggaaggaagtaatggggtttttggatttctttgggctatggtgatgcgatgtcataatggtcccactcaagacacaccgtgtagatgactcgaactgcgttcttggataacccacggtagtatgtcgtcttctatcgagatgctcttgacagtgcgcttttg

SEQ ID NO: 30622 - DNA, 1647 bp, Muscodor strobelii
  misc_feature: SGI cDNA ID NO. 570534
  misc_feature: Reduced expression when VOC is produced
  misc_feature: Encodes the peptide sequence at SEQ ID NO 30623
atggctccaggccttcgaccacttcagctgccattattggtggagcaaaggaaacagaaggaagctgcactaatggcatctgtcgacatgcacgaaggtgatgcatctgccacctacaatcatcagctctacccacagaaacaacaaacgcaaaaacaacaaattcgacaacatgagttcgtggttacagagacagcttcttctgaagtaacctctccgctgactccaagtttctcgccaagaggccacctgcggtactctagttctatgtcgtcgtttgatctggccactcctggtagttgcgatgatgtgccatcttctcctacgcaggtgttgcaaacacccggcaaacgtatactcgacgacgtcgaagaagaacccttcgaatacgaccgttttgcccgcctcgatctcgaagtccatgatatcgaggcagcatatgacgaggtttcggaacaattcgacctctacgattgcttatgcgacgaaccttgcgtgcacagagatccggagcagtcaccgagtgcaactagcttctacgcacggggtaggtcctttgactacgacgctgggtttttcagtgacaatgattcccccttttctcagcgtccatctcggaagaaacaaagagatggctcattacctcctttaatgggtctatcatatcgtatcggctcccgtttcccatccttgacaagatggagatcacctaggaaatcgagtaccgtcagttcacctgcatctgacttgtatgagcgaggatcaagatctcgtgctgcttcaagccgatcatcttctatttcgggtcgtgtaccggatcgcaaaaatgagccacaactcccaccaactccagcactgtcattttatgagagtagtgatagtatcaccatgcccgggccgctggatgttgacgaagccgatgaagtcctgtactccatccaacgcgagcgcgcccaagcagttacgccattgctgccacccatgatgactagcaagtgtgatcaaatcacatcacaaccttcgccattgcaatcgccgactattgcatgtccagtcgacgatgaaccacagtcgcctttgatgctctctccgcctttgagcaccaaaccctcgatttcttcgtttcgtcacatcattgcctctggagagttacctcctattccttctcatgatatttggtctgatcttcttggacatgccaacttcaccatcatgccagtaccatataagccagagactgccaacctgtcgtcgttgcaagaactacgaggggactgggagatggcacgcgtcaactacaccaagcatctcgtacgcactggggagcactatggtctcacttcaaagacttatgcttacaccgaagaaaagtgggccgaggtcgatggaaactggcgtgctttccatgatgaaatcgctgcggccgtcgttgccagcggcgagatcgcaagctgtgacaaatttgatgaaagcatcatcacgactgtgcccattatggacggcgaaggcaaattccctgagcgtggcgacgaagatattgttgggcctatggtacgcgaggcaactatgaatacgctatctggcgcagaccgcaagcgtcccagcttttggcgcaccatatcggaccgcgttggcctgcgaaaataa

SEQ ID NO: 30623 - protein, 548 aa, Muscodor strobelii
  misc_feature: SGI Peptide ID NO. 570534
  misc_feature (1)..(548): NCBI GI: 256734936 Blast Desc: NECHADRAFT_75688 [Nectria haematococca mpVI 77-13-4]
  misc_feature (1)..(548): NCBI GI: 46137969 Blast Desc: FG10499.1 [Gibberella zeae PH-1]
  misc_feature (56)..(548): NCBI GI: 261354422 Blast Desc: conserved [Verticillium albo-atrum VaMs.102]
  misc_feature (43)..(548): NCBI GI: 145607996 Blast Desc: MGG_09755 [Magnaporthe grisea 70-15] gi|145015465|gb|EDK00002.1| MGG_09755 [Magnaporthe grisea 70-15]
  misc_feature (68)..(519): NCBI GI: 156059934 Blast Desc: SS1G_03980 [Sclerotinia sclerotiorum 1980] gi|154701766|gb|EDO01505.1| SS1G_03980 [Sclerotinia sclerotiorum 1980]
  misc_feature (1)..(548): NCBI GI: 85092539 Blast Desc: NCU08141 [Neurospora crassa OR74A] gi|28920872|gb|EAA30212.1| conserved [Neurospora crassa OR74A]
  misc_feature (1)..(548): NCBI GI: 116205712 Blast Desc: CHGG_02149 [Chaetomium globosum CBS 148.51] gi|88182746|gb|EAQ90214.1| CHGG_02149 [Chaetomium globosum CBS 148.51]
  misc_feature (147)..(548): NCBI GI: 171678229 Blast Desc: protein product [Podospora anserina] gi|170937184|emb|CAP61841.1| protein product [Podospora anserina]
  misc_feature (65)..(544): NCBI GI: 115389158 Blast Desc: conserved [Aspergillus terreus NIH2624] gi|114194480|gb|EAU36180.1| conserved [Aspergillus terreus NIH2624]
  misc_feature (66)..(542): NCBI GI: 189196658 Blast Desc: conserved [Pyrenophora tritici-repentis Pt-1C-BFP] gi|187980546|gb|EDU47172.1| conserved [Pyrenophora tritici-repentis Pt-1C-BFP]
  misc_feature: Useful for introducing or modulating the production of volatile compounds
MAPGLRPLQLPLLVEQRKQKEAALMASVDMHEGDASATYNHQLYPQKQQTQKQQIRQHEFVVTETASSEVTSPLTPSFSPRGHLRYSSSMSSFDLATPGSCDDVPSSPTQVLQTPGKRILDDVEEEPFEYDRFARLDLEVHDIEAAYDEVSEQFDLYDCLCDEPCVHRDPEQSPSATSFYARGRSFDYDAGFFSDNDSPFSQRPSRKKQRDGSLPPLMGLSYRIGSRFPSLTRWRSPRKSSTVSSPASDLYERGSRSRAASSRSSSISGRVPDRKNEPQLPPTPALSFYESSDSITMPGPLDVDEADEVLYSIQRERAQAVTPLLPPMMTSKCDQITSQPSPLQSPTIACPVDDEPQSPLMLSPPLSTKPSISSFRHIIASGELPPIPSHDIWSDLLGHANFTIMPVPYKPETANLSSLQELRGDWEMARVNYTKHLVRTGEHYGLTSKTYAYTEEKWAEVDGNWRAFHDEIAAAVVASGEIASCDKFDESIITTVPIMDGEGKFPERGDEDIVGPMVREATMNTLSGADRKRPSFWRTISDRVGLRK

SEQ ID NO: 30624 - DNA, 6007 bp, Muscodor strobelii
  misc_feature: SGI EST ID NO. CUFF.72528.0
  misc_feature: Variant of the nucleotide sequence at SEQ ID NO 30622
caaaacttgaccgatgacggacgaatagggttacgcagaccaggggaaaagagccttgcgagtgtgggactacggtacataagttgggaccaattccatgcccgagtcggcggcctaggcataacactagggagcgtattccgatggagcaacactcagagcctctgtctgagatagggcttgggcgattccaccatcgcagagccttggatcatttgtcatggcgcgagcttctggaggcttttctggctcgtctgctcgtctggtacaagcataagtatgaatctgtgcgaatcgtatatacatctacgtatatgtaatgctttccatacaagcatccaaaggtagcttgtgattgacgtttggcaattcggcgcttattttgtgcttatgacgagttcacattcttcgcctttaccttcttgaggacatggtgcaacctatgatacttcgaattgtagttcattgtacacttgcataagctaggtaaaagtcggcctgaagttatgacagaaccggtggaatcaattgctaggtacagcgcattgcacaaaagtgtatgggctatctaaaatgctagggaaaatttttatagacgaagattgggcaagggcaacaagaaaagtacaaatgaattgcccaatcctgcccttccctgatcgagctagaacccaagcccaggtcaccggctcaacggggattcaatccgcgccgccggcctatccccgttattattagctagtcgcaaatgggttggaggttggacggtctgctctgctctcggcaacattgagcgaacgaacaacattatggacagatgagaggctccaactgaagatcagatagacatatgaatgcaaaacagcagcagttcaatgcgaaagaccccggcagatagatgattaatcattgacgtgaggttccaattcgttctatgtgcgcgcgtcacaaatagtagatgtctagtaacagcggcacggccagtttggaacggccaagctgctcatcatcgtcaccatcctgagatttaatggatgtcgatatggaaagcccccaaatgaagtactggtatttactgactacaggccattttggctcgaatgatattgaaatatgaggggaagaaaagctagcatgttttaccaatcatggtagcaggcttcgttcatcgcagaccgagcgctattagataaggaaaaccaggagacctgggccacaggtatccacgaaaccccgagaatggtgacgcaggtaacaggcgagggagagcaacgggcaacaaagcatgtggactttggtaactctacgtgtatggccgggcattggcaattgtactataaaatgctcatacatgtgtacgcgctgttgtgtgttgagtctgtagtatgtagagttgccgctttctggagcacaggcacatgcaagactcaacactttttctcatccgaggtgtctgcacagaatactgggaagattactagaattgcgaagtagacgaggtagacaagggctcctagagaatatcgtcagcgagggtacccaacaggccagggcggggccgaggtcagggatcaattgtcaaaatcttccagcccttcgctgcgtctgccacgatggaccaggctcacgaggcgcaagcggcgtaggatccgctatctcttgggcctgatggagacttttgcgagcaaccgtccgcgctcaaccatgtgcttatgatgggtctttttttaaaaatgggttactctcaatggcggtcgggacggattcagtctagacatgagctcgaaagaaagggaagggggaaatttctgtccatgtccatgctggattctgatgtcaagtggagttcaagttggcgcagaggccatatcggactcacagcaagcggttggtgattgacagagaaaagaagtcgagtctgtctcccaacccgccccgcccattttcaccaaccatcgttttgttgttccacgactcgttcaccacgcaacagtccacttcttcgacacacttcagagaggagaagaagcccggtgcataggagccactgataggagagatcaagaacaagcgaaccgcttattcacacatcttgttttccggcacgcaccatctttcgcacattgcaaccctggtacaatagaagaatagtagctgggccagaggtgctcccacatatacatacatactgtcccacggaagacacaaggtatcttcggccacacacacttacacacatacatctcggtgcacacgcataaccacaacgcacagtcataaagctcagcaaccccgcgttcgcctgtcgtgccgtcgttacttcaccacaagggagtcgaatcttggcagctctggtatagtgcctagttattacatactaccacccttctgcactcgcctggctggttgtcacaagggccacctgcacgcgaccccggaagagtgtcggaattgggacgacttgaccggatttgattggcaaagcgacctcgattctgccagagcgccagcacaacacagcaccagcgacaggagcctgactacaaccccacgaattgactaaacttgggagcggtatactgaccaggaacacgtggacggttgcgagcaaggcgcagatagatgggtgcgcgacaagtggtacacgtatgaacgtatcaacacacgggaccattcgcttttggggagaagctgtcgacacttgcctctatgaggagtagcatcaagggaagcagcataaacccaatcttttcccgccaactctatctctgccttggcgagtataatatgtggaggtagctcaattgctctgtgacagcatcaacattcagattatttagagagaaggaatccgagaccaaaattgatctcttcggcgacctggaagaaaagaagcaatcggaaaagaaaagttggaacggcagagctgcgcaaacgcgacaagggtaaaaggattcggattaccaggcttcctcactctctgacgtctgtgtgcacattcttttttttcattccctcatttggagaaacacccccgccattcaccactctcacctgttcacccacccacccactcgtccactgtcactgttaccttgaaacaacacgcgcgaccctgtgcctatcattgcctttaatacgcttccttcacttacacgcgattccaaaccaaatcaacgacaacaactccatattattcaaaactcgacttgatctacactaggccgtttgaaataacgcgcaaggcgacgacagaactcatactacccaggctttgaatcataagtattatcataattatatactgttttggcagctgtttgcgaagcccttcggacggcgtcgtgcccacgctggtctgcgcaacaatacacaaagatggctccaggccttcgaccacttcagctgccattattggtggagcaaaggaaacagaaggaagctgcactaatggcatctgtcgacatgcacgaaggtgatgcatctgccacctacaatcatcagctctacccacagaaacaacaaacgcaaaaacaacaaattcgacaacatgagttcgtggttacagagacagcttcttctgaagtaacctctccgctgactccaagtttctcgccaagaggccacctgcggtactctagttctatgtcgtcgtttgatctggccactcctggtagttgcgatgatgtgccatcttctcctacgcaggtgttgcaaacacccggcaaacgtatactcgacgacgtcgaagaagaacccttcgaatacgaccgttttgcccgcctcgatctcgaagtccatgatatcgaggcagcatatgacgaggtttcggaacaattcgacctctacgattgcttatgcgacgaaccttgcgtgcacagagatccggagcagtcaccgagtgcaactagcttctacgcacggggtaggtcctttgactacgacgctgggtttttcagtgacaatgattcccccttttctcagcgtccatctcggaagaaacaaagagatggctcattacctcctttaatgggtctatcatatcgtatcggctcccgtttcccatccttgacaagatggagatcacctaggaaatcgagtaccgtcagttcacctgcatctgacttgtatgagcgaggatcaagatctcgtgctgcttcaagccgatcatcttctatttcgggtcgtgtaccggatcgcaaaaatgagccacaactcccaccaactccagcactgtcattttatgagagtagtgatagtatcaccatgcccgggccgctggatgttgacgaagccgatgaagtcctgtactccatccaacgcgagcgcgcccaagcagttacgccattgctgccacccatgatgactagcaagtgtgatcaaatcacatcacaaccttcgccattgcaatcgccgactattgcatgtccagtcgacgatgaaccacagtcgcctttgatgctctctccgcctttgagcaccaaaccctcgatttcttcgtttcgtcacatcattgcctctggagagttacctcctattccttctcatgatatttggtctgatcttcttggacatgccaacttcaccatcatgccagtaccatataagccagagactgccaacctgtcgtcgttgcaagaactacgaggggactgggagatggcacgcgtcaactacaccaagcatctcgtacgcactggggagcactatggtctcacttcaaagacttatgcttacaccgaagaaaagtgggccgaggtcgatggaaactggcgtgctttccatgatgaaatcgctgcggccgtcgttgccagcggcgagatcgcaagctgtgacaaatttgatgaaagcatcatcacgactgtgcccattatggacggcgaaggcaaattccctgagcgtggcgacgaagatattgttgggcctatggtacgcgaggcaactatgaatacgctatctggcgcagaccgcaagcgtcccagcttttggcgcaccatatcggaccgcgttggcctgcgaaaataaaccagctgtatagcaagtatttacaatgaagctgcgggttattctgttacgctcatgacaacttatgacgatcacgacttgagcggcatttacactcctttgaaccaaccacatctcctggacttattgcattcttgcattgttttgcgacacacatagagagataccatttgctatctattcgtcgacgactttgatccgacgcatcgagctcattatcttccccgctctaaatgacctaccagtctacatgacagcgcacgccaggctatgaaaagcccacgaccacgtctatttatgttattattattatcatctctttgattttatcaagcgttgtttcatgcaagcccggtgttagtcggaatctaccataaaagtcggcacgctacatccgcatttgatttattatcgcatgcatagggcgcaaatgcgcccctcggagtttttcttttcacaggtgttgcggggtgccgcttagaattctcggattgattacacggcccctcaatccgctcgctagccaagccggctgctgcagctacgcgtgcgcgacgcgacggttgcaagctgagagtggctacccccacctcgccttgtacgttgccggaccttaaatcactatttgttagtgtctattgtctactgtctacattttattatctgtatggatccgtgaattgtaccatgtcacggagagaacggaacggaacgaaggaaaagaggcttttctataccctgttggaattatcgaggatgaggggatgaaatttgagaatcaatggacttgtaaaccagcgtgtactgttacagaaatcacgcgtatcattttgatcgctggatttagcccccggaacagccgttgttgacagatggggtaaggggagagactccagtgactgatggccttgatgcaagttcttggcagagaaggtgacgaaaaactttgaaacaatccaaaacaaattataaaagatcctgt

SEQ ID NO: 30625 - DNA, 1488 bp, Muscodor strobelii
  misc_feature: SGI cDNA ID NO. 570535
  misc_feature: Reduced expression when VOC is produced
  misc_feature: Encodes the peptide sequence at SEQ ID NO 30626
atggccagacaatcagttttagccacggctctctttgccctcaaggctttcggctccccacatcccatgatcacagcagcgccgagcataacggatcgcgacctagccctggcgcgtagaggcatcattagcgacgccgaaagttttatcgatggcctagggagcgatgtctcgagtttcatttcatcgggcgttcctgctttctttcagaatttccccactggcgacgacgtagagagcgcgctcggaatcggtgacgatgatctgaaggcaacgcccactcacgttcttaatattcccagttacgcgaactggacaaacgacggctggaacttgagaatacatggcaatgtctacaagcaacctaacatcagccaagacgacctcgatgacctggcaaacatctttttaatcgacacgagcgttgacgatctggatgcagcaggacaggccgaggcgcgaaatgtgacggcttctatctttgtcgttcaacagggcaacgtagctgtcacagtcaatttggtcaatgacgtccatgttcgccctaatgcaagcggcggtgtggtcaatgccgagggcggtgctcagacaatcgacttgccttataacactaccgcggagggcgacttcgatacattcgtgttgctgaagaatacgaccggctccaaaggtggtcatttggtccctggcaacgagacagcgcatatccaggcactcaatgtgtacacggagggtaccgacaccggcaatgccactgcctatctcgttcccccgacaggatatacaatcatctctgatatcgatgacatcctgcgcataacgaagatctacgacccgaaggaagggcttctgaactccttcgctcgactttacacgccgtggcaggatatgcccgagatttacgccaactggtctgctaccatcgacaacttccatttccattacctcaccacgacccccgagcagattacacgaaactacatggaatacatctacaagacctaccctctcggctccttcgacactcgaccgctgaacttctccgacggatcggcaacacttcagatccgccgcttcctgctcgacaagatcttcttgactttcccacagcgaaagttcgtgctcatgggcgatacgactaactctgatgtcatgaaggcttatcctcaattagcgaaagattacccaggacaggtccagtgcatcttcctgcgcaacaccacagcaacggacgacaccgatttgttcccgtatgacacaaagggcttcgagggccttgatcagaaacagtatatgttctttgttaatgccgatgatttgagagctgttgatatcgagggcggcaactgctggaacagccgcgtcgtccagaatgtgacttttggtgagcaggggcgggatttcggcaatgcagcgactactaaggagtggagctggtctgcgcttattatgagtcttggaactgcaatgggtatggtactattatag

SEQ ID NO: 30626 - protein, 495 aa, Muscodor strobelii
  misc_feature: SGI Peptide ID NO. 570535
  misc_feature (27)..(469): NCBI GI: 256728959 Blast Desc: NECHADRAFT_39861 [Nectria haematococca mpVI 77-13-4]
  misc_feature (26)..(495): NCBI GI: 46138489 Blast Desc: FG10759.1 [Gibberella zeae PH-1]
  misc_feature (20)..(490): NCBI GI: 156033330 Blast Desc: SS1G_13385 [Sclerotinia sclerotiorum 1980] gi|154698788|gb|EDN98526.1| SS1G_13385 [Sclerotinia sclerotiorum 1980]
  misc_feature (1)..(469): NCBI GI: 145234995 Blast Desc: An03g02510 [Aspergillus niger] gi|134057822|emb|CAK38217.1| protein product [Aspergillus niger]
  misc_feature (22)..(494): NCBI GI: 169600729 Blast Desc: SNOG_03209 [Phaeosphaeria nodorum SN15] gi|111068820|gb|EAT89940.1| SNOG_03209 [Phaeosphaeria nodorum SN15]
  misc_feature (18)..(495): NCBI GI: 39940150 Blast Desc: MGG_05165 [Magnaporthe grisea 70-15] gi|145010573|gb|EDJ95229.1| MGG_05165 [Magnaporthe grisea 70-15]
  misc_feature (19)..(494): NCBI GI: 189211433 Blast Desc: conserved [Pyrenophora tritici-repentis Pt-1C-BFP] gi|187978140|gb|EDU44766.1| conserved [Pyrenophora tritici-repentis Pt-1C-BFP]
  misc_feature (42)..(470): NCBI GI: 239606468 Blast Desc: conserved [Ajellomyces dermatitidis ER-3]
  misc_feature (22)..(470): NCBI GI: 240272945 Blast Desc: conserved [Ajellomyces capsulatus H143]
  misc_feature (69)..(469): NCBI GI: 225684193 Blast Desc: conserved [Paracoccidioides brasiliensis Pb03]
  misc_feature: Useful for introducing or modulating the production of volatile compounds
MARQSVLATALFALKAFGSPHPMITAAPSITDRDLALARRGIISDAESFIDGLGSDVSSFISSGVPAFFQNFPTGDDVESALGIGDDDLKATPTHVLNIPSYANWTNDGWNLRIHGNVYKQPNISQDDLDDLANIFLIDTSVDDLDAAGQAEARNVTASIFVVQQGNVAVTVNLVNDVHVRPNASGGVVNAEGGAQTIDLPYNTTAEGDFDTFVLLKNTTGSKGGHLVPGNETAHIQALNVYTEGTDTGNATAYLVPPTGYTIISDIDDILRITKIYDPKEGLLNSFARLYTPWQDMPEIYANWSATIDNFHFHYLTTTPEQITRNYMEYIYKTYPLGSFDTRPLNFSDGSATLQIRRFLLDKIFLTFPQRKFVLMGDTTNSDVMKAYPQLAKDYPGQVQCIFLRNTTATDDTDLFPYDTKGFEGLDQKQYMFFVNADDLRAVDIEGGNCWNSRVVQNVTFGEQGRDFGNAATTKEWSWSALIMSLGTAMGMVLL

SEQ ID NO: 30627 - DNA, 1960 bp, Muscodor strobelii
  misc_feature: SGI EST ID NO. CUFF.72581.0
  misc_feature: Variant of the nucleotide sequence at SEQ ID NO 30625
cggccgtctccaaatctctctgtgctgtgcgcattttcacctttggcctgtcgctggtcttgtagttgtgcggccggtatttgcagccgtgaccaatcccgtcgtagtggttagatctctagactgctgattatacgatcgcttcgtcgcatgttggtttcttaccgttgtccattcggagctcgtattaagaatacaaacgcaaccgcatcatctacggacccttcggactgccctcgcacacaagaacgatggccagacaatcagttttagccacggctctctttgccctcaaggctttcggctccccacatcccatgatcacagcagcgccgagcataacggatcgcgacctagccctggcgcgtagaggcatcattagcgacgccgaaagttttatcgatggcctagggagcgatgtctcgagtttcatttcatcgggcgttcctgctttctttcagaatttccccactggcgacgacgtagagagcgcgctcggaatcggtgacgatgatctgaaggcaacgcccactcacgttcttaatattcccagttacgcgaactggacaaacgacggctggaacttgagaatacatggcaatgtctacaagcaacctaacatcagccaagacgacctcgatgacctggcaaacatctttttaatcgacacgagcgttgacgatctggatgcagcaggacaggccgaggcgcgaaatgtgacggcttctatctttgtcgttcaacagggcaacgtagctgtcacagtcaatttggtcaatgacgtccatgttcgccctaatgcaagcggcggtgtggtcaatgccgagggcggtgctcagacaatcgacttgccttataacactaccgcggagggcgacttcgatacattcgtgttgctgaagaatacgaccggctccaaaggtggtcatttggtccctggcaacgagacagcgcatatccaggcactcaatgtgtacacggagggtaccgacaccggcaatgccactgcctatctcgttcccccgacaggatatacaatcatctctgatatcgatgacatcctgcgcataacgaagatctacgacccgaaggaagggcttctgaactccttcgctcgactttacacgccgtggcaggatatgcccgagatttacgccaactggtctgctaccatcgacaacttccatttccattacctcaccacgacccccgagcagattacacgaaactacatggaatacatctacaagacctaccctctcggctccttcgacactcgaccgctgaacttctccgacggatcggcaacacttcagatccgccgcttcctgctcgacaagatcttcttgactttcccacagcgaaagttcgtgctcatgggcgatacgactaactctgatgtcatgaaggcttatcctcaattagcgaaagattacccaggacaggtccagtgcatcttcctgcgcaacaccacagcaacggacgacaccgatttgttcccgtatgacacaaagggcttcgagggccttgatcagaaacagtatatgttctttgttaatgccgatgatttgagagctgttgatatcgagggcggcaactgctggaacagccgcgtcgtccagaatgtgacttttggtgagcaggggcgggatttcggcaatgcagcgactactaaggagtggagctggtctgcgcttattatgagtcttggaactgcaatgggtatggtactattatagagcggcgttgagtgtgttatgagttatgagttagtaggttacgcggttatgttagacgttgtgtaatgaccgaccccaagcatcatgtgctatgagggcgaggagcatttgtatatattctattcatgactgtgagatagttcaccgtcgtcatcattgctcttatgagcttctgtcgataatagtttcattgcgaatgatcaagttgcggcttcatcgac

SEQ ID NO: 30628 - DNA, 408 bp, Muscodor strobelii
  misc_feature: SGI cDNA ID NO. 570536
  misc_feature: Encodes the peptide sequence at SEQ ID NO 30629
atgaatcggcgcatgctcaccaaagacgacgaggcggccggcggcgacgaggtcgaggtccgccgcgaagaccaggacaagatcaacaagttcagccggctgcaccagcgcgagctgaagatccagggcgagctcgatgcgaagaacaaggagaaggaggagctggacgacgtcaccctcgagctcgagctggccgacgaagacgagacggtcccctacaagattggcgattccttcttccacatccccctgccccaggcccaagagatgctcgccgagtccacgtcccgcattgacgacgaggtctcccagctcgaggacagcatgaccaccaccaaggaggagatgcaggaactcaaggtccagctctacgctcgcttcggccgcagtatcaacctcgagacctga

SEQ ID NO: 30629 - protein, 135 aa, Muscodor strobelii
  misc_feature: SGI Peptide ID NO. 570536
  misc_feature (25)..(130): Pfam Id: PF01920 Pfam Desc: Prefoldin subunit
  misc_feature (1)..(135): NCBI GI: 39977691 Blast Desc: MGG_06730 [Magnaporthe grisea 70-15] gi|145013752|gb|EDJ98393.1| MGG_06730 [Magnaporthe grisea 70-15]
  misc_feature (1)..(135): NCBI GI: 34500102 Blast Desc: Gim complex component GIM3-like protein [Epichloe festucae]
  misc_feature (1)..(135): NCBI GI: 171690120 Blast Desc: protein product [Podospora anserina] gi|170945008|emb|CAP71119.1| protein product [Podospora anserina]
  misc_feature (1)..(135): NCBI GI: 261356773 Blast Desc: VDBG_05310 [Verticillium albo-atrum VaMs.102]
  misc_feature (1)..(135): NCBI GI: 156043904 Blast Desc: SS1G_10055 [Sclerotinia sclerotiorum 1980] gi|154694444|gb|EDN94182.1| SS1G_10055 [Sclerotinia sclerotiorum 1980]
  misc_feature (1)..(135): NCBI GI: 261201005 Blast Desc: prefoldin subunit 4 [Ajellomyces dermatitidis SLH14081] gi|239593975|gb|EEQ76556.1| prefoldin subunit 4 [Ajellomyces dermatitidis SLH14081] gi|239607149|gb|EEQ84136.1| 4
  misc_feature (1)..(135): NCBI GI: 240278998 Blast Desc: prefoldin subunit 4 [Ajellomyces capsulatus H143]
  misc_feature (1)..(135): NCBI GI: 225560245 Blast Desc: prefoldin subunit [Ajellomyces capsulatus G186AR]
  misc_feature (1)..(135): NCBI GI: 46138615 Blast Desc: FG10822.1 [Gibberella zeae PH-1]
  misc_feature (1)..(135): NCBI GI: 154296816 Blast Desc: prefoldin subunit 4 [Botryotinia fuckeliana B05.10] gi|150843151|gb|EDN18344.1| prefoldin subunit 4 [Botryotinia fuckeliana B05.10]
MNRRMLTKDDEAAGGDEVEVRREDQDKINKFSRLHQRELKIQGELDAKNKEKEELDDVTLELELADEDETVPYKIGDSFFHIPLPQAQEMLAESTSRIDDEVSQLEDSMTTTKEEMQELKVQLYARFGRSINLET

SEQ ID NO: 30630 - DNA, 1442 bp, Muscodor strobelii
  misc_feature: SGI EST ID NO. CUFF.72593.1
  misc_feature: Variant of the nucleotide sequence at SEQ ID NO 30628
ccgcgcagcttaaccacagcttcctttggtctggcaagcttgttgcaagccgattgttccgtctgtgagccccacccaggcaaacaacggccacgtagcgcgtctccgaacacacaccgtatcattcacttcgccaggtcacagactgccttgaagatgaatcggcgcatgctcaccaaagacgacgaggcggccggcggcgacgaggtcgaggtccgccgcgaagaccaggacaagatcaacaagttcagccggctgcaccagcgcgagctgaagatccagggcgagctcgatgcgaagaacaaggagaaggaggagctggacgacgtcaccctcgagctcgagctggccgacgaagacgagacggtcccctacaagattggcgattccttcttccacatccccctgccccaggcccaagagatgctcgccgagtccacgtcccgcattgacgacgaggtctcccagctcgaggacagcatgaccaccaccaaggaggagatgcaggaactcaaggtccagctctacgctcgcttcggccgcagtatcaacctcgagacctgatggcccttgttgttgccgacgggcgcaacctaatccatcaccgcgccgaagacgaagaatactttctctgctctcaaacaaaggctgccggtctagtctcgtctggcctcgatcagaccagacccccagagatagctgtgacactctcacgtggctccgatgtgatcctgctgcagcagaacactgctctggcaacatgccctggttccacacgggacccgatgactcttgagcctctgccagccatttagagacggccagcgaatgccattgcgccagtaggcaccggcacttggccggtgtagagaatgcatgcagcgccaatctcacacagagcacgagagtcgatggtcaagaattgaaaaaatctagattttgaagatctgctttgtgcactcagagttagagttagaaactcgtatgggtcgcgaacttcgcgcattgctatcttttccgtaagacttggtttctcagttattagtacatgcacgaggccaagcccgtatatcatccagtctagactgttcgttgaacatggcttgtgattgtagtggatatatccgatatttggtcaattcagcactcccgccgcgacgttgtttcacgataagtaatattaatcctgctcatcgatttcatagaagcagtagccacgctaattatcctgggatgtctccattgttactcttcaaaatatctggagcgggaactctgcgtgaagtcgctatgcttctatgactcgtcttttcctcagatatgtaacataaaagcgtcatgaatctgacacctctagaatcagctttgcttgtacaaggtaagtcgtgtcgaaggatttccgcaatacctcattatcgattggcttccttttaagagcatgc

SEQ ID NO: 30631 - DNA, 2355 bp, Muscodor strobelii
  misc_feature: SGI cDNA ID NO. 570537
  misc_feature: Encodes the peptide sequence at SEQ ID NO 30632
atggctccggagccctctagcagcagcgagtccagcggccgtgacgaaatccgcccggacttctacatcggccaacatgactcgacaagaaccgagactctcggtgacttgcagtacggacaagtcttgaatgcaggatttggctttgtcaccacacctataactaatacacacttccatgaccgtattgcgaagctcgtcaccaccacagctcacgagcacgaagccttggctaagcccgggtctcaaccggatcccatcgtgcccccgttgactaccgatgataccactctattcccagagtcttataccagtggtttcatcggttacgccagcccctggatcgacctgacttcacccaaccatgtcgttgccagcatctcacgacaggtcttgaacctcgagatcgcttacgccaacttttgcggtgtgcgcagcgtcataatacctgggcctagactggattctgtcaaagtcggcaacggccagggtattgctcaatatgcccgagctgtgcaagaggctctcttggtcggcactcgtgtcaatttgatcattcatctacccatgtaccgtgagcctggtcttgaagaaaagatgccgcaactctcgatatctaatgccactcccgaggagcccaaaaagtctgaggaaattgatctcttcagctcctgggattcttggcatgtcgtcaggacaatctgcggctacgatacgagagtcatggtcgccctgaaagtccctcacgttctaccggaccaggaactgcagtcgagatggtttgcagagcctgttcagtatcttactcttggccctgctgtgttcgccgccaacaaggctgggtatccctctctaccacgactccatcagggtatgatccataatttcatgcagctaaagcatcatccctacttcatcctttgcgatgttgggccagagttgcaatcgggttccgaatcagaactggtaatagacaccacttcatcatctgcattccccacgctggcagatgccgccggacaaccagctgagaatgggtataaggtgcagggcgagaatccctacgtcggatatctacgatacgtcgaacgccaacaggagccaatcactcagatggagcgcgacactctggctagctttcaagattggctacaatcacccctgcagccgctctccgacaacttggaaagcgtcacctacgaagtatttgaaggcgatcctgtcaagtacaaccaatacgaaatggccattgaggaagccctacgcgaatggcgtgatctttcgaagcctacatcatctcctgagggcgtggtcatcgccgttgctggttccggccgtgggcctttggtaactcgggctttgcaggcgagtaagactacaggcgtaccggtcaaggtctgggccgtggagaagaacccaaatgcatacgtgtatttgctgcggcagaatgagaaggtatgggatgggtgcgtcactgttgttaagaccgacatgcgcgcctggaaaggcccatccacccctgataaccccgaaggaggaggcaacgttgacattctcgtctcagagctgcttggctcgtttggcgacaacgagttatcacctgaatgtctcgatggaattcagcacgtactagccccggaacatggtatctcgatccctagctcgtacacggcgcatctctctcctatttctacaccgaggatctatgcagatatcaaacagcgtaccgagtttggcggtgaggagaacgccttcaacacgccgtgggttgtacgcctctttgcaatcgacttcaatgctgcgcgcggggtgccggacagaccacgcttccagcaggcatgggagtttacgcacccgcttcctgaggccacactggacctggtagcagcacgacgctcggggggcgtagtcggaggaggcggaggcagcatggcaggcggcgtgggcgccaacgatcacaatgccagacactgccacctcacattcgtgtgccgaagtcgtggcgtctgtcatggcctcgcagggtacttcgagtcgacgctgtacgagtcgcagctcgacagcgagatggtggatggggttagacccaaagttgagctgagcacgttgccggagatgattgatctgaagagccgggatatggtctcttggttccctatcttctttccgctcaagcaaccgttgtatctaccgccggatgcggaagtggaagtcagcatgtggcgacagacggacgatgccaaggtgtggtacgagtggatggtggaggcgtacgtgtgggtgagcgagacgcagagagtcaaggtgggaggcagcgagatgtgcagtagtcgcaaggtcgcatgtctgatgtga

SEQ ID NO: 30632 - protein, 784 aa, Muscodor strobelii
  misc_feature: SGI Peptide ID NO. 570537
  misc_feature (220)..(757): Pfam Id: PF05185 Pfam Desc: PRMT5 arginine-N-methyltransferase
  misc_feature (351)..(757): Pfam Id: PF05185 Pfam Desc: PRMT5 arginine-N-methyltransferase
  misc_feature (220)..(310): Pfam Id: PF05185 Pfam Desc: PRMT5 arginine-N-methyltransferase
  misc_feature (18)..(784): NCBI GI: 256728960 Blast Desc: protein arginine N-methyltransferase [Nectria haematococca mpVI 77-13-4]
  misc_feature (1)..(784): NCBI GI: 46138483 Blast Desc: FG10756.1 [Gibberella zeae PH-1]
  misc_feature (8)..(784): NCBI GI: 39943766 Blast Desc: MGG_03894 [Magnaporthe grisea 70-15] gi|145014594|gb|EDJ99162.1| MGG_03894 [Magnaporthe grisea 70-15]
  misc_feature (16)..(784): NCBI GI: 116204793 Blast Desc: CHGG_10280 [Chaetomium globosum CBS 148.51] gi|88176408|gb|EAQ83876.1| CHGG_10280 [Chaetomium globosum CBS 148.51]
  misc_feature (16)..(784): NCBI GI: 171690154 Blast Desc: protein product [Podospora anserina] gi|170945025|emb|CAP71136.1| protein product [Podospora anserina]
  misc_feature (16)..(784): NCBI GI: 164428059 Blast Desc: NCU01613 [Neurospora crassa OR74A] gi|157071994|gb|EAA27288.2| conserved [Neurospora crassa OR74A]
  misc_feature (1)..(784): NCBI GI: 261353012 Blast Desc: arginine N-methyltransferase skb1 [Verticillium albo-atrum VaMs.102]
  misc_feature (16)..(784): NCBI GI: 7800975 Blast Desc: related to SHK1 KINASE-BINDING protein [Neurospora crassa]
  misc_feature (19)..(784): NCBI GI: 156060467 Blast Desc: SS1G_02372 [Sclerotinia sclerotiorum 1980] gi|154699780|gb|EDN99518.1| SS1G_02372 [Sclerotinia sclerotiorum 1980]
  misc_feature (11)..(784): NCBI GI: 189188940 Blast Desc: protein arginine N-methyltransferase HSL7 [Pyrenophora tritici-repentis Pt-1C-BFP] gi|187972415|gb|EDU39914.1| protein arginine N-methyltransferase HSL7 [Pyrenophora tritici-repentis
  misc_feature (100)..(757): SWISSPROT Homolog: EC 2.1.1.125 Histone-arginine N-methyltransferase
MAPEPSSSSESSGRDEIRPDFYIGQHDSTRTETLGDLQYGQVLNAGFGFVTTPITNTHFHDRIAKLVTTTAHEHEALAKPGSQPDPIVPPLTTDDTTLFPESYTSGFIGYASPWIDLTSPNHVVASISRQVLNLEIAYANFCGVRSVIIPGPRLDSVKVGNGQGIAQYARAVQEALLVGTRVNLIIHLPMYREPGLEEKMPQLSISNATPEEPKKSEEIDLFSSWDSWHVVRTICGYDTRVMVALKVPHVLPDQELQSRWFAEPVQYLTLGPAVFAANKAGYPSLPRLHQGMIHNFMQLKHHPYFILCDVGPELQSGSESELVIDTTSSSAFPTLADAAGQPAENGYKVQGENPYVGYLRYVERQQEPITQMERDTLASFQDWLQSPLQPLSDNLESVTYEVFEGDPVKYNQYEMAIEEALREWRDLSKPTSSPEGVVIAVAGSGRGPLVTRALQASKTTGVPVKVWAVEKNPNAYVYLLRQNEKVWDGCVTVVKTDMRAWKGPSTPDNPEGGGNVDILVSELLGSFGDNELSPECLDGIQHVLAPEHGISIPSSYTAHLSPISTPRIYADIKQRTEFGGEENAFNTPWVVRLFAIDFNAARGVPDRPRFQQAWEFTHPLPEATLDLVAARRSGGVVGGGGGSMAGGVGANDHNARHCHLTFVCRSRGVCHGLAGYFESTLYESQLDSEMVDGVRPKVELSTLPEMIDLKSRDMVSWFPIFFPLKQPLYLPPDAEVEVSMWRQTDDAKVWYEWMVEAYVWVSETQRVKVGGSEMCSSRKVACLM

SEQ ID NO: 30633 - DNA, 3927 bp, Muscodor strobelii
  misc_feature: SGI EST ID NO. CUFF.72706.0
  misc_feature: Variant of the nucleotide sequence at SEQ ID NO 30631
gccattgcatgcactgctgtggaactcagctctccttcgcagtgctgaggcctgccgcgaagtacatgcttgcctgagtttgttgtccaggattgtttaccgcaatctggtcggtcttgttcgttctagtttcaagcatgagagtctgaagcttgaccctatttctccaattttcgtctaatcatcttgtgcgcctctttaggctcctcacaatctgcacaagtcccgcggccacagatttagatactgtcatacgactgcaataatcgaacaatggctccggagccctctagcagcagcgagtccagcggccgtgacgaaatccgcccggacttctacatcggccaacatgactcgacaagaaccgagactctcggtgacttgcagtacggacaagtcttgaatgcaggatttggctttgtcaccacacctataactaatacacacttccatgaccgtattgcgaagctcgtcaccaccacagctcacgagcacgaagccttggctaagcccgggtctcaaccggatcccatcgtgcccccgttgactaccgatgataccactctattcccagagtcttataccagtggtttcatcggttacgccagcccctggatcgacctgacttcacccaaccatgtcgttgccagcatctcacgacaggtcttgaacctcgagatcgcttacgccaacttttgcggtgtgcgcagcgtcataatacctgggcctagactggattctgtcaaagtcggcaacggccagggtattgctcaatatgcccgagctgtgcaagaggctctcttggtcggcactcgtgtcaatttgatcattcatctacccatgtaccgtgagcctggtcttgaagaaaagatgccgcaactctcgatatctaatgccactcccgaggagcccaaaaagtctgaggaaattgatctcttcagctcctgggattcttggcatgtcgtcaggacaatctgcggctacgatacgagagtcatggtcgccctgaaagtccctcacgttctaccggaccaggaactgcagtcgagatggtttgcagagcctgttcagtatcttactcttggccctgctgtgttcgccgccaacaaggctgggtatccctctctaccacgactccatcagggtatgatccataatttcatgcagctaaagcatcatccctacttcatcctttgcgatgttgggccagagttgcaatcgggttccgaatcagaactggtaatagacaccacttcatcatctgcattccccacgctggcagatgccgccggacaaccagctgagaatgggtataaggtgcagggcgagaatccctacgtcggatatctacgatacgtcgaacgccaacaggagccaatcactcagatggagcgcgacactctggctagctttcaagattggctacaatcacccctgcagccgctctccgacaacttggaaagcgtcacctacgaagtatttgaaggcgatcctgtcaagtacaaccaatacgaaatggccattgaggaagccctacgcgaatggcgtgatctttcgaagcctacatcatctcctgagggcgtggtcatcgccgttgctggttccggccgtgggcctttggtaactcgggctttgcaggcgagtaagactacaggcgtaccggtcaaggtctgggccgtggagaagaacccaaatgcatacgtgtatttgctgcggcagaatgagaaggtatgggatgggtgcgtcactgttgttaagaccgacatgcgcgcctggaaaggcccatccacccctgataaccccgaaggaggaggcaacgttgacattctcgtctcagagctgcttggctcgtttggcgacaacgagttatcacctgaatgtctcgatggaattcagcacgtactagccccggaacatggtatctcgatccctagctcgtacacggcgcatctctctcctatttctacaccgaggatctatgcagatatcaaacagcgtaccgagtttggcggtgaggagaacgccttcaacacgccgtgggttgtacgcctctttgcaatcgacttcaatgctgcgcgcggggtgccggacagaccacgcttccagcaggcatgggagtttacgcacccgcttcctgaggccacactggacctggtagcagcacgacgctcggggggcgtagtcggaggaggcggaggcagcatggcaggcggcgtgggcgccaacgatcacaatgccagacactgccacctcacattcgtgtgccgaagtcgtggcgtctgtcatggcctcgcagggtacttcgagtcgacgctgtacgagtcgcagctcgacagcgagatggtggatggggttagacccaaagttgagctgagcacgttgccggagatgattgatctgaagagccgggatatggtctcttggttccctatcttctttccgctcaagcaaccgttgtatctaccgccggatgcggaagtggaagtcagcatgtggcgacagacggacgatgccaaggtgtggtacgagtggatggtggaggcgtacgtgtgggtgagcgagacgcagagagtcaaggtgggaggcagcgagatgtgcagtagtcgcaaggtcgcatgtctgatgtgagggtatagaaaggaatgcgtgatgatattacctgatgagatgggttaagatgattgaagagggacaggaagaaaaagatgcattttcattgcgatgtgctgggatacccggagaggcagggctggctaggtgcatgataccatgataaaaacggagatgagacttacgtctgttatgatacaagcctattcgagcgatgcatcgagagctagatggcggagatgaaaagagatgaagagatggacagaatgctctggcaaggggcatcgaacgaattacgtgcaagcatcacgatgattgacgaatccgacatggaagatggcttttccggggatttattatttgtgccgctctatgctatgcatggccatcgtagtcatcgagtacatctatttgcacgtcgaacctatcctcgcaagaagcaaggccttgcagtgtcggtgttttgagggcgatagcactcgtgtccttcgtcgtagcccgtcctgtcgattgtagagcagcatgccaaaggccattcattggtgctgaaaagcgcaacagtctttatgctctcttcctatgaatgaaacatgtccatcacctctgcggttgcctttcattctttctgtgccatcatatcatatcgtccatatttgcggggtatctcgacacgccatctttcgtcgtccatccctgtccagcctgccctctcgcgctgcgcatgagaaagccaaacaactccccatggattcagttgatgccatctatccatcacgaatcgcccatcaagacatcgccctgatcggcgctcttgatccagaggacattgttgcagcggatgaggatctggccgaggtcggaggtgaacttctggttgatgtactcttgggcgttggtgagctggatgttgaagtagccgtcgatggagaccagtctgcccttgtactcggtctcgccccacttcaggcgcaccactatgtccttctggaccctgcgtgatgttagttgacgcgaatctcgcacaagagaagagaggacgagggccggggaaggaaggcgaagggcgtgtagtcgtggggttgggaatcaggcgtacagttcttgcagcatcggcttcgggttgacgggcatgaactagacagggagtcagcgagggagcggcagaaagtgggagtgatagagcagatcttacactcatgatgggcgattctgcgatgggaggttgtcagtcgggatggtgagagatgatcttggtgatgtcgctcggcgagttgttgtttagttaccttaggtagctgttggaacttttggtgggtt

SEQ ID NO: 30634 - DNA, 264 bp, Muscodor strobelii
  misc_feature: SGI cDNA ID NO. 570538
  misc_feature: Encodes the peptide sequence at SEQ ID NO 30635
atgagtttcatgcccgtcaacccgaagccgatgctgcaagaactggtccagaaggacatagtggtgcgcctgaagtggggcgagaccgagtacaagggcagactggtctccatcgacggctacttcaacatccagctcaccaacgcccaagagtacatcaaccagaagttcacctccgacctcggccagatcctcatccgctgcaacaatgtcctctggatcaagagcgccgatcagggcgatgtcttgatgggcgattcgtga

SEQ ID NO: 30635 - protein, 87 aa, Muscodor strobelii
  misc_feature: SGI Peptide ID NO. 570538
  misc_feature (10)..(76): Pfam Id: PF01423 Pfam Desc: LSM domain
  misc_feature (1)..(84): NCBI GI: 39943768 Blast Desc: MGG_03895 [Magnaporthe grisea 70-15] gi|145014595|gb|EDJ99163.1| MGG_03895 [Magnaporthe grisea 70-15]
  misc_feature (1)..(80): NCBI GI: 261353011 Blast Desc: LSM domain-containing protein [Verticillium albo-atrum VaMs.102]
  misc_feature (1)..(77): NCBI GI: 116204791 Blast Desc: conserved [Chaetomium globosum CBS 148.51] gi|88176407|gb|EAQ83875.1| conserved [Chaetomium globosum CBS 148.51]
  misc_feature (2)..(81): NCBI GI: 171690156 Blast Desc: protein product [Podospora anserina] gi|170945026|emb|CAP71137.1| protein product [Podospora anserina]
  misc_feature (1)..(84): NCBI GI: 85080344 Blast Desc: NCU01614 [Neurospora crassa OR74A] gi|30580500|sp|Q9P5Z8.1|RUXF_NEUCR RecName: Full= small nuclear ribonucleoprotein F; Short=snRNP-F; Short=Sm protein F; Short=SmF
  misc_feature (1)..(77): NCBI GI: 261193311 Blast Desc: small nuclear ribonucleoprotein SmF [Ajellomyces dermatitidis SLH14081] gi|239588666|gb|EEQ71309.1| small nuclear ribonucleoprotein SmF [Ajellomyces dermatitidis SLH14081]
  misc_feature (1)..(80): NCBI GI: 256730648 Blast Desc: [Nectria haematococca mpVI 77-13-4]
  misc_feature (1)..(77): NCBI GI: 119191758 Blast Desc: CIMG_00256 [Coccidioides immitis RS]
  misc_feature (1)..(77): NCBI GI: 239614009 Blast Desc: small nuclear ribonucleoprotein SmF [Ajellomyces dermatitidis ER-3]
  misc_feature (1)..(86): NCBI GI: 225680065 Blast Desc: conserved [Paracoccidioides brasiliensis Pb03]
MSFMPVNPKPMLQELVQKDIVVRLKWGETEYKGRLVSIDGYFNIQLTNAQEYINQKFTSDLGQILIRCNNVLWIKSADQGDVLMGDS

SEQ ID NO: 30636 - DNA, 3568 bp, Muscodor strobelii
  misc_feature: SGI EST ID NO. CUFF.72707.1
  misc_feature: Variant of the nucleotide sequence at SEQ ID NO 30634
attgtaccttagccttgtaacccaccaaaagttccaacagctacctaaggtaactaaacaacaactcgccgagcgacatcaccaagatcatctctcaccatcccgactgacaacctcccatcgcagaatcgcccatcatgagtttcatgcccgtcaacccgaagccgatgctgcaagaactggtccagaaggacatagtggtgcgcctgaagtggggcgagaccgagtacaagggcagactggtctccatcgacggctacttcaacatccagctcaccaacgcccaagagtacatcaaccagaagttcacctccgacctcggccagatcctcatccgctgcaacaatgtcctctggatcaagagcgccgatcagggcgatgtcttgatgggcgattcgtgatggatagatggcatcaactgaatccatggggagttgtttggctttctcatgcgcagcgcgagagggcaggctggacagggatggacgacgaaagatggcgtgtcgagataccccgcaaatatggacgatatgatatgatggcacagaaagaatgaaaggcaaccgcagaggtgatggacatgtttcattcataggaagagagcataaagactgttgcgcttttcagcaccaatgaatggcctttggcatgctgctctacaatcgacaggacgggctacgacgaaggacacgagtgctatcgccctcaaaacaccgacactgcaaggccttgcttcttgcgaggataggttcgacgtgcaaatagatgtactcgatgactacgatggccatgcatagcatagagcggcacaaataataaatccccggaaaagccatcttccatgtcggattcgtcaatcatcgtgatgcttgcacgtaattcgttcgatgccccttgccagagcattctgtccatctcttcatctcttttcatctccgccatctagctctcgatgcatcgctcgaataggcttgtatcataacagacgtaagtctcatctccgtttttatcatggtatcatgcacctagccagccctgcctctccgggtatcccagcacatcgcaatgaaaatgcatctttttcttcctgtccctcttcaatcatcttaacccatctcatcaggtaatatcatcacgcattcctttctataccctcacatcagacatgcgaccttgcgactactgcacatctcgctgcctcccaccttgactctctgcgtctcgctcacccacacgtacgcctccaccatccactcgtaccacaccttggcatcgtccgtctgtcgccacatgctgacttccacttccgcatccggcggtagatacaacggttgctgtacgtcttttgttagcgcggaggaaatggcatgtatgctaagaaagatgctctgacacagtagatatagattgacagacagacttaccttgagcggaaagaagatagggaaccaagagaccatatcccggctcttcagatcaatcatctccggcaacgtgctcagctcaactttgggtctaaccccatccaccatctcgctgtcgagctgcgactcgtacagcgtcgactcgaagtaccctgcgaggccatgacagacgccacgacttcggcacacgaatgtgaggtggcagtgtctggcattgtgatcgttggcgcccacgccgcctgccatgctgcctccgcctcctccgactacgccccccgagcgtcgtgctgctaccaggtccagtgtggcctcaggaagcgggtgcgtaaactcccatgcctgctggaagcgtggtctgtccggcaccccgcgcgcagcattgaagtcgattgcaaagaggcgtacaacccacggcgtgttgaaggcgttctcctcaccgccaaactcggtacgctgtttgatatctgcatagatcctcggtgtagaaataggagagagatgcgccgtgtacgagctagggatcgagataccatgttccggggctagtacgtgctgaattccatcgagacattcaggtgataactcgttgtcgccaaacgagccaagcagctctgagacgagaatgtcaacgttgcctcctccttcggggttatcaggggtggatgggcctttccaggcgcgcatgtcggtcttaacaacagtgacgcacccatcccataccttctcattctgccgcagcaaatacacgtatgcatttgggttcttctccacggcccagaccttgaccggtacgcctgtagtcttactcgcctgcaaagcccgagttaccaaaggcccacggccggaaccagcaacggcgatgaccacgccctcaggagatgatgtaggcttcgaaagatcacgccattcgcgtagggcttcctcaatggccatttcgtattggttgtacttgacaggatcgccttcaaatacttcgtaggtgacgctttccaagttgtcggagagcggctgcaggggtgattgtagccaatcttgaaagctagccagagtgtcgcgctccatctgagtgattggctcctgttggcgttcgacgtatcgtagatatccgacgtagggattctcgccctgcaccttatacccattctcagctggttgtccggcggcatctgccagcgtggggaatgcagatgatgaagtggtgtctattaccagttctgattcggaacccgattgcaactctggcccaacatcgcaaaggatgaagtagggatgatgctttagctgcatgaaattatggatcataccctgatggagtcgtggtagagagggatacccagccttgttggcggcgaacacagcagggccaagagtaagatactgaacaggctctgcaaaccatctcgactgcagttcctggtccggtagaacgtgagggactttcagggcttcaaatgattagtatctgcagcatagcgaaacgagaagaggtactcagatgatatcacgtgaaaattgtaatgaaggttgtataagatagatctgccacttaccgaccatgactctcgtatcgtagccgcagattgtcctgacgacatgccaagaatcccaggagctgaagagatcaatttcctcagactttttgggctcctcgggagtggcattagatatcgagagttgcggcatcttttcttcaagaccaggctcacggtacatgggtagatgaatgatcaaattgacacgagtgccgaccaagagagcctcttgcacagctcgggcatattgagcaataccctggccgttgccgactttgacagaatccagtctaggcccaggtattatgacgctgcgcacaccgcaaaagttggcgtaagcgatctcgaggttcaagacctgtcgtgagatgctggcaacgacatggttgggtgaagtcaggtcgatccaggggctggcgtaaccgatgaaaccactggtataagactctgggaatagagtggtatcatcggtagtcaacgggggcacgatgggatccggttgagacccgggcttagccaaggcttcgtgctcgtgagctgtggtggtgacgagcttcgcaatacggtcatggaagtgtgtattagttataggtgtggtgacaaagccaaact

SEQ ID NO: 30637 - DNA, 483 bp, Muscodor strobelii
  misc_feature: SGI cDNA ID NO. 570539
  misc_feature: Encodes the peptide sequence at SEQ ID NO 30638
atgtatgcactgactctggttgccgagcttaacggagtgaccaacctgcgtcccaaggactctcccgatgctcccttttggtacacctttgtcgtccaatgcacatcctgccgcgagacccactctaaccccgtcgccgtgagccagtttgaaaccaatgagatgagcggcagtcggggggaggccaactttgtctggaagtgcaagaactgcaagagagagtcatcagcctccatcaaggtgggccccaaggcttacgagcaggctgagccgcccaagcagcagactgtcatcgagtttgactgtcgaggactcgagtttacttctttctctcccgagggtgagtgggtggctgatggattggagtcgggcaccaagttcgagggcgtcgagctcactgagggcgagtggttcgactacgacgagaaggccaacgacgaggtcagcatcaaggagctgcgctgggacatcaagagagcatga

SEQ ID NO: 30638 - protein, 160 aa, Muscodor strobelii
  misc_feature: SGI Peptide ID NO. 570539
  misc_feature (1)..(158): Pfam Id: PF05907 Pfam Desc: Eukaryotic protein of function (DUF866)
  misc_feature (2)..(154): Pfam Id: PF05907 Pfam Desc: Eukaryotic protein of function (DUF866)
  misc_feature (1)..(160): NCBI GI: 85110386 Blast Desc: NCU08505 [Neurospora crassa OR74A] gi|28925114|gb|EAA34198.1| conserved [Neurospora crassa OR74A] gi|38524210|emb|CAE75677.1| conserved [Neurospora crassa]
  misc_feature (1)..(160): NCBI GI: 171689212 Blast Desc: protein product [Podospora anserina] gi|170944568|emb|CAP70679.1| protein product [Podospora anserina]
  misc_feature (1)..(160): NCBI GI: 145606036 Blast Desc: MGG_06705 [Magnaporthe grisea 70-15] gi|145013777|gb|EDJ98418.1| MGG_06705 [Magnaporthe grisea 70-15]
  misc_feature (1)..(160): NCBI GI: 261352996 Blast Desc: DUF866 domain-containing protein [Verticillium albo-atrum VaMs.102]
  misc_feature (1)..(160): NCBI GI: 189188812 Blast Desc: PTRG_00412 [Pyrenophora tritici-repentis Pt-1C-BFP] gi|187972351|gb|EDU39850.1| PTRG_00412 [Pyrenophora tritici-repentis Pt-1C-BFP]
  misc_feature (1)..(159): NCBI GI: 154311927 Blast Desc: BC1G_05997 [Botryotinia fuckeliana B05.10] gi|150850647|gb|EDN25840.1| BC1G_05997 [Botryotinia fuckeliana B05.10]
  misc_feature (1)..(160): NCBI GI: 259483934 Blast Desc: TPA: DUF866 domain protein (AFU_orthologue; AFUA_2G15510) [Aspergillus nidulans FGSC A4]
  misc_feature (1)..(160): NCBI GI: 121716528 Blast Desc: DUF866 domain protein [Aspergillus clavatus NRRL 1] gi|119403991|gb|EAW14408.1| DUF866 domain protein [Aspergillus clavatus NRRL 1]
  misc_feature (1)..(160): NCBI GI: 238488665 Blast Desc: DUF866 domain protein [Aspergillus flavus NRRL3357] gi|220697958|gb|EED54298.1| DUF866 domain protein [Aspergillus flavus NRRL3357]
  misc_feature (1)..(160): NCBI GI: 146323042 Blast Desc: DUF866 domain protein [Aspergillus fumigatus Af293] gi|129558587|gb|EAL93848.2| DUF866 domain protein [Aspergillus fumigatus Af293]
MYALTLVAELNGVTNLRPKDSPDAPFWYTFVVQCTSCRETHSNPVAVSQFETNEMSGSRGEANFVWKCKNCKRESSASIKVGPKAYEQAEPPKQQTVIEFDCRGLEFTSFSPEGEWVADGLESGTKFEGVELTEGEWFDYDEKANDEVSIKELRWDIKRA

SEQ ID NO: 30639 - DNA, 1003 bp, Muscodor strobelii
  misc_feature: SGI EST ID NO. CUFF.72587.4
  misc_feature: Variant of the nucleotide sequence at SEQ ID NO 30637
gccattgaagacatgatgcagcatacatctcatgagacacaggggagttttattgtaacctaatcgctggcttattcttaaggaattctacttaaacatgcagacctcgtaacaggaatacatctgcttttccacagtcattgtcgcccatcatgtatgcactgactctggttgccgagcttaacggagtgaccaacctgcgtcccaaggactctcccgatgctcccttttggtacacctttgtcgtccaatgcacatcctgccgcgagacccactctaaccccgtcgccgtgagccagtttgaaaccaatgagatgagcggcagtcggggggaggccaactttgtctggaagtgcaagaactgcaagagagagtcatcagcctccatcaaggtgggccccaaggcttacgagcaggctgagccgcccaagcagcagactgtcatcgagtttgactgtcgaggactcgagtttacttctttctctcccgagggtgagtgggtggctgatggattggagtcgggcaccaagttcgagggcgtcgagctcactgagggcgagtggttcgactacgacgagaaggccaacgacgaggtcagcatcaaggagctgcgctgggacatcaagagagcatgaccgcgatctaagtgatggaatcccgacatctactgaaacgtgtgatgaagacgtgacgatgcatttgcagtctgcatgggaggtggatccccgtcgatggctcaacggcatgagctacctagccgagatgtagagagaaattgtaaaatacgaggaagaatgtgactattcaaagtgcatgaacagatgctgaggcacgctgctcggctgtgagctatatggagatcaaagcaaggacaagcctgatactattgtgagaattagatacaaccaaactgtggcatgtacttgaaatgtaaataaatgagatggtcggatcattgtacaattgaaatcatatgcgatcataggcttttgtctatactgtt

SEQ ID NO: 30640 - DNA, 2847 bp, Muscodor strobelii
  misc_feature: SGI cDNA ID NO. 570540
  misc_feature: Reduced expression when VOC is produced
  misc_feature: Encodes the peptide sequence at SEQ ID NO 30641
atgcaagctctgtggtcccgaactgcggccgcgcaatcctcgtgctcgtgcagctgccgcctctgtctgccgcccaatgccgtagtgcgcaggtccgcgtcggcggcggccaggcggcgcgtcacgggcgccgacctggtcacggcctgctacaccaccatcatcggctccgccgttttcatcgatgcccgccacaagaacgagcgccgccgcgagctcgacgaccgcctcgaccgcgcaagggaagcggtcaagcatctgcccatcacgaccacgaccacgaccacgaacaccacatcatcatcgtcgtcatcaccattaacatcaacagcatccacgaaaacaacaccatacgcagtcgactcatcacctaccactacctcgatctcgacctcgacctcgacctcgactgcaaccatcacaacaccaacaccgctagagtccgctccttcagatcgcttcggctactacactcccgtcttcgaccgcatcgcctctcccccaggaaccatccgccacctcgccgtgcagagaagacaggcggcaaaacgacgcatcacatccgctgcaccaggcctaccagacgtcccagactttgaaactgactggcgcaagccgctggaccctcggcaagatgacggcggcagctggcggcggcccagacggcagcagtggctgcaggaccagcgcgactgggtcgacatcgaggcccagatcatggccgaggagctggatcccgagctggagctgcgcgagcccaaggaccaagtccagctcgccaagacctcatttgccgtcgtcgatctggtcgccgcgctgatgcagcagaacgcgaaacacagcctgggaagccggggaagtcgcggaagccaagtcctgcccagagtgcagcgcctgcaggccaccggcgagtatcccgccttctctctgcccgaggccgaccccgtaagcaccgccgacgtccgccagcagctcaacagagccgtgcggtccaccttcagatcccacctgcagtccaagctgtccacgccgtccaagccgtcctccgacaacgacaacgacaacgacatgctcggcaagatatgccacaacctgctggtcgccagcgtcccgcccaccatccacacctacaacatcctcaccctcggcttccaccgcgccggccgccccgacctggccaacgccgtcgtcgagtcctacctcagccgcacccgctggcccgccaccagcgccaccatccgctgcctgctcgcccactgccgcgccatcgacagcctcgacggcttccgccacacgacgctccgcatgaagggcctcgtcgacgacggcatgcatcacggcatcttccgcctcacctacccccccgacgccccctccgtttccggcttcttggcctgggcccacaggtactgcgcgcagaggaaacacggctgggtcgtccgcacgcagagggatgacctgcacttcctcgacatcgagaagacgtggctgcactttggcgagctcgcccatgcttgcaaccccttcgtcgcttggctgcgccacagcagcgccatccgcccggagtctcttctcggcctcgtgcgcgcttgtgtggccgagtccgacacagcggtcgcccgcaagttagtcatcgccatcgtcaagcacttcaacaacttcagcatcctgctcagccgcatgttccaggccaacacgacgcatttctgtcgagaggtcgtctggcacctccaggagatgctcgctatgtgctgggggcaccatggtgagtatttcaagggcagatggatgaaatatagccccggggccgagaggttgcaggagtggctcccaacggtagacattgagctacagctcagagaacacgccaagttgcgtctggctcctacgttgcgcaccattctcggctccgacgagcccctcctccgccggcttgagaacgcgatccagcacctggacaaagccccgcggaaacaggcagcgagccgcatttcgctcacccagcgctatgcagacgcccgccgagagcatatcaggatatccatcaacacaaggtttgctgacatggaagagacaactcggtggctcatggccgccgccagaacggctatcatctactatcggactgggtatcaaatggaccctgccggtctcctgttccgaggactcagaaccaacaagcttcagcgccatcaacagctggcgcttgccgaagctgtccaccatatcgacatcacgagacccacattgaaccgtcgagacctcaaggagatgctactaagaagatttcccatccgatcactcctcgaccaactcctagatacgagacgaggagactggcccctgactaccaatactctggcatccttcttcgaccccgaagcaattgcgcgtacaccgggtgattcggtagccggaagaaagatgcatgggtcgcttactcgccaaatcactgaggctgtgcttcggatcgaggatgaaatccgcgcagtcctcttcgcctatctcccacggacgtatgtcaatagagcgctagcttaccacggcggctactacaatatatccttagagcgtcttgtcgattatcatatgcggcgcatcgactacaatatagccaagggctggattgaaccccccgcagtcccttggtacagtaataaccaggaagctctgtcctcccttgaagacggcgctatttcccaggaggcacttatagagctgaagcacaagatagtggaggctatacctaacgaaagacatgatcacgatccggcagaggctgcattgatcattggagtagatgagatccagagcgagatggcccacagcacaaacggcttctgttga

SEQ ID NO: 30641 - protein, 948 aa, Muscodor strobelii
  misc_feature: SGI Peptide ID NO. 570540
  misc_feature (1)..(562): NCBI GI: 85110384 Blast Desc: NCU08504 [Neurospora crassa OR74A] gi|28925113|gb|EAA34197.1| [Neurospora crassa OR74A] gi|38524209|emb|CAE75676.1| [Neurospora crassa]
  misc_feature (291)..(584): NCBI GI: 156060471 Blast Desc: SS1G_02374 [Sclerotinia sclerotiorum 1980] gi|154699782|gb|EDN99520.1| SS1G_02374 [Sclerotinia sclerotiorum 1980]
  misc_feature (305)..(558): NCBI GI: 145606034 Blast Desc: MGG_06706 [Magnaporthe grisea 70-15] gi|145013776|gb|EDJ98417.1| MGG_06706 [Magnaporthe grisea 70-15]
  misc_feature (238)..(558): NCBI GI: 116204589 Blast Desc: CHGG_10178 [Chaetomium globosum CBS 148.51] gi|88176306|gb|EAQ83774.1| CHGG_10178 [Chaetomium globosum CBS 148.51]
  misc_feature (300)..(633): NCBI GI: 171689214 Blast Desc: protein product [Podospora anserina] gi|170944569|emb|CAP70680.1| protein product [Podospora anserina]
  misc_feature (291)..(524): NCBI GI: 154311925 Blast Desc: BC1G_05996 [Botryotinia fuckeliana B05.10] gi|150850646|gb|EDN25839.1| BC1G_05996 [Botryotinia fuckeliana B05.10]
  misc_feature (245)..(578): NCBI GI: 261352995 Blast Desc: conserved [Verticillium albo-atrum VaMs.102]
  misc_feature (1)..(159): NCBI GI: 239611915 Blast Desc: conserved [Ajellomyces dermatitidis ER-3]
  misc_feature (1)..(159): NCBI GI: 261201784 Blast Desc: conserved [Ajellomyces dermatitidis SLH14081] gi|239590203|gb|EEQ72784.1| conserved [Ajellomyces dermatitidis SLH14081]
  misc_feature (229)..(569): NCBI GI: 256730599 Blast Desc: NECHADRAFT_74284 [Nectria haematococca mpVI 77-13-4]
  misc_feature: Useful for introducing or modulating the production of volatile compounds
MQALWSRTAAAQSSCSCSCRLCLPPNAVVRRSASAAARRRVTGADLVTACYTTIIGSAVFIDARHKNERRRELDDRLDRAREAVKHLPITTTTTTTNTTSSSSSSPLTSTASTKTTPYAVDSSPTTTSISTSTSTSTATITTPTPLESAPSDRFGYYTPVFDRIASPPGTIRHLAVQRRQAAKRRITSAAPGLPDVPDFETDWRKPLDPRQDDGGSWRRPRRQQWLQDQRDWVDIEAQIMAEELDPELELREPKDQVQLAKTSFAVVDLVAALMQQNAKHSLGSRGSRGSQVLPRVQRLQATGEYPAFSLPEADPVSTADVRQQLNRAVRSTFRSHLQSKLSTPSKPSSDNDNDNDMLGKICHNLLVASVPPTIHTYNILTLGFHRAGRPDLANAVVESYLSRTRWPATSATIRCLLAHCRAIDSLDGFRHTTLRMKGLVDDGMHHGIFRLTYPPDAPSVSGFLAWAHRYCAQRKHGWVVRTQRDDLHFLDIEKTWLHFGELAHACNPFVAWLRHSSAIRPESLLGLVRACVAESDTAVARKLVIAIVKHFNNFSILLSRMFQANTTHFCREVVWHLQEMLAMCWGHHGEYFKGRWMKYSPGAERLQEWLPTVDIELQLREHAKLRLAPTLRTILGSDEPLLRRLENAIQHLDKAPRKQAASRISLTQRYADARREHIRISINTRFADMEETTRWLMAAARTAIIYYRTGYQMDPAGLLFRGLRTNKLQRHQQLALAEAVHHIDITRPTLNRRDLKEMLLRRFPIRSLLDQLLDTRRGDWPLTTNTLASFFDPEAIARTPGDSVAGRKMHGSLTRQITEAVLRIEDEIRAVLFAYLPRTYVNRALAYHGGYYNISLERLVDYHMRRIDYNIAKGWIEPPAVPWYSNNQEALSSLEDGAISQEALIELKHKIVEAIPNERHDHDPAEAALIIGVDEIQSEMAHSTNGFC

SEQ ID NO: 30642 - DNA, 3480 bp, Muscodor strobelii
  misc_feature: SGI cDNA ID NO. 570541
  misc_feature: Elevated expression when VOC is produced
  misc_feature: Encodes the peptide sequence at SEQ ID NO 30643
atgaagtttgggagaaatcttcctcgtaaccaagtcccagaatgggcggcatcatacatcaattacaagggccttaagaagctgatcaaagccgcggtggaaacggccaagacgggggaggatgtcgacctagcagagttcttcttcgctctggaccgtaatctcgaagatgtggattccttttataacaagaaatttgccgaggctcatcgacgccttaagcttttgcaggaccgctatggtcgaagcccggatgtcgttgcagagcttgatgagcaagaaaccgaagagttgatgactgctctgcttgagattcggagtcagctgaggaatttggcgtggttcggtgagatcaatcgacgaggattcgtcaagatcaccaagaagctggacaagagagttcccaactccacgacaaaagatcgatatatcaccaccaaggtcgatccgaaacctttcgccaaagatttcacagtggggagactgatcaatgaaatcaacaaatggctatctgtgctgggagatgctcaaaatgttgatgatgcgaggtccgataaatcgtcaagatctgtcagatctcttggaagggcaacagttaaggctctgccgagtgtgcccaaaaccgtgcttgacgcactagacaccgccattagagaagacaatgcagtagcactggaaagtagcttgtccgacagcaagtttgaggcatcttcacccgcatctcaaggcttgttacatagcctgctccaacgatgcatcgcctctttctccaagaagtgcatcgcattcatactaccacagcttcagaccctctacgagcctgacgatctgaatgagcgaaacgcgatccatcgactcgtcatcaatatcggacgtgccaaatcttcgtctatcactggcgatttggaggccaatgcagtagctctgcctgtaaaatctcactacaacacacattatgtcgcgcccccttcccagactattgccacgtcgtctcttcccggtcatgatttcatagcaactgttcttctcacaaaagcagatgagagtgttcaacttttggactacttcctcgacgctctgtcgcccgagcagcgttctgcattgagcaccccagactctctgggtcgcattcctctccactatgcagctcactatggttttgttgtgctctgtgagatcatcatggaaaagatgcagaaatggggccaattcaatgtcacaaacggaatagatgcgccggagtggcaggatgaagaaggtaatgcgcctctgcatcttgcggtgatgggggggcatccgctcacgactaagtgtcttttgcaaggagagaactggcagggcttcgaccatgtccacagaaagccagtatcgaagtcgagcgccgtcttggctatggccacgagatccaactacgtacgaattgtcaagttactcgtggaagccgggatggacatcaattggcaggacgggacgggtgaaacggctttacacaaggcggcgcgctttggtcacgctgagtgtgctaagattctgattgagggctcagccgaacagaaggcagacctggacttgacggaacagtcatttgcgtggaatgcccttcatattgccgccgtagacggacacatccaagtagcacagcttcttgtcaatgccggtatcgatgtctctagggccgattcgtttgggtggacagccaaagaacacgcaaccttacgtggtcatctggatgtcgctggactcttggaatcggagaccgccttcgttccacaacctatcaaagattccgaagatgtggactcttcatcccctcgctcttcttcaccaaccgagaatccttcgttggaggatagaagatccaatggtagcaccagggtggccgaccctatcaagtctttcggtcatcgatatctgacagacgaatgtttggtcatggttagcttggggtcgatggatatgcgaaaggacatcgagcccgtaaaattagaccgtgtacctctcgcggaggcgcacacgaacgagctcgataccgcgctttccgtagtcatttcggcccaaggtgcccaaggcgatcctacgacgatcgacttgccggtgcacgacaatatctctactgaaccgattctgttccgcacctcagatgcctccaaggtgaagatgctctttgacatcgtgccaacgtatgccggcaatgagaagaagaaaatcggccgagccgtggcattactgtcatccgtccgtccgagcataggcgcgaagcggatgaacctgcagggcgacgtgtgtgtacccatcatgaattccaacctcgaggttatcggcgcggtcaacttcaactttctcatcatcactccattcacgcatcctaacatggagatcaactcgcagcagacgtattggaagaagctagattccacgatgctgatcgggcaccgtggtctcggcaagaatttcctggcgaacaagtcgctgcaattaggagagaacacggtatcctcgttcatcgctgccgccaatctgggggcgcaatacgtcgagttcgacgtccagctcactaaagaccacgtcccggtcatctatcacgacttcctcgtcagcgagaccggcatcgacgctcctgtccatacgctgacactcgagcaatttcttcacatcaatggagagcagaacggccgatcgcggcgcgaatcgcccgaacgacgtcgaccagccgatgacgtggagcctgcgtctcagggtccggacatgccgggacggtacagatccatgtcgatggacttctcgacgaagaaggagaagcaagatcgcctgctggacgagcgcatgaagtacacgctcaactacaagcaatcgggctacaaagccaacacgcgaggcaacttcgtgcaggcgccgttcgcgacgctcgaggagctctttaggaaagtgcccgagacggtcgggttcaacatcgagatgaaatacccgatgctcctcgagtcggaacagcacgacatggacacgtacgcgatcgagctgaactcgttctgcgacgtggtactcacgaaggtgtacgagatggcacgcggcagacatatcatcttctcgagtttcaacccggacatatgtctctgcttgtcgttcaaacagccaagtatcccgatcatgttcctcacggatgcgggagccgaggaagtcagtgacatccgggcgagttccctccaagaggcgatccggtttgcgggacggtggaacttattggggattgtgagcaatgcgacggtttttgtcaaggcgccgcggctcgtgagggtggtgaaacagagtgggcttgtgtgtgttagttatggggttgagaataatgatgaggctttggtcaagaaacaagtcaacgagggcatcgacgcagtcatcgtcgatagcgtgctggcgatccgacgcggcttgacgaaagagagctcgcctgatcgaggggttctacgggaaggtagtgaagactga

SEQ ID NO: 30643 - protein, 1159 aa, Muscodor strobelii
  misc_feature: SGI Peptide ID NO. 570541
  misc_feature (491)..(527): Pfam Id: PF00023 Pfam Desc: Ankyrin repeat
  misc_feature (811)..(1137): Pfam Id: PF03009 Pfam Desc: Glycerophosphoryl diester phosphodiesterase family
  misc_feature (1)..(148): Pfam Id: PF03105 Pfam Desc: SPX domain
  misc_feature (529)..(561): Pfam Id: PF00023 Pfam Desc: Ankyrin repeat
  misc_feature (1)..(1145): NCBI GI: 85083718 Blast Desc: NCU01747 [Neurospora crassa OR74A] gi|8218222|emb|CAB92623.1| related to multifunctional cyclin-dependent kinase PHO85 [Neurospora crassa] NCU01747 crassa
  misc_feature (1)..(1148): NCBI GI: 256730600 Blast Desc: [Nectria haematococca mpVI 77-13-4]
  misc_feature (1)..(1143): NCBI GI: 116204591 Blast Desc: CHGG_10179 [Chaetomium globosum CBS 148.51] gi|88176307|gb|EAQ83775.1| CHGG_10179 [Chaetomium globosum CBS 148.51]
  misc_feature (1)..(1143): NCBI GI: 145606038 Blast Desc: MGG_06704 [Magnaporthe grisea 70-15] gi|145013778|gb|EDJ98419.1| MGG_06704 [Magnaporthe grisea 70-15]
  misc_feature (1)..(1148): NCBI GI: 46109182 Blast Desc: FG01473.1 [Gibberella zeae PH-1]
  misc_feature (6)..(1142): NCBI GI: 171689228 Blast Desc: protein product [Podospora anserina] gi|170944576|emb|CAP70687.1| protein product [Podospora anserina]
  misc_feature (1)..(1146): NCBI GI: 156060129 Blast Desc: SS1G_02203 [Sclerotinia sclerotiorum 1980] gi|154699611|gb|EDN99349.1| SS1G_02203 [Sclerotinia sclerotiorum 1980]
  misc_feature (7)..(1146): NCBI GI: 154315457 Blast Desc: BC1G_04301 [Botryotinia fuckeliana B05.10] gi|150847241|gb|EDN22434.1| BC1G_04301 [Botryotinia fuckeliana B05.10]
  misc_feature (1)..(1142): NCBI GI: 189210824 Blast Desc: glycerophosphodiester phosphodiesterase GDE1 [Pyrenophora tritici-repentis Pt-1C-BFP] gi|187977836|gb|EDU44462.1| glycerophosphodiester GDE1 Pt-1C-BFP]
  misc_feature (1)..(1143): NCBI GI: 212529246 Blast Desc: glycerophosphocholine phosphodiesterase Gde1, [Penicillium marneffei ATCC 18224] gi|210074178|gb|EEA28265.1| glycerophosphocholine phosphodiesterase Gde1, [Penicillium ATCC
  misc_feature (1)..(1146): SWISSPROT Homolog: EC 3.1.4.46 Glycerophosphodiester phosphodiesterase
  misc_feature: Useful for introducing or modulating the production of volatile compounds
MKFGRNLPRNQVPEWAASYINYKGLKKLIKAAVETAKTGEDVDLAEFFFALDRNLEDVDSFYNKKFAEAHRRLKLLQDRYGRSPDVVAELDEQETEELMTALLEIRSQLRNLAWFGEINRRGFVKITKKLDKRVPNSTTKDRYITTKVDPKPFAKDFTVGRLINEINKWLSVLGDAQNVDDARSDKSSRSVRSLGRATVKALPSVPKTVLDALDTAIREDNAVALESSLSDSKFEASSPASQGLLHSLLQRCIASFSKKCIAFILPQLQTLYEPDDLNERNAIHRLVINIGRAKSSSITGDLEANAVALPVKSHYNTHYVAPPSQTIATSSLPGHDFIATVLLTKADESVQLLDYFLDALSPEQRSALSTPDSLGRIPLHYAAHYGFVVLCEIIMEKMQKWGQFNVTNGIDAPEWQDEEGNAPLHLAVMGGHPLTTKCLLQGENWQGFDHVHRKPVSKSSAVLAMATRSNYVRIVKLLVEAGMDINWQDGTGETALHKAARFGHAECAKILIEGSAEQKADLDLTEQSFAWNALHIAAVDGHIQVAQLLVNAGIDVSRADSFGWTAKEHATLRGHLDVAGLLESETAFVPQPIKDSEDVDSSSPRSSSPTENPSLEDRRSNGSTRVADPIKSFGHRYLTDECLVMVSLGSMDMRKDIEPVKLDRVPLAEAHTNELDTALSVVISAQGAQGDPTTIDLPVHDNISTEPILFRTSDASKVKMLFDIVPTYAGNEKKKIGRAVALLSSVRPSIGAKRMNLQGDVCVPIMNSNLEVIGAVNFNFLIITPFTHPNMEINSQQTYWKKLDSTMLIGHRGLGKNFLANKSLQLGENTVSSFIAAANLGAQYVEFDVQLTKDHVPVIYHDFLVSETGIDAPVHTLTLEQFLHINGEQNGRSRRESPERRRPADDVEPASQGPDMPGRYRSMSMDFSTKKEKQDRLLDERMKYTLNYKQSGYKANTRGNFVQAPFATLEELFRKVPETVGFNIEMKYPMLLESEQHDMDTYAIELNSFCDVVLTKVYEMARGRHIIFSSFNPDICLCLSFKQPSIPIMFLTDAGAEEVSDIRASSLQEAIRFAGRWNLLGIVSNATVFVKAPRLVRVVKQSGLVCVSYGVENNDEALVKKQVNEGIDAVIVDSVLAIRRGLTKESSPDRGVLREGSED

SEQ ID NO: 30644 - DNA, 7880 bp, Muscodor strobelii
  misc_feature: SGI EST ID NO. CUFF.72873.1
  misc_feature: Variant of the nucleotide sequence at SEQ ID NO 30642
cgcgttgaggtagttgaagagcctgaaacgaggaacatgtacccgaggtcacgtatcagacatggcgctggaaaaggggacgagttttgacttgctagctcttatcggtacctgaaggtgatgtcactcctgctgtcgattttgtgagggctcgcgaggggcgtggctgcgatacagtttggaatgtgtcaagttccaacgacatcagatgccgatagcaacatgccttcacccatcgaccctttctttgtgcatccgtacagtccgtgataggaatttttcccattctacacctatccgagcccgcgactaccccttctctttaagttgggacttctttcagaaaacgaattcctctcgaattcaccactatcgtccccgaccgcccacccacctcctgcaccatgcagatacctatcctgtaacgtcatccctcttcaaggggccaaggactgattgcatctacgtggagaagacgaacaagagtcgataaggagcgacgatatttcgaacatatctgaggctgaccaatctggtgagatgtactagaattctgctcgtctcatcgctggcttggctgcacgtcacacctgaacttctctcgcctacagcggttatcggcataaccgcatacgtgtcgattcgtcaaaccaccggagagtcgagtcgcgggtggggagttctccttttccagagccatcgtttcactggtagcacgagatgaagtttgggagaaatcttcctcgtaaccaagtcccagaatgggcggcatcatacatcaattacaagggccttaagaagctgatcaaagccgcggtggaaacggccaagacgggggaggatgtcgacctagcagagttcttcttcgctctggaccgtaatctcgaagatgtggattccttttataacaagaaatttgccgaggctcatcgacgccttaagcttttgcaggaccgctatggtcgaagcccggatgtcgttgcagagcttgatgagcaagaaaccgaagagttgatgactgctctgcttgagattcggagtcagctgaggaatttggcgtggttcggtgagatcaatcgacgaggattcgtcaagatcaccaagaagctggacaagagagttcccaactccacgacaaaagatcgatatatcaccaccaaggtcgatccgaaacctttcgccaaagatttcacagtggggagactgatcaatgaaatcaacaaatggctatctgtgctgggagatgctcaaaatgttgatgatgcgaggtccgataaatcgtcaagatctgtcagatctcttggaagggcaacagttaaggctctgccgagtgtgcccaaaaccgtgcttgacgcactagacaccgccattagagaagacaatgcagtagcactggaaagtagcttgtccgacagcaagtttgaggcatcttcacccgcatctcaaggcttgttacatagcctgctccaacgatgcatcgcctctttctccaagaagtgcatcgcattcatactaccacagcttcagaccctctacgagcctgacgatctgaatgagcgaaacgcgatccatcgactcgtcatcaatatcggacgtgccaaatcttcgtctatcactggcgatttggaggccaatgcagtagctctgcctgtaaaatctcactacaacacacattatgtcgcgcccccttcccagactattgccacgtcgtctcttcccggtcatgatttcatagcaactgttcttctcacaaaagcagatgagagtgttcaacttttggactacttcctcgacgctctgtcgcccgagcagcgttctgcattgagcaccccagactctctgggtcgcattcctctccactatgcagctcactatggttttgttgtgctctgtgagatcatcatggaaaagatgcagaaatggggccaattcaatgtcacaaacggaatagatgcgccggagtggcaggatgaagaaggtaatgcgcctctgcatcttgcggtgatgggggggcatccgctcacgactaagtgtcttttgcaaggagagaactggcagggcttcgaccatgtccacagaaagccagtatcgaagtcgagcgccgtcttggctatggccacgagatccaactacgtacgaattgtcaagttactcgtggaagccgggatggacatcaattggcaggacgggacgggtgaaacggctttacacaaggcggcgcgctttggtcacgctgagtgtgctaagattctgattgagggctcagccgaacagaaggcagacctggacttgacggaacagtcatttgcgtggaatgcccttcatattgccgccgtagacggacacatccaagtagcacagcttcttgtcaatgccggtatcgatgtctctagggccgattcgtttgggtggacagccaaagaacacgcaaccttacgtggtcatctggatgtcgctggactcttggaatcggagaccgccttcgttccacaacctatcaaagattccgaagatgtggactcttcatcccctcgctcttcttcaccaaccgagaatccttcgttggaggatagaagatccaatggtagcaccagggtggccgaccctatcaagtctttcggtcatcgatatctgacagacgaatgtttggtcatggttagcttggggtcgatggatatgcgaaaggacatcgagcccgtaaaattagaccgtgtacctctcgcggaggcgcacacgaacgagctcgataccgcgctttccgtagtcatttcggcccaaggtgcccaaggcgatcctacgacgatcgacttgccggtgcacgacaatatctctactgaaccgattctgttccgcacctcagatgcctccaaggtgaagatgctctttgacatcgtgccaacgtatgccggcaatgagaagaagaaaatcggccgagccgtggcattactgtcatccgtccgtccgagcataggcgcgaagcggatgaacctgcagggcgacgtgtgtgtacccatcatgaattccaacctcgaggttatcggcgcggtcaacttcaactttctcatcatcactccattcacgcatcctaacatggagatcaactcgcagcagacgtattggaagaagctagattccacgatgctgatcgggcaccgtggtctcggcaagaatttcctggcgaacaagtcgctgcaattaggagagaacacggtatcctcgttcatcgctgccgccaatctgggggcgcaatacgtcgagttcgacgtccagctcactaaagaccacgtcccggtcatctatcacgacttcctcgtcagcgagaccggcatcgacgctcctgtccatacgctgacactcgagcaatttcttcacatcaatggagagcagaacggccgatcgcggcgcgaatcgcccgaacgacgtcgaccagccgatgacgtggagcctgcgtctcagggtccggacatgccgggacggtacagatccatgtcgatggacttctcgacgaagaaggagaagcaagatcgcctgctggacgagcgcatgaagtacacgctcaactacaagcaatcgggctacaaagccaacacgcgaggcaacttcgtgcaggcgccgttcgcgacgctcgaggagctctttaggaaagtgcccgagacggtcgggttcaacatcgagatgaaatacccgatgctcctcgagtcggaacagcacgacatggacacgtacgcgatcgagctgaactcgttctgcgacgtggtactcacgaaggtgtacgagatggcacgcggcagacatatcatcttctcgagtttcaacccggacatatgtctctgcttgtcgttcaaacagccaagtatcccgatcatgttcctcacggatgcgggagccgaggaagtcagtgacatccgggcgagttccctccaagaggcgatccggtttgcgggacggtggaacttattggggattgtgagcaatgcgacggtttttgtcaaggcgccgcggctcgtgagggtggtgaaacagagtgggcttgtgtgtgttagttatggggttgagaataatgatgaggctttggtcaagaaacaagtcaacgagggcatcgacgcagtcatcgtcgatagcgtgctggcgatccgacgcggcttgacgaaagagagctcgcctgatcgaggggttctacgggaaggtagtgaagactgagtttcccaagatgttgatgcgtgttttgtatcgttagacttcgagagagacatagggacgatagaatgggcacatgtaccaatgggaagataattacgtaacatggctagtcatccggatgcgaaaggaagtcgaataatacgagacgcatcaacgttttgtctcatctgccgtagttcacattcgcgttcatgtgtcgaagatgccttgatttatctatcaagatgatcgtagttgcgatattcatatttggaattcatgtttcatttgatatgttttacaaattgatgatgaatacgtacaggtgacctctatctatctaaatatgtgcatggcgtacatagtggtacatgtatgtagatacagtaggtagtgacgcaggtaggcatgtgttttgtacagcacatttctctccgagaaaccccttcataacccggtatgcgtcttcctattacaaacagcccggactctctgtccattgctgtcctcgtgcgagcagtcgattgttgatgtactaggatggatatagtcggtcctcaacagaagccgtttgtgctgtgggccatctcgctctggatctcatctactccaatgatcaatgcagcctctgccggatcgtgatcatgtctttcgttaggtatagcctccactatcttgtgcttcagctctataagtgcctcctgggaaatagcgccgtcttcaagggaggacagagcttcctggttattactgtaccaagggactgcggggggttcaatccagcccttggctatattgtagtcgatgcgccgcatatgataatcgacaagacgctctaaggatatattgtagtagccgccgtggtaagctagcgctctattgacatacgtccgtgggagataggcgaagaggactgcgcggatttcatcctcgatccgaagcacagcctcagtgatttggcgagtaagcgacccatgcatctttcttccggctaccgaatcacccggtgtacgcgcaattgcttcggggtcgaagaaggatgccagagtattggtagtcaggggccagtctcctcgtctcgtatctaggagttggtcgaggagtgatcggatgggaaatcttcttagtagcatctccttgaggtctcgacggttcaatgtgggtctcgtgatgtcgatatggtggacagcttcggcaagcgccagctgttgatggcgctgaagcttgttggttctgagtcctcggaacaggagaccggcagggtccatttgatacccagtccgatagtagatgatagccgttctggcggcggccatgagccaccgagttgtctcttccatgtcagcaaaccttgtgttgatggatatcctgatatgctctcggcgggcgtctgcatagcgctgggtgagcgaaatgcggctcgctgcctgtttccgcggggctttgtccaggtgctggatcgcgttctcaagccggcggaggaggggctcgtcggagccgagaatggtgcgcaacgtaggagccagacgcaacttggcgtgttctctgagctgtagctcaatgtctaccgttgggagccactcctgcaacctctcggccccggggctatatttcatccatctgcccttgaaatactcaccatggtgcccccagcacatagcgagcatctcctggaggtgccagacgacctctcgacagaaatgcgtcgtgttggcctggaacatgcggctgagcaggatgctgaagttgttgaagtgcttgacgatggcgatgactaacttgcgggcgaccgctgtgtcggactcggccacacaagcgcgcacgaggccgagaagagactccgggcggatggcgctgctgtggcgcagccaagcgacgaaggggttgcaagcatgggcgagctcgccaaagtgcagccacgtcttctcgatgtcgaggaagtgcaggtcatccctctgcgtgcggacgacccagccgtgtttcctctgcgcgcagtacctgtgggcccaggccaagaagccggaaacggagggggcgtcgggggggtaggtgaggcggaagatgccgtgatgcatgccgtcgtcgacgaggcccttcatgcggagcgtcgtgtggcggaagccgtcgaggctgtcgatggcgcggcagtgggcgagcaggcagcggatggtggcgctggtggcgggccagcgggtgcggctgaggtaggactcgacgacggcgttggccaggtcggggcggccggcgcggtggaagccgagggtgaggatgttgtaggtgtggatggtgggcgggacgctggcgaccagcaggttgtggcatatcttgccgagcatgtcgttgtcgttgtcgttgtcggaggacggcttggacggcgtggacagcttggactgcaggtgggatctgaaggtggaccgcacggctctgttgagctgctggcggacgtcggcggtgcttacggggtcggcctcgggcagagagaaggcgggatactcgccggtggcctgcaggcgctgcactctgggcaggacttggcttccgcgacttccccggcttcccaggctgtgtttcgcgttctgctgcatcagcgcggcgaccagatcgacgacggcaaatgaggtcttggcgagctggacttggtccttgggctcgcgcagctccagctcgggatccagctcctcggccatgatctgggcctcgatgtcgacccagtcgcgctggtcctgcagccactgctgccgtctgggccgccgccagctgccgccgtcatcttgccgagggtccagcggcttgcgccagtcagtttcaaagtctgggacgtctggtaggcctggtgcagcggatgtgatgcgtcgttttgccgcctgtcttctctgcacggcgaggtggcggatggttcctgggggagaggcgatgcggtcgaagacgggagtgtagtagccgaagcgatctgaaggagcggactctagcggtgttggtgttgtgatggttgcagtcgaggtcgaggtcgaggtcgagatcgaggtagtggtaggtgatgagtcgactgcgtatggtgttgttttcgtggatgctgttgatgttaatggtgatgacgacgatgatgatgtggtgttcgtggtcgtggtcgtggtcgtgatgggcagatgcttgaccgcttcccttgcgcggtcgaggcggtcgtcgagctcgcggcggcgctcgttcttgtggcgggcatcgatgaaaacggcggagccgatgatggtggtgtagcaggccgtgaccaggtcggcgcccgtgacgcgccgcctggccgccgccgacgcggacctgcgcactacggcattgggcggcagacagaggcggcagctgcacgagcacgaggattgcgcggccgcagttcgggaccacagagcttgcatagctcgcgcatgtcgtcgcccttgtcgtcggatgtgtcgtcgtcggatcggtggactagagcatgttgcctgcgcggctcaattggccctgacggccgcagattgcactgtagtgtagcgtgtcgagtcgtcttgatcaccgcggcatcgtcgtccagcctcaatggtgctcgcgaattcgggaattggcaggttgatgaccttaaggaaggttgaaaagtgatgtggaatatgggccgatgcgtgaaaagtcgagagcttgggcctggagcttcgccggctgctggcacggaatca

SEQ ID NO: 30645 - DNA, 2559 bp, Muscodor strobelii
  misc_feature: SGI cDNA ID NO. 570542
  misc_feature: Reduced expression when VOC is produced
  misc_feature: Encodes the peptide sequence at SEQ ID NO 30646
atggctttccagactccggccgtcgcctccatcagccaggccacctcggagctgtggccgtcgctgcgcaacaccttggccgtccccttccgtgccaggagatcgtccgtctcgacaccctcacaagcccagctccccgtccgcgggcccgcgcccacacccacacagcccatacagcccaagcccgtcgctgcttcgccgatatccgggctccccgacttcatgcgacacgttcgcctcgacgccctggccgtccctccgagcgcgcagactatggctgctcctcctctcgacatccggacctccatctccacgatgcaccgcgtggctctgatggcctcgaaccccgtcgtccacaggctgtaccctcaccacctgctgcggcgatccatgtcatccatgtcctccatgtctaccgcctctcctgctctccggcccacgttcccgttcccgtctccgagtcccttgtcccacatctcgccgctgcaacggagagacttccagtcgggcggcctgtcgaggaacctgctggcgcgcatggaggagtctgctaaccgcaacccgaccagcgccacggcccagaacgccttctaccaggcgctgctcaaggccaacatgcccgccatcatcatcgagcgctaccagtccaaccgcttcgccaccaacgccgccaccaccgacgcctacaacaaggccatgaacatgctcgccccgaccgccgcccactcccacgcccacgcccactccgccgccgacatcgacgacaccgtcaagaacctgcccggcaccctcacttcgacccaggtccaggccgtctcccaggctctcgctgctcgctcccgcggtgccaacctcgccgtcgccaaggacgcaggaggtgtcgcggccaagggcaccaaggacggccctctccacgtggtcgtcgacgagtccgtcggcagctccgtcttccgctgggtcaagttcatcttctacttcgccctcgtcacctacctgagcctggtcgtcgtcaccctggccatcgagagcacctccatgttccggcggcccggtagcaaagccgtcgacagcgaggtcaaacccgagcagcagaaggcccgcttctccgacgtccacggcgccgacgaggccaaggaggagctggtcgacatggtcgagttcttgcgcaaccccgacaagttctcccagctcggaggcaagctgcccaagggtatcctcctggtcggccctcccggcaccggaaagaccctgctggcccgcgccgtcgctggcgaggctggcgtgcccttcttctacatgtctggcagtgagttcgatgaggtctacgtcggcgtcggtgctaagcgcgtgcgggatctcttcgccgctgccaaggccaagtctcccgccattgtcttcatcgacgagctcgacgccatcggcggccgccgtaacgccagggacgccaactacgtgaagcagacgctgaaccagctgttgactgagttggatgggtttgatcagtcggccaacgttattatcattggcgctaccaacttccccgacgcactcgacaaggctctcatccgtcctggccgtttcgatcgccacgtccaggtcgacctgcccgatgtccgcggccgtctcgccatcctgcagcaccacgccaagaagatcaaggccgagaaggatgtcgacttgaaggcgattgcacagtccacctctggcctctccggtgcggaactggagaacattgtcaaccaggccgctgtccatgcaagcaagaacaagtccaagtttgtcggcaagtgggatttcgactgggccaaagacaaggtcatcatgggcgccgagaggaagagcatggtcatttcggccaaggagaaggagatgacggcctatcacgaggccggacacgctctcatgcaactcctcagccaggaacatcacccgggtacgctctacaaggtcacggtattgcctcgcgggcctacgctcggccacacggcttggttgcccgagatggacaagttctcgtacaccatggccaactaccgggccagtatcgacgttgctcttggcggaaaactggcagaggagattgtatatggctcggaccaagtgaccagcggtgcctcatccgatttgcaaaatgcgacgcggagtgccttctccatggtggcatcttttggcatgtctgagaagctgggcaacatggagtactctagccgttacgacaagctaagcagcgaaaccaaggccctcgtggaatccgaagtgcagcggaccgtggatgaggcctacgagcggtgccggatcctgctgacgaagcaccgcaaggaactcgacctcctagccaaagcgctggtggactatgagacgttgagcaaagaggaagtggagaaggtcattcgaggcgaggcgctgcccaaccgcatgagcatgccgaaaggacctatggtcgtcccggccagtgctgcggccccgtcaccgggagctcccgaaccgcctgttgaaggctcaccaccacctcagccccctgttgcaccaccgcctggtgccccttccgagggaaaatag

SEQ ID NO: 30646 - protein, 852 aa, Muscodor strobelii
  misc_feature: SGI Peptide ID NO. 570542
  misc_feature (404)..(588): Pfam Id: PF00004 Pfam Desc: ATPase family associated with various cellular activities (AAA)
  misc_feature (404)..(535): Pfam Id: PF07728 Pfam Desc: ATPase family associated with various cellular activities (AAA)
  misc_feature (595)..(796): Pfam Id: PF01434 Pfam Desc: Peptidase family M41
  misc_feature (404)..(438): Pfam Id: PF07728 Pfam Desc: ATPase family associated with various cellular activities (AAA)
  misc_feature (111)..(816): NCBI GI: 12082995 Blast Desc: AF323913_1 intermembrane space AAA protease IAP-1 [Neurospora crassa] gi|12082997|gb|AAG48699.1|AF323914_1 intermembrane space AAA protease IAP-1 [Neurospora crassa] AAA
  misc_feature (110)..(816): NCBI GI: 116199775 Blast Desc: CHGG_08043 [Chaetomium globosum CBS 148.51] gi|88179322|gb|EAQ86790.1| CHGG_08043 [Chaetomium globosum CBS 148.51]
  misc_feature (71)..(824): NCBI GI: 46109186 Blast Desc: FG01475.1 [Gibberella zeae PH-1]
  misc_feature (7)..(816): NCBI GI: 164427356 Blast Desc: NCU03359 [Neurospora crassa OR74A] gi|157071709|gb|EAA27232.2| NCU03359 [Neurospora crassa OR74A]
  misc_feature (1)..(824): NCBI GI: 256730602 Blast Desc: [Nectria haematococca mpVI 77-13-4]
  misc_feature (75)..(817): NCBI GI: 171688928 Blast Desc: protein product [Podospora anserina] gi|170944426|emb|CAP70537.1| protein product [Podospora anserina]
  misc_feature (141)..(829): NCBI GI: 156054484 Blast Desc: SS1G_06090 [Sclerotinia sclerotiorum 1980] gi|154703870|gb|EDO03609.1| SS1G_06090 [Sclerotinia sclerotiorum 1980]
  misc_feature (1)..(828): NCBI GI: 258567738 Blast Desc: cell division protein ftsH [Uncinocarpus reesii 1704] gi|237906059|gb|EEP80460.1| cell division protein ftsH [Uncinocarpus reesii 1704]
  misc_feature (1)..(829): NCBI GI: 119500238 Blast Desc: intermembrane space AAA protease IAP-1 [Neosartorya fischeri NRRL 181] gi|119415041|gb|EAW24979.1| intermembrane space AAA protease IAP-1 [Neosartorya fischeri NRRL 181]
  misc_feature (129)..(838): NCBI GI: 212542291 Blast Desc: intermembrane space AAA protease IAP-1 [Penicillium marneffei ATCC 18224] gi|210066207|gb|EEA20300.1| intermembrane space AAA protease IAP-1 [Penicillium marneffei ATCC 18224]
  misc_feature: Useful for introducing or modulating the production of volatile compounds
MAFQTPAVASISQATSELWPSLRNTLAVPFRARRSSVSTPSQAQLPVRGPAPTPTQPIQPKPVAASPISGLPDFMRHVRLDALAVPPSAQTMAAPPLDIRTSISTMHRVALMASNPVVHRLYPHHLLRRSMSSMSSMSTASPALRPTFPFPSPSPLSHISPLQRRDFQSGGLSRNLLARMEESANRNPTSATAQNAFYQALLKANMPAIIIERYQSNRFATNAATTDAYNKAMNMLAPTAAHSHAHAHSAADIDDTVKNLPGTLTSTQVQAVSQALAARSRGANLAVAKDAGGVAAKGTKDGPLHVVVDESVGSSVFRWVKFIFYFALVTYLSLVVVTLAIESTSMFRRPGSKAVDSEVKPEQQKARFSDVHGADEAKEELVDMVEFLRNPDKFSQLGGKLPKGILLVGPPGTGKTLLARAVAGEAGVPFFYMSGSEFDEVYVGVGAKRVRDLFAAAKAKSPAIVFIDELDAIGGRRNARDANYVKQTLNQLLTELDGFDQSANVIIIGATNFPDALDKALIRPGRFDRHVQVDLPDVRGRLAILQHHAKKIKAEKDVDLKAIAQSTSGLSGAELENIVNQAAVHASKNKSKFVGKWDFDWAKDKVIMGAERKSMVISAKEKEMTAYHEAGHALMQLLSQEHHPGTLYKVTVLPRGPTLGHTAWLPEMDKFSYTMANYRASIDVALGGKLAEEIVYGSDQVTSGASSDLQNATRSAFSMVASFGMSEKLGNMEYSSRYDKLSSETKALVESEVQRTVDEAYERCRILLTKHRKELDLLAKALVDYETLSKEEVEKVIRGEALPNRMSMPKGPMVVPASAAAPSPGAPEPPVEGSPPPQPPVAPPPGAPSEGK

SEQ ID NO: 30647 - DNA, 3931 bp, Muscodor strobelii
  misc_feature: SGI EST ID NO. CUFF.72597.0
  misc_feature: Variant of the nucleotide sequence at SEQ ID NO 30645
ctggcagcagcagtcgcagtcttggacaacaagccaaatggcaatcgacaagacagtgatcaagccgtcatggagccgacgtaaaagttgggcaagtggttatgattagtactaattgagacggggcgagcattggaagcgcaagtggcatccggggggattccgcactctgcacaggcttgcactaaacaatcgagtgcaagttccaacggcttcttccaacgaggtttccaacctccggcgcggccagcagtcccacgacgtcttcactgcgtccaaccttgagcagggcttgctgtcgtactgcgcccgcgacactcgacactcgacttcacgccacttctctatttttctttttcctctctggcgcacacacatcgacttagggactagcaccacatcaccacatcactacatcttttcttgtcgctttagtctgccatcatcttggctgtttggttttgtttctactcatcctgccccggcacatttatcatcgcatcaaccacccaccccatggcttgaccctcgtcttactggtcaatcccgtctgctctacctcactcatccctacctccctacctccgacaacaacacgacttttaatctggtctagagacatcgttctgagtgccgcctcgcgtctcgcctggccgtcactggcccccccgaagtcgtcatggctttccagactccggccgtcgcctccatcagccaggccacctcggagctgtggccgtcgctgcgcaacaccttggccgtccccttccgtgccaggagatcgtccgtctcgacaccctcacaagcccagctccccgtccgcgggcccgcgcccacacccacacagcccatacagcccaagcccgtcgctgcttcgccgatatccgggctccccgacttcatgcgacacgttcgcctcgacgccctggccgtccctccgagcgcgcagactatggctgctcctcctctcgacatccggacctccatctccacgatgcaccgcgtggctctgatggcctcgaaccccgtcgtccacaggctgtaccctcaccacctgctgcggcgatccatgtcatccatgtcctccatgtctaccgcctctcctgctctccggcccacgttcccgttcccgtctccgagtcccttgtcccacatctcgccgctgcaacggagagacttccagtcgggcggcctgtcgaggaacctgctggcgcgcatggaggagtctgctaaccgcaacccgaccagcgccacggcccagaacgccttctaccaggcgctgctcaaggccaacatgcccgccatcatcatcgagcgctaccagtccaaccgcttcgccaccaacgccgccaccaccgacgcctacaacaaggccatgaacatgctcgccccgaccgccgcccactcccacgcccacgcccactccgccgccgacatcgacgacaccgtcaagaacctgcccggcaccctcacttcgacccaggtccaggccgtctcccaggctctcgctgctcgctcccgcggtgccaacctcgccgtcgccaaggacgcaggaggtgtcgcggccaagggcaccaaggacggccctctccacgtggtcgtcgacgagtccgtcggcagctccgtcttccgctgggtcaagttcatcttctacttcgccctcgtcacctacctgagcctggtcgtcgtcaccctggccatcgagagcacctccatgttccggcggcccggtagcaaagccgtcgacagcgaggtcaaacccgagcagcagaaggcccgcttctccgacgtccacggcgccgacgaggccaaggaggagctggtcgacatggtcgagttcttgcgcaaccccgacaagttctcccagctcggaggcaagctgcccaagggtatcctcctggtcggccctcccggcaccggaaagaccctgctggcccgcgccgtcgctggcgaggctggcgtgcccttcttctacatgtctggcagtgagttcgatgaggtctacgtcggcgtcggtgctaagcgcgtgcgggatctcttcgccgctgccaaggccaagtctcccgccattgtcttcatcgacgagctcgacgccatcggcggccgccgtaacgccagggacgccaactacgtgaagcagacgctgaaccagctgttgactgagttggatgggtttgatcagtcggccaacgttattatcattggcgctaccaacttccccgacgcactcgacaaggctctcatccgtcctggccgtttcgatcgccacgtccaggtcgacctgcccgatgtccgcggccgtctcgccatcctgcagcaccacgccaagaagatcaaggccgagaaggatgtcgacttgaaggcgattgcacagtccacctctggcctctccggtgcggaactggagaacattgtcaaccaggccgctgtccatgcaagcaagaacaagtccaagtttgtcggcaagtgggatttcgactgggccaaagacaaggtcatcatgggcgccgagaggaagagcatggtcatttcggccaaggagaaggagatgacggcctatcacgaggccggacacgctctcatgcaactcctcagccaggaacatcacccgggtacgctctacaaggtcacggtattgcctcgcgggcctacgctcggccacacggcttggttgcccgagatggacaagttctcgtacaccatggccaactaccgggccagtatcgacgttgctcttggcggaaaactggcagaggagattgtatatggctcggaccaagtgaccagcggtgcctcatccgatttgcaaaatgcgacgcggagtgccttctccatggtggcatcttttggcatgtctgagaagctgggcaacatggagtactctagccgttacgacaagctaagcagcgaaaccaaggccctcgtggaatccgaagtgcagcggaccgtggatgaggcctacgagcggtgccggatcctgctgacgaagcaccgcaaggaactcgacctcctagccaaagcgctggtggactatgagacgttgagcaaagaggaagtggagaaggtcattcgaggcgaggcgctgcccaaccgcatgagcatgccgaaaggacctatggtcgtcccggccagtgctgcggccccgtcaccgggagctcccgaaccgcctgttgaaggctcaccaccacctcagccccctgttgcaccaccgcctggtgccccttccgagggaaaatagacgacacgaaggaacgccgaacatctccatccgctaccagcatatgagatactttccatcatggtgcttcctcaggacttacccctgtggcagtggtgtgcagctcttctcctgttcagagcccgtcgtgtgattcagatggatactcctgtcccatggaatggcgagtaagagacttgccaggaggagatcatcattacgagatagagcgcaaagaaagcatagttttaccggcatagcgatgggacggaaacattgtcagattcgcatcttggaagcgagacctatcctggcgtcagccgtcggtcgactcgttacaagattcgaactgactgctcccctgtatcttatatatggttatgtacatgtgcatagctgtgagcgcgttatgggacagttgcactatgtgttcgtatctgcccggcaagctcgcacattgtatgaatagaataggaaaaatcgaaatctgataaatcttttttgttcatttcaatttgaccccctggctcctctagtgctcgtttaaaaatctgataagctgtgatctgattacctatataattgtctgatggtgacccgtgatctgtacatcatggcttctacatgtcactgctcgctactcctaaatgatgggtttaagtacgaatcctagtgaaatacgaggtagcaggtatagctctcatatcattttac

SEQ ID NO: 30648 - DNA, 3201 bp, Muscodor strobelii
  misc_feature: SGI cDNA ID NO. 570543
  misc_feature: Encodes the peptide sequence at SEQ ID NO 30649
atggcgaccctcgtcaacctgaacatgagcaacatgaataatgctatgaacggcgccgacgacgcgctgccgacgccgaagcagatccgcttcatcaacaaccagggccagccgccgaccaagcgccgccgcatcaacgccgcgtgcctgacctgccgcaagcgcaagacgcgctgtgccggcgagcagcccacctgctcgacctgcgagaacaacggccacgtctgtctcggctactcggacgtcgtcgacaagcgcaagcccggccccctcgacgacgccaccgccgacccctaccccgacggcgacccggagcccgagctgagacacgcccgcgatctgcacgaccttcgaaacggccatggccatggccacagcagtctcaatggcaatggcaacggcaacggcaacgacgacgcctccgggaccatgtcgggccgcacgtccaacacgccccacgactacgccacgccgctgctcccgcacaagaccgaggccgtcgactgggaggatgcccactcgcaaaagtcacagtcacagtcacagtcccagtcccagtcccagaccaccccgagacgagaggccatggcggcatcgtcggcatcgtcgtcgtcgcggccggccatcccgcgcaacacgtccttctcgaccgaggacggccgcagccccaacagccggtcgcccgtcatgcaccacagcgagggcggccaccgcgtgccctacttccgctacttcggccccaccgccatcgtccccggcttcaagcagatggtcgtcaaggtcagcgaccgccgccgcagctccatgtccatgtccgccaccgccacctcgcccagcgtcggctcctccatcgccgcgggcctgctctcgacgacgcagcagcccgacgtcgacctcgccaacgtcgacgacatccccgtctacgacatcaacgacccttcccccgtccacccgctcatcctcagcctcgtcgagaccttcttcctgcgcctcggctgcaactaccccttcctcaaccgcaacaagttccccaagctcgtccaggagaagcgcgtcgagcccatcctcgtcgacgccgtctgcgccctcgccgcccgcttctccgacgtcaccctcttcaagacctggaacgacggcaagctcgccaagtccgagtacggccacgtctgggcccagcgcgccaaggccgccaccgtcgacaccttcgcctgtccctccgtcgccgccgtccaggcttgtctgctgatggcctacgatggcttcggcgccgaccaggacagcgccctgtggatgtatctgggggtggcgatccgcatggccatcgacctcggcctgtccaaggaggacggcgtcaagtaccaaggccctaaggacccctggctgacccgttggatcgacaggcgcatggatgagttccacgaagaccggccagagggtgacgagcccactgtcactatcggccccgaagaacagagagagatcgagcaagagcgcatcgacactttctgggccgtcttcttcctcgatcgtgccatctcgtccggcaccggtcgtcctgtcacgctgagggctgatgatttcgatcttggtcttcccagatcgctggtgaagcacgagtcccagtggcccgacccatatgcgtcattgttgcacatcattcatctatacggccgagtctccgatgtcttgaacaacatcaaggagcccaaggatctcaccaaggacaagctcaaccgtctcgtcggcatggagaacgagctgaccagactgcaccagaagatggacccgcgcctgcgctttgatgctaacaacttccaagcgcatgtgaagaatacccatggcactactttcatcttgcttcatttttggttccacgccctgatcatagtcctacatcagccgacattgctcacatccaaaggcaccgtcgaccgcaagcatcagctcaaagcccacagtcgagaactgtccatgtcgagcgccaagaccattgccgacatcctagccttcgccgagctattggatcccagatgtttcatcggtaatcctttcacctcccaacccatttatatcgccgcctgtgcttttctgctcgagtccaaagtgagttcatcacagcccgactcgcagacggtgtcgccacctcccggactgaagagccaaggaccacataccggagaccaaaacagtgcctcgtccaagcatctcctattagcatcagcagcgctccagaactaccaactctgttacaaggccttaaagcagatgcacgcgtactggggtggagttagatatatactcaacgtgctggatcaaaagtcccatggcgaggaagactgcgagacattcacgacagaagaatatgaaagcaccaaacgctgtcgacgggatagtctgactccacggttcaccaagcccacggatttcccagcatcacccatgccagagagcgggccacctctcgcttggtcgctgactggcacgaccaactctcccaactcgagccttaccctcctcttccatacgcaaggcaatgttggaggccctaccagccatcaccctggaccgccgcagcaggtcgcgccacagcccccacagcaagcttcgagtcccgcgaccgcacccacaccaccgggcaatatgatatacgatcccatccggcagagcctcccggagactcccatgtacccgccagcctatccgcaacccaacacgtcggcgttgcggcactctgtccgaggtgcaaatgcaacgtcacgctctagggggcagatccgcttcagcgacatgccccaggacgatggcatgcccacgacatcggacagcacgaagatgggtgtcacatcgcaggcaggtcctgggctgtccaacatgtcctacacacccgcaacgcaaacatcttcgtctgggtttgagccacaaggcgcctacctcacgagcgcctcgccttccacgagcacaccatcccagacaatgggtaccaatggccacgccataccgggtgcatacgccaccgcggcggacgggttctactcgtttgtcggagcgccgggctacgacctgcatctattgacgtatgacaacgagacggacatcggccagcatctatcgagctttgagcacacggacatgatgagttggtgcggcgactactttccaaacgacgtttttgggctctattcgggggccgatggcttatga

SEQ ID NO: 30649 - protein, 1066 aa, Muscodor strobelii
  misc_feature: SGI Peptide ID NO. 570543
  misc_feature (47)..(86): Pfam Id: PF00172 Pfam Desc: Fungal Zn(2)-Cys(6) binuclear cluster domain
  misc_feature (406)..(539): Pfam Id: PF04082 Pfam Desc: Fungal specific transcription factor domain
  misc_feature (488)..(539): Pfam Id: PF04082 Pfam Desc: Fungal specific transcription factor domain
  misc_feature (406)..(448): Pfam Id: PF04082 Pfam Desc: Fungal specific transcription factor domain
  misc_feature (9)..(1064): NCBI GI: 256730511 Blast Desc: NECHADRAFT_98518 [Nectria haematococca mpVI 77-13-4]
  misc_feature (29)..(1059): NCBI GI: 46109512 Blast Desc: FG01638.1 [Gibberella zeae PH-1]
  misc_feature (193)..(917): NCBI GI: 116205117 Blast Desc: CHGG_10442 [Chaetomium globosum CBS 148.51] gi|88176570|gb|EAQ84038.1| CHGG_10442 [Chaetomium globosum CBS 148.51]
  misc_feature (198)..(1060): NCBI GI: 261357234 Blast Desc: pathway-specific nitrogen regulator [Verticillium albo-atrum VaMs.102]
  misc_feature (237)..(913): NCBI GI: 171689568 Blast Desc: protein product [Podospora anserina] gi|170944746|emb|CAP70857.1| protein product [Podospora anserina]
  misc_feature (27)..(892): NCBI GI: 156065567 Blast Desc: SS1G_00794 [Sclerotinia sclerotiorum 1980] gi|154691653|gb|EDN91391.1| SS1G_00794 [Sclerotinia sclerotiorum 1980]
  misc_feature (23)..(942): NCBI GI: 9367493 Blast Desc: related to pathway-specific nitrogen regulator [Neurospora crassa]
  misc_feature (23)..(942): NCBI GI: 164424818 Blast Desc: NCU05411 [Neurospora crassa OR74A] gi|157070674|gb|EAA34263.2| NCU05411 [Neurospora crassa OR74A]
  misc_feature (209)..(1059): NCBI GI: 39943856 Blast Desc: MGG_03939 [Magnaporthe grisea 70-15] gi|145014647|gb|EDJ99215.1| MGG_03939 [Magnaporthe grisea 70-15]
  misc_feature (9)..(841): NCBI GI: 115397683 Blast Desc: conserved [Aspergillus terreus NIH2624] gi|114192624|gb|EAU34324.1| conserved [Aspergillus terreus NIH2624]
MATLVNLNMSNMNNAMNGADDALPTPKQIRFINNQGQPPTKRRRINAACLTCRKRKTRCAGEQPTCSTCENNGHVCLGYSDVVDKRKPGPLDDATADPYPDGDPEPELRHARDLHDLRNGHGHGHSSLNGNGNGNGNDDASGTMSGRTSNTPHDYATPLLPHKTEAVDWEDAHSQKSQSQSQSQSQSQTTPRREAMAASSASSSSRPAIPRNTSFSTEDGRSPNSRSPVMHHSEGGHRVPYFRYFGPTAIVPGFKQMVVKVSDRRRSSMSMSATATSPSVGSSIAAGLLSTTQQPDVDLANVDDIPVYDINDPSPVHPLILSLVETFFLRLGCNYPFLNRNKFPKLVQEKRVEPILVDAVCALAARFSDVTLFKTWNDGKLAKSEYGHVWAQRAKAATVDTFACPSVAAVQACLLMAYDGFGADQDSALWMYLGVAIRMAIDLGLSKEDGVKYQGPKDPWLTRWIDRRMDEFHEDRPEGDEPTVTIGPEEQREIEQERIDTFWAVFFLDRAISSGTGRPVTLRADDFDLGLPRSLVKHESQWPDPYASLLHIIHLYGRVSDVLNNIKEPKDLTKDKLNRLVGMENELTRLHQKMDPRLRFDANNFQAHVKNTHGTTFILLHFWFHALIIVLHQPTLLTSKGTVDRKHQLKAHSRELSMSSAKTIADILAFAELLDPRCFIGNPFTSQPIYIAACAFLLESKVSSSQPDSQTVSPPPGLKSQGPHTGDQNSASSKHLLLASAALQNYQLCYKALKQMHAYWGGVRYILNVLDQKSHGEEDCETFTTEEYESTKRCRRDSLTPRFTKPTDFPASPMPESGPPLAWSLTGTTNSPNSSLTLLFHTQGNVGGPTSHHPGPPQQVAPQPPQQASSPATAPTPPGNMIYDPIRQSLPETPMYPPAYPQPNTSALRHSVRGANATSRSRGQIRFSDMPQDDGMPTTSDSTKMGVTSQAGPGLSNMSYTPATQTSSSGFEPQGAYLTSASPSTSTPSQTMGTNGHAIPGAYATAADGFYSFVGAPGYDLHLLTYDNETDIGQHLSSFEHTDMMSWCGDYFPNDVFGLYSGADGL

SEQ ID NO: 30650 - DNA, 4449 bp, Muscodor strobelii
  misc_feature: SGI EST ID NO. CUFF.72602.0
  misc_feature: Variant of the nucleotide sequence at SEQ ID NO 30648
cgagtgtctgccatcatccatggccaccctcctagcaggctgtagataacaggattgatccgtacaggaaacatggctagacatcagacttcacaaactgggtcatcggttaggagagaggcaggcaagtctgtgtcgtagtcacaattgatatcacactcgacagctgcaggattcgaatagtgtttggagtcgcggagtggcagagctaaggtatctacagtactgtatctcacatctcgtatctacatgaagtcggtacctaaacaatcgagacaataacaaggagacgtaacgattgaggccggcatggatgcagctcctatagcgtggcggcatcgcagctcgtgggaggagcccaccttgtccacctcgcgcacttggcatttgcagaagacccccgcccgagcaccactgcccgccactcccccggattctcaggctggttttgtgggttttgcatgacatttctcatcatcgccattgacgctctctcgctgcccgccgcccattaaacaccatgtccgcgctgctcagctgctgtcagtgagcggggtgcataggtgcataagcttgcaacggcgacaacgatatcgatatcatccggatcacgacgattgacgccaccacgaaaatgacgaggcccacaacgacgacgacgacgacgacgacgaagaacaagtagattagcaagactgatcacatattatctgattcgcagagaggagagccctcggaggggagccgcccacgatggcgaccctcgtcaacctgaacatgagcaacatgaataatgctatgaacggcgccgacgacgcgctgccgacgccgaagcagatccgcttcatcaacaaccagggccagccgccgaccaagcgccgccgcatcaacgccgcgtgcctgacctgccgcaagcgcaagacgcgctgtgccggcgagcagcccacctgctcgacctgcgagaacaacggccacgtctgtctcggctactcggacgtcgtcgacaagcgcaagcccggccccctcgacgacgccaccgccgacccctaccccgacggcgacccggagcccgagctgagacacgcccgcgatctgcacgaccttcgaaacggccatggccatggccacagcagtctcaatggcaatggcaacggcaacggcaacgacgacgcctccgggaccatgtcgggccgcacgtccaacacgccccacgactacgccacgccgctgctcccgcacaagaccgaggccgtcgactgggaggatgcccactcgcaaaagtcacagtcacagtcacagtcccagtcccagtcccagaccaccccgagacgagaggccatggcggcatcgtcggcatcgtcgtcgtcgcggccggccatcccgcgcaacacgtccttctcgaccgaggacggccgcagccccaacagccggtcgcccgtcatgcaccacagcgagggcggccaccgcgtgccctacttccgctacttcggccccaccgccatcgtccccggcttcaagcagatggtcgtcaaggtcagcgaccgccgccgcagctccatgtccatgtccgccaccgccacctcgcccagcgtcggctcctccatcgccgcgggcctgctctcgacgacgcagcagcccgacgtcgacctcgccaacgtcgacgacatccccgtctacgacatcaacgacccttcccccgtccacccgctcatcctcagcctcgtcgagaccttcttcctgcgcctcggctgcaactaccccttcctcaaccgcaacaagttccccaagctcgtccaggagaagcgcgtcgagcccatcctcgtcgacgccgtctgcgccctcgccgcccgcttctccgacgtcaccctcttcaagacctggaacgacggcaagctcgccaagtccgagtacggccacgtctgggcccagcgcgccaaggccgccaccgtcgacaccttcgcctgtccctccgtcgccgccgtccaggcttgtctgctgatggcctacgatggcttcggcgccgaccaggacagcgccctgtggatgtatctgggggtggcgatccgcatggccatcgacctcggcctgtccaaggaggacggcgtcaagtaccaaggccctaaggacccctggctgacccgttggatcgacaggcgcatggatgagttccacgaagaccggccagagggtgacgagcccactgtcactatcggccccgaagaacagagagagatcgagcaagagcgcatcgacactttctgggccgtcttcttcctcgatcgtgccatctcgtccggcaccggtcgtcctgtcacgctgagggctgatgatttcgatcttggtcttcccagatcgctggtgaagcacgagtcccagtggcccgacccatatgcgtcattgttgcacatcattcatctatacggccgagtctccgatgtcttgaacaacatcaaggagcccaaggatctcaccaaggacaagctcaaccgtctcgtcggcatggagaacgagctgaccagactgcaccagaagatggacccgcgcctgcgctttgatgctaacaacttccaagcgcatgtgaagaatacccatggcactactttcatcttgcttcatttttggttccacgccctgatcatagtcctacatcagccgacattgctcacatccaaaggcaccgtcgaccgcaagcatcagctcaaagcccacagtcgagaactgtccatgtcgagcgccaagaccattgccgacatcctagccttcgccgagctattggatcccagatgtttcatcggtaatcctttcacctcccaacccatttatatcgccgcctgtgcttttctgctcgagtccaaagtgagttcatcacagcccgactcgcagacggtgtcgccacctcccggactgaagagccaaggaccacataccggagaccaaaacagtgcctcgtccaagcatctcctattagcatcagcagcgctccagaactaccaactctgttacaaggccttaaagcagatgcacgcgtactggggtggagttagatatatactcaacgtgctggatcaaaagtcccatggcgaggaagactgcgagacattcacgacagaagaatatgaaagcaccaaacgctgtcgacgggatagtctgactccacggttcaccaagcccacggatttcccagcatcacccatgccagagagcgggccacctctcgcttggtcgctgactggcacgaccaactctcccaactcgagccttaccctcctcttccatacgcaaggcaatgttggaggccctaccagccatcaccctggaccgccgcagcaggtcgcgccacagcccccacagcaagcttcgagtcccgcgaccgcacccacaccaccgggcaatatgatatacgatcccatccggcagagcctcccggagactcccatgtacccgccagcctatccgcaacccaacacgtcggcgttgcggcactctgtccgaggtgcaaatgcaacgtcacgctctagggggcagatccgcttcagcgacatgccccaggacgatggcatgcccacgacatcggacagcacgaagatgggtgtcacatcgcaggcaggtcctgggctgtccaacatgtcctacacacccgcaacgcaaacatcttcgtctgggtttgagccacaaggcgcctacctcacgagcgcctcgccttccacgagcacaccatcccagacaatgggtaccaatggccacgccataccgggtgcatacgccaccgcggcggacgggttctactcgtttgtcggagcgccgggctacgacctgcatctattgacgtatgacaacgagacggacatcggccagcatctatcgagctttgagcacacggacatgatgagttggtgcggcgactactttccaaacgacgtttttgggctctattcgggggccgatggcttatgacgatgacacaatgaaacctatcggtcttttattcaccgttccggttatccttcccacactattctatagcgcgtctcatttccctcggcgacctctttcacccactgccgacgccccactggctgaatgctcgcgccgtaccgatccacggtgattcgggcatgtcctgcgtgcccaccattgtattagttgataccccatccttgtctgttaggcgtgtaaaccgggcagatatttgtgtttgatttgaagaattaggcgccgtttttggataagtgtgtcagcttggcgtataggaagagcagggccagagggaagaaacccgaatttcttggtaggcggcgaatgattgaatcgtgtatatacaagtgtgctccagggcaaataggcagcatccccagggcagattcgatgcataggaaggaaaaggatccaatatagcaatcatgactttacgttcaaatcttcacgagacttggctctgctttatttcgg

SEQ ID NO: 30651 - DNA, 1743 bp, Muscodor strobelii
  misc_feature: SGI cDNA ID NO. 570544
  misc_feature: Encodes the peptide sequence at SEQ ID NO 30652
atgttgttgtatactagggtcgcgcccccgaagataccaaaaagacggtcgagagcaggttgtgcatattgcaaagaaaaaaagaaaaaatgcgacgagaaacgcccccactgcgctcgctgtgttgagcgcggcgtcgagtgtacttatgaggcgatccggccgcggcagcggaggaaaagagactcccaatcgagcttctcactgagctcgccactagaccgaatgaccttcaaagatgactaccaaatcgcattagatatggttatagcctctagcgatgctgattatgcaagtaccaatgatccgttatctccttacgaaggaacagtcatccaggacgacgacgatcagcattcggtgactggtcgacgagagtcgaatagtgatgttgccctgacctcgctacgttctctgcctcctgaattggccatgatcgcgccatgtccgacggtgtgcccgacgctggagttctcgatcccagccttttccgagttctcgtgtcgaccaaatagacgagcactggtcgatcatttctgcaatgtgttatcacatcttattgtttttcgagaggagtcgggcaatccattccagcaactcgtgcttccactatcttatcgaagctctcccgtcatgtatgccatctacgcgctgtcgagcgcccatctggaatatcgaggtgtccaaaatgccgaaaagtctttgtattttcacaatcaggccattcaagaattggccaaggctatcgaatatcaagggaaggtcaacaagaatgaggtgctcgccgccatcatgctccttgtgtactacgaggtgctcgtccaacgaggtcgaacaaatatcatcgacggtcacctaaagggggctttcacgatcttgtgcttgaatcaggaactaaatccagcgagcttgtttctggagcgggcgtttgggttttacgacgtgataacggcactgtctctaggcacgccaccattgtcaaccgctccaagtgccggtggacttctcccagtcccgcctctcgatgcgcctgcagcatcaccactcactaacgttgacacgcttctgggtatggctacgacgctctggccgatcatgcaccgcctatccaacttgttatcagtaaagcgtgaacttgagaccgcccagggattaaagcagacatcgaaagtcgccgtgctgcgcgccgagttcgaggctatgtcccaggcgatcgagacggctttaacacgatggaaaccatgtctgccaccgaacatcagtattcaggatgatgttcttgtacgaaatggtacgcccagcgaggaaattccggaaatgtcgcgtctgcaatctatcttacataatgcgctcgcataccggcacagcgcattcgtctatctctaccgaacgatctacgaatatgagccgacgcacaaatcggtacagaagcacgcccacgcatcgcttcaccactgcgttgagaccacagccgctcggggacccatgggggcattactctggccgctgttcgtggcagcttgcgaggcgacaggcagcgaagacagggagcaggccaagaaggcgtttgaggaagtcgagcggaggcaaggcatgacgaacataggcgaagcgtggcggatcgtgcaggaagtctggaggagactcgacacgcccaaagaggacgtagtgacgaggggaaaccatcctgatctttggaggaagatcagttcggagatgggagtgagcattgtctttggatag

SEQ ID NO: 30652 - protein, 580 aa, Muscodor strobelii
  misc_feature: SGI Peptide ID NO. 570544
  misc_feature (19)..(57): Pfam Id: PF00172 Pfam Desc: Fungal Zn(2)-Cys(6) binuclear cluster domain
  misc_feature (1)..(580): NCBI GI: 46109510 Blast Desc: FG01637.1 [Gibberella zeae PH-1]
  misc_feature (1)..(580): NCBI GI: 261357233 Blast Desc: conserved [Verticillium albo-atrum VaMs.102]
  misc_feature (1)..(580): NCBI GI: 164424820 Blast Desc: NCU05414 [Neurospora crassa OR74A] gi|16944523|emb|CAD11325.1| [Neurospora crassa] gi|157070675|gb|EAA34266.2| conserved [Neurospora crassa OR74A]
  misc_feature (1)..(580): NCBI GI: 256730510 Blast Desc: [Nectria haematococca mpVI 77-13-4]
  misc_feature (28)..(580): NCBI GI: 171689572 Blast Desc: protein product [Podospora anserina] gi|170944748|emb|CAP70859.1| protein product [Podospora anserina]
  misc_feature (142)..(580): NCBI GI: 145605675 Blast Desc: MGG_06954 [Magnaporthe grisea 70-15] gi|145013470|gb|EDJ98111.1| MGG_06954 [Magnaporthe grisea 70-15]
  misc_feature (28)..(580): NCBI GI: 154322797 Blast Desc: BC1G_00741 [Botryotinia fuckeliana B05.10] gi|150848075|gb|EDN23268.1| BC1G_00741 [Botryotinia fuckeliana B05.10]
  misc_feature (141)..(580): NCBI GI: 11359538 Blast Desc: BC1G_00741 [Botryotinia fuckeliana B05.10] gi|150848075|gb|EDN23268.1| BC1G_00741 [Botryotinia fuckeliana B05.10]
  misc_feature (1)..(421): NCBI GI: 116205119 Blast Desc: CHGG_10443 [Chaetomium globosum CBS 148.51] gi|88176571|gb|EAQ84039.1| CHGG_10443 [Chaetomium globosum CBS 148.51]
  misc_feature (266)..(580): NCBI GI: 156064769 Blast Desc: SS1G_00392 [Sclerotinia sclerotiorum 1980] gi|154691254|gb|EDN90992.1| SS1G_00392 [Sclerotinia sclerotiorum 1980]
MLLYTRVAPPKIPKRRSRAGCAYCKEKKKKCDEKRPHCARCVERGVECTYEAIRPRQRRKRDSQSSFSLSSPLDRMTFKDDYQIALDMVIASSDADYASTNDPLSPYEGTVIQDDDDQHSVTGRRESNSDVALTSLRSLPPELAMIAPCPTVCPTLEFSIPAFSEFSCRPNRRALVDHFCNVLSHLIVFREESGNPFQQLVLPLSYRSSPVMYAIYALSSAHLEYRGVQNAEKSLYFHNQAIQELAKAIEYQGKVNKNEVLAAIMLLVYYEVLVQRGRTNIIDGHLKGAFTILCLNQELNPASLFLERAFGFYDVITALSLGTPPLSTAPSAGGLLPVPPLDAPAASPLTNVDTLLGMATTLWPIMHRLSNLLSVKRELETAQGLKQTSKVAVLRAEFEAMSQAIETALTRWKPCLPPNISIQDDVLVRNGTPSEEIPEMSRLQSILHNALAYRHSAFVYLYRTIYEYEPTHKSVQKHAHASLHHCVETTAARGPMGALLWPLFVAACEATGSEDREQAKKAFEEVERRQGMTNIGEAWRIVQEVWRRLDTPKEDVVTRGNHPDLWRKISSEMGVSIVFG

SEQ ID NO: 30653 - DNA, 2425 bp, Muscodor strobelii
  misc_feature: SGI EST ID NO. CUFF.72609.2
  misc_feature: Variant of the nucleotide sequence at SEQ ID NO 30651
ttttaagtcaagagttcatccaccaacgtgaactagcatgccagtacgtagatagaaatcgctggatctagcccgaacttcaaggatgttgctgccgagctgcaaaccatacacaggcaacggtgtactttccggatctcctaacctcattagtgaatcttctcttgccccttgacaaggtcatgaggatatttcgtacaccggactgggcccatattagtgtagaatagtccatcgtccacacgtcttcttccctcgccaatctacatgatgcgaataatgaccacaagtaaagaatattgtgattgacattttcacccgagccctctccactcataagagcgagggagtcatggaatgtatatagtcagctctttcacattgaacgatgttgttgtatactagggtcgcgcccccgaagataccaaaaagacggtcgagagcaggttgtgcatattgcaaagaaaaagtacgcagacccaccgcatccagattctcttattgtctcgggactgatttttcacggtggcacaatagaagaaaaaatgcgacgagaaacgcccccactgcgctcgctgtgttgagcgcggcgtcgagtgtacttatgaggcgatccggccgcggcagcggaggaaaagagactcccaatcgagcttctcactgagctcgccactagaccgaatgaccttcaaagatgactaccaaatcgcattagatatggttatagcctctagcgatgctgattatgcaagtaccaatgatccgttatctccttacgaaggaacagtcatccaggacgacgacgatcagcattcggtgactggtcgacgagagtcgaatagtgatgttgccctgacctcgctacgttctctgcctcctgaattggccatgatcgcgccatgtccgacggtgtgcccgacgctggagttctcgatcccagccttttccgagttctcgtgtcgaccaaatagacgagcactggtcgatcatttctgcaatgtgttatcacatcttattgtttttcgagaggagtcgggcaatccattccagcaactcgtgcttccactatcttatcgaagctctcccgtcatgtatgccatctacgcgctgtcgagcgcccatctggaatatcgaggtgtccaaaatgccgaaaagtctttgtattttcacaatcaggccattcaagaattggccaaggctatcgaatatcaagggaaggtcaacaagaatgaggtgctcgccgccatcatgctccttgtgtactacgaggtgctcgtccaacgaggtcgaacaaatatcatcgacggtcacctaaagggggctttcacgatcttgtgcttgaatcaggaactaaatccagcgagcttgtttctggagcgggcgtttgggttttacgacgtgataacggcactgtctctaggcacgccaccattgtcaaccgctccaagtgccggtggacttctcccagtcccgcctctcgatgcgcctgcagcatcaccactcactaacgttgacacgcttctgggtatggctacgacgctctggccgatcatgcaccgcctatccaacttgttatcagtaaagcgtgaacttgagaccgcccagggattaaagcagacatcgaaagtcgccgtgctgcgcgccgagttcgaggctatgtcccaggcgatcgagacggctttaacacgatggaaaccatgtctgccaccgaacatcagtattcaggatgatgttcttgtacgaaatggtacgcccagcgaggaaattccggaaatgtcgcgtctgcaatctatcttacataatgcgctcgcataccggcacagcgcattcgtctatctctaccgaacgatctacgaatatgagccgacgcacaaatcggtacagaagcacgcccacgcatcgcttcaccactgcgttgagaccacagccgctcggggacccatgggggcattactctggccgctgttcgtggcagcttgcgaggcgacaggcagcgaagacagggagcaggccaagaaggcgtttgaggaagtcgagcggaggcaaggcatgacgaacataggcgaagcgtggcggatcgtgcaggaagtctggaggagactcgacacgcccaaagaggacgtagtgacgaggggaaaccatcctgatctttggaggaagatcagttcggagatgggagtgagcattgtctttggatagcgtggcattccaacttcggatgcaacgtatcgggttggatgatcgaaagcttcaagttccatctgacgtgttcaggtagacattgtcatggttggtatcgggaacgggcccggaaatcataggtgtaacatgaaaatttaataccctttcctcctcggccgtcaaacgtacagcctcgggaaactctgcttacagtcgctgatacaagacctcgcttagattcgtt

SEQ ID NO: 30654 - DNA, 327 bp, Muscodor strobelii
  misc_feature: SGI cDNA ID NO. 570545
  misc_feature: Encodes the peptide sequence at SEQ ID NO 30655
atgttggcagcgtcgctttccgaccccaagaatgtccaggtcgcctggcccccgcccgtcagcatctcacctctcgacgattggaccggattgcagtatattgaccaacagactgcaaagctctgcggtaagaaagaagatttgctcacggcgcccggcatcctgcaagacatcgtgcaacgcttcgagaagatgtatgagaggatgcagtctggcaaacatctaaagtctcccggtgtagtggctgtgaaagacccgactcccccgaagaccttccgccgcgaccacgtacgcaaggtgggagccgatccccagttttcaagatag

SEQ ID NO: 30655 - protein, 108 aa, Muscodor strobelii
  misc_feature: SGI Peptide ID NO. 570545
MLAASLSDPKNVQVAWPPPVSISPLDDWTGLQYIDQQTAKLCGKKEDLLTAPGILQDIVQRFEKMYERMQSGKHLKSPGVVAVKDPTPPKTFRRDHVRKVGADPQFSR

SEQ ID NO: 30656 - DNA, 1500 bp, Muscodor strobelii
  misc_feature: SGI cDNA ID NO. 570546
  misc_feature: Elevated expression when VOC is produced
  misc_feature: Encodes the peptide sequence at SEQ ID NO 30657
atgttgtcttcaaatctatgcagtttttatcgtggggtcaccgccagtcagctgaaattcaactccttgacacagcatggcaaggcaagcctcgatgaggacacccaataccaagttcagtggatccagaaagttaacggcttccatctggggaagaggaaggcagtttgtcaaaaggagaattggtcattatgcccatcttcggtaggcggtggatgctgcccagacaactactcctgcgacaccgcctcctgttatgccacaaccgcaggcccgacaacagcctgtggaaaagcgaattactttaactgtcctctgacggcaggtggaggctgttgtcctgtcaactacatttgtaacactaacgctggctgcgatcccccggaagggcaaactgtcgactgtcccgcaagctattccagttgtgctgcttcattcggtggtggatgctgtcccgaaggaagggtttgcggctcaggtgtatgctacgctggcactccctctacatatgcagtctctaagacgataacgaccacaaactcaaaagggcacgcggtcacaacagtcgtcacatacaccacggccataaccgatgggcctcccacatctgccggatcagcaacagcagctggtgtaccgcaactagtccctagtactatcgcgaaagaacctgctgtccaaacaagtgataacaacgggagccacagtggtctatcgtctggagccctgggcggaatagtggcaggcgttatcgttattcttatcgtcatcatagctgcagcgaccttcatcatcttgcggcttaagaaggcagagaaagctgccaaagctgctcaagtggcagctgagtctaaaaatgattcctcaaatggccattcccgttctcataaacctgggtttggacagccgtccgtatcggaaattgatgcaagcactgatgttgacccctcaactcagatgcccatcatgcacccctctcctcaaattcgatcacgatcggcatctagcactttgggcgatcgcaccccatctcatactcccaattttacaaactctggcacttcgtcaccaccaatatggggagtaccattcaactatgcaccttcgtctaatgcatcagatgggcgacaatcaagcttagattcctacccgcaacttgataatcgcagtgttcccattttcggtcgtaagagtgtcgagtctcatggatcgtatgggcatagccgccaaccgagtgatacaagcgagttggaagcaccccacggcgaatccgagcttgagaccacaggcacgaatggcgagtcaacatcgcgtcgacggtcaaatagcgcttcaagatcccacaacagacggggcagtgacttgtcaggccagaacggccggggtgatagcagtacggttccagtatctcctccgttgggcactgtgaacgaaattcacgaactgcacggctattatggtcctgtgcatgaactgtccgatggtgctcggaactcatga

SEQ ID NO: 30657 - protein, 499 aa, Muscodor strobelii
  misc_feature: SGI Peptide ID NO. 570546
  misc_feature (12)..(310): NCBI GI: 39978141 Blast Desc: MGG_06955 [Magnaporthe grisea 70-15] gi|145013469|gb|EDJ98110.1| MGG_06955 [Magnaporthe grisea 70-15]
  misc_feature (40)..(337): NCBI GI: 154322763 Blast Desc: BC1G_00724 [Botryotinia fuckeliana B05.10] gi|150848058|gb|EDN23251.1| BC1G_00724 [Botryotinia fuckeliana B05.10]
  misc_feature (40)..(337): NCBI GI: 156064779 Blast Desc: SS1G_00397 [Sclerotinia sclerotiorum 1980] gi|154691259|gb|EDN90997.1| SS1G_00397 [Sclerotinia sclerotiorum 1980]
  misc_feature (50)..(492): NCBI GI: 46109508 Blast Desc: FG01636.1 [Gibberella zeae PH-1]
  misc_feature (55)..(487): NCBI GI: 171689574 Blast Desc: protein product [Podospora anserina] gi|170944749|emb|CAP70860.1| protein product [Podospora anserina]
  misc_feature (64)..(297): NCBI GI: 256730724 Blast Desc: NECHADRAFT_89646 [Nectria haematococca mpVI 77-13-4]
  misc_feature (135)..(378): NCBI GI: 261357232 Blast Desc: conserved [Verticillium albo-atrum VaMs.102]
  misc_feature (52)..(104): NCBI GI: 116205121 Blast Desc: CHGG_10444 [Chaetomium globosum CBS 148.51] gi|88176572|gb|EAQ84040.1| CHGG_10444 [Chaetomium globosum CBS 148.51]
  misc_feature (73)..(282): NCBI GI: 171691791 Blast Desc: protein product [Podospora anserina] gi|170945844|emb|CAP72645.1| protein product [Podospora anserina]
  misc_feature (157)..(422): NCBI GI: 85110530 Blast Desc: NCU05417 [Neurospora crassa OR74A] gi|16944522|emb|CAB97477.2| related to C2H2 zinc finger transcription factor D-Sp1 [Neurospora crassa] [Neurospora crassa
  misc_feature: Useful for introducing or modulating the production of volatile compounds
MLSSNLCSFYRGVTASQLKFNSLTQHGKASLDEDTQYQVQWIQKVNGFHLGKRKAVCQKENWSLCPSSVGGGCCPDNYSCDTASCYATTAGPTTACGKANYFNCPLTAGGGCCPVNYICNTNAGCDPPEGQTVDCPASYSSCAASFGGGCCPEGRVCGSGVCYAGTPSTYAVSKTITTTNSKGHAVTTVVTYTTAITDGPPTSAGSATAAGVPQLVPSTIAKEPAVQTSDNNGSHSGLSSGALGGIVAGVIVILIVIIAAATFIILRLKKAEKAAKAAQVAAESKNDSSNGHSRSHKPGFGQPSVSEIDASTDVDPSTQMPIMHPSPQIRSRSASSTLGDRTPSHTPNFTNSGTSSPPIWGVPFNYAPSSNASDGRQSSLDSYPQLDNRSVPIFGRKSVESHGSYGHSRQPSDTSELEAPHGESELETTGTNGESTSRRRSNSASRSHNRRGSDLSGQNGRGDSSTVPVSPPLGTVNEIHELHGYYGPVHELSDGARNS

SEQ ID NO: 30658 - DNA, 2872 bp, Muscodor strobelii
  misc_feature: SGI EST ID NO. CUFF.72618.0
  misc_feature: Variant of the nucleotide sequence at SEQ ID NO 30656
cgggtctttcacagccactacaccgggagactttagatgtttgccagactgcatcctctcatacatcttctcgaagcgttgcacgatgtcttgcaggatgccgggcgccgtgagcaaatcttatcagtgcggcggaccatgagggtgtgaaccccttgtagttgattggcatggggccaaaaagctctggaagcgaccaacagagcgccgacactacacgccccggatacgacgcggttacacgaaccttctttcttaccgcagagctttgcagtctgttggtcaatatactgcaatccggtccaatcgtcgagaggtgagatgctgacgggcgggggccaggcgacctggacattcttggggtcggaaagcgacgctgccaacatgcacatgttctcgatttggcaccatggtgcatgaagagggccatagtccacacgcaggatccccaatgttgcgtagttggggggtcatttggaggcaccaatccacaggtaggcagcgaagaccaacagatattgtttcccataggctcaccatactgttttcgggggcgttttccatgagaatcccatctgacctatgggtcttcgaacccttgacagcggaaagacacattttgctgatccaaacagtcggttccgtatgcaatacgctgaagacaaaccagcatctcgattacctgccgagaaagacgggagcctcctctttctcaacataatagtcatgggccggtgcatgttactggagatctgacagcttcatttgtgtctttgttgctgtccagctaccgacttcacgattcttccggtgcatactgcacatgttgtcttcaaatctatgcagtttttatcgtggggtcaccgccagtcagctgaaattcaactgtacgtgaggggttggagttgcgcctgagcctgcttatgctagtaggttcgtgaggcatcatttctcgctgcggattatcgactacgctagctacgcatcatcgttcattgtagatcttgcgataattcgattacatttcgccgagttgtcattattgttatctgggtgcatgacgagaccgcggccgttgacattttatgcgaggaatgctaagctccgataatgagggggatctggcaaccttgcggctgtatactgcttacgcttgcagccttgacacagcatggcaaggcaagcctcgatgaggacacccaataccaagttcagtggatccagaaagttaacggcttccatctggggaagaggaaggcagtttgtcaaaaggagaattggtcattatgcccatcttcggtaggcggtggatgctgcccagacaactactcctgcgacaccgcctcctgttatgccacaaccgcaggcccgacaacagcctgtggaaaagcgaattactttaactgtcctctgacggcaggtggaggctgttgtcctgtcaactacatttgtaacactaacgctggctgcgatcccccggaagggcaaactgtcgactgtcccgcaagctattccagttgtgctgcttcattcggtggtggatgctgtcccgaaggaagggtttgcggctcaggtgtatgctacgctggcactccctctacatatgcagtctctaagacgataacgaccacaaactcaaaagggcacgcggtcacaacagtcgtcacatacaccacggccataaccgatgggcctcccacatctgccggatcagcaacagcagctggtgtaccgcaactagtccctagtactatcgcgaaagaacctgctgtccaaacaagtgataacaacgggagccacagtggtctatcgtctggagccctgggcggaatagtggcaggcgttatcgttattcttatcgtcatcatagctgcagcgaccttcatcatcttgcggcttaagaaggcagagaaagctgccaaagctgctcaagtggcagctgagtctaaaaatgattcctcaaatggccattcccgttctcataaacctgggtttggacagccgtccgtatcggaaattgatgcaagcactgatgttgacccctcaactcagatgcccatcatgcacccctctcctcaaattcgatcacgatcggcatctagcactttgggcgatcgcaccccatctcatactcccaattttacaaactctggcacttcgtcaccaccaatatggggagtaccattcaactatgcaccttcgtctaatgcatcagatgggcgacaatcaagcttagattcctacccgcaacttgataatcgcagtgttcccattttcggtcgtaagagtgtcgagtctcatggatcgtatgggcatagccgccaaccgagtgatacaagcgagttggaagcaccccacggcgaatccgagcttgagaccacaggcacgaatggcgagtcaacatcgcgtcgacggtcaaatagcgcttcaagatcccacaacagacggggcagtgacttgtcaggccagaacggccggggtgatagcagtacggttccagtatctcctccgttgggcactgtgaacgaaattcacgaactgcacggctattatggtcctgtgcatgaactgtccgatggtgctcggaactcatgaattatctacgtaatttggaaatcttcgtgtttatacttctaggcaaattggcgccctctggtttcggttgtttcttgtatgaggttctacataaacgcaccattctttacagataccaggaagttgtactatgcattcatttgagacaataccaactgtactttccttttggatgttcgtattatgaattgatagccagggtcgtctgggtatatagaaagcgtatagttctaatcaatacatcggatgatgccgcggaagtatgtttattcgctga

SEQ ID NO: 30659 - DNA, 819 bp, Muscodor strobelii
  misc_feature: SGI cDNA ID NO. 570547
  misc_feature: Elevated expression when VOC is produced
  misc_feature: Encodes the peptide sequence at SEQ ID NO 30660
atgttaagcgagtcatttctgtgcgtgttcaagggaggtcctcttgggccgaggcttcgcgaattgatgtggaacaattggacggcagcagagagagcttcttcgtcaaattccagcgccaacactcatttctatatttacaagttctatgagtttgcagacggtctaccacatcctagaccattctgcgccaagctggcagagctccatctccgctcgcttgatgcatctcccgatcacaagttcggttttcatgtgactacgtataatggcaatattccgcaggataatacttgggttgatacatgggaggcctttttcgttcaagccttcaaacacgtactccgtattcgacaagagcgtgcaggtcattgcgctgagttggaaatattactatcccctttcttcgaaaagttgattcctagattactccggccattagaaactgggggaaatagcattaagccaacattgattcatggagacttgtggtatggtaatgctgctattacagataaggcatcaggtgaaggaattgtatacgatccttcaagtttctgggctcataacgaatacgagcttgggaactggcgtccagagagaaataagttctcacgagagtatttcagtgcttatcactcacacatccccatctcatcgcctgtgggcgactatgatgatcgaaatgctctctacgctatccgtttcgatcttaatgcggcgacactatttccgagcgaaaagcagtatctggcttcggtcattaaggagatgcgaagattaattgagaaattcccacaaggcttcactgagagataa

SEQ ID NO: 30660 - protein, 272 aa, Muscodor strobelii
  misc_feature: SGI Peptide ID NO. 570547
  misc_feature (23)..(264): Pfam Id: PF03881 Pfam Desc: Fructosamine kinase
  misc_feature (155)..(187): Pfam Id: PF03881 Pfam Desc: Fructosamine kinase
  misc_feature (34)..(242): NCBI GI: 116179188 Blast Desc: CHGG_00222 [Chaetomium globosum CBS 148.51] gi|88184519|gb|EAQ91987.1| CHGG_00222 [Chaetomium globosum CBS 148.51]
  misc_feature (41)..(234): NCBI GI: 145231128 Blast Desc: An01g14380 [Aspergillus niger] gi|134055957|emb|CAK37433.1| protein product [Aspergillus niger]
  misc_feature (38)..(243): NCBI GI: 145605954 Blast Desc: MGG_11859 [Magnaporthe grisea 70-15] gi|145013692|gb|EDJ98333.1| MGG_11859 [Magnaporthe grisea 70-15]
  misc_feature (35)..(271): NCBI GI: 171694622 Blast Desc: protein product [Podospora anserina] gi|170947553|emb|CAP59714.1| protein product [Podospora anserina]
  misc_feature (41)..(244): NCBI GI: 238503680 Blast Desc: conserved [Aspergillus flavus NRRL3357] gi|220690543|gb|EED46892.1| conserved [Aspergillus flavus NRRL3357]
  misc_feature (41)..(244): NCBI GI: 169765035 Blast Desc: [Aspergillus oryzae RIB40] gi|83764843|dbj|BAE54987.1| protein product [Aspergillus oryzae]
  misc_feature (37)..(244): NCBI GI: 171679237 Blast Desc: protein product [Podospora anserina] gi|170939244|emb|CAP64472.1| protein product [Podospora anserina]
  misc_feature (41)..(234): NCBI GI: 255946231 Blast Desc: Pc20g14050 [Penicillium chrysogenum Wisconsin 54-1255] gi|211588618|emb|CAP86734.1| Pc20g14050 [Penicillium chrysogenum Wisconsin 54-1255]
  misc_feature (37)..(270): NCBI GI: 119176150 Blast Desc: CIMG_09820 [Coccidioides immitis RS]
  misc_feature (41)..(265): NCBI GI: 240110347 Blast Desc: CPC735_063790 [Coccidioides posadasii C735 delta SOWgp]
  misc_feature: Useful for introducing or modulating the production of volatile compounds
MLSESFLCVFKGGPLGPRLRELMWNNWTAAERASSSNSSANTHFYIYKFYEFADGLPHPRPFCAKLAELHLRSLDASPDHKFGFHVTTYNGNIPQDNTWVDTWEAFFVQAFKHVLRIRQERAGHCAELEILLSPFFEKLIPRLLRPLETGGNSIKPTLIHGDLWYGNAAITDKASGEGIVYDPSSFWAHNEYELGNWRPERNKFSREYFSAYHSHIPISSPVGDYDDRNALYAIRFDLNAATLFPSEKQYLASVIKEMRRLIEKFPQGFTER

SEQ ID NO: 30661 - DNA, 1508 bp, Muscodor strobelii
  misc_feature: SGI EST ID NO. CUFF.72622.0
  misc_feature: Variant of the nucleotide sequence at SEQ ID NO 30659
cttgtctcaccatgttgttggttcgatcgttaccaaattcttgccgaatttttcgtccatgaccattattgccttttatttgaggctacgtatgagtagatggctctctataatgaatttgggcagattgacgaaaatgttcttggtggtataggattgccttcaaacccgaggcacgctcgcgcgctgacatcattgagttctttcaaatgttaagcgagtcatttctgtgcgtgttcaagggaggtcctcttgggccgaggcttcgcgaattgatgtggaacaattggacggcagcagagagagcttcttcgtcaaagtttcgagaggtcaccatgggcgaaaatctctagaaggcgaatttgagtccacgtcggcgattcacgctgtcactccagatttctgtcccaagccagttgcgtggggatctttcagttccagcgccaacactcatttctatatttacaagttctatgagtttgcagacggtctaccacatcctagaccattctgcgccaagctggcagagctccatctccgctcgcttgatgcatctcccgatcacaagttcggttttcatgtgactacgtataatggcaatattccgcaggataatacttgggttgatacatgggaggcctttttcgttcaagccttcaaacacgtactccgtattcgacaagagcgtgcaggtcattgcgctgagttggaaatattactatcccctttcttcgaaaagttgattcctagattactccggccattagaaactgggggaaatagcattaagccaacattgattcatggagacttgtggtatggtaatgctgctattacagataaggcatcaggtgaaggaattgtatacgatccttcaagtttctgggctcataacgaatacgagcttgggaactggcgtccagagagaaataagttctcacgagagtatttcagtgcttatcactcacacatccccatctcatcgcctgtgggcgactatgatgatcgaaatgctctctacgctatccgtttcgatcttaatgcggcgacactatttccgagcgaaaagcagtatctggcttcggtcattaaggagatgcgaagattaattgagaaattcccacaaggcttcactgagagataaatgccatgtctcttacggaggtcagaccggtgatcgtgtagcttacggaagtgccataaaagcttatgtggggataacttcaagtttctaactatcttctgagtaaacgggcgaatagaataatgcttatatatatacctaaacctttatattatgctctttagagcgtaccgtattaccttaggcggcaactcgaataagcggaccactttgtgataatgtcgtactatgccggggttcagtttcgatcgacccttattccgcgtgatttgcccaataagagtcttcgccttctacactgaatcagcaaagagctatgcttagctatggtctatcgtgcactgactctcaagcatcaataaag

SEQ ID NO: 30662 - DNA, 1086 bp, Muscodor strobelii
  misc_feature: SGI cDNA ID NO. 570548
  misc_feature: Encodes the peptide sequence at SEQ ID NO 30663
atgcagttgccttattctttcaatgtcaacaatggcagtcagatacccgccatcggtctgggaacatttcaaggggatactggaaacgcccgggtcgaagatgcagttgtgcgcgctctgaagattggatatcgtcacattgatggagccgcagcatatggaaacgagaaagaaattgggagagcaattcaaaagagtggtgtctctaggggagagctcttcataacatcaaagctggcgcagacatggcatgagcctcacagtgttgagcaagctcttgatatgactctatccgacttgcaactcgaatacatccctcatgcttacaagagcgacgaataccacgagactcttaggcaccctagcggaaatggcaagcccgtgattgattacgatttgtcaagagactatgtatcgacttggcgggcgatggaatcgttggtggagagtgggaaggcaaaagccatcggcgtctcaaacttcaatcttctgaaaatgaagaacttgatagaagtaggcggcatcatcccggccgtgaaccaggtggaaatacatccgtcagtagttgcgtctcagtcaaggagaagaagtacgataagagctgatagaacaagatatttgccacagaaagagcttgtagatttctgccaagctaatagagtcgtggtcatggcgcatcagcctcttggtggacggcctgttggagtggtgaaggctcacgccaacgtctctccgccgactgagcatcccacggtcagacgtattgcgtctttgacgatgaaatctgaagcgcaagtttgcttgtcgtggtcagttcaaaggggcattcctgttattccgaaatccgtaaaggatgagcacatgaaagagaacctcgacctgtgctggcttagcgacgagcatttcgcagctatagatgaattgtctcggaaaactggacctatacgcttcctaaatccagcgcctcacattgggtttgacatcttcgacgaggagaacgaccaaccggtatgcgacaaggcgccttgggatgaagacagaggatacgttagatgccggaaatctcacggaggtgaggactcgtga

SEQ ID NO: 30663 - protein, 361 aa, Muscodor strobelii
  misc_feature: SGI Peptide ID NO. 570548
  misc_feature (9)..(310): Pfam Id: PF00248 Pfam Desc: Aldo/keto reductase family
  misc_feature (9)..(105): Pfam Id: PF00248 Pfam Desc: Aldo/keto reductase family
  misc_feature (206)..(310): Pfam Id: PF00248 Pfam Desc: Aldo/keto reductase family
  misc_feature (136)..(186): Pfam Id: PF00248 Pfam Desc: Aldo/keto reductase family
  misc_feature (5)..(337): NCBI GI: 145231126 Blast Desc: An01g14370 [Aspergillus niger] gi|134055956|emb|CAK37432.1| protein product [Aspergillus niger]
  misc_feature (6)..(314): NCBI GI: 154320540 Blast Desc: BC1G_01742 [Botryotinia fuckeliana B05.10] gi|150853431|gb|EDN28623.1| BC1G_01742 [Botryotinia fuckeliana B05.10]
  misc_feature (1)..(336): NCBI GI: 119180467 Blast Desc: CIMG_08862 [Coccidioides immitis RS]
  misc_feature (1)..(331): NCBI GI: 67537318 Blast Desc: AN4829.2 [Aspergillus nidulans FGSC A4] gi|40740874|gb|EAA60064.1| AN4829.2 [Aspergillus nidulans FGSC A4] gi|259482316|tpe|CBF76682.1| TPA: aldehyde reductase I (ARI),
  misc_feature (1)..(341): NCBI GI: 159127709 Blast Desc: aldehyde reductase I (ARI), [Aspergillus fumigatus A1163]
  misc_feature (1)..(341): NCBI GI: 119492059 Blast Desc: aldo-keto reductase [Neosartorya fischeri NRRL 181] gi|119411684|gb|EAW21627.1| aldo-keto reductase [Neosartorya fischeri NRRL 181]
  misc_feature (1)..(335): NCBI GI: 70999966 Blast Desc: aldehyde reductase I (ARI) [Aspergillus fumigatus Af293] gi|66852337|gb|EAL92662.1| aldehyde reductase I (ARI), [Aspergillus fumigatus Af293]
  misc_feature (1)..(336): NCBI GI: 240110345 Blast Desc: alcohol dehydrogenase, [Coccidioides posadasii C735 delta SOWgp]
  misc_feature (1)..(350): NCBI GI: 67522445 Blast Desc: AN1679.2 [Aspergillus nidulans FGSC A4] gi|40745643|gb|EAA64799.1| AN1679.2 [Aspergillus nidulans FGSC A4] gi|259487018|tpe|CBF85353.1| TPA: NADP(+) coupled glycerol
  misc_feature (1)..(341): NCBI GI: 145231224 Blast Desc: An01g14880 [Aspergillus niger] gi|134056007|emb|CAK37442.1| protein product [Aspergillus niger]
  misc_feature (6)..(341): SWISSPROT Homolog: EC 1.1.1.2 Alcohol dehydrogenase (NADP(+))
MQLPYSFNVNNGSQIPAIGLGTFQGDTGNARVEDAVVRALKIGYRHIDGAAAYGNEKEIGRAIQKSGVSRGELFITSKLAQTWHEPHSVEQALDMTLSDLQLEYIPHAYKSDEYHETLRHPSGNGKPVIDYDLSRDYVSTWRAMESLVESGKAKAIGVSNFNLLKMKNLIEVGGIIPAVNQVEIHPSVVASQSRRRSTIRADRTRYLPQKELVDFCQANRVVVMAHQPLGGRPVGVVKAHANVSPPTEHPTVRRIASLTMKSEAQVCLSWSVQRGIPVIPKSVKDEHMKENLDLCWLSDEHFAAIDELSRKTGPIRFLNPAPHIGFDIFDEENDQPVCDKAPWDEDRGYVRCRKSHGGEDS

SEQ ID NO: 30664 - DNA, 1625 bp, Muscodor strobelii
  misc_feature: SGI EST ID NO. CUFF.72624.0
  misc_feature: Variant of the nucleotide sequence at SEQ ID NO 30662
catccacttaccaacttcgtacgctccgtcagatatcggctttagaagactgtacagctcttctgactcttcaactatgggaccatcattggatgttccgtctctcaggcctaacgctgatctattctaaactagcgactatcacaaacttcgatctcacaaatctagagtgctaaatatgcagttgccttattctttcaatgtcaacaatggcagtcagatacccgccatcggtctgggaacatttcaaggggatactggaaacgcccgggtcgaagatgcagttgtgcgcgctctgaagattggatatcgtcacattgatggagccgcagcatatggaaacgagaaagaaattgggagagcaattcaaaagagtggtgtctctaggggagagctcttcataacatcaaagctgtgagcacagttcgggacaggaatgacaagaactcactattagtcccagggcgcagacatggcatgagcctcacagtgttgagcaagctcttgatatgactctatccgacttgcaactcgaatacagttcgttaaatacatgctcagggttacttaggctgacaatttcctgagttgatctctatttgatgcatttccctcatgcttacaagagcgacgaataccacgagactcttaggcaccctagcggaaatggcaagcccgtgattgattacgatttgtcaagagactatgtatcgacttggcgggcgatggaatcgttggtggagagtgggaaggcaaaagccatcgatatttgccacagaaagagcttgtagatttctgccaagctaatagagtcgtggtcatggcgcatcagcctcttggtggacggcctgttggagtggtgaaggctcacgccaacgtctctccgccgactgagcatcccacggtcagacgtattgcgtctttgacgatgaaatctgaagcgcaagtttgcttgtcgtggtcagttcaaaggggcattcctgttattccgaaatccgtaaaggatgagcacatgaaagagaacctcgacctgtgctggcttagcgacgagcatttcgcagctatagatgaattgtctcggaaaactggacctatacgcttcctaaatccagcgcctcacattgggtttgacatcttcgacgaggagaacgaccaaccggtatgcgacaaggcgccttgggatgaagacagaggatacgttagatgccggaaatctcacggaggtgaggactcgtgatcgtgggaagcgtgaagaagtgctgaagatgatcgttcagagtggaataccgaattgacttgcggatgatcaccgtatatacacactcttgagaccctgtattaggtgccatcaagcatggcgtattacctcacaaccctgacttcgtataggtgcgctacttcgtgacaaaaagagtaccgcaatcgcacaataaggtacgtaggtaaatgttgaatctccagccagtagcgacagaatacatcttaccgcggctttcgaattctgggatgtctctaaactacatggacgtcgattcggagaaagtgcacccgtccagaactcaacaatcaggacccattctcgtaggccattcgaagtcgaaataccagctcgcactagcttcgct

SEQ ID NO: 30665 - DNA, 1029 bp, Muscodor strobelii
  misc_feature: SGI cDNA ID NO. 570549
  misc_feature: Encodes the peptide sequence at SEQ ID NO 30666
atgcagttgccttattctttcaatgtcaacaatggcagtcagatacccgccatcggtctgggaacatttcaaggggatactggaaacgcccgggtcgaagatgcagttgtgcgcgctctgaagattggatatcgtcacattgatggagccgcagcatatggaaacgagaaagaaattgggagagcaattcaaaagagtggtgtctctaggggagagctcttcataacatcaaagctggcgcagacatggcatgagcctcacagtgttgagcaagctcttgatatgactctatccgacttgcaactcgaatacatccctcatgcttacaagagcgacgaataccacgagactcttaggcaccctagcggaaatggcaagcccgtgattgattacgatttgtcaagagactatgtatcgacttggcgggcgatggaatcgttggtggagagtgggaaggcaaaagccatcggcgtctcaaacttcaatcttctgaaaatgaagaacttgatagaagtaggcggcatcatcccggccgtgaaccaggtggaaatacatccatatttgccacagaaagagcttgtagatttctgccaagctaatagagtcgtggtcatggcgcatcagcctcttggtggacggcctgttggagtggtgaaggctcacgccaacgtctctccgccgactgagcatcccacggtcagacgtattgcgtctttgacgatgaaatctgaagcgcaagtttgcttgtcgtggtcagttcaaaggggcattcctgttattccgaaatccgtaaaggatgagcacatgaaagagaacctcgacctgtgctggcttagcgacgagcatttcgcagctatagatgaattgtctcggaaaactggacctatacgcttcctaaatccagcgcctcacattgggtttgacatcttcgacgaggagaacgaccaaccggtatgcgacaaggcgccttgggatgaagacagaggatacgttagatgccggaaatctcacggaggtgaggactcgtga

SEQ ID NO: 30666 - protein, 342 aa, Muscodor strobelii
  misc_feature: SGI Peptide ID NO. 570549
  misc_feature (9)..(291): Pfam Id: PF00248 Pfam Desc: Aldo/keto reductase family
  misc_feature (136)..(291): Pfam Id: PF00248 Pfam Desc: Aldo/keto reductase family
  misc_feature (9)..(105): Pfam Id: PF00248 Pfam Desc: Aldo/keto reductase family
  misc_feature (5)..(318): NCBI GI: 145231126 Blast Desc: An01g14370 [Aspergillus niger] gi|134055956|emb|CAK37432.1| protein product [Aspergillus niger]
  misc_feature (6)..(295): NCBI GI: 154320540 Blast Desc: BC1G_01742 [Botryotinia fuckeliana B05.10] gi|150853431|gb|EDN28623.1| BC1G_01742 [Botryotinia fuckeliana B05.10]
  misc_feature (1)..(317): NCBI GI: 119180467 Blast Desc: CIMG_08862 [Coccidioides immitis RS]
  misc_feature (1)..(312): NCBI GI: 67537318 Blast Desc: AN4829.2 [Aspergillus nidulans FGSC A4] gi|40740874|gb|EAA60064.1| AN4829.2 [Aspergillus nidulans FGSC A4] gi|259482316|tpe|CBF76682.1| TPA: aldehyde reductase I (ARI),
  misc_feature (1)..(322): NCBI GI: 159127709 Blast Desc: aldehyde reductase I (ARI), [Aspergillus fumigatus A1163]
  misc_feature (1)..(322): NCBI GI: 119492059 Blast Desc: aldo-keto reductase [Neosartorya fischeri NRRL 181] gi|119411684|gb|EAW21627.1| aldo-keto reductase [Neosartorya fischeri NRRL 181]
  misc_feature (1)..(312): NCBI GI: 70999966 Blast Desc: aldehyde reductase I (ARI) [Aspergillus fumigatus Af293] gi|66852337|gb|EAL92662.1| aldehyde reductase I (ARI), [Aspergillus fumigatus Af293]
  misc_feature (1)..(317): NCBI GI: 240110345 Blast Desc: alcohol dehydrogenase, [Coccidioides posadasii C735 delta SOWgp]
  misc_feature (1)..(331): NCBI GI: 67522445 Blast Desc: AN1679.2 [Aspergillus nidulans FGSC A4] gi|40745643|gb|EAA64799.1| AN1679.2 [Aspergillus nidulans FGSC A4] gi|259487018|tpe|CBF85353.1| TPA: NADP(+) coupled glycerol
  misc_feature (1)..(322): NCBI GI: 145231224 Blast Desc: An01g14880 [Aspergillus niger] gi|134056007|emb|CAK37442.1| protein product [Aspergillus niger]
  misc_feature (6)..(322): SWISSPROT Homolog: EC 1.1.1.2 Alcohol dehydrogenase (NADP(+))
MQLPYSFNVNNGSQIPAIGLGTFQGDTGNARVEDAVVRALKIGYRHIDGAAAYGNEKEIGRAIQKSGVSRGELFITSKLAQTWHEPHSVEQALDMTLSDLQLEYIPHAYKSDEYHETLRHPSGNGKPVIDYDLSRDYVSTWRAMESLVESGKAKAIGVSNFNLLKMKNLIEVGGIIPAVNQVEIHPYLPQKELVDFCQANRVVVMAHQPLGGRPVGVVKAHANVSPPTEHPTVRRIASLTMKSEAQVCLSWSVQRGIPVIPKSVKDEHMKENLDLCWLSDEHFAAIDELSRKTGPIRFLNPAPHIGFDIFDEENDQPVCDKAPWDEDRGYVRCRKSHGGEDS

SEQ ID NO: 30667 - DNA, 1625 bp, Muscodor strobelii; identical to SEQ ID NO: 30664
  misc_feature: SGI EST ID NO. CUFF.72624.0
  misc_feature: Variant of the nucleotide sequence at SEQ ID NO 30665

SEQ ID NO: 30668 - DNA, 1218 bp, Muscodor strobelii
  misc_feature: SGI cDNA ID NO. 570550
  misc_feature: Encodes the peptide sequence at SEQ ID NO 30669
atgcgcgtgctgaggtctgcgtgggtgaagatcatcgcgtgggcactcatcaatgtcggtagatgcacgagtcccccacattgtagtatcgtgagcttcgagtctatgttagcccgcctagaggtccccgcgacgacgaccacagtcatatatgcgactgagatcgaggcaggcggcacttcgttcgatgcgagcctcgaatatccaaacaatgcgacaaacttaccaccgctatgcgcagtgaagattaatgtcaaatcgtctagcaacacgtcattcaatctaggaatcttcttgcctagtccttccaaatggaatggccgcctgatgaccactggaaacggcggatttggtgggggcattaactatcccgatatgggcgaatacgcacattatgggttcgcaagtctgtcaaccgataccgggcatgattcagatattgaagatagttcgtgggctttgaataatccagaagccatcattgattggagctatcgcgccctacacggttcagttgctgttgcaaaagagattgtgtcagtcttttacagtattagtggaaagtgttctacgccatccgctatgcggtcgtactacaccggctgtgctactggcggtcgacaagggctacgattattgcagctttatcccgatgatttcgatggtcttctgattggcgacgcggcatggcagacgacccatttgcagacgtggtcgacctggctacctcgtcaggactacccaccagaatctccatatcatatatcggagattctcttcacctcgctgacatcgcgtatcaccgagatctgtgacgggcaggatggactctctgattcggtcttgcaagagcccagcaaatgcaacatagactacgaagacctactttgttcgactttatctacggatcaaattccatgtgtgaccgaataccagatgattacgctacggaaaatgttttctccttacaacttaaacggaacttccgtgtttccaggtctgccattcggcgccgacccgtctatacttgcttcgggatcgaactccgtcggctacggatattttcagaacttcatttataacacgacatcatataactttacctcatacaacgacgatgacttcttcgccgcagtaaatagggacccagggcgagcgactgcgcaggacttccatatttcaccttttgagcagagagggggcaagatcatcatgtaa

SEQ ID NO: 30669 - protein, 405 aa, Muscodor strobelii
  misc_feature: SGI Peptide ID NO. 570550
  misc_feature (79)..(405): Pfam Id: PF07519 Pfam Desc: Tannase and feruloyl esterase
  misc_feature (63)..(405): NCBI GI: 116214427 Blast Desc: CHGG_11054 [Chaetomium globosum CBS 148.51] gi|88175409|gb|EAQ82878.1| CHGG_11054 [Chaetomium globosum CBS 148.51]
  misc_feature (12)..(405): NCBI GI: 212530880 Blast Desc: feruloyl esterase B precursor, [Penicillium marneffei ATCC 18224] gi|210074995|gb|EEA29082.1| feruloyl esterase B precursor, [Penicillium marneffei ATCC 18224]
  misc_feature (23)..(405): NCBI GI: 85091584 Blast Desc: NCU09026 [Neurospora crassa OR74A] gi|28920367|gb|EAA29737.1| conserved [Neurospora crassa OR74A]
  misc_feature (25)..(405): NCBI GI: 39942844 Blast Desc: MGG_03502 [Magnaporthe grisea 70-15] gi|145009941|gb|EDJ94597.1| MGG_03502 [Magnaporthe grisea 70-15]
  misc_feature (26)..(404): NCBI GI: 154322593 Blast Desc: BC1G_00639 [Botryotinia fuckeliana B05.10] gi|150847973|gb|EDN23166.1| BC1G_00639 [Botryotinia fuckeliana B05.10]
  misc_feature (48)..(404): NCBI GI: 189210102 Blast Desc: feruloyl esterase B precursor [Pyrenophora tritici-repentis Pt-1C-BFP] gi|187977476|gb|EDU44102.1| feruloyl esterase B precursor [Pyrenophora tritici-repentis Pt-1C-BFP]
  misc_feature (71)..(404): NCBI GI: 145257202 Blast Desc: An04g02780 [Aspergillus niger] gi|134058558|emb|CAK96445.1| protein product [Aspergillus niger]
  misc_feature (45)..(404): NCBI GI: 238507123 Blast Desc: conserved [Aspergillus flavus NRRL3357] gi|220689476|gb|EED45827.1| conserved [Aspergillus flavus NRRL3357]
  misc_feature (21)..(405): NCBI GI: 171679739 Blast Desc: protein product [Podospora anserina] gi|170939495|emb|CAP64723.1| protein product [Podospora anserina]
  misc_feature (68)..(404): NCBI GI: 169621189 Blast Desc: SNOG_13802 [Phaeosphaeria nodorum SN15] gi|111057706|gb|EAT78826.1| SNOG_13802 [Phaeosphaeria nodorum SN15]
  misc_feature (78)..(404): SWISSPROT Homolog: EC 3.1.1.73 Feruloyl esterase
MRVLRSAWVKIIAWALINVGRCTSPPHCSIVSFESMLARLEVPATTTTVIYATEIEAGGTSFDASLEYPNNATNLPPLCAVKINVKSSSNTSFNLGIFLPSPSKWNGRLMTTGNGGFGGGINYPDMGEYAHYGFASLSTDTGHDSDIEDSSWALNNPEAIIDWSYRALHGSVAVAKEIVSVFYSISGKCSTPSAMRSYYTGCATGGRQGLRLLQLYPDDFDGLLIGDAAWQTTHLQTWSTWLPRQDYPPESPYHISEILFTSLTSRITEICDGQDGLSDSVLQEPSKCNIDYEDLLCSTLSTDQIPCVTEYQMITLRKMFSPYNLNGTSVFPGLPFGADPSILASGSNSVGYGYFQNFIYNTTSYNFTSYNDDDFFAAVNRDPGRATAQDFHISPFEQRGGKIIM

SEQ ID NO: 30670 - DNA, 583 bp, Muscodor strobelii
  misc_feature: SGI EST ID NO. CUFF.72627.0
  misc_feature: Variant of the nucleotide sequence at SEQ ID NO 30668
tcataaggctgtagtacgccgtataaactagtctgacttgctcggcttaagcttttcgaatgacataaaatgtaggcgtcctggtcgaagattttcctttccgcggcctttgagcgatacagctgcccgagctttgcgcgctcattcggccttggtcaattacgtagacacaaaatgcgcgtgctgaggtctgcgtgggtgaagatcatcgcgtgggcactcatcaatgtcggtagatgcacgagtcccccacattgtagtatcgtgagcttcgagtctatgttagcccgcctagaggtccccgcgacgacgaccacagtcatatatgcgactgagatcgaggcaggcggcacttcgttcgatgcgagcctcgaatatccaaacaatgcgacaaacttaccaccgctatgcgcagtgaagattaatgtcaaatcgtctagcaacacgtcattcaatctaggaatcttcttgcctagtccttccaaatggaatggccgcctgatgaccactggaaacggcggatttggtgggggcattaactatcccgatatgggcgaatacgcacattatgggttcgcaagtc

SEQ ID NO: 30671 - DNA, 912 bp, Muscodor strobelii
  misc_feature: SGI cDNA ID NO. 570551
  misc_feature: Encodes the peptide sequence at SEQ ID NO 30672
atggactttccttcggtcaacatcattgagcttcctgataggcgcagtctctcgtacgctgtctttggtgacgaaacggctaaaaacaccgtcttttatcaccatggcttcccgtccagccgcaatgaggccttgatgtttacggagtctgcacgtcgatatggaattcgcctcgtcgcacccgaccgtccgggctacggaaactcgacaccacaagcaggccgtcgcattattgactggccagctgatctcgctgctttggcgaaacatctgggtgtgacgcgttttgcagttattggagtttcaggtggtgcaccatacgcgctcgcagcctggcacgcgctcccacatgatctgtgcgtcggcgtcgcagttgttagcggattttatccagtctcactcggcactgaaggcatgttagtggctaatcgtgtcatcttgaacatcgcgcaatggtcgacatggattgtcgcgaaaggcctggatcttttcatcggatcacttgtccaagacattgccaaaggagagaagaagtttggcgatcaggctacgaaagcttggccacgaccagatgctgaggcttggcattctcacgctgatgttcgcaaggctctgatgggtggaatggctcaggctttcgagcaaggtggtatgggaagcgcatgggaattttacctcaatggacatgactggggatttcagctggaagattcagatgtcccacccggtaaaatggtgttgtggcatgggaggcaagacatcaatgccccagctcgtatggcagaaaaggtagcggagaaagtcgagaatgccgagttgcgaatgttagaagaggacgcacatgtaagtgtcatccccagcaagagggacgagatcatggagacggtgagaaatatgctttctgcctcatga

SEQ ID NO: 30672 - protein, 303 aa, Muscodor strobelii
  misc_feature: SGI Peptide ID NO. 570551
  misc_feature (56)..(298): Pfam Id: PF00561 Pfam Desc: alpha/beta hydrolase fold
  misc_feature (7)..(300): NCBI GI: 46127753 Blast Desc: FG08254.1 [Gibberella zeae PH-1]
  misc_feature (1)..(301): NCBI GI: 256733373 Blast Desc: NECHADRAFT_35689 [Nectria haematococca mpVI 77-13-4]
  misc_feature (9)..(296): NCBI GI: 189211733 Blast Desc: alpha/beta hydrolase fold domain containing protein [Pyrenophora tritici-repentis Pt-1C-BFP] gi|187979394|gb|EDU46020.1| alpha/beta hydrolase fold domain
  misc_feature (6)..(303): NCBI GI: 39974049 Blast Desc: MGG_00829 [Magnaporthe grisea 70-15] gi|145018232|gb|EDK02511.1| MGG_00829 [Magnaporthe grisea 70-15]
  misc_feature (9)..(293): NCBI GI: 169609935 Blast Desc: SNOG_08059 [Phaeosphaeria nodorum SN15] gi|111063215|gb|EAT84335.1| SNOG_08059 [Phaeosphaeria nodorum SN15]
  misc_feature (3)..(233): NCBI GI: 116178782 Blast Desc: CHGG_00019 [Chaetomium globosum CBS 148.51] gi|88184316|gb|EAQ91784.1| CHGG_00019 [Chaetomium globosum CBS 148.51]
  misc_feature (7)..(285): NCBI GI: 119180110 Blast Desc: CIMG_08725 [Coccidioides immitis RS]
  misc_feature (7)..(285): NCBI GI: 240110272 Blast Desc: alpha/beta hydrolase fold family protein [Coccidioides posadasii C735 delta SOWgp]
  misc_feature (1)..(300): NCBI GI: 39966483 Blast Desc: MGG_01903 [Magnaporthe grisea 70-15] gi|145009600|gb|EDJ94256.1| MGG_01903 [Magnaporthe grisea 70-15]
  misc_feature (3)..(296): NCBI GI: 238839490 Blast Desc: hydrolase [Microsporum canis CBS 113480]
MDFPSVNIIELPDRRSLSYAVFGDETAKNTVFYHHGFPSSRNEALMFTESARRYGIRLVAPDRPGYGNSTPQAGRRIIDWPADLAALAKHLGVTRFAVIGVSGGAPYALAAWHALPHDLCVGVAVVSGFYPVSLGTEGMLVANRVILNIAQWSTWIVAKGLDLFIGSLVQDIAKGEKKFGDQATKAWPRPDAEAWHSHADVRKALMGGMAQAFEQGGMGSAWEFYLNGHDWGFQLEDSDVPPGKMVLWHGRQDINAPARMAEKVAEKVENAELRMLEEDAHVSVIPSKRDEIMETVRNMLSAS

SEQ ID NO: 30673 - DNA, 3371 bp, Muscodor strobelii
  misc_feature: SGI EST ID NO. CUFF.72636.0
  misc_feature: Variant of the nucleotide sequence at SEQ ID NO 30671
aaaggaagcaatgtaacgataatatcctttcaagagtcagttcaatgccacgaggattggtttttattagatcattcctcgtttcgactatgtatgtgatgatcacacttccagtcaacatcataaagcccccaagttcagctgcactttggcatttcgaactcgtccgtcattaataggtcatcaattcagcatggactttccttcggtcaacatcattgagcttcctgataggcgcagtctctcgtacgctgtctttggtgacgaaacggctaaaaacaccgtcttttatcaccatggcttcccgtccagccgcaatgaggccttgatgtttacggagtctgcacgtcgatatggaattcgcctcgtcgcacccgaccgtccgggctacggaaactcgacaccacaagcaggccgtcgcattattgactggccagctgatctcgctgctttggcgaaacatctgggtgtgacgcgttttgcagttattggagtttcaggtggtgcaccatacgcgctcgcagcctggcacgcgctcccacatgatctgtgcgtcggcgtcgcagttgttagcggattttatccagtctcactcggcactgaaggcatgttagtggctaatcgtgtcatcttgaacatcgcgcaatggtcgacatggattgtcgcgaaaggcctggatcttttcatcggatcacttgtccaagacattgccaaaggagagaagaagtttggcgatcaggctacgaaagcttggccacgaccagatgctgaggcttggcattctcacgctgatgttcgcaaggctctgatgggtggaatggctcaggctttcgagcaaggtggtatgggaagcgcatgggaattttacctcaatggacatgactggggatttcagctggaagattcagatgtcccacccggtaaaatggtgttgtggcatgggaggcaagacatcaatgccccagctcgtatggcagaaaaggtagcggagaaagtcgagaatgccgagttgcgaatgttagaagaggacgcacatgtaagtgtcatccccagcaagagggacgagatcatggagacggtgagaaatatgctttctgcctcatgaattgcgaaattttctggtacacacataatatcaacatattgttatcatctggtcctagtctgtgtatcgaggtgatcgttgatagcgacaaagtaggcgatcactcggcaatggacagagtcaacctctattgtacatctgttggtcgtggcggttattgccctccaaatatcatgacgaatttagttatggagaactaggggcagagtctttcacaccagaagcgacaataagaagaaatttgaaagggagaatttttatttattacgcgacagagccgtgcaacttcatagcttccagtgtgccgaaccttcgcctagactgaagcacactttgattgtcttttcctacaccggcgtagaaatctatggcatgcgcaagcgtagaaacacaaagcagcttgcattgtggtctttgcaattcaatacatataagatctggttgcaggccgcgagtgacgtcgcacgattgatttccagcatcgtaccaacagcgcaaaggctttgtcacatggagattcgtaccgcccgacccgcagtggcggttgcagcaccgttggccctaaattaagtgctcctaggccttgccatcttcactattcctccttcatccaccaacttgttacgcgtacatagtcgccacaccttttcaatagtcagatactgttcgatctgcatatgccgagctcgctctcattagagcaagagtgtagaataaatcactcgacaattcagatcattttcccttattcaaagccgagggcagtgagcaacgcactgggtgtctcatggaaaaactcccagtcgaactaggtcagcgaatactcgcacatctcgatctgaacacgctgcgagatgccgctctttcttgtcgttgcttttttgaggccttcaatggtgctcaagatttgattgttggcgaaattcttctgcgagagattcaccctgatgtactgccggaagctctcctggtcaatatttcatggaatcatggtaaaccgtccgtggagaaagccattcaattcgcccagcagaatattcgacgtagagaacctatctcatcgaaatggcgcttcattgacgcttttcctctaataaaatttcatgagaaagtcagatatctcgcaactcaagctgctgccgatgcgctttttagatacccgcgcctgactatcaagggacagtcaaatattccgacccccgaggaagtgcgtcggttcgagcgaactctatatcgtttccagctctactgcaatgtcatcggtggattcctccccgatgaccccaatgacctcgaagagatgttcttcgaccatttcgctacttgggaaaacgagcaattagcttgcatccaagaacatctgacacgactcgtttccaaaccattcaactatcttgtcgatcacgatgtgacttggggatacctcggggttccatatatcgatcggcatggatcagatcatgcgcgggcaatcttgtctgagggtattgataagatatatcgcttgtcccaagcctcgaattacgaacagatttatgctctattaagtcgcggagaagacagatttagcgagcctccgaggttatgtgtatttgtagactggggcattgaaaagggtgcgaaccctctaattccgccttacttaccgctcgaggagctggaagacgaggacaaacgattcgtgatatccaagcctttctacaaggatcccgaccgtggcccggcgtcaatgtgggagtgggtatatcgcgacttctttcctggcgaattggtaggaaatccattcatgagaatcttccgacagtgggcttttccactttgggatcattcgcgcctcacaagcaccggcattctagaagacattagtatccctggggaactagtcaatagtgagctggaatttgaggaatataatactccgtctcgcttagaatttctagaaaaaacccagaacgacaggacggaaatatggaaaatggcaggtcatggttggtatagctacaatgacaagaagcatgtcgagtacaccccctttgacattgacccgtcggtacagtttaactatatcaagcccaacactcttgaggcagccaaagctttctggcagggttatcgagatcatgtgcgacagtctgaagcgtggaaccttataaggcccaacagcaatggaggataagctcgagacaatttaatcattcggtctgcctttcagtaacatagcgcggtgatatgatgtccatggacaactcggtccatacgagctcgt

SEQ ID NO: 30674 - DNA, 1389 bp, Muscodor strobelii
  misc_feature: SGI cDNA ID NO. 570552
  misc_feature: Encodes the peptide sequence at SEQ ID NO 30675
atggaaaaactcccagtcgaactaggtcagcgaatactcgcacatctcgatctgaacacgctgcgagatgccgctctttcttgtcgttgcttttttgaggccttcaatggtgctcaagatttgattgttggcgaaattcttctgcgagagattcaccctgatgtactgccggaagctctcctggtcaatatttcatggaatcatggtaaaccgtccgtggagaaagccattcaattcgcccagcagaatattcgacgtagagaacctatctcatcgaaatggcgcttcattgacgcttttcctctaataaaatttcatgagaaagtcagatatctcgcaactcaagctgctgccgatgcgctttttagatacccgcgcctgactatcaagggacagtcaaatattccgacccccgaggaagtgcgtcggttcgagcgaactctatatcgtttccagctctactgcaatgtcatcggtggattcctccccgatgaccccaatgacctcgaagagatgttcttcgaccatttcgctacttgggaaaacgagcaattagcttgcatccaagaacatctgacacgactcgtttccaaaccattcaactatcttgtcgatcacgatgtgacttggggatacctcggggttccatatatcgatcggcatggatcagatcatgcgcgggcaatcttgtctgagggtattgataagatatatcgcttgtcccaagcctcgaattacgaacagatttatgctctattaagtcgcggagaagacagatttagcgagcctccgaggttatgtgtatttgtagactggggcattgaaaagggtgcgaaccctctaattccgccttacttaccgctcgaggagctggaagacgaggacaaacgattcgtgatatccaagcctttctacaaggatcccgaccgtggcccggcgtcaatgtgggagtgggtatatcgcgacttctttcctggcgaattggtaggaaatccattcatgagaatcttccgacagtgggcttttccactttgggatcattcgcgcctcacaagcaccggcattctagaagacattagtatccctggggaactagtcaatagtgagctggaatttgaggaatataatactccgtctcgcttagaatttctagaaaaaacccagaacgacaggacggaaatatggaaaatggcaggtcatggttggtatagctacaatgacaagaagcatgtcgagtacaccccctttgacattgacccgtcggtacagtttaactatatcaagcccaacactcttgaggcagccaaagctttctggcagggttatcgagatcatgtgcgacagtctgaagcgtggaaccttataaggcccaacagcaatggaggataa

SEQ ID NO: 30675 - protein, 462 aa, Muscodor strobelii
  misc_feature: SGI Peptide ID NO. 570552
  misc_feature (4)..(412): NCBI GI: 238845280 Blast Desc: conserved [Microsporum canis CBS 113480]
  misc_feature (1)..(443): NCBI GI: 256720789 Blast Desc: [Nectria haematococca mpVI 77-13-4]
  misc_feature (17)..(350): NCBI GI: 145245225 Blast Desc: An11g09220 [Aspergillus niger] gi|134079576|emb|CAK97052.1| [Aspergillus niger]
  misc_feature (4)..(423): NCBI GI: 159123500 Blast Desc: AFUB_080550 [Aspergillus fumigatus A1163]
  misc_feature (4)..(423): NCBI GI: 70983990 Blast Desc: AFUA_8G07220 [Aspergillus fumigatus Af293] gi|66845146|gb|EAL85482.1| AFUA_8G07220 [Aspergillus fumigatus Af293]
  misc_feature (4)..(423): NCBI GI: 119485841 Blast Desc: NFIA_100030 [Neosartorya fischeri NRRL 181] gi|119410419|gb|EAW20366.1| conserved [Neosartorya fischeri NRRL 181]
  misc_feature (1)..(356): NCBI GI: 119182895 Blast Desc: [Coccidioides immitis RS]
  misc_feature (1)..(356): NCBI GI: 240109431 Blast Desc: CPC735_029360 [Coccidioides posadasii C735 delta SOWgp]
  misc_feature (1)..(396): NCBI GI: 258571307 Blast Desc: [Uncinocarpus reesii 1704] gi|237904727|gb|EEP79128.1| [Uncinocarpus reesii 1704]
  misc_feature (1)..(356): NCBI GI: 256731130 Blast Desc: NECHADRAFT_85066 [Nectria haematococca mpVI 77-13-4]
MEKLPVELGQRILAHLDLNTLRDAALSCRCFFEAFNGAQDLIVGEILLREIHPDVLPEALLVNISWNHGKPSVEKAIQFAQQNIRRREPISSKWRFIDAFPLIKFHEKVRYLATQAAADALFRYPRLTIKGQSNIPTPEEVRRFERTLYRFQLYCNVIGGFLPDDPNDLEEMFFDHFATWENEQLACIQEHLTRLVSKPFNYLVDHDVTWGYLGVPYIDRHGSDHARAILSEGIDKIYRLSQASNYEQIYALLSRGEDRFSEPPRLCVFVDWGIEKGANPLIPPYLPLEELEDEDKRFVISKPFYKDPDRGPASMWEWVYRDFFPGELVGNPFMRIFRQWAFPLWDHSRLTSTGILEDISIPGELVNSELEFEEYNTPSRLEFLEKTQNDRTEIWKMAGHGWYSYNDKKHVEYTPFDIDPSVQFNYIKPNTLEAAKAFWQGYRDHVRQSEAWNLIRPNSNGG

SEQ ID NO: 30676 - DNA, 3371 bp, Muscodor strobelii; identical to SEQ ID NO: 30673
  misc_feature: SGI EST ID NO. CUFF.72636.0
  misc_feature: Variant of the nucleotide sequence at SEQ ID NO 30674

SEQ ID NO: 30677 - DNA, 882 bp, Muscodor strobelii
  misc_feature: SGI cDNA ID NO. 570553
  misc_feature: Encodes the peptide sequence at SEQ ID NO 30678
atggcttacacgatccagtccgcggcgaagctcaacaacgggtttgaaatcccgcttctaggttttggtgtctaccaaactcctccccatgagaccgagaaggcgtgtgccgaggcgctcaaagtgggataccggcacatcgactctgcagtgatgtaccgcaacgaagcgggggtgggagccgcaatgaaaaagagcggcatcccgagatccgaaatattctacacatccaagatccctcaggtcccaaatagcggaaatgactatgtaaagactaaggcacaggtcgacctcagtctcaaaactgccggcgttgactatattgatttgatgttgattcacgctccgtttggaggctcagcaaatcgcaagggagtgtggaaggcactcgtcgaggctgtcgaggaaggcaagattcgaagtattggcgtgagcaattacggaattcatcatctcgaagaattggagtcacacattgccgagctcgaggaagaaaggggagggaagggaaaaggaggtatcatctccgtggcgcaatacgaagttcatccttggtgtgctcgcaaagacattgctgaatggtgcgcaaagcgcggtattgtcttggaagcttactgcccagtggtcagaggccaaaagtttgacgatccggaagtgaagcagttggcagagaagtatgggaagacgcctgcgcaaatattgatcaggtggagcttacaaaagggatacgtgcctcttccgaagagtgtcacaccgagcagaatccaagagaacgccgatatctacgggttcagcttgacagactctgaggtgagtgccttggagaagtcggagtatagcccgatagcctgggatccaactcaaacgggcctcgacaattaa

SEQ ID NO: 30678 - protein, 293 aa, Muscodor strobelii
  misc_feature: SGI Peptide ID NO. 570553
  misc_feature (11)..(279): Pfam Id: PF00248 Pfam Desc: Aldo/keto reductase family
  misc_feature (11)..(155): Pfam Id: PF00248 Pfam Desc: Aldo/keto reductase family
  misc_feature (177)..(279): Pfam Id: PF00248 Pfam Desc: Aldo/keto reductase family
  misc_feature (2)..(293): NCBI GI: 39949783 Blast Desc: aldehyde reductase, [Magnaporthe grisea 70-15] gi|145009366|gb|EDJ94077.1| aldehyde reductase, [Magnaporthe grisea 70-15]
  misc_feature (5)..(287): NCBI GI: 46111643 Blast Desc: FG02703.1 [Gibberella zeae PH-1]
  misc_feature (3)..(292): NCBI GI: 156047827 Blast Desc: SS1G_09603 [Sclerotinia sclerotiorum 1980] gi|154693998|gb|EDN93736.1| SS1G_09603 [Sclerotinia sclerotiorum 1980]
  misc_feature (5)..(292): NCBI GI: 256725688 Blast Desc: [Nectria haematococca mpVI 77-13-4]
  misc_feature (5)..(293): NCBI GI: 164422959 Blast Desc: NCU09519 [Neurospora crassa OR74A] gi|157069889|gb|EAA29278.2| NCU09519 [Neurospora crassa OR74A]
  misc_feature (5)..(289): NCBI GI: 169595528 Blast Desc: SNOG_00504 [Phaeosphaeria nodorum SN15] gi|111070879|gb|EAT91999.1| SNOG_00504 [Phaeosphaeria nodorum SN15]
  misc_feature (5)..(293): NCBI GI: 116191471 Blast Desc: CHGG_05453 [Chaetomium globosum CBS 148.51] gi|88181366|gb|EAQ88834.1| CHGG_05453 [Chaetomium globosum CBS 148.51]
  misc_feature (4)..(293): NCBI GI: 242799234 Blast Desc: aldo-keto reductase (AKR), [Talaromyces stipitatus ATCC 10500] gi|218716681|gb|EED16102.1| aldo-keto reductase (AKR), [Talaromyces stipitatus ATCC 10500]
  misc_feature (4)..(287): NCBI GI: 189209285 Blast Desc: 2,5-diketo-D-gluconic acid reductase A [Pyrenophora tritici-repentis Pt-1C-BFP] gi|187977068|gb|EDU43694.1| 2,5-diketo-D-gluconic acid reductase A [Pyrenophora Pt-1C-BFP]
  misc_feature (2)..(287): NCBI GI: 70998955 Blast Desc: aldo-keto reductase (AKR) [Aspergillus fumigatus Af293] gi|66851836|gb|EAL92161.1| aldo-keto reductase (AKR), [Aspergillus fumigatus Af293] gi|159127217|gb|EDP52332.1| (AKR),
  misc_feature (4)..(276): SWISSPROT Homolog: EC 1.1.1.274 2,5-didehydrogluconate reductase
MAYTIQSAAKLNNGFEIPLLGFGVYQTPPHETEKACAEALKVGYRHIDSAVMYRNEAGVGAAMKKSGIPRSEIFYTSKIPQVPNSGNDYVKTKAQVDLSLKTAGVDYIDLMLIHAPFGGSANRKGVWKALVEAVEEGKIRSIGVSNYGIHHLEELESHIAELEEERGGKGKGGIISVAQYEVHPWCARKDIAEWCAKRGIVLEAYCPVVRGQKFDDPEVKQLAEKYGKTPAQILIRWSLQKGYVPLPKSVTPSRIQENADIYGFSLTDSEVSALEKSEYSPIAWDPTQTGLDN

SEQ ID NO: 30679 - DNA, 1166 bp, Muscodor strobelii
  misc_feature: SGI EST ID NO. CUFF.72816.0
  misc_feature: Variant of the nucleotide sequence at SEQ ID NO 30677
cgacgagctctgtctcccgacctgcgtattgacttagctcctccggatttgcgatcatccagcttgattactaccagaaacatggcttacacgatccagtccgcggcgaagctcaacaacgggtttgaaatcccgcttctaggttttggtgtctaccaaacgtaagagcaattcatactctagcatgaacatttgacttatatacacagtcctccccatgagaccgagaaggcgtgtgccgaggcgctcaaagtgggataccggcacatcgactctgcagtgatgtaccgcaacgaagcgggggtgggagccgcaatgaaaaagagcggcatcccgagatccgaaatattctacacatccaagatccctcaggtcccaaatagcggaaatgactatgtaaagactaaggcacaggtcgacctcagtctcaaaactgccggcgttgactatattgatttgatgttgattcacgctccgtttggaggctcagcaaatcgcaagggagtgtggaaggcactcgtcgaggctgtcgaggaaggcaagattcgaagtattggcgtgagcaattacggaattcatcatctcgaagaattggagtcacacattgccgagctcgaggaagaaaggggagggaagggaaaaggaggtatcatctccgtggcgcaatacgaagttcatccttggtgtgctcgcaaagacattgctgaatggtgcgcaaagcgcggtattgtcttggaagcttactgcccagtggtcagaggccaaaagtttgacgatccggaagtgaagcagttggcagagaagtatgggaagacgcctgcgcaaatattgatcaggtggagcttacaaaagggatacgtgcctcttccgaagagtgtcacaccgagcagaatccaagagaacgccgatatctacgggttcagcttgacagactctgaggtgagtgccttggagaagtcggagtatagcccgatagcctgggatccaactcaaacgggcctcgacaattaagcaagcccaggggttgtatattcacatccattcgatatgtaggagaaggagaaaacaattgcgcgccttgaagtgccgcattacttttacttagaatgaggcagaagagtaaccgtgaattatacttgaagtcgagtcttgaaggactgctggaa

SEQ ID NO: 30680 - DNA, 705 bp, Muscodor strobelii
  misc_feature: SGI cDNA ID NO. 570554
  misc_feature: Encodes the peptide sequence at SEQ ID NO 30681
atggtatccgcttcgttgctggttgactacaatgctacaagaggcgatgccgtgtcgaagatgggcctcgtcaacctcgaagccgctagaggagagtcgcagtctgaaaacacagcagatctttatatcaaaagcgatgtagactggcgcggactaccagcagctcattttcatcgaattgctggtgacatccgtgccgagtatcacgctttaaataagcagacagtccaaggcaagacgtactttattggatattcgttcgcacttggcgcgatgcctgaaagcctcatgatctttcagtggaaagcctacgatttcgacagcgggtcggacacagccaacattccgctttcgctagaattcaaaaagggtttgatgaactttcaatactcagcaacggagtccggcggacgaaatgcacaatggtcgaaggctgtcaacactaaaaacccctacaggatcgccttcgagattcacgcagatcctgacccaaaggttggctatgtccgcatatggtggaatggtcgcccagctacatttaccacgacgggaacaaacttgctgatggcgaatacgtatgggtcgcgctgtgaccctaaagtcggtgcttatcgtggcgaggctgtacaagtcgacacatgggtctatcagcttcagatatccaatacaaaggcggacttggactcatactttttcaacgagtga

SEQ ID NO: 30681 - protein, 234 aa, Muscodor strobelii
  misc_feature: SGI Peptide ID NO. 570554
  misc_feature (7)..(227): NCBI GI: 121714104 Blast Desc: ACLA_016830 [Aspergillus clavatus NRRL 1] gi|119402816|gb|EAW13237.1| ACLA_016830 [Aspergillus clavatus NRRL 1]
  misc_feature (4)..(227): NCBI GI: 238500251 Blast Desc: conserved [Aspergillus flavus NRRL3357] gi|220693113|gb|EED49459.1| conserved [Aspergillus flavus NRRL3357]
  misc_feature (4)..(227): NCBI GI: 169779583 Blast Desc: [Aspergillus oryzae RIB40] gi|83772995|dbj|BAE63123.1| protein product [Aspergillus oryzae]
  misc_feature (4)..(227): NCBI GI: 115384972 Blast Desc: [Aspergillus terreus NIH2624] gi|114196725|gb|EAU38425.1| [Aspergillus terreus NIH2624]
  misc_feature (4)..(220): NCBI GI: 240108633 Blast Desc: CPC735_009830 [Coccidioides posadasii C735 delta SOWgp]
  misc_feature (4)..(220): NCBI GI: 119186267 Blast Desc: [Coccidioides immitis RS]
  misc_feature (4)..(221): NCBI GI: 238838012 Blast Desc: conserved [Microsporum canis CBS 113480]
  misc_feature (65)..(227): NCBI GI: 254390138 Blast Desc: SSCG_02759 [Streptomyces clavuligerus ATCC 27064] gi|197703845|gb|EDY49657.1| SSCG_02759 [Streptomyces clavuligerus ATCC 27064]
MVSASLLVDYNATRGDAVSKMGLVNLEAARGESQSENTADLYIKSDVDWRGLPAAHFHRIAGDIRAEYHALNKQTVQGKTYFIGYSFALGAMPESLMIFQWKAYDFDSGSDTANIPLSLEFKKGLMNFQYSATESGGRNAQWSKAVNTKNPYRIAFEIHADPDPKVGYVRIWWNGRPATFTTTGTNLLMANTYGSRCDPKVGAYRGEAVQVDTWVYQLQISNTKADLDSYFFNE

SEQ ID NO: 30682 - DNA, 1074 bp, Muscodor strobelii
  misc_feature: SGI cDNA ID NO. 570555
  misc_feature: Encodes the peptide sequence at SEQ ID NO 30683
atggcatgttgttggcggttctttctcttggccttagtaaacacacacacgcaagaaagacggaatactatgcgatcagtgagaataaaagatgggcggggagacgcagatgctctctacatcaatgatcatgaactaaatccaaagcctggggcaaaagatgtgatcgtgcaaattagatgtttcggcttaaacagaatggatatcatgcagcgggaagcaaaatacccctatgccttgcccgcggaagctggcgatatcttgggtgttgagttcagcggcatcatagccgaattagatgatcaatgtagctcagatttccaagttggtgacgaggtattcgggctggcatatggaggcgcatatgcagaaaagataagggtgtctgagaatatgctgatgcataaacctgaaagtgtctcatttgaagaggccgcaggcatacctgaaacattttttacagctctccaggctattcatctagtcggcggactgacaaagggacaatctgtgatcattcatgcaggggcttctggcgttgggcaagccgcaatccaaatctcacgattactagaggcaaagtttattttctctacagcaggaacagattcaaaatgcgaattgtgtacatctctcggggctgattttgccatcaactacaagcacggcgacagctttgagactgttgtgtcaagggagacacaaggacgcggtgtcgacctcataattgatatggtcggtcgggactactggcatcgcaacgtcgcatcatgcgcaatggattcgcgaatagttcttgtggctttgatgagcggcgggatagttgacgagtgcagccttcgggctctgatgaacaagagaatatccattctccccaccactttgaggacgagaagtccgggttatcagaaagagcttcgagacctgttttcgaagctcattcttccagcactgactgataagagactaaaagttactattgacaaagtcttctcgtggaaggacgtatcagaagcgcacaaaaggatggaatccaacgcgaacgctggaaagataatctgtacggttgactga

SEQ ID NO: 30683 - protein, 357 aa, Muscodor strobelii
  misc_feature: SGI Peptide ID NO. 570555
  misc_feature (52)..(136): Pfam Id: PF08240 Pfam Desc: Alcohol dehydrogenase GroES-like domain
  misc_feature (167)..(311): Pfam Id: PF00107 Pfam Desc: Zinc-binding dehydrogenase
  misc_feature (24)..(357): NCBI GI: 145251684 Blast Desc: An16g00410 [Aspergillus niger] gi|134082891|emb|CAK42721.1| protein product [Aspergillus niger]
  misc_feature (21)..(356): NCBI GI: 259483472 Blast Desc: TPA: quinone oxidoreductase, (AFU_orthologue; AFUA_1G02090) [Aspergillus nidulans FGSC A4]
  misc_feature (22)..(356): NCBI GI: 39974231 Blast Desc: MGG_00738 [Magnaporthe grisea 70-15] gi|145018329|gb|EDK02608.1| MGG_00738 [Magnaporthe grisea 70-15]
  misc_feature (24)..(356): NCBI GI: 67542061 Blast Desc: AN7194.2 [Aspergillus nidulans FGSC A4] gi|40742256|gb|EAA61446.1| AN7194.2 [Aspergillus nidulans FGSC A4]
  misc_feature (23)..(356): NCBI GI: 85098921 Blast Desc: NCU01419 [Neurospora crassa OR74A] gi|28922203|gb|EAA31451.1| NCU01419 [Neurospora crassa OR74A] gi|28949991|emb|CAD70876.1| NADPH quinone oxidoreductase homolog
  misc_feature (21)..(357): NCBI GI: 156064545 Blast Desc: SS1G_00280 [Sclerotinia sclerotiorum 1980] gi|154691142|gb|EDN90880.1| SS1G_00280 [Sclerotinia sclerotiorum 1980]
  misc_feature (23)..(356): NCBI GI: 119497367 Blast Desc: quinone oxidoreductase, [Neosartorya fischeri NRRL 181] gi|119413604|gb|EAW23545.1| quinone oxidoreductase, [Neosartorya fischeri NRRL 181]
  misc_feature (23)..(356): NCBI GI: 156059638 Blast Desc: SS1G_03831 [Sclerotinia sclerotiorum 1980] gi|154701618|gb|EDO01357.1| SS1G_03831 [Sclerotinia sclerotiorum 1980]
  misc_feature (24)..(357): NCBI GI: 145234510 Blast Desc: An02g14970 [Aspergillus niger] gi|134057573|emb|CAK37983.1| protein product [Aspergillus niger]
  misc_feature (22)..(356): NCBI GI: 154291314 Blast Desc: BC1G_15304 [Botryotinia fuckeliana B05.10] gi|150846996|gb|EDN22189.1| BC1G_15304 [Botryotinia fuckeliana B05.10]
  misc_feature (34)..(353): SWISSPROT Homolog: EC 1.6.5.5 NADPH:quinone reductase
MACCWRFFLLALVNTHTQERRNTMRSVRIKDGRGDADALYINDHELNPKPGAKDVIVQIRCFGLNRMDIMQREAKYPYALPAEAGDILGVEFSGIIAELDDQCSSDFQVGDEVFGLAYGGAYAEKIRVSENMLMHKPESVSFEEAAGIPETFFTALQAIHLVGGLTKGQSVIIHAGASGVGQAAIQISRLLEAKFIFSTAGTDSKCELCTSLGADFAINYKHGDSFETVVSRETQGRGVDLIIDMVGRDYWHRNVASCAMDSRIVLVALMSGGIVDECSLRALMNKRISILPTTLRTRSPGYQKELRDLFSKLILPALTDKRLKVTIDKVFSWKDVSEAHKRMESNANAGKIICTVD

SEQ ID NO: 30684 - DNA, 636 bp, Muscodor strobelii
  misc_feature: SGI cDNA ID NO. 570556
  misc_feature: Elevated expression when VOC is produced
  misc_feature: Encodes the peptide sequence at SEQ ID NO 30685
atgactattgctctagaacatttctggatcaatcccttgagcatgcattttgcccaaattcgtgtcagcgacctagtactagtcgacgagcatgggcgtgtcctaccagatggcgctcaattccctatcaacggtcccgctttcgctattcatagcgaaattcacaaagctcgttcggacatcaacgctgcctgccatgctcattctgtgtatggcaaggcattttcatgctttgggaggccaattgagcctttgtaccaagacgcaatacgtttttataacgacttgagtgtttacaacgactatggagggactgtcgtctcaactgaggaaggacgccgtatcgcagaggcgctcggcccaaaaaatcgaagcatcatcttgcgaaaccatgggattatcacgtgtggctctaccgtagacgaggccgcatttttgttcatttcgcttgacaggtgttgtcattcacaactactcgccaatgctgcagcaggaccaggatgggagaaaatctacatcagagacgacatcgcacaatcaacgcacaagaaaagcgggaattcaagtaaaatgtggcttgccttccagccgtattacgaccaagtggtagcagagagcccagatctgcttcagtaa

SEQ ID NO: 30685 - protein, 211 aa, Muscodor strobelii
  misc_feature: SGI Peptide ID NO. 570556
  misc_feature (2)..(176): Pfam Id: PF00596 Pfam Desc: Class II Aldolase and Adducin N-terminal domain
  misc_feature (6)..(176): Pfam Id: PF00596 Pfam Desc: Class II Aldolase and Adducin N-terminal domain
  misc_feature (7)..(211): NCBI GI: 145251686 Blast Desc: An16g00420 [Aspergillus niger] gi|134082892|emb|CAK42722.1| protein product [Aspergillus niger]
  misc_feature (8)..(210): NCBI GI: 238496987 Blast Desc: aldolase, [Aspergillus flavus NRRL3357] gi|220694609|gb|EED50953.1| aldolase, [Aspergillus flavus NRRL3357]
  misc_feature (8)..(210): NCBI GI: 169774465 Blast Desc: [Aspergillus oryzae RIB40] gi|83769563|dbj|BAE59698.1| protein product [Aspergillus oryzae]
  misc_feature (3)..(206): NCBI GI: 238494866 Blast Desc: class II aldolase/adducin domain protein [Aspergillus flavus NRRL3357] gi|220695319|gb|EED51662.1| class II aldolase/adducin domain protein [Aspergillus flavus NRRL3357]
  misc_feature (3)..(206): NCBI GI: 169777677 Blast Desc: [Aspergillus oryzae RIB40] gi|83772041|dbj|BAE62171.1| protein product [Aspergillus oryzae]
  misc_feature (3)..(206): NCBI GI: 240108656 Blast Desc: Class II Aldolase and Adducin N-terminal domain containing protein [Coccidioides posadasii C735 delta SOWgp]
  misc_feature (3)..(206): NCBI GI: 225681845 Blast Desc: class II aldolase/adducin domain-containing protein [Paracoccidioides brasiliensis Pb03]
  misc_feature (6)..(206): NCBI GI: 169615330 Blast Desc: SNOG_10822 [Phaeosphaeria nodorum SN15] gi|160702937|gb|EAT82216.2| SNOG_10822 [Phaeosphaeria nodorum SN15]
  misc_feature (3)..(206): NCBI GI: 226288942 Blast Desc: Class II Aldolase family protein [Paracoccidioides brasiliensis Pb18]
  misc_feature (3)..(206): NCBI GI: 189207917 Blast Desc: class II aldolase/adducin domain containing protein [Pyrenophora tritici-repentis Pt-1C-BFP] gi|187976385|gb|EDU43011.1| class II aldolase/adducin domain
  misc_feature (9)..(143): SWISSPROT Homolog: EC 4.1.2.17 L-fuculose-phosphate aldolase
  misc_feature: Useful for introducing or modulating the production of volatile compounds
MTIALEHFWINPLSMHFAQIRVSDLVLVDEHGRVLPDGAQFPINGPAFAIHSEIHKARSDINAACHAHSVYGKAFSCFGRPIEPLYQDAIRFYNDLSVYNDYGGTVVSTEEGRRIAEALGPKNRSIILRNHGIITCGSTVDEAAFLFISLDRCCHSQLLANAAAGPGWEKIYIRDDIAQSTHKKSGNSSKMWLAFQPYYDQVVAESPDLLQ

SEQ ID NO: 30686 - DNA, 2777 bp, Muscodor strobelii
  misc_feature: SGI EST ID NO. CUFF.72666.0
  misc_feature: Variant of the nucleotide sequence at SEQ ID NO 30684
gtgtttactaaggccaagagaaagaaccgccaacaacatgccatcttcatatactggtacagagtccttacaatcacagacaacgcttcctgcgccttccaatggaaatgaaacccattcaagcgagaaggccaagttctttgaagatgtacattttctcggcgacgaatcaggaaagatcattattcgatcgccacctacctttgctaacaaagttgacgagagaaactacaaaaagcagcacctagctgcagcgttccgggtttttgcaaagcagggatttgatgagggcgttgccggacacatttcgctacgcgatcccgagaatccaggcaagtaaatccgatgtgctcacttcactgaatactctgatatgaaaagtttatgactattgctctagaacatttctggatcaatcccttgagcatgcattttgcccaaattcgtgtcagcgacctagtactagtcgacgagcatgggcgtgtcctaccagatggcgctcaattccctatcaacggtcccgctttcgctattcatagcgaaattcacaaagctcgttcggacatcaacgctgcctgccatgctcattctgtgtatggcaaggcattttcatgctttgggaggccaattgagcctttgtaccaagacgcaatacgtttttataacgacttgagtgtttacaacgactatggagggactgtcgtctcaactgaggaaggacgccgtatcgcagaggcgctcggcccaaaaaatcgaagcatcatcttgcgaaaccatgggattatcacgtgtggctctaccgtagacgaggccgcatttttgttcatttcgcttgacaggtgttgtcattcacaactactcgccaatgctgcagcaggaccaggatgggagaaaatctacatcagagacgacatcgcacaatcaacgcacaagaaaagcgggaattcaagtaaaatgtggcttgccttccagccgtattacgaccaagtggtagcagagagcccagatctgcttcagtaaattacgaaaaataggctagaagcgaacttcggtatcgttcaatagccgcatatcatgatgacgtgttcaacccctctatggcacttataacgttggttattttcccggagaccaccggggttattttctccttctacaacaaagcccaataccttatcggcaaacatttctcatcgtgtttgtagtatcagagcattaagtaactaagaacatgtcggaaagcttgggctatggagagagccttgtatctgcctgcgcagatgtaccgccatccataaggtttatcaactgcagtagtattctgatacttgatttagattctggcaactacagatgaacacctattcgggaacggaattcatgttcagtgtaaagattggatcgcgaggtgtgcatttcgtccagatgatacagtattgagcaataagtcgtgctttgcacaatctctctcacatataagtcgattgttctaatgatctgtgtgcggatttgtaagtgtactacaagcaaaagttgagtctgattactgggaaacattgtcaatgctatccatgaatccgaaaagtccatcgtcttcccagaagtgcgagttgtgactagtaaaaccttgaagatcatgagagttatggtcctgcgagtttatgaacgtctcaaataacgagttccaatgcgaagactgaggcgactcatccgaaatttgtggcaagtcagcatgtctgaaattgctctctacagaggctgtacgagaagttcaaatgtcagttcattgggatttcctgggaccattagtaatagcatacttgagttctccatgacgtcgtgctttttcataagccgtctgatgatcgcagccggtctcgtgactcctgggttgggagttgaaagctcatctagtgcagacaaactgagcatcaggaggcgattgtgttcaccactgtggttattactccctaaagcggcattgcgaacgtgtatagtacagctcacgtaggcagcatagctggtcaagtaaggcgcgcccctgagtgtgtactctgtttggtaggtggagacgattttggtaatagtcctagcggctgtagtacatgtcttccaacacgctcgagcggtatcaagcacccgtgagcgaaggtggccatcagagacgaatggccgattcaatagtatgactagagaataaaatatgttgtacaagttcaacacattgggcgagggaactgacgtattgttaacaatggggtcgtacaccagatgaggaggtaactggtctttccattgggataaggcactactgagggtgtgcaagtcggaagccgctttcacaccggacggttttgctgaataaagacaagctattatgcgggtcacgatcttggagagattacagagctgtaggaatgtagaaacagaatagatgggcatcggttcatggctcgcaactgtgggcaagatggcttgctctgagtcaaggtatggcatccaagcctcgagttcttcgaaagtgtcgcaaaattcagcaggacaatgattatcatcaagagacatcgccactggccgacccaggtatagactctgaagcttgtcgcaaatgaaagctccccagaatactcttcgacgcagctcttgttcttcctgactcatacctggcttacgacaatcaacgtgcagacctatatcgtataccattcgtatggccagcccactgtaaagccatcctttgctgacgtcgccgcgggctatgtatgtagagcccaaaa

SEQ ID NO: 30687 - DNA, 1989 bp, Muscodor strobelii
  misc_feature: SGI cDNA ID NO. 570557
  misc_feature: Elevated expression when VOC is produced
  misc_feature: Encodes the peptide sequence at SEQ ID NO 30688
atggccgaatctcgatcgccacgccggtccagcatagatgcaagtgcccacgagcgtcactcgagagcatgccaattctgccgagttcgcaagatcaggtgcgataggatactgccagtttgcgcgtcttgtaacgcgcatggacggacttgcgtgtacatcaatgagcagccccggccacgaccctccgctgcacttgtatcctccttacaaaatgaagttcgcacacttcagcgtaaccttgccgagctcaagcatgcacagcccgctcaattagcacatcttccagagcaaatcgatgttccggatagcctttctagcgacctggatgacaatcacactcaggatccctcatcctgcgatataattcaggggaacttacagaacttcacgccgcggccgcttgaagtaggtaaccatgagacggagactgaaacagaggccgaattcaacccttccaatcatgtatcaatcgatgatgaaggtcgtgtggaggccttcggtctcacgtcaacacttcacgacactccgcaagacagtctaatgatccccgagtcaggtataatgcgggcagaaagcaaatatcagcttattgcgaacgcggcattacaacgacagcaagagtatcgtctacgcttacttcctgacattgatggaattcctatcgacatcgctcaacacttgcttgatctacactggaaccgacagcatcacacatttcttctgacatatcgaccagcaatcatgcatgatctcatctatggaggacccaattgttccaaactacttgtgaatgcgatattcgcatgcgccagcaaatactcggaccgagcatatctacgtgacgaccaattggatcctgtcagtgcaggtggtcgattcttccgacgctgcgatgagttaatcaccgctgagctaacgttgggtcggccgaccattcccactatcgtctcacttttgcttttgggctctacatacatagcccgcggcgacgtcagcaaaggatggctttacagtgggctggccatacgaatggtatacgatataggtctgcacgttgattgtcgtaagccaggtatgagtcaggaagaacaagagctgcgtcgaagagtattctggggagctttcatttgcgacaagcttcagagtctatacctgggtcggccagtggcgatgtctcttgatgataatcattgtcctgctgaattttgcgacactttcgaagaactcgaggcttggatgccataccttgactcagagcaagccatcttgcccacagttgcgagccatgaaccgatgcccatctattctgtttctacattcctacagctctgtaatctctccaagatcgtgacccgcataatagcttgtctttattcagcaaaaccgtccggtgtgaaagcggcttccgacttgcacaccctcagtagtgccttatcccaatggaaagaccagttacctcctcatctggtgtacgaccccattgttaacaatacgtcagttccctcgcccaatgtgttgaacttgtacaacatattttattctctagtcatactattgaatcggccattcgtctctgatggccaccttcgctcacgggtgcttgataccgctcgagcgtgttggaagacatgtactacagccgctaggactattaccaaaatcgtctccacctaccaaacagagtacacactcaggggcgcgccttacttgaccagctatgctgcctacgtgagctgtactatacacgttcgcaatgccgctttagggagtaataaccacagtggtgaacacaatcgcctcctgatgctcagtttgtctgcactagatgagctttcaactcccaacccaggagtcacgagaccggctgcgatcatcagacggcttatgaaaaagcacgacgtcatggagaactcaagtatgctattactaatggtcccaggaaatcccaatgaactgacatttgaacttctcgtacagcctctgtag

SEQ ID NO: 30688 - protein, 662 aa, Muscodor strobelii
  misc_feature: SGI Peptide ID NO. 570557
  misc_feature (22)..(61): Pfam Id: PF00172 Pfam Desc: Fungal Zn(2)-Cys(6) binuclear cluster domain
  misc_feature (312)..(406): Pfam Id: PF04082 Pfam Desc: Fungal specific transcription factor domain
  misc_feature (1)..(648): NCBI GI: 240111326 Blast Desc: Fungal specific transcription factor, [Coccidioides posadasii C735 delta SOWgp]
  misc_feature (1)..(635): NCBI GI: 119189209 Blast Desc: CIMG_04652 [Coccidioides immitis RS]
  misc_feature (21)..(630): NCBI GI: 238843337 Blast Desc: nitrogen assimilation transcription factor nirA [Microsporum canis CBS 113480]
  misc_feature (6)..(635): NCBI GI: 145251688 Blast Desc: An16g00430 [Aspergillus niger] gi|134082893|emb|CAK42723.1| protein product [Aspergillus niger]
  misc_feature (62)..(630): NCBI GI: 242800220 Blast Desc: conserved [Talaromyces stipitatus ATCC 10500] gi|218716887|gb|EED16308.1| conserved [Talaromyces stipitatus ATCC 10500]
  misc_feature (156)..(652): NCBI GI: 258576303 Blast Desc: conserved [Uncinocarpus reesii 1704] gi|237902599|gb|EEP77000.1| conserved [Uncinocarpus reesii 1704]
  misc_feature (22)..(643): NCBI GI: 169774467 Blast Desc: [Aspergillus oryzae RIB40] gi|83769564|dbj|BAE59699.1| protein product [Aspergillus oryzae]
  misc_feature (143)..(640): NCBI GI: 115492479 Blast Desc: [Aspergillus terreus NIH2624] gi|114197727|gb|EAU39427.1| [Aspergillus terreus NIH2624]
  misc_feature (22)..(638): NCBI GI: 238496985 Blast Desc: conserved [Aspergillus flavus NRRL3357] gi|220694608|gb|EED50952.1| conserved [Aspergillus flavus NRRL3357]
  misc_feature (146)..(651): NCBI GI: 46117899 Blast Desc: FG04666.1 [Gibberella zeae PH-1]
  misc_feature: Useful for introducing or modulating the production of volatile compounds
MAESRSPRRSSIDASAHERHSRACQFCRVRKIRCDRILPVCASCNAHGRTCVYINEQPRPRPSAALVSSLQNEVRTLQRNLAELKHAQPAQLAHLPEQIDVPDSLSSDLDDNHTQDPSSCDIIQGNLQNFTPRPLEVGNHETETETEAEFNPSNHVSIDDEGRVEAFGLTSTLHDTPQDSLMIPESGIMRAESKYQLIANAALQRQQEYRLRLLPDIDGIPIDIAQHLLDLHWNRQHHTFLLTYRPAIMHDLIYGGPNCSKLLVNAIFACASKYSDRAYLRDDQLDPVSAGGRFFRRCDELITAELTLGRPTIPTIVSLLLLGSTYIARGDVSKGWLYSGLAIRMVYDIGLHVDCRKPGMSQEEQELRRRVFWGAFICDKLQSLYLGRPVAMSLDDNHCPAEFCDTFEELEAWMPYLDSEQAILPTVASHEPMPIYSVSTFLQLCNLSKIVTRIIACLYSAKPSGVKAASDLHTLSSALSQWKDQLPPHLVYDPIVNNTSVPSPNVLNLYNIFYSLVILLNRPFVSDGHLRSRVLDTARACWKTCTTAARTITKIVSTYQTEYTLRGAPYLTSYAAYVSCTIHVRNAALGSNNHSGEHNRLLMLSLSALDELSTPNPGVTRPAAIIRRLMKKHDVMENSSMLLLMVPGNPNELTFELLVQPL

SEQ ID NO: 30689 - DNA, 3141 bp, Muscodor strobelii
  misc_feature: SGI EST ID NO. CUFF.72667.1
  misc_feature: Variant of the nucleotide sequence at SEQ ID NO 30687
attttttcgcgttgatgacccaaaattctacgatggactatgttgttccgttgccgagaattactgacagattgccgccatggccgaatctcgatcgccacgccggtccagcatagatgcaagtgcccacgagcgtcactcgagagcatgccaattctgccgagttcgcaagatcaggtgcgataggatactgccagtttgcgcgtcttgtaacgcgcatggacggacttgcgtgtacatcaatgagcagccccggccacgaccctccgctgcacttgtatcctccttacaaaatgaagttcgcacacttcagcgtaaccttgccgagctcaagcatgcacagcccgctcaattagcacatcttccagagcaaatcgatgttccggatagcctttctagcgacctggatgacaatcacactcaggatccctcatcctgcgatataattcaggggaacttacagaacttcacgccgcggccgcttgaagtaggtaaccatgagacggagactgaaacagaggccgaattcaacccttccaatcatgtatcaatcgatgatgaaggtcgtgtggaggccttcggtctcacgtcaacacttcacgacactccgcaagacagtctaatgatccccgagtcaggtataatgcgggcagaaagcaaatatcagcttattgcgaacgcggcattacaacgacagcaagagtatcgtctacgcttacttcctgacattgatggaattcctatcgacatcgctcaacacttgcttgatctacactggaaccgacagcatcacacatttcttctgacatatcgaccagcaatcatgcatgatctcatctatggaggacccaattgttccaaactacttgtgaatgcgatattcgcatgcgccagcaaatactcggaccgagcatatctacgtgacgaccaattggatcctgtcagtgcaggtggtcgattcttccgacgctgcgatgagttaatcaccgctgagctaacgttgggtcggccgaccattcccactatcgtctcacttttgcttttgggctctacatacatagcccgcggcgacgtcagcaaaggatggctttacagtgggctggccatacgaatggtatacgatataggtctgcacgttgattgtcgtaagccaggtatgagtcaggaagaacaagagctgcgtcgaagagtattctggggagctttcatttgcgacaagcttcagagtctatacctgggtcggccagtggcgatgtctcttgatgataatcattgtcctgctgaattttgcgacactttcgaagaactcgaggcttggatgccataccttgactcagagcaagccatcttgcccacagttgcgagccatgaaccgatgcccatctattctgtttctacattcctacagctctgtaatctctccaagatcgtgacccgcataatagcttgtctttattcagcaaaaccgtccggtgtgaaagcggcttccgacttgcacaccctcagtagtgccttatcccaatggaaagaccagttacctcctcatctggtgtacgaccccattgttaacaatacgtcagttccctcgcccaatgtgttgaacttgtacaacatattttattctctagtcatactattgaatcggccattcgtctctgatggccaccttcgctcacgggtgcttgataccgctcgagcgtgttggaagacatgtactacagccgctaggactattaccaaaatcgtctccacctaccaaacagagtacacactcaggggcgcgccttacttgaccagctatgctgcctacgtgagctgtactatacacgttcgcaatgccgctttagggagtaataaccacagtggtgaacacaatcgcctcctgatgctcagtttgtctgcactagatgagctttcaactcccaacccaggagtcacgagaccggctgcgatcatcagacggcttatgaaaaagcacgacgtcatggagaactcaagtatgctattactaatggtcccaggaaatcccaatgaactgacatttgaacttctcgtacagcctctgtagagagcaatttcagacatgctgacttgccacaaatttcggatgagtcgcctcagtcttcgcattggaactcgttatttgagacgttcataaactcgcaggaccataactctcatgatcttcaaggttttactagtcacaactcgcacttctgggaagacgatggacttttcggattcatggatagcattgacaatgtttcccagtaatcagactcaacttttgcttgtagtacacttacaaatccgcacacagatcattagaacaatcgacttatatgtgagagagattgtgcaaagcacgacttattgctcaatactgtatcatctggacgaaatgcacacctcgcgatccaatctttacactgaacatgaattccgttcccgaataggtgttcatctgtagttgccagaatctaaatcaagtatcagaatactactgcagttgataaaccttatggatggcggtacatctgcgcaggcagatacaaggctctctccatagcccaagctttccgacatgttcttagttacttaatgctctgatactacaaacacgatgagaaatgtttgccgataaggtattgggctttgttgtagaaggagaaaataaccccggtggtctccgggaaaataaccaacgttataagtgccatagaggggttgaacacgtcatcatgatatgcggctattgaacgataccgaagttcgcttctagcctatttttcgtaatttactgaagcagatctgggctctctgctaccacttggtcgtaatacggctggaaggcaagccacattttacttgaattcccgcttttcttgtgcgttgattgtgcgatgtcgtctctgatgtagattttctcccatcctggtcctgctgcagcattggcgagtagttgtgaatgacaacacctgtcaagcgaaatgaacaaaaatgcggcctcgtctacggtagagccacacgtgataatcccatggtttcgcaagatgatgcttcgattttttgggccgagcgcctctgcgatacggcgtccttcctcagttgagacgacagtccctccatagtcgttgtaaa

SEQ ID NO: 30690 - DNA, 936 bp, Muscodor strobelii
  misc_feature: SGI cDNA ID NO. 570558
  misc_feature: Encodes the peptide sequence at SEQ ID NO 30691
atgaccgagtctacgaatcgccaattcaacaaaacgccgggatggctagactggcatgctacaccaagcacccccagtttcaagcttcctcctggcgcgattgattctcactgccacgtcttcggacccggagagaaatacccatattctccagaacggaaatataccccttgcgaagcctcccaagatcaacttttcgctttgagagaccatttaggcttcagtcgtaacgttattgtgcaagcaacatgccatggaactgataatcgagctttagtcgctgcgtgccaagcttcgaacggtcatgcacgcggaatcgccacagtgaaacgagatatatcagatgatcagctcaagacacttcacgcagagggcgtacggggattacggttcaactttgtgagaagactcgttgactttactccgaaagacgaactccgagatctagctgtccgtgttgccaaacttggttggcatattgttgtctactttgaagctgccgacctaccggagctttgggacttcttcacaaacttacctacgaccattgtaattgaccacatgggacgtccagatgtgagcaaatcagttgatggcccggaattcaaactgtttcgcagattcgtgagagaaaatccaaatgtggtcgtcaaagtgacgggacccgagcgcctcaccaagtctggcccttatgccctcaacggagagcagtatgcttatcgcgatgttgtgccttttgcaaagcaactagtggaggagtttccagagcgcgttatttggggcactgattggccgcatcccaatctgaagagtcatatgcccgatgatggtttgctggtcgacttcatcccacatattgcgacgactgcacacctgcagaacaagcttttagttgacaatcctaagaggctttactggccagagttatgtacatga

SEQ ID NO: 30691 - protein, 311 aa, Muscodor strobelii
  misc_feature: SGI Peptide ID NO. 570558
  misc_feature (34)..(307): Pfam Id: PF04909 Pfam Desc: Amidohydrolase
  misc_feature (8)..(308): NCBI GI: 119898830 Blast Desc: 2-pyrone-4,6-dicarboxylate hydrolase [Azoarcus sp. BH72] gi|119671243|emb|CAL95156.1| 2-pyrone-4,6-dicarboxylate hydrolase [Azoarcus sp. BH72]
  misc_feature (9)..(308): NCBI GI: 160899880 Blast Desc: amidohydrolase 2 [Delftia acidovorans SPH-1] gi|160365464|gb|ABX37077.1| amidohydrolase 2 [Delftia acidovorans SPH-1]
  misc_feature (1)..(308): NCBI GI: 260222182 Blast Desc: [Curvibacter symbiont of Hydra magnipapillata]
  misc_feature (8)..(308): NCBI GI: 14861215 Blast Desc: AF305325_3 PmdD [Comamonas testosteroni]
  misc_feature (9)..(308): NCBI GI: 264678878 Blast Desc: 2-pyrone-4,6-dicarboxylic acid hydrolase [Comamonas testosteroni CNB-2] gi|262209391|gb|ACY33489.1| 2-pyrone-4,6-dicarboxylic acid hydrolase [Comamonas testosteroni
  misc_feature (8)..(308): NCBI GI: 39573668 Blast Desc: 2-pyrone-4,6-dicarboxylate lactonase [Pseudomonas straminea]
  misc_feature (8)..(308): NCBI GI: 58200954 Blast Desc: PmcD [Comamonas sp. DJ-12]
  misc_feature (9)..(308): NCBI GI: 23016548 Blast Desc: COG3618: metal-dependent hydrolase of the TIM-barrel fold [Magnetospirillum magnetotacticum MS-1]
  misc_feature (9)..(308): NCBI GI: 221066559 Blast Desc: amidohydrolase 2 [Comamonas testosteroni KF-1] gi|220711582|gb|EED66950.1| amidohydrolase 2 [Comamonas testosteroni KF-1]
  misc_feature (1)..(308): NCBI GI: 121604930 Blast Desc: amidohydrolase 2 [Polaromonas naphthalenivorans CJ2] gi|120593899|gb|ABM37338.1| amidohydrolase 2 [Polaromonas naphthalenivorans CJ2]
MTESTNRQFNKTPGWLDWHATPSTPSFKLPPGAIDSHCHVFGPGEKYPYSPERKYTPCEASQDQLFALRDHLGFSRNVIVQATCHGTDNRALVAACQASNGHARGIATVKRDISDDQLKTLHAEGVRGLRFNFVRRLVDFTPKDELRDLAVRVAKLGWHIVVYFEAADLPELWDFFTNLPTTIVIDHMGRPDVSKSVDGPEFKLFRRFVRENPNVVVKVTGPERLTKSGPYALNGEQYAYRDVVPFAKQLVEEFPERVIWGTDWPHPNLKSHMPDDGLLVDFIPHIATTAHLQNKLLVDNPKRLYWPELCT

SEQ ID NO: 30692 - DNA, 386 bp, Muscodor strobelii
  misc_feature: SGI EST ID NO. CUFF.72670.0
  misc_feature: Variant of the nucleotide sequence at SEQ ID NO 30690
ggagagcagtatgcttatcgcgatgttgtgccttttgcaaagcaactagtggaggagtttccagagcgcgttatttggggcactgattggccgcatcccaatctgaagagtcatatgcccgatgatggtttgctggtcgacttcatcccacatattgcgacgactgcacacctgcagaacaagcttttagttgacaatcctaagaggctttactggccagagttatgtacatgacttggaacgggctgcaagtgctttaatttcaaagccggacaggtgttactgtatgagatttccctaccgattcaattagaatatatctcctagtcgtatttcacacatttcagcaagtaacttgggctctcggtgttcagtattgatgaccg

SEQ ID NO: 30693 - DNA, 1236 bp, Muscodor strobelii
  misc_feature: SGI cDNA ID NO. 570559
  misc_feature: Encodes the peptide sequence at SEQ ID NO 30694
atgttcttctccccacggtgtcttcaggcccggcttgcattcggcaagaaaatgaacgagtctaagccagatgccaacggaatcgaggtagcctacgaggagaatgcagtgggttatcgtgagtaccgcgaagctctcggtgtagagttttcggacggagagtgccgaaaggttcttcgcaagattgattttatcattcttcccattttcctagtcacccaagcgcttcagttcatggatagaacagctctgaattatgcgaacctttttgggtatcaaacggccctgaatttgcatggttcacagttcaactttctgacagctgttctatatgccggatatttcattggtcaatatccatgtggatggcttgttggtcgtttccctgcccagaaggtcatggcagtcactattctgctttggggacttatggtgattctcttgacccatgccaggacattttcaggcgctttggctcttagattgcctttcaaagtcttcatgggtgtctttgaggcagcagtaactccgattaggtggcatcgtcagcagtatgggcatcccgcgtcatcgttgcttgctaatttgcctcttggcgctgttacatgcgcttgggctgtcatcgtatactgtgtcctccctgatgcaccatcaaatgcacgatttctcaccgagcgtgaacgtcttatcgccgtgaagagagtatcggggaatcaggtgggcatcaagaataagtcattcaacagaaaacaaggcctacttgtgtttcgagacccgaaagtcatacttttggtgatatcagtctttgctgccgcaattcctagcgcagtactgttggcattcagtaccgttatcatccgtgacctgggcttttcaactactaagaccacagagctcaagtcggttggcgacgctactcaggtcgttgccctcttcatcgcaggtctcatcactttcaacatcccaaactccagtactgcattttgctggggcaatttcgcaggtgcctttgtcgttaagaacagcgaagcgcccatttaccatacagcaacggtcagcctgctggcaggatatgctatcaagctcgtttgtcatgccattcttctcctttatatgttctctgtcaacagatatagggatcggcaatacggcgctgcaaacaaagagaagagcgacgaggctgggatgcaagacaagacggaattccagaatctcgactttcgttacatactataa

SEQ ID NO: 30694 - protein, 411 aa, Muscodor strobelii
  misc_feature: SGI Peptide ID NO. 570559
  misc_feature (70)..(177): Pfam Id: PF07690 Pfam Desc: Major Facilitator Superfamily
  misc_feature (20)..(411): NCBI GI: 115386802 Blast Desc: conserved [Aspergillus terreus NIH2624] gi|114190940|gb|EAU32640.1| conserved [Aspergillus terreus NIH2624]
  misc_feature (20)..(411): NCBI GI: 67900786 Blast Desc: AN7380.2 [Aspergillus nidulans FGSC A4] gi|40742561|gb|EAA61751.1| AN7380.2 [Aspergillus nidulans FGSC A4] gi|259483260|tpe|CBF78499.1| TPA: conserved [Aspergillus FGSC
  misc_feature (19)..(411): NCBI GI: 46109820 Blast Desc: FG01792.1 [Gibberella zeae PH-1]
  misc_feature (39)..(411): NCBI GI: 169603678 Blast Desc: SNOG_04847 [Phaeosphaeria nodorum SN15] gi|111066118|gb|EAT87238.1| SNOG_04847 [Phaeosphaeria nodorum SN15]
  misc_feature (16)..(325): NCBI GI: 154296608 Blast Desc: BC1G_12712 [Botryotinia fuckeliana B05.10] gi|150843295|gb|EDN18488.1| BC1G_12712 [Botryotinia fuckeliana B05.10]
  misc_feature (39)..(317): NCBI GI: 238507341 Blast Desc: MFS transporter, [Aspergillus flavus NRRL3357] gi|220689585|gb|EED45936.1| MFS transporter, [Aspergillus flavus NRRL3357]
  misc_feature (39)..(317): NCBI GI: 169786341 Blast Desc: [Aspergillus oryzae RIB40] gi|83776379|dbj|BAE66498.1| protein product [Aspergillus oryzae]
  misc_feature (20)..(324): NCBI GI: 255931043 Blast Desc: Pc12g01830 [Penicillium chrysogenum Wisconsin 54-1255] gi|211581697|emb|CAP79810.1| Pc12g01830 [Penicillium chrysogenum Wisconsin 54-1255]
  misc_feature (21)..(324): NCBI GI: 238490918 Blast Desc: pantothenate transporter, [Aspergillus flavus NRRL3357] gi|220697109|gb|EED53450.1| pantothenate transporter, [Aspergillus flavus NRRL3357]
  misc_feature (23)..(324): NCBI GI: 169772985 Blast Desc: [Aspergillus oryzae RIB40] gi|83768822|dbj|BAE58959.1| protein product [Aspergillus oryzae]
MFFSPRCLQARLAFGKKMNESKPDANGIEVAYEENAVGYREYREALGVEFSDGECRKVLRKIDFIILPIFLVTQALQFMDRTALNYANLFGYQTALNLHGSQFNFLTAVLYAGYFIGQYPCGWLVGRFPAQKVMAVTILLWGLMVILLTHARTFSGALALRLPFKVFMGVFEAAVTPIRWHRQQYGHPASSLLANLPLGAVTCAWAVIVYCVLPDAPSNARFLTERERLIAVKRVSGNQVGIKNKSFNRKQGLLVFRDPKVILLVISVFAAAIPSAVLLAFSTVIIRDLGFSTTKTTELKSVGDATQVVALFIAGLITFNIPNSSTAFCWGNFAGAFVVKNSEAPIYHTATVSLLAGYAIKLVCHAILLLYMFSVNRYRDRQYGAANKEKSDEAGMQDKTEFQNLDFRYIL

SEQ ID NO: 30695 - DNA, 415 bp, Muscodor strobelii
  misc_feature: SGI EST ID NO. CUFF.72679.0
  misc_feature: Variant of the nucleotide sequence at SEQ ID NO 30693
ggagactggtcagtttctggttgtgtaatgcccaaagcgtcggatttacgatatctgttacgacaatttcgtcaaatatggcaggctatacgcatcgctcgattgctagcgcattgatatttactgcattttgctggggcaatttcgcaggtgcctttgtcgttaagaacagcgaagcgcccatttaccatacagcaacggtcagcctgctggcaggatatgctatcaagctcgtttgtcatgccattcttctccgtaagtcggtttgacggggatcatattaaacagaataaattcctacatcatgataatatactgacaattagagaagtttatatgttctctgtcaacagatatagggatcggcaatacggcgctgcaaacaaagagaagagcgacgaggctgggatgcaag

SEQ ID NO: 30696 - DNA, 1440 bp, Muscodor strobelii
  misc_feature: SGI cDNA ID NO. 570560
  misc_feature: Encodes the peptide sequence at SEQ ID NO 30697
atggctacccagcacgctaatgtcgctgcgccgccagccctacttctagaatcagacgcaaagccttttaaggttaggcgaacgtggtatcgcacgacactcttcaatgccgtcgtcatcggcggtgttggtttccttgcccccgggttatggaatgcgatgaatcagctcggtgcaggcggagccgagaagccattcctcatcaatgcggcaaactcgctcgtgtttgggatcctaggtctagtttgcatctttggcgcaccagtcgcaaatcgcattggcctcaactggactcttttcttaggtctggtgggttatccaatatactcggcaggattatatctgaataatcgctatggaaatgtctggttggttctcgtgggcgcgacgacttgtgggttcagcgcaggcttgttttgggcgtctgagggagccgttgctttaggatatcccgagcccgccaaaagaggccgctatatgaatatctggctttggttccgaacagctgggccaattgtgggaggtgccattgtgcttggtctcaaccacgaggaaggcaaaaaaggaaaggtgggctacgaggtgtatctcatcttcatcgctttacaggccatcgcggcgcctttggcacttctgctttcttcgcctgggaaagttcagcgtagcgatgggagcaaagttatcgtgcgtgcagagacttcgttcaccgctgaggtcaaggcactctacaacgtgtgcaaacgaaaggacattttacttctcttacctattttttgggcagcgtacttcaatcagtatagtgggaattttcagacttattacttcggtgttcgagcgcgagcgctgatcgggttcacgtccaacttcggaaccctgctatcttctcagatcacgagcatgtttctcgattacaaaggcctttcggtccggaatcgtattgtatactgctggtggtatgttgttgctgtacacattattgcttgggtctacggctgggtcattcaagaaaagtacacggctagtcctccatcattagattggaccactcccggtttcgtggaaggctattttgtcatcttactctggtcttttgcgcaacaagcagtgcagaactggctctattatcttctttctactaaaacagataatatctctgagcttactcggttttcgggtattctaagaggccaggagagtctggctcaagcagtcagctttggtctcaacacccgtgactggtatggagggcgtgtgcctctggcagttaatacgattcttttgggtctctgtgtaatccccacgtatctcgttgtccgagatcatgtgcccgttgaagccagcccggctcaaatttcccttgatcaggtcgcacattcggatagtgatgtgaaggataataacggcgactccgctagattgagcgagaagagcttgccatag

SEQ ID NO: 30697 - protein, 479 aa, Muscodor strobelii
  misc_feature: SGI Peptide ID NO. 570560
  misc_feature (26)..(467): NCBI GI: 255949038 Blast Desc: Pc22g13600 [Penicillium chrysogenum Wisconsin 54-1255] gi|211592303|emb|CAP98648.1| Pc22g13600 [Penicillium chrysogenum Wisconsin 54-1255]
  misc_feature (25)..(455): NCBI GI: 145241912 Blast Desc: An09g02880 [Aspergillus niger] gi|134078144|emb|CAK40225.1| protein product [Aspergillus niger]
  misc_feature (16)..(475): NCBI GI: 242804414 Blast Desc: conserved [Talaromyces stipitatus ATCC 10500] gi|218717715|gb|EED17136.1| conserved [Talaromyces stipitatus ATCC 10500]
  misc_feature (26)..(445): NCBI GI: 238578300 Blast Desc: MPER_12280 [Moniliophthora perniciosa FA553] gi|215450163|gb|EEB89602.1| MPER_12280 [Moniliophthora perniciosa FA553]
  misc_feature (161)..(475): NCBI GI: 238489583 Blast Desc: conserved [Aspergillus flavus NRRL3357] gi|220698417|gb|EED54757.1| conserved [Aspergillus flavus NRRL3357]
  misc_feature (24)..(315): NCBI GI: 169763640 Blast Desc: [Aspergillus oryzae RIB40] gi|83770748|dbj|BAE60881.1| protein product [Aspergillus oryzae]
  misc_feature (21)..(440): NCBI GI: 119489982 Blast Desc: NFIA_062110 [Neosartorya fischeri NRRL 181] gi|119411107|gb|EAW21050.1| conserved [Neosartorya fischeri NRRL 181]
  misc_feature (29)..(477): NCBI GI: 212546897 Blast Desc: DUF895 domain membrane protein [Penicillium marneffei ATCC 18224] gi|210065122|gb|EEA19217.1| DUF895 domain membrane protein [Penicillium marneffei ATCC 18224]
  misc_feature (21)..(440): NCBI GI: 70998805 Blast Desc: DUF895 domain membrane protein [Aspergillus fumigatus Af293] gi|66851761|gb|EAL92086.1| DUF895 domain membrane protein [Aspergillus fumigatus Af293] gi|159127144|gb|EDP52259.1| DUF895
  misc_feature (24)..(456): NCBI GI: 255944977 Blast Desc: Pc20g07320 [Penicillium chrysogenum Wisconsin 54-1255] gi|211587991|emb|CAP86061.1| Pc20g07320 [Penicillium chrysogenum Wisconsin 54-1255]
MATQHANVAAPPALLLESDAKPFKVRRTWYRTTLFNAVVIGGVGFLAPGLWNAMNQLGAGGAEKPFLINAANSLVFGILGLVCIFGAPVANRIGLNWTLFLGLVGYPIYSAGLYLNNRYGNVWLVLVGATTCGFSAGLFWASEGAVALGYPEPAKRGRYMNIWLWFRTAGPIVGGAIVLGLNHEEGKKGKVGYEVYLIFIALQAIAAPLALLLSSPGKVQRSDGSKVIVRAETSFTAEVKALYNVCKRKDILLLLPIFWAAYFNQYSGNFQTYYFGVRARALIGFTSNFGTLLSSQITSMFLDYKGLSVRNRIVYCWWYVVAVHIIAWVYGWVIQEKYTASPPSLDWTTPGFVEGYFVILLWSFAQQAVQNWLYYLLSTKTDNISELTRFSGILRGQESLAQAVSFGLNTRDWYGGRVPLAVNTILLGLCVIPTYLVVRDHVPVEASPAQISLDQVAHSDSDVKDNNGDSARLSEKSLP

SEQ ID NO: 30698 - DNA, 804 bp, Muscodor strobelii
  misc_feature: SGI EST ID NO. CUFF.72691.0
  misc_feature: Variant of the nucleotide sequence at SEQ ID NO 30696
gagccgttgctttaggatatcccgagcccgccaaaagaggccgctatatgaatatctggctttggttccgaacagctgggccaattgtgggaggtgccattgtgcttggtctcaaccacgaggaaggcaaaaaaggaaaggtgggctacgaggtgtatctcatcttcatcgctttacaggccatcgcggcgcctttggcacttctgctttcttcgcctgggaaagttcagcgtagcgatgggagcaaagttatcgtgcgtgcagagacttcgttcaccgctgaggtcaaggcactctacaacgtgtgcaaacgaaaggacattttacttctcttacctattttttgggcagcgtacttcaatcagtatagtgggaattttcagacttattacttcggtgttcgagcgcgagcgctgatcgggttcacgtccaacttcggaaccctgctatcttctcagatcacgagcatgtttctcgattacaaaggcctttcggtccggaatcgtattgtatactgctggtggtatgttgttgctgtacacattattgcttgggtctacggctgggtcattcaagaaaagtacacggctagtcctccatcattagattggaccactcccggtttcgtggaaggctattttgtcatcttactctggtcttttgcgcaacaagcagtgcagaactggctctattatcttctttctactaaaacagataatatctctgagcttactcggttttcgggtattctaagaggccaggagagtctggctcaagcagtcagctttggtctcaacacccgtg

SEQ ID NO: 30699 - DNA, 696 bp, Muscodor strobelii
  misc_feature: SGI cDNA ID NO. 570561
  misc_feature: Encodes the peptide sequence at SEQ ID NO 30700
atgtctaattccacaaaaacggaattgaactgcaggcggaacttcgacatcattgttgtaggagctggcaatgctggatactctgcggctctttcggctgctgagacgcttggctctaatactagggtactactcatagacaaatgtccggaaaattggaatggcggtaacacgtatttcaccgcaggtgcaatgaggactgttcataagggtctaacggacattttgccaatcgtcaacaatgtagacaatgagatgggacaactcatcgatctcgaaccgtatgaaagtaccgattttctgtctgatctaaaccgagttactggagggccctatgatcatgcactgggccagactctggtagatgagtcgaactcgacgatcaaatggcttgctcgtcatggcgttcggtttcagctgagttttaacccccaggcatacaggctcaacgggaggtacaaattctgggtaggcatgtgtttaacgaccgaagatggcgggaaagggttggtggaggactacaaaactgcctgttcaagtcacggcgtctcaacttggtattccacagtagcaaagaaaatcatattgcaaccatctacaggctcagtggctggccttgtggccgaaactgcgcgtgagggcgtctttgagctttgcgcaagagcagttattttggctgcagggagttttgaataa

SEQ ID NO: 30700 - protein, 231 aa, Muscodor strobelii
  misc_feature: SGI Peptide ID NO. 570561
  misc_feature (16)..(44): Pfam Id: PF00890 Pfam Desc: FAD binding domain
  misc_feature (16)..(34): Pfam Id: PF01134 Pfam Desc: Glucose inhibited division protein A
  misc_feature (16)..(59): Pfam Id: PF07992 Pfam Desc: Pyridine nucleotide-disulphide oxidoreductase
  misc_feature (16)..(231): NCBI GI: 226279112 Blast Desc: tricarballylate dehydrogenase [Paracoccidioides brasiliensis Pb01]
  misc_feature (16)..(231): NCBI GI: 225677926 Blast Desc: fumarate reductase flavoprotein subunit [Paracoccidioides brasiliensis Pb03]
  misc_feature (16)..(231): NCBI GI: 258576299 Blast Desc: conserved [Uncinocarpus reesii 1704] gi|237902597|gb|EEP76998.1| conserved [Uncinocarpus reesii 1704]
  misc_feature (9)..(231): NCBI GI: 119189205 Blast Desc: CIMG_04650 [Coccidioides immitis RS]
  misc_feature (12)..(231): NCBI GI: 240111328 Blast Desc: FAD binding domain containing protein [Coccidioides posadasii C735 delta SOWgp]
  misc_feature (15)..(231): NCBI GI: 67539926 Blast Desc: AN6133.2 [Aspergillus nidulans FGSC A4] gi|40738729|gb|EAA57919.1| AN6133.2 [Aspergillus nidulans FGSC A4] gi|259479675|tpe|CBF70114.1| TPA: conserved [Aspergillus FGSC
  misc_feature (16)..(231): NCBI GI: 145232464 Blast Desc: An02g05410 [Aspergillus niger] gi|134056593|emb|CAK37647.1| protein product [Aspergillus niger]
  misc_feature (9)..(231): NCBI GI: 189198185 Blast Desc: fumarate reductase flavoprotein subunit precursor [Pyrenophora tritici-repentis Pt-1C-BFP] gi|187981378|gb|EDU48004.1| fumarate reductase flavoprotein
  misc_feature (16)..(231): NCBI GI: 169774441 Blast Desc: [Aspergillus oryzae RIB40] gi|83769551|dbj|BAE59686.1| protein product [Aspergillus oryzae]
  misc_feature (16)..(231): NCBI GI: 238497015 Blast Desc: extracellular 3-ketosteroid 1-dehydrogenase, [Aspergillus flavus NRRL3357] gi|220694623|gb|EED50967.1| extracellular 3-ketosteroid 1-dehydrogenase, [Aspergillus flavus
  misc_feature (17)..(230): SWISSPROT Homolog: EC 1.3.99.1 Succinate dehydrogenase
MSNSTKTELNCRRNFDIIVVGAGNAGYSAALSAAETLGSNTRVLLIDKCPENWNGGNTYFTAGAMRTVHKGLTDILPIVNNVDNEMGQLIDLEPYESTDFLSDLNRVTGGPYDHALGQTLVDESNSTIKWLARHGVRFQLSFNPQAYRLNGRYKFWVGMCLTTEDGGKGLVEDYKTACSSHGVSTWYSTVAKKIILQPSTGSVAGLVAETAREGVFELCARAVILAAGSFE

SEQ ID NO: 30701 - DNA, 156 bp, Muscodor strobelii
  misc_feature: SGI EST ID NO. CUFF.72697.0
  misc_feature: Variant of the nucleotide sequence at SEQ ID NO 30699
ctatgatcatgcactgggccagactctggtagatgagtcgaactcgacgatcaaatggcttgctcgtcatggcgttcggtttcagctgagttttaacccccaggcatacaggctcaacgggaggtacaaattctgggtaggcatgtgtttaacgac

SEQ ID NO: 30702 - DNA, 813 bp, Muscodor strobelii
  misc_feature: SGI cDNA ID NO. 570562
  misc_feature: Encodes the peptide sequence at SEQ ID NO 30703
atggcaattcgcgatctgaatgctaagcaggctgggaactggtcgggctgtcactcagttgtttgggatgctaactcgccccatgatagtggtgatcgcattttttctaacgagtacacaaagtcaggctatctattggggatcacggtaaacatcaatggtgaaagatttttcgacgagggtagcgacctcaggaactacacgtacgccaaatttggaaaagctattctgaaccggcctacagggacagcttttcaaatctgtgactctgttgtcctcccttggttacggtctgaagagtatagggacgaaatcgttgaaaagatcgacgcatcaagtatcgaagaactgtcacagaaacttgttgcacaaggcctgatgaatcctgccagactagtagaaactgtgcacgaatacaacgaagccatcacgcaagccgaacaggagcactcagagcgaaaatgggatccttcgatcaaggatggtctcacaactcaatcatcaaagatttctctaggcattccgaaatcaaactgggctttgccgttgaggaaagccccatttgttgcgaaccgggttagatgtggtattactttcacttttgggggcttagccattgatcccgagacatcaggagtgatttctgtattgaccgatgaggttatccccggagtatattgttgtggtgagatggttggcggtctattttacgataactatccaggtggtagtggactgacctccggcgcagtttttgggagaaaagctggaaagcatgcagctcgattggttcaaacaacaaaccgattttga

SEQ ID NO: 30703 - protein, 270 aa, Muscodor strobelii
  misc_feature: SGI Peptide ID NO. 570562
  misc_feature (1)..(252): NCBI GI: 67539926 Blast Desc: AN6133.2 [Aspergillus nidulans FGSC A4] gi|40738729|gb|EAA57919.1| AN6133.2 [Aspergillus nidulans FGSC A4] gi|259479675|tpe|CBF70114.1| TPA: conserved [Aspergillus FGSC
  misc_feature (1)..(261): NCBI GI: 242798311 Blast Desc: conserved [Talaromyces stipitatus ATCC 10500] gi|218716488|gb|EED15909.1| conserved [Talaromyces stipitatus ATCC 10500]
  misc_feature (1)..(252): NCBI GI: 145232464 Blast Desc: An02g05410 [Aspergillus niger] gi|134056593|emb|CAK37647.1| protein product [Aspergillus niger]
  misc_feature (1)..(261): NCBI GI: 169774441 Blast Desc: [Aspergillus oryzae RIB40] gi|83769551|dbj|BAE59686.1| protein product [Aspergillus oryzae]
  misc_feature (1)..(265): NCBI GI: 256728419 Blast Desc: NECHADRAFT_73047 [Nectria haematococca mpVI 77-13-4]
  misc_feature (5)..(264): NCBI GI: 115492475 Blast Desc: conserved [Aspergillus terreus NIH2624] gi|114197725|gb|EAU39425.1| conserved [Aspergillus terreus NIH2624]
  misc_feature (1)..(255): NCBI GI: 189198185 Blast Desc: fumarate reductase flavoprotein subunit precursor [Pyrenophora tritici-repentis Pt-1C-BFP] gi|187981378|gb|EDU48004.1| fumarate reductase flavoprotein
  misc_feature (2)..(252): NCBI GI: 119189205 Blast Desc: CIMG_04650 [Coccidioides immitis RS]
  misc_feature (2)..(252): NCBI GI: 240111328 Blast Desc: FAD binding domain containing protein [Coccidioides posadasii C735 delta SOWgp]
  misc_feature (2)..(252): NCBI GI: 258576299 Blast Desc: conserved [Uncinocarpus reesii 1704] gi|237902597|gb|EEP76998.1| conserved [Uncinocarpus reesii 1704]
  misc_feature (48)..(262): SWISSPROT Homolog: EC 1.3.99.1 Succinate dehydrogenase
MAIRDLNAKQAGNWSGCHSVVWDANSPHDSGDRIFSNEYTKSGYLLGITVNINGERFFDEGSDLRNYTYAKFGKAILNRPTGTAFQICDSVVLPWLRSEEYRDEIVEKIDASSIEELSQKLVAQGLMNPARLVETVHEYNEAITQAEQEHSERKWDPSIKDGLTTQSSKISLGIPKSNWALPLRKAPFVANRVRCGITFTFGGLAIDPETSGVISVLTDEVIPGVYCCGEMVGGLFYDNYPGGSGLTSGAVFGRKAGKHAARLVQTTNRF

SEQ ID NO: 30704 - DNA, 291 bp, Muscodor strobelii
  misc_feature: SGI EST ID NO. CUFF.72700.0
  misc_feature: Variant of the nucleotide sequence at SEQ ID NO 30702
ctcagagcgaaaatgggatccttcgatcaaggatggtctcacaactcaatcatcaaagatttctctaggcattccgaaatcaaactgggctttgccgttgaggaaagccccatttgttgcgaaccgggttagatgtggtattactttcacttttgggggcttagccattgatcccgagacatcaggagtgatttctgtattgaccgatgaggttatccccggagtatattgttgtggtgagatggttggcggtctattttacgataactatccaggtggtagtggactgac

SEQ ID NO: 30705 - DNA, 915 bp, Muscodor strobelii
  misc_feature: SGI cDNA ID NO. 570563
  misc_feature: Elevated expression when VOC is produced
  misc_feature: Encodes the peptide sequence at SEQ ID NO 30706
atgtctcaagacacagtgactgtgccacctgatgcctgggacatgcatatacatgtcttcgatccagttaacttcccttatggagttccccggtcgtatacccctaaagcagccactctcgaagagtatcctcatgaaataactggttgctccaaacttctagtagtccaggcaaccgttcagggacactcgcctgatccgttgctggcaacattagcttcaaaatctcgagcggaatcgcacataatggtacgtggattggctacgatcaatccattgcaagtcagcgacgaagagcttgactcattacatgcagcaggagttcgtggaattcgccttcatgaagtctcctggggccatggggatcaaagcggtccgacagctattgcaaataagatcgtggccatcgctccgcgcatagcacgactccactggatcatcgacgtgttcactaacgtgcgcacgtgggctttgctctcaagtaccattcgcgcgaatgtagactccagagttcgtctcgttgcagaccatttatgcggtgccttccctggagacgaagcgctgcccgagttccaagcagtgctggatcttgtcaaggatggccttctttacgtgaagctctccgggtttgaaagactctatcatggagcagaagcttcgatggatgccctcgagtatatcactaaatctatcatatctgcgaacggacggaggattctatacgggtcagactggccgcatacgcaactcggagtttctaggcggggcaaatcggatgaacaacgactcagcgagatcgaagggttcagagaagttcccgacaagatgcatattcgaaaactacgtgaatggatttcggacgaagatacgtggcaacagctttgggttacgaatgccatggatctatttgagtga

SEQ ID NO: 30706 - protein, 304 aa, Muscodor strobelii
  misc_feature: SGI Peptide ID NO. 570563
  misc_feature (13)..(303): Pfam Id: PF04909 Pfam Desc: Amidohydrolase
  misc_feature (13)..(253): Pfam Id: PF04909 Pfam Desc: Amidohydrolase
  misc_feature (8)..(304): NCBI GI: 145251694 Blast Desc: An16g00450 [Aspergillus niger] gi|134082896|emb|CAK42726.1| protein product [Aspergillus niger]
  misc_feature (4)..(304): NCBI GI: 145252748 Blast Desc: An16g05790 [Aspergillus niger] gi|134083441|emb|CAK46919.1| protein product [Aspergillus niger]
  misc_feature (11)..(294): NCBI GI: 145233729 Blast Desc: An02g11080 [Aspergillus niger] gi|134057170|emb|CAK48773.1| protein product [Aspergillus niger]
  misc_feature (8)..(303): NCBI GI: 256722606 Blast Desc: NECHADRAFT_49769 [Nectria haematococca mpVI 77-13-4]
  misc_feature (3)..(303): NCBI GI: 238501818 Blast Desc: conserved [Aspergillus flavus NRRL3357] gi|220692380|gb|EED48727.1| conserved [Aspergillus flavus NRRL3357]
  misc_feature (13)..(303): NCBI GI: 238485136 Blast Desc: conserved [Aspergillus flavus NRRL3357] gi|220698685|gb|EED55024.1| conserved [Aspergillus flavus NRRL3357]
  misc_feature (8)..(304): NCBI GI: 169768418 Blast Desc: [Aspergillus oryzae RIB40] gi|83766537|dbj|BAE56677.1| protein product [Aspergillus oryzae]
  misc_feature (8)..(304): NCBI GI: 238497724 Blast Desc: conserved [Aspergillus flavus NRRL3357] gi|220693371|gb|EED49716.1| conserved [Aspergillus flavus NRRL3357]
  misc_feature (8)..(299): NCBI GI: 46139127 Blast Desc: FG11078.1 [Gibberella zeae PH-1]
  misc_feature (8)..(303): NCBI GI: 146339667 Blast Desc: BRADO2661 [Bradyrhizobium sp. ORS278] gi|146192473|emb|CAL76478.1| conserved [Bradyrhizobium sp. ORS278]
  misc_feature: Useful for introducing or modulating the production of volatile compounds
MSQDTVTVPPDAWDMHIHVFDPVNFPYGVPRSYTPKAATLEEYPHEITGCSKLLVVQATVQGHSPDPLLATLASKSRAESHIMVRGLATINPLQVSDEELDSLHAAGVRGIRLHEVSWGHGDQSGPTAIANKIVAIAPRIARLHWIIDVFTNVRTWALLSSTIRANVDSRVRLVADHLCGAFPGDEALPEFQAVLDLVKDGLLYVKLSGFERLYHGAEASMDALEYITKSIISANGRRILYGSDWPHTQLGVSRRGKSDEQRLSEIEGFREVPDKMHIRKLREWISDEDTWQQLWVTNAMDLFE

SEQ ID NO: 30707 - DNA, 1459 bp, Muscodor strobelii
  misc_feature: SGI EST ID NO. CUFF.72704.0
  misc_feature: Variant of the nucleotide sequence at SEQ ID NO 30705
agcacatgaatcgattactcatatactcaactggtcctgcggactccaactttccgtgtcgtgggggttacgcaactaacaaatgacgaagctagccatcttctttcaatcgtagaaaactaaccttgtagatttcgacgaaagactctcttcaacttatatcttcagtgattcagttgcagagatatcggcaaaatgtctcaagacacagtgactgtgccacctgatgcctgggacatgcatatacatgtcttcgatccagttaacttcccttatggagttccccggtcgtatacccctaaagcagccactctcgaagagtatcctcatgaaataactggttgctccaaacttctagtagtccaggcaaccgttcagggacactcgcctgatccgttgctggcaacattagcttcaaaatctcgagcggaatcgcacataatggtacgtggattggctacgatcaatccattgcaagtcagcgacgaagagcttgactcattacatgcagcaggagttcgtggaattcgccttcatgaagtctcctggggccatggggatcaaagcggtccgacagctattgcaaataagatcgtggccatcgctccgcgcatagcacgactccactggatcatcgacgtgttcactaacgtgcgcacgtgggctttgctctcaagtaccattcgcgcgaatgtagactccagagttcgtctcgttgcagaccatttatgcggtgccttccctggagacgaagcgctgcccgagttccaagcagtgctggatcttgtcaaggatggccttctttacgtgaagctctccgggtttgaaagactctatcatggagcagaagcttcgatggatgccctcgagtatatcactaaatctatcatatctgcgaacggacggaggattctatacgggtcagactggccgcatacgcaactcggagtttctaggcggggcaaatcggatgaacaacgactcagcgagatcgaagggttcagagaagttcccgacaagatgcatattcgaaaactacgtgaatggatttcggacgaagatacgtggcaacagctttgggttacgaatgccatggatctatttgagtgacaatgcgcaacaccaagctactcctagcctacaacaaacccttcgactagataaaccagctctaatgaccccaatcctaaacaccctgatcctacccttttttcgcattcccggaccctgactctagccctaacccgaatcctaaccacgaaccctacgcaacctcgaggtgacatcagaaaattgacaagtctcaaggcgggtctgaagggaagaaaacaacatgagcgattgacatatgtccagagccaatatacaagcgctgccgatttctatctgcctttcttgcgcaagcatcgaggtcgtctataacatctaaagtgatcgtgatttcaagcagaaccaagat

SEQ ID NO: 30708 - DNA, 1137 bp, Muscodor strobelii
  misc_feature: SGI cDNA ID NO. 570564
  misc_feature: Elevated expression when VOC is produced
  misc_feature: Encodes the peptide sequence at SEQ ID NO 30709
atggcaacaccaacttactttgacccttccatcatactgccagcgtacattacatctccaccgacggcgcaattcactcctggtcccggatgcatagattcagatgataactgggttgtattcacgagttgctacgcgtatccaacgtcatacgattggctcacttgctcgttgaccaatttcggacccgtcgactaccctgcttcgccatgtgcaccaccttacgaggcacagactgtcgttggggatataacgagctactattcgggatgtccttctggttactcgggggcatcaacggcgatatacagcgatgacaacagaccaagatatgatgttgcagtctattgctgcccaacacaatatcctttcgatgcctatggctattttcacggcgatggaattgagtcaaccacaacaggaccgaatggcgaggtcgctactgtggaatatcccctcccggggtgtaccgcatcgttcatcgagcagctttcagatcaggtcatccccgtgcagacctcctacaatacgtacggatgggagaagcggcaagtgaacaatgtgccctgggactatgctcacggaactatgtacgccgaggtccagtcgtattcttatacggtgttctacaacactcacacttgttaccaagactgttacggatggcatgattactacttttctgggagtgcgcagccttcgttcactgtaccatctgattttacgccggccactataactccagttgatactccaccttcgacagaaacaccgccagagcagactgtgagcgttacttcgcctccgcttgagacaccaacgacgatcccaccgccgaccgaggcgcccactactagcgcgcaacctagtacatctgaagccttgccatcttcacagagtccctcaagtacgactattccttccagcacggaaatacccgctgagacgatctcacaaacacttccaccggaggtaacttctactctgatatcggacaacacgacggaaactacctcttcgtcagcacaggcaacgcttgcatccccttctgcaacaccgactggagcgggatctgttgtcacgccggttcagattatcttactaggcagtattgtcttatgcttcatgctgcagtga

SEQ ID NO: 30709 - protein, 378 aa, Muscodor strobelii
  misc_feature: SGI Peptide ID NO. 570564
  misc_feature: Useful for introducing or modulating the production of volatile compounds
MATPTYFDPSIILPAYITSPPTAQFTPGPGCIDSDDNWVVFTSCYAYPTSYDWLTCSLTNFGPVDYPASPCAPPYEAQTVVGDITSYYSGCPSGYSGASTAIYSDDNRPRYDVAVYCCPTQYPFDAYGYFHGDGIESTTTGPNGEVATVEYPLPGCTASFIEQLSDQVIPVQTSYNTYGWEKRQVNNVPWDYAHGTMYAEVQSYSYTVFYNTHTCYQDCYGWHDYYFSGSAQPSFTVPSDFTPATITPVDTPPSTETPPEQTVSVTSPPLETPTTIPPPTEAPTTSAQPSTSEALPSSQSPSSTTIPSSTEIPAETISQTLPPEVTSTLISDNTTETTSSSAQATLASPSATPTGAGSVVTPVQIILLGSIVLCFMLQ

SEQ ID NO: 30710 - DNA, 2357 bp, Muscodor strobelii
  misc_feature: SGI EST ID NO. CUFF.72809.0
  misc_feature: Variant of the nucleotide sequence at SEQ ID NO 30708
gttctagcatctcggtagctacataagaccgctttggggcttgccaacccctgatcccatcgcttttcagtggataagcattagcttggcagagccctatccagattgatgccgttgcctgcctaactcagcttcatgttgcgccgcccttttgcatccgtcgtgaacgagatgttttgtttataattgtagtagacgtcgcctgcttttgttcgcccgaacgctcgttcgaaatggctgcacatcttcaatatttgacaagtggggttatggtcacgcattgagtctatagagttctagtgctctctcggaaacgaaaggaaaacgatggcaacaccaacttactttgacccttccatcatactgccagcgtacattacatctccaccgacggcgcaattcactcctggtcccggatgcatagattcagatgataactgggttgtattcacgagttgctacgcgtatccaacgtcatacgattggctcacttgctcgttgaccaatttcggacccgtcgactaccctgcttcgccatgtgcaccaccttacgaggcacagactgtcgttggggatataacgagctactattcgggatgtccttctggttactcgggggcatcaacggcgatatacagcgatgacaacagaccaagatatgatgttgcagtctattgctgcccaacacaatatcctttcgatgcctatggctattttcacggcgatggaattgagtcaaccacaacaggaccgaatggcgaggtcgctactgtggaatatcccctcccggggtgtaccgcatcgttcatcgagcagctttcagatcaggtcatccccgtgcagacctcctacaatacgtacggatgggagaagcggcaagtgaacaatgtgccctgggactatgctcacggaactatactgttacggatggcatgattactacttttctgggagtgcgcagccttcgttcactgtaccatctgattttacgccggccactataactccagttgatactccaccttcgacagaaacaccgccagagcagactgtgagcgttacttcgcctccgcttgagacaccaacgacgatcccaccgccgaccgaggcgcccactactagcgcgcaacctagtacatctgaagccttgccatcttcacagagtccctcaagtacgactattccttccagcacggaaatacccgctgagacgatctcacaaacacttccaccggaggtaacttctactctgatatcggacaacacgacggaaactacctcttcgtcagcacaggcaacgcttgcatccccttctgcaacaccgactggagcgggatctgttgtcacgccggttcagattatcttactaggcagtattgtcttatgcttcatgctgcagtgagagaccacaggcgttttaatgtatgaaagtatcacaatcttagaaattagagaataatgacaacaggagacaacgactttgatcattcgatgctacctcaagtggaataggtccatgtcggcacatgaaattgctgcgctaccacttacgatgctgcgaagggatcaacatttgttgagaaatggcactgcagaattgatgttcatgttctggggtccatgctgctaagttacaggcgagatagggcacctcacactggtgttgccaacaaccgcgaatctgcctcgcgggcaaagatgtagaacaaaagtttggattttcaaagttaagagaatgcacattgttagatatacggaatctaccagatcgcatccagtaatatccggattctcaacaatcagctcgggaacatactagtatcaatgcatggcttttcgagaatccctcctcctgtcgcatctccatccgcctaaaatgaaagcgaataggggggcactaaccaaagttacaggtgactgacaaaaatcgtgccgcagtaaactacctcaactaacctacctcacgtctagcgttcagttttcgtcgcagcagctttcaattcagcgaaacaagattcgaggtgatgttggactatggtaatctatgagaatgagcttttgcaaaaaaaaatttctttgcatggtgcatgttgttgtgttttgcgacctacttgctctcgcactattcatattaatcgcctcacccacttgtggcgcagtggcatcgtggatcgagtggcatggctcaaccggaaccatccgggattctatttgctacacacccaaactcgcgtcgcctttttctgagtcagtcccgatcttctgggctatcttgaacgttacactactgcacgtttgcattccctgatttcatctagactagaacagctaagatgtcggtggcgtacgaactgtcg

SEQ ID NO: 30711 - DNA, 954 bp, Muscodor strobelii
  misc_feature: SGI cDNA ID NO. 570565
  misc_feature: Elevated expression when VOC is produced
  misc_feature: Encodes the peptide sequence at SEQ ID NO 30712
atgtcttccgtcaatgcacatgggtctccggagccggaagagcagcaagacaacgaccgtgtcggtgcgttacgggcctccctacgcgcagagtggaacagggactttcatgccaacctacaagccaacaatgcggaactcactacggctatgatgaacaatattaccaacctgttccaacaacacatgccgcaacaaccaccagcccctgtctcgcagcaagtctctcagcaagcctctcaacctcagggccagccgccggcaccgaggatccctggggcacgtgaccagccgcgcgctggtgtgcctcagggggaggtgtcggcggcgcccgctcgcggtcccaagtccgtcaactacttggcccacttgcgatacgagctggacaaagtcgaaaagagcattgagactaggaccaccagacaaagtagactgcaccaaaacgacatacaaacacgacgcagcttcaaagagagaattgacgagctcaagaaccacagggatgatctccagattcgtatcgcggcactggaatttgcacccaaccacgtccatcaggccaatactccgccacagtctcagacccaagcacagtcatccacatctgcacagccttcggcatcgacaccagcacccacacccacacccacaccagcaccatcatcagcatcagcatcagggcatgcacatgcacatacacccgaagaagcatcagcacttgcggtccctcggcctgagccccagccgccaatgccaatgaaccctcctgggcgtcccaaccagccgcgcgctggtgcccaggagggggaggcgttggcggcgggcggtgcgtccggtgctgtccccgacaccccgaagttgccagtagttcggctcggatcccctctcccatccgaaccagtttcgaagcgtcttcgtcagtccagtccagcacagcgaccactaagcgagtga

SEQ ID NO: 30712 - protein, 317 aa, Muscodor strobelii
  misc_feature: SGI Peptide ID NO. 570565
  misc_feature: Useful for introducing or modulating the production of volatile compounds
MSSVNAHGSPEPEEQQDNDRVGALRASLRAEWNRDFHANLQANNAELTTAMMNNITNLFQQHMPQQPPAPVSQQVSQQASQPQGQPPAPRIPGARDQPRAGVPQGEVSAAPARGPKSVNYLAHLRYELDKVEKSIETRTTRQSRLHQNDIQTRRSFKERIDELKNHRDDLQIRIAALEFAPNHVHQANTPPQSQTQAQSSTSAQPSASTPAPTPTPTPAPSSASASGHAHAHTPEEASALAVPRPEPQPPMPMNPPGRPNQPRAGAQEGEALAAGGASGAVPDTPKLPVVRLGSPLPSEPVSKRLRQSSPAQRPLSE

SEQ ID NO: 30713 - DNA, 1116 bp, Muscodor strobelii
  misc_feature: SGI EST ID NO. CUFF.72806.2
  misc_feature: Variant of the nucleotide sequence at SEQ ID NO 30711
ccttctagtgtcttccctacccatatcattagtgatcaccgtcgccatagactgccatcatccactatcacccgccatcatcacacagagtctccatcgccatcttccatcaccaactttcattgacaccatcttgcatcactcgtgtccattaccatcggtcgtccaaccttgtgttgtcatcatgccaccatgtcgacctgatgaatgcggcttcagcatttgtgttgacgacttgctgacgatgtgtatgaagcaaagcatctatccctctcgtcggtctcgtcggtctcgtcggtctcgttgcattcatcagtctcgtcggtcttgttaccttcatcaccacgtttcatgatgtcttccgtcaatgcacatgggtctccggagccggaagagcagcaagacaacgaccgtgtcggtgcgttacgggcctccctacgcgcagagtggaacagggactttcatgccaacctacaagccaacaatgcggaactcactacggctatgatgaacaatattaccaacctgttccaacaacacatgccgcaacaaccaccagcccctgtctcgcagcaagtctctcagcaagcctctcaacctcagggccagccgccggcaccgaggatccctggggcacgtgaccagccgcgcgctggtgtgcctcagggggaggtgtcggcggcgcccgctcgcggtcccaagtccgtcaactacttggcccacttgcgatacgagctggacaaagtcgaaaagagcattgagactaggaccaccagacaaagtagactgcaccaaaacgacatacaaacacgacgcagcttcaaagagagaattgacgagctcaagaaccacagggatgatctccagattcgtatcgcggcactggaatttgcacccaaccacgtccatcaggccaatactccgccacagtctcagacccaagcacagtcatccacatctgcacagccttcggcatcgacaccagcacccacacccacacccacaccagcaccatcatcagcatcagcatcagggcatgcacatgcacatacacccgaagaagcatcagcacttgcggtccctcggcctgagccccagccgccaatgccaatgaac

SEQ ID NO: 30714 - DNA, 267 bp, Muscodor strobelii
  misc_feature: SGI cDNA ID NO. 570566
  misc_feature: Encodes the peptide sequence at SEQ ID NO 30715
atggccatcgacgatatcgagtccatgatggcccacaagcacatccttgaggccctcatcaagagcatggtcgggatcatgggctacagatccacatccgtgcgaaggaagttcttgcgtgagaactcgcgcaagatgaaggccaagcccatcatagaagtggcggactccgttgttgtcttcatggacggctgtcggtgcttcaccttcgagtccttgctcatccagggtcaggcatcgggtatggagatcggcacatcattctag

SEQ ID NO: 30715 - protein, 88 aa, Muscodor strobelii
  misc_feature: SGI Peptide ID NO. 570566
MAIDDIESMMAHKHILEALIKSMVGIMGYRSTSVRRKFLRENSRKMKAKPIIEVADSVVVFMDGCRCFTFESLLIQGQASGMEIGTSF

SEQ ID NO: 30716 - DNA, 381 bp, Muscodor strobelii
  misc_feature: SGI cDNA ID NO. 570567
  misc_feature: Encodes the peptide sequence at SEQ ID NO 30717
atgctattcactggaaatctcgtgatcgaaatggagatgaagatggagacggacgtcgctcttggtatcgatgagagtcaggccaggcgagtctgggaagtggagatcgaatcggaaaggggcaatagcgggacacagaacacaatgaataggagtaccggtgaagctatggccgacatacagcatgggactaaggggtgggtagtacaatttgccttcaagcaagtcgtaccaacattgatgactcaaggagcagacccaggaacaaagaccgaagtagaaacaggaggtctagcagagcctggacaagggggtctcgcgagtgacagtccgcaccaaattgagaaatcgccgatcgatactttcgaaaagaccaagtag

SEQ ID NO: 30717 - protein, 126 aa, Muscodor strobelii
  misc_feature: SGI Peptide ID NO. 570567
MLFTGNLVIEMEMKMETDVALGIDESQARRVWEVEIESERGNSGTQNTMNRSTGEAMADIQHGTKGWVVQFAFKQVVPTLMTQGADPGTKTEVETGGLAEPGQGGLASDSPHQIEKSPIDTFEKTK

SEQ ID NO: 30718 - DNA, 201 bp, Muscodor strobelii
  misc_feature: SGI cDNA ID NO. 570568
  misc_feature: Reduced expression when VOC is produced
  misc_feature: Encodes the peptide sequence at SEQ ID NO 30719
atgggcacgaacatcatcgcagtgtttcgacagtactctgatatctctttctggccggactgtacgatctcccggtcgaatcaaacttggcgcatcgggtcgggaattcgttctcgagcagttttctgcggaccatcgtccactgccgaattcgatctccagcacctcgcaagcctcattgttcttccacgccgatactaa

SEQ ID NO: 30719 - protein, 66 aa, Muscodor strobelii
  misc_feature: SGI Peptide ID NO. 570568
  misc_feature: Useful for introducing or modulating the production of volatile compounds
MGTNIIAVFRQYSDISFWPDCTISRSNQTWRIGSGIRSRAVFCGPSSTAEFDLQHLASLIVLPRRY

SEQ ID NO: 30720 - DNA, 5234 bp, Muscodor strobelii
  misc_feature: SGI EST ID NO. CUFF.73155.0
  misc_feature: Variant of the nucleotide sequence at SEQ ID NO 30718
caaatcttctactcctctcttcaagaacaatactatgttacccatgctgcatctccatgctacagtcctctgcacatttcggtcaattgaacacaggtacgcaggttgttattcgcgagggaggcagttcaattgcatgtgcagtttaacggtatcacagaactcccatttgatctccacgactcccccacgagtattgtgatttacgagtttttagtttaagactctcgcggtcttcttcgtcagaaatcgacagtcctacatagttcactgagaatgcccatcagagactcattcaactcgccgagatcatgcattcctcccacagcccttcgaccatcgatcatgctcccattttttccacgtgaagttccacgagcgagtcttccacgaacgagtctgcagccgacatcccacgctcatcaatcttcgaattccctttcttcggattgcctttctcgcctgtacatgcaacctgttgcgcattctggcaccctccatgaccagatccccgttccggaatcgaacatcgacattcccggtgccaccgcagttgattatggtgtgaagctccgtcgatccgcataagctctgcgtattcctcctggctgaatcatggatcatgggcgttgagccttgaaccttggatcgatgtcttgcgtgcatcatgcataagcagtccgtttccatgttgttttcgctccggtatcttacctcctcttccccggccattttccctcagccgctcgagccgctgttcgttctgatagctgacgcgattgtcaaacgacacaagaagggaactgcctttgcctgtaatgctttttggacccgagttctcggaatctaggcctgaaggagtatcattctacatgagagcatgattcatgtccgagtatctaccgcgcaatgctgcattattgaacattgtgcatcactgtaagttacgaacggttctggccacgtgagtcatgactcagagctgtcgacatgcacgactaccatcttccctggccttcacgtgtgtctcctgagtctagatttcttgtatttgccaagcaagagaatctttgcaggtgtaccagggtcaagacatacacaggcacgtaggctctgacttgctttcgcttcttccttccttctctttcccgtagtgccccttgtccgcgtcaatgttgggaagcatgcactccatcaatatgtttcccgagggcaaggcactagccaagcaaggtagtatttctcaaggcgattgaccatgcgtctttctgccatctacagctgcgaggggcatctcagcattcgcatctctctctgtgcatgcacgagtccagtcttcgcatacatcgtactacatcactggtgatgcgcagactcctctgctctcttgtattgactgttctcaaatccagagagttaattcaattgagacaacttgcgattgtgactctcgtgacatgtcatgatttgtgacaatgagcaacttgcacagtcagtcatcactatggcaatatcttctgaaacttcgtgggcgcaatctcgtagagtctaggtcgagcgcccgagattcaaaacagcaaatgatagaagtaggagcttcggtcgctatgagcgaggagtatttgttatgcgaagaaatggtcatcgtcagctatcagacacgtattccatcatatattcctgcttcgaattcaaatagaatgctctgacttctagtattcaacttgtctcctgccttctagctctgatatgtattcacccaagccctcccgtcatacactttacgctagatctcgcagagtagaacttgtgcattggataaatggactagagtgataggaaacttcaagaagttgaacgagccacaaaccgtcatgactttcgatctccaggacgcacgcacgccgatgacctgtagaaagcacaccaaagcttctgattaaatgctttgggtgatccggcccatctcggcctatcctttcgcatcttcgtcatcgggcaaagcacgaacatcgcaagccaaacgcatgcggcaagcaatatgaaggaagcctgtgcaagactccggaggagtatttgagtatctagatatctacacaggctcaaggctccattatcatcatgtcaggctggatcacgttatgcgactcctcgtgactagatgtagacatttccatggtttccgaacatctccagcatcaccgaacctttttttatcaattgaaagaccacagcagatatttggctggatattccgacacgaaaaaaagcccttccggcgtgtactttgatgaagttaattccgccatatagatcgcgaaactactctgtgccactctgcgagtttgattcagcctccgatcttcaacactactgttctttcattatctcgtcggttcattcgtcgatatcacttttctggcctcttcgtctatcattaacttatagcatcactcagcgtcactcatcatgtctctattagtaattcttatatttctgattatttcttgattcctcatcttaattatcttggatcgcgggtataccggaatcggagccatgatatacctatctgagacactagtattggacatccttacacgatttcttggatatcggcacaattaattgtgcatccattgtactgcataatatcttcagacatattatcagctgtcatactaagttcagagcctcgtttagagagcacgctgcggcccctcggggattctgtttcaacacaaactacacaaacatcacgagaattcccagcatggcttcttcaaccatttgtcctactcagctggtgcctgaattcgaaatccattcgtcgacatgcacttcaacatgcacttcagcatcccataccttggacaattccgctgccgattcacgccctgctcatcgtccgatctgtcctccaatctgacatcccaccctcgaccattcacaagagccaaggacagcatcatacctctttctgtcattatgtctttctcgctgtcctccctggcacgcctcggccgactccagatcgattcggattatccctctgtcacctgagagtctctcaattcgcgttgctctctgtcaatccggccttctctccaccacttgagatccctcttcgacgccacttttgcagatggagaacataattgtctgacacgatgctttcctcctatctgtgttcgaactgaatgtgcatctcaacatccacgaagacatctgcatccattcttttctcagtttcccaagtttcccagacagtttcacgggctatacccgttatcattcggctgtccgatcaggcttctgtctatcgtcttcggtgtcccgtctcttgacatctcgaaattcatcctgctgtccgacagagcagccttccgtccaccgacgcgtccatcggcgcgttcttcgatccgtcgtacagactatccagactcgaattcccatcctatcccacccgttgtctttcggtcgtcctccgacacatcatgtcagcatcgacgctgtcccaacgacgtccacagggatgccatacaattgacttgaccattctccctcctctcatactggcagtttagtacatctccacctcgagaatcgactcgactgctttgtccggaacatttctttcacaactgggcttggaatagttcagacctttcgcatgatcgcaatcatgatctccacgaagctcccaaggtcgaatacggagttcctggagcccgagccctctacatcgcctgatttccaccctgctggctcaagctctttcaagcttcgcgtcctacccgcttttgctaatcatctacgtggagaaatccctttctctcctgccgagcacggctaatgatttggctactgagatcaacaccaatttcttgggtccctcccaaggctgccagtcccagaacaaccagtccttggaagcacacctgaatcatcagtgcatggatcatggtgcagtttcatgacttcaagatcatccaagcgtgtggcactccaattagcgctctagttgtcccatgacgattagccatcgacctcaattcaggattcactctagaaatgctcaccggaccccgttccatcttcgagatctcatgtattccagtcattgtcccgatctctacctttcttcatggatggcggaagatcagacacccgtcttgaggttcgccgacatagacacaggccttccaccctttcgcctggcttcggtcacttggttttgtgctagactctaccaccactcacgctcccatgggcacgaacatcatcgcagtgtttcgacagtactctgatatctctttctggccggactgtacgatctcccggtcgaatcaaacttggcgcatcgggtcgggaattcgttctcgagcagttttctgcggaccatcgtccactgccgaattcgatctccagcacctcgcaagcctcattgttcttccacgccgatactaatgtagttggaccgtggcctggtctcatcgatgacttcctccatccttgaaacagacgtcttttgtggctctaccacgattggcgataatcggacacattcccttgaagacactggcacacatcctattcatcaacacaagcaacatcggggccggagtccatcttaggctctcgtgtcgatcttgaacgatatggtccaatggccattgtcacaactaggcctgcctttgtgtccctcacaacgcagccccatcgtcgccaccctaagctggttggttgaattggctatgagacagccatggcgtaccgtggatcctgatttggtccccagctatggattagggctccaggtcaacagtggtcgcatcttcgccagatccgacaactcagccgtgggaaaaataccgggatccccagtgttatggaatcccgtatctcatccagcatgggcgacattaattgatttggaggatatgaagccaagttggagcggacaacagatttttctctttccgcgtcttcgctgggctcccgcgctcctctacattctccctttcccacggtgataagcctggttcaactcgggatgcagaagattgataagacggggcatcggaaatgtatcgtgtcatctgtgggatctcctggcaacgtcggctccttcgtctttgcctcttggttcttgctgtcgcttgccgcctacgtttccccttcatcatacactaggtagccactcattaaatttaattgaatcatcaatggtc

SEQ ID NO: 30721 - DNA, 1149 bp, Muscodor strobelii
  misc_feature: SGI cDNA ID NO. 570569
  misc_feature: Reduced expression when VOC is produced
  misc_feature: Encodes the peptide sequence at SEQ ID NO 30722
atgcgtgtcttaatcattggaggtggactgggtgggctctgcctagcccacggtctgctcaaggctgggattgacgtgcaaatatttgagaaacagacaagtgcgtcggagaacttggctggctacggcctccacatcaataggcacggcaggcaggcgctgcggagctgtctacccatctcgaactgggctcggctgcagaatctgttcacatccgccggcgcacaaatattctttcgtgacacgcaattgcgtgtcttggcgatgcgagacgacgcagaaatatctgggaatccgcagcacaacgcagagcgcagcggcatcgggagactggagcttcgcgatgtcttgctcgagggccttgacggtgaaaattcctccgtcatgcgttgggccaaaactttcatcgatttccagtcactcgacgatggccgcgtccgcgcgcatttttcagacggcacattcgaagacgctgacctactcgttggcgcagacggcccaagatcagcagtacgacaacaatatcttcccgacatacatcgtttaaatctgggaatctcagccattgccggtcgatgtgtactagatgaaaggagaagaaaaatggtgccacaggaattgacggacgggtcgctaaataacgttgtcccttttggaaaaggttggatgttcgtctctgcgtgggcctccatgccgagtatagatgttgaatcttcttcacctgaagactatcttgtctgggcgtatatcttgcatcgggatgatgtgccatacgagatcgacatgtccgatggaccaacgttgcacgagcatgtcctaaaagccacggagggatggtcgtctggacttcgcagtctgatcgaagaatccgacccattggccgcgaaacacattactctacggtccatgccgatactcacatcatgggagccgagcaatgtcaccgttctaggcgattctatccacaacatgacgcctatggctggcatcggggcaaacaccgcgcttcgcgactcagaagtgcttgcgagatacctggttgatgtgcgtgccaggagaatgacgttggttgaggccgtgggtagctatgaggcagagatgagaagctatgccaatgaagccctacaaaaaatcaagacaaaatgctga

SEQ ID NO: 30722 - protein, 382 aa, Muscodor strobelii
  misc_feature: SGI Peptide ID NO. 570569
  misc_feature (1)..(378): Pfam Id: PF01494 Pfam Desc: FAD binding domain
  misc_feature (1)..(36): Pfam Id: PF01494 Pfam Desc: FAD binding domain
  misc_feature (14)..(373): NCBI GI: 37526149 Blast Desc: plu2236 [Photorhabdus luminescens subsp. laumondii TTO1] gi|36785579|emb|CAE14529.1| protein product [Photorhabdus luminescens subsp. laumondii TTO1]
  misc_feature (14)..(376): NCBI GI: 37525680 Blast Desc: plu1743 [Photorhabdus luminescens subsp. laumondii TTO1] gi|36785108|emb|CAE14036.1| protein product [Photorhabdus luminescens subsp. laumondii TTO1]
  misc_feature (14)..(373): NCBI GI: 253989669 Blast Desc: PAU_02189 [Photorhabdus asymbiotica] gi|253781119|emb|CAQ84281.1| conserved [Photorhabdus asymbiotica]
  misc_feature (14)..(376): NCBI GI: 253990248 Blast Desc: PAU_02771 [Photorhabdus asymbiotica] gi|253781698|emb|CAQ84861.1| conserved [Photorhabdus asymbiotica]
  misc_feature (1)..(381): NCBI GI: 154623208 Blast Desc: FAD-depending monooxygenase [Streptomyces tendae]
  misc_feature (13)..(379): NCBI GI: 229861960 Blast Desc: 2-polyprenyl-6-methoxyphenol hydroxylase-like oxidoreductase [Stackebrandtia nassauensis DSM 44728] gi|229750611|gb|EEP08403.1| 2-polyprenyl-6-methoxyphenol DSM
  misc_feature (3)..(370): NCBI GI: 238059417 Blast Desc: monooxygenase, FAD-binding [Micromonospora sp. ATCC 39149] gi|237881228|gb|EEP70056.1| monooxygenase, FAD-binding [Micromonospora sp. ATCC 39149]
  misc_feature (13)..(371): NCBI GI: 256670867 Blast Desc: FAD-dependent monooxygenase [Streptomyces sp. AA4]
  misc_feature (14)..(375): NCBI GI: 108804124 Blast Desc: monooxygenase, FAD-binding protein [Rubrobacter xylanophilus DSM 9941] gi|108765367|gb|ABG04249.1| monooxygenase, FAD-binding protein [Rubrobacter xylanophilus DSM 9941]
  misc_feature (3)..(370): NCBI GI: 159038268 Blast Desc: monooxygenase FAD-binding [Salinispora arenicola CNS-205] gi|157917103|gb|ABV98530.1| monooxygenase FAD-binding [Salinispora arenicola CNS-205]
  misc_feature (108)..(372): SWISSPROT Homolog: EC 1.14.13.90 Zeaxanthin epoxidase
  misc_feature: Useful for introducing or modulating the production of volatile compounds
MRVLIIGGGLGGLCLAHGLLKAGIDVQIFEKQTSASENLAGYGLHINRHGRQALRSCLPISNWARLQNLFTSAGAQIFFRDTQLRVLAMRDDAEISGNPQHNAERSGIGRLELRDVLLEGLDGENSSVMRWAKTFIDFQSLDDGRVRAHFSDGTFEDADLLVGADGPRSAVRQQYLPDIHRLNLGISAIAGRCVLDERRRKMVPQELTDGSLNNVVPFGKGWMFVSAWASMPSIDVESSSPEDYLVWAYILHRDDVPYEIDMSDGPTLHEHVLKATEGWSSGLRSLIEESDPLAAKHITLRSMPILTSWEPSNVTVLGDSIHNMTPMAGIGANTALRDSEVLARYLVDVRARRMTLVEAVGSYEAEMRSYANEALQKIKTKC

SEQ ID NO: 30723 - DNA, 1492 bp, Muscodor strobelii
  misc_feature: SGI EST ID NO. CUFF.72853.1
  misc_feature: Variant of the nucleotide sequence at SEQ ID NO 30721
atagaatagcccataaggccgtcctagatatatcatagcctctccgagtgatatcttcagcaaatgcgttactatttcctcgtattccccaactcatttcatcatcgacataaacttccaattctgctctattaccaagaagccccctcgaaattacatgcgtgtcttaatcattggaggtggactgggtgggctctgcctagcccacggtctgctcaaggctgggattgacgtgcaaatatttgagaaacagacaagtgcgtcggagaacttggctggctacggcctccacatcaataggcacggcaggcaggcgctgcggagctgtctacccatctcgaactgggctcggctgcagaatctgttcacatccgccggcgcacaaatattctttcgtgacacgcaattgcgtgtcttggcgatgcgagacgacgcagaaatatctgggaatccgcagcacaacgcagagcgcagcggcatcgggagactggagcttcgcgatgtcttgctcgagggccttgacggtgaaaattcctccgtcatgcgttgggccaaaactttcatcgatttccagtcactcgacgatggccgcgtccgcgcgcatttttcagacggcacattcgaagacgctgacctactcgttggcgcagacggcccaagatcagcagtacgacaacaatatcttcccgacatacatcgtttaaatctgggaatctcagccattgccggtcgatgtgtactagatgaaaggagaagaaaaatggtgccacaggaattgacggacgggtcgctaaataacgttgtcccttttggaaaaggttggatgttcgtctctgcgtgggcctccatgccgagtatagatgttgaatcttcttcacctgaagactatcttgtctgggcgtatatcttgcatcgggatgatgtgccatacgagatcgacatgtccgatggaccaacgttgcacgagcatgtcctaaaagccacggagggatggtcgtctggacttcgcagtctgatcgaagaatccgacccattggccgcgaaacacattactctacggtccatgccgatactcacatcatgggagccgagcaatgtcaccgttctaggcgattctatccacaacatgacgcctatggctggcatcggggcaaacaccgcgcttcgcgactcagaagtgcttgcgagatacctggttgatgtgcgtgccaggagaatgacgttggttgaggccgtgggtagctatgaggcagagatgagaagctatgccaatgaagccctacaaaaaatcaagacaaaatgctgaagctgcctgcgcaggaagaggtatgcagcggttcttgtttcgagggcttttgctggccgcccaggaatctcgcactgttatgcgactaacgttaggacaagcagtagttaaaggcgttattcattaacccttgttatatatacataatgagtagctagttagctatgtaaggtaaagaaatcgaac

SEQ ID NO: 30724 - DNA, 1734 bp, Muscodor strobelii
  misc_feature: SGI cDNA ID NO. 570570
  misc_feature: Encodes the peptide sequence at SEQ ID NO 30725
atgatgctttcgttttattcggctgctgtcgctgtggctctggccgagctggcgattgctatgccaaagcttcctgcaacgattcgacctgagcctcgcgcatccgcagaccagactctcgaaaacgccatccaagctattggaggtgaagcggctctggcgtcagtcaaatcaataacttatcatgcccctagcatattccgaagtcaaaccttgacacagagttacaacctcaagtattctgatcagtccgtcgcaatcgccgggtcgcaggacatgtctttctccttcgacggggaccacatccgacgccgaatcgatcgggcatattcttatggggattactggatctgggcatttccaaaccttaagccgaatatgaactatacgcagatctcccagaccgggcccgatggatttagctgcttcaccaaggggcgaaacagtttcttcgctgaagacccgaccgttcctttggggtttgctgatgcagcacttgcggagtttctggggcatcaagctgtgcagttcgccttccctgcgttgctcgccctttggaagcagaatgccgccaacctgtatgccgtcgaggtccaagacgcaatcactggccagagttatcaagccatctccaactcggctcaagagcttaccatcatcttcaatcgtacctcctcgttaccctatataattcgagcctacgagaataacgcgatttttggcaactcgaccagtgacttgctgctctccgactaccgaaatacggcaatcggcaagaacacaactatcctgcttccgcatagattccagacaatctacaactcccgagacgtcctggaagacttcctggtagattccatttcggtgaacccagacttccctgaagggttcttccagctgcgcaacagctcttctacagccaaaatcgcgccgaaacgtgacccggagtacgatcacgccgaggtacatgcattcttcgagaccggactgtgggacacgccaactgtcttcaacgtatcggagctgacggttcagcacccgattccagggttcgataagatcaagtcagtctacattggatatcccgactacgttcaaatgatagtggagttcgatgatggcgtactgatcacagatgcgccgcctcatcggtccaaagcaatcattcagtgggtcagggaggtattgggcaaaagcgtcaagtacattgccctaagccaccatcaccacgaccacgcgtatggtgtaggggactacgtgacagcaggcgcaatcctcgtgatcccagaagtggcaaagaattattactcgtcagtcaacggtggcaacgtcccgatgattacatttaacaagacgcatccatttgtcctaagagatgactcggtccaattccgcgcgatttatcacgacgaagcgcctcatgccaaggactgggtgtacagcttagcttccaaggccaatccgacaaacaatgacagcgtcatcgtgttcaatgcagatgtctggagtcctggatccgatgcgttgcgctttgacactggctattccaggcagtggctcgatgccgccgtcgccgatggccttccgaagaattcaaccgtcgtagggtcgcatggaacgacgaacaacgggactacgcaggcgctgcaagatctcatcgacatcctaggctacgattatccttctttcggcgtcggtgactggaaggttggtggacctctaaatgcccactaa

SEQ ID NO: 30725 - protein, 577 aa, Muscodor strobelii
  misc_feature: SGI Peptide ID NO. 570570
  misc_feature (363)..(538): Pfam Id: PF00753 Pfam Desc: Metallo-beta-lactamase superfamily
  misc_feature (26)..(574): NCBI GI: 256723739 Blast Desc: NECHADRAFT_52281 [Nectria haematococca mpVI 77-13-4]
  misc_feature (32)..(574): NCBI GI: 256729599 Blast Desc: NECHADRAFT_95379 [Nectria haematococca mpVI 77-13-4]
  misc_feature (35)..(574): NCBI GI: 46114486 Blast Desc: FG03085.1 [Gibberella zeae PH-1]
  misc_feature (35)..(573): NCBI GI: 256726460 Blast Desc: NECHADRAFT_39362 [Nectria haematococca mpVI 77-13-4]
  misc_feature (67)..(454): NCBI GI: 256728061 Blast Desc: NECHADRAFT_83485 [Nectria haematococca mpVI 77-13-4]
  misc_feature (35)..(439): NCBI GI: 261357190 Blast Desc: conserved [Verticillium albo-atrum VaMs.102]
  misc_feature (116)..(576): NCBI GI: 256732317 Blast Desc: NECHADRAFT_41325 [Nectria haematococca mpVI 77-13-4]
  misc_feature (311)..(532): NCBI GI: 261353412 Blast Desc: [Verticillium albo-atrum VaMs.102]
  misc_feature (39)..(428): NCBI GI: 115380149 Blast Desc: metallo-beta-lactamase superfamily protein [Stigmatella aurantiaca DW4/3-1] gi|115362838|gb|EAU62041.1| metallo-beta-lactamase superfamily protein [Stigmatella DW4/3-1]
  misc_feature (363)..(427): NCBI GI: 37521372 Blast Desc: glr1803 [Gloeobacter violaceus PCC 7421] gi|35212369|dbj|BAC89744.1| glr1803 [Gloeobacter violaceus PCC 7421]
MMLSFYSAAVAVALAELAIAMPKLPATIRPEPRASADQTLENAIQAIGGEAALASVKSITYHAPSIFRSQTLTQSYNLKYSDQSVAIAGSQDMSFSFDGDHIRRRIDRAYSYGDYWIWAFPNLKPNMNYTQISQTGPDGFSCFTKGRNSFFAEDPTVPLGFADAALAEFLGHQAVQFAFPALLALWKQNAANLYAVEVQDAITGQSYQAISNSAQELTIIFNRTSSLPYIIRAYENNAIFGNSTSDLLLSDYRNTAIGKNTTILLPHRFQTIYNSRDVLEDFLVDSISVNPDFPEGFFQLRNSSSTAKIAPKRDPEYDHAEVHAFFETGLWDTPTVFNVSELTVQHPIPGFDKIKSVYIGYPDYVQMIVEFDDGVLITDAPPHRSKAIIQWVREVLGKSVKYIALSHHHHDHAYGVGDYVTAGAILVIPEVAKNYYSSVNGGNVPMITFNKTHPFVLRDDSVQFRAIYHDEAPHAKDWVYSLASKANPTNNDSVIVFNADVWSPGSDALRFDTGYSRQWLDAAVADGLPKNSTVVGSHGTTNNGTTQALQDLIDILGYDYPSFGVGDWKVGGPLNAH

SEQ ID NO: 30726 - DNA, 5233 bp, Muscodor strobelii
  misc_feature: SGI EST ID NO. CUFF.72824.0
  misc_feature: Variant of the nucleotide sequence at SEQ ID NO 30724
gttaaactccatcaaaaccccgtacgctgcggtagcatcttttatgcttagagcctcgtccggcgagttcgatacaaagtagcctacctaaccattatcaccggcacttagtgaagttccgatgcgagtagccctgttatttactgacttgagattttgcaaactcaataccgtctgcatcacaatgtagcgctgctcccacgcctaactccgactgtagtgatataaaggaggcaaaacgggccggctgaaaggctctggcatgaatctgcattttgtttcgttatcccgcaagccttgcacaagtactctttctacatcattgaaatgatagcaagaccgatatgatgctttcgttttattcggctgctgtcgctgtggctctggccgagctggcgattgctatgccaaagcttcctgcaacgattcgacctgagcctcgcgcatccgcagaccagactctcgaaaacgccatccaagctattggaggtgaagcggctctggcgtcagtcaaatcaataacttatcatgcccctagcatattccgaagtcaaaccttgacacagagttacaacctcaagtattctgatcagtccgtcgcaatcgccgggtcgcaggacatgtctttctccttcgacggggaccacatccgacgccgaatcgatcgggcatattcttatggggattactggatctgggcatttccaaaccttaagccgaatatgaactatacgcagatctcccagaccgggcccgatggatttagctgcttcaccaaggggcgaaacagtttcttcgctgaagacccgaccgttcctttggggtttgctgatgcagcacttgcggagtttctggggcatcaagctgtgcagttcgccttccctgcgttgctcgccctttggaagcagaatgccgccaacctgtatgccgtcgaggtccaagacgcaatcactggccagagttatcaagccatctccaactcggctcaagagcttaccatcatcttcaatcgtacctcctcgttaccctatataattcgagcctacgagaataacgcgatttttggcaactcgaccagtgacttgctgctctccgactaccgaaatacggcaatcggcaagaacacaactatcctgcttccgcatagattccagacaatctacaactcccgagacgtcctggaagacttcctggtagattccatttcggtgaacccagacttccctgaagggttcttccagctgcgcaacagctcttctacagccaaaatcgcgccgaaacgtgacccggagtacgatcacgccgaggtacatgcattcttcgagaccggactgtgggacacgccaactgtcttcaacgtatcggagctgacggttcagcacccgattccagggttcgataagatcaagtcagtctacattggatatcccgactacgttcaaatgatagtggagttcgatgatggcgtactgatcacagatgcgccgcctcatcggtccaaagcaatcattcagtgggtcagggaggtattgggcaaaagcgtcaagtacattgccctaagccaccatcaccacgaccacgcgtatggtgtaggggactacgtgacagcaggcgcaatcctcgtgatcccagaagtggcaaagaattattactcgtcagtcaacggtggcaacgtcccgatgattacatttaacaagacgcatccatttgtcctaagagatgactcggtccaattccgcgcgatttatcacgacgaagcgcctcatgccaaggactgggtgtacagcttagcttccaaggccaatccgacaaacaatgacagcgtcatcgtgttcaatgcagatgtctggagtcctggatccgatgcgttgcgctttgacactggctattccaggcagtggctcgatgccgccgtcgccgatggccttccgaagaattcaaccgtcgtagggtcgcatggaacgacgaacaacgggactacgcaggcgctgcaagatctcatcgacatcctaggctacgattatccttctttcggcgtcggtgactggaaggttggtggacctctaaatgcccactaaatctagccatagttttcggccctggccaagtgagctcaatcatcgacatgaaacacgcaattgcagcatagaagacaacaattcgtgtaaattggattgcgatgatcactagaaacatcggatttgaagctcagcacatggcttacaatgcgcagctccgagttcccctatgatccatgtgtatatgggcgtgtgagtagcgggacgggcccaaccgagagggtgcccacgtaacacatcaggggtatatattagatttttttctgcagcaatcttgtattaagttaatatacgcttcttgtctcaattccctgcgccctaaacgcagattccgagccctattcagtgtgatcccttgagtgcttgtccctcgcagtagagtcttaggattgcagcgtagttgcaattagtttcgttgttgttctcgagatcgatttcagtatgtgcgtcatcttcatagtccaagttgttatgacaaaaaggaaaaaaagacaagggaagggggatgaacactacttacttggttaacatgtagaagtatgtatacatgacttgagcgacaatggatgcgggccatttatctcacacaaccgtttcaagatgttgtataaatagaagatagaaatcaccactcctagtcaatcattccggatggcgtagcatcataccctgtcaagaagctcgtttcggtttgaaccccccaatcttcaaggaattgtgctgcctcctcgtccgacattggagtcgggccaaatggatccgcagcgttgagattaagccaaagcaggtcgccgttcacggttggatcaaccgtgttggtattgagatgatctacatcccttgcctctgagaatgaactatctccacacattgtccccatagctttaggcttatgcgcgttgctagaatccgatgcagattgtaatgcattcatcaatatcggattcgtggcgtgccctatcctggctgtatctacaggctcaaccatcggggagtcttgatgcatcgacgagacgatcgtaggagtattcctggctataattggaagcattgtggagtccaaattcactaggggtcggaaatatagatcatgcacctgtgtcgggatattaaggccgcatgctctgtcccaccaggcgtacaggcgtcgaaggacctgcaagaacttgaaaggcactcgaagatgtttgtcacctgcaagtcgcgtcaaggtcgtctctaataagctgaagtaatgtttgatcttgaggtgttctttgtcaaccatcttgccgagctcattgtcgcgacgaagcgaaaccatatgaagaataatcaggacgatcatggcatggaaagttcgagtgtaatgcgtaatggggctgtgtgtagcaatcgagtgctcgatcccacaaaatgtttctatcatgccgtgggcacatctgacaagagtaaacactatccatgctcgcgctggtgttaatggtgacggacccggagcaagcgggacgctccagtgccgaattaagtacggtggttgaaagtccgacggctcgcaagtatcgtgtagggcgaacacgagcacacgagattgatagtacttgaccgcgatgttagccgtattaactactagaaagttagcaaccagagacttgacgagggcttcgttcagtgactcaccatccaacagctccgaattcaacattccttcgagagcttcgaatgtagcactgaattgcgatatttggtcttcaaacatcgccaattctttcccactcttacccatacttatctgaagagtaccgacggcttgttctgcgcaaagctgggcatcaatcataaaagccagctggcggtccggtccgcatggaataccagaacgcagatggtgtagagacgaggccatcgatcttgtgaagggtagaacgctgggtcgaccggacgtgattgcaattctgtcctccattcagcatggtttacgaggtgtctttattgactcttcataaggactgacccagagctcaacaaaaagcaccctagaagagtcctttgtttttccagcgattcacattccgagcttcgtggctgtgtcgatgattcgaacccagaattcaagctctcgttgtacgatgtctgatcttctcccaatccaagatccatggccatggtcgcagcgagatgcatgtattgagaatggtttagatctctgaagttgtccggcggaaacggccagacagccatgatgagcatggcttgcaccagttccaacgtcttctggtttccgaccacgacagcttcggcgaacctgtgcagcagctgaacactgagagcgcgaaagagagacggatcagcaccagtggctgctgccgtgagaatggaaagaaacaaggtgggcttctcgcttctaagttgacttgtcgttagctcaggatgaagtggtataaatggccactgagggaaaagttgcgacctatattggagtacgagttcgtctgcgagttcaattgttaggagcccgagatcgattgcatcttcatggactacatttttaaggctgtgccatggtgtactggctatacccccgctggatgtcggtagcgtttcggatccttgggtccctgatcggcattgggactgggcatccgagtcaccgtgctcttctagtctcccacttggatcctctattagcaatgcttcattcgatggtgaccattctgtgggcgcgctgcctgcagaagcaccgatagctgtcttcatcctttgcagttctttctcgagctctgcgattcgagtgtcggtccttttacgcggctttctacgcgtcaccaacgcgaatgtgcacaaccgacccgtcgcagcgcaccgttgacattttggcgttgtgcctctggtattctcctggatgatgcatttctcttttgaagctctgcatgactggcaagccttccgcaccgtaccggtggtctcagatgcatgaacagattccgcctggagtctgccgacctcttgctgatagaccagttcgtcatccgcagctagtggatttgccatttcggagcctttcacaggaatgaggcccagctggagaccacaaatcaatgcagcgcttctcctttgtagctatgtatcctcgcgatgatgttgaaggcagagctcaaatgacaagagtcgcccgg

SEQ ID NO: 30727 - DNA, 1824 bp, Muscodor strobelii
  misc_feature: SGI cDNA ID NO. 570571
  misc_feature: Encodes the peptide sequence at SEQ ID NO 30728
atggcaaatccactagctgcggatgacgaactggtctatcagcaagaggtcggcagactccaggcggaatctgttcatgcatctgagaccaccggtacggtgcggaaggcttgccagtcatgcagagcttcaaaagagaaatgcatcatccaggagaataccagaggcacaacgccaaaatgtcaacgaagcgagaagcccaccttgtttctttccattctcacggcagcagccactggtgctgatccgtctctctttcgcgctctcagtgttcagctgctgcacaggttcgccgaagctgtcgtggtcggaaaccagaagacgttggaactggtgcaagccatgctcatcatggctgtctggccgtttccgccggacaacttcagagatctaaaccattctcaatacatgcatctcgctgcgaccatggccatggatcttggattgggagaagatcagacatcgtacaacgagagcttgaattctgggttcgaatcatcgacacagccacgaagctcggaatgtgaatcgctggaaaaacaaaggactcttctagggtgctttttgttgagctctggaattgcaatcacgtccggtcgacccagcgttctacccttcacaagatcgatggcctcgtctctacaccatctgcgttctggtattccatgcggaccggaccgccagctggcttttatgattgatgcccagctttgcgcagaacaagccgtcggtactcttcagataagtatgggtaagagtgggaaagaattggcgatgtttgaagaccaaatatcgcaattcagtgctacattcgaagctctcgaaggaatgttgaattcggagctgttggatgttaatacggctaacatcgcggtcaagtactatcaatctcgtgtgctcgtgttcgccctacacgatacttgcgagccgtcggactttcaaccaccgtacttaattcggcactggagcgtcccgcttgctccgggtccgtcaccattaacaccagcgcgagcatggatagtgtttactcttgtcagatgtgcccacggcatgatagaaacattttgtgggatcgagcactcgattgctacacacagccccattacgcattacactcgaactttccatgccatgatcgtcctgattattcttcatatggtttcgcttcgtcgcgacaatgagctcggcaagatggttgacaaagaacacctcaagatcaaacattacttcagcttattagagacgaccttgacgcgacttgcaggtgacaaacatcttcgagtgcctttcaagttcttgcaggtccttcgacgcctgtacgcctggtgggacagagcatgcggccttaatatcccgacacaggtgcatgatctatatttccgacccctagtgaatttggactccacaatgcttccaattatagccaggaatactcctacgatcgtctcgtcgatgcatcaagactccccgatggttgagcctgtagatacagccaggatagggcacgccacgaatccgatattgatgaatgcattacaatctgcatcggattctagcaacgcgcataagcctaaagctatggggacaatgtgtggagatagttcattctcagaggcaagggatgtagatcatctcaataccaacacggttgatccaaccgtgaacggcgacctgctttggcttaatctcaacgctgcggatccatttggcccgactccaatgtcggacgaggaggcagcacaattccttgaagattggggggttcaaaccgaaacgagcttcttgacagggtatgatgctacgccatccggaatgattgactag

SEQ ID NO: 30728 - protein, 607 aa, Muscodor strobelii
  misc_feature: SGI Peptide ID NO. 570571
  misc_feature (56)..(454): NCBI GI: 154301173 Blast Desc: BC1G_10559 [Botryotinia fuckeliana B05.10] gi|150856307|gb|EDN31499.1| BC1G_10559 [Botryotinia fuckeliana B05.10]
  misc_feature (56)..(445): NCBI GI: 156057027 Blast Desc: SS1G_04244 [Sclerotinia sclerotiorum 1980] gi|154702030|gb|EDO01769.1| SS1G_04244 [Sclerotinia sclerotiorum 1980]
  misc_feature (57)..(459): NCBI GI: 115391013 Blast Desc: [Aspergillus terreus NIH2624] gi|114193935|gb|EAU35635.1| [Aspergillus terreus NIH2624]
  misc_feature (63)..(445): NCBI GI: 171696314 Blast Desc: protein product [Podospora anserina] gi|170948399|emb|CAP60563.1| protein product [Podospora anserina]
  misc_feature (57)..(445): NCBI GI: 145255073 Blast Desc: An18g03950 [Aspergillus niger] gi|134084440|emb|CAK97432.1| protein product [Aspergillus niger]
  misc_feature (66)..(466): NCBI GI: 256723654 Blast Desc: NECHADRAFT_86714 [Nectria haematococca mpVI 77-13-4]
  misc_feature (57)..(455): NCBI GI: 169771235 Blast Desc: [Aspergillus oryzae RIB40] gi|83767946|dbj|BAE58085.1| protein product [Aspergillus oryzae]
  misc_feature (57)..(455): NCBI GI: 238486226 Blast Desc: C6 finger domain protein, [Aspergillus flavus NRRL3357] gi|220699230|gb|EED55569.1| C6 finger domain protein, [Aspergillus flavus NRRL3357]
  misc_feature (63)..(443): NCBI GI: 46108378 Blast Desc: FG01071.1 [Gibberella zeae PH-1]
  misc_feature (63)..(443): NCBI GI: 85119541 Blast Desc: NCU02525 [Neurospora crassa OR74A] gi|28927468|gb|EAA36420.1| [Neurospora crassa OR74A]
MANPLAADDELVYQQEVGRLQAESVHASETTGTVRKACQSCRASKEKCIIQENTRGTTPKCQRSEKPTLFLSILTAAATGADPSLFRALSVQLLHRFAEAVVVGNQKTLELVQAMLIMAVWPFPPDNFRDLNHSQYMHLAATMAMDLGLGEDQTSYNESLNSGFESSTQPRSSECESLEKQRTLLGCFLLSSGIAITSGRPSVLPFTRSMASSLHHLRSGIPCGPDRQLAFMIDAQLCAEQAVGTLQISMGKSGKELAMFEDQISQFSATFEALEGMLNSELLDVNTANIAVKYYQSRVLVFALHDTCEPSDFQPPYLIRHWSVPLAPGPSPLTPARAWIVFTLVRCAHGMIETFCGIEHSIATHSPITHYTRTFHAMIVLIILHMVSLRRDNELGKMVDKEHLKIKHYFSLLETTLTRLAGDKHLRVPFKFLQVLRRLYAWWDRACGLNIPTQVHDLYFRPLVNLDSTMLPIIARNTPTIVSSMHQDSPMVEPVDTARIGHATNPILMNALQSASDSSNAHKPKAMGTMCGDSSFSEARDVDHLNTNTVDPTVNGDLLWLNLNAADPFGPTPMSDEEAAQFLEDWGVQTETSFLTGYDATPSGMID

SEQ ID NO: 30729 - DNA, 5083 bp, Muscodor strobelii
  misc_feature: SGI EST ID NO. CUFF.72825.1
  misc_feature: Variant of the nucleotide sequence at SEQ ID NO 30727
ccgggcgactcttgtcatttgagctctgccttcaacatcatcgcgaggatacatagctacaaaggagaagcgctgcattgatttgtggtctccagctgggcctcattcctgtgaaaggctccgaaatggcaaatccactagctgcggatgacgaactggtctatcagcaagaggtcggcagactccaggcggaatctgttcatgcatctgagaccaccggtacggtgcggaaggcttgccagtcatgcagagcttcaaaagagaaatgcatcatccaggagaataccagaggcacaacgccaaaatgtcaacggtgcgctgcgacgggtcggttgtgcacattcgcgttggtgacgcgtagaaagccgcgtaaaaggaccgacactcgaatcgcagagctcgagaaagaactgcaaaggatgaagacagctatcggtgcttctgcaggcagcgcgcccacagaatggtcaccatcgaatgaagcattgctaatagaggatccaagtgggagactagaagagcacggtgactcggatgcccagtcccaatgccgatcagggacccaaggatccgaaacgctaccgacatccagcgggggtatagccagtacaccatggcacagccttaaaaatgtagtccatgaagatgcaatcgatctcgggctcctaacaattgaactcgcagacgaactcgtactccaatataggtcgcaacttttccctcagtggccatttataccacttcatcctgagctaacgacaagtcaacttagaagcgagaagcccaccttgtttctttccattctcacggcagcagccactggtgctgatccgtctctctttcgcgctctcagtgttcagctgctgcacaggttcgccgaagctgtcgtggtcggaaaccagaagacgttggaactggtgcaagccatgctcatcatggctgtctggccgtttccgccggacaacttcagagatctaaaccattctcaatacatgcatctcgctgcgaccatggccatggatcttggattgggagaagatcagacatcgtacaacgagagcttgaattctgggttcgaatcatcgacacagccacgaagctcggaatgtgaatcgctggaaaaacaaaggactcttctagggtgctttttgttgagctctggaattgcaatcacgtccggtcgacccagcgttctacccttcacaagatcgatggcctcgtctctacaccatctgcgttctggtattccatgcggaccggaccgccagctggcttttatgattgatgcccagctttgcgcagaacaagccgtcggtactcttcagataagtatgggtaagagtgggaaagaattggcgatgtttgaagaccaaatatcgcaattcagtgctacattcgaagctctcgaaggaatgttgaattcggagctgttggatgttaatacggctaacatcgcggtcaagtactatcaatctcgtgtgctcgtgttcgccctacacgatacttgcgagccgtcggactttcaaccaccgtacttaattcggcactggagcgtcccgcttgctccgggtccgtcaccattaacaccagcgcgagcatggatagtgtttactcttgtcagatgtgcccacggcatgatagaaacattttgtgggatcgagcactcgattgctacacacagccccattacgcattacactcgaactttccatgccatgatcgtcctgattattcttcatatggtttcgcttcgtcgcgacaatgagctcggcaagatggttgacaaagaacacctcaagatcaaacattacttcagcttattagagacgaccttgacgcgacttgcaggtgacaaacatcttcgagtgcctttcaagttcttgcaggtccttcgacgcctgtacgcctggtgggacagagcatgcggccttaatatcccgacacaggtgcatgatctatatttccgacccctagtgaatttggactccacaatgcttccaattatagccaggaatactcctacgatcgtctcgtcgatgcatcaagactccccgatggttgagcctgtagatacagccaggatagggcacgccacgaatccgatattgatgaatgcattacaatctgcatcggattctagcaacgcgcataagcctaaagctatggggacaatgtgtggagatagttcattctcagaggcaagggatgtagatcatctcaataccaacacggttgatccaaccgtgaacggcgacctgctttggcttaatctcaacgctgcggatccatttggcccgactccaatgtcggacgaggaggcagcacaattccttgaagattggggggttcaaaccgaaacgagcttcttgacagggtatgatgctacgccatccggaatgattgactaggagtggtgatttctatcttctatttatacaacatcttgaaacggttgtgtgagataaatggcccgcatccattgtcgctcaagtcatgtatacatacttctacatgttaaccaaaacaacaacgaaactaattgcaactacgctgcaatcctaagactctactgcgagggacaagcactcaagggatcacactgaatagggctcggaatctgcgtttagggcgcagggaattgagacaagaagcgtatattaacttaatacaagattgctgcagaaaaaaatctaatatatacccctgatgtgttacgtgggcaccctctcggttgggcccgtcccgctactcacacgcccatatacacatggatcataggggaactcggagctgcgcattgtaagccatgtgctgagcttcaaatccgatgtttctagtgatcatcgcaatccaatttacacgaattgttgtcttctatgctgcaattgcgtgtttcatgtcgatgattgagctcacttggccagggccgaaaactatggctagatttagtgggcatttagaggtccaccaaccttccagtcaccgacgccgaaagaaggataatcgtagcctaggatgtcgatgagatcttgcagcgcctgcgtagtcccgttgttcgtcgttccatgcgaccctacgacggttgaattcttcggaaggccatcggcgacggcggcatcgagccactgcctggaatagccagtgtcaaagcgcaacgcatcggatccaggactccagacatctgcattgaacacgatgacgctgtcattgtttgtcggattggccttggaagctaagctgtacacccagtccttggcatgaggcgcttcgtcgtgataaatcgcgcggaattggaccgagtcatctcttaggacaaatggatgcgtcttgttaaatgtaatcatcgggacgttgccaccgttgactgacgagtaataattctttgccacttctgggatcacgaggattgcgcctgctgtcacgtagtcccctacaccatacgcgtggtcgtggtgatggtggcttagggcaatgtacttgacgcttttgcccaatacctccctgacccactgaatgattgctttggaccgatgaggcggcgcatctgtgatcagtacgccatcatcgaactccactatcatttgaacgtagtcgggatatccaatgtagactgacttgatcttatcgaaccctggaatcgggtgctgaaccgtcagctccgatacgttgaagacagttggcgtgtcccacagtccggtctcgaagaatgcatgtacctcggcgtgatcgtactccgggtcacgtttcggcgcgattttggctgtagaagagctgttgcgcagctggaagaacccttcagggaagtctgggttcaccgaaatggaatctaccaggaagtcttccaggacgtctcgggagttgtagattgtctggaatctatgcggaagcaggatagttgtgttcttgccgattgccgtatttcggtagtcggagagcagcaagtcactggtcgagttgccaaaaatcgcgttattctcgtaggctcgaattatatagggtaacgaggaggtacgattgaagatgatggtaagctcttgagccgagttggagatggcttgataactctggccagtgattgcgtcttggacctcgacggcatacaggttggcggcattctgcttccaaagggcgagcaacgcagggaaggcgaactgcacagcttgatgccccagaaactccgcaagtgctgcatcagcaaaccccaaaggaacggtcgggtcttcagcgaagaaactgtttcgccccttggtgaagcagctaaatccatcgggcccggtctgggagatctgcgtatagttcatattcggcttaaggtttggaaatgcccagatccagtaatccccataagaatatgcccgatcgattcggcgtcggatgtggtccccgtcgaaggagaaagacatgtcctgcgacccggcgattgcgacggactgatcagaatacttgaggttgtaactctgtgtcaaggtttgacttcggaatatgctttgaaccaattagcaatggcattcatatttaatcgaatgattgatgattgtgaaatacctaggggcatgataagttattgatttgactgacgccagagccgcttcacctccaatagcttggatggcgttttcgagagtctggtctgcggatgcgcgaggctcaggtcgaatcgttgcaggaagctttggcatagcaatcgccagctcggccagagccacagcgacagcagccgaataaaacgaaagcatcatatcggtcttgctatcatttcaatgatgtagaaagagtacttgtgcaaggcttgcgggataacgaaacaaaatgcagattcatgccagagcctttcagccggcccgttttgcctcctttatatcactacagtcggagttaggcgtgggagcagcgctacattgtgatgcagacggtattgagtttgcaaaatctcaagtcagtaaataacagggctactcgcatcggaacttcactaagtgccggtgataatggttaggtaggctactttgtatcgaactcgccggacgaggctctaagcataaaagatgctaccgcagcgtacggggttttgatggagtttaac

SEQ ID NO: 30730 - DNA, 370 bp, Muscodor strobelii
  misc_feature: SGI cDNA ID NO. 570572
  misc_feature: Elevated expression when VOC is produced
  misc_feature: Encodes the peptide sequence at SEQ ID NO 30731
atggctcccatgactatccgcaaggtcctcgtagagaggattacaaaagaaaccagtgttcaggtcgccttgtcgcttgatggaggacccttggaccatcttccgaacgagaaagttcaaataccaagttcggtgcctgaacaaacagagcaacatcatgctagtcaggactctgcctcgcaacaggtttgggtatggaccggaatagggtttctcgaccacatgatacatgcgcttgccaagcacggtggatggagtctaagagtgcgaacaattggtgatcttgcgattgatgaccatcatacggccgaagacacttttctcggtattggagaggctgtttccaaggcactacgaggggataagggag

SEQ ID NO: 30731 - protein, 123 aa, Muscodor strobelii
  misc_feature: SGI Peptide ID NO. 570572
  misc_feature (67)..(122): Pfam Id: PF00475 Pfam Desc: Imidazoleglycerol-phosphate dehydratase
  misc_feature (7)..(123): NCBI GI: 117557339 Blast Desc: imidazoleglycerol phosphate dehydratase [uncultured eukaryote]
  misc_feature (6)..(123): NCBI GI: 238844434 Blast Desc: imidazoleglycerol phosphate dehydratase [Microsporum canis CBS 113480]
  misc_feature (4)..(118): NCBI GI: 225558173 Blast Desc: imidazoleglycerol-phosphate dehydratase [Ajellomyces capsulatus G186AR]
  misc_feature (1)..(118): NCBI GI: 119196849 Blast Desc: CIMG_02799 [Coccidioides immitis RS]
  misc_feature (1)..(118): NCBI GI: 240110773 Blast Desc: Imidazoleglycerol-phosphate dehydratase, [Coccidioides posadasii C735 delta SOWgp]
  misc_feature (3)..(118): NCBI GI: 121703628 Blast Desc: imidazoleglycerol-phosphate dehydratase [Aspergillus clavatus NRRL 1] gi|119398222|gb|EAW08652.1| imidazoleglycerol-phosphate dehydratase [Aspergillus clavatus 1]
  misc_feature (7)..(118): NCBI GI: 212546371 Blast Desc: imidazoleglycerol-phosphate dehydratase [Penicillium marneffei ATCC 18224] gi|210064859|gb|EEA18954.1| imidazoleglycerol-phosphate dehydratase [Penicillium marneffei
  misc_feature (3)..(118): NCBI GI: 119467740 Blast Desc: imidazoleglycerol-phosphate dehydratase [Neosartorya fischeri NRRL 181] gi|119405828|gb|EAW15779.1| imidazoleglycerol-phosphate dehydratase [Neosartorya fischeri
  misc_feature (7)..(123): NCBI GI: 151175628 Blast Desc: imidazole glycerol phosphate dehydratase [Alternaria citri] gi|151175630|dbj|BAF69039.1| imidazole glycerol phosphate dehydratase [Alternaria alternata] gi|151175632|dbj|BAF69040.1|
  misc_feature (3)..(118): NCBI GI: 70984180 Blast Desc: imidazoleglycerol-phosphate dehydratase [Aspergillus fumigatus Af293] gi|66845235|gb|EAL85570.1| imidazoleglycerol-phosphate dehydratase [Aspergillus fumigatus
  misc_feature (4)..(123): SWISSPROT Homolog: EC 4.2.1.19 Imidazoleglycerol-phosphate dehydratase
  misc_feature: Useful for introducing or modulating the production of volatile compounds
MAPMTIRKVLVERITKETSVQVALSLDGGPLDHLPNEKVQIPSSVPEQTEQHHASQDSASQQVWVWTGIGFLDHMIHALAKHGGWSLRVRTIGDLAIDDHHTAEDTFLGIGEAVSKALRGDKG

SEQ ID NO: 30732 - DNA, 638 bp, Muscodor strobelii
  misc_feature: SGI EST ID NO. CUFF.72866.0
  misc_feature: Variant of the nucleotide sequence at SEQ ID NO 30730
ctgttttgaacgtttacgtcacgccacaatctaagtcaatgaaagtatcatcaatgtctacagttcagcacgtaggcaatcagctcgcaaaagcacatcaaatatcgttaccccgctcggccttggcgatatatgccacaagcttatggtaaggcactgaagaacctgatatacatctagtcaacatttccacatccctttgtccccagctcatctactcaatgctataagacacaaatgtattgaagctgttcgagactcagtttacttatcccacaaatcatggctcccatgactatccgcaaggtcctcgtagagaggattacaaaagaaaccagtgttcaggtcgccttgtcgcttgatggaggacccttggaccatcttccgaacgagaaagttcaaataccaagttcggtgcctgaacaaacagagcaacatcatgctagtcaggactctgcctcgcaacaggtttgggtatggaccggaatagggtttctcgaccacatgatacatgcgcttgccaagcacggtggatggagtctaagagtgcgaacaattggtgatcttgcgattgatgaccatcatacggccgaagacacttttctcggtattggagaggctgtttccaaggcactacg

SEQ ID NO: 30733 - DNA, 4677 bp, Muscodor strobelii
  misc_feature: SGI cDNA ID NO. 570573
  misc_feature: Elevated expression when VOC is produced
  misc_feature: Encodes the peptide sequence at SEQ ID NO 30734
atgatagctaaaagccgactctccgggctatcgcgagtattcagtgggttttctattgcaactaaagatacggaatcaaacatcgacacccatggcgagcatggactcaccttgctatcggatgcttctgaccctattgcggatttcatattcgtgcacggtttgggcggtggctcccgaaaaacatggaggcgaggccaaaatgagaatctgttttggcccaaagaatggctgtcccgtgatcccgagttcaatgacattcgcgttcacactttcgggtacaatgcaaactggaccgaccgccatgagagtatacttgggattggcgacttcgcaaactcattgttagtcgagttgcagaactccacaatgatccgtcgcagtaaagatgcaagtcatgagcagaaactttcgaggacacagtcattcatcctttctcaacatgatcccgtattccaagatattggcaagcgttatcaatcggtattctttcttgcgacacctcatcgtggcgcgagctctgctcagtttttgaataccttgatcaaggctacagcagggggtaacgccccatttttagaagatctccaacaagagtctcccgctatcgaagcaataaatgacgaattcagacactatgcagatcaagtcaatctattctcgtttttcgagaccaaagcaacctctatacttggagtcggcgaaaagtttattgttcgacgaacatccgcagtcatgggctacccccgagagcgcgcttttggtctaaatgcagaccatagaggtatctgcaaattcgagtctccttctgagccaaattatcttacagtaaggaatgccatggttgagactatagatcggatccgtgagatttggaatataaaccacgaatccgacataaaggcttatcggcggaggttaacgactttcctctgctactcggagcatctaaatccattgcatgtcgatttcgatgagcccgtggtagatggttcatgtgagtggctgaccgacacgcttcacttcagacaatggcgagacactgcaaacaccaaaatattctggctcaagggtgctccaggagtcgggaaatcgttcctagcacgacatatagccgaacatctttcatctttgaatcgggcaacaattcagtactatttcacagccagcgataagacacagtcttcacttgctgcttgtcttctctcgttagcatggcaaatggctagtacggatgctggagttcgggactgttttctcgacatggacgagtgtgaaacccaatttgaccccaaaagctttctttccatatggaggtttttatttatgggcggaatcttccgaatcaaaccccacaaacctcatttctgggttatcgatgcacttgacgagtgtgccagccatgaggacatcatacctctcttgtccaagataccgaccgagtttcctcttcaaatctttattacttcccgaccgcttccagaacttcagaatgatctcagaagcctcaaatttaccacaacgatacaggaggtgctacctgagtgtaccgaggatgacataagacggtacatcgttggacatacgagcttttcggatcagcacgctgcggatgacagcaatctcgtctctctccttctggccagatcaaatggcagtttcctgtgggttaagcttgtcttgaaagaactccgcaaacttttgagtgtagaaactatacgcaaggttcttcaggatgttcctgttggaatggaccatctctatagaagaagcctcgaaaccatgtcggaagagacatatgtcaagccactcaccaaggccatcctgatgtgggccgtgtgtagcattcggcccatgaccatcgttgagctacaaatggcccttcagctgcagatgaatgacactattcataatctggagaaccagattccatggctttgtggatatcttgtgtcagtcgactctcagtcgagagtgaagatggtgcacgaaacggcacgcacattcgttctcaactctgaggatactgcttggttgcaatttgatgagaaagacgtccacggagtccttgccatggtgtgtctacggtgtctgaacgacaaagagatgaaatcgcccagatccaggcggccagggtcaattaagaccaccagtcctgtcagcccgttcctcgactatgcagcattatccttctttgagcatattgcaagatgcccggttgagaacgacttactattagatgccatttatgagttttgtagctcgcccaacggaaatatactgagctggataaagtacattgcatcatgtaacgatctcgcacctatagttcgcgcagggagcatcttccagtcatatgccagcaagtacgcccgagatacttacatcaaaactaccaagctggctttgatctgtagttggggcatcgatctcgctcgaattgtggccaaatttggcaggaatctcatccgcagccctgcatcaatatacacagtcatcccccccttttgcccccgaaactctgcacctttcaaacagttcggtcattccgggaggggaatgattgtcaaaggcatgaagtccatgacagactgggatgactgccttgctaccgtggtctatcgcaaacgttctaatcgtgcgatcaccctcgccggatccaaccaacgcttcgctgtcggtactacaaataccacagtaactatatataactcacaaacttgccaggaattcgggacgcttactcacggcgaagccccaagagtcatagcattcgacatttctggccaaatgctggctaccgcaggccggaaattgctgaatgtctgggatacgagctcaaagaagcttcgtttttcgtttcaaatatcttctgcgtgtatttcgttagcctatacttcagacaacgaaatgctgatcgctgcctgtaacgacaatcacatctattactatgaccttgccagacaagagctcgaatcaagtgtcgaatggttcatggacgaagactcgacaaccctaattgggacaccagcaacagcggttatatcagtcgagcaaaaacttttagcctttagttatcgaggcggccatatcggcatttggaattgggacgacgatgaattcatcggtctttgtgaaaagccagatgcgagaaatcaaagatgtccatttcatgccgcctcactgaccttcagccaggcgccaaatgccagcttgctcgccgcaagttacgagcagggcgagatcattgtttttgatccactcagtggtgaactcaagtccagctacaaggcaaagacagatgaccaaacattgtcttcttctcctgatgggaggacacttgttgcgggtgactcttcgggaactatacgtattttcgacttccaaggtctggatggacctagccacaaattgagacttctctatgcgatttacagtcaagaggagaatattagacagttgtcattttgtgatgacaagaattttgttgatatacggggtacgaaagcaaaagtttgggagcctgcagtgctacttcgccaagatttcccaggcggtgaaacagagtccattcaatctgaaccacgagatgcgatagcagaaatacccgagattgatacgatcacatcactggccttagaacagagcggcaagtatgccttctgtgggacggaatcaggcctcataaccgtgtttgatacttcaactggagatcgccttgaaaatctttataagcatgctactgatgactcagtcgttgcgcttcagttcgggaaccagtccagtattcttgctagtgcaggctcctcgagcagaataatcatgaaacgtatcagcttcaatggccgtaaggttgttgcccatgaaagtatttatgaatatcatatgggggaaattatcgaaaatttgttgttcaataaagacgagacaaagattctcttagcatcgacaaccaaggatgtcattttctcaatggctaataattcgacggatatcgcaacatggaaaacaagagatccgggagtctggtgcaataatccacatgacccgggccagctttttctaatcgttggcaacactttaagagcattttcgtgggatggtcttcaagaaataacatccggtgcagctatccacttagacatggacattcctacccacttcggtatcaatagcctgtattcaggttggaacggttccacttttgcgaccctgtactctgaactcagccatgctcggtccaacatccgtctcgagttttgggacgcagcgggtttcaacgctacggatcaacggattgaaggtgaagattctgccaatatatcaccccaaattggatttcgagtggttagcgatgctattgctattcttatcggcacaatgggtatgataattggcatgcataatagaaagatcttcttcctggatcacgagggttggatttgttcgattgctgcggtcatcaccgcagctacaaacacgtatgatcgtcacttcttcctacctacagactggttaagcacggatgacacgttgatgttcaagcttaccagtaaaaatgagatcatcttggcgaaaggcgaagagttggccatcatacggaaaggtttcggcatgcctcaaagtattgtgcttcccgcaacgatctccaagcaatcttcctttactaatggctga

SEQ ID NO: 30734 - protein, 1558 aa, Muscodor strobelii
  misc_feature: SGI Peptide ID NO. 570573
  misc_feature (23)..(1537): NCBI GI: 255937083 Blast Desc: Pc13g11510 [Penicillium chrysogenum Wisconsin 54-1255] gi|211584188|emb|CAP92220.1| Pc13g11510 [Penicillium chrysogenum Wisconsin 54-1255]
  misc_feature (32)..(1543): NCBI GI: 256733681 Blast Desc: NECHADRAFT_36093 [Nectria haematococca mpVI 77-13-4]
  misc_feature (11)..(1545): NCBI GI: 159127877 Blast Desc: AFUB_041630 [Aspergillus fumigatus A1163]
  misc_feature (11)..(1545): NCBI GI: 146323333 Blast Desc: NACHT and WD domain protein [Aspergillus fumigatus Af293] gi|129558342|gb|EAL92825.2| NACHT and WD domain protein [Aspergillus fumigatus Af293]
  misc_feature (9)..(1537): NCBI GI: 46135873 Blast Desc: FG09452.1 [Gibberella zeae PH-1]
  misc_feature (15)..(1368): NCBI GI: 171679241 Blast Desc: protein product [Podospora anserina] gi|170939246|emb|CAP64474.1| protein product [Podospora anserina]
  misc_feature (24)..(1537): NCBI GI: 145231130 Blast Desc: An01g14390 [Aspergillus niger] gi|134055958|emb|CAK37434.1| protein product [Aspergillus niger]
  misc_feature (43)..(1537): NCBI GI: 261358157 Blast Desc: SERAC1 [Verticillium albo-atrum VaMs.102]
  misc_feature (142)..(1516): NCBI GI: 154320544 Blast Desc: BC1G_01744 [Botryotinia fuckeliana B05.10] gi|150853433|gb|EDN28625.1| BC1G_01744 [Botryotinia fuckeliana B05.10]
  misc_feature (35)..(1539): NCBI GI: 258563436 Blast Desc: [Uncinocarpus reesii 1704] gi|237907970|gb|EEP82371.1| [Uncinocarpus reesii 1704]
  misc_feature: Useful for introducing or modulating the production of volatile compounds
MIAKSRLSGLSRVFSGFSIATKDTESNIDTHGEHGLTLLSDASDPIADFIFVHGLGGGSRKTWRRGQNENLFWPKEWLSRDPEFNDIRVHTFGYNANWTDRHESILGIGDFANSLLVELQNSTMIRRSKDASHEQKLSRTQSFILSQHDPVFQDIGKRYQSVFFLATPHRGASSAQFLNTLIKATAGGNAPFLEDLQQESPAIEAINDEFRHYADQVNLFSFFETKATSILGVGEKFIVRRTSAVMGYPRERAFGLNADHRGICKFESPSEPNYLTVRNAMVETIDRIREIWNINHESDIKAYRRRLTTFLCYSEHLNPLHVDFDEPVVDGSCEWLTDTLHFRQWRDTANTKIFWLKGAPGVGKSFLARHIAEHLSSLNRATIQYYFTASDKTQSSLAACLLSLAWQMASTDAGVRDCFLDMDECETQFDPKSFLSIWRFLFMGGIFRIKPHKPHFWVIDALDECASHEDIIPLLSKIPTEFPLQIFITSRPLPELQNDLRSLKFTTTIQEVLPECTEDDIRRYIVGHTSFSDQHAADDSNLVSLLLARSNGSFLWVKLVLKELRKLLSVETIRKVLQDVPVGMDHLYRRSLETMSEETYVKPLTKAILMWAVCSIRPMTIVELQMALQLQMNDTIHNLENQIPWLCGYLVSVDSQSRVKMVHETARTFVLNSEDTAWLQFDEKDVHGVLAMVCLRCLNDKEMKSPRSRRPGSIKTTSPVSPFLDYAALSFFEHIARCPVENDLLLDAIYEFCSSPNGNILSWIKYIASCNDLAPIVRAGSIFQSYASKYARDTYIKTTKLALICSWGIDLARIVAKFGRNLIRSPASIYTVIPPFCPRNSAPFKQFGHSGRGMIVKGMKSMTDWDDCLATVVYRKRSNRAITLAGSNQRFAVGTTNTTVTIYNSQTCQEFGTLTHGEAPRVIAFDISGQMLATAGRKLLNVWDTSSKKLRFSFQISSACISLAYTSDNEMLIAACNDNHIYYYDLARQELESSVEWFMDEDSTTLIGTPATAVISVEQKLLAFSYRGGHIGIWNWDDDEFIGLCEKPDARNQRCPFHAASLTFSQAPNASLLAASYEQGEIIVFDPLSGELKSSYKAKTDDQTLSSSPDGRTLVAGDSSGTIRIFDFQGLDGPSHKLRLLYAIYSQEENIRQLSFCDDKNFVDIRGTKAKVWEPAVLLRQDFPGGETESIQSEPRDAIAEIPEIDTITSLALEQSGKYAFCGTESGLITVFDTSTGDRLENLYKHATDDSVVALQFGNQSSILASAGSSSRIIMKRISFNGRKVVAHESIYEYHMGEIIENLLFNKDETKILLASTTKDVIFSMANNSTDIATWKTRDPGVWCNNPHDPGQLFLIVGNTLRAFSWDGLQEITSGAAIHLDMDIPTHFGINSLYSGWNGSTFATLYSELSHARSNIRLEFWDAAGFNATDQRIEGEDSANISPQIGFRVVSDAIAILIGTMGMIIGMHNRKIFFLDHEGWICSIAAVITAATNTYDRHFFLPTDWLSTDDTLMFKLTSKNEIILAKGEELAIIRKGFGMPQSIVLPATISKQSSFTNG

SEQ ID NO: 30735 - DNA, 5018 bp, Muscodor strobelii
  misc_feature: SGI EST ID NO. CUFF.72843.0
  misc_feature: Variant of the nucleotide sequence at SEQ ID NO 30733
catgatcccgtattccaagatattggcaagcgttatcaatcggtattctttcttgcgacacctcatcgtggcgcgagctctgctcagtttttgaataccttgatcaaggctacagcagggggtaacgccccatttttagaagatctccaacaagagtctcccgctatcgaagcaataaatgacgaattcagacactatgcagatcaagtcaatctattctcgtttttcgagaccaaagcaacctctatacttggagtcggcgaaaagtttattgttcgacgaacatccgcagtcatgggctacccccgagagcgcgcttttggtctaaatgcagaccatagaggtatctgcaaattcgagtctccttctgagccaaattatcttacagtaaggaatgccatggttgagactatagatcggatccgtgagatttggaatataaaccacgaatccgacataaaggcttatcggcggaggttaacgactttcctctgctactcggagcatctaaatccattgcatgtcgatttcgatgagcccgtggtagatggttcatgtgagtggctgaccgacacgcttcacttcagacaatggcgagacactgcaaacaccaaaatattctggctcaagggtgctccaggagtcgggaaatcgttcctagcacgacatatagccgaacatctttcatctttgaatcgggcaacaattcagtactatttcacagccagcgataagacacagtcttcacttgctgcttgtcttctctcgttagcatggcaaatggctagtacggatgctggagttcgggactgttttctcgacatggacgagtgtgaaacccaatttgaccccaaaagctttctttccatatggaggtttttatttatgggcggaatcttccgaatcaaaccccacaaacctcatttctgggttatcgatgcacttgacgagtgtgccagccatgaggacatcatacctctcttgtccaagataccgaccgagtttcctcttcaaatctttattacttcccgaccgcttccagaacttcagaatgatctcagaagcctcaaatttaccacaacgatacaggaggtgctacctgagtgtaccgaggatgacataagacggtacatcgttggacatacgagcttttcggatcagcacgctgcggatgacagcaatctcgtctctctccttctggccagatcaaatggcagtttcctgtgggttaagcttgtcttgaaagaactccgcaaacttttgagtgtagaaactatacgcaaggttcttcaggatgttcctgttggaatggaccatctctatagaagaagcctcgaaaccatgtcggaagagacatatgtcaagccactcaccaaggccatcctgatgtgggccgtgtgtagcattcggcccatgaccatcgttgagctacaaatggcccttcagctgcagatgaatgacactattcataatctggagaaccagattccatggctttgtggatatcttgtgtcagtcgactctcagtcgagagtgaagatggtgcacgaaacggcacgcacattcgttctcaactctgaggatactgcttggttgcaatttgatgagaaagacgtccacggagtccttgccatggtgtgtctacggtgtctgaacgacaaagagatgaaatcgcccagatccaggcggccagggtcaattaagaccaccagtcctgtcagcccgttcctcgactatgcagcattatccttctttgagcatattgcaagatgcccggttgagaacgacttactattagatgccatttatgagttttgtagctcgcccaacggaaatatactgagctggataaagtacattgcatcatgtaacgatctcgcacctatagttcgcgcagggagcatcttccagtcatatgccagcaagtacgcccgagatacttacatcaaaactaccaagctggctttgatctgtagttggggcatcgatctcgctcgaattgtggccaaatttggcaggaatctcatccgcagccctgcatcaatatacacagtcatcccccccttttgcccccgaaactctgcacctttcaaacagttcggtcattccgggaggggaatgattgtcaaaggcatgaagtccatgacagactgggatgactgccttgctaccgtggtctatcgcaaacgttctaatcgtgcgatcaccctcgccggatccaaccaacgcttcgctgtcggtactacaaataccacagtaactatatataactcacaaacttgccaggaattcgggacgcttactcacggcgaagccccaagagtcatagcattcgacatttctggccaaatgctggctaccgcaggccggaaattgctgaatgtctgggatacgagctcaaagaagcttcgtttttcgtttcaaatatcttctgcgtgtatttcgttagcctatacttcagacaacgaaatgctgatcgctgcctgtaacgacaatcacatctattactatgaccttgccagacaagagctcgaatcaagtgtcgaatggttcatggacgaagactcgacaaccctaattgggacaccagcaacagcggttatatcagtcgagcaaaaacttttagcctttagttatcgaggcggccatatcggcatttggaattgggacgacgatgaattcatcggtctttgtgaaaagccagatgcgagaaatcaaagatgtccatttcatgccgcctcactgaccttcagccaggcgccaaatgccagcttgctcgccgcaagttacgagcagggcgagatcattgtttttgatccactcagtggtgaactcaagtccagctacaaggcaaagacagatgaccaaacattgtcttcttctcctgatgggaggacacttgttgcgggtgactcttcgggaactatacgtattttcgacttccaaggtctggatggacctagccacaaattgagacttctctatgcgatttacagtcaagaggagaatattagacagttgtcattttgtgatgacaagaattttgttgatatacggggtacgaaagcaaaagtttgggagcctgcagtgctacttcgccaagatttcccaggcggtgaaacagagtccattcaatctgaaccacgagatgcgatagcagaaatacccgagattgatacgatcacatcactggccttagaacagagcggcaagtatgccttctgtgggacggaatcaggcctcataaccgtgtttgatacttcaactggagatcgccttgaaaatctttataagcatgctactgatgactcagtcgttgcgcttcagttcgggaaccagtccagtattcttgctagtgcaggctcctcgagcagaataatcatgaaacgtatcagcttcaatggccgtaaggttgttgcccatgaaagtatttatgaatatcatatgggggaaattatcgaaaatttgttgttcaataaagacgagacaaagattctcttagcatcgacaaccaaggatgtcattttctcaatggctaataattcgacggatatcgcaacatggaaaacaagagatccgggagtctggtgcaataatccacatgacccgggccagctttttctaatcgttggcaacactttaagagcattttcgtgggatggtcttcaagaaataacatccggtgcagctatccacttagacatggacattcctacccacttcggtatcaatagcctgtattcaggttggaacggttccacttttgcgaccctgtactctgaactcagccatgctcggtccaacatccgtctcgagttttgggacgcagcgggtttcaacgctacggatcaacggattgaaggtgaagattctgccaatatatcaccccaaattggatttcgagtggttagcgatgctattgctattcttatcggcacaatgggtatgataattggcatgcataatagaaagatcttcttcctggatcacgagggttggatttgttcgattgctgcggtcatcaccgcagctacaaacacgtatgatcgtcacttcttcctacctacagactggttaagcacggatgacacgttgatgttcaagcttaccagtaaaaatgagatcatcttggcgaaaggcgaagagttggccatcatacggaaaggtttcggcatgcctcaaagtattgtgcttcccgcaacgatctccaagcaatcttcctttactaatggctgagcttcgagaaacaaacagctgacatgtacgacattttctcggaatgactgtgcaggaatagcatatgatagactaatcgcagaggacagtttggctctcccagatgcttcaagcgctatcgttgtcaatttcatgaactttgcttgtttctaattcgaaataatgtttgcagtttggagttggtggtttctttaggtcctctgcactttcgcattactccgacacagttgcatgacattacaccgcagattcaataaggtcatttactagaggactcagaggaaaatccatgcttacatccctagtatcattttatacccactggagggcgcattgtggtaacttttcatatatcatgttctgactctaccagcaaacagcacggagatttatttgcttcaagacccatcataggatctgcatatttgtctaccttattcatattgagctattatcaaacgtatatagcttctgcagcacatcaggagtatctcacataacatagatagatcaaagatgagaatctagggatgagatgagaatattcaatcgagaagtggatcagtcaatatctgcgttttttggatcattcctcatggccgtagccatcaaaatcatgagatgttctataaaaatggcaactttagattggctgtagatgtagctagctttgggaggtatctagaatgcccgacttataaatatcatggcctatggtagtattaagagaatgtatacagtatactccgacgctgaggtccagataaggtgtaatctgcgag

SEQ ID NO: 30736 - DNA, 1641 bp, Muscodor strobelii
  misc_feature: SGI cDNA ID NO. 570574
  misc_feature: Reduced expression when VOC is produced
  misc_feature: Encodes the peptide sequence at SEQ ID NO 30737
atggagtcttctttcgtggttgtcgtagctatagcagctgccatcggcgtcgtctctcatattagctattttgtacgtggtgaacataccctcgccgcacccaagttattcgccgtcgccactcttggacctccatgcctgactgcagtcctttggcacttttcgaacctgtcattctccgttgctgtcactatcatctaccttggctatatggcctacatggtcggcctctttacttcaataggactttatagaatattctttcaccctctaagacattttcccggacctaggctagcgagtatcagccaattctaccacttcttcaagatccagaggaggctcgacaacttcagacacattgactttctacatgagaagtacggggaatatgttcgagtcgggccaaatctgatttcaattgccgatcctgatctaatagaacccattttccaccccaagagcaactttacaaaggccgactggtatgatattggatacccagttaccaaccttgtgcaaatacgcgacagatcagagcacgataggcgaaggcgacatggctgggatgcggctttcacgaccagagcattacgttcgtacgattctcgtatcctacactatgcagatcaacttgttgtccagatacaacagaggctcggacaatctgtgaatgtcacgaaatggatggaatggttcgctttcgacgtcttaggtgacttggctcttgggcggtctttcggagctttgaaagatgccagatcacacagcttaattgacacgatgcatgagacaagtgctttacctctgggcgctttaggatccctaccttgggtcattcagataatgggatcgcttatccccgcaaggttcaatcgctttatggatttagtcagatatagtgaacggtgtattacggaacgaaaagcgaccaagccgagcgaacctgatatcttaactccgatattagcagctggaccattttacgcggacccccaaaaagatgcgttacttctagttggagatgcgagacttctgatcattgcaggaagcgatacgacgtctgcaacgttgacatttgccctttacaatcttgcgagagatccgagaattgtgcaggcgctaagagaggagcttgagcaagacggcatatacaatcatgaatcgctctctgtggtgcaattgcagaatctgagctatatgaatgctttcatcaacgagactctgagaatgcaccctacaaatccaggcggggtttttcgttgtacaccacctgagggtgccatgataggaggacatttgttccccagcggggtaaaaattgttaatccgcacttcacaattcaccgctccccgaaagctttcatagctccaaacgagttcattccagagcgatggaccactagatcaaatcttatccttaacaagaacgcctggctaccattctcccggggtcattactcttgtcttggccgaaatttagccttgaatgagataagagtcgtcatctcgaagatgatactcgagtttgatatcggctttgcccccggtgagactggccagacgctgatggaggactcaagagacatattcactatggcattggccaaactggacctctgctttacgaggcggagctga

SEQ ID NO: 30737 - protein, 546 aa, Muscodor strobelii
  misc_feature: SGI Peptide ID NO. 570574
  misc_feature (95)..(542): Pfam Id: PF00067 Pfam Desc: Cytochrome P450
  misc_feature (346)..(542): Pfam Id: PF00067 Pfam Desc: Cytochrome P450
  misc_feature (191)..(311): Pfam Id: PF00067 Pfam Desc: Cytochrome P450
  misc_feature (13)..(546): NCBI GI: 156051546 Blast Desc: SS1G_07180 [Sclerotinia sclerotiorum 1980] gi|154704958|gb|EDO04697.1| SS1G_07180 [Sclerotinia sclerotiorum 1980]
  misc_feature (10)..(546): NCBI GI: 261354521 Blast Desc: benzoate 4-monooxygenase cytochrome P450 [Verticillium albo-atrum VaMs.102]
  misc_feature (1)..(542): NCBI GI: 119189629 Blast Desc: conserved [Coccidioides immitis RS]
  misc_feature (12)..(546): NCBI GI: 145258880 Blast Desc: An04g08440 [Aspergillus niger] gi|134074816|emb|CAK38931.1| protein product [Aspergillus niger]
  misc_feature (1)..(542): NCBI GI: 116203111 Blast Desc: CHGG_09440 [Chaetomium globosum CBS 148.51] gi|88177958|gb|EAQ85426.1| CHGG_09440 [Chaetomium globosum CBS 148.51]
  misc_feature (11)..(545): NCBI GI: 238502809 Blast Desc: cytochrome P450 oxidoreductase, [Aspergillus flavus NRRL3357] gi|220691448|gb|EED47796.1| cytochrome P450 oxidoreductase, [Aspergillus flavus NRRL3357]
  misc_feature (1)..(542): NCBI GI: 240111169 Blast Desc: Cytochrome P450 family protein [Coccidioides posadasii C735 delta SOWgp]
  misc_feature (10)..(544): NCBI GI: 67541805 Blast Desc: AN7066.2 [Aspergillus nidulans FGSC A4] gi|40742005|gb|EAA61195.1| AN7066.2 [Aspergillus nidulans FGSC A4] gi|259483617|tpe|CBF79154.1| TPA: cytochrome P450, (Eurofung)
  misc_feature (7)..(546): NCBI GI: 67516649 Blast Desc: AN0606.2 [Aspergillus nidulans FGSC A4] gi|40747549|gb|EAA66705.1| AN0606.2 [Aspergillus nidulans FGSC A4] gi|259489127|tpe|CBF89142.1| TPA: (Eurofung) [Aspergillus A4]
  misc_feature (7)..(546): NCBI GI: 171691038 Blast Desc: protein product [Podospora anserina] gi|170945467|emb|CAP71579.1| protein product [Podospora anserina]
  misc_feature (91)..(546): SWISSPROT Homolog: EC 1.14.13.12 Benzoate 4-monooxygenase
  misc_feature: Useful for introducing or modulating the production of volatile compounds
MESSFVVVVAIAAAIGVVSHISYFVRGEHTLAAPKLFAVATLGPPCLTAVLWHFSNLSFSVAVTIIYLGYMAYMVGLFTSIGLYRIFFHPLRHFPGPRLASISQFYHFFKIQRRLDNFRHIDFLHEKYGEYVRVGPNLISIADPDLIEPIFHPKSNFTKADWYDIGYPVTNLVQIRDRSEHDRRRRHGWDAAFTTRALRSYDSRILHYADQLVVQIQQRLGQSVNVTKWMEWFAFDVLGDLALGRSFGALKDARSHSLIDTMHETSALPLGALGSLPWVIQIMGSLIPARFNRFMDLVRYSERCITERKATKPSEPDILTPILAAGPFYADPQKDALLLVGDARLLIIAGSDTTSATLTFALYNLARDPRIVQALREELEQDGIYNHESLSVVQLQNLSYMNAFINETLRMHPTNPGGVFRCTPPEGAMIGGHLFPSGVKIVNPHFTIHRSPKAFIAPNEFIPERWTTRSNLILNKNAWLPFSRGHYSCLGRNLALNEIRVVISKMILEFDIGFAPGETGQTLMEDSRDIFTMALAKLDLCFTRRS

SEQ ID NO: 30738 - DNA, 2407 bp, Muscodor strobelii
  misc_feature: SGI EST ID NO. CUFF.72847.0
  misc_feature: Variant of the nucleotide sequence at SEQ ID NO 30736
taagaatcaagtaaggacgccgtgtgcactgcacttccgataggtgaattcatcatgcgatgtccgatctgattcaggtttcggagaccataagatgcagcatcgttgccacagtagtctcggccacttagcagcctgcatacctcttgggctcggccgcatgtcaatcggcgaagggtagtattcgggccatatagcgtgaatcgccatgtcatggtgagtctaacgttggattggccgtactcgacatgctctagtgggcttcgttctctgcatcatgactttacttgtatattatcatgtcccttttcccttttgcgaacaacttgaatttggtgtgatgcctggctcttggcccccaatatggagtcttctttcgtggttgtcgtagctatagcagctgccatcggcgtcgtctctcatattagctattttgtacgtggtgaacataccctcgccgcacccaagttattcgccgtcgccactcttggacctccatgcctgactgcagtcctttggcacttttcgaacctgtcattctccgttgctgtcactatcatctaccttggctatatggcctacatggtcggcctctttacttcaataggactttatagaatattctttcaccctctaagacattttccgtaagtaaaagatacgatacatacaacgggatcagtctgcttcgcgtgcctttagggcagagtttctcagaatgagtacatttacaaaatgaacacagatcgttaactttcttctaccaaacatagcggacctaggctagcgagtatcagccaattctaccacttcttcaagatccagaggaggctcgacaacttcagacacattgactttctacatgagaagtacggggaatatgttcgagtcgggccaaatctgatttcaattgccgatcctgatctaatagaacccattttccaccccaagagcaactttacaaaggccgactggtatgatattggatacccagttaccaaccttgtgcaaatacgcgacagatcagagcacgataggcgaaggcgacatggctgggatgcggctttcacgaccagagcattacgttcgtacgattctcgtatcctacactatgcagatcaacttgttgtccagatacaacagaggctcggacaatctgtgaatgtcacgaaatggatggaatggttcgctttcgacgtcttaggtgacttggctcttgggcggtctttcggagctttgaaagatgccagatcacacagcttaattgacacgatgcatgagacaagtgctttacctctgggcgctttaggatccctaccttgggtcattcagataatgggatcgcttatccccgcaaggttcaatcgctttatggatttagtcagatatagtgaacggtgtattacggaacgaaaagcgaccaagccgagcgaacctgatatcttaactccgatattagcagctggaccattttacgcggacccccaaaaagatgcgttacttctagttggagatgcgagacttctgatcattgcaggaagcgatacgacgtctgcaacgttgacatttgccctttacaatcttgcgagagatccgagaattgtgcaggcgctaagagaggagcttgagcaagacggcatatacaatcatgaatcgctctctgtggtgcaattgcagaatctgagctatatgaatgctttcatcaacgagactctgagaatgcaccctacaaatccaggcggggtttttcgttgtacaccacctgagggtgccatgataggaggacatttgttccccagcggggtaaaaattgttaatccgcacttcacaattcaccgctccccgaaagctttcatagctccaaacgagttcattccagagcgatggaccactagatcaaatcttatccttaacaagaacgcctggctaccattctcccggggtcattactcttgtcttggccgaaatttagccttgaatgagataagagtcgtcatctcgaagatgatactcgagtttgatatcggctttgcccccggtgagactggccagacgctgatggaggactcaagagacatattcactatggcattggccaaactggacctctgctttacgaggcggagctgagcatgagcttgttttgcgagtttaggtttgggcgtatataataccctattagtgtgtatgtcattattgaatgggatattcggtttgttttcgactactggaaaatgcagtgtgctttctttcctccgggtggcgattgattgtgtcatgcattgaaaacttcgattgccttaggcataccgattccagtctgatacttgaatcaagctaccgcggctcactcagaatcttgggtagctactatacgtagatcagtgtctgctattcttaatttgtg

SEQ ID NO: 30739 - DNA, 855 bp, Muscodor strobelii
  misc_feature: SGI cDNA ID NO. 570575
  misc_feature: Encodes the peptide sequence at SEQ ID NO 30740
atggaggaacccgtgaccaagaagcagaagaggacaaagtcgaccaagcgctcagactatcgcgaatctctcaaggacaaggtcgccgagctgcccaagaagagattctttcgccagagggcccacgccaatgtcttctcagatcacaatctagaatatcctaagagcccagatcacatggactggtctaccttcttccccgactatgccgtcgacaaggatgtcgccatggcggtggaggatggccagaccagcgaggcgctcccggccagactgagcaaagaggtcgaggtcgtcgacatcggatgcggcttcgggggcctgctgatcgagctggcgcccgccctgccggacagcctgatcctgggcatggagatccgcacgtcggtgaccgagtacgtgcagcaccggatcactgcgctgcgagcacgcaactcggaggccaagctgtacggcaacatcggctgcctgcgggccaattcgatgaagttcatgcccaacttcttccgcaagggccagctgtccaaggccttcatctgcttcccggacccgcacttcaaacagcgaaagcacaaggcccgcattgtctcgatgactctcaactccgagtacgcctacgtgttgaggccaggtggcatcgtatacaccatcaccgacgtcgaggacctccacaattggatggttcggcacctggaggcgcacccctcgttcgagagggtcttgaaggaggagcaggaggcagacccttgtgtggccatcatgaagaacgcgacggaggagagccagaaggtgacgcggaatcagggacagaagtttgtggctctcttccgacgcctagaagatccgccttggtga

SEQ ID NO: 30740 - protein, 284 aa, Muscodor strobelii
  misc_feature: SGI Peptide ID NO. 570575
  misc_feature (56)..(279): Pfam Id: PF02390 Pfam Desc: methyltransferase
  misc_feature (11)..(284): NCBI GI: 74627673 Blast Desc: TRMB_GLOLA RecName: Full=tRNA (guanine-N(7)-)-methyltransferase; AltName: Full=tRNA(m7G46)-methyltransferase; AltName: Full=Transfer RNA 8;
  misc_feature (1)..(284): NCBI GI: 85085805 Blast Desc: tRNA methyltransferase [Neurospora crassa OR74A] gi|74628467|sp|Q7RZC1.1|TRMB_NEUCR RecName: Full=tRNA (guanine-N(7)-)-methyltransferase; AltName: AltName: RNA 8 - tRNA
  misc_feature (10)..(282): NCBI GI: 171682120 Blast Desc: protein product [Podospora anserina] gi|229891704|sp|B2AR91.1|TRMB_PODAN RecName: Full=tRNA (guanine-N(7)-)-methyltransferase; AltName: AltName: RNA 8
  misc_feature (1)..(284): NCBI GI: 40882342 Blast Desc: t-RNA methyltransferase [Neurospora crassa]
  misc_feature (8)..(284): NCBI GI: 116202567 Blast Desc: CHGG_09168 [Chaetomium globosum CBS 148.51] gi|121778452|sp|Q2GS86.1|TRMB_CHAGB RecName: Full=tRNA (guanine-N(7)-)-methyltransferase; AltName: AltName: RNA 8 CBS
  misc_feature (1)..(284): NCBI GI: 154304005 Blast Desc: BC1G_09638 [Botryotinia fuckeliana B05.10] gi|229891694|sp|A6S8E7.1|TRMB_BOTFB RecName: Full=tRNA (guanine-N(7)-)-methyltransferase; AltName: AltName: RNA 8
  misc_feature (25)..(269): NCBI GI: 256727145 Blast Desc: [Nectria haematococca mpVI 77-13-4]
  misc_feature (1)..(267): NCBI GI: 46134287 Blast Desc: FG09283.1 [Gibberella zeae PH-1]
  misc_feature (11)..(284): NCBI GI: 261359666 Blast Desc: tRNA (guanine-N(7)-)-methyltransferase [Verticillium albo-atrum VaMs.102]
  misc_feature (1)..(284): NCBI GI: 156030659 Blast Desc: SS1G_14425 [Sclerotinia sclerotiorum 1980] gi|154700816|gb|EDO00555.1| SS1G_14425 [Sclerotinia sclerotiorum 1980]
  misc_feature (19)..(284): SWISSPROT Homolog: EC 2.1.1.33 tRNA (guanine-N(7)-)-methyltransferase
MEEPVTKKQKRTKSTKRSDYRESLKDKVAELPKKRFFRQRAHANVFSDHNLEYPKSPDHMDWSTFFPDYAVDKDVAMAVEDGQTSEALPARLSKEVEVVDIGCGFGGLLIELAPALPDSLILGMEIRTSVTEYVQHRITALRARNSEAKLYGNIGCLRANSMKFMPNFFRKGQLSKAFICFPDPHFKQRKHKARIVSMTLNSEYAYVLRPGGIVYTITDVEDLHNWMVRHLEAHPSFERVLKEEQEADPCVAIMKNATEESQKVTRNQGQKFVALFRRLEDPPW

SEQ ID NO: 30741 - DNA, 7207 bp, Muscodor strobelii
  misc_feature: SGI EST ID NO. CUFF.72876.2
  misc_feature: Variant of the nucleotide sequence at SEQ ID NO 30739
tgttggaatagttcaaggcgtatcttaaaagtcctatttcatgcaggctactggccgaatcacccgtacggagctatccgccaaacgaagtggcgatcgcagatgtgtcatcaggatcgaatgtctcggcgccattcgaaacttgtgcgagaaccatgggagaggtcttctataatgcagagctcgatcatagccttgctcgagcgtcagtgcgatgctacgttgcctgtcgacatacttgaccgaagaggagtaaacaacaaggatgggtagagcccgcttacagtaaaactcaccggtcaacggccgagatgatattgcgtatgttcatatcttgtcatttgcctcacgactatgacttagcctatgttcttggctgcgatattgactttatgtgcctgtcctataagaatatctatctcgtgtaatcccagcgcctgtacgagttatcaaattacatcgcagacatcacagacttatccggacctggcggcatgcctaggatctcgagctaataagagatcataatggtcttgactactcggttgagcatcacaccgacttgcgcaagaggcgatcttccgggttcccctttccagttgcctccgtcgatgtgccggctctgccatgtctacgatgccatgctcaacttgagatcgttcgtgaagcggtcaaaataaagacaatgaacaaaagctcggccacgaaatcggccgcgtctttcaaagtaccacggggaagtaacgcataaagcccgtgagcatggctacatctcctcctgacgcaattttagcacacgctagttgcgtcacagctgcgacaggatggcacaggacaaggacagtgagcattacgctcgcggtaccgagatattttgctcgctgttctactcatatactagattaataataactagtcgacgcgtgtctagcaatgcagtatctgagcgctgaaggcgacaacagcagactcatgcaagtatcatttgctaacttgcatgcgtctagagacctgacggcgcgccaccggacgaaagcaggtcactagagcaagcaagtagagaatgagttgctgcccttacggccgtcgtgcgttcggacaacttatagcagctcgacaacgagctggctagctcacttggctagaaaccgtcgccggtgggaagctcaccaaggctatgatccatcttggagaaaactcggcgtgtttcgttggctgtcctggtcaagtcagcacattactcatgcccacttcggtggcagcccgtgcccaactctcttacctggaaatgggcagtgcgacggcggtgccatgggcagaccagggacgggacgtttcccgtgtggccattcacgatgatctgggttagcccgtacccaatctacgttcacggtgcgcataccttgcggcgcacccgtccctaccattagctggctacccaactacgtctcagcccttgccgtcagttgcagaacatgctgatgttgggtctggtcttggaactggcacgcacgttggctagtacctctatgtcgtctgacacacttcctgaagcgtcccggtttaccgacattcgcatgaatctcaaccgaacgcgagggcagcctgacccgtgcagccgggtgagccgtccagaggatttgagcatatgccacgagtagggctggggcttgtcctgttttagacacgaataagtttggttcatacggcaagttattcggcaaatctacttcgctcaggcgatgtaatcacttaacacagcacacatattacactctcctcccactccggagaattgtttccctgaaagagaagataaaaaaacagatcatgacccatgttggtttcggcgagcgacgttcaaaccaaaagcctcgcgaaaagcaaaaagtggtagcaaccccagaaaccgactctttcctttttgagagcagatttctgcccaagaatcccttataatgctgagacttgaattcacatcattgtaacgtggtaacaatagccaatatcagtacgtacaagagaaagaaagaatcgtttcattcattatctgtatgccatctacttcatgatttaattttcttgttgcgaaggaaacgcaaagcaacaaaacatcaccgatgcctacgcccgaacccatgccatcccttgtcatgcctataaaccaacagaaacaaaaagacccatacaactccctctgcaatttcaaatttgagttgtctcgtgttccatcctcgaatgcgacagtgtgacacaatcaaacaggacattttggaataaatccagagtcagggggccattaccgtctcaacatcaccagttgccatgcagagactccaagtcaacgcaaaacaaacaacaaaaagcaaaagaatctacacgatcagatgaagaccaaaccagattggtcttcaactgatctcaccattccaaatttcaacacgaagaagtcgtgctttcataaccagccagtcagctagttgctttagcaaccccgtcttctagatagtttcttgacagggttatcctcatatcatcgtcacccactcgccaagggggtaaaaagagcttcccgctatgagagccagttttcgctctgcttggcaggctttgggctctcatgtccaaaatcaagtttcggcatttcgatcttgggtgcgggctcctcaggtttctgctttccaccgccctgtttcttcacagggcttttgggggctggaggcccgtaccgtacgtctcgtacgtcccatccatcctcagcggctgccgcgacccaagttcgtaggccgtcgtggatgcccgcatagaatttctccttgcaggtccgtaggctgaaacccatggtgtgctcccagcccgatatacgcaacaggtcacggagcgcatttcgttcttcagccgtgggcgtgcaggccagtatcgcattcaccaagtcgagatgtgaggtgagataattggtggcatcccattccacaccgccgacatagggggctgctgggaccgggacccgctcctgtgggaagtgcgtctgcatgtacgccgcactatcgataccggaggcatcgcctatgtgacgtttcttctccggggccaaatagacgacgttgacgtggtgcaggtatatccaaaacacttccttggtcacactgacgaactccttacaccatacccggtagggtcgctcacggcgcatttcgaggacgaaggctgggggccgatcctcttccttcggctcggtgtctcggagatgcccgagcaccgtcttggcccggatgggccgatcttgagggggcgccgattggatgtaggtaaacagtaccgaagtgatgatcatgcgcgtagtaaagtcgctagggcctttcttctccgggtcgaagagcatatccagaagggctcggaataaagtagcttggactgagtgcaagtactggattccacaggcggtggtacagagagctttgaggcaaagaagcgcttcatgcaagagcgcgtcttcgtgctcctctctattgcggtgttagtcatcaaagtctcgctaacagtaaatacatgttttgaagaacctacctccactccacctccatgatacgatggaggagcccgacaatctcttgcatacctccctggcgaatgaaatcctcggaccaggccaccgtctcgttccgcaaaagaagacgcaatttgtgcaatttgcccacttcgacattctcaggtcgctgcactttgcgaagataagtcacgtagtccatgggattctggtgcagtttcatcttggacaatatgccattccccgaactcgagcccgccgactcgggccgctcactagccacgctctcggtggatcgagttctgaaatgccgtcccagtgttccctcacccttggatttcttcatgggcgatgtcgactctgacttcttgcccctgttccgagtcagggtgaagctgcgtcccctcaactgcttctcgtttgttttagtcccctggcgctcattcatgctggagtcgctgtcgtggctcccgggtctcgaggcgttggcgccacggctctcagcccagtcctgtcggatgaactccatcttgatagtgtcggctagatttctcatcttgtatctctggttctctgggatgtttcgtcgatccaacatggcctcgaggtgcttcgcgacatccttggggtcgagggcgaactcggaagattccttggatggcgatttgcttcctgatccactcgcattgctaaaattagtgaagatgttgagctttcctcgcatcttggtcggtgagcccttcttatcgtcccgaccactgcctacggtctttgaattcgtatcctcgcgtgacgtcgtgtaagttgcatgatatgactttggccgctctttcgtcttgcgggtactcgaagaaacatctgcggtgatactggtagtaatcgcatgggtagacatgacgctgctatctgccaagcccattggcttctccaaaagtccactcgagaactgggcgtagatgggagggcgtgacatttcctgcgaactcgtggaagagggtggggtctggttctccttgttcctcgagttgacgtcgtcctcgctatatcccttatggagattcttcaagctcttggggcggcttaaaagagcggcaagattcgtggatgacttggtctttttaggcttgccaggcatcgaatcgtccttgcccttcttggttgatttggtagcgtccttgggcggcacagtctttccgaaaaagcccgtcttcgtcggtgatagattgggggtggtgggcgatctgggaataccaccagcctggttctggatctcccctagagcagcgggacgggacactatgggaggagccatattgtggtggaacggaggctgtgcagcaaaggtagatgcaggtcgtaagtcagcaggttgcagaacagatccatccgagttgttacgtcggtgcatgaaagacgtcaggacatttgacttggagcgttgatggtgatattgacgagcttcgtttgaggggccattgtggtttaccgaagccatggcgtgagtcgggcgttggaatgttgtgtcagctgctacaacccgcacaagagtaaaatgaagaagtgaaacaaaaaggatgtctgaggagtcaaccaatggatgatatgccagatgctgcccgcgaagtgaatagctaacaatgcatcactccgccttcaattcaagagccgactgctccgacggttagtgaggcagctgggagatgagacagtcggagccaagctgactgcagaattgaagtgttgagtaagttagttcagcattggaaagaatactttgcttgctaagaagaaagaagcagatgcagaatcataataagaagagtgccctgtcaaagtcgtattttggtcgggacgtgatgacggtgtaaacgtgcatatcggagagagagaccaaacgatcggcgtggcctgcacgggcctagatcaacacatcgcagttgccccagaaacaaccgttgcagacccctccatccctggccgcgcctgcgggaagccacccgagcaccccactactagcttccatgaccccgctaaaagagctgtacctcgtagctggtaaaggctatcgattaggcatgtctacatgcagaacgagcatttgcatttgcatttgcgacgattggtgtatacaaaagttgtcaccattcgcgatcatccccatcagcgcccttcgacgacaagacgaccactcccctgccgttcgataccggaacttccgaagctacgacacgacttcttggaccggccgacagcgggacgccatggaggaacccgtgaccaagaagcagaagaggacaaagtcgaccaagcgctcagactatcgcgaatctctcaaggacaaggtcgccgagctgcccaagaagagattctttcgccagagggcccacgccaatgtcttctcagatcacaatctagaatatcctaagagcccagatcacatggactggtctaccttcttccccgactatgccgtcgacaaggatgtcgccatggcggtggaggatggccagaccagcgaggcgctcccggccagactgagcaaagaggtcgaggtcgtcgacatcggatgcggcttcgggggcctgctgatcgagctggcgcccgccctgccggacagcctgatcctgggcatggagatccgcacgtcggtgaccgagtacgtgcagcaccggatcactgcgctgcgagcacgcaactcggaggccaagctgtacggcaacatcggctgcctgcgggccaattcgatgaagttcatgcccaacttcttccgcaagggccagctgtccaaggccttcatctgcttcccggacccgcacttcaaacagcgaaagcacaaggcccgcattgtctcgatgactctcaactccgagtacgcctacgtgttgaggccaggtggcatcgtatacaccatcaccgacgtcgaggacctccacaattggatggttcggcacctggaggcgcacccctcgttcgagagggtcttgaaggaggagcaggaggcagacccttgtgtggccatcatgaagaacgcgacggaggagagccagaaggtgacgcggaatcagggacagaagtttgtggctctcttccgacgcctagaagatccgccttggtgatatatcggatttcgtcactctttatgagatgtgcagccagccagccgccccgcttcgctttgctttgctcgacatgacagccacgccgtgatgatgaatctgtagaaccagtgctccaaagccataatgtagataatcgcttccatcttacctgtattgtgaatggagaactgtgactagtagcgaagatggcatgagaccacggccaagtgttgaaaataagtgtgagacagatggatgcgtgtggggcagattcggtagatggcatgtcacgtcacccaagtccgaaccaagtgcctgggatgggtcatggatgcgatgcatgattgaaacccaccaccatttaggtaactactctgcacaagtattgggagaaggtgcctcattctcattgacctataaactcggccgtcgaacgatgacgcgaccactgcggcctgcagactccgaccatgggccccttaagggggagagacgtcgccatcgcgggcatcgtctgcttcgtcggctgggggtacgccgtcagctggtttcccaccctccg

SEQ ID NO: 30742 - DNA, 785 bp, Muscodor strobelii
  misc_feature: SGI cDNA ID NO. 570576
  misc_feature: Encodes the peptide sequence at SEQ ID NO 30743
atggcttcggtaaaccacaatggcccctcaaacgaagctcgtcaatatcaccatcaacgctccaagtcaaatgtcctgacgtctttcatgcaccgacgtaacaactcggatggatctgttctgcaacctgctgacttacgacctgcatctacctttgctgcacagcctccgttccaccacaatatggctcctcccatagtgtcccgtcccgctgctctaggggagatccagaaccaggctggtggtattcccagatcgcccaccacccccaatctatcaccgacgaagacgggctttttcggaaagactgtgccgcccaaggacgctaccaaatcaaccaagaagggcaaggacgattcgatgcctggcaagcctaaaaagaccaagtcatccacgaatcttgccgctcttttaagccgccccaagagcttgaagaatctccataagggatatagcgaggacgacgtcaactcgaggaacaaggagaaccagaccccaccctcttccacgagttcgcaggaaatgtcacgccctcccatctacgcccagttctcgagtggacttttggagaagccaatgggcttggcagatagcagcgtcatgtctacccatgcgattactaccagtatcaccgcagatgtttcttcgagtacccgcaagacgaaagagcggccaaagtcatatcatgcaacttacacgacgtcacgcgaggatacgaattcaaagaccgtaggcagtggtcgggacgataagaagggctcaccgaccaagatgcgaggaaagct

SEQ ID NO: 30743 - protein, 261 aa, Muscodor strobelii
  misc_feature: SGI Peptide ID NO. 570576
  misc_feature (20)..(233): NCBI GI: 256727107 Blast Desc: NECHADRAFT_32348 [Nectria haematococca mpVI 77-13-4]
  misc_feature (17)..(238): NCBI GI: 116202441 Blast Desc: CHGG_09105 [Chaetomium globosum CBS 148.51] gi|88177623|gb|EAQ85091.1| CHGG_09105 [Chaetomium globosum CBS 148.51]
  misc_feature (11)..(229): NCBI GI: 46135941 Blast Desc: FG09486.1 [Gibberella zeae PH-1]
  misc_feature (17)..(194): NCBI GI: 154322569 Blast Desc: BC1G_00627 [Botryotinia fuckeliana B05.10] gi|150847961|gb|EDN23154.1| BC1G_00627 [Botryotinia fuckeliana B05.10]
  misc_feature (17)..(194): NCBI GI: 156064939 Blast Desc: SS1G_00479 [Sclerotinia sclerotiorum 1980] gi|154691339|gb|EDN91077.1| SS1G_00479 [Sclerotinia sclerotiorum 1980]
  misc_feature (20)..(232): NCBI GI: 145613862 Blast Desc: MGG_01308 [Magnaporthe grisea 70-15] gi|145020879|gb|EDK05008.1| MGG_01308 [Magnaporthe grisea 70-15]
  misc_feature (18)..(186): NCBI GI: 261359517 Blast Desc: conserved [Verticillium albo-atrum VaMs.102]
  misc_feature (66)..(186): NCBI GI: 70720934 Blast Desc: [Epichloe festucae]
  misc_feature (117)..(191): NCBI GI: 169606362 Blast Desc: SNOG_06218 [Phaeosphaeria nodorum SN15] gi|160706974|gb|EAT86049.2| SNOG_06218 [Phaeosphaeria nodorum SN15]
  misc_feature (107)..(187): NCBI GI: 85090901 Blast Desc: NCU05987 [Neurospora crassa OR74A] gi|28920017|gb|EAA29404.1| conserved [Neurospora crassa OR74A]
MASVNHNGPSNEARQYHHQRSKSNVLTSFMHRRNNSDGSVLQPADLRPASTFAAQPPFHHNMAPPIVSRPAALGEIQNQAGGIPRSPTTPNLSPTKTGFFGKTVPPKDATKSTKKGKDDSMPGKPKKTKSSTNLAALLSRPKSLKNLHKGYSEDDVNSRNKENQTPPSSTSSQEMSRPPIYAQFSSGLLEKPMGLADSSVMSTHAITTSITADVSSSTRKTKERPKSYHATYTTSREDTNSKTVGSGRDDKKGSPTKMRGK

SEQ ID NO: 30744 - DNA, 7270 bp, Muscodor strobelii
  misc_feature: SGI EST ID NO. CUFF.72875.0
  misc_feature: Variant of the nucleotide sequence at SEQ ID NO 30742
cggagggtgggaaaccagctgacggcgtacccccagccgacgaagcagacgatgcccgcgatggcgacgtctctcccccttaaggggcccatggtcggagtctgcaggccgcagtggtcgcgtcatcgttcgacggccgagtttataggtcaatgagaatgaggcaccttctcccaatacttgtgcagagtagttacctaaatggtggtgggtttcaatcatgcatcgcatccatgacccatcccaggcacttggttcggacttgggtgacgtgacatgccatctaccgaatctgccccacacgcatccatctgtctcacacttattttcaacacttggccgtggtctcatgccatcttcgctactagtcacagttctccattcacaatacaggtaagatggaagcgattatctacattatggctttggagcactggttctacagattcatcatcacggcgtggctgtcatgtcgagcaaagcaaagcgaagcggggcggctggctggctgcacatctcataaagagtgacgaaatccgatatatcaccaaggcggatcttctaggcgtcggaagagagccacaaacttctgtccctgattccgcgtcaccttctggctctcctccgtcgcgttcttcatgatggccacacaagggtctgcctcctgctcctccttcaagaccctctcgaacgaggggtgcgcctccaggtgccgaaccatccaattgtggaggtcctcgacgtcggtgatggtgtatacgatgccacctggcctcaacacgtaggcgtactcggagttgagagtcatcgagacaatgcgggccttgtgctttcgctgtttgaagtgcgggtccgggaagcagatgaaggccttggacagctggcccttgcggaagaagttgggcatgaacttcatcgaattggcccgcaggcagccgatgttgccgtacagcttggcctccgagttgcgtgctcgcagcgcagtgatccggtgctgcacgtactcggtcaccgacgtgcggatctccatgcccaggatcaggctgtccggcagggcgggcgccagctcgatcagcaggcccccgaagccgcatccgatgtcgacgacctcgacctctttgctcagtctggccgggagcgcctcgctggtctggccatcctccaccgccatggcgacatccttgtcgacggcatagtcggggaagaaggtagaccagtccatgtgatctgggctcttaggactgtgttcgcacgtgacatcttagcttgatgaactacctccagaccatacgaagcaaacgtactattctagattgtgatctgagaagacattggcgtgggccctctggcgaaagaatctcttcttgggcagctcggcgaccttgtccttgagagattcgcgatagtctgagcgcttggtcgactttgtcctcttctgcttcttggtcacgggttcctccatggcgtcccgctgtcggccggtccaagaagtcgtgtcgtagcttcggaagttccggtatcgaacggcaggggagtggtcgtcttgtcgtcgaagggcgctgatggggatgatcgcgaatggtgacaacttttgtatacaccaatcgtcgcaaatgcaaatgcaaatgctcgttctgcatgtagacatgcctaatcgatagcctttaccagctacgaggtacagctcttttagcggggtcatggaagctagtagtggggtgctcgggtggcttcccgcaggcgcggccagggatggaggggtctgcaacggttgtttctggggcaactgcgatgtgttgatctaggcccgtgcaggccacgccgatcgtttggtctctctctccgatatgcacgtttacaccgtcatcacgtcccgaccaaaatacgactttgacagggcactcttcttattatgattctgcatctgcttctttcttcttagcaagcaaagtattctttccaatgctgaactaacttactcaacacttcaattctgcagtcagcttggctccgactgtctcatctcccagctgcctcactaaccgtcggagcagtcggctcttgaattgaaggcggagtgatgcattgttagctattcacttcgcgggcagcatctggcatatcatccattggttgactcctcagacatcctttttgtttcacttcttcattttactcttgtgcgggttgtagcagctgacacaacattccaacgcccgactcacgccatggcttcggtaaaccacaatggcccctcaaacgaagctcgtcaatatcaccatcaacgctccaagtcaaatgtcctgacgtctttcatgcaccgacgtaacaactcggatggatctgttctgcaacctgctgacttacgacctgcatctacctttgctgcacagcctccgttccaccacaatatggctcctcccatagtgtcccgtcccgctgctctaggggagatccagaaccaggctggtggtattcccagatcgcccaccacccccaatctatcaccgacgaagacgggctttttcggaaagactgtgccgcccaaggacgctaccaaatcaaccaagaagggcaaggacgattcgatgcctggcaagcctaaaaagaccaagtcatccacgaatcttgccgctcttttaagccgccccaagagcttgaagaatctccataagggatatagcgaggacgacgtcaactcgaggaacaaggagaaccagaccccaccctcttccacgagttcgcaggaaatgtcacgccctcccatctacgcccagttctcgagtggacttttggagaagccaatgggcttggcagatagcagcgtcatgtctacccatgcgattactaccagtatcaccgcagatgtttcttcgagtacccgcaagacgaaagagcggccaaagtcatatcatgcaacttacacgacgtcacgcgaggatacgaattcaaagaccgtaggcagtggtcgggacgataagaagggctcaccgaccaagatgcgaggaaagctcaacatcttcactaattttagcaatgcgagtggatcaggaagcaaatcgccatccaaggaatcttccgagttcgccctcgaccccaaggatgtcgcgaagcacctcgaggccatgttggatcgacgaaacatcccagagaaccagagatacaagatgagaaatctagccgacactatcaagatggagttcatccgacaggactgggctgagagccgtggcgccaacgcctcgagacccgggagccacgacagcgactccagcatgaatgagcgccaggggactaaaacaaacgagaagcagttgaggggacgcagcttcaccctgactcggaacaggggcaagaagtcagagtcgacatcgcccatgaagaaatccaagggtgagggaacactgggacggcatttcagaactcgatccaccgagagcgtggctagtgagcggcccgagtcggcgggctcgagttcggggaatggcatattgtccaagatgaaactgcaccagaatcccatggactacgtgacttatcttcgcaaagtgcagcgacctgagaatgtcgaagtgggcaaattgcacaaattgcgtcttcttttgcggaacgagacggtggcctggtccgaggatttcattcgccagggaggtatgcaagagattgtcgggctcctccatcgtatcatggaggtggagtggaggtaggttcttcaaaacatgtatttactgttagcgagactttgatgactaacaccgcaatagagaggagcacgaagacgcgctcttgcatgaagcgcttctttgcctcaaagctctctgtaccaccgcctgtggaatccagtacttgcactcagtccaagctactttattccgagcccttctggatatgctcttcgacccggagaagaaaggccctagcgactttactacgcgcatgatcatcacttcggtactgtttacctacatccaatcggcgccccctcaagatcggcccatccgggccaagacggtgctcgggcatctccgagacaccgagccgaaggaagaggatcggcccccagccttcgtcctcgaaatgcgccgtgagcgaccctaccgggtatggtgtaaggagttcgtcagtgtgaccaaggaagtgttttggatatacctgcaccacgtcaacgtcgtctatttggccccggagaagaaacgtcacataggcgatgcctccggtatcgatagtgcggcgtacatgcagacgcacttcccacaggagcgggtcccggtcccagcagccccctatgtcggcggtgtggaatgggatgccaccaattatctcacctcacatctcgacttggtgaatgcgatactggcctgcacgcccacggctgaagaacgaaatgcgctccgtgacctgttgcgtatatcgggctgggagcacaccatgggtttcagcctacggacctgcaaggagaaattctatgcgggcatccacgacggcctacgaacttgggtcgcggcagccgctgaggatggatgggacgtacgagacgtacggtacgggcctccagcccccaaaagccctgtgaagaaacagggcggtggaaagcagaaacctgaggagcccgcacccaagatcgaaatgccgaaacttgattttggacatgagagcccaaagcctgccaagcagagcgaaaactggctctcatagcgggaagctctttttacccccttggcgagtgggtgacgatgatatgaggataaccctgtcaagaaactatctagaagacggggttgctaaagcaactagctgactggctggttatgaaagcacgacttcttcgtgttgaaatttggaatggtgagatcagttgaagaccaatctggtttggtcttcatctgatcgtgtagattcttttgctttttgttgtttgttttgcgttgacttggagtctctgcatggcaactggtgatgttgagacggtaatggccccctgactctggatttattccaaaatgtcctgtttgattgtgtcacactgtcgcattcgaggatggaacacgagacaactcaaatttgaaattgcagagggagttgtatgggtctttttgtttctgttggtttataggcatgacaagggatggcatgggttcgggcgtaggcatcggtgatgttttgttgctttgcgtttccttcgcaacaagaaaattaaatcatgaagtagatggcatacagataatgaatgaaacgattctttctttctcttgtacgtactgatattggctattgttaccacgttacaatgatgtgaattcaagtctcagcattataagggattcttgggcagaaatctgctctcaaaaaggaaagagtcggtttctggggttgctaccactttttgcttttcgcgaggcttttggtttgaacgtcgctcgccgaaaccaacatgggtcatgatctgtttttttatcttctctttcagggaaacaattctccggagtgggaggagagtgtaatatgtgtgctgtgttaagtgattacatcgcctgagcgaagtagatttgccgaataacttgccgtatgaaccaaacttattcgtgtctaaaacaggacaagccccagccctactcgtggcatatgctcaaatcctctggacggctcacccggctgcacgggtcaggctgccctcgcgttcggttgagattcatgcgaatgtcggtaaaccgggacgcttcaggaagtgtgtcagacgacatagaggtactagccaacgtgcgtgccagttccaagaccagacccaacatcagcatgttctgcaactgacggcaagggctgagacgtagttgggtagccagctaatggtagggacgggtgcgccgcaaggtatgcgcaccgtgaacgtagattgggtacgggctaacccagatcatcgtgaatggccacacgggaaacgtcccgtccctggtctgcccatggcaccgccgtcgcactgcccatttccaggtaagagagttgggcacgggctgccaccgaagtgggcatgagtaatgtgctgacttgaccaggacagccaacgaaacacgccgagttttctccaagatggatcatagccttggtgagcttcccaccggcgacggtttctagccaagtgagctagccagctcgttgtcgagctgctataagttgtccgaacgcacgacggccgtaagggcagcaactcattctctacttgcttgctctagtgacctgctttcgtccggtggcgcgccgtcaggtctctagacgcatgcaagttagcaaatgatacttgcatgagtctgctgttgtcgccttcagcgctcagatactgcattgctagacacgcgtcgactagttattattaatctagtatatgagtagaacagcgagcaaaatatctcggtaccgcgagcgtaatgctcactgtccttgtcctgtgccatcctgtcgcagctgtgacgcaactagcgtgtgctaaaattgcgtcaggaggagatgtagccatgctcacgggctttatgcgttacttccccgtggtactttgaaagacgcggccgatttcgtggccgagcttttgttcattgtctttattttgaccgcttcacgaacgatctcaagttgagcatggcatcgtagacatggcagagccggcacatcgacggaggcaactggaaaggggaacccggaagatcgcctcttgcgcaagtcggtgtgatgctcaaccgagtagtcaagaccattatgatctcttattagctcgagatcctaggcatgccgccaggtccggataagtctgtgatgtctgcgatgtaatttgataactcgtacaggcgctgggattacacgagatagatattcttataggacaggcacataaagtcaatatcgcagccaagaacataggctaagtcatagtcgtgaggcaaatgacaagatatgaacatacgcaatatcatctcggccgttgaccggtgagttttactgtaagcgggctctacccatccttgttgtttactcctcttcggtcaagtatgtcgacaggcaacgtagcatcgcactgacgctcgagcaaggctatgatcgagctctgcattatagaagacctctcccatggttctcgcacaagtttcgaatggcgccgagacattcgatcctgatgacacatctgcgatcgccacttcgtttggcggatagctccgtacgggtgattcggccagtagcctgcatgaaataggacttttaagatacgccttgaactattccaaca

SEQ ID NO: 30745 - DNA, 789 bp, Muscodor strobelii
  misc_feature: SGI cDNA ID NO. 570577
  misc_feature: Encodes the peptide sequence at SEQ ID NO 30746
atggattacgggctccacgaccaacatgccacttacatcttgagccaaagcaaccgcgacgatgacgagactgacctcgatgatagctgggtcatgctgtctaggacaggcgagatagagccgctgccacacgaaagtatactattcaagacgaggggccgcgtagcgctgagcatcacggcacccaatcaaccatccggcgtgactcccctttccatcaaaagcgagagcggtacagcgttcataacgaaccaaagactaatatacttgccggctaacgcgacagaacaatttaaatcattctcgagcaagattttaggctgtcaagatgggcgaatgcgctcgtcctgggtcggaccgtggtactgggaagccagtgtgaggccagtacccgacggcaacataccgccggacttccccagggtgacactgaagttgacattcaaagacggcggcttcagcgagttcgagtctaaattcgtggagatcaagacgcggcttcaccacgcggcccagatcgccgaagagtcgggccaaagaaactgggccctgacggttcatgacgagcagctgccagaatactcggcttcacagggccaaggagcttcgaccacagcatcccaagcaacaccgcaagaggtggcacagcgtgcggacgaagccagccggcaggtggatgcgaaccaagcgcagccagacgagcccccacctgactacgatgaggctcaggcacaggccatcagcatgcaattcgatgagagagcgcgggaagaggcagaacgacagtag

SEQ ID NO: 30746 - protein, 262 aa, Muscodor strobelii
  misc_feature: SGI Peptide ID NO. 570577
  misc_feature (1)..(262): NCBI GI: 39951327 Blast Desc: MGG_01306 [Magnaporthe grisea 70-15] gi|145020880|gb|EDK05009.1| MGG_01306 [Magnaporthe grisea 70-15]
  misc_feature (2)..(261): NCBI GI: 261359515 Blast Desc: conserved [Verticillium albo-atrum VaMs.102]
  misc_feature (3)..(262): NCBI GI: 156064259 Blast Desc: SS1G_00137 [Sclerotinia sclerotiorum 1980] gi|154690999|gb|EDN90737.1| SS1G_00137 [Sclerotinia sclerotiorum 1980]
  misc_feature (1)..(262): NCBI GI: 171682138 Blast Desc: protein product [Podospora anserina] gi|170941028|emb|CAP66678.1| protein product [Podospora anserina]
  misc_feature (3)..(262): NCBI GI: 154312256 Blast Desc: BC1G_06161 [Botryotinia fuckeliana B05.10] gi|150850124|gb|EDN25317.1| BC1G_06161 [Botryotinia fuckeliana B05.10]
  misc_feature (24)..(179): NCBI GI: 85089088 Blast Desc: NCU05988 [Neurospora crassa OR74A] gi|28919160|gb|EAA28658.1| [Neurospora crassa OR74A]
  misc_feature (2)..(251): NCBI GI: 116202437 Blast Desc: CHGG_09103 [Chaetomium globosum CBS 148.51] gi|88177621|gb|EAQ85089.1| CHGG_09103 [Chaetomium globosum CBS 148.51]
  misc_feature (29)..(257): NCBI GI: 225559850 Blast Desc: conserved [Ajellomyces capsulatus G186AR]
  misc_feature (29)..(257): NCBI GI: 154287456 Blast Desc: conserved [Ajellomyces capsulatus NAm1] gi|150408164|gb|EDN03705.1| conserved [Ajellomyces capsulatus NAm1]
  misc_feature (12)..(259): NCBI GI: 70720932 Blast Desc: [Epichloe festucae]
MDYGLHDQHATYILSQSNRDDDETDLDDSWVMLSRTGEIEPLPHESILFKTRGRVALSITAPNQPSGVTPLSIKSESGTAFITNQRLIYLPANATEQFKSFSSKILGCQDGRMRSSWVGPWYWEASVRPVPDGNIPPDFPRVTLKLTFKDGGFSEFESKFVEIKTRLHHAAQIAEESGQRNWALTVHDEQLPEYSASQGQGASTTASQATPQEVAQRADEASRQVDANQAQPDEPPPDYDEAQAQAISMQFDERAREEAERQ

SEQ ID NO: 30747 - DNA, 3424 bp, Muscodor strobelii
  misc_feature: SGI EST ID NO. CUFF.73206.1
  misc_feature: Variant of the nucleotide sequence at SEQ ID NO 30745
cagctcgccgccttggtcgagttctacccgtgcatggcttcacgttggccgaatgtacccctaatgcatacatttcctggtggcgtgtttcgaggtactctaacgacggcgctcatttgataggctgctcaaccacaacctagactacaccattgcttggcaattcaagggctggttttcgcaccagtatactccagactgacggccagacaaacggacgagcaacccatctcgaattgcgctaagcagcccccctccaactctcccatgaaataacatctttcgcaagtctgtcgagcgttgagcacacccactcctgcagccgcttgcttatttttaatcccttttgggccgtagctacgaagcaacgttcgtcctccggacattagtggcccacattatcgctcctatacacccaacatacatactgcttctccatccaggctttttaccttgttactattatcatcttgtatatgcagtcccagctcgtgccgtcccggatctgctcagactaacaaggccctgtccactggaaccctgcctggacagtcgacgaatcccacaggttcggttgacgcccggcgcgacctttgctacatcggaatccacctccctaggacggactgaaactgccttgccgagactgtcttaactaccgagctttcttctacttcttcttatcccacaatgtcaatcaactgggtcatgctgtctaggacaggcgagatagagccgctgccacacgaaagtatactattcaagacgaggggccgcgtagcgctgagcatcacggcacccaatcaaccatccggcgtgactcccctttccatcaaaagcgagagcggtacagcgttcataacgaaccaaagactaatatacttgccggctaacgcgacagaacaatttaaatcattctcgagcaagattttaggctgtcaagatgggcgaatgcgctcgtcctgggtcggaccgtggtactgggaagccagtgtgaggccagtacccgacggcaacataccgccggacttccccagggtgacactgaagttgacattcaaagacggcggcttcagcgagttcgagtctaaattcgtggagatcaagacgcggcttcaccacgcggcccagatcgccgaagagtcgggccaaagaaactgggccctgacggttcatgacgagcagctgccagaatactcggcttcacagggccaaggagcttcgaccacagcatcccaagcaacaccgcaagaggtggcacagcgtgcggacgaagccagccggcaggtggatgcgaaccaagcgcagccagacgagcccccacctgactacgatgaggctcaggcacaggccatcagcatgcaattcgatgagagagcgcgggaagaggcagaacgacagtaggcccccgtgtgtatatggctacaactatgagtcatgtgtggatcatgtcagctagggaaaggggggcgagccgcgcgaggcgacgtcgagtgagataatctcacatcagaacggctggcactgcaccaacaaggtgatgacatgagcccatgctaatttttatctgcaataatgtcccacggtgcattgattgtacttgacgacgcatgtatgaaaggacggcaagtaccaactaagtatagctacggtcaatgtagataggggcggtgaggcgacgaagggtagagtacgtcagatgtcaaatggacatctaggcttgcatcacgagacgggaagatagcaatacgtatgtgggacgcggtcaaagtggagaaacacgctgagttgacacaagaatgcgacaggcttctgccttcatgaaattgtgtctatcacgcaatgcacgccgcattatatgaggtaggcacggtaggcagataggcgttgatggtaaggcaacccgaacccgacaacttggaccacgatggacctaattgggcagaggagtacattgattatgggttggattaccataggctcgaatgtatctgctttcattggctgattgttccgttataatgactccagggtaaaagagctcaagccatccgcgacatgctcgattacctaatgtctagttggtccaatgataacttcacgtgactcggagctctggcggcagccaatggggttggctcaattgttgatgctcgtaattttctcatagccaaccacgccgtagctcatcgcagcatcaaccacatctgcccatctcgcccgaagcaagccattggaagtgcaattgatcgccatgggtgtctgggacgtcatctccgacctcgtcgaggccgccacgccatggagcaccgtcgaagctgaggctccccctgccgaggataaggagcccaagacccaggacgagggatccgacgactccaagagcgaagacgccgacaaggaccaagcttccagcgaggactcaagcgaggagggcgctgaggacgactcatctgaaggcggcgaagattccgagggggaggacgaggaagaggaagaggaggatgaagaggagcttgaggaccccaaggagaagctcgaggaagagtgcaagaactccaagcagtgcgcaccagctaagcatcacttcgacgaatgcgttgagagggtcaccaatgcatccgatgacgacagcgaggagaaagaggactgtgtcgaagaattcttccaccttgcccactgcgccacccagtgcgccgctcccaagctctggtccgtcctcaaatagagcatcttccatgtacgatatccgatcaccggcgatacctagcatcctctacccgtgtatagacctccttagagcaacaatagccggactgaacgagatgaggccaactacacggccacgaccttggcctcgcgatggcgattgtatggcgcgatccgtgatggctcaatgaatgacaagcaacaagccccctgtggtgtcccattcagcactggctctccctcttgtatcataacattgcattaaacctcccaaattagatctttgatgacattttgtcccgttgcctgctgccacccgtatctaatatttctgccacggaacagaacctaaatcaaaaatcgtctctcattggactatccattgctctagcctcatgtttgagaccattaaatgcatggagacattcaaggcctcatgaagctaacacacaagtatatcgaatgaaactcatatgttttcactacaatgatgtgcctacaccttagtccgtcagatatcgtcgacttgggttatttttcattctctttgcttgagggagctgtcatgtgatggtctgatactgatctgggctctttgaacgcagcctggcaacatagcagtctaaagacactttgatgggtatcaatgactctcgtccatctatgttagacgtgcaaggtctcaattacgcaatagttctgcaataaggattcg

SEQ ID NO: 30748 - DNA, 474 bp, Muscodor strobelii
  misc_feature: SGI cDNA ID NO. 570578
  misc_feature: Reduced expression when VOC is produced
  misc_feature: Encodes the peptide sequence at SEQ ID NO 30749
atgggtgtctgggacgtcatctccgacctcgtcgaggccgccacgccatggagcaccgtcgaagctgaggctccccctgccgaggataaggagcccaagacccaggacgagggatccgacgactccaagagcgaagacgccgacaaggaccaagcttccagcgaggactcaagcgaggagggcgctgaggacgactcatctgaaggcggcgaagattccgagggggaggacgaggaagaggaagaggaggatgaagaggagcttgaggaccccaaggagaagctcgaggaagagtgcaagaactccaagcagtgcgcaccagctaagcatcacttcgacgaatgcgttgagagggtcaccaatgcatccgatgacgacagcgaggagaaagaggactgtgtcgaagaattcttccaccttgcccactgcgccacccagtgcgccgctcccaagctctggtccgtcctcaaatag

SEQ ID NO: 30749 - protein, 157 aa, Muscodor strobelii
  misc_feature: SGI Peptide ID NO. 570578
  misc_feature (90)..(157): Pfam Id: PF02320 Pfam Desc: Ubiquinol-cytochrome C reductase hinge protein
  misc_feature (1)..(157): NCBI GI: 116202435 Blast Desc: CHGG_09102 [Chaetomium globosum CBS 148.51] gi|88177620|gb|EAQ85088.1| CHGG_09102 [Chaetomium globosum CBS 148.51]
  misc_feature (1)..(157): NCBI GI: 85089093 Blast Desc: NCU05989 [Neurospora crassa OR74A] gi|28919161|gb|EAA28659.1| [Neurospora crassa OR74A]
  misc_feature (1)..(157): NCBI GI: 145613864 Blast Desc: MGG_01305 [Magnaporthe grisea 70-15] gi|145020881|gb|EDK05010.1| MGG_01305 [Magnaporthe grisea 70-15]
  misc_feature (1)..(157): NCBI GI: 154312254 Blast Desc: ubiquinol-cytochrome c reductase complex subunit [Botryotinia fuckeliana B05.10] gi|150850123|gb|EDN25316.1| ubiquinol-cytochrome c reductase complex subunit [Botryotinia
  misc_feature (1)..(157): NCBI GI: 156064261 Blast Desc: SS1G_00138 [Sclerotinia sclerotiorum 1980] gi|154691000|gb|EDN90738.1| SS1G_00138 [Sclerotinia sclerotiorum 1980]
  misc_feature (1)..(157): NCBI GI: 46135947 Blast Desc: FG09489.1 [Gibberella zeae PH-1]
  misc_feature (1)..(157): NCBI GI: 261359514 Blast Desc: ubiquinol-cytochrome c reductase complex subunit [Verticillium albo-atrum VaMs.102]
  misc_feature (1)..(157): NCBI GI: 256727109 Blast Desc: NECHADRAFT_99351 [Nectria haematococca mpVI 77-13-4]
  misc_feature (1)..(157): NCBI GI: 67538854 Blast Desc: AN5597.2 [Aspergillus nidulans FGSC A4] gi|40743050|gb|EAA62240.1| AN5597.2 [Aspergillus nidulans FGSC A4] gi|259484941|tpe|CBF81592.1| TPA: ubiquinol-cytochrome c 17
  misc_feature (1)..(157): NCBI GI: 169606594 Blast Desc: SNOG_06343 [Phaeosphaeria nodorum SN15] gi|160707034|gb|EAT86174.2| SNOG_06343 [Phaeosphaeria nodorum SN15]
  misc_feature: Useful for introducing or modulating the production of volatile compounds
MGVWDVISDLVEAATPWSTVEAEAPPAEDKEPKTQDEGSDDSKSEDADKDQASSEDSSEEGAEDDSSEGGEDSEGEDEEEEEEDEEELEDPKEKLEEECKNSKQCAPAKHHFDECVERVTNASDDDSEEKEDCVEEFFHLAHCATQCAAPKLWSVLK

SEQ ID NO: 30750 - DNA, 3424 bp, Muscodor strobelii; identical to SEQ ID NO: 30747
  misc_feature: SGI EST ID NO. CUFF.73206.1
  misc_feature: Variant of the nucleotide sequence at SEQ ID NO 30748

SEQ ID NO: 30751 - DNA, 1512 bp, Muscodor strobelii
  misc_feature: SGI cDNA ID NO. 570579
  misc_feature: Encodes the peptide sequence at SEQ ID NO 30752
atgagcaataagatccgcgaagcgtacgcaatggacgatatgaagagtgacaggaagaagtcgagttcgcccacgcgcaaggacgggttgcagcgcctcgcgtcgagctcggatgatggttttgggtcggcggccgcgtcgacgagcgctatagaaaatatcaactcacagggagaggcgacgacgattcagactgtgtacaaggtctataagaggaggtgggttggtctcgcggtcttgacgctgatgaatattatcgttagttgggattggctgacattctctcccgtatctcaacacgcagcagcgtattatggacactccgagactgacatcaactggttctccaccgcgtttctgttcgcttttgtgttagcctcgccattggccatgtatatgctacatcttgggccaaaagcttccatcatttcagctgccgtattcttgatcatcggcaatgtggttcgagtggcgggctcgcactccaagtctggaggcaacttcggcgtcgtcatgtttggacagatccttatcgggttcgcgcaacccttcatcttgatcgcacccacgcgttactcggatatgtggttttcgacccgtggccgtgtagccgcaaccgcgctcccgagtctggctaacccgttcggtgccgccatcggtcagctcgtcgtcccgtttttggccacgaaagccgaggaggtgtcgttggctgtcatcgtcacaaccatcatctccgtagtcatagccctcccggcattcttcattccctcgcggcctcccacaccaccaggcccctcgggaacaggacccaaggtctccctcaatgatctgcgagcagctatcccacatctcaaaaacgtcgagctctggctaatagccatccccttcgccgtctacgtcgccctcttcaacagcatatcctcactcctcaaccagatcctcctgccctacgatttcacgtccgacgaggcgggcatcgccggcgcagttctgatcttcgtcggcctcgtcacctcagccatcacgtcaccgatcctagacaagaccaaggccttcctcctcgccatcaaagtctgtgtccccatcatcggcctcagtctcctggcattcgtcttcgtgcccgccacgcgagatctagctggcccctacgtagtcctcgccattctcggtgccagtgccttcaccctcctgcccgtcgccctagaattcatgtgcgagcttacctaccccttatccccagagattacctccaccgtagcctgggccatctcccaacttctcggcggcgtgttcgtcatcatctcctcggcactgcgcgatggcgaaaacgcaaatccgccgtacaacctcaaccgagcgttgatcttcagcgccgtcatcggactcgccgtcgtgccgctaccgatgtctttggggttgtttgggaggaaggacaaggttgtcatgagacgagccttgagcgatgaggaggctaggaggagggagagtgatgcgggcactgagcaggcttga

SEQ ID NO: 30752 - protein, 503 aa, Muscodor strobelii
  misc_feature: SGI Peptide ID NO. 570579
  misc_feature (80)..(429): Pfam Id: PF07690 Pfam Desc: Major Facilitator Superfamily
  misc_feature (80)..(401): Pfam Id: PF07690 Pfam Desc: Major Facilitator Superfamily
  misc_feature (20)..(496): NCBI GI: 116202433 Blast Desc: CHGG_09101 [Chaetomium globosum CBS 148.51] gi|88177619|gb|EAQ85087.1| CHGG_09101 [Chaetomium globosum CBS 148.51]
  misc_feature (53)..(498): NCBI GI: 46135949 Blast Desc: FG09490.1 [Gibberella zeae PH-1]
  misc_feature (64)..(496): NCBI GI: 256727110 Blast Desc: [Nectria haematococca mpVI 77-13-4]
  misc_feature (26)..(491): NCBI GI: 70720929 Blast Desc: [Epichloe festucae]
  misc_feature (3)..(498): NCBI GI: 171682134 Blast Desc: protein product [Podospora anserina] gi|170941026|emb|CAP66676.1| protein product [Podospora anserina]
  misc_feature (52)..(489): NCBI GI: 164428242 Blast Desc: NCU05990 [Neurospora crassa OR74A] gi|157072068|gb|EAA29562.2| conserved [Neurospora crassa OR74A]
  misc_feature (42)..(496): NCBI GI: 238843878 Blast Desc: major facilitator superfamily domain-containing protein 7-b [Microsporum canis CBS 113480]
  misc_feature (67)..(501): NCBI GI: 240105337 Blast Desc: Major Facilitator Superfamily protein [Coccidioides posadasii C735 delta SOWgp]
  misc_feature (12)..(490): NCBI GI: 156064263 Blast Desc: SS1G_00139 [Sclerotinia sclerotiorum 1980] gi|154691001|gb|EDN90739.1| SS1G_00139 [Sclerotinia sclerotiorum 1980]
  misc_feature (67)..(501): NCBI GI: 119194375 Blast Desc: CIMG_01562 [Coccidioides immitis RS]
MSNKIREAYAMDDMKSDRKKSSSPTRKDGLQRLASSSDDGFGSAAASTSAIENINSQGEATTIQTVYKVYKRRWVGLAVLTLMNIIVSWDWLTFSPVSQHAAAYYGHSETDINWFSTAFLFAFVLASPLAMYMLHLGPKASIISAAVFLIIGNVVRVAGSHSKSGGNFGVVMFGQILIGFAQPFILIAPTRYSDMWFSTRGRVAATALPSLANPFGAAIGQLVVPFLATKAEEVSLAVIVTTIISVVIALPAFFIPSRPPTPPGPSGTGPKVSLNDLRAAIPHLKNVELWLIAIPFAVYVALFNSISSLLNQILLPYDFTSDEAGIAGAVLIFVGLVTSAITSPILDKTKAFLLAIKVCVPIIGLSLLAFVFVPATRDLAGPYVVLAILGASAFTLLPVALEFMCELTYPLSPEITSTVAWAISQLLGGVFVIISSALRDGENANPPYNLNRALIFSAVIGLAVVPLPMSLGLFGRKDKVVMRRALSDEEARRRESDAGTEQA

SEQ ID NO: 30753 - DNA, 4682 bp, Muscodor strobelii
  misc_feature: SGI EST ID NO. CUFF.72947.0
  misc_feature: Variant of the nucleotide sequence at SEQ ID NO 30751
tgaacattggcaacaggcaagcgaaatagcacgacgccagttgtcgattgtctgtgttgtctcagttattgcatgggcaggacacacatgccttccttgttcagcttgggttgcaggtgcacttgagagatcaacgcaataaatgatacctgtgcccggtgttttggcatatgacactgctctaccaggtaatttcatgttacaagtttgggattacaacttaaccgccgttcatccatccaaacatcaacccgtctaaccgaatgcgacgtcgccaacgcaagacgaggacacatcttcaattcaaagccaaggaaaagtcttcatgtttacttaactgttcctttaaacattcatccttcgatctaggagattagatccatataacctgcagtgacttgtcataccgaggtagaggtagataacgacgacttagccaagtcttaacgcaagaggagaaatccggcccgctcgatcgcatcgaactccaaaaataacgaattggcagacgttgatcgagaggctgcttatctggactcgcaacatagagaagggaaaagcagccctatattgattatacgaagcaacccttggatttcagacaggattcaacctaatattagtcgcaatagcgcatgcgctatccctcattctaggcaggggatcgacttcatctagcggcatctggcggcaattcagcgacggtttcatccgtcaatctgaatcctaatctcatcctctttcgatatctgatctttcctcaacgcaggcgacgaatggcgtctgattcaggctcatcgtcaaacgggaaagaatcggaagcgggagttatgcagagcaacgcagacacgatagagatgagcaataagatccgcgaagcgtacgcaatggacgatatgaagagtgacaggaagaagtcgagttcgcccacgcgcaaggacgggttgcagcgcctcgcgtcgagctcggatgatggttttgggtcggcggccgcgtcgacgagcgctatagaaaatatcaactcacagggagaggcgacgacgattcagactgtgtacaaggtctataagaggaggtgggttggtctcgcggtcttgacgctgatgaatattatcgttagttgggattggctgacattctctcccgtatctcaacacgcagcagcgtattatggacactccgagactgacatcaactggttctccaccgcgtttctgttcgcttttgtgttagcctcgccattggccatgtatatgctacatcttgggccaaaagcttccatcatttcagctgccgtattcttgatcatcggcaatgtggttcgagtggcgggctcgcactccaagtctggaggcaacttcggcgtcgtcatgtttggacagatccttatcgggttcgcgcaacccttcatcttgatcgcacccacgcgttactcggatatgtggttttcgacccgtggccgtgtagccgcaaccgcgctcccgagtctggctaacccgttcggtgccgccatcggtcagctcgtcgtcccgtttttggccacgaaagccgaggaggtgtcgttggctgtcatcgtcacaaccatcatctccgtagtcatagccctcccggcattcttcattccctcgcggcctcccacaccaccaggcccctcgggaacaggacccaaggtctccctcaatgatctgcgagcagctatcccacatctcaaaaacgtcgagctctggctaatagccatccccttcgccgtctacgtcgccctcttcaacagcatatcctcactcctcaaccagatcctcctgccctacgatttcacgtccgacgaggcgggcatcgccggcgcagttctgatcttcgtcggcctcgtcacctcagccatcacgtcaccgatcctagacaagaccaaggccttcctcctcgccatcaaagtctgtgtccccatcatcggcctcagtctcctggcattcgtcttcgtgcccgccacgcgagatctagctggcccctacgtagtcctcgccattctcggtgccagtgccttcaccctcctgcccgtcgccctagaattcatgtgcgagcttacctaccccttatccccagagattacctccaccgtagcctgggccatctcccaacttctcggcggcgtgttcgtcatcatctcctcggcactgcgcgatggcgaaaacgcaaatccgccgtacaacctcaaccgagcgttgatcttcagcgccgtcatcggactcgccgtcgtgccgctaccgatgtctttggggttgtttgggaggaaggacaaggttgtcatgagacgagccttgagcgatgaggaggctaggaggagggagagtgatgcgggcactgagcaggcttgatgtgatgtaacgatgtgatggaaccttgggggcaggaatgggagtttcggtattggcggcggcgtttgggggcgtgattgtggaggcagatgtgatatcactatatttcttgggtttcaattgctgcgcacttacatatgcgcgggtgtgtatgtgtcacaatattaaatgaggcatgaaaggcatgtattgatgttttcattatcataagcgcactggttgaatagtccatcaactaatgcagacgctatactaggtagtatatatgtaatatgtgcaccatctcatcatatgtatatctctcgcatcttcgcgagcattttcccgaaatatcaatggtctagcgtgcatattatatcataccttgccctgcttcagagcctcttcccacgcgatacgaaggctctcaagctcctcccaacaccgacgcccatcctcctcgaacttccgcctgctctcttcggtaagcgtaaccgcatcccatttcctgcccttcgccttccgcagccaccccgctgcagtgtcgtttttgatcgcctcggcatcttcgatacggccttcccacccccagccctggacctccgtcttcttgggcgctacataaccaagtcgcgaggcggctgacccccatttgatgcgccccgcatcctgagcgtcgagtgtcgactgatccgccagaccgagccaggatgtcgcgcaagcaccggcgtagatggtgacggtgtgccaaggggatccacaccatcgcgataagttcatagctacccagtaccaaaaaaataaaaaccagttcaaggggaagatgggcgtgcagactacgcctgggtgtgagaggtagaacttgggcttcacgggcttgttcttcgtcgcgggagaggcgaagtaggatgcgttgacttcttgcacggttggcaattcggacgtaaggacgaagaggtctgtgatacgcttgctgctctcgtaggggggcatgtacttggcggcttggaaatcgttgaagtctaaatgtccgtgatcttcagcatctatgctgctcgtccagacgacacgacccggcgtctcgctcttgttcgcgcgactaaggagggggagaagctcgtgggcgaggaggtagtggccgaagaggttggcggtgaagacttcggccagttgtggggggagaggatttttatgttcccgttccctatcagcttctgggagtcgagcacgactgcgggtttctgggcgatcttgaaagatgggaaggttgtgcactggacgaggccgacggtgaagaactgcttggcgaggccgagccagtcgacgcccgtccagccgcctataccggcgttgaagagggcggcgtcgatgcgaggtatcttgacatcgggtatgacgcccgtgggatctgacacggtgccattgactagccggtcggcggctgcgtatatggagcgcaggtcgcagaggtcgagctggacactcaggacgtggactctggcgattgtggcctcgcggtcgaagttggcccctagacgggcttcgagcgtcttggaggtgtggacggcatcgtataggtattttcgtagagccagcacggtgtctttggacttgctcttggagcgggtggtgggcaagaggatgaggtgggctgaaggtgggcgagaggcgaggaattcgtcgatggtgcgctgacctattcccataccaacaccactgcagagaatattgttacttcatcgtccagatttatttgcgagcagagctagttggcgtcaattggcgttggactatttcaaaatcacatacctgttggctcccgtgatgagtacgaaatactggtcatcgctggacgccttggcccaggggggagacgccattgtctatgtccgaaccgatagctcaaatttcgacgaagctcacaacgaaatacgtatcacatatatagacgggttttgcaacggaggattcgttgtcgacttactactgctcgacggcacttgtgcatagccgtgtggggtgacggacgtgggctacgggctagcgtgcatttgggaaatctacaacgtctcacggcgactggcgttccgggtcgggccatgtcgatgaagctctctgggacatggacatgttgctgccgtctttacgaatacgataacgacgaggacgatgtgagaatcatggtttgtatttgtatttgcctaagtctagaaatttcttgtgagagagtaagcgatatcgcgatatggcagatgagatccattgttacatccacccaccggtcctagcatctccaaaatgatacccgacaggctgtcaccaagcccttctcgc

SEQ ID NO: 30754 - DNA, 1347 bp, Muscodor strobelii
  misc_feature: SGI cDNA ID NO. 570580
  misc_feature: Encodes the peptide sequence at SEQ ID NO 30755
atggcgtctcccccctgggccaaggcgtccagcgatgaccagtatttcgtactcatcacgggagccaacagtggtgttggtatgggaataggtcagcgcaccatcgacgaattcctcgcctctcgcccaccttcagcccacctcatcctcttgcccaccacccgctccaagagcaagtccaaagacaccgtgctggctctacgaaaatacctatacgatgccgtccacacctccaagacgctcgaagcccgtctaggggccaacttcgaccgcgaggccacaatcgccagagtccacgtcctgagtgtccagctcgacctctgcgacctgcgctccatatacgcagccgccgaccggctagtcaatggcaccgtgtcagatcccacgggcgtcatacccgatgtcaagatacctcgcatcgacgccgccctcttcaacgccggtataggcggctggacgggcgtcgactggctcggcctcgccaagcagttcttcaccgtcggcctcgtccagtgcacaaccttcccatctttcaagatcgcccagaaacccgcagtcgtgctcgactcccagaagctgatagggaacgggaacataaaaatcctctccccccacaactggccgaatcgcgcgaacaagagcgagacgccgggtcgtgtcgtctggacgagcagcatagatgctgaagatcacggacatttagacttcaacgatttccaagccgccaagtacatgcccccctacgagagcagcaagcgtatcacagacctcttcgtccttacgtccgaattgccaaccgtgcaagaagtcaacgcatcctacttcgcctctcccgcgacgaagaacaagcccgtgaagcccaagttctacctctcacacccaggcgtagtctgcacgcccatcttccccttgaactggtttttatttttttggtactgggtagctatgaacttatcgcgatggtgtggatccccttggcacaccgtcaccatctacgccggtgcttgcgcgacatcctggctcggtctggcggatcagtcgacactcgacgctcaggatgcggggcgcatcaaatgggggtcagccgcctcgcgacttggttatgtagcgcccaagaagacggaggtccagggctgggggtgggaaggccgtatcgaagatgccgaggcgatcaaaaacgacactgcagcggggtggctgcggaaggcgaagggcaggaaatgggatgcggttacgcttaccgaagagagcaggcggaagttcgaggaggatgggcgtcggtgttgggaggagcttgagagccttcgtatcgcgtgggaagaggctctgaagcagggcaaggtatga

SEQ ID NO: 30755 - protein, 448 aa, Muscodor strobelii
  misc_feature: SGI Peptide ID NO. 570580
  misc_feature (5)..(448): NCBI GI: 256727686 Blast Desc: NECHADRAFT_91272 [Nectria haematococca mpVI 77-13-4]
  misc_feature (1)..(443): NCBI GI: 85091228 Blast Desc: NCU05991 [Neurospora crassa OR74A] gi|28920185|gb|EAA29563.1| [Neurospora crassa OR74A]
  misc_feature (1)..(441): NCBI GI: 116202431 Blast Desc: CHGG_09100 [Chaetomium globosum CBS 148.51] gi|88177618|gb|EAQ85086.1| CHGG_09100 [Chaetomium globosum CBS 148.51]
  misc_feature (1)..(440): NCBI GI: 171682150 Blast Desc: protein product [Podospora anserina] gi|170941034|emb|CAP66684.1| protein product [Podospora anserina]
  misc_feature (6)..(445): NCBI GI: 70720928 Blast Desc: [Epichloe festucae]
  misc_feature (1)..(443): NCBI GI: 156064637 Blast Desc: SS1G_00326 [Sclerotinia sclerotiorum 1980] gi|154691188|gb|EDN90926.1| SS1G_00326 [Sclerotinia sclerotiorum 1980]
  misc_feature (1)..(340): NCBI GI: 261359510 Blast Desc: 3-ketosteroid reductase [Verticillium albo-atrum VaMs.102]
  misc_feature (1)..(447): NCBI GI: 29150686 Blast Desc: 3-ketosteroid reductase [Botryotinia fuckeliana]
  misc_feature (16)..(443): NCBI GI: 145613868 Blast Desc: MGG_01303 [Magnaporthe grisea 70-15] gi|145020883|gb|EDK05012.1| MGG_01303 [Magnaporthe grisea 70-15]
  misc_feature (13)..(447): NCBI GI: 119500244 Blast Desc: 3-ketosteroid reductase [Neosartorya fischeri NRRL 181] gi|119415044|gb|EAW24982.1| 3-ketosteroid reductase [Neosartorya fischeri NRRL 181]
  misc_feature (16)..(368): SWISSPROT Homolog: EC 1.1.1.270 3-keto-steroid reductase
MASPPWAKASSDDQYFVLITGANSGVGMGIGQRTIDEFLASRPPSAHLILLPTTRSKSKSKDTVLALRKYLYDAVHTSKTLEARLGANFDREATIARVHVLSVQLDLCDLRSIYAAADRLVNGTVSDPTGVIPDVKIPRIDAALFNAGIGGWTGVDWLGLAKQFFTVGLVQCTTFPSFKIAQKPAVVLDSQKLIGNGNIKILSPHNWPNRANKSETPGRVVWTSSIDAEDHGHLDFNDFQAAKYMPPYESSKRITDLFVLTSELPTVQEVNASYFASPATKNKPVKPKFYLSHPGVVCTPIFPLNWFLFFWYWVAMNLSRWCGSPWHTVTIYAGACATSWLGLADQSTLDAQDAGRIKWGSAASRLGYVAPKKTEVQGWGWEGRIEDAEAIKNDTAAGWLRKAKGRKWDAVTLTEESRRKFEEDGRRCWEELESLRIAWEEALKQGKV

SEQ ID NO: 30756 - DNA, 4925 bp, Muscodor strobelii
  misc_feature: SGI EST ID NO. CUFF.72948.1
  misc_feature: Variant of the nucleotide sequence at SEQ ID NO 30754
gcgagaagggcttggtgacagcctgtcgggtatcattttggagatgctaggaccggtgggtggatgtaacaatggatctcatctgccatatcgcgatatcgcttactctctcacaagaaatttctagacttaggcaaatacaaatacaaaccatgattctcacatcgtcctcgtcgttatcgtattcgtaaagacggcagcaacatgtccatgtcccagagagcttcatcgacatggcccgacccggaacgccagtcgccgtgagacgttgtagatttcccaaatgcacgctagcccgtagcccacgtccgtcaccccacacggctatgcacaagtgccgtcgagcagtagtaagtcgacaacgaatcctccgttgcaaaacccgtctatatatgtgatacgtatttcgttgtgagcttcgtcgaaatttgagctatcggttcggacatagacaatggcgtctcccccctgggccaaggcgtccagcgatgaccagtatttcgtactcatcacgggagccaacagtggtgttggtatgggaataggtcagcgcaccatcgacgaattcctcgcctctcgcccaccttcagcccacctcatcctcttgcccaccacccgctccaagagcaagtccaaagacaccgtgctggctctacgaaaatacctatacgatgccgtccacacctccaagacgctcgaagcccgtctaggggccaacttcgaccgcgaggccacaatcgccagagtccacgtcctgagtgtccagctcgacctctgcgacctgcgctccatatacgcagccgccgaccggctagtcaatggcaccgtgtcagatcccacgggcgtcatacccgatgtcaagatacctcgcatcgacgccgccctcttcaacgccggtataggcggctggacgggcgtcgactggctcggcctcgccaagcagttcttcaccgtcggcctcgtccagtgcacaaccttcccatctttcaagatcgcccagaaacccgcagtcgtgctcgactcccagaagctgatagggaacgggaacataaaaatcctctccccccacaactggccgaagtcttcaccgccaacctcttcggccactacctcctcgcccacgagcttctccccctccttagtcgcgcgaacaagagcgagacgccgggtcgtgtcgtctggacgagcagcatagatgctgaagatcacggacatttagacttcaacgatttccaagccgccaagtacatgcccccctacgagagcagcaagcgtatcacagacctcttcgtccttacgtccgaattgccaaccgtgcaagaagtcaacgcatcctacttcgcctctcccgcgacgaagaacaagcccgtgaagcccaagttctacctctcacacccaggcgtagtctgcacgcccatcttccccttgaactggtttttatttttttggtactgggtagctatgaacttatcgcgatggtgtggatccccttggcacaccgtcaccatctacgccggtgcttgcgcgacatcctggctcggtctggcggatcagtcgacactcgacgctcaggatgcggggcgcatcaaatgggggtcagccgcctcgcgacttggttatgtagcgcccaagaagacggaggtccagggctgggggtgggaaggccgtatcgaagatgccgaggcgatcaaaaacgacactgcagcggggtggctgcggaaggcgaagggcaggaaatgggatgcggttacgcttaccgaagagagcaggcggaagttcgaggaggatgggcgtcggtgttgggaggagcttgagagccttcgtatcgcgtgggaagaggctctgaagcagggcaaggtatgatataatatgcacgctagaccattgatatttcgggaaaatgctcgcgaagatgcgagagatatacatatgatgagatggtgcacatattacatatatactacctagtatagcgtctgcattagttgatggactattcaaccagtgcgcttatgataatgaaaacatcaatacatgcctttcatgcctcatttaatattgtgacacatacacacccgcgcatatgtaagtgcgcagcaattgaaacccaagaaatatagtgatatcacatctgcctccacaatcacgcccccaaacgccgccgccaataccgaaactcccattcctgcccccaaggttccatcacatcgttacatcacatcaagcctgctcagtgcccgcatcactctccctcctcctagcctcctcatcgctcaaggctcgtctcatgacaaccttgtccttcctcccaaacaaccccaaagacatcggtagcggcacgacggcgagtccgatgacggcgctgaagatcaacgctcggttgaggttgtacggcggatttgcgttttcgccatcgcgcagtgccgaggagatgatgacgaacacgccgccgagaagttgggagatggcccaggctacggtggaggtaatctctggggataaggggtaggtaagctcgcacatgaattctagggcgacgggcaggagggtgaaggcactggcaccgagaatggcgaggactacgtaggggccagctagatctcgcgtggcgggcacgaagacgaatgccaggagactgaggccgatgatggggacacagactttgatggcgaggaggaaggccttggtcttgtctaggatcggtgacgtgatggctgaggtgacgaggccgacgaagatcagaactgcgccggcgatgcccgcctcgtcggacgtgaaatcgtagggcaggaggatctggttgaggagtgaggatatgctgttgaagagggcgacgtagacggcgaaggggatggctattagccagagctcgacgtttttgagatgtgggatagctgctcgcagatcattgagggagaccttgggtcctgttcccgaggggcctggtggtgtgggaggccgcgagggaatgaagaatgccgggagggctatgactacggactgtggattttgtcagctgattgtgtttggaccatgaaaggtgagtgagacgtacgatgatggttgtgacgatgacagccaacgacacctcctcggctttcgtggccaaaaacgggacgacgagctgaccgatggcggcaccgaacgggttagccagactcgggagcgcggttgcggctacacggccacgggtcgaaaaccacatatccgagtaacgcgtgggtgcgatcaagatgaagggttgcgcgaacccgataaggatctgtccaaacatgacgacgccgaagttgcctccagacttggagtgcgagcccgccactcgaaccacattgccgatgatcaagaatacggcagctgaaatgatggaagcttttggcccaagatgtagcatatacatggccaatggcgaggctaacacaaaagcgaacagaaacgcggtggagaaccagttgatgtcagtctcggagtgtccataatacgctgctgcgtgttgagatacgggagagaatgtcagccactgcgaatgatgtcagtatccaattacatctttcaatgagttcagctgtcgtttccgtctcttgagattggtcatctgtcgagcgttgagtgcagtggcttgtggtgaggctaccaatgaactcgcgacgagaacgccatcgatcctcagctcgcggcgtacattgacatttcgaatacaatatatcgcagcccagaagaacgagtttaaaagcatagaacatctcacgcaaggaaacggtagagtaaggggaaacagagagacaagagttgtcgacttacatcccaactaacgataatattcatcagcgtcaagaccgcgagaccaacccacctcctcttatagaccttgtacacagtctgaatcgtcgtcgcctctccctgtgagttgatattttctatagcgctcgtcgacgcggccgccgacccaaaaccatcatccgagctcgacgcgaggcgctgcaacccgtccttgcgcgtgggcgaactcgacttcttcctgtcactcttcatatcgtccattgcgtacgcttcgcggatcttattgctcatctctatcgtgtctgcgttgctctgcataactcccgcttccgattctttcccgtttgacgatgagcctgaatcagacgccattcgtcgcctgcgttgaggaaagatcagatatcgaaagaggatgagattaggattcagattgacggatgaaaccgtcgctgaattgccgccagatgccgctagatgaagtcgatcccctgcctagaatgagggatagcgcatgcgctattgcgactaatattaggttgaatcctgtctgaaatccaagggttgcttcgtataatcaatatagggctgcttttcccttctctatgttgcgagtccagataagcagcctctcgatcaacgtctgccaattcgttatttttggagttcgatgcgatcgagcgggccggatttctcctcttgcgttaagacttggctaagtcgtcgttatctacctctacctcggtatgacaagtcactgcaggttatatggatctaatctcctagatcgaaggatgaatgtttaaaggaacagttaagtaaacatgaagacttttccttggctttgaattgaagatgtgtcctcgtcttgcgttggcgacgtcgcattcggttagacgggttgatgtttggatggatgaacggcggttaagttgtaatcccaaacttgtaacatgaaattacctggtagagcagtgtcatatgccaaaacaccgggcacaggtatcatttattgcgttgatctctcaagtgcacctgcaacccaagctgaacaaggaaggcatgtgtgtcctgcccatgcaataactgagacaacacagacaatcgacaactggcgtcgtgctatttcgcttgcctgttgccaatgttca

SEQ ID NO: 30757 - DNA, 315 bp, Muscodor strobelii
  misc_feature: SGI cDNA ID NO. 570581
  misc_feature: Reduced expression when VOC is produced
  misc_feature: Encodes the peptide sequence at SEQ ID NO 30758
atgttcacaatagatggccttctagctggcgtctgggccgtcgtggactggattactttcttctttaagctggcgagtcttgctttcgccgtccccttcatcggcctgatgatattcgacttctttctctggctctggcgatccatccgcccaccaccacgcgaatcacgtgcctctagtccgaatgcgaaacgagttcgacggaattcacctggtcaacccgattctccaacgaccacaagctccgccctcgctcctaataaagagttaaatggcaacgacagaagaacgccgtatgccacgcccgaatcatga

SEQ ID NO: 30758 - protein, 104 aa, Muscodor strobelii
  misc_feature: SGI Peptide ID NO. 570581
  misc_feature: Useful for introducing or modulating the production of volatile compounds
MFTIDGLLAGVWAVVDWITFFFKLASLAFAVPFIGLMIFDFFLWLWRSIRPPPRESRASSPNAKRVRRNSPGQPDSPTTTSSALAPNKELNGNDRRTPYATPES

SEQ ID NO: 30759 - DNA, 2308 bp, Muscodor strobelii
  misc_feature: SGI EST ID NO. CUFF.73017.1
  misc_feature: Variant of the nucleotide sequence at SEQ ID NO 30757
ttttgacttataatgactggagccactgcaatcttgaggcacctgtcggccttgagacactggccacgcccttttcttctattcgtgttctaagcacgatgagcaatgttgcagaatcgtgtcccaaataaaaaagtttagtggcgccctgctggcctgtcttctggtctgacacatgctcgtcgtaccttaataaataccttgcacctccactttactttcctttgccttggggcccaggaccccgcttcccacggttccctgccgtcgcgcgattgcgaatcctcaaacattaccatcgtgacagcgacatccaaatctatcatccagcttcgtgctctcctcctccgctttgccgttcatatcttgagctcttcatggatgactccgaacgtcgcttcgccatcctcttgtctcttgctgcaggataaggcggcgattattgttccaactctgacatcatcctcacctccaccaccccgcgcactgctagtaattctgctgccgaggctcacaactcgcttcattcaccatgttcacaatagatggccttctagctggcgtctgggccgtcgtggactggattactttcttctttaagctggcgagtcttgctttcgccgtccccttcatcggcctgatgatattcgacttctttctctggctctggcgatccatccgcccaccaccacgcgaatcacgtgcctctagtccgaatgcgaaacgagttcgacggaattcacctggtcaacccgattctccaacgaccacaagctccgccctcgctcctaataaagagttaaatggcaacgacagaagaacgccgtatgccacgcccgaatcatgacgatgcgccacgaacctcgatgcgacaaggacgacgaatataattatgcgctctatatggagatccgccggagttcacttaatacatagataataacagcgaacagtctgcttttggccaggatattgatttgtctaccactttcgccattatatcattacagctatctatgcatctctatgcgatctgccccagcacctggatcaaatcgctggtcacgcccatggctgtcacctcgccgccggcgccggcgccctggatgatgagcgggttgctgccgtaccgcttggtgtagaagctgatgatattgtcgcttcccttgagcgccgcgatggggtgcgaccggtcgaacgtctccagcccaaccttgacgctcttggaggccacgtcgatgctgccgacgaagcgcaccaccttgccctgcgcctcggccgacgccttgacctcctccatctgcgagtcgaactggggcagcttctcgaggaactcgtcaccgctcgagacggactcgagctccttggggatcaggctctggacggggaaggaggtcggcgactcgacgggcaggccggcgtagcgggcgaggatggtgagcttgcgggcgacgtcgaggccgttgaggtcgtcgcgcgggtcgggctcggtgtagcccagctccttggccttcttgacttcggcagaccactgaccaccttgaccgtcgagcggggcgaacgagttgaagaggaaagacatggtgccgctaaagacaccctcgatcttggtgacctcgtctcccgtgtcgaccaggtccttgatggtggagatgatggggagccccgcgccgcaggaggactcgtggtagagcttggcgcccgaggtgccggcggcggtgaagatgtcctgccacagcttgtaggagccggagaaggccttcttgttaggggtgacgatgctgatgccgcggctaaggaagagagggtaggcgtcggcgacggcttgggagctcgtgttgtcgatgagcacggctttagagggcgccttggcgagatactctgccagcatggccaaggcgaaggggccattggcggaggagctgagctgctggagaacattgtcggtgttgagggcggcgtagtcatcgttgaagagagccttcttgctggtggagatgtaacagaggttgagcttcggggttggacgtcgaatggtaagagcagtgagctgattgaggaaacatttgcccactcctccggcacctgacgatagatgagcacaagtcagagatatacacccaacatatctaagcggtaatgataatgtaatggatcaacataccaatgatggcgatggagacttggttcggagtagcagccatcttgatcctactattagcttgtctgaaacaacaattggtgagaatacaatgactgcttgcgaagagacagttgaatatctgctcgtggtgggcgtggggtaaac

SEQ ID NO: 30760 - DNA, 1101 bp, Muscodor strobelii
  misc_feature: SGI cDNA ID NO. 570582
  misc_feature: Reduced expression when VOC is produced
  misc_feature: Encodes the peptide sequence at SEQ ID NO 30761
atggctgctactccgaaccaagtctccatcgccatcattggtgccggaggagtgggcaaatgtttcctcaatcagctcactgctcttaccattcgacgtccaaccccgaagctcaacctctgttacatctccaccagcaagaaggctctcttcaacgatgactacgccgccctcaacaccgacaatgttctccagcagctcagctcctccgccaatggccccttcgccttggccatgctggcagagtatctcgccaaggcgccctctaaagccgtgctcatcgacaacacgagctcccaagccgtcgccgacgcctaccctctcttccttagccgcggcatcagcatcgtcacccctaacaagaaggccttctccggctcctacaagctgtggcaggacatcttcaccgccgccggcacctcgggcgccaagctctaccacgagtcctcctgcggcgcggggctccccatcatctccaccatcaaggacctggtcgacacgggagacgaggtcaccaagatcgagggtgtctttagcggcaccatgtctttcctcttcaactcgttcgccccgctcgacggtcaaggtggtcagtggtctgccgaagtcaagaaggccaaggagctgggctacaccgagcccgacccgcgcgacgacctcaacggcctcgacgtcgcccgcaagctcaccatcctcgcccgctacgccggcctgcccgtcgagtcgccgacctccttccccgtccagagcctgatccccaaggagctcgagtccgtctcgagcggtgacgagttcctcgagaagctgccccagttcgactcgcagatggaggaggtcaaggcgtcggccgaggcgcagggcaaggtggtgcgcttcgtcggcagcatcgacgtggcctccaagagcgtcaaggttgggctggagacgttcgaccggtcgcaccccatcgcggcgctcaagggaagcgacaatatcatcagcttctacaccaagcggtacggcagcaacccgctcatcatccagggcgccggcgccggcggcgaggtgacagccatgggcgtgaccagcgatttgatccaggtgctggggcagatcgcatag

SEQ ID NO: 30761 - protein, 366 aa, Muscodor strobelii
  misc_feature: SGI Peptide ID NO. 570582
  misc_feature (156)..(359): Pfam Id: PF00742 Pfam Desc: Homoserine dehydrogenase
  misc_feature (14)..(148): Pfam Id: PF03447 Pfam Desc: Homoserine dehydrogenase, NAD binding domain
  misc_feature (92)..(148): Pfam Id: PF03447 Pfam Desc: Homoserine dehydrogenase, NAD binding domain
  misc_feature (3)..(366): NCBI GI: 145610643 Blast Desc: MGG_11450 [Magnaporthe grisea 70-15] gi|145018025|gb|EDK02304.1| MGG_11450 [Magnaporthe grisea 70-15]
  misc_feature (2)..(366): NCBI GI: 116202569 Blast Desc: conserved [Chaetomium globosum CBS 148.51] gi|88177687|gb|EAQ85155.1| conserved [Chaetomium globosum CBS 148.51]
  misc_feature (1)..(366): NCBI GI: 46134289 Blast Desc: FG09284.1 [Gibberella zeae PH-1]
  misc_feature (3)..(366): NCBI GI: 256727144 Blast Desc: [Nectria haematococca mpVI 77-13-4]
  misc_feature (1)..(366): NCBI GI: 261359673 Blast Desc: homoserine dehydrogenase [Verticillium albo-atrum VaMs.102]
  misc_feature (3)..(365): NCBI GI: 85085800 Blast Desc: homoserine dehydrogenase [Neurospora crassa OR74A] gi|11250969|pir||T49733 homoserine dehydrogenase [imported] - Neurospora crassa gi|28918667|gb|EAA28338.1| homoserine crassa
  misc_feature (6)..(366): NCBI GI: 154304009 Blast Desc: BC1G_09640 [Botryotinia fuckeliana B05.10] gi|150854275|gb|EDN29467.1| BC1G_09640 [Botryotinia fuckeliana B05.10]
  misc_feature (6)..(366): NCBI GI: 156030657 Blast Desc: SS1G_14424 [Sclerotinia sclerotiorum 1980] gi|154700815|gb|EDO00554.1| SS1G_14424 [Sclerotinia sclerotiorum 1980]
  misc_feature (1)..(366): NCBI GI: 169764345 Blast Desc: [Aspergillus oryzae RIB40] gi|83764498|dbj|BAE54642.1| protein product [Aspergillus oryzae]
  misc_feature (1)..(366): NCBI GI: 238504428 Blast Desc: homoserine dehydrogenase, [Aspergillus flavus NRRL3357] gi|220690916|gb|EED47265.1| homoserine dehydrogenase, [Aspergillus flavus NRRL3357]
  misc_feature (21)..(365): SWISSPROT Homolog: EC 1.1.1.3 Homoserine dehydrogenase
  misc_feature: Useful for introducing or modulating the production of volatile compounds
MAATPNQVSIAIIGAGGVGKCFLNQLTALTIRRPTPKLNLCYISTSKKALFNDDYAALNTDNVLQQLSSSANGPFALAMLAEYLAKAPSKAVLIDNTSSQAVADAYPLFLSRGISIVTPNKKAFSGSYKLWQDIFTAAGTSGAKLYHESSCGAGLPIISTIKDLVDTGDEVTKIEGVFSGTMSFLFNSFAPLDGQGGQWSAEVKKAKELGYTEPDPRDDLNGLDVARKLTILARYAGLPVESPTSFPVQSLIPKELESVSSGDEFLEKLPQFDSQMEEVKASAEAQGKVVRFVGSIDVASKSVKVGLETFDRSHPIAALKGSDNIISFYTKRYGSNPLIIQGAGAGGEVTAMGVTSDLIQVLGQIA

SEQ ID NO: 30762 - DNA, 2324 bp, Muscodor strobelii
  misc_feature: SGI EST ID NO. CUFF.73018.0
  misc_feature: Variant of the nucleotide sequence at SEQ ID NO 30760
gtttaccccacgcccaccacgagcagatattcaactgtctcttcgcaagcagtcattgtattctcaccaattgttgtttcagacaagctaatagtaggatcaagatggctgctactccgaaccaagtctccatcgccatcattggtgccggaggagtgggcaaatgtttcctcaatcagctcactgctcttaccattcgacgtccaaccccgaagctcaacctctgttacatctccaccagcaagaaggctctcttcaacgatgactacgccgccctcaacaccgacaatgttctccagcagctcagctcctccgccaatggccccttcgccttggccatgctggcagagtatctcgccaaggcgccctctaaagccgtgctcatcgacaacacgagctcccaagccgtcgccgacgcctaccctctcttccttagccgcggcatcagcatcgtcacccctaacaagaaggccttctccggctcctacaagctgtggcaggacatcttcaccgccgccggcacctcgggcgccaagctctaccacgagtcctcctgcggcgcggggctccccatcatctccaccatcaaggacctggtcgacacgggagacgaggtcaccaagatcgagggtgtctttagcggcaccatgtctttcctcttcaactcgttcgccccgctcgacggtcaaggtggtcagtggtctgccgaagtcaagaaggccaaggagctgggctacaccgagcccgacccgcgcgacgacctcaacggcctcgacgtcgcccgcaagctcaccatcctcgcccgctacgccggcctgcccgtcgagtcgccgacctccttccccgtccagagcctgatccccaaggagctcgagtccgtctcgagcggtgacgagttcctcgagaagctgccccagttcgactcgcagatggaggaggtcaaggcgtcggccgaggcgcagggcaaggtggtgcgcttcgtcggcagcatcgacgtggcctccaagagcgtcaaggttgggctggagacgttcgaccggtcgcaccccatcgcggcgctcaagggaagcgacaatatcatcagcttctacaccaagcggtacggcagcaacccgctcatcatccagggcgccggcgccggcggcgaggtgacagccatgggcgtgaccagcgatttgatccaggtgctggggcagatcgcatagagatgcatagatagctgtaatgatataatggcgaaagtggtagacaaatcaatatcctggccaaaagcagactgttcgctgttattatctatgtattaagtgaactccggcggatctccatatagagcgcataattatattcgtcgtccttgtcgcatcgaggttcgtggcgcatcgtcatgattcgggcgtggcatacggcgttcttctgtcgttgccatttaactctttattaggagcgagggcggagcttgtggtcgttggagaatcgggttgaccaggtgaattccgtcgaactcgtttcgcattcggactagaggcacgtgattcgcgtggtggtgggcggatggatcgccagagccagagaaagaagtcgaatatcatcaggccgatgaaggggacggcgaaagcaagactcgccagcttctacaaccgagtttccttgaattagcttggattcggaagcatgctagctggaccttatcgatgtcattactcacaaagaagaaagtaatccagtccacgacggcccagacgccagctagaaggccatctattgtgaacatggtgaatgaagcgagttgtgagcctcggcagcagaattactagcagtgcgcggggtggtggaggtgaggatgatgtcagagttggaacaataatcgccgccttatcctgcagcaagagacaagaggatggcgaagcgacgttcggagtcatccatgaagagctcaagatatgaacggcaaagcggaggaggagagcacgaagctggatgatagatttggatgtcgctgtcacgatggtaatgtttgaggattcgcaatcgcgcgacggcagggaaccgtgggaagcggggtcctgggccccaaggcaaaggaaagtaaagtggaggtgcaaggtatttattaaggtacgacgagcatgtgtcagaccagaagacaggccagcagggcgccactaaacttttttatttgggacacgattctgcaacattgctcatcgtgcttagaacacgaatagaagaaaagggcgtggccagtgtctcaaggccgacaggtgcctcaagattgcagtggctccagtcattataagtcaaaaaggcacctcggcaatgcgtca

SEQ ID NO: 30763 - DNA, 960 bp, Muscodor strobelii
  misc_feature: SGI cDNA ID NO. 570583
  misc_feature: Encodes the peptide sequence at SEQ ID NO 30764
atgccccaagatccaaacctctatggccaacggccggccaagaaacagaagaaagacaataccctgtccagctccctgacattcgcctcggagctatcgagcttactctccgacccatcatcatcggctggtataagcgcaggccgtgcgcgcccctcaaagacaaagggcgacatcttctctacaaggaagcgcaaagacgaaccccgaggcaagaaagacgagcccagcagcaacaagatccaaataaaagacatccgcggcaccgaagaagaaaaacaggaccatgcccgcgcaaggaggaagatggaggagaaggcgcggctgtacaatgccatgaagagaggtgactacatcgccaaagacaacgaagccgcgccgctcgtcgactttgatcgcaagtgggccgagcgccatcctgatgatcccgatgccgacccgaaccgctactctagctcgggtagcgataacgaatctgaagacgatggcggtgccggtgtagagatggtcgagttcagggacgaagagcttgaggacatggccgcgaagcccaaggcgcctcagaatgtcatctatggagacacaatccaacaccatgcattcagcctcgacgccgaaacccaggataagatggccgagttggcggccaagagagataaggagcctaccccaccgccagatacgcacttcgacggccacgccgagatcaggaataagggcatgggcttctatcacttctccaaggatgaggacgagagagtcaaacagatgagcaatctcgagaaggagagggagaacaccgaaagaattagacgggagagggaagaggaaagacaaaagaggaaaagggagatcgaggagaggaggaagaaggttggagagagaagggctgagaaactggctgatagctttctcgacgggttggccggtgagattggtgcgaaacagaccaacccttag

SEQ ID NO: 30764 - protein, 319 aa, Muscodor strobelii
  misc_feature: SGI Peptide ID NO. 570583
  misc_feature (1)..(310): NCBI GI: 46134291 Blast Desc: FG09285.1 [Gibberella zeae PH-1]
  misc_feature (1)..(310): NCBI GI: 256727723 Blast Desc: NECHADRAFT_76833 [Nectria haematococca mpVI 77-13-4]
  misc_feature (1)..(318): NCBI GI: 261359664 Blast Desc: conserved [Verticillium albo-atrum VaMs.102]
  misc_feature (1)..(308): NCBI GI: 116202571 Blast Desc: CHGG_09170 [Chaetomium globosum CBS 148.51] gi|88177688|gb|EAQ85156.1| CHGG_09170 [Chaetomium globosum CBS 148.51]
  misc_feature (1)..(314): NCBI GI: 39973663 Blast Desc: MGG_01022 [Magnaporthe grisea 70-15] gi|145018024|gb|EDK02303.1| MGG_01022 [Magnaporthe grisea 70-15]
  misc_feature (3)..(312): NCBI GI: 169610553 Blast Desc: SNOG_08380 [Phaeosphaeria nodorum SN15] gi|111063536|gb|EAT84656.1| SNOG_08380 [Phaeosphaeria nodorum SN15]
  misc_feature (1)..(304): NCBI GI: 85085788 Blast Desc: NCU03932 [Neurospora crassa OR74A] gi|11359482|pir||T49730 B24B19.20 [imported] - Neurospora crassa gi|28918664|gb|EAA28335.1| conserved [Neurospora crassa OR74A]
  misc_feature (1)..(309): NCBI GI: 156030655 Blast Desc: SS1G_14423 [Sclerotinia sclerotiorum 1980] gi|154700814|gb|EDO00553.1| SS1G_14423 [Sclerotinia sclerotiorum 1980]
  misc_feature (1)..(308): NCBI GI: 119187227 Blast Desc: CIMG_03661 [Coccidioides immitis RS]
  misc_feature (1)..(305): NCBI GI: 240108271 Blast Desc: CPC735_006170 [Coccidioides posadasii C735 delta SOWgp]
MPQDPNLYGQRPAKKQKKDNTLSSSLTFASELSSLLSDPSSSAGISAGRARPSKTKGDIFSTRKRKDEPRGKKDEPSSNKIQIKDIRGTEEEKQDHARARRKMEEKARLYNAMKRGDYIAKDNEAAPLVDFDRKWAERHPDDPDADPNRYSSSGSDNESEDDGGAGVEMVEFRDEELEDMAAKPKAPQNVIYGDTIQHHAFSLDAETQDKMAELAAKRDKEPTPPPDTHFDGHAEIRNKGMGFYHFSKDEDERVKQMSNLEKERENTERIRREREEERQKRKREIEERRKKVGERRAEKLADSFLDGLAGEIGAKQTNP

SEQ ID NO: 30765 - DNA, 804 bp, Muscodor strobelii
  misc_feature: SGI cDNA ID NO. 570584
  misc_feature: Encodes the peptide sequence at SEQ ID NO 30766
atgtctgagcccaccggtctcgtcgccaagagtggcattgagctcctcactttcggcacacctaatggctacaaagccagtatcctccttgaggagctcaaggaagcttatggcaaggagtacacttggcaatctatcaacatcatgaagaatacgcaaaaggagccctggtttactgccgtcggcgccaacggccgtatcccagctatcgtagatcacgaccgtggtgacttcccggttttcgagggtctcgccatcttgggatatttgaccagacgttacgacccggagcacaagttcagctttcctgtagacagcaacgagtatgacgaggccgagacgtggatggcgtggcagcatggcggcctgggccccatgcaaggacaggctaaccactttttccgcttcgccaaggagaagatcccctatggcatccagcgctacgttggcgagaccgagcgtctgtatggtgtcctgaacacgagactcgagggccgcgactggatcgtcggaaacaagtacagtatcgccgatatcaaccttgtcggttgggtccaaggcgctgctatggtcaatatcgacctagagaagcagttccctaacatcgcgaagtggctggataggatcttggagagacctgcggtcaagaagggtttcgctgtcccctacgaaaaccccttcgcttacaagaaggccagggaggatatcaagaatgatcccgagaagaagaaggcgtatgaggagagcgagaagctcctcaatgacgcaaaggagaagtatgggtataagtatgcccctgtttaa

SEQ ID NO: 30766 - protein, 267 aa, Muscodor strobelii
  misc_feature: SGI Peptide ID NO. 570584
  misc_feature (125)..(213): Pfam Id: PF00043 Pfam Desc: Glutathione S-transferase, C-terminal domain
  misc_feature (154)..(213): Pfam Id: PF00043 Pfam Desc: Glutathione S-transferase, C-terminal domain
  misc_feature (1)..(262): NCBI GI: 116202485 Blast Desc: CHGG_09127 [Chaetomium globosum CBS 148.51] gi|88177645|gb|EAQ85113.1| CHGG_09127 [Chaetomium globosum CBS 148.51]
  misc_feature (2)..(265): NCBI GI: 156030689 Blast Desc: SS1G_14440 [Sclerotinia sclerotiorum 1980] gi|154700831|gb|EDO00570.1| SS1G_14440 [Sclerotinia sclerotiorum 1980]
  misc_feature (3)..(265): NCBI GI: 189188654 Blast Desc: glutathione S-transferase II [Pyrenophora tritici-repentis Pt-1C-BFP] gi|187972272|gb|EDU39771.1| glutathione S-transferase II [Pyrenophora tritici-repentis
  misc_feature (1)..(265): NCBI GI: 256727148 Blast Desc: NECHADRAFT_33795 [Nectria haematococca mpVI 77-13-4]
  misc_feature (2)..(265): NCBI GI: 154304019 Blast Desc: BC1G_09645 [Botryotinia fuckeliana B05.10] gi|150854280|gb|EDN29472.1| BC1G_09645 [Botryotinia fuckeliana B05.10]
  misc_feature (1)..(265): NCBI GI: 46134279 Blast Desc: FG09279.1 [Gibberella zeae PH-1]
  misc_feature (3)..(222): NCBI GI: 156065385 Blast Desc: SS1G_00703 [Sclerotinia sclerotiorum 1980] gi|154691562|gb|EDN91300.1| SS1G_00703 [Sclerotinia sclerotiorum 1980]
  misc_feature (4)..(265): NCBI GI: 169612846 Blast Desc: SNOG_09550 [Phaeosphaeria nodorum SN15] gi|160702595|gb|EAT82815.2| SNOG_09550 [Phaeosphaeria nodorum SN15]
  misc_feature (13)..(261): NCBI GI: 169594974 Blast Desc: SNOG_00220 [Phaeosphaeria nodorum SN15] gi|160700985|gb|EAT91715.2| SNOG_00220 [Phaeosphaeria nodorum SN15]
  misc_feature (9)..(222): NCBI GI: 256728538 Blast Desc: [Nectria haematococca mpVI 77-13-4]
  misc_feature (21)..(219): SWISSPROT Homolog: EC 2.5.1.18 Glutathione transferase
MSEPTGLVAKSGIELLTFGTPNGYKASILLEELKEAYGKEYTWQSINIMKNTQKEPWFTAVGANGRIPAIVDHDRGDFPVFEGLAILGYLTRRYDPEHKFSFPVDSNEYDEAETWMAWQHGGLGPMQGQANHFFRFAKEKIPYGIQRYVGETERLYGVLNTRLEGRDWIVGNKYSIADINLVGWVQGAAMVNIDLEKQFPNIAKWLDRILERPAVKKGFAVPYENPFAYKKAREDIKNDPEKKKAYEESEKLLNDAKEKYGYKYAPV

SEQ ID NO: 30767 - DNA, 1579 bp, Muscodor strobelii
  misc_feature: SGI EST ID NO. CUFF.73209.0
  misc_feature: Variant of the nucleotide sequence at SEQ ID NO 30765
caaagtctcaggagcttgggacagctcatgcagttgtttggaatccttacctctgagcacatgggtcgatgatttcgtgattataaaccaccaagaagttacaacaccattgaagcagcatttaccgtgattggacatcagcattccaaccccgccccaaaacgcctatagctgcgtcttctagatcctgccttgcatgccgtcgatatagagtttctgtacccgttcgcgtcgtaccaattgcgtgctgcagcctgttgcttaataaaataagacgtgcttaggaagccacaagcttcacgactcctcaatgccttcccaccagccgatcttgacatcacttcggcatataagaacagtcacctcccgcacatcatcacgacattttgttacttccccatgctccattcccaaatccaactttcgacctcatcaactttctctgcaaacctcagtactacgataccctccaagagctttgtactctactacgtcaccgcgcctctcttctaagtcagcagtttcggaacaagaacaagaagccgaagacatgtctgagcccaccggtctcgtcgccaagagtggcattgagctcctcactttcggcacacctaatggctacaaagccagtatcctccttgaggagctcaaggaagcttatggcaaggagtacacttggcaatctatcaacatcatgaagaatacgcaaaaggagccctggtttactgccgtcggcgccaacggccgtatcccagctatcgtagatcacgaccgtggtgacttcccggttttcgagggtctcgccatcttgggatatttgaccagacgttacgacccggagcacaagttcagctttcctgtagacagcaacgagtatgacgaggccgagacgtggatggcgtggcagcatggcggcctgggccccatgcaaggacaggctaaccactttttccgcttcgccaaggagaagatcccctatggcatccagcgctacgttggcgagaccgagcgtctgtatggtgtcctgaacacgagactcgagggccgcgactggatcgtcggaaacaagtacagtatcgccgatatcaaccttgtcggttgggtccaaggcgctgctatggtcaatatcgacctagagaagcagttccctaacatcgcgaagtggctggataggatcttggagagacctgcggtcaagaagggtttcgctgtcccctacgaaaaccccttcgcttacaagaaggccagggaggatatcaagaatgatcccgagaagaagaaggcgtatgaggagagcgagaagctcctcaatgacgcaaaggagaagtatgggtataagtatgcccctgtttaaagacgacgggatagttctgtatcattagtgttaggtccaatcaatgagatgcggaagcgattctggttgatttggttaaaatgatgcttatgaactcgtgatacgatgttatggattgttaaaaggcaaacaaagtgagctcgactgattagctaaggatgattggaaatttgcgttgctataagatcgtgttgaactgctaatgttaaacctacatcgttccgg

SEQ ID NO: 30768 - DNA, 210 bp, Muscodor strobelii
  misc_feature: SGI cDNA ID NO. 570585
  misc_feature: Reduced expression when VOC is produced
  misc_feature: Encodes the peptide sequence at SEQ ID NO 30769
atgcctttcatcacacccaactcaacctcatcggatgtaccaccacctagctcggagaaccagcattcagaaacgcctgcaccgactggcgctggtgtaaacacgggcgcaggaaccatacgcgagaagaccgaagctgagctcggagcggatcgtctctacgaagaagccatggaggaagagtatgcgaagcgagagggcggcgcatag

SEQ ID NO: 30769 - protein, 69 aa, Muscodor strobelii
  misc_feature: SGI Peptide ID NO. 570585
  misc_feature (5)..(69): NCBI GI: 164426602 Blast Desc: NCU03904 [Neurospora crassa OR74A] gi|16945425|emb|CAB91680.2| [Neurospora crassa] gi|157071402|gb|EAA28307.2| conserved [Neurospora crassa OR74A]
  misc_feature (28)..(69): NCBI GI: 116202483 Blast Desc: [Chaetomium globosum CBS 148.51] gi|88177644|gb|EAQ85112.1| [Chaetomium globosum CBS 148.51]
  misc_feature (6)..(69): NCBI GI: 154292739 Blast Desc: [Botryotinia fuckeliana B05.10] gi|150845836|gb|EDN21029.1| [Botryotinia fuckeliana B05.10]
  misc_feature (5)..(69): NCBI GI: 156053483 Blast Desc: [Sclerotinia sclerotiorum 1980] gi|154704687|gb|EDO04426.1| [Sclerotinia sclerotiorum 1980]
  misc_feature (7)..(69): NCBI GI: 169611556 Blast Desc: SNOG_08892 [Phaeosphaeria nodorum SN15] gi|111062940|gb|EAT84060.1| SNOG_08892 [Phaeosphaeria nodorum SN15]
  misc_feature (16)..(69): NCBI GI: 46134241 Blast Desc: FG09260.1 [Gibberella zeae PH-1]
  misc_feature (25)..(69): NCBI GI: 261359653 Blast Desc: conserved [Verticillium albo-atrum VaMs.102]
  misc_feature: Useful for introducing or modulating the production of volatile compounds
MPFITPNSTSSDVPPPSSENQHSETPAPTGAGVNTGAGTIREKTEAELGADRLYEEAMEEEYAKREGGA

SEQ ID NO: 30770 - DNA, 1242 bp, Muscodor strobelii
  misc_feature: SGI cDNA ID NO. 570586
  misc_feature: Encodes the peptide sequence at SEQ ID NO 30771
atgtccgatctcccagttctcatcatcggcgcaggcgtgagcggccttctgctcgcccagcatctcaagaaacaagagattccttatgaaatctttgagcgtgatacctctttcgacactcgtggagtcggctggggtctgacgttgcactggtccctagatcccttgagatccttgatcccagatgagttggtagcagatctgccgtacgcctatgcggaccgcatttctgtcgagaaaggcattatggcgaaagctccctattacgacctgaccactgggactcgcattacagaaacaaaatccgatgcgctcaaggtgcgagtcacgagagatagacttcgacatcttctcgccaagggtctcgacattcagtggggcaaatcattccatagcttccaagacgacggtgattctgtaaccgtcacctttgacgatgggggcaagcgtactgggcgtctgctagtcggtgctgatggggctagttcgagggtccgccgggcacttcatcctgatatcggccgaacctatcatctgccagtcaatgtcaccggcatcaagctggttgctaaacctgagcaagttgagtcaatcagacagctggacccttactacttttccggtgtcgctcacaacaacacgttcttgtacactagtattctggatgcacctggaagcaacgaagatagcggagacacttatacgatgcaagtgagcgtgtcttgggagccaagagcgggtctcctgggccgtgaggagccactcgaattccctgatagccaggaagagagacatgctctgattcgtgagatcgccgacacctggacggagccattcaggtcgttcattcacaacatccctaaggagactgaggttcagattttggttgtgcaagattatatcccccctctggactttaagcagaaggggcgagtcaccttgatgggcgactctgtacatgctatggctatgtaccgaggagaaggtgccaaccacgccatctacgacatctatgagttctcgaagagagtaactccttatctggccaaaaacacaatgccagacctccgagatgccctcgatgagttcgaggagacggtggctaagcggacacatccagccgtgatggcttcgagaagagcttgcttagatgcacatgaattcgagcgggttaatgagaagagtcctctgttcctgaagcgagcaccttgggttgagtttactgatgcggagatggaatga

SEQ ID NO: 30771 - protein, 413 aa, Muscodor strobelii
  misc_feature: SGI Peptide ID NO. 570586
  misc_feature (3)..(378): Pfam Id: PF01494 Pfam Desc: FAD binding domain
  misc_feature (108)..(169): Pfam Id: PF01494 Pfam Desc: FAD binding domain
  misc_feature (1)..(411): NCBI GI: 261357852 Blast Desc: FAD binding domain-containing protein [Verticillium albo-atrum VaMs.102]
  misc_feature (2)..(403): NCBI GI: 256728307 Blast Desc: NECHADRAFT_97732 [Nectria haematococca mpVI 77-13-4]
  misc_feature (5)..(413): NCBI GI: 171681064 Blast Desc: protein product [Podospora anserina] gi|170940490|emb|CAP65718.1| protein product [Podospora anserina]
  misc_feature (3)..(413): NCBI GI: 46139133 Blast Desc: FG11081.1 [Gibberella zeae PH-1]
  misc_feature (5)..(413): NCBI GI: 116191351 Blast Desc: CHGG_05393 [Chaetomium globosum CBS 148.51] gi|88181306|gb|EAQ88774.1| CHGG_05393 [Chaetomium globosum CBS 148.51]
  misc_feature (1)..(401): NCBI GI: 145254293 Blast Desc: An18g01240 [Aspergillus niger] gi|134084166|emb|CAK47199.1| protein product [Aspergillus niger]
  misc_feature (1)..(401): NCBI GI: 119467073 Blast Desc: FAD binding domain protein [Neosartorya fischeri NRRL 181] gi|119405495|gb|EAW15446.1| FAD binding domain protein [Neosartorya fischeri NRRL 181]
  misc_feature (4)..(401): NCBI GI: 238505563 Blast Desc: FAD binding domain protein [Aspergillus flavus NRRL3357] gi|220690115|gb|EED46465.1| FAD binding domain protein [Aspergillus flavus NRRL3357]
  misc_feature (1)..(401): NCBI GI: 121704254 Blast Desc: FAD binding domain protein [Aspergillus clavatus NRRL 1] gi|119398535|gb|EAW08965.1| FAD binding domain protein [Aspergillus clavatus NRRL 1]
  misc_feature (1)..(401): NCBI GI: 255953751 Blast Desc: Pc21g05830 [Penicillium chrysogenum Wisconsin 54-1255] gi|211589339|emb|CAP95480.1| Pc21g05830 [Penicillium chrysogenum Wisconsin 54-1255]
  misc_feature (4)..(389): SWISSPROT Homolog: EC 1.14.13.90 Zeaxanthin epoxidase
MSDLPVLIIGAGVSGLLLAQHLKKQEIPYEIFERDTSFDTRGVGWGLTLHWSLDPLRSLIPDELVADLPYAYADRISVEKGIMAKAPYYDLTTGTRITETKSDALKVRVTRDRLRHLLAKGLDIQWGKSFHSFQDDGDSVTVTFDDGGKRTGRLLVGADGASSRVRRALHPDIGRTYHLPVNVTGIKLVAKPEQVESIRQLDPYYFSGVAHNNTFLYTSILDAPGSNEDSGDTYTMQVSVSWEPRAGLLGREEPLEFPDSQEERHALIREIADTWTEPFRSFIHNIPKETEVQILVVQDYIPPLDFKQKGRVTLMGDSVHAMAMYRGEGANHAIYDIYEFSKRVTPYLAKNTMPDLRDALDEFEETVAKRTHPAVMASRRACLDAHEFERVNEKSPLFLKRAPWVEFTDAEME

SEQ ID NO: 30772 - DNA, 2725 bp, Muscodor strobelii
  misc_feature: SGI EST ID NO. CUFF.73150.0
  misc_feature: Variant of the nucleotide sequence at SEQ ID NO 30770
tgtgtcgccatgctttccgggttgttttatggaagcgctgtccgaggccgagtcatacggtccattttcgcttgaccatgaccgatgtgacgacatcaattaaagaatcgcactgtcgcgtactgaaccaggatggcagcttgtgataaaatcatgcttgacccagcatctggtcctgcgttggctggctttgatcttcatccagactcactattatctgacaagtcatatatccatttgccggcatgtccgatctcccagttctcatcatcggcgcaggcgtgagcggccttctgctcgcccagcatctcaagaaacaagagattccttatgaaatctttgagcgtgatacctctttcgacactcgtggagtcggctggggtctgacgttgcactggtccctagatcccttgagatccttgatcccagatgagttggtagcagatctgccgtacgcctatgcggaccgcatttctgtcgagaaaggcattatggcgaaagctccctattacgacctgaccactgggactcgcattacagaaacaaaatccgatgcgctcaaggtgcgagtcacgagagatagacttcgacatcttctcgccaagggtctcgacattcaggtatatacacctagctatttcagtccgctgctatccaccctgctgagctgactgatggttcttgaatacgtagtggggcaaatcattccatagcttccaagacgacggtgattctgtaaccgtcacctttgacgatgggggcaagcgtactgggcgtctgctagtcggtgctgatggggctagttcgagggtccgccgggcacttcatcctgatatcggccgaacctatcatctgccagtcaatgtcaccggcatcaagctggttgctaaacctgagcaagttgagtcaatcagacagctggacccttactacttttccggtgtcgctcacaacaacacgttcttgtacactagtattctggatgcacctggaagcaacgaagatagcggagacacttatacgatgcaagtgagcgtgtcttgggagccaagagcgggtctcctgggccgtgaggagccactcgaattccctgatagccaggaagagagacatgctctgattcgtgagatcgccgacacctggacggagccattcaggtcgttcattcacaacatccctaaggagactgaggttcagattttggttgtgcaagattatatcccccctctggactttaagcagaaggggcgagtcaccttgatgggcgactctgtacatgctatggctatgtaccgaggagaaggtgccaaccacgccatctacgacatctatgagttctcgaagagagtaactccttatctggccaaaaacacaatgccagacctccgagatgccctcgatgagttcgaggagacggtggctaagcggacacatccagccgtgatggcttcgagaagagcttgcttagatgcacatgaattcgagcgggttaatgagaagagtcctctgttcctgaagcgagcaccttgggttgagtttactgatgcggagatggaatgatcttagacgttgaatttaactatcatgttaattttaaatttaaaatctatcaggtatatagctttttaatggcaaagagttcaaatccggcttaaaaaagcggaaagcatacaaaattataagaattttataagatctttaattgttggtgtaatgaggtttgaacaataggtatttgaatattcgtatgcgcatgaacctctccggtattaggcatcacagatattttgtacacaaccaccccgtctcagtcagcagtcgtgtttcgcaattcatttgggagccgcaggattcacagacaacctcgatatgatcgcagttgcttgcaggatcacctctatagtagctttgggatccaagatcatggggagaaatactgaatagactccgctcatcgcacgctgtccgtatcgtgtcacccatcttcctgctgaagtgtgacaagaagtcgcggcttccatgtgggcgaacgttgcggtgcgacctgcagccttattctctgtacaaatgaatcacggcttccggcagactgtcacagttaacacaatacttaccacttgcctttcactagtcacaccgggttgaaatacccgccagtcgatcacactgtcacaaattattccgaatacttgacaaacatatcaatatcgccaagtgggaaaaaatgagtatgggaaggaggtatcattaagtcattgagtaaccatatatctctatgcgccgccctctcgcttcgcatactcttcctccatggcttcttcgtagagacgatccgctccgagctcagcttcggtcttctcgcgtatggttcctgcgcccgtgtttacaccagcgccagtcggtgcaggcgtttctgaatgctggttctccgagctaggtggtggtacatccgatgaggttgagttgggtgtgatgaaaggcattgtgttgagtggctctggttattgtagaatttctctgcaggtaggttgaaatggtagacgtagacgacgtagacgtttcccggccaaacaatagagaacagctggtttgagaagccctctaacaaaagaactgttagtagactcaacatataaattggaagtggttgagtttatataggtagcagttgagacctaggcgtggcggagcacttcactcgccactgtgacgaagcggatccacc

SEQ ID NO: 30773 - DNA, 747 bp, Muscodor strobelii
  misc_feature: SGI cDNA ID NO. 570587
  misc_feature: Encodes the peptide sequence at SEQ ID NO 30774
atgatgaacatcaacgatattctcacatcaaacaaacttgagagcgttgctctcggactggcggtcttgagcggctcattattggtcgctgccgctgtcgattaccacaactgggttgcctttggcacgggcggtacacctcccaatctccaaggttatctcaaaattaccaaatttcggattctgcgttggctctccaacgacgatctcaaagacgcatcacgcctaccatcagacgggctatcatacatcaaagggcagctccgtcgcagaacaggatcgcccccaaaaatcttcaggcgaacactgccgcagcgacaatttcccgaaccgctggacccggctatctacaagaaactacacgctctgccagagaaatatgctcaactttacagccagcagcttaagttagacaagtcaattaccgaggggcgctcgactgacgccatatacgccaagacggggcctacggacagcagcatcaagcgcgctcacgacaaggtcttaggcgacgagatcgcgcacgtgcatcctgctgagaactcgctgcatgtgtggctgacgccgacggacacgcgcaaggtcgtcgaggcgggatggggcgagagatttccgctcgcctcactcggcatggttcatgatgggtggacgtttgtctacgcgccgaggtctatggaggaagttgatgttattgaggatattgtcaaggctggtataggccatttgacaggtattcagattgaatga

SEQ ID NO: 30774 - protein, 248 aa, Muscodor strobelii
  misc_feature: SGI Peptide ID NO. 570587
  misc_feature (1)..(247): NCBI GI: 212537497 Blast Desc: conserved [Penicillium marneffei ATCC 18224] gi|210068646|gb|EEA22737.1| conserved [Penicillium marneffei ATCC 18224]
  misc_feature (34)..(247): NCBI GI: 242809053 Blast Desc: conserved [Talaromyces stipitatus ATCC 10500] gi|218715914|gb|EED15336.1| conserved [Talaromyces stipitatus ATCC 10500]
  misc_feature (34)..(247): NCBI GI: 58258249 Blast Desc: CNA01040 [Cryptococcus neoformans var. neoformans JEC21] gi|134106175|ref|XP_778098.1| CNBA1010 [Cryptococcus neoformans var. neoformans B-3501A] gi|50260801|gb|EAL23451.1|
  misc_feature (39)..(247): NCBI GI: 255943476 Blast Desc: Pc19g00080 [Penicillium chrysogenum Wisconsin 54-1255] gi|211587240|emb|CAP79424.1| Pc19g00080 [Penicillium chrysogenum Wisconsin 54-1255]
  misc_feature (34)..(248): NCBI GI: 189192512 Blast Desc: conserved [Pyrenophora tritici-repentis Pt-1C-BFP] gi|187974201|gb|EDU41700.1| conserved [Pyrenophora tritici-repentis Pt-1C-BFP]
  misc_feature (22)..(248): NCBI GI: 169606900 Blast Desc: SNOG_06500 [Phaeosphaeria nodorum SN15] gi|111065211|gb|EAT86331.1| SNOG_06500 [Phaeosphaeria nodorum SN15]
  misc_feature (34)..(247): NCBI GI: 156053103 Blast Desc: SS1G_06719 [Sclerotinia sclerotiorum 1980] gi|154704497|gb|EDO04236.1| SS1G_06719 [Sclerotinia sclerotiorum 1980]
  misc_feature (11)..(244): NCBI GI: 67900798 Blast Desc: AN7386.2 [Aspergillus nidulans FGSC A4] gi|40742567|gb|EAA61757.1| AN7386.2 [Aspergillus nidulans FGSC A4] gi|259483253|tpe|CBF78486.1| TPA: conserved [Aspergillus FGSC
  misc_feature (7)..(244): NCBI GI: 256730932 Blast Desc: NECHADRAFT_84660 [Nectria haematococca mpVI 77-13-4]
  misc_feature (5)..(246): NCBI GI: 258568862 Blast Desc: conserved [Uncinocarpus reesii 1704] gi|237906621|gb|EEP81022.1| conserved [Uncinocarpus reesii 1704]
MMNINDILTSNKLESVALGLAVLSGSLLVAAAVDYHNWVAFGTGGTPPNLQGYLKITKFRILRWLSNDDLKDASRLPSDGLSYIKGQLRRRTGSPPKIFRRTLPQRQFPEPLDPAIYKKLHALPEKYAQLYSQQLKLDKSITEGRSTDAIYAKTGPTDSSIKRAHDKVLGDEIAHVHPAENSLHVWLTPTDTRKVVEAGWGERFPLASLGMVHDGWTFVYAPRSMEEVDVIEDIVKAGIGHLTGIQIE

SEQ ID NO: 30775 - DNA, 1178 bp, Muscodor strobelii
  misc_feature: SGI EST ID NO. CUFF.72879.0
  misc_feature: Variant of the nucleotide sequence at SEQ ID NO 30773
ccaaggttatctcaaaattaccaaatttcggattctgcgttggctctccaacgacgatctcaaagacgcatcacgcctaccatcagacgggctatcatacatcaaagggcagctccgtcgcagaacaggatcgcccccaaaaatcttcaggcgaacactgccgcagcgacaatttcccgaaccgctggacccggctatctacaagaaactacacgctctgccagagaaatatgctcaactttacagccagcagcttaagttagacaagtcaattaccgaggggcgctcgactgacgccatatacgccaagacggggcctacggacagcagcatcaagcgcgctcacgacaaggtcttaggcgacgagatcgcgcacgtgcatcctgctgagaactcgctgcatgtgtggctgacgccgacggacacgcgcaaggtcgtcgaggcgggatggggcgagagatttccgctcgcctcactcggcatggttcatgatgggtggacgtttgtctacgcgccgaggtctatggaggaagttgatgttattgaggatattgtcaaggctggtataggccatttgacaggtattcagattgaatgagatcttatttacaggaagttgaaaggcatggcagtagggtaggaatgttttttttgggggggaggggggaagcggcgctctttgaagtgaatgtaggctgttatgtcagtagacacaatttcattatggcagcgatggcttcttggtttggctactgtaaaactcgctttagtactaagcaacgcaacatgatacaactccagacttaaataaatgagctgagattcaccacttagacgtagaaaatgaacgctatctgtccagcgcccaagccttcgtgatgtaagtttcaagcaatcttaccgcaccagcatgcatcgtgcgaacctcgcacgatctgtacggcgaactacaataatcgccgcatagagctctattcgttacttttaccattatttagtgcccctagtaagcgggcatcactgaagatactctgaaccaaaacaatttaatgacgaaaggcatctcggcccattggcttagtcgatcattccgagaccgagctattatccctccaagtgctgattcagcatcagcacatacaaggatgacttatcgagctactctacaactagcacta

SEQ ID NO: 30776 - DNA, 798 bp, Muscodor strobelii
  misc_feature: SGI cDNA ID NO. 570588
  misc_feature: Encodes the peptide sequence at SEQ ID NO 30777
atgacttccaatgaagtgctaaaggagtcacaggttcttcggaaacttgtcgccgcaaatcacattcttcacctccatggcgccgtcgatgcattcggtcatgtgtccgtgagacatcctcaagatccgtctgtctacattatgtgtgcctacatgcctccagccctcgtcgagacggaaaaggacctggtcgagtatcatgtcgatggcagcgctccggtccaccctgatgcgcctaaagggtattcggagaggtttatccacggtgagcttttcaagcgctacccggagatccatgccgttgtgcattctcacgcggaggccgttcagccatataccgtcggagtggacctggcgctatctccaatgatccacatggcagggttcatggggggtgacattaaggtttgggacattacaaaagagtatcaagagccttatcaacaagacatgttggtcaacaacgaagctctgggctcatctctggcggaatcattttcgaactctgggaaattagaggagacagttgtattgatgaagcgccatggatacacgactttcggcccagacatcgagacggccgtctatcgtgccatctacacgctcgtcaatgcaggcgtccagactcgggctcttacgattcagaatgcagctggcattaccgcaagcaaggttactggcctcaatgcccgacaggcacaagactgcaagaagatgactgaggctacgcaggataaggcgtggagactatggactcgggaggtggaaacaaaccagctatatactaatggtatctga

SEQ ID NO: 30777 - protein, 265 aa, Muscodor strobelii
  misc_feature: SGI Peptide ID NO. 570588
  misc_feature (14)..(224): Pfam Id: PF00596 Pfam Desc: Class II Aldolase and Adducin N-terminal domain
  misc_feature (11)..(263): NCBI GI: 169606902 Blast Desc: SNOG_06501 [Phaeosphaeria nodorum SN15] gi|160707105|gb|EAT86332.2| SNOG_06501 [Phaeosphaeria nodorum SN15]
  misc_feature (17)..(263): NCBI GI: 189192514 Blast Desc: class II aldolase [Pyrenophora tritici-repentis Pt-1C-BFP] gi|187974202|gb|EDU41701.1| class II aldolase [Pyrenophora tritici-repentis Pt-1C-BFP]
  misc_feature (7)..(263): NCBI GI: 242792609 Blast Desc: conserved [Talaromyces stipitatus ATCC 10500] gi|218718577|gb|EED17997.1| conserved [Talaromyces stipitatus ATCC 10500]
  misc_feature (12)..(263): NCBI GI: 169595356 Blast Desc: SNOG_00416 [Phaeosphaeria nodorum SN15] gi|111070791|gb|EAT91911.1| SNOG_00416 [Phaeosphaeria nodorum SN15]
  misc_feature (48)..(263): NCBI GI: 154298900 Blast Desc: BC1G_11697 [Botryotinia fuckeliana B05.10] gi|150857602|gb|EDN32794.1| BC1G_11697 [Botryotinia fuckeliana B05.10]
  misc_feature (5)..(264): NCBI GI: 171676934 Blast Desc: protein product [Podospora anserina] gi|170936534|emb|CAP61194.1| protein product [Podospora anserina]
  misc_feature (6)..(256): NCBI GI: 104781685 Blast Desc: class II aldolase [Pseudomonas entomophila L48] gi|95110672|emb|CAK15385.1| class II aldolase [Pseudomonas entomophila L48]
  misc_feature (52)..(263): NCBI GI: 189202614 Blast Desc: class II aldolase [Pyrenophora tritici-repentis Pt-1C-BFP] gi|187984742|gb|EDU50230.1| class II aldolase [Pyrenophora tritici-repentis Pt-1C-BFP]
  misc_feature (16)..(254): NCBI GI: 163858238 Blast Desc: aldolase domain-containing protein [Bordetella petrii DSM 12804] gi|163261966|emb|CAP44268.1| Aldolase domain protein, Class II [Bordetella petrii]
  misc_feature (9)..(260): NCBI GI: 78065842 Blast Desc: class II aldolase/adducin-like [Burkholderia sp. 383] gi|77966587|gb|ABB07967.1| Class II aldolase/adducin-like protein [Burkholderia sp. 383]
MTSNEVLKESQVLRKLVAANHILHLHGAVDAFGHVSVRHPQDPSVYIMCAYMPPALVETEKDLVEYHVDGSAPVHPDAPKGYSERFIHGELFKRYPEIHAVVHSHAEAVQPYTVGVDLALSPMIHMAGFMGGDIKVWDITKEYQEPYQQDMLVNNEALGSSLAESFSNSGKLEETVVLMKRHGYTTFGPDIETAVYRAIYTLVNAGVQTRALTIQNAAGITASKVTGLNARQAQDCKKMTEATQDKAWRLWTREVETNQLYTNGI

SEQ ID NO: 30778 - DNA, 1128 bp, Muscodor strobelii
  misc_feature: SGI EST ID NO. CUFF.72882.0
  misc_feature: Variant of the nucleotide sequence at SEQ ID NO 30776
cgagtaactcctgtttcgaggcaacctaagctaggctcagtgacgtcttcatcaaccgccacacacgagaggggaaacacagataaatagaacaaaatacgcagttatctgtctctctgtatagtattaggccatcgcatcttcgaatttgagcgacgatattcgcacagcctggcgtcttaccggataccacttgatagtgatacccggcagcaaaaattgttacgagaccgttcagcatcaaaaaaaagtcacctcgacagtgattttccccattcatgatgacttccaatgaagtgctaaaggaggttcttcggaaacttgtcgccgcaaatcacattcttcacctccatggcgccgtcgatgcattcggtcatgtgtccgtgagacatcctcaagatccgtctgtctacattatgtgtgcctacatgcctccagccctcgtcgagacggaaaaggacctggtcgagtatcatgtcgatggcagcgctccggtccaccctgatgcgcctaaagggtattcggagaggtttatccacggtgagcttttcaagcgctacccggagatccatgccgttgtgcattctcacgcggaggccgttcagccatataccgtcggagtggacctggcgctatctccaatgatccacatggcagggttcatggggggtgacattaaggtttgggacattacaaaagagtatcaagagccttatcaacaagacatgttggtcaacaacgaagctctgggctcatctctggcggaatcattttcgaactctgggaaattagaggagacagttgtattgatgaagcgccatggatacacgactttcggcccagacatcgagacggccgtctatcgtgccatctacacgctcgtcaatgcaggcgtccagactcgggctcttacgattcagaatgcagctggcattaccgcaagcaaggttactggcctcaatgcccgacaggcacaagactgcaagaagatgactgaggctacgcaggataaggcgtggagactatggactcgggaggtggaaacaaaccagctatatactaatggtatctgaagtaaccatttccattttagataagcttcaatgaaaggagaactttctacctggc

SEQ ID NO: 30779 - DNA, 1593 bp, Muscodor strobelii
  misc_feature: SGI cDNA ID NO. 570589
  misc_feature: Encodes the peptide sequence at SEQ ID NO 30780
atgacgaccattttcggaaacccgggctcgactgagcagccgatgctaaagaattttccgtccgacttctcctatatcttcggcttgcaggaggcatctgtcgtgggcatggccggcgggtattccgaagctgcgcggaagcctgtcctcgtcagtctgcatacttcagccgggactggaaatgcaatgggaacaatcgtaaccgcttttctgaccaaagttccgctggtgatcatcgccggacagcagacgagagaaatgctccttggcgagcccctgctcgccaacagagacgctacgatgctaccgcagccttacatcaagtggtcgtaccaaccggtgcgtgccgtcgatgtccccggcgccgtggcgaggggtatagccgtagcgacccaggcgcccatgggccccgtttatatctcggtgcccctcgatgactgggatgcgcccatgggtgatactcggctcgtcattcgtagcactagcacgaggtttggcccagacccgggacggcttgccgagtttgcgggacggatccgtaaatcaagaagagctgctctcgtcttcggagccgaagtggataaatcccttgcttgggatgccgctgtatctttagctgagcggctcgggtgtccggttttccaggctccgctctctgaacgcgtgacgttcccacatacacacgcgcttttcaaagggtcattccctgcggctcggggaccgatcgctaaaaccctgcaggagttcgatctcgtcctcattatcggggcagaagtcttccggtattacccctggattcccggtcctgtctgcccggacggagtggacctattgcacataactgaggaccccaacgatgcggccaaggccgtctgtggtgatagtctggtttccgatgttctgctggctttggacggtctgaacagtttactcgacgacttaacgttaccaacgaaagcaaaggtcgagccagaggtaaatgaaccgggtaacacggccgtcgtagggcacgagtcgcccaccgcaggccttatgacagcggcccaagcgttccaagtcgtcgcgaaagcacgacctgccgatgttattctcgtgcacgagacaccgtccaacacagccgatctgatgaaagcttggcgcaacgaccggcccgagtcatgcttcacattcggcagcggcggtctaggctggaacactccagcagcagtgggcgtggcgctggtccaacagcagcgaaacagcggcaggcatacggttcttgtagtcggagatggttccatccagtactcgattcagagcatatacaccgcggtgcagctgaagcttcggctgatctacttggtcccggataacagcgggtacactgtattaaaagagtttgcggttttagagaatacgcctagtgtgccctggctggatgttcctggcctgaatgttgctgctactgcggtgtcctttggatgtccggcatatcgcgcgaacaacgaaaaggaacttgagagtatgttcagggatgcgcttgatacggatggacctgtgttgatccaatttcctatagataggactccacggtcattgttggggtcgatttga

SEQ ID NO: 30780 - protein, 530 aa, Muscodor strobelii
  misc_feature: SGI Peptide ID NO. 570589
  misc_feature (367)..(517): Pfam Id: PF02775 Pfam Desc: Thiamine pyrophosphate enzyme, C-terminal TPP binding domain
  misc_feature (172)..(307): Pfam Id: PF00205 Pfam Desc: Thiamine pyrophosphate enzyme, central domain
  misc_feature (1)..(155): Pfam Id: PF02776 Pfam Desc: Thiamine pyrophosphate enzyme, N-terminal TPP binding domain
  misc_feature (391)..(517): Pfam Id: PF02775 Pfam Desc: Thiamine pyrophosphate enzyme, C-terminal TPP binding domain
  misc_feature (3)..(150): Pfam Id: PF02776 Pfam Desc: Thiamine pyrophosphate enzyme, N-terminal TPP binding domain
  misc_feature (1)..(527): NCBI GI: 225872954 Blast Desc: benzoylformate decarboxylase [Acidobacterium capsulatum ATCC 51196] gi|225793820|gb|ACO33910.1| benzoylformate decarboxylase [Acidobacterium capsulatum ATCC 51196]
  misc_feature (1)..(519): NCBI GI: 220904969 Blast Desc: thiamine pyrophosphate protein TPP binding domain protein [Desulfovibrio desulfuricans subsp. desulfuricans str. ATCC 27774] gi|219869268|gb|ACL49603.1| thiamine pyrophosphate
  misc_feature (1)..(519): NCBI GI: 212711351 Blast Desc: PROVALCAL_02423 [Providencia alcalifaciens DSM 30120] gi|212686080|gb|EEB45608.1| PROVALCAL_02423 [Providencia alcalifaciens DSM 30120]
  misc_feature (1)..(519): NCBI GI: 261345842 Blast Desc: benzoylformate decarboxylase [Providencia rustigianii DSM 4541] gi|282566332|gb|EFB71867.1| benzoylformate decarboxylase [Providencia rustigianii DSM 4541]
  misc_feature (1)..(527): NCBI GI: 183599820 Blast Desc: PROSTU_03333 [Providencia stuartii ATCC 25827] gi|188022088|gb|EDU60128.1| PROSTU_03333 [Providencia stuartii ATCC 25827]
  misc_feature (1)..(521): NCBI GI: 239907808 Blast Desc: benzoylformate decarboxylase [Desulfovibrio magneticus RS-1] gi|239797674|dbj|BAH76663.1| benzoylformate decarboxylase [Desulfovibrio magneticus RS-1]
  misc_feature (1)..(528): NCBI GI: 145589271 Blast Desc: thiamine pyrophosphate binding domain-containing protein [Polynucleobacter necessarius subsp. asymbioticus QLW-P1DMWA-1] gi|145047677|gb|ABP34304.1| thiamine pyrophosphate
  misc_feature (1)..(519): NCBI GI: 237748999 Blast Desc: thiamine pyrophosphate enzyme TPP binding domain-containing protein [Oxalobacter formigenes OXCC13] gi|229380361|gb|EEO30452.1| thiamine pyrophosphate enzyme TPP
  misc_feature (1)..(518): NCBI GI: 118470040 Blast Desc: benzoylformate decarboxylase [Mycobacterium smegmatis str. MC2 155] gi|118171327|gb|ABK72223.1| benzoylformate decarboxylase [Mycobacterium smegmatis str. MC2 155]
  misc_feature (1)..(518): NCBI GI: 158313264 Blast Desc: thiamine pyrophosphate binding domain-containing protein [Frankia sp. EAN1pec] gi|158108669|gb|ABW10866.1| thiamine pyrophosphate protein TPP binding domain protein sp.
  misc_feature (1)..(516): SWISSPROT Homolog: EC 4.1.1.7 Benzoylformate decarboxylase
MTTIFGNPGSTEQPMLKNFPSDFSYIFGLQEASVVGMAGGYSEAARKPVLVSLHTSAGTGNAMGTIVTAFLTKVPLVIIAGQQTREMLLGEPLLANRDATMLPQPYIKWSYQPVRAVDVPGAVARGIAVATQAPMGPVYISVPLDDWDAPMGDTRLVIRSTSTRFGPDPGRLAEFAGRIRKSRRAALVFGAEVDKSLAWDAAVSLAERLGCPVFQAPLSERVTFPHTHALFKGSFPAARGPIAKTLQEFDLVLIIGAEVFRYYPWIPGPVCPDGVDLLHITEDPNDAAKAVCGDSLVSDVLLALDGLNSLLDDLTLPTKAKVEPEVNEPGNTAVVGHESPTAGLMTAAQAFQVVAKARPADVILVHETPSNTADLMKAWRNDRPESCFTFGSGGLGWNTPAAVGVALVQQQRNSGRHTVLVVGDGSIQYSIQSIYTAVQLKLRLIYLVPDNSGYTVLKEFAVLENTPSVPWLDVPGLNVAATAVSFGCPAYRANNEKELESMFRDALDTDGPVLIQFPIDRTPRSLLGSI

SEQ ID NO: 30781 - DNA, 1524 bp, Muscodor strobelii
  misc_feature: SGI cDNA ID NO. 570590
  misc_feature: Encodes the peptide sequence at SEQ ID NO 30782
atgggtctccatcgagacggagcccacctagacctaccccctctagagaccgaaatacgccgccgagtctggtgggctattatgatcctcgatctccggtgcgcggaagagcgcgatacggaattcgcaaccagtgatcttatgttcgacaccaagatgccgctcagcattaacgactacactcttagcgtttcctcccaagaaacaccgacgtcggagataggatggtcggactgcgcagccgctgtggttcggtatgagtgtagtgtcttgctcaaacgggctctacgatccaagtttgctgcgggctcgtttgaaaaactcaatcaagacctggaagaatcaaacaaaagactgaacgatgtataccgtaaacttaatgaacagatacttgatcacagctccgagctcgcggaaccggtccaccacttcacaactattgtagcccggatcctcatgtctaaaatatatttggttgcatggcacaagtcaacactgaatacaacaggtgagctgtcaggtaatccatcggacgaagtctacttaacggcgattgaaaccgttgagtgcaacctcacactgatttcaaacccttgtttcaaacaatatcgatggatctgctcgacttactttaactggcggcctatcgcttgcgtccttctgggtctgatccatcgtccgtggacggccagagcggagcgcggatggcaagccgtgaatggattcaaccacaatccagtggaagtcgcccgaaagacggatcgaattgccttgtttgtgccactccgtaggctcttcgtccaagccaagcggcaccgttccactgaaattgctcggctcaaggcggatccagacgaagctcttcggctcgacttggccgagcgttcgagttcaagccgatcccggtttggtccaccccccggaatagaagaccgatcaaaggaaattaagatgcagtggactcggatattgcaaccggataacctcgatccgcaccgtgaccctacggacacatcctgctcgaccgatcacccagcgaaccccatggccgttgcctttgagcgcacagttgaccggggccaacgacgcgagccgtggggtagttactacacgcaagactttaccgaagatcacaaagtgctctcgagtggtgggccaccgccatcgatggcacagcaaggtactctgagctcacttatgaacacctctatactcactcccgggacggggtggaatgtagctgcccaagtttcaaatagtaatgaacaagacatggccaatccttcccatatggcctacatggatcaatccgcgaagccccatgaccaagtcgaggtcacaacaactcaggtattggaatcagaacccgaaaccgagagtaatatgtggtacggttcacttacttccatggaccacatgatggaaacggattttaacatggacgccgacatcagtggaggaagatttatttggggaaattgggatgagaacctccgaaccggactcgaggacccaacagcttaa

SEQ ID NO: 30782 - protein, 507 aa, Muscodor strobelii
  misc_feature: SGI Peptide ID NO. 570590
  misc_feature (1)..(35): Pfam Id: PF04082 Pfam Desc: Fungal specific transcription factor domain
  misc_feature (1)..(503): NCBI GI: 256734805 Blast Desc: NECHADRAFT_65901 [Nectria haematococca mpVI 77-13-4]
  misc_feature (1)..(348): NCBI GI: 256724950 Blast Desc: NECHADRAFT_91416 [Nectria haematococca mpVI 77-13-4]
  misc_feature (1)..(500): NCBI GI: 46121945 Blast Desc: FG05350.1 [Gibberella zeae PH-1]
  misc_feature (1)..(499): NCBI GI: 46107834 Blast Desc: FG00800.1 [Gibberella zeae PH-1]
  misc_feature (1)..(335): NCBI GI: 116182784 Blast Desc: CHGG_02020 [Chaetomium globosum CBS 148.51] gi|88186317|gb|EAQ93785.1| CHGG_02020 [Chaetomium globosum CBS 148.51]
  misc_feature (1)..(324): NCBI GI: 171694798 Blast Desc: protein product [Podospora anserina] gi|170947641|emb|CAP59803.1| protein product [Podospora anserina]
  misc_feature (1)..(304): NCBI GI: 85119154 Blast Desc: NCU02896 [Neurospora crassa OR74A] gi|28927389|gb|EAA36342.1| [Neurospora crassa OR74A]
  misc_feature (1)..(352): NCBI GI: 255947838 Blast Desc: Pc22g06580 [Penicillium chrysogenum Wisconsin 54-1255] gi|211591703|emb|CAP97946.1| Pc22g06580 [Penicillium chrysogenum Wisconsin 54-1255]
  misc_feature (1)..(291): NCBI GI: 145613123 Blast Desc: MGG_11119 [Magnaporthe grisea 70-15] gi|145020262|gb|EDK04391.1| MGG_11119 [Magnaporthe grisea 70-15]
  misc_feature (1)..(307): NCBI GI: 171693411 Blast Desc: protein product [Podospora anserina] gi|170946654|emb|CAP73457.1| protein product [Podospora anserina]
MGLHRDGAHLDLPPLETEIRRRVWWAIMILDLRCAEERDTEFATSDLMFDTKMPLSINDYTLSVSSQETPTSEIGWSDCAAAVVRYECSVLLKRALRSKFAAGSFEKLNQDLEESNKRLNDVYRKLNEQILDHSSELAEPVHHFTTIVARILMSKIYLVAWHKSTLNTTGELSGNPSDEVYLTAIETVECNLTLISNPCFKQYRWICSTYFNWRPIACVLLGLIHRPWTARAERGWQAVNGFNHNPVEVARKTDRIALFVPLRRLFVQAKRHRSTEIARLKADPDEALRLDLAERSSSSRSRFGPPPGIEDRSKEIKMQWTRILQPDNLDPHRDPTDTSCSTDHPANPMAVAFERTVDRGQRREPWGSYYTQDFTEDHKVLSSGGPPPSMAQQGTLSSLMNTSILTPGTGWNVAAQVSNSNEQDMANPSHMAYMDQSAKPHDQVEVTTTQVLESEPETESNMWYGSLTSMDHMMETDFNMDADISGGRFIWGNWDENLRTGLEDPTA

SEQ ID NO: 30783 - DNA, 1723 bp, Muscodor strobelii
  misc_feature: SGI EST ID NO. CUFF.72891.0
  misc_feature: Variant of the nucleotide sequence at SEQ ID NO 30781
gccttgtttgtgccactccgtaggctcttcgtccaagccaagcggcaccgttccactgaaattgctcggctcaaggcggatccagacgaagctcttcggctcgacttggccgagcgttcgagttcaagccgatcccggtttggtccaccccccggaatagaagaccgatcaaaggaaattaagatgcagtggactcggatattgcaaccggataacctcgatccgcaccgtgaccctacggacacatcctgctcgaccgatcacccagcgaaccccatggccgttgcctttgagcgcacagttgaccggggccaacgacgcgagccgtggggtagttactacacgcaagactttaccgaagatcacaaagtgctctcgagtggtgggccaccgccatcgatggcacagcaaggtactctgagctcacttatgaacacctctatactcactcccgggacggggtggaatgtagctgcccaagtttcaaatagtaatgaacaagacatggccaatccttcccatatggcctacatggatcaatccgcgaagccccatgaccaagtcgaggtcacaacaactcaggtattggaatcagaacccgaaaccgagagtaatatgtggtacggttcacttacttccatggaccacatgatggaaacggattttaacatggacgccgacatcagtggaggaagatttatttggggaaattgggatgagaacctccgaaccggactcgaggacccaacagcttaagcgcatggccatttacaactcagccgcttgaattatttgcctcggaagaacagcccaggcttcccactggagcgatcgtttttgtcgactacggttcgttcgagaacaaacacatatacttatttgagttgcattcttactactcaagctctcgagggtcattgctcgcaggccttggctgaaaatggaggaacggatcgtggcatcgcctgatttagaacaagccttcgactcgcgggagaatacattcgacgaagttccctgactacttgggtacgggaaaacatagtctgatgtacttatagtctagccgcttatgtgaatattgaaacaaatcggttttgatcagaacgaggagcatctgtttgatatgaacggatctgtgtcagcacctcgagggagtcgttcgggcgggaatatgagtaccggtttgaatctcgaccactgaatggaatgaatacttcatggaaaaggggctgaaggggccgccgggcagcataggtgaaccttcattgttgagggtccattttcgagaatgatgtggctttctcaagccgtgtggtggtaattaggagtatactcacatatgagagtgcgtctcgtgatcatcgattgatgtttaatggggcacaacgggtagtacatgatttgcagacagatagactggaaactaccccttttcttccccagccatgaacagactagcgcggtaaattcagatctgtacgcaagaacactggctagttacaagcatgccttgcttaagtaggtacctacttaactttgtcctcaagcttcgaccgaacatcactatgagtaagagaacttgattacaatacggcattgtacaaggataagtgggctctgtgtagacattattaggcatgtaatcgccgaagggccgatatgggctatgaaatagggttagctcggctcttcggtgcctccgctaggggtcctcgatgcc

SEQ ID NO: 30784 - DNA, 966 bp, Muscodor strobelii
  misc_feature: SGI cDNA ID NO. 570591
  misc_feature: Encodes the peptide sequence at SEQ ID NO 30785
atgactaagaagccagctgctgtgatgatgcgaatcgcaatcgccggtgctggtggcctcgcgtccctcatagcccaagaactctgtcaaagcgcccatgctgtcctagttctgtcgagaatgcctcatccagagttcgaaagcaactatgggtgccaggttgttgtagttgattatcataacatggacagcctacagtttgccgttcaaggaatagatcttgttatctcaactataactggcgcggaacagctcaaccttatcgaagcggctaaacgagctcgagtacggtgctttgttccctccgagttcgagggctcgttgagtcatagaccatcaaatgggcacgaccccttcgacaccggctctgctgctgcgctcgcacaactcagacactgggcatcgtcgcgacaccactcgatgagatacaccgtgttctcctgcggcgtattctacgaacgtttcgctcccggtggactaggcgcgtacaatatgggcacgatgtctagacttccgaacgaaggagactacatgataaatgtccgtaccggcacggctgagttcccagcgacgaacgctcaagggcgttctttcaagattagcatgacgtcggcgtttgatgtagcgcgattcgttgccgctgcggttgagctcgggatcgacaattggccacgcgagtttaagatgcgtggaactaagctcagtcctcagaggatacagcagtactgcagtgaggtcagacagatgcaattcgaggtccaagaacggccttttaacgagatatccgactgggtcgattattaccagcaaaaccaagacgaagacagatggttcttcatgcaacatctcctccagactgccatgggccgttacaccttcgacgagaccaatctgaatgagcttgtcaactttgagcccatggcgttcagagattggctatacaacacctgggcgcctgcgcaataa

SEQ ID NO: 30785 - protein, 321 aa, Muscodor strobelii
  misc_feature: SGI Peptide ID NO. 570591
  misc_feature (12)..(269): Pfam Id: PF05368 Pfam Desc: NmrA-like family
  misc_feature (48)..(105): Pfam Id: PF05368 Pfam Desc: NmrA-like family
  misc_feature (2)..(318): NCBI GI: 116179856 Blast Desc: CHGG_00556 [Chaetomium globosum CBS 148.51] gi|88184853|gb|EAQ92321.1| CHGG_00556 [Chaetomium globosum CBS 148.51]
  misc_feature (9)..(319): NCBI GI: 261352033 Blast Desc: conserved [Verticillium albo-atrum VaMs.102]
  misc_feature (3)..(319): NCBI GI: 21622301 Blast Desc: [Neurospora crassa]
  misc_feature (3)..(319): NCBI GI: 164425321 Blast Desc: NCU04634 [Neurospora crassa OR74A] gi|157070880|gb|EAA29941.2| [Neurospora crassa OR74A]
  misc_feature (9)..(319): NCBI GI: 154301819 Blast Desc: BC1G_10061 [Botryotinia fuckeliana B05.10] gi|150855723|gb|EDN30915.1| BC1G_10061 [Botryotinia fuckeliana B05.10]
  misc_feature (9)..(313): NCBI GI: 256732132 Blast Desc: NECHADRAFT_80433 [Nectria haematococca mpVI 77-13-4]
  misc_feature (10)..(319): NCBI GI: 156044370 Blast Desc: SS1G_10288 [Sclerotinia sclerotiorum 1980] gi|154694677|gb|EDN94415.1| SS1G_10288 [Sclerotinia sclerotiorum 1980]
  misc_feature (9)..(313): NCBI GI: 46137377 Blast Desc: FG10204.1 [Gibberella zeae PH-1]
  misc_feature (9)..(319): NCBI GI: 225561185 Blast Desc: conserved [Ajellomyces capsulatus G186AR]
  misc_feature (9)..(318): NCBI GI: 212533959 Blast Desc: isoflavone reductase family protein [Penicillium marneffei ATCC 18224] gi|210072500|gb|EEA26589.1| isoflavone reductase family protein [Penicillium marneffei ATCC 18224]
MTKKPAAVMMRIAIAGAGGLASLIAQELCQSAHAVLVLSRMPHPEFESNYGCQVVVVDYHNMDSLQFAVQGIDLVISTITGAEQLNLIEAAKRARVRCFVPSEFEGSLSHRPSNGHDPFDTGSAAALAQLRHWASSRHHSMRYTVFSCGVFYERFAPGGLGAYNMGTMSRLPNEGDYMINVRTGTAEFPATNAQGRSFKISMTSAFDVARFVAAAVELGIDNWPREFKMRGTKLSPQRIQQYCSEVRQMQFEVQERPFNEISDWVDYYQQNQDEDRWFFMQHLLQTAMGRYTFDETNLNELVNFEPMAFRDWLYNTWAPAQ

SEQ ID NO: 30786 - DNA, 3103 bp, Muscodor strobelii
  misc_feature: SGI EST ID NO. CUFF.72903.1
  misc_feature: Variant of the nucleotide sequence at SEQ ID NO 30784
ttttgcctctccaacatggccatcttcgcgatagtttcggcccccaattcgacgcgtttgtcctcttatggcattatattcactttccagcccacgaatagtaacgaggaaaaaaattaggaaataaaatgaaaatgcattttcgcgagtatagtcacataaatggaccacatgctgagagcagcctagtatttccacgcacgcgcaacatggttgccgaccaatcgatgtattgtccatcatgtctcttgtggctgtcggaacatgcgcgactccagttgctattccacaccctccacaccctggtcgcctacaacatagatagcccaattcgctagcgaataggaataatcataatctaaataagattattggccatctttcctgtcctaccatgcgcgattcggcagggcgttaacacacattcgggaccacctgcagcttgtgtacatgtgcgccgatgaaatcgggcaaaatgtttgacgacctcttgaagccttctcgcgaattacccctgaacaggctgttccgtctgggcttctttcgctcgacaagcatacgtctcaacctacaagatttcaccgtcttgtccgatgtaactgaggcacatttcgccatccctgccgcctgcacacaatgcatggcggatagccatcatgtgaaccgcccgtctggtatctgaggctatccctgaacctccactagtgccgtataagggtgaccttttatggattccgggcctctgagatacacgacatacttgatcgccagtgctgagagtactgtatcaaggctattgctaagtatgtcctgcgttgctttttcgtttgtgctatagaggtaactcgcggcctctcgcaaggctagagtgtccttggctcgacaacatggactataacaacaactcttcgagctgtaattatcatcgtctttctctctaggcttgcttgatttctagacggaacataccatcggaaacggccgacgaccataagtcattgactatgcgtgcttcaacaacctttcaggcaacaccccctcgaccagtgttctcggtatgtgaagagacgtcactggttcttcgcgaagacaatccaccgctcagcattcaagggtatcacaccagctcactcgacaacccctgcttgcgaatttgatcccatcgatactgtgagccgaaggggatccgtcaaagtctcttggggatatacacatgaggatatggggtcaagccattgttccttcattgagcattacctctgcctggatcttcaagtcaacggacacacggaatctcatgcggctctataggatccgctggcttgctcggcgtttgatgcttcaagattgctcggttctagcttcctcccgccttttcggcgttatttcattctgggtagtgatgtatgtttctgaagtaacatcgtctactcttgtttcgtcttataacgcacctttgctcgtcaccccggccagtgtcattttaaatcgactgttgaatagcataatattcgaagtacaccctgtgtatcccgtctcagaactagaattctgcacagtaccattatactatcgttgaaggtatcacgagcgagcttcaccgccgcaactcctgttataaattcacatactgctataaatttgagagatctactttgccgccgttaccatgactaagaagccagctgctgtgatgatgcgaatcgcaatcgccggtgctggtggcctcgcgtccctcatagcccaagaactctgtcaaagcgcccatgctgtcctagttctgtcgagaatgcctcatccagagttcgaaagcaactatgggtgccaggttgttgtagttgattatcataacatggacagcctacagtttgccgttcaaggaatagatcttgttatctcaactataactggcgcggaacagctcaaccttatcgaagcggctaaacgagctcgagtacggtgctttgttccctccgagttcgagggctcgttgagtcatagaccatcaaatgggcacgaccccttcgacaccggctctgctgctgcgctcgcacaactcagacactgggcatcgtcgcgacaccactcgatgagatacaccgtgttctcctgcggcgtattctacgaacgtttcgctcccggtggactaggcgcgtacaatatgggcacgatgtctagacttccgaacgaaggagactacatgataaatgtccgtaccggcacggctgagttcccagcgacgaacgctcaagggcgttctttcaagattagcatgacgtcggcgtttgatgtagcgcgattcgttgccgctgcggttgagctcgggatcgacaattggccacgcgagtttaagatgcgtggaactaagctcagtcctcagaggatacagcagtactgcagtgaggtcagacagatgcaattcgaggtccaagaacggccttttaacgagatatccgactgggtcgattattaccagcaaaaccaagacgaagacagatggttcttcatgcaacatctcctccagactgccatgggccgttacaccttcgacgagaccaatctgaatgagcttgtcaactttgagcccatggcgttcagagattggctatacaacacctgggcgcctgcgcaataatgctcttcggccctatctacccgttttagtctcgagagagtgttttgaattttgtcatctcttgactcttgtgcttttgttcacatcatttcatttgtaacgtttctactagactcgtcctggcgacagaaatttcctttccacttcgccgatctgggtttcttttctaaaccgctatcaattgcaacaatctaaatgtcccgtctagtcagggagcatcgacaactacgactaggcacatatagatgaaagacaaatacacaacacaccgctctgcgcatatacgatgcaatcctttacccatccaatttacgctatcccgtcctatctctcctcaactatagatatttacatcactgcttggatctgtatttatgatccttgcatgtacacagttcttatgtgggcttcaatacacatctatcccctgaaatctatttgcgtttcaggctgtgagctcccagtgac

SEQ ID NO: 30787 - DNA, 1725 bp, Muscodor strobelii
  misc_feature: SGI cDNA ID NO. 570592
  misc_feature: Encodes the peptide sequence at SEQ ID NO 30788
atgagtgttagaccaatggggtttacggaggaggagtgggaagagatatcggctagtatacccaaggcagacgatgtctctctcaagaagtatcttcagggtcgcgacgccctcatagcgcaagagaacaaacagcggagtgatgccctcttccgcaagaatctctcgccaatcgcgcagcgtgcctgcgaaatcgtagaaaaagtccgtaccgaggagaaagctagcatctggaccccagccctagaggattctttagcacaatcggcggaaaacatcacagtgcaccctggcatgatgttcagtctctccaaggcccggatggagagcacgaagctctggcaaatcgtgcgccgaatgccaaaaggcgctcttctccatgcccatatggacgcgatggtagacttcgacttccttttcggcttgctctttgaaacacctggcatccacctctctgccgatcaacctcttaccaaccctgccgcgcttgagagcgcgtttttgaacttcagattcttcaagaagtcccgtactgacggcaatctatggaaagagaattataaaccatcgacacatattctgcttacgcaggtcgctgacgcatttccggatggaggtaaggagggatttttgaagtggctctatagccgtgcaaccatttctcgcacggaagccatcgagcagcaccatggcgtcgatcacgtgtggaggaagttcttctcctgtttccgtgtggtaaacagcatgatacactacgagccgatttaccgtcaatttttgcgtcgtctcatgactcttctgaaagccgatggcgtaaattatgccgagctacggttctcctgggagttagactactaccgccaaaatagcgaggtggcagagggcgactacacagcaatgatggacgttttagatgacgaggtaaggaagtttcaagccaccgaggaaggcaaaggcttttggggtttacgcacaatctgggcttcgattcgcgttagagggacgagagagattatacaggatatggataactgcattacgacaaaactcacacacccgcatcttgtcgcggggtacgacttggtggggcaagaggacttaggccgtccgcatgtggattgtataccggagttgatgtggttcatgaaacagtgcgccgaggaacgtgtcaacattccgtttttcttccatgccggcgagactcttggatccggctctgagacggatcacaacttgttcgatgttgtacttctcggaactaggcggattggacatgggttcagcttgtacaagcaccccctgctgatcgaccttgtgaaggaaaaacgcatactcatcgaatcatgcccgatctccaatgaagtgcttcgactctgcggctccgtcatgtcacaccctcttcccgccttacttgcccgcggtgtcgcatgctcactttgcaacgatgaccccgcgatgctgggccaagacacagcagggagcacgcacgatttttggcaggccctacagggatgggagaacctaggactagcggggctaggatctctagcagagaactccgtccgctgggcatgcttcgaggatcagactaacgaggattgggaccgcgacgtgaaaatggcaagtgttggatccggactcaaagctcagaggctcaaggaatgggctgtagaatgggaacgcttctgcctctgggtcgttgaggagttcgacgatgaaaaataa

SEQ ID NO: 30788 - protein, 574 aa, Muscodor strobelii
  misc_feature: SGI Peptide ID NO. 570592
  misc_feature (120)..(537): Pfam Id: PF00962 Pfam Desc: Adenosine/AMP deaminase
  misc_feature (269)..(537): Pfam Id: PF00962 Pfam Desc: Adenosine/AMP deaminase
  misc_feature (5)..(574): NCBI GI: 154304851 Blast Desc: BC1G_09011 [Botryotinia fuckeliana B05.10] gi|150853873|gb|EDN29065.1| BC1G_09011 [Botryotinia fuckeliana B05.10]
  misc_feature (9)..(573): NCBI GI: 46137379 Blast Desc: FG10205.1 [Gibberella zeae PH-1]
  misc_feature (5)..(574): NCBI GI: 156065737 Blast Desc: SS1G_00879 [Sclerotinia sclerotiorum 1980] gi|154691738|gb|EDN91476.1| SS1G_00879 [Sclerotinia sclerotiorum 1980]
  misc_feature (8)..(573): NCBI GI: 85092016 Blast Desc: NCU04642 [Neurospora crassa OR74A] gi|21622309|emb|CAD37012.1| related to cecr1 protein [Neurospora crassa] gi|28920587|gb|EAA29949.1| NCU04642 [Neurospora crassa
  misc_feature (7)..(573): NCBI GI: 39974167 Blast Desc: MGG_00770 [Magnaporthe grisea 70-15] gi|145018295|gb|EDK02574.1| MGG_00770 [Magnaporthe grisea 70-15]
  misc_feature (9)..(570): NCBI GI: 189196953 Blast Desc: adenosine deaminase family protein [Pyrenophora tritici-repentis Pt-1C-BFP] gi|187980762|gb|EDU47388.1| adenosine deaminase family protein [Pyrenophora tritici-repentis Pt-1C-BFP]
  misc_feature (16)..(572): NCBI GI: 239615197 Blast Desc: adenosine deaminase [Ajellomyces dermatitidis ER-3]
  misc_feature (16)..(572): NCBI GI: 261192398 Blast Desc: adenosine deaminase [Ajellomyces dermatitidis SLH14081] gi|239589481|gb|EEQ72124.1| adenosine deaminase [Ajellomyces dermatitidis SLH14081]
  misc_feature (16)..(572): NCBI GI: 226289572 Blast Desc: conserved [Paracoccidioides brasiliensis Pb18]
  misc_feature (16)..(572): NCBI GI: 225680329 Blast Desc: cat eye syndrome critical region protein [Paracoccidioides brasiliensis Pb03]
  misc_feature (72)..(563): SWISSPROT Homolog: EC 3.5.4.4 Adenosine deaminase
MSVRPMGFTEEEWEEISASIPKADDVSLKKYLQGRDALIAQENKQRSDALFRKNLSPIAQRACEIVEKVRTEEKASIWTPALEDSLAQSAENITVHPGMMFSLSKARMESTKLWQIVRRMPKGALLHAHMDAMVDFDFLFGLLFETPGIHLSADQPLTNPAALESAFLNFRFFKKSRTDGNLWKENYKPSTHILLTQVADAFPDGGKEGFLKWLYSRATISRTEAIEQHHGVDHVWRKFFSCFRVVNSMIHYEPIYRQFLRRLMTLLKADGVNYAELRFSWELDYYRQNSEVAEGDYTAMMDVLDDEVRKFQATEEGKGFWGLRTIWASIRVRGTREIIQDMDNCITTKLTHPHLVAGYDLVGQEDLGRPHVDCIPELMWFMKQCAEERVNIPFFFHAGETLGSGSETDHNLFDVVLLGTRRIGHGFSLYKHPLLIDLVKEKRILIESCPISNEVLRLCGSVMSHPLPALLARGVACSLCNDDPAMLGQDTAGSTHDFWQALQGWENLGLAGLGSLAENSVRWACFEDQTNEDWDRDVKMASVGSGLKAQRLKEWAVEWERFCLWVVEEFDDEK

SEQ ID NO: 30789 - DNA, 2510 bp, Muscodor strobelii
  misc_feature: SGI EST ID NO. CUFF.72914.1
  misc_feature: Variant of the nucleotide sequence at SEQ ID NO 30787
caagaagtggtaggcagactagaatggacggaagaacgccgaagtgacgatagcggggtgaaattcgatccagtacagtgaatagcggggcagtaaatctgacgtcgcaccctttaacaccgtctcactccccgtgatcagcactggtgatttcttcataagaccattggtgaagttatttgcgtccatataaaagtacccaggtagagcatgtaatctgaaagttcttcctcattttcttgtatctcgcctttgcaagtctgaacccgctgcgccgtgcgctgactcagctctcacccacgaggtcccctacatatctcatcactatgagtgttagaccaatggggtttacggaggaggagtgggaagagatatcggctagtatacccaaggcagacgatgtctctctcaagaagtatcttcagggtcgcgacgccctcatagcgcaagagaacaaacagcggagtgatgccctcttccgcaagaatctctcgccaatcgcgcagcgtgcctgcgaaatcgtagaaaaagtccgtaccgaggagaaagctagcatctggaccccagccctagaggattctttagcacaatcggcggaaaacatcacagtgcaccctggcatgatgttcagtctctccaaggcccggatggagagcacgaagctctggcaaatcgtgcgccgaatgccaaaaggcgctcttctccatgcccatatggacgcgatggtagacttcgacttccttttcggcttgctctttgaaacacctggcatccacctctctgccgatcaacctcttaccaaccctgccgcgcttgagagcgcgtttttgaacttcagattcttcaagaagtcccgtactgacggcaatctatggaaagagaattataaaccatcgacacatattctgcttacgcaggtcgctgacgcatttccggatggaggtaaggagggatttttgaagtggctctatagccgtgcaaccatttctcgcacggaagccatcgagcagcaccatggcgtcgatcacgtgtggaggaagttcttctcctgtttccgtgtggtaaacagcatgatacactacgagccgatttaccgtcaatttttgcgtcgtctcatgactcttctgaaagccgatggcgtaaattatgccgagctacggttctcctgggagttagactactaccgccaaaatagcgaggtggcagagggcgactacacagcaatgatggacgttttagatgacgaggtaaggaagtttcaagccaccgaggaaggcaaaggcttttggggtttacgcacaatctgggcttcgattcgcgttagagggacgagagagattatacaggatatggataactgcattacgacaaaactcacacacccgcatcttgtcgcggggtacgacttggtggggcaagaggacttaggccgtccgcatgtggattgtataccggagttgatgtggttcatgaaacagtgcgccgaggaacgtgtcaacattccgtttttcttccatgccggcgagactcttggatccggctctgagacggatcacaacttgttcgatgttgtacttctcggaactaggcggattggacatgggttcagcttgtacaagcaccccctgctgatcgaccttgtgaaggaaaaacgcatactcatcgaatcatgcccgatctccaatgaagtgcttcgactctgcggctccgtcatgtcacaccctcttcccgccttacttgcccgcggtgtcgcatgctcactttgcaacgatgaccccgcgatgctgggccaagacacagcagggagcacgcacgatttttggcaggccctacagggatgggagaacctaggactagcggggctaggatctctagcagagaactccgtccgctgggcatgcttcgaggatcagactaacgaggattgggaccgcgacgtgaaaatggcaagtgttggatccggactcaaagctcagaggctcaaggaatgggctgtagaatgggaacgcttctgcctctgggtcgttgaggagttcgacgatgaaaaataaattggtatggttgcatcccattccccgcgtcaggtgatgggatgggacaggtggaggaaggatacgacaataggaaatgcacaatgttgcatgtaaggattctgcctggctcgctatcctaccgacggacgtagcgtgggtataaaggaggctctacggcacttgtctcgctcgccgcaacagtcgtactacaaatgcagcctcggattggttggagtaggtcgatacgagcgaccatcgtgttcgcaaagggaaacaggggatagcatcttgccctacgaccatagggctgaggcgcatagatagacgtgacatgcatacgtagcggaggatcagggaaccaaggttcaggcagcgcaatcgtcgcgatcgtcttgtcacgccattacacgatgtgggacacgagatagaccgaaaatctaaggcgactatatgtccatcacgatcactttgcgacgc

SEQ ID NO: 30790 - DNA, 591 bp, Muscodor strobelii
  misc_feature: SGI cDNA ID NO. 570593
  misc_feature: Encodes the peptide sequence at SEQ ID NO 30791
atgtggttcatgaaacagtgcgccgaggaacgtgtcaacattccgtttttcttccatgccggcgagactcttggatccggctctgagacggatcacaacttgttcgatgttgtacttctcggaactaggcggattggacatgggttcagcttgtacaagcaccccctgctgatcgaccttgtgaaggaaaaacgcatactcatcgaatcatgcccgatctccaatgaagtgcttcgactctgcggctccgtcatgtcacaccctcttcccgccttacttgcccgcggtgtcgcatgctcactttgcaacgatgaccccgcgatgctgggccaagacacagcagggagcacgcacgatttttggcaggccctacagggatgggagaacctaggactagcggggctaggatctctagcagagaactccgtccgctgggcatgcttcgaggatcagactaacgaggattgggaccgcgacgtgaaaatggcaagtgttggatccggactcaaagctcagaggctcaaggaatgggctgtagaatgggaacgcttctgcctctgggtcgttgaggagttcgacgatgaaaaataa

SEQ ID NO: 30791 - protein, 196 aa, Muscodor strobelii
  misc_feature: SGI Peptide ID NO. 570593
  misc_feature (13)..(159): Pfam Id: PF00962 Pfam Desc: Adenosine/AMP deaminase
  misc_feature (1)..(195): NCBI GI: 46137379 Blast Desc: FG10205.1 [Gibberella zeae PH-1]
  misc_feature (1)..(196): NCBI GI: 156065737 Blast Desc: SS1G_00879 [Sclerotinia sclerotiorum 1980] gi|154691738|gb|EDN91476.1| SS1G_00879 [Sclerotinia sclerotiorum 1980]
  misc_feature (1)..(196): NCBI GI: 154304851 Blast Desc: BC1G_09011 [Botryotinia fuckeliana B05.10] gi|150853873|gb|EDN29065.1| BC1G_09011 [Botryotinia fuckeliana B05.10]
  misc_feature (1)..(195): NCBI GI: 256731745 Blast Desc: [Nectria haematococca mpVI 77-13-4]
  misc_feature (1)..(195): NCBI GI: 85092016 Blast Desc: NCU04642 [Neurospora crassa OR74A] gi|21622309|emb|CAD37012.1| related to cecr1 protein [Neurospora crassa] gi|28920587|gb|EAA29949.1| NCU04642 [Neurospora crassa
  misc_feature (2)..(195): NCBI GI: 39974167 Blast Desc: MGG_00770 [Magnaporthe grisea 70-15] gi|145018295|gb|EDK02574.1| MGG_00770 [Magnaporthe grisea 70-15]
  misc_feature (1)..(192): NCBI GI: 189196953 Blast Desc: adenosine deaminase family protein [Pyrenophora tritici-repentis Pt-1C-BFP] gi|187980762|gb|EDU47388.1| adenosine deaminase family protein [Pyrenophora tritici-repentis Pt-1C-BFP]
  misc_feature (1)..(192): NCBI GI: 169616634 Blast Desc: SNOG_11491 [Phaeosphaeria nodorum SN15] gi|160703228|gb|EAT81199.2| SNOG_11491 [Phaeosphaeria nodorum SN15]
  misc_feature (1)..(194): NCBI GI: 239615197 Blast Desc: adenosine deaminase [Ajellomyces dermatitidis ER-3]
  misc_feature (1)..(194): NCBI GI: 261192398 Blast Desc: adenosine deaminase [Ajellomyces dermatitidis SLH14081] gi|239589481|gb|EEQ72124.1| adenosine deaminase [Ajellomyces dermatitidis SLH14081]
  misc_feature (1)..(155): SWISSPROT Homolog: EC 3.5.4.4 Adenosine deaminase
MWFMKQCAEERVNIPFFFHAGETLGSGSETDHNLFDVVLLGTRRIGHGFSLYKHPLLIDLVKEKRILIESCPISNEVLRLCGSVMSHPLPALLARGVACSLCNDDPAMLGQDTAGSTHDFWQALQGWENLGLAGLGSLAENSVRWACFEDQTNEDWDRDVKMASVGSGLKAQRLKEWAVEWERFCLWVVEEFDDEK

SEQ ID NO: 30792 - DNA, 2510 bp, Muscodor strobelii; identical to SEQ ID NO: 30789
  misc_feature: SGI EST ID NO. CUFF.72914.1
  misc_feature: Variant of the nucleotide sequence at SEQ ID NO 30790

SEQ ID NO: 30793 - DNA, 606 bp, Muscodor strobelii
  misc_feature: SGI cDNA ID NO. 570594
  misc_feature: Encodes the peptide sequence at SEQ ID NO 30794
atgctgtccgaccagctcgatcctcgtctagtatattggcctctgctagcttgttgtcttgcgaccggtcttacggatggcacgctctataatgcttacggcactttcgtgtcaatgcaaacgggaaacaccgttttcgttgccctcggtacatcggggcagaacaatagaccctttggatgggctcgttctttggctgcgggcatcatccaaggtgggcttattgatggacgctacccaagtcgacgcgatcccacagatgttgattttacggaactcgccccaattgccttattatcattccaagcggctgctcagattgtcaacagtcgaggtttaggtgtacccgaggtgccaaccgttgtcatcacaacgctcctatgcgacttggtcagcgacccatatatttttgccccattcaggggtaaccccaagaggaacaagcgtgctgttgctttcacgttgaccttagttggagcgattgccggcgggtttatttctaagaagacaggcgctgttcaaaatagtctatggcttgtcgccgctctcaagttcgccatctcaatcttctggctgttgtgtcgaaaggatcagaatgaaaagtag

SEQ ID NO: 30794 - protein, 201 aa, Muscodor strobelii
  misc_feature: SGI Peptide ID NO. 570594
  misc_feature (14)..(192): Pfam Id: PF06912 Pfam Desc: Domain of function (DUF1275)
  misc_feature (15)..(198): NCBI GI: 121711002 Blast Desc: DUF1275 domain protein [Aspergillus clavatus NRRL 1] gi|119401267|gb|EAW11691.1| DUF1275 domain protein [Aspergillus clavatus NRRL 1]
  misc_feature (15)..(198): NCBI GI: 159128603 Blast Desc: DUF1275 domain protein [Aspergillus fumigatus A1163]
  misc_feature (15)..(198): NCBI GI: 70988661 Blast Desc: DUF1275 domain protein [Aspergillus fumigatus Af293] gi|66846820|gb|EAL87151.1| DUF1275 domain protein [Aspergillus fumigatus Af293]
  misc_feature (15)..(166): NCBI GI: 156049025 Blast Desc: SS1G_08219 [Sclerotinia sclerotiorum 1980] gi|154692618|gb|EDN92356.1| SS1G_08219 [Sclerotinia sclerotiorum 1980]
  misc_feature (2)..(195): NCBI GI: 255951212 Blast Desc: Pc22g24850 [Penicillium chrysogenum Wisconsin 54-1255] gi|211593390|emb|CAP99773.1| Pc22g24850 [Penicillium chrysogenum Wisconsin 54-1255]
  misc_feature (15)..(201): NCBI GI: 119497693 Blast Desc: NFIA_032720 [Neosartorya fischeri NRRL 181] gi|119413768|gb|EAW23707.1| conserved [Neosartorya fischeri NRRL 181]
  misc_feature (15)..(191): NCBI GI: 145256251 Blast Desc: An10g00830 [Aspergillus niger CBS 513.88] gi|85720871|gb|ABC75847.1| DUF1275 domain protein [Aspergillus niger] gi|89888451|gb|ABD78718.1| conserved [Aspergillus niger]
  misc_feature (15)..(199): NCBI GI: 115437810 Blast Desc: [Aspergillus terreus NIH2624] gi|114188720|gb|EAU30420.1| [Aspergillus terreus NIH2624]
  misc_feature (5)..(197): NCBI GI: 169777427 Blast Desc: [Aspergillus oryzae RIB40] gi|83771916|dbj|BAE62046.1| protein product [Aspergillus oryzae]
  misc_feature (39)..(197): NCBI GI: 238494562 Blast Desc: DUF1275 domain protein [Aspergillus flavus NRRL3357] gi|220695167|gb|EED51510.1| DUF1275 domain protein [Aspergillus flavus NRRL3357]
MLSDQLDPRLVYWPLLACCLATGLTDGTLYNAYGTFVSMQTGNTVFVALGTSGQNNRPFGWARSLAAGIIQGGLIDGRYPSRRDPTDVDFTELAPIALLSFQAAAQIVNSRGLGVPEVPTVVITTLLCDLVSDPYIFAPFRGNPKRNKRAVAFTLTLVGAIAGGFISKKTGAVQNSLWLVAALKFAISIFWLLCRKDQNEK

SEQ ID NO: 30795 - DNA, 186 bp, Muscodor strobelii
  misc_feature: SGI EST ID NO. CUFF.72930.0
  misc_feature: Variant of the nucleotide sequence at SEQ ID NO 30793
gcgatatgctgtccgaccagctcgatcctcgtctagtatattggcctctgctagcttgttgtcttgcgaccggtcttacggatggcacgctctataatggtttgtaacacccaacaagcaaaacactagagcacaccttacggcactttcgtgtcaatgcaaacgggaaacaccgttttcgttgcc

SEQ ID NO: 30796 - DNA, 1206 bp, Muscodor strobelii
  misc_feature: SGI cDNA ID NO. 570595
  misc_feature: Encodes the peptide sequence at SEQ ID NO 30797
atggcaccgtctgctatctcaaacgatgcggtgccccagatcgaaagccaatctgctctcattcttgaagcagcaacaacggacgtcaagtctggccagctgcacggagatatcaaaactgccattattagtattaacacagaagtaccagcggaaacaccggaaaattcttccccagccacgcatggtttcatagacgctctgtcagccggagtcgtcaaagaggtgaccctagcaaagagtaatggagccacgtctccatcttcctggctcccactcaatcacattgctactagtgcggatgagcctatgtctggcgctaaaaaactccgcaagatgatcttcgacacgagcgagttgatcatctgcccgggcgtctacgatggcttatccgcacgaactgctattgaactgggattcaacgccatgtatatgactggagcaggtaccacagcttcacgtctcggccaaccagatttagctattgcccagctgcacgaaatgcgtgagaacgccgagatgattgccaatcttgacccattcggtccacctttgatcgctgacatggacactggatacggaggtcccataatggctgcgagaacagttgaacaatacatcagagccggtgttgctggcgcccatctcgaagatcaagttctcatgaagcgctgcggacatcttagcggcaaacgagttgtagccgccgacgagtacattgccagaatccgtgcggctcatgcagcaagagtacgcttgcagtctgactttgtgttgattgctcggacagatgcgttacaaacactcggctacgatgagtgcatcaagcgccttcgcatggcccgtgacgagggtgctgatgtcggcctactggaagggttttcctccaaggagcaggctgcacaggctgttcaagatcttgctccatggcctctcttgctcaattcagtggagaacgggaagagcccgcttattactgtcgaggaagctcgtaaaatgggcttccgcatcatgatctttagctttgcaactctggctcctgcgtacattgccatcaaggaaaccttgacacgcctcaagaatcagggtgtagtgggtactcctccagatattacaccagtgagattgtttgaggtgtgcggactgaagcatagtatggctgttgatatgaacgctggcggatcttcgtttggtatgaacttatag

SEQ ID NO: 30797 - protein, 401 aa, Muscodor strobelii
  misc_feature: SGI Peptide ID NO. 570595
  misc_feature (184)..(265): Pfam Id: PF00463 Pfam Desc: Isocitrate lyase family
  misc_feature (104)..(397): NCBI GI: 115437814 Blast Desc: ATEG_09284 [Aspergillus terreus NIH2624] gi|114188721|gb|EAU30421.1| ATEG_09284 [Aspergillus terreus NIH2624]
  misc_feature (103)..(397): NCBI GI: 242773046 Blast Desc: carboxyphosphonoenolpyruvate phosphonomutase, [Talaromyces stipitatus ATCC 10500] gi|218721778|gb|EED21196.1| carboxyphosphonoenolpyruvate phosphonomutase, [Talaromyces ATCC
  misc_feature (104)..(397): NCBI GI: 119497695 Blast Desc: carboxyphosphonoenolpyruvate phosphonomutase, [Neosartorya fischeri NRRL 181] gi|119413769|gb|EAW23708.1| carboxyphosphonoenolpyruvate phosphonomutase, [Neosartorya NRRL
  misc_feature (104)..(397): NCBI GI: 70988663 Blast Desc: carboxyphosphonoenolpyruvate phosphonomutase [Aspergillus fumigatus Af293] gi|66846821|gb|EAL87152.1| carboxyphosphonoenolpyruvate phosphonomutase, [Aspergillus Af293]
  misc_feature (105)..(397): NCBI GI: 169777425 Blast Desc: [Aspergillus oryzae RIB40] gi|238494558|ref|XP_002378515.1| carboxyphosphonoenolpyruvate phosphonomutase, [Aspergillus flavus NRRL3357] protein product
  misc_feature (104)..(397): NCBI GI: 121711004 Blast Desc: carboxyphosphonoenolpyruvate phosphonomutase, [Aspergillus clavatus NRRL 1] gi|119401268|gb|EAW11692.1| carboxyphosphonoenolpyruvate phosphonomutase, [Aspergillus NRRL
  misc_feature (87)..(397): NCBI GI: 212531491 Blast Desc: carboxyphosphonoenolpyruvate phosphonomutase, [Penicillium marneffei ATCC 18224] gi|210071266|gb|EEA25355.1| carboxyphosphonoenolpyruvate phosphonomutase, [Penicillium ATCC
  misc_feature (107)..(397): NCBI GI: 255951208 Blast Desc: Pc22g24830 [Penicillium chrysogenum Wisconsin 54-1255] gi|211593388|emb|CAP99771.1| Pc22g24830 [Penicillium chrysogenum Wisconsin 54-1255]
  misc_feature (84)..(397): NCBI GI: 46519242 Blast Desc: oxaloacetate acetylhydrolase [Botryotinia fuckeliana]
  misc_feature (104)..(397): NCBI GI: 32165945 Blast Desc: oxaloacetate acetylhydrolase [Aspergillus niger]
  misc_feature (104)..(387): SWISSPROT Homolog: EC 2.7.8.23 Carboxyvinyl-carboxyphosphonate phosphorylmutase
MAPSAISNDAVPQIESQSALILEAATTDVKSGQLHGDIKTAIISINTEVPAETPENSSPATHGFIDALSAGVVKEVTLAKSNGATSPSSWLPLNHIATSADEPMSGAKKLRKMIFDTSELIICPGVYDGLSARTAIELGFNAMYMTGAGTTASRLGQPDLAIAQLHEMRENAEMIANLDPFGPPLIADMDTGYGGPIMAARTVEQYIRAGVAGAHLEDQVLMKRCGHLSGKRVVAADEYIARIRAAHAARVRLQSDFVLIARTDALQTLGYDECIKRLRMARDEGADVGLLEGFSSKEQAAQAVQDLAPWPLLLNSVENGKSPLITVEEARKMGFRIMIFSFATLAPAYIAIKETLTRLKNQGVVGTPPDITPVRLFEVCGLKHSMAVDMNAGGSSFGMNL

SEQ ID NO: 30798 - DNA, 447 bp, Muscodor strobelii
  misc_feature: SGI cDNA ID NO. 570596
  misc_feature: Elevated expression when VOC is produced
  misc_feature: Encodes the peptide sequence at SEQ ID NO 30799
atgtcgaaattcaccacctacgcgtatcccggaatgggagaatgggctcgtaaagagctgtcatacagccaagctatccgcgttggcgacagagttcactgcgcaggtcaaggtggatgggaccgcacagatggctcaatctcaactgatctagatgctgaagtagatcaggcctttgcaaatgtcgagcacaacctgcggcacgcgggcgcgcaggggtggtcacaagtctacagggtcacaacctaccatacaaatatcaaatcaacgcatgaccgagttgttgcaaattaccggaaatacatgcctcatcaccagcccgtatggacagaggtcggggtgaaagaactggggctagacacgatgcacatcgagattgaggttgaggctcatgacccggaaggagctgcattggcgaagagcggaaaggataaggaacacacttaa

SEQ ID NO: 30799 - protein, 148 aa, Muscodor strobelii
  misc_feature: SGI Peptide ID NO. 570596
  misc_feature (16)..(132): Pfam Id: PF01042 Pfam Desc: Endoribonuclease L-PSP
  misc_feature (1)..(133): NCBI GI: 70982001 Blast Desc: L-PSP endoribonuclease family protein [Aspergillus fumigatus Af293] gi|66844152|gb|EAL84491.1| L-PSP endoribonuclease family protein, [Aspergillus fumigatus Af293]
  misc_feature (1)..(134): NCBI GI: 145246094 Blast Desc: An12g02100 [Aspergillus niger] gi|134080008|emb|CAK48492.1| protein product [Aspergillus niger]
  misc_feature (1)..(133): NCBI GI: 159122241 Blast Desc: L-PSP endoribonuclease family protein, [Aspergillus fumigatus A1163]
  misc_feature (1)..(134): NCBI GI: 238492507 Blast Desc: L-PSP endoribonuclease family protein, [Aspergillus flavus NRRL3357] gi|220695984|gb|EED52326.1| L-PSP endoribonuclease family protein, [Aspergillus flavus NRRL3357]
  misc_feature (1)..(133): NCBI GI: 255931927 Blast Desc: Pc12g06820 [Penicillium chrysogenum Wisconsin 54-1255] gi|211582139|emb|CAP80309.1| Pc12g06820 [Penicillium chrysogenum Wisconsin 54-1255]
  misc_feature (1)..(136): NCBI GI: 242797265 Blast Desc: L-PSP endoribonuclease family protein, [Talaromyces stipitatus ATCC 10500] gi|218719563|gb|EED18983.1| L-PSP endoribonuclease family protein, [Talaromyces stipitatus ATCC
  misc_feature (1)..(136): NCBI GI: 169866563 Blast Desc: CC1G_06058 [Coprinopsis cinerea okayama7#130] gi|116498952|gb|EAU81847.1| CC1G_06058 [Coprinopsis cinerea okayama7#130]
  misc_feature (1)..(134): NCBI GI: 255937071 Blast Desc: Pc13g11450 [Penicillium chrysogenum Wisconsin 54-1255] gi|211584182|emb|CAP92214.1| Pc13g11450 [Penicillium chrysogenum Wisconsin 54-1255]
  misc_feature (1)..(139): NCBI GI: 261356937 Blast Desc: endoribonuclease L-psp family protein [Verticillium albo-atrum VaMs.102]
  misc_feature (1)..(133): NCBI GI: 119487357 Blast Desc: L-PSP endoribonuclease family protein, [Neosartorya fischeri NRRL 181] gi|119410628|gb|EAW20574.1| L-PSP endoribonuclease family protein, [Neosartorya fischeri NRRL 181]
  misc_feature: Useful for introducing or modulating the production of volatile compounds
MSKFTTYAYPGMGEWARKELSYSQAIRVGDRVHCAGQGGWDRTDGSISTDLDAEVDQAFANVEHNLRHAGAQGWSQVYRVTTYHTNIKSTHDRVVANYRKYMPHHQPVWTEVGVKELGLDTMHIEIEVEAHDPEGAALAKSGKDKEHT

SEQ ID NO: 30800 - DNA, 926 bp, Muscodor strobelii
  misc_feature: SGI EST ID NO. CUFF.72939.0
  misc_feature: Variant of the nucleotide sequence at SEQ ID NO 30798
catactataaaatcaaagcaacaggactttaaacaacacatctgtgctaatcagcatatatcacatcagttcaagaatctctcaatttgctcgcaatttcagtcgaggttagatattcaacttgatcactatagatacagtatgtcgaaattcaccacctacgcgtatcccggaatgggagaatgggctcgtaaagagctgtcatacagccaagctatccgcgttggcgacagagttcactgcgcaggtcaaggtggatgggaccgcacagatggctcaatctcaactgatctagatgctgaagtagatcaggcctttgcaaatgtcgagcacaacctgcggcacgcgggcgcgcaggggtggtcacaagtctacagggtcacaacctaccatacaaatatcaaatcaacgcatgaccgagttgttgcaaattaccggaaatacatgcctcatcaccagcccgtatggacagaggtcggggtgaaagaactggggctagacacgatgcacatcgagattgaggttgaggctcatgacccggaaggagctgcattggcgaagagcggaaaggataaggaacacacttaataatcatgcttcacaagcgtcctgagtatcatttcgcttttctaaaatcaacttgcaagataattcttccactgttggctagggacactggagctggctggttcctagatcacagagccaggggttaaaagggacactagctgaagtgcaatgcatgagagcagactagcaagttcatattgtcacagctcgtgtgctatctcgtgtgtatacggtagtcatcatttccatgtacgatcacgtagtcataggtgggccagtcacaatctataaaaattacgctattcatcatatcctctacccaaacctcacctattgactcgtatggaacattcggt

SEQ ID NO: 30801 - DNA, 1275 bp, Muscodor strobelii
  misc_feature: SGI cDNA ID NO. 570597
  misc_feature: Encodes the peptide sequence at SEQ ID NO 30802
atgtctaaatcaaggtcactgttggagttatcctccaagattcaacaaatggttgccattgtcgaccagactctaaaggacaatgaactaccgcttccctcttttgacgtaggagcaccgttatcatcccaaattccggtttccatcgaagagaccaaattcgagctcctcgaagcacttgacgaattgcaagcgcttttgcacgggccgctgtatcatgtcatgtacatgagcgcaattgttcccaataacgctgccatctttggcgtcctctccaagttcaacatcgctcaaaaattggaagccgacgagtgtgtctcctatgccgagctcgggaagcgctgcggtctgctagagagcgagacgcggcgcctcgtgcgtggcgccattgcgctgcgcttcttcgatgagccagaagccaacaaagtccaacataatgcggcttcttcggccttggcgaccccggcagccgctgcctgggtcaagagtaccttgcgtaactcggctccgagcgctatgaagttagcagatgctcttgcacagtaccctgggtcagaggatccccgcgagacaggcttcgcactggcaaatggcggtcgagacttctttacggtactccaggaggagccggagcgtgcggccgagttcgctcaatcaatgagtatgcagagtatgggccccgataggaacgtgtcgtactgcgtggaagccctggccgcctggggccatgccgacaagtgtccccgagtcattgtcgatgtcgggggctctcttgggacgctatcagaggctctcgttcgacggtacccgggaatcgatcacgcaatcgtacaggacctctccaagacaatcggcgacgccaaagtgccagaagacttgcagaaagaccagcgaatgcgatttatggagtacgacttcttcactgagcagcccgtgaaagacgcagacgtgtatctgtttcggcaaatcctgcacgactggtccgacttgaagtgtgtcgaaatactgaaaagccaagtcgcggcgctgaaaccaggagcgcgcatcgttctaaacgagatgtgttcccgtccgcccaatgcttatacccacatccgggatgcggatcacagaggttatgacatcgcaatgaagcacttcttcaatggcaaagaacggacgagcgaagacttccgcgccctcttcgccgccgccgataagaggtttgagatcgtctcattccggcggcccctaggctctgccatgtcgataatcgaagttgcctggcgaggatga

SEQ ID NO: 30802 - protein, 424 aa, Muscodor strobelii
  misc_feature: SGI Peptide ID NO. 570597
  misc_feature (137)..(396): Pfam Id: PF00891 Pfam Desc: O-methyltransferase
  misc_feature (249)..(396): Pfam Id: PF00891 Pfam Desc: O-methyltransferase
  misc_feature (1)..(422): NCBI GI: 169613869 Blast Desc: SNOG_10068 [Phaeosphaeria nodorum SN15] gi|111061283|gb|EAT82403.1| SNOG_10068 [Phaeosphaeria nodorum SN15]
  misc_feature (2)..(422): NCBI GI: 242800307 Blast Desc: O-methyltransferase, [Talaromyces stipitatus ATCC 10500] gi|218716905|gb|EED16326.1| O-methyltransferase, [Talaromyces stipitatus ATCC 10500]
  misc_feature (1)..(422): NCBI GI: 212534482 Blast Desc: O-methyltransferase, [Penicillium marneffei ATCC 18224] gi|210069796|gb|EEA23886.1| O-methyltransferase, [Penicillium marneffei ATCC 18224]
  misc_feature (1)..(423): NCBI GI: 189208266 Blast Desc: sterigmatocystin 8-O-methyltransferase precursor [Pyrenophora tritici-repentis Pt-1C-BFP] gi|187976559|gb|EDU43185.1| sterigmatocystin precursor Pt-1C-BFP]
  misc_feature (7)..(422): NCBI GI: 116206014 Blast Desc: CHGG_02300 [Chaetomium globosum CBS 148.51] gi|88182897|gb|EAQ90365.1| CHGG_02300 [Chaetomium globosum CBS 148.51]
  misc_feature (1)..(423): NCBI GI: 212536596 Blast Desc: O-methyltransferase, [Penicillium marneffei ATCC 18224] gi|210070853|gb|EEA24943.1| O-methyltransferase, [Penicillium marneffei ATCC 18224]
  misc_feature (6)..(424): NCBI GI: 242813653 Blast Desc: hydroxyindole O-methyltransferase, [Talaromyces stipitatus ATCC 10500] gi|218714548|gb|EED13971.1| hydroxyindole O-methyltransferase, [Talaromyces stipitatus ATCC 10500]
  misc_feature (6)..(424): NCBI GI: 238507580 Blast Desc: O-methyltransferase, [Aspergillus flavus NRRL3357] gi|220688510|gb|EED44862.1| O-methyltransferase, [Aspergillus flavus NRRL3357]
  misc_feature (2)..(423): NCBI GI: 171677656 Blast Desc: protein product [Podospora anserina] gi|170936896|emb|CAP61555.1| protein product [Podospora anserina]
  misc_feature (7)..(424): NCBI GI: 238841485 Blast Desc: sterigmatocystin 8-O-methyltransferase [Microsporum canis CBS 113480]
  misc_feature (68)..(403): SWISSPROT Homolog: EC 2.1.1.110 Sterigmatocystin 8-O-methyltransferase
MSKSRSLLELSSKIQQMVAIVDQTLKDNELPLPSFDVGAPLSSQIPVSIEETKFELLEALDELQALLHGPLYHVMYMSAIVPNNAAIFGVLSKFNIAQKLEADECVSYAELGKRCGLLESETRRLVRGAIALRFFDEPEANKVQHNAASSALATPAAAAWVKSTLRNSAPSAMKLADALAQYPGSEDPRETGFALANGGRDFFTVLQEEPERAAEFAQSMSMQSMGPDRNVSYCVEALAAWGHADKCPRVIVDVGGSLGTLSEALVRRYPGIDHAIVQDLSKTIGDAKVPEDLQKDQRMRFMEYDFFTEQPVKDADVYLFRQILHDWSDLKCVEILKSQVAALKPGARIVLNEMCSRPPNAYTHIRDADHRGYDIAMKHFFNGKERTSEDFRALFAAADKRFEIVSFRRPLGSAMSIIEVAWRG

SEQ ID NO: 30803 - DNA, 492 bp, Muscodor strobelii
  misc_feature: SGI EST ID NO. CUFF.72950.0
  misc_feature: Variant of the nucleotide sequence at SEQ ID NO 30801
cggcgctgaaaccaggagcgcgcatcgttctaaacgagatgtgttcccgtccgcccaatgcttatacccacatccgggatgcggatcacagaggttatgacatcgcaatgaagcacttcttcaatggcaaagaacggacgagcgaagacttccgcgccctcttcgccgccgccgataagaggtttgagatcgtctcattccggcggcccctaggctctgccatgtcgataatcgaagttgcctggcgaggatgatagtaccttagcttttgtgactggaatctcaaatacgacctctgctgattaatggaaatgtcgtttgaatgacattgggtttgtcacaaaggcgttgctaggctgttccaggctagcagcttgaaaaatccacaatctttagcagcctaacatgaaatttcaaagttaacctgagccccaagtaagagatagaaatacaccttatgctacggtctgtaattattcatcgaatagctcg

SEQ ID NO: 30804 - DNA, 1056 bp, Muscodor strobelii
  misc_feature: SGI cDNA ID NO. 570598
  misc_feature: Encodes the peptide sequence at SEQ ID NO 30805
atggcttatacacgtccggtcagtcgctcgcctaccgataccaggaccggctctgtgcccctagacataggagatgcaaaacacaatgactaccttccgactagcaccaagacgattcaggagtactccacaactaagctaggcggtcaaaccgatatactctcgtcgcaagcatcaaggagccatccacgcgagcgcgctgaactatacaagcaaaaagccttggattggtttgacaagtttgactttggtttcgatatctccgataagagtacctggattcaagaacatcttcccatgatgatgaaggggggagtcatcttgaactactgcgccgcgcatgagaaatgggtttgggaagcaagatgcgagcccggcgttatcgaaccttttgcacagctgtggtgcacagatgaacttctagtctctttcgactcggtcaacatcacgctgcccggtcgaaaagatgtgccgtggtctccttggccgcacgttgaccagtcccctacccgcaaaggcctcgcttgtgttcagggcatcatcaacctctctcccgcgggcccgcgcgacggcggactgcagctttggcaggggagcgcggagctctttgaacaatttttcgccgaacacccaccgtcgtccaagaccacagacacaccaggccaagtcgatttctacggcttcacactcgacgacgttgcgtggttcgaggcgcgtggttgcctacccattaaaatcgacgccgagccaggcgatctcatcatctgggattcgcgcaccgtgcaccactcgaagctgccggagagcgacacgatccgtaccgtgctgtatgctacatatgcgccggctcggttggcgtccccggaggatctagccctgaaggcggatttgtttcaccgctacgaggggtcaacgcactggccgcactgtaacatctggccgcagggaaaggcgaaacggaatgggaacatctgccctggagaaagggatgagccacttgagaagccggagatcactgaaacggtactgaagcttgccggggtcaaatcttattaa

SEQ ID NO: 30805 - protein, 351 aa, Muscodor strobelii
  misc_feature: SGI Peptide ID NO. 570598
  misc_feature (65)..(351): NCBI GI: 115387281 Blast Desc: conserved [Aspergillus terreus NIH2624] gi|114195230|gb|EAU36930.1| conserved [Aspergillus terreus NIH2624]
  misc_feature (65)..(351): NCBI GI: 189211303 Blast Desc: conserved [Pyrenophora tritici-repentis Pt-1C-BFP] gi|187978075|gb|EDU44701.1| conserved [Pyrenophora tritici-repentis Pt-1C-BFP]
  misc_feature (63)..(351): NCBI GI: 189211353 Blast Desc: conserved [Pyrenophora tritici-repentis Pt-1C-BFP] gi|187978100|gb|EDU44726.1| conserved [Pyrenophora tritici-repentis Pt-1C-BFP]
  misc_feature (63)..(351): NCBI GI: 238505390 Blast Desc: conserved [Aspergillus flavus NRRL3357] gi|220690038|gb|EED46388.1| conserved [Aspergillus flavus NRRL3357]
  misc_feature (65)..(351): NCBI GI: 145248229 Blast Desc: An13g02250 [Aspergillus niger] gi|134081113|emb|CAK41624.1| protein product [Aspergillus niger]
  misc_feature (65)..(351): NCBI GI: 169772907 Blast Desc: [Aspergillus oryzae RIB40] gi|238490822|ref|XP_002376648.1| conserved [Aspergillus flavus NRRL3357] gi|83768783|dbj|BAE58920.1| protein product oryzae]
  misc_feature (65)..(351): NCBI GI: 256724177 Blast Desc: [Nectria haematococca mpVI 77-13-4]
  misc_feature (65)..(351): NCBI GI: 46115778 Blast Desc: FG03731.1 [Gibberella zeae PH-1]
  misc_feature (65)..(351): NCBI GI: 242812244 Blast Desc: conserved [Talaromyces stipitatus ATCC 10500] gi|218714257|gb|EED13680.1| conserved [Talaromyces stipitatus ATCC 10500]
  misc_feature (63)..(351): NCBI GI: 169611606 Blast Desc: SNOG_08917 [Phaeosphaeria nodorum SN15] gi|111062965|gb|EAT84085.1| SNOG_08917 [Phaeosphaeria nodorum SN15]
MAYTRPVSRSPTDTRTGSVPLDIGDAKHNDYLPTSTKTIQEYSTTKLGGQTDILSSQASRSHPRERAELYKQKALDWFDKFDFGFDISDKSTWIQEHLPMMMKGGVILNYCAAHEKWVWEARCEPGVIEPFAQLWCTDELLVSFDSVNITLPGRKDVPWSPWPHVDQSPTRKGLACVQGIINLSPAGPRDGGLQLWQGSAELFEQFFAEHPPSSKTTDTPGQVDFYGFTLDDVAWFEARGCLPIKIDAEPGDLIIWDSRTVHHSKLPESDTIRTVLYATYAPARLASPEDLALKADLFHRYEGSTHWPHCNIWPQGKAKRNGNICPGERDEPLEKPEITETVLKLAGVKSY

SEQ ID NO: 30806 - DNA, 1600 bp, Muscodor strobelii
  misc_feature: SGI EST ID NO. CUFF.72957.0
  misc_feature: Variant of the nucleotide sequence at SEQ ID NO 30804
aggtggttgcctcgaataagcgggccactttgtgacaacttgatagaattgtgtccgcgatatacccctttgttctggagtttcgacgcgaacgacttcttgactccttgagcttccgtaaattctcaccttggagggatgagcaggaaacggggtgctagcataacgggagtcaggggatcagcgcggaagctgacacgcatgctgatgaccggttgcatttcccatcaggcttacacgaccatcatctcggacccctacacccgtgtaggtaagtagtgtaagcggtctaatgcagtactgctgacgcgggggtgccaagaatgacggtgtggcaataaacgatcgagagagccactaccatagcacaatggtagttcgcattttctcaatacaatcgtcggttcatctcacagtctcatgaacgatggcttatacacgtccggtcagtcgctcgcctaccgataccaggaccggctctgtgcccctagacataggagatgcaaaacacaatgactaccttccgactagcaccaagacgattcaggagtactccacaactaagctaggcggtcaaaccgatatactctcgtcgcaagcatcaagtaagatcctctttggtgactggcgtgacgacttctttaagaatggttattatgttattaagggagccatccacgcgagcgcgctgaactatacaagcaaaaagccttggattggtttgacaagtttgactttggtttcgatatctccgataagagtacctggattcaagaacatcttcccatgatgatgaaggggggagtcatcttgaactactgcgccgcgcatgagaaatgggtttgggaagcaagatgcgagcccggcgttatcgaaccttttgcacagctgtggtgcacagatgaacttctagtctctttcgactcggtcaacatcacgctgcccggtcgaaaagatgtgccgtggtctccttggccgcacgttgaccagtcccctacccgcaaaggcctcgcttgtgttcagggcatcatcaacctctctcccgcgggcccgcgcgacggcggactgcagctttggcaggggagcgcggagctctttgaacaatttttcgccgaacacccaccgtcgtccaagaccacagacacaccaggccaagtcgatttctacggcttcacactcgacgacgttgcgtggttcgaggcgcgtggttgcctacccattaaaatcgacgccgagccaggcgatctcatcatctgggattcgcgcaccgtgcaccactcgaagctgccggagagcgacacgatccgtaccgtgctgtatgctacatatgcgccggctcggttggcgtccccggaggatctagccctgaaggcggatttgtttcaccgctacgaggggtcaacgcactggccgcactgtaacatctggccgcagggaaaggcgaaacggaatgggaacatctgccctggagaaagggatgagccacttgagaagccggagatcactgaaacggtactgaagcttgccggggtcaaatcttattaagttgagctataatgtgtctacaatctttggctttaaggccaaataaagaggcccg

SEQ ID NO: 30807 - DNA, 4869 bp, Muscodor strobelii
  misc_feature: SGI cDNA ID NO. 570599
  misc_feature: Encodes the peptide sequence at SEQ ID NO 30808
atgagtattaatctcccccgaggaaaaggtactgaagagctttggaaaactctcgcagatggtctgaacgctgtccaaacgctgcctgagtcgcgtttcaaggtctccgactactactcgacagaggaagatgcggatatactctccatgcgagttaagcatggcgcatttttggcagatcccttcgcctttgacaacgcctttttcaacatttccccccgagaggcgaaatccatggacccgcaacagcgattactgctttacgcagctcaagaagcattggatgatgctggatacgtagcagactcaacaccatcttctcaaagaatgtctactggatgctacggtattggcgtcgctacgggtgactacgtggacaatctgcgcgacgacatcgacgtcttctatgcccctggtacgctgcgtgcgtttcatagtgggagaatatcatacttctacaagtttagcggcccaagtatcgttttagatacagcatgctcatcttcaatggtctctatttaccaagcatgtcgggccttgcagcagggcgactgcacgaccgccattgccggcggcgtgaatgtcatatccagtccagatatgtacctcggattagctaaaggccactttcttagtcctacagggggatgcaagtcctttgacgcggacgcagatggatattgtcgagccgaaggctgcgttctttttgtgctcaaaaacttatcggccgccgtcgctgagaacgatcgtatacatggagttatccgtaatgtgatgataaatcagagcggtaatgctcattctatcacgcatccccacagcccgacgcaaatcgatctcctccgacgattgatggagaaaccgaatattgatcctaggtcagttactgtcgtggaagcgcacggaacaggtacacaggcgggagatgcctgtgaaatagaaagcctaaggactgtttttggtccgcatcattctctcgagaatcctctcgttgttggctctattaaaagtaatatcggacattgcgaggccgcgtctggagcagcgggtcttgcgaagctcctcctcatgcttcgccaccacaagattcctatgcaggctggccttcgaaacatcaacccacgctttgccgacatggaaagtgctggtttggccatacctagccagaccttggcatggaaacatgagcacacgacaccgagaagagctctgctgaacagcttcggtgctgccggctccaacgcatctcttctcctggaggagtgggttgagcccgtgaacagcccgaagaacaaacacccagcacggtcagcgtatgtgtttgcactttcagcaaagtctgccagggcactgcaaagaattatagaacaagacattcggtatctcaaagatcctacgtcttcgctatcgatcgagaacatctgttacactgctgtcgcgcgacgtcagacccatcagtaccgcattgctatagcatgcacctcgatgagcgatctaattgcgaagctagagcggcttgaaacccataacgccatggtctctgctggtcgcgtctcgaaagtcgtcttcatcttttcgggccaaggtagcttgtacgaaggaatgggacaagagcttatgaccacactgcccacgttcagggatacgatagtgaagtgcgatacaatccttcgtgacttgggttacccaggcatcttaggccttttctcgacaaattttgaaaacacaggagaaccgtcttatgatgcggaccatgtcatcacctcgcaatgtgcctgtgtcgcattagaatatgcacttgctatggttttcgtctcgtggggggtcgtgccccagtatgttatgggccatagtctcggcgaatatgcggccatgtgcttttcgggtttactgacgttggaggacgcgttgcacgtcgtagccgcgcgagccaccatgatgacgcagaagtgcgcctccaattctacgggaatggcagcatgtgacctgtcctctagtagtgttgatgaattgatatcaactcacactagagacctctccggattgaccgttgcctgtgttaatggcatcaacaactgcgtagtcgctggtcccatcggtcaattagatagatttcgaacatattgccacgcaagaaacgccaagatcaagatacttgacactcccttcgcattccactcctctgctatggaccctatcttggagcccttgaagactttaggacggtctatcaagttttcacgacccaccactcctatcctctcgactgtcctcgggcgcttgtttagagaggatgacttatctggtgattacttcgccgcgcatgctcgacaacgggtactgtttagccaaagtcttgcttctttgcaaaatttagaatcagtcactggtgctttgttcctcgaatttggtcctcacccaatattgctccccatggtcaagaccttcttcggtacgaatagttcttgtatctacttggcaacgcttcgaaaaggacagagcgcttggtcatctctcactgatacgctgtccgatctttacttgctagatactcccgtgacttggcgccaggtcttttcaccaacattggctaaaatggtaaatctgccgggacacccgttagagggcccgacttatttcacaccataccgtgaaggtcgtcgatctcaagtttccgattctcacggaggaacgtcacccgtgtcccgcactgttacaggactcactcttcttccctggcttaggagtatggacccatcgagagaaacctgtgtactcgaaacctcccttggagtcatcgggcccttgattctgggtcacgatgttggcgggacacccatttgtccggcttcagtattccacgagctggctctcgaagcagcatccataatgatcgaatcgcccaacaggtatttgatggtcgtcggcgagatgaacatgactacccccctggcatacaaggaatcacgtgtagccgatgtagtgaccgtgtatattgaaaagaatggcgtcggctcaaaggcagacttcaagatatcctcgtgcctcaacgcagatctggccgaggatatacattgcaccggtactattactctcattgacttccacatcgtcgagtcccgttggtcaaaggacgcagcgatggtatcgcggcagacccgttatctcgaaggtccggggaaagattacagcagcatcttccgcacgaaagtcctctaccaggcaatcttcccgcgtgtcgtccgatattctccagattatcaaagcttgttatatttgaccgttgccgatgataacctcgaaggcattggactgtttaagctgccatccagtgcccagagtcacggttattttgcacctcctgttttcattgatacgctattgcatgcggctggtttcatcgccaaccttgggcttcggtccgacgaggtggggatttgcgcacgcgtcgagtccattgagatgtccaaccagaatattgactacaaggacactttcaccgtgtattgtagcttgctcgaggtaagaggagccgttctggcagacgcggtagcgctggatagtgcaggaagagtggtcgccgtggtccgtggtatggagttcaagaaacttcggcttcatgcttttcagcacctcttatcccaaaaatcgtctacctttgatcctcgggagacttccgagggtctctcagaagataccagcggcggatccatgaatactccgattgcgccatctgacagtagtagtagcgaatctgtcagagcatcgctcaagagtctcataggtgagcttggcggtttcgacgaagaagacctgaactaccaaaagccgctggaagagctaggaattgattcgctcatgcagatcgagatcattgcaaagcttgttcgagcgtatccatgtctcaggggatcgtcgcgtatggctctatctgactgcgatactcttgcatcgctcgaatgcacgttactaaacctcattatggggccttcgcacgcttcaccccctcgacctgcctgtatgctcacgccggcgccatctaagcttccaaatgatccagaatggagaaaggcactgcaagtaccgtacccggagcgacaacaatcgccggcaaatgacggcgagcaggcgtatgacaacttagtagctctacatcttttgcctaccgacatgtctgtgccactttgtttgattcatgacggcagtggtcaaattagcatgtacgcgcgactgcgtggccacgatcgaaattcgtacgccatctttgacccgcactttggaagtggtgagatttcattcccgagcctatcgcacatggcggagatgtacacttctcgtatcgtacaatcatgcccttcacgtatcatagtaggcgggtggtcgtacggcggtgtcgtggcctttgagatggcgcgacagctcttggctaagggattcgatgttaagggtctcgtattaattgactctccgagtccgattaatcatcaacctctcccgtatagcatcatctgtcacgctactaacctaaagagtcaaaaggagatgctcgtttctgaaagccaagttgcgataaagaacgagtttcagtcaaacgcttctctcctgggcaactaccaggcggtgcctctaccccggcaacccaaccgacatcacctacacactgtcatgctgaggagccagcgagtgcttgatacagagagcctctgtggcgtcaggtatgattggctcagtaaacaaagtattcgtgacgccagcatcgtggactgggaagtattggtcggcggccagattgaagtcttaccaattccagggaaccatttcgaggccttttctccagaaaatgtaagtaaaacgttatctgctctgtag

SEQ ID NO: 30808 - protein, 1622 aa, Muscodor strobelii
  misc_feature: SGI Peptide ID NO. 570599
  misc_feature (522)..(853): Pfam Id: PF00698 Pfam Desc: Acyl transferase domain
  misc_feature (1)..(244): Pfam Id: PF00109 Pfam Desc: Beta-ketoacyl synthase, N-terminal domain
  misc_feature (252)..(370): Pfam Id: PF02801 Pfam Desc: Beta-ketoacyl synthase, C-terminal domain
  misc_feature (1393)..(1622): Pfam Id: PF00975 Pfam Desc: Thioesterase domain
  misc_feature (599)..(853): Pfam Id: PF00698 Pfam Desc: Acyl transferase domain
  misc_feature (522)..(559): Pfam Id: PF00698 Pfam Desc: Acyl transferase domain
  misc_feature (1393)..(1500): Pfam Id: PF00975 Pfam Desc: Thioesterase domain
  misc_feature (1)..(1622): NCBI GI: 46116244 Blast Desc: FG03964.1 [Gibberella zeae PH-1]
  misc_feature (1)..(1326): NCBI GI: 115387048 Blast Desc: ATEG_07379 [Aspergillus terreus NIH2624] gi|114191063|gb|EAU32763.1| ATEG_07379 [Aspergillus terreus NIH2624]
  misc_feature (1)..(1291): NCBI GI: 242816973 Blast Desc: polyketide synthase, [Talaromyces stipitatus ATCC 10500] gi|218713323|gb|EED12747.1| polyketide synthase, [Talaromyces stipitatus ATCC 10500]
  misc_feature (1)..(1615): NCBI GI: 170089613 Blast Desc: polyketide beta-ketoacyl-synthase [Laccaria bicolor S238N-H82] gi|164649289|gb|EDR13531.1| polyketide beta-ketoacyl-synthase [Laccaria bicolor S238N-H82]
  misc_feature (28)..(1353): NCBI GI: 189207306 Blast Desc: conidial yellow pigment biosynthesis polyketide synthase [Pyrenophora tritici-repentis Pt-1C-BFP] gi|187976080|gb|EDU42706.1| conidial yellow pigment biosynthesis
  misc_feature (1)..(1335): NCBI GI: 171677268 Blast Desc: protein product [Podospora anserina] gi|170936702|emb|CAP61360.1| protein product [Podospora anserina]
  misc_feature (1)..(1320): NCBI GI: 238491832 Blast Desc: polyketide synthase, [Aspergillus flavus NRRL3357] gi|220697566|gb|EED53907.1| polyketide synthase, [Aspergillus flavus NRRL3357]
  misc_feature (1)..(1335): NCBI GI: 159124819 Blast Desc: polyketide synthase, [Aspergillus fumigatus A1163]
  misc_feature (1)..(1320): NCBI GI: 169773815 Blast Desc: [Aspergillus oryzae RIB40] gi|83769237|dbj|BAE59374.1| protein product [Aspergillus oryzae]
  misc_feature (1)..(951): NCBI GI: 242772323 Blast Desc: polyketide synthase, [Talaromyces stipitatus ATCC 10500] gi|218721636|gb|EED21054.1| polyketide synthase, [Talaromyces stipitatus ATCC 10500]
  misc_feature (12)..(880): SWISSPROT Homolog: EC 2.3.1.94 6-deoxyerythronolide-B synthase
  misc_feature: Useful for fungicidal and/or biocontrol applications
MSINLPRGKGTEELWKTLADGLNAVQTLPESRFKVSDYYSTEEDADILSMRVKHGAFLADPFAFDNAFFNISPREAKSMDPQQRLLLYAAQEALDDAGYVADSTPSSQRMSTGCYGIGVATGDYVDNLRDDIDVFYAPGTLRAFHSGRISYFYKFSGPSIVLDTACSSSMVSIYQACRALQQGDCTTAIAGGVNVISSPDMYLGLAKGHFLSPTGGCKSFDADADGYCRAEGCVLFVLKNLSAAVAENDRIHGVIRNVMINQSGNAHSITHPHSPTQIDLLRRLMEKPNIDPRSVTVVEAHGTGTQAGDACEIESLRTVFGPHHSLENPLVVGSIKSNIGHCEAASGAAGLAKLLLMLRHHKIPMQAGLRNINPRFADMESAGLAIPSQTLAWKHEHTTPRRALLNSFGAAGSNASLLLEEWVEPVNSPKNKHPARSAYVFALSAKSARALQRIIEQDIRYLKDPTSSLSIENICYTAVARRQTHQYRIAIACTSMSDLIAKLERLETHNAMVSAGRVSKVVFIFSGQGSLYEGMGQELMTTLPTFRDTIVKCDTILRDLGYPGILGLFSTNFENTGEPSYDADHVITSQCACVALEYALAMVFVSWGVVPQYVMGHSLGEYAAMCFSGLLTLEDALHVVAARATMMTQKCASNSTGMAACDLSSSSVDELISTHTRDLSGLTVACVNGINNCVVAGPIGQLDRFRTYCHARNAKIKILDTPFAFHSSAMDPILEPLKTLGRSIKFSRPTTPILSTVLGRLFREDDLSGDYFAAHARQRVLFSQSLASLQNLESVTGALFLEFGPHPILLPMVKTFFGTNSSCIYLATLRKGQSAWSSLTDTLSDLYLLDTPVTWRQVFSPTLAKMVNLPGHPLEGPTYFTPYREGRRSQVSDSHGGTSPVSRTVTGLTLLPWLRSMDPSRETCVLETSLGVIGPLILGHDVGGTPICPASVFHELALEAASIMIESPNRYLMVVGEMNMTTPLAYKESRVADVVTVYIEKNGVGSKADFKISSCLNADLAEDIHCTGTITLIDFHIVESRWSKDAAMVSRQTRYLEGPGKDYSSIFRTKVLYQAIFPRVVRYSPDYQSLLYLTVADDNLEGIGLFKLPSSAQSHGYFAPPVFIDTLLHAAGFIANLGLRSDEVGICARVESIEMSNQNIDYKDTFTVYCSLLEVRGAVLADAVALDSAGRVVAVVRGMEFKKLRLHAFQHLLSQKSSTFDPRETSEGLSEDTSGGSMNTPIAPSDSSSSESVRASLKSLIGELGGFDEEDLNYQKPLEELGIDSLMQIEIIAKLVRAYPCLRGSSRMALSDCDTLASLECTLLNLIMGPSHASPPRPACMLTPAPSKLPNDPEWRKALQVPYPERQQSPANDGEQAYDNLVALHLLPTDMSVPLCLIHDGSGQISMYARLRGHDRNSYAIFDPHFGSGEISFPSLSHMAEMYTSRIVQSCPSRIIVGGWSYGGVVAFEMARQLLAKGFDVKGLVLIDSPSPINHQPLPYSIICHATNLKSQKEMLVSESQVAIKNEFQSNASLLGNYQAVPLPRQPNRHHLHTVMLRSQRVLDTESLCGVRYDWLSKQSIRDASIVDWEVLVGGQIEVLPIPGNHFEAFSPENVSKTLSAL

SEQ ID NO: 30809 - DNA, 861 bp, Muscodor strobelii
  misc_feature: SGI cDNA ID NO. 570600
  misc_feature: Encodes the peptide sequence at SEQ ID NO 30810
atgaattatgtgatggagcgaattgatgttcattgtcacgctgtacctccaggctatcgccagtatgcgctggataatggccacgcccggcctgatggtatgcctgcgcttccgaactggaaaccagaggatcacatcgctctcatgaagaagctgagaattgctaaatccatcctgagcatcacgtccccaggtacccatcttacgccctcccaggattctcgtgcagcagcagagactcggaagacaaacgaagaactctcggacgtcagcattcgccatgcatcccattttgcattctttgcatcattgccgcttccctctatagaagagtctatagaggagattgactacgccttggatcatctcggcgctgtaggcttcgctgtaatgtccaatgcgaatggtgtctatctaggagacgcgtcacttgatcccgtctttgccaaactcaacgcgcgcagagctatagtcttcattcatcctactacttgcagtttgctgagtccgggcggacagatagagaaggtcagcccgctcgcacagtatccacgcccgatgatggagttcatgtttgacgagacgcgtgcaatcgcgaaccttctcctttccgggactgtctcaaagtatcgggacattacattcatcatgtcccactgtggatgcactcttcctccgatcctggatcgtctcggatcctttgccacgtttacaggcgaaaaaaaccgaagtgacgagtttcgagagatgcttcgagaacgtttcttctttgacctggccggatttccatttcctgaccaaattcacgggctgctcagaatgttgggaaggggggctgagcgaaggctgctgtgtaagtga

SEQ ID NO: 30810 - protein, 286 aa, Muscodor strobelii
  misc_feature: SGI Peptide ID NO. 570600
  misc_feature (8)..(286): Pfam Id: PF04909 Pfam Desc: Amidohydrolase
  misc_feature (8)..(232): Pfam Id: PF04909 Pfam Desc: Amidohydrolase
  misc_feature (6)..(284): NCBI GI: 46116246 Blast Desc: FG03965.1 [Gibberella zeae PH-1]
  misc_feature (5)..(275): NCBI GI: 255940830 Blast Desc: Pc16g08650 [Penicillium chrysogenum Wisconsin 54-1255] gi|211585807|emb|CAP93535.1| Pc16g08650 [Penicillium chrysogenum Wisconsin 54-1255]
  misc_feature (6)..(272): NCBI GI: 212539119 Blast Desc: PMAA_101330 [Penicillium marneffei ATCC 18224] gi|210069457|gb|EEA23548.1| PMAA_101330 [Penicillium marneffei ATCC 18224]
  misc_feature (6)..(264): NCBI GI: 189207042 Blast Desc: amidohydrolase 2 [Pyrenophora tritici-repentis Pt-1C-BFP] gi|187975948|gb|EDU42574.1| amidohydrolase 2 [Pyrenophora tritici-repentis Pt-1C-BFP]
  misc_feature (7)..(280): NCBI GI: 169615921 Blast Desc: SNOG_11127 [Phaeosphaeria nodorum SN15] gi|111060506|gb|EAT81626.1| SNOG_11127 [Phaeosphaeria nodorum SN15]
  misc_feature (5)..(275): NCBI GI: 242372230 Blast Desc: amidohydrolase [Staphylococcus epidermidis M23864:W1] gi|242349959|gb|EES41560.1| amidohydrolase [Staphylococcus epidermidis M23864:W1]
  misc_feature (8)..(276): NCBI GI: 256395586 Blast Desc: amidohydrolase 2 [Catenulispora acidiphila DSM 44928] gi|256361812|gb|ACU75309.1| amidohydrolase 2 [Catenulispora acidiphila DSM 44928]
  misc_feature (5)..(268): NCBI GI: 70725474 Blast Desc: SH0473 [Staphylococcus haemolyticus JCSC1435] gi|68446198|dbj|BAE03782.1| protein product [Staphylococcus haemolyticus JCSC1435]
  misc_feature (7)..(275): NCBI GI: 46139485 Blast Desc: FG11257.1 [Gibberella zeae PH-1]
  misc_feature (49)..(276): NCBI GI: 226362708 Blast Desc: hydrolase [Rhodococcus opacus B4] gi|226241193|dbj|BAH51541.1| hydrolase [Rhodococcus opacus B4]
MNYVMERIDVHCHAVPPGYRQYALDNGHARPDGMPALPNWKPEDHIALMKKLRIAKSILSITSPGTHLTPSQDSRAAAETRKTNEELSDVSIRHASHFAFFASLPLPSIEESIEEIDYALDHLGAVGFAVMSNANGVYLGDASLDPVFAKLNARRAIVFIHPTTCSLLSPGGQIEKVSPLAQYPRPMMEFMFDETRAIANLLLSGTVSKYRDITFIMSHCGCTLPPILDRLGSFATFTGEKNRSDEFREMLRERFFFDLAGFPFPDQIHGLLRMLGRGAERRLLCK

SEQ ID NO: 30811 - DNA, 1599 bp, Muscodor strobelii
  misc_feature: SGI cDNA ID NO. 570601
  misc_feature: Encodes the peptide sequence at SEQ ID NO 30812
atgggtttcgattatgatgcaaacagcactattctactaagcctatgcctttcggggactgctttgatcgtgctggttatattaaaatactatgttgcaagttgtcggcctcgagcatttccgcctggtcccaggacgcttccattcataggcaatatcagccaggtgccaagggttaaggcgttcttaaaatttcacgagcttggaaagcagtatggctcgatccttggactgaaactgggttctcagaatgttgttgttttaaatagctataagcacgtgagagcgctctttgatcaaagaggctctatctactcgagccgtccaaggacgtatgtcgccaatgaacttgtctgccctaatgagattcacctgctactactcgaatatggtcacgagtggcgtaaacaacgcaagatagttcagtcgctgctgaacgtgacttccgtagaccgcttacttccaatacaaaatgccgaggccactcagactatgttggagctgcttcaggatcctcaaggctactacaaccacatccgccggtacaccactgctgtcatcctagcctcagtctatgcacaacggggcgcccgattcgatgcgcccaatgtacaggcactctaccacgcacaagatcagttcacggccatcttggagcaggggcggacgccacctgttgaggcatttcccttcctgaagctggtgccggagtttatggcgccatggaagcagtgggctagaagggttcgagaagaacaaaaaggactatatctgtcgctcctcaatgagacgagggcacgaattgcatcggagagaggtcctcactgctacttggaggagatgctacgcgatcagaccaagaacgatatggacgatgagcacatcgcctatctagcgggaaatttgatggaggctgggtcggatacgacagcctctacattgttttctttcattcttgctatgatcaagtaccctgaagagttccgcaaagcacagcgggaagtcgatcaagtctgtggcgtctcaagatccccaacaacggatgatgtggaccgtctccccttcatcaaggcctgcatggatgagacactgcgatggcgtcctgtagcttccggaggtgttcctcacatgctaacgcaggatgacgcgtatgaaggatatttcctgcctaagggtaccgttgtcctggccaatacctgggcaatccaccacgatgaggccgagtattaccagcccgagagatttgtacctgaccgcttcttgaacaataagtacgggacgaaatatgtggtggatgaaagcaaagaccccaatcgtagagtgtcatatggatttggtgcaggaagaagggtttgcccaggacagaggctggccaagaactcactgatgttgaatatggccaagatagcttggggtttcgatctttcgccaggttgcgatggcgttaacattgatgtggcgtcagcttacacgaatgggtttttaattgcccctgagaggtttcctgttcacttcaaagcgcgatctaacaagcatcgggatgttatcactcgagagtatgaggccgtcaaacctttccttgagaagtatgaggattga

SEQ ID NO: 30812 - protein, 532 aa, Muscodor strobelii
  misc_feature: SGI Peptide ID NO. 570601
  misc_feature (41)..(505): Pfam Id: PF00067 Pfam Desc: Cytochrome P450
  misc_feature (246)..(469): Pfam Id: PF00067 Pfam Desc: Cytochrome P450
  misc_feature (41)..(141): Pfam Id: PF00067 Pfam Desc: Cytochrome P450
  misc_feature (11)..(529): NCBI GI: 67524539 Blast Desc: AN2727.2 [Aspergillus nidulans FGSC A4] gi|40743839|gb|EAA63025.1| AN2727.2 [Aspergillus nidulans FGSC A4] gi|259486362|tpe|CBF84139.1| TPA: cytochrome P450, (Eurofung)
  misc_feature (128)..(532): NCBI GI: 115391249 Blast Desc: [Aspergillus terreus NIH2624] gi|114194053|gb|EAU35753.1| [Aspergillus terreus NIH2624]
  misc_feature (15)..(531): NCBI GI: 169603513 Blast Desc: SNOG_04767 [Phaeosphaeria nodorum SN15] gi|111067407|gb|EAT88527.1| SNOG_04767 [Phaeosphaeria nodorum SN15]
  misc_feature (19)..(521): NCBI GI: 255944711 Blast Desc: Pc20g05940 [Penicillium chrysogenum Wisconsin 54-1255] gi|211587858|emb|CAP85923.1| Pc20g05940 [Penicillium chrysogenum Wisconsin 54-1255]
  misc_feature (21)..(528): NCBI GI: 259484285 Blast Desc: TPA: cytochrome P450, (Eurofung) [Aspergillus nidulans FGSC A4]
  misc_feature (17)..(521): NCBI GI: 119483586 Blast Desc: Cytochrome P450 oxidoreductase, [Neosartorya fischeri NRRL 181] gi|119409852|gb|EAW19799.1| Cytochrome P450 oxidoreductase, [Neosartorya fischeri NRRL 181]
  misc_feature (10)..(528): NCBI GI: 240111106 Blast Desc: Cytochrome P450 family protein [Coccidioides posadasii C735 delta SOWgp]
  misc_feature (24)..(524): NCBI GI: 85111866 Blast Desc: NCU11242 [Neurospora crassa OR74A] gi|28925910|gb|EAA34906.1| NCU11242 [Neurospora crassa OR74A] gi|38566928|emb|CAE76231.1| related to O-methylsterigmatocystin
  misc_feature (3)..(531): NCBI GI: 170109003 Blast Desc: [Laccaria bicolor S238N-H82] gi|164639289|gb|EDR03561.1| [Laccaria bicolor S238N-H82]
  misc_feature (13)..(531): NCBI GI: 171694638 Blast Desc: protein product [Podospora anserina] gi|170947561|emb|CAP59722.1| protein product [Podospora anserina]
  misc_feature (12)..(522): SWISSPROT Homolog: EC 1.14.99.9 Steroid 17-alpha-monooxygenase
MGFDYDANSTILLSLCLSGTALIVLVILKYYVASCRPRAFPPGPRTLPFIGNISQVPRVKAFLKFHELGKQYGSILGLKLGSQNVVVLNSYKHVRALFDQRGSIYSSRPRTYVANELVCPNEIHLLLLEYGHEWRKQRKIVQSLLNVTSVDRLLPIQNAEATQTMLELLQDPQGYYNHIRRYTTAVILASVYAQRGARFDAPNVQALYHAQDQFTAILEQGRTPPVEAFPFLKLVPEFMAPWKQWARRVREEQKGLYLSLLNETRARIASERGPHCYLEEMLRDQTKNDMDDEHIAYLAGNLMEAGSDTTASTLFSFILAMIKYPEEFRKAQREVDQVCGVSRSPTTDDVDRLPFIKACMDETLRWRPVASGGVPHMLTQDDAYEGYFLPKGTVVLANTWAIHHDEAEYYQPERFVPDRFLNNKYGTKYVVDESKDPNRRVSYGFGAGRRVCPGQRLAKNSLMLNMAKIAWGFDLSPGCDGVNIDVASAYTNGFLIAPERFPVHFKARSNKHRDVITREYEAVKPFLEKYED

SEQ ID NO: 30813 - DNA, 819 bp, Muscodor strobelii
  misc_feature: SGI EST ID NO. CUFF.72988.0
  misc_feature: Variant of the nucleotide sequence at SEQ ID NO 30811
acagacactgcgatggcgtcctgtagcttccggaggtgttcctcacatgctaacgcaggatgacgcgtatgaaggatatttcctgcctaagggtaccgttgtcctggccaatacctgggcaatccaccacgatgaggccgagtattaccagcccgagagatttgtacctgaccgcttcttgaacaataagtacgggacgaaatatgtggtggatgaaagcaaagaccccaatcgtagagtgtcatatggatttggtgcaggaagaagggtttgcccaggacagaggctggccaagaactcactgatgttgaatatggccaagatagcttggggtttcgatctttcgccaggttgcgatggcgttaacattgatgtggcgtcagcttacacgaatgggtttttaattgcccctgagaggtttcctgttcacttcaaagcgcgatctaacaagcatcgggatgttatcactcgagagtatgaggccgtcaaacctttccttgagaagtatgaggattgaaaattcctgaatagcgatgaaagtattcaaggacgacagcaatgttatgtacgtagaggtactgtatcattgtagctcgcgagcggctgccagcgagcctataattcgttcaatgcgttcccattactgaaacgtggccagccaaacagctcccgtgcattgcccgcatacacagcgagcctttgttccgcgtcaaaaatgttatcgcattgctcgtccaattgctcggcaagtccaataacaactttagcgggggtaaaagggtagtcggtcccatctagtagtcagaaaggtgttgcgtt

SEQ ID NO: 30814 - DNA, 1344 bp, Muscodor strobelii
  misc_feature: SGI cDNA ID NO. 570602
  misc_feature: Encodes the peptide sequence at SEQ ID NO 30815
atggcgtcgcgaagcagccttcaaatccttatgtgtagtacgcccgtttccggccatattatacccatgcgggaaatcgcgaagcagcttgtgctccgaggatacgatgtttgctttgtgtctggctctggctatcgacaacagattgaagaaatcggagcactatttgtacctgttcagggttacggtgacttttatgacctcagagcacgagaccttgacgctctatggcctacgcctcttttatctcttgagggaccagcacatttttgccatgacctagttcacatattctgcaagtctctaccttcgcagcatcatgctattcaggtcgctttgcggatgctcaatgagaagcgtccagagaggccagtaatccttataacggagagtttgaattttggagcactacctcttctcttgggcgcatctgggatacgtccacagggattcgttgcaattggtctcaaccccgtgatgctgagtagtgttgattgcccaccctttgggcttggagctgaactagacagctcttcagagagtcgggaatggatcaaaattgagaacaaaaaacaaaaagaaacgttcgccttggcccaaaaggctttcgggcaagccctcgaaagcgtgggggctcgagtgccagagacgttcctgttagatgctctgtactctcttcccgatcgatttgtgcaaatgtgtacgcaaagcgtagagtacattcgaagcgatgctccgcaaactctgcgctttgctggcggctaccctcaatttttgaatgatgacgaaacagtagagagaccaacatggtggaacgaagttacgacaaacaagaccaaaagtatcattttcgtctgtcaggggaccgtggcctcagatctcaatcagttggcgttccctaccatgtccgcattcgctgagcggcctgacgttaccgtagtgctcgccataggccggaaaggcgccaggctctcccccgaaacttgcgtgccgactaacgcgagggtggtggactatattccgtatgatcaattacttcctcactgcgacgtctttgtcacgaccggaggttatggggggtttcagcgggccctttaccacggttgcccgctcgtgatagcaggcacgacagaagagaagccggagacggcggcgagagcagaatgggccggggtggcggtgaacctccgtgtgagcaatccctcgattgtacaattgagagaggcagtggacaaggtcctctcgaacccgaggtacaaggcagcagctttgaggacacaggcggagatagcaggttgtgaccctttaggtgttattataaaaaccatcgaagaattagcttag

SEQ ID NO: 30815 - protein, 447 aa, Muscodor strobelii
  misc_feature: SGI Peptide ID NO. 570602
  misc_feature (333)..(425): Pfam Id: PF00201 Pfam Desc: UDP-glucoronosyl and UDP-glucosyl transferase
  misc_feature (9)..(446): NCBI GI: 156045613 Blast Desc: SS1G_09997 [Sclerotinia sclerotiorum 1980] gi|154694390|gb|EDN94128.1| SS1G_09997 [Sclerotinia sclerotiorum 1980]
  misc_feature (1)..(447): NCBI GI: 154309557 Blast Desc: BC1G_07249 [Botryotinia fuckeliana B05.10] gi|150852272|gb|EDN27464.1| BC1G_07249 [Botryotinia fuckeliana B05.10]
  misc_feature (2)..(429): NCBI GI: 46117008 Blast Desc: FG04346.1 [Gibberella zeae PH-1]
  misc_feature (9)..(429): NCBI GI: 145604911 Blast Desc: MGG_01961 [Magnaporthe grisea 70-15] gi|145012824|gb|EDJ97465.1| MGG_01961 [Magnaporthe grisea 70-15]
  misc_feature (7)..(445): NCBI GI: 145236587 Blast Desc: An06g01140 [Aspergillus niger] gi|134075400|emb|CAK39187.1| protein product [Aspergillus niger]
  misc_feature (10)..(446): NCBI GI: 270492939 Blast Desc: UDP-glucuronosyl/UDP-glucosyltransferase [Acidovorax avenae subsp. avenae ATCC 19860] gi|270330095|gb|EFA40888.1| UDP-glucuronosyl/UDP-glucosyltransferase [Acidovorax avenae ATCC
  misc_feature (8)..(447): NCBI GI: 148255496 Blast Desc: glycosyltransferase [Bradyrhizobium sp. BTAi1] gi|146407669|gb|ABQ36175.1| glycosyltransferase [Bradyrhizobium sp. BTAi1]
  misc_feature (8)..(420): NCBI GI: 256729230 Blast Desc: NECHADRAFT_47739 [Nectria haematococca mpVI 77-13-4]
  misc_feature (9)..(446): NCBI GI: 39968249 Blast Desc: MGG_02217 [Magnaporthe grisea 70-15] gi|145010100|gb|EDJ94756.1| MGG_02217 [Magnaporthe grisea 70-15]
  misc_feature (8)..(446): NCBI GI: 120613290 Blast Desc: UDP-glucuronosyl/UDP-glucosyltransferase [Acidovorax avenae subsp. citrulli AAC00-1] gi|120591754|gb|ABM35194.1| UDP-glucuronosyl/UDP-glucosyltransferase [Acidovorax citrulli
MASRSSLQILMCSTPVSGHIIPMREIAKQLVLRGYDVCFVSGSGYRQQIEEIGALFVPVQGYGDFYDLRARDLDALWPTPLLSLEGPAHFCHDLVHIFCKSLPSQHHAIQVALRMLNEKRPERPVILITESLNFGALPLLLGASGIRPQGFVAIGLNPVMLSSVDCPPFGLGAELDSSSESREWIKIENKKQKETFALAQKAFGQALESVGARVPETFLLDALYSLPDRFVQMCTQSVEYIRSDAPQTLRFAGGYPQFLNDDETVERPTWWNEVTTNKTKSIIFVCQGTVASDLNQLAFPTMSAFAERPDVTVVLAIGRKGARLSPETCVPTNARVVDYIPYDQLLPHCDVFVTTGGYGGFQRALYHGCPLVIAGTTEEKPETAARAEWAGVAVNLRVSNPSIVQLREAVDKVLSNPRYKAAALRTQAEIAGCDPLGVIIKTIEELA

SEQ ID NO: 30816 - DNA, 1449 bp, Muscodor strobelii
  misc_feature: SGI cDNA ID NO. 570603
  misc_feature: Encodes the peptide sequence at SEQ ID NO 30817
atgaatgacaccagtggccggatcgccatcgttggcatggcatgccgccttcctggtggtgttgacagccccgagagcctctggtcactgttggcggagggcagagacggctggtcagaagtacctaaagaccgatgggactggaagtcgttctaccatacggattccgatgccaatgaggcgacaaatttcagccatgcccatttcctgcagcaggatatggcggcgtttgacgcgcgcttcttcggcatctcagcagccgaggcggcagccatggatccgcaacagaggcttctgttagaagttacttatgaggctgtcgagaatgcgggactaactctcgagagcttgcggggttccaatacttctgtgcacatggcgctttcagaacgtggttatgacaggatggggtataaagacatggccaacggcatgtataaaaagatcccgcgcgagttattttttgaccgtgctcctaagacatcgttgcacattgttggaaccggggaggctatcttagccaacagaatctcgtatttcatggacctcaaagggagttccaacgcgcttgatacaggttgtgtacgtacagtcatgtctggaggtcttgtggctctacatcaagcttgccgttcactgagagtcaacgactctaacttggcatttgccggggcaagtcaactatatgtatctcctgaccaatcgattgttatgtcggctctcacaagtaagcacggaagatgttatacatttgacgaccgcggcgaaggctacgggcgaggcgagggtgttggtgtccttgtcctcaaacgccttgatcgggcattggtggacggcgacccgatacatgctgtcgtagtagacgtagactgcaaccaggacggcaagactatgggactcttgctaccaaacgccgatgcccaggcggctctcgcgcgttcggtttacgataaggctggtctcgatcctctcgagacgttgtacgtggaagctcacggcaccggaactattgcaggcgacactgccgaagtctcttccatatctagagtctttggtcgcgaggcggggcgaacatccgctcttccgattgtgcgtacgatggtgctattgggaagcgcaaaggccaacctcggccatacggaagccgtcagcggtcttgcgggcatgattaaaggtgttatggtcctgaagaagaaccagattccgccccagctcaacttcgtcaatccaaaaccgactcttcgtcttgaagagaggggcataacagtcagtctaccatggccactattagactgctcggacatcatggacctagacgtatttcagtcaatagcttcgggtatggcggaaccaacgcccacgctattctcgagtcgtacgatcgcccgctgccagctatcaacaggaatagcaaaggtcgcatcagttctgttccaattgatagcttga

SEQ ID NO: 30817 - protein, 482 aa, Muscodor strobelii
  misc_feature: SGI Peptide ID NO. 570603
  misc_feature (6)..(275): Pfam Id: PF00109 Pfam Desc: Beta-ketoacyl synthase, N-terminal domain
  misc_feature (283)..(408): Pfam Id: PF02801 Pfam Desc: Beta-ketoacyl synthase, C-terminal domain
  misc_feature (7)..(425): NCBI GI: 212543173 Blast Desc: polyketide synthase, [Penicillium marneffei ATCC 18224] gi|210066648|gb|EEA20741.1| polyketide synthase, [Penicillium marneffei ATCC 18224]
  misc_feature (8)..(428): NCBI GI: 256721575 Blast Desc: NECHADRAFT_78513 [Nectria haematococca mpVI 77-13-4]
  misc_feature (9)..(428): NCBI GI: 45272100 Blast Desc: polyketide synthase [Gibberella zeae]
  misc_feature (8)..(428): NCBI GI: 46122833 Blast Desc: FG05794.1 [Gibberella zeae PH-1]
  misc_feature (8)..(428): NCBI GI: 256723827 Blast Desc: NECHADRAFT_37058 [Nectria haematococca mpVI 77-13-4]
  misc_feature (8)..(423): NCBI GI: 154319269 Blast Desc: BC1G_02586 [Botryotinia fuckeliana B05.10] gi|150857017|gb|EDN32209.1| BC1G_02586 [Botryotinia fuckeliana B05.10]
  misc_feature (8)..(423): NCBI GI: 40787328 Blast Desc: polyketide synthase [Botryotinia fuckeliana]
  misc_feature (1)..(423): NCBI GI: 189200591 Blast Desc: mycocerosic acid synthase [Pyrenophora tritici-repentis Pt-1C-BFP] gi|187983731|gb|EDU49219.1| mycocerosic acid synthase [Pyrenophora tritici-repentis
  misc_feature (8)..(425): NCBI GI: 156063378 Blast Desc: SS1G_01807 [Sclerotinia sclerotiorum 1980] gi|154697141|gb|EDN96879.1| SS1G_01807 [Sclerotinia sclerotiorum 1980]
  misc_feature (8)..(428): NCBI GI: 259481863 Blast Desc: TPA: polyketide synthase, (JCVI) [Aspergillus nidulans FGSC A4]
  misc_feature (8)..(430): SWISSPROT Homolog: EC 2.3.1.161 Lovastatin nonaketide synthase
  misc_feature: Useful for fungicidal and/or biocontrol applications
MNDTSGRIAIVGMACRLPGGVDSPESLWSLLAEGRDGWSEVPKDRWDWKSFYHTDSDANEATNFSHAHFLQQDMAAFDARFFGISAAEAAAMDPQQRLLLEVTYEAVENAGLTLESLRGSNTSVHMALSERGYDRMGYKDMANGMYKKIPRELFFDRAPKTSLHIVGTGEAILANRISYFMDLKGSSNALDTGCVRTVMSGGLVALHQACRSLRVNDSNLAFAGASQLYVSPDQSIVMSALTSKHGRCYTFDDRGEGYGRGEGVGVLVLKRLDRALVDGDPIHAVVVDVDCNQDGKTMGLLLPNADAQAALARSVYDKAGLDPLETLYVEAHGTGTIAGDTAEVSSISRVFGREAGRTSALPIVRTMVLLGSAKANLGHTEAVSGLAGMIKGVMVLKKNQIPPQLNFVNPKPTLRLEERGITVSLPWPLLDCSDIMDLDVFQSIASGMAEPTPTLFSSRTIARCQLSTGIAKVASVLFQLIA

SEQ ID NO: 30818 - DNA, 8445 bp, Muscodor strobelii
  misc_feature: SGI cDNA ID NO. 570604
  misc_feature: Encodes the peptide sequence at SEQ ID NO 30819
atgaggctaatcaccatatcggcaaactcagaagcatcccttgacaattggatcctcaaatttcgacaatggctcggctctgatcagggtcgggctacttcgcttgcagacctggctcataccctgaactttcgacgatcacagtttccctggcgctgcagctttgtgtccaacagcgttgaatcactggcggatgcgttcacaagctccaaggtaacgccggtcagggcggcaaaagaagtcggagtcgcctttgtcttcacgggccagggagcgcaatggttcgctatgggccatagtctcctaatgagatcccaaattttcgcgtcctcgatatctcggtgcagtcaggtcatgcaagctttgaagtgcgactgggatcttgtcgaggaactgtcccgcgataggaacacatcgcggcttggagagagcaaaatctctcagccatgtacaacagcgatccaaatcgcgctcgttgaccttctagagacttggggtctgagacctgaagcggtatatggccacagttccggtgagattgcggctgcatacgctgctggcgccctcagtagagacgcagcaatggaagtagcgtacctgagaggtatttgctcttccgaggccaagggctcaaatgcagcgatgggggctatgctagcggttggagagggcgagatagctatccaggagagaattcagagccttggccaaaaggacggcattgtgacggtggcatgcgttaacagcccggagagcaccaccgtctcgggcgatctagctgcgatcctcaaactccagtgtgtattggatgatgcatctatctttaaccgacggctccaggttgatactgcataccactcacatcacatggaggcggtcgcatcgccatactttaagtctcttgaaaaactgtcgcatggtaccccaacaaacaatgttgcgttttactcgtctgtcacaggaagtcttaaaaaatccgattttggccctgcgtactgggtgtccaacctggtatcacaggtgaagttcagcgccgcaacacatctggtggctgagcacctgtcgagctctggctcgtccgccaatttgctcgtcgaagttggcccacactctgcattgcttgggcccttgaggcagtctctatcgaagtggaagagccataaggcgggtatgccgttaagctacacgtactcctcgtgccttgttcgaaatacagacgcaatagcatccgtcttggctctggctggcaaggtcttcgagacgggccaccccgtgcaattgaacgctttgacagatcttacagaaatctcgtcccagccccgtgtggtagagaatttaccagcatattcatgggatcacagttccacctactggaccgagtcgagactcagtaaagcgcgccgcttccggccattcccgtatcatgatcttcttggtctttttgacgagaccagctccaccaaggaacctcggtggcgtcatcatctgagtcttgacactttgccatggcttcgcgatcatgttattgacggatttgtcatattcccaggcgccggatatctggccatggtgactgaggcgatgaaacagctgttgcatatacgcaagactgcaggtcacttccgaaacgtcaccttccgtgacgtccagttcctgaagcccgtggtgatcatggaagacgcgatcaaaggcagcgatcaagtcgagttgcagcttactatcagcccttcccaccagcacgtaggcagctcctgggaatacttccgcgttatctcttatgacagccagactgatgcatggatggaaaattgtgctggtcttgtatccgctgttgtcgaaactgccgaggcacagacccaagcccagacccacgacgaggtcatgggcaccacggaagacggtcttggtcacttgacgatggcagccgcagtgaagatgcaagaagacacacaggccaactcgaccattcaggccgaccctgagacgacgtatcgtgagctcatggcatctggaatggcttatggccccagcttcagaggcatgaaagagattcagatgggccactgtcaggggttcgcgaggattatcgtgggagacattgaagccaagatgcccggacaatacatgcagccacacattttccaccccagtacattcgatggcatgctccagctagtgactctggtgttccgtcgtgagtgcatggctgcgcccgtcatgcccctgacagttggcgcgatgtgcgtaagcgccgacatggatccgactccaggggcagaactcctcgtagccatctgtctgacacccgaaagtcgacaggtgggaagtggtgatttctgcgctttccagaggcaaagcgacggcacggtccgccccgtggccactggcagtggtgttcgactgcaagtcatcggaaaggctgatgcaagcggctcgtcgacccacaaatctagttaccgggtagcttgggcgcctgacgtggaccacatctcacaagacgattttatgaagcgcgctgcccgtctccacatctccgacaccagtggcgatgagtcgagcaagccgcccattgacgagcagcttcatctcaatgagcaagttgcgaccatcttcaatcggcgggcccttgggcggctgcgcgaggcagggaaccctagagcatgtaacacgcatttaaacaaactcttggactggatgcagcgatgggaccagtctgaggccgctcgttttctgagcaccgacaccaccaacgaggatgaagcccggttggttgctcaagctagacgcaacaacattggcggtctcattctgagccaaatgggaccgcactactttgatggtatcctcaccggcaaggcggacccgctagagctcctggtcgaagacgacttattgggacggctctattccgagtatgtgttgttccgtaaccactatgcgcagatggaggaatatgtccagtctctggttcataagtaccccaacatgaaggtcctggagattggtgctggcactggcggtgccacgatgccgctgctccgcaaaatcgaacgccgcggccgtctgctgctagaaaagtacacctacactgacatatcgtccggcttcttcgagcgggcgcgtcagaagtttggcagatggataggccagatggatttccagaccctagacatttccgccgatccgctgacacagggatacgtggctgagagctttgatctcatcattgccgccaacgtcctgcacgccactccgcaaatggatgtgactctcaataacgtccgtaggctgttgaagccgggtggccgtctggtgctcatggagctcacccaggtggcagccgcacatacgttcatcgttggggcgctcgagggttggtggatgtcggaggacgggcgcaaggatggcccgcttctcacggtgtccgagtgggatggacttctacggcgcacaggcttcacgggcacggatttggtaatacccgcgcatacaggccgtttgcgggatataagcagtttgatgatgacccgaaaagcaatatgggcaggtagcgcaaatgataacaagaagccttcgagtatggcagggtccaaggagagcagaattcttctcgggcactatgatccttctcaagaggctttggttgctggaatacgcgtgtgcttaaacgagagacaaatcagctgtacccagcaagtctggagtgaagccactacagcagatgcgaaccaactctcaattgtgcttgactcggccgagcacgcgctactccttgacccgacccccgagacctttgcgcgtgtcaagcagctacttctccgtagcaggaacattctttgggttagctttcatcagacactgtccagtgcgaaaacggcagctctgacgaacatggtcaatggcatggctagggtgctgcggcatgaagatccagccctgtgtcttgtcaccgtcaatatccaggacgaaatcgagttgaccaacccgagcacctcgcagctgcgacgtacagcccaaatactatcggatattgtgatgtcatcgttctggccactctcagaaacgacgcgctccgtagaggtcgaatacgccatccgcggagacgaggttcgcattccgcgggtgattcccgacgacgactttcgtcgttaccaggaaagttacagcggtagcagtccgaacgtcgcgcctgtccaatatcccacagccgacccgttgtcatcatcatcacttatcgagtgcaaatatctcgatcaagagcgacccctagtattcgatgttcgagtccccggtctgttgaacacgatccgcttcgtggataacgaagagatgaagcaaccgcttggtgctgaccatatcgaagtgcaagtccgcgcacacggtctcaacttcaaggatgtgttgatcgcactggggcagatgcctccgggtaccagcatggcaggcgtggcagcgggcgtggtcacttcggtcggctccaactcccagtccttgtggaaaccaggtgatagagtaattggtctcttcgtggcgccttatgggaacccggtgcgggttatcagtagaggcgcaatccgcattcccgactccgtcaccttcgtcgatgctgcggctatcgcgttagtatactacacggcctggtacggtcttgtccatgtcgccaggctcgaggagggacagactgtccttgtgcacgcggcgtctggtggtgtgggccaagccgccatccagatcgcgcagcacattggggctgaggtctacgctacagtgagcagcgctgcaaagcgtcagctcatccagaatcagtatggtataccacagactcacattttctcgtccaactcccgacaccttaaaaagctcgttatgaacgctacacgcggtaacggtgtcgacgtggtcttaaactcgctctcaggtcagatgctgatcgatagctgggactgcgttgccccattcggaacgtttgtagagatcggtaagaccgatatacacggtcgcagccagctaaacatggccaacttcgagaaacacatcacgtttgcctcagtagatgtgggccgcatgtatctgagacgccctgacacggccgcgcacatgcttgggcagattttcgacttggtcaaccagggcgtgctgaagccgccataccccattacgacgtaccctatgacgcagattgaggacgcgtttcgcgtcatggcgacgagaaaacacgtcgggaaggtggttttggtggccgacgaacagactatggtccgtgcagctacaccaaagccgcccgcgctccatctccatggtaatgggacttatgtgatcagcggcggagtaggtgacattggtaagaagatttgccaatttcttgccgagaagggagcaggtcatatcgtggctcttacgcgtcgcgatgtaaagacccaagaacgtgtgtctttggaagaagctgtgaaacagcctggtggtacactacatattgtcagatgcgatatcagcagcgaggcttccgtgaaggctgccgccaaagacatcgccgggcttccacctgtgagaggtgtcgttcaaagtgcactggtcctacaagaccacccaatggagtatatgcaggtcgaagactggaaagcctcggtcagaccgaaggtccatggcacactaaacatgcaccaacacttctgctcgcccgagacgaccgaattctttgtcatgctatcgtccgtcaacagcatgattggcttagtctcgcaaagtaactacgctgctggcaacgctttccaggatgccttttgccagaccatgaacacccaaggaacagcaaagggggggtccattactcactatactaccatcaatgtcggcgccgttgagggttcggagcagatcgcccgggcaatcggagccggcaccaatatccccacatcagtgacatttagtgacgtcctcgccacactcgagtatgctatgggttcgcaggcaaaagccgaccgtgcctcgcaactacttatggcttttgagcgcgacaccctagaggacgcactaggtcctacgatactaagtgaccgaatttttgatcacgtattaagccagagaaagcaagggaccgggatgactgatggcatcgctgtcacaacccaattcaccgccgtcactgcggctagggaggccacttctatcagagaggcagaagacatcgtcaggcatgcgctagtcgacaagtttgcggcatttctaggcgacgacatcgtggatgaccaacctatctccgcgttaggagttgactcgctcgtgtcgattgagctcaagaactggatcaagcatacgttcaacacaccactgcagacttttgagctcagtggtgcatctagcatcatcgcccttgcgcatcttgttgtgtcgagaatggagctgaagtgcaatggaactaaatccagcagcgcattccccaacggagatgaggaatccagtgacgtgccttcgagcgatcgacagaagccgtggaacgggaacatcggcggcgccaatgagcacaaagctacaggtgcttccaaggcaaagacaccgttccacggtttagagtgctgcaagcatagtgagactctacctgttcagcccctgccggatcttgacgactctctagacttctggctcgaggctaatgcgcatctgttcccggccgaggaaatccgcgtcatccagcaggatatggtcttcctgcgcgcgccagacagtcccgcgagacgggttctggccgacttgtttgctgcccacgcgcgagacgatgacccaggccacagttggctaaatgaggtcctcactgatgcgcgcttcttgtgccagcgcgacccccttgcaccatatcatagcatcatggcctcgcatcgggatgttggcgaggaaagggtgctagaacagcacggacaggctgaacgggcagccatcattacacaggctacgctggcatttaaacggtctatgcaggccgggactgtggcgcctctcgaggtcgcgggtcgacccgagtgtacgtggcggtggaggtggctgtttcactcggtgcgggtgccccgaactgggtgtgatgagatgatgcgctacgacgacaacaccggcgtgaagggggcagacgattatatcgccgtgctaaggcagggtcgagtgttcaaagtgatgctccaagatgagcagggccaggatcttccttttgccgtcctcaaggccacgttcgaggcaattgtgacccaggtgatagacgatgcagtctggtcaggtatcctgaccacggataaccgagactcttgggctaaggtaagaggaacacttgagagtaccagtccggacaatatcaagtacttccagctcatcgacactgcaatgttcgtcttgtgcttggatgacagcagtccagagacagcggaggagagggcacgacaaggttaccttggtgacggtttcaatcggtggtatgacaaagtgttgcaattctacgtgcacgctaatggacgatccggcttcattactgagcatggagctgtcgacggaaccacaccagctcgtctgcaggagctaattggtaggtatatagaggagcatgctaagcgcgagaagccgagcgagccgaatggtcatcatcaaaccaatagcatcgtgctcgaggagacggttctacaaacaacacccgagatcgagatacatatacaggctcttcgcaaacgctacctcggatacacatccccagaaaccacaacctatacccaagaatatcttgatgagttcggtactgagttcctcatgcaccaccgcgtagccgttaagagcgtcgttgacttaaccttccaacttgcactgcgtcttttctttgggcgtactctgccagcctgggaacccgtcagcgcagcccactaccacactgggcgctctgacggtgtgcaacgtgcgacgcccgccgtggtctcgttctgcgatatggtggcgtctttacatcaggacggttgcgagtcgcaccaacaactagacagcgagatctctggcgtgctactcgaagagagcgagcgcctaaaggacctggttacattacttaccgcagctacgaagcagatgaacgctggtatgcgcgagatgctaaacggacgcagctacctccgcgtcatggagctgctgaactggctgtggccggcggacacacccaagccgcgcttcttgagcgagcacgtcttctttggcaggcaattcccgcccgtgttcgtgcagagcaacgcagtcgagacggacatgccgatcgaggatcttgttcacgtcatgccgtcccctgagggtctgtgggccatcatgtttccagaaaagaacaggatacgaatctgccttaccactggtgcccccgcaagggcagcggcttttatggaacagttgcgacatgcggcgaggattatgcgagctattgttgaatccacgtga

SEQ ID NO: 30819 - protein, 2814 aa, Muscodor strobelii
  misc_feature: SGI Peptide ID NO. 570604
  misc_feature (84)..(425): Pfam Id: PF00698 Pfam Desc: Acyl transferase domain
  misc_feature (1769)..(1936): Pfam Id: PF00106 Pfam Desc: short chain dehydrogenase
  misc_feature (1558)..(1706): Pfam Id: PF00107 Pfam Desc: Zinc-binding dehydrogenase
  misc_feature (2197)..(2809): Pfam Id: PF00755 Pfam Desc: Choline/Carnitine o-acyltransferase
  misc_feature (1769)..(1956): Pfam Id: PF08659 Pfam Desc: KR domain
  misc_feature (999)..(1106): Pfam Id: PF08241 Pfam Desc: Methyltransferase domain
  misc_feature (999)..(1104): Pfam Id: PF08242 Pfam Desc: Methyltransferase domain
  misc_feature (148)..(346): Pfam Id: PF00698 Pfam Desc: Acyl transferase domain
  misc_feature (84)..(121): Pfam Id: PF00698 Pfam Desc: Acyl transferase domain
  misc_feature (2278)..(2548): Pfam Id: PF00755 Pfam Desc: Choline/Carnitine o-acyltransferase
  misc_feature (1769)..(1935): Pfam Id: PF08659 Pfam Desc: KR domain
  misc_feature (2)..(2812): NCBI GI: 212543173 Blast Desc: polyketide synthase, [Penicillium marneffei ATCC 18224] gi|210066648|gb|EEA20741.1| polyketide synthase, [Penicillium marneffei ATCC 18224]
  misc_feature (2)..(2813): NCBI GI: 46122833 Blast Desc: FG05794.1 [Gibberella zeae PH-1]
  misc_feature (2)..(2812): NCBI GI: 189200591 Blast Desc: mycocerosic acid synthase [Pyrenophora tritici-repentis Pt-1C-BFP] gi|187983731|gb|EDU49219.1| mycocerosic acid synthase [Pyrenophora tritici-repentis
  misc_feature (2)..(2655): NCBI GI: 156053511 Blast Desc: SS1G_06923 [Sclerotinia sclerotiorum 1980] gi|154704701|gb|EDO04440.1| SS1G_06923 [Sclerotinia sclerotiorum 1980]
  misc_feature (2)..(2811): NCBI GI: 154319269 Blast Desc: BC1G_02586 [Botryotinia fuckeliana B05.10] gi|150857017|gb|EDN32209.1| BC1G_02586 [Botryotinia fuckeliana B05.10]
  misc_feature (2)..(1860): NCBI GI: 40787328 Blast Desc: polyketide synthase [Botryotinia fuckeliana]
  misc_feature (3)..(2814): NCBI GI: 63002602 Blast Desc: Aft9-1 [Alternaria alternata]
  misc_feature (2)..(2128): NCBI GI: 121704114 Blast Desc: polyketide synthase, [Aspergillus clavatus NRRL 1] gi|119398465|gb|EAW08895.1| polyketide synthase, [Aspergillus clavatus NRRL 1]
  misc_feature (457)..(2650): NCBI GI: 156063378 Blast Desc: SS1G_01807 [Sclerotinia sclerotiorum 1980] gi|154697141|gb|EDN96879.1| SS1G_01807 [Sclerotinia sclerotiorum 1980]
  misc_feature (2)..(1860): NCBI GI: 256723827 Blast Desc: NECHADRAFT_37058 [Nectria haematococca mpVI 77-13-4]
  misc_feature (4)..(1413): SWISSPROT Homolog: EC 2.3.1.161 Lovastatin nonaketide synthase
  misc_feature: Useful for fungicidal and/or biocontrol applications
MRLITISANSEASLDNWILKFRQWLGSDQGRATSLADLAHTLNFRRSQFPWRCSFVSNSVESLADAFTSSKVTPVRAAKEVGVAFVFTGQGAQWFAMGHSLLMRSQIFASSISRCSQVMQALKCDWDLVEELSRDRNTSRLGESKISQPCTTAIQIALVDLLETWGLRPEAVYGHSSGEIAAAYAAGALSRDAAMEVAYLRGICSSEAKGSNAAMGAMLAVGEGEIAIQERIQSLGQKDGIVTVACVNSPESTTVSGDLAAILKLQCVLDDASIFNRRLQVDTAYHSHHMEAVASPYFKSLEKLSHGTPTNNVAFYSSVTGSLKKSDFGPAYWVSNLVSQVKFSAATHLVAEHLSSSGSSANLLVEVGPHSALLGPLRQSLSKWKSHKAGMPLSYTYSSCLVRNTDAIASVLALAGKVFETGHPVQLNALTDLTEISSQPRVVENLPAYSWDHSSTYWTESRLSKARRFRPFPYHDLLGLFDETSSTKEPRWRHHLSLDTLPWLRDHVIDGFVIFPGAGYLAMVTEAMKQLLHIRKTAGHFRNVTFRDVQFLKPVVIMEDAIKGSDQVELQLTISPSHQHVGSSWEYFRVISYDSQTDAWMENCAGLVSAVVETAEAQTQAQTHDEVMGTTEDGLGHLTMAAAVKMQEDTQANSTIQADPETTYRELMASGMAYGPSFRGMKEIQMGHCQGFARIIVGDIEAKMPGQYMQPHIFHPSTFDGMLQLVTLVFRRECMAAPVMPLTVGAMCVSADMDPTPGAELLVAICLTPESRQVGSGDFCAFQRQSDGTVRPVATGSGVRLQVIGKADASGSSTHKSSYRVAWAPDVDHISQDDFMKRAARLHISDTSGDESSKPPIDEQLHLNEQVATIFNRRALGRLREAGNPRACNTHLNKLLDWMQRWDQSEAARFLSTDTTNEDEARLVAQARRNNIGGLILSQMGPHYFDGILTGKADPLELLVEDDLLGRLYSEYVLFRNHYAQMEEYVQSLVHKYPNMKVLEIGAGTGGATMPLLRKIERRGRLLLEKYTYTDISSGFFERARQKFGRWIGQMDFQTLDISADPLTQGYVAESFDLIIAANVLHATPQMDVTLNNVRRLLKPGGRLVLMELTQVAAAHTFIVGALEGWWMSEDGRKDGPLLTVSEWDGLLRRTGFTGTDLVIPAHTGRLRDISSLMMTRKAIWAGSANDNKKPSSMAGSKESRILLGHYDPSQEALVAGIRVCLNERQISCTQQVWSEATTADANQLSIVLDSAEHALLLDPTPETFARVKQLLLRSRNILWVSFHQTLSSAKTAALTNMVNGMARVLRHEDPALCLVTVNIQDEIELTNPSTSQLRRTAQILSDIVMSSFWPLSETTRSVEVEYAIRGDEVRIPRVIPDDDFRRYQESYSGSSPNVAPVQYPTADPLSSSSLIECKYLDQERPLVFDVRVPGLLNTIRFVDNEEMKQPLGADHIEVQVRAHGLNFKDVLIALGQMPPGTSMAGVAAGVVTSVGSNSQSLWKPGDRVIGLFVAPYGNPVRVISRGAIRIPDSVTFVDAAAIALVYYTAWYGLVHVARLEEGQTVLVHAASGGVGQAAIQIAQHIGAEVYATVSSAAKRQLIQNQYGIPQTHIFSSNSRHLKKLVMNATRGNGVDVVLNSLSGQMLIDSWDCVAPFGTFVEIGKTDIHGRSQLNMANFEKHITFASVDVGRMYLRRPDTAAHMLGQIFDLVNQGVLKPPYPITTYPMTQIEDAFRVMATRKHVGKVVLVADEQTMVRAATPKPPALHLHGNGTYVISGGVGDIGKKICQFLAEKGAGHIVALTRRDVKTQERVSLEEAVKQPGGTLHIVRCDISSEASVKAAAKDIAGLPPVRGVVQSALVLQDHPMEYMQVEDWKASVRPKVHGTLNMHQHFCSPETTEFFVMLSSVNSMIGLVSQSNYAAGNAFQDAFCQTMNTQGTAKGGSITHYTTINVGAVEGSEQIARAIGAGTNIPTSVTFSDVLATLEYAMGSQAKADRASQLLMAFERDTLEDALGPTILSDRIFDHVLSQRKQGTGMTDGIAVTTQFTAVTAAREATSIREAEDIVRHALVDKFAAFLGDDIVDDQPISALGVDSLVSIELKNWIKHTFNTPLQTFELSGASSIIALAHLVVSRMELKCNGTKSSSAFPNGDEESSDVPSSDRQKPWNGNIGGANEHKATGASKAKTPFHGLECCKHSETLPVQPLPDLDDSLDFWLEANAHLFPAEEIRVIQQDMVFLRAPDSPARRVLADLFAAHARDDDPGHSWLNEVLTDARFLCQRDPLAPYHSIMASHRDVGEERVLEQHGQAERAAIITQATLAFKRSMQAGTVAPLEVAGRPECTWRWRWLFHSVRVPRTGCDEMMRYDDNTGVKGADDYIAVLRQGRVFKVMLQDEQGQDLPFAVLKATFEAIVTQVIDDAVWSGILTTDNRDSWAKVRGTLESTSPDNIKYFQLIDTAMFVLCLDDSSPETAEERARQGYLGDGFNRWYDKVLQFYVHANGRSGFITEHGAVDGTTPARLQELIGRYIEEHAKREKPSEPNGHHQTNSIVLEETVLQTTPEIEIHIQALRKRYLGYTSPETTTYTQEYLDEFGTEFLMHHRVAVKSVVDLTFQLALRLFFGRTLPAWEPVSAAHYHTGRSDGVQRATPAVVSFCDMVASLHQDGCESHQQLDSEISGVLLEESERLKDLVTLLTAATKQMNAGMREMLNGRSYLRVMELLNWLWPADTPKPRFLSEHVFFGRQFPPVFVQSNAVETDMPIEDLVHVMPSPEGLWAIMFPEKNRIRICLTTGAPARAAAFMEQLRHAARIMRAIVEST

SEQ ID NO: 30820 - DNA, 5856 bp, Muscodor strobelii
  misc_feature: SGI EST ID NO. CUFF.73021.0
  misc_feature: Variant of the nucleotide sequence at SEQ ID NO 30818
cagtaagtagcgcttgtttcgatagaagaacccagcaacgcccggaaattctatagcataacaacaccaatctcaaactatcacgaataggaaaaaggactaacatgttttgatacactagatcctcaccggcaaggcggacccgctagagctcctggtcgaagacgacttattgggacggctctattccgagtatgtgttgttccgtaaccactatgcgcagatggaggaatatgtccagtctctggttcataagtaccccaacatgaaggtcctggagattggtgctggcactggcggtgccacgatgccgctgctccgcaaaatcgaacgccgcggccgtctgctgctagaaaagtacacctacactgacatatcgtccggcttcttcgagcgggcgcgtcagaagtttggcagatggataggccagatggatttccagaccctagacatttccgccgatccgctgacacagggatacgtggctgagagctttgatctcatcattgccgccaacgtcctgcacgccactccgcaaatggatgtgactctcaataacgtccgtaggctgttgaagccgggtggccgtctggtgctcatggagctcacccaggtggcagccgcacatacgttcatcgttggggcgctcgagggttggtggatgtcggaggacgggcgcaaggatggcccgcttctcacggtgtccgagtgggatggacttctacggcgcacaggcttcacgggcacggatttggtaatacccgcgcatacaggccgtttgcgggatataagcagtttgatgatgacccgaaaagcaatatgggcaggtagcgcaaatgataacaagaagccttcgagtatggcagggtccaaggagagcagaattcttctcgggcactatgatccttctcaagaggctttggttgctggaatacgcgtgtgcttaaacgagagacaaatcagctgtacccagcaagtctggagtgaagccactacagcagatgcgaaccaactctcaattgtgcttgactcggccgagcacgcgctactccttgacccgacccccgagacctttgcgcgtgtcaagcagctacttctccgtagcaggaacattctttgggttagctttcatcagacactgtccagtgcgaaaacggcagctctgacgaacatggtcaatggcatggctagggtgctgcggcatgaagatccagccctgtgtcttgtcaccgtcaatatccaggacgaaatcgagttgaccaacccgagcacctcgcagctgcgacgtacagcccaaatactatcggatattgtgatgtcatcgttctggccactctcagaaacgacgcgctccgtagaggtcgaatacgccatccgcggagacgaggttcgcattccgcgggtgattcccgacgacgactttcgtcgttaccaggaaagttacagcggtagcagtccgaacgtcgcgcctgtccaatatcccacagccgacccgttgtcatcatcatcacttatcgagtgcaaatatctcgatcaagagcgacccctagtattcgatgttcgagtccccggtctgttgaacacgatccgcttcgtggataacgaagagatgaagcaaccgcttggtgctgaccatatcgaagtgcaagtccgcgcacacggtctcaacttcaaggatgtgttgatcgcactggggcagatgcctccgggtaccagcatggcaggcgtggcagcgggcgtggtcacttcggtcggctccaactcccagtccttgtggaaaccaggtgatagagtaattggtctcttcgtggcgccttatgggaacccggtgcgggttatcagtagaggcgcaatccgcattcccgactccgtcaccttcgtcgatgctgcggctatcgcgttagtatactacacggcctggtacggtcttgtccatgtcgccaggctcgaggagggacagactgtccttgtgcacgcggcgtctggtggtgtgggccaagccgccatccagatcgcgcagcacattggggctgaggtctacgctacagtgagcagcgctgcaaagcgtcagctcatccagaatcagtatggtataccacagactcacattttctcgtccaactcccgacaccttaaaaagctcgttatgaacgctacacgcggtaacggtgtcgacgtggtcttaaactcgctctcaggtcagatgctgatcgatagctgggactgcgttgccccattcggaacgtttgtagagatcggtaagaccgatatacacggtcgcagccagctaaacatggccaacttcgagaaacacatcacgtttgcctcagtagatgtgggccgcatgtatctgagacgccctgacacggccgcgcacatgcttgggcagattttcgacttggtcaaccagggcgtgctgaagccgccataccccattacgacgtaccctatgacgcagattgaggacgcgtttcgcgtcatggcgacgagaaaacacgtcgggaaggtggttttggtggccgacgaacagactatggtccgtgcagctacaccaaagccgcccgcgctccatctccatggtaatgggacttatgtgatcagcggcggagtaggtgacattggtaagaagatttgccaatttcttgccgagaagggagcaggtcatatcgtggctcttacgcgtcgcgatgtaaagacccaagaacgtgtgtctttggaagaagctgtgaaacagcctggtggtacactacatattgtcagatgcgatatcagcagcgaggcttccgtgaaggctgccgccaaagacatcgccgggcttccacctgtgagaggtgtcgttcaaagtgcactggtcctacaagaccacccaatggagtatatgcaggtcgaagactggaaagcctcggtcagaccgaaggtccatggcacactaaacatgcaccaacacttctgctcgcccgagacgaccgaattctttgtcatgctatcgtccgtcaacagcatgattggcttagtctcgcaaagtaactacgctgctggcaacgctttccaggatgccttttgccagaccatgaacacccaaggaacagcaaagggggggtccattactcactatactaccatcaatgtcggcgccgttgagggttcggagcagatcgcccgggcaatcggagccggcaccaatatccccacatcagtgacatttagtgacgtcctcgccacactcgagtatgctatgggttcgcaggcaaaagccgaccgtgcctcgcaactacttatggcttttgagcgcgacaccctagaggacgcactaggtcctacgatactaagtgaccgaatttttgatcacgtattaagccagagaaagcaagggaccgggatgactgatggcatcgctgtcacaacccaattcaccgccgtcactgcggctagggaggccacttctatcagagaggcagaagacatcgtcaggcatgcgctagtcgacaagtttgcggcatttctaggcgacgacatcgtggatgaccaacctatctccgcgttaggagttgactcgctcgtgtcgattgagctcaagaactggatcaagcatacgttcaacacaccactgcagacttttgagctcagtggtgcatctagcatcatcgcccttgcgcatcttgttgtgtcgagaatggagctgaagtgcaatggaactaaatccagcagcgcattccccaacggagatgaggaatccagtgacgtgccttcgagcgatcgacagaagccgtggaacgggaacatcggcggcgccaatgagcacaaagctacaggtgcttccaaggcaaagacaccgttccacggtttagagtgctgcaagcatagtgagactctacctgttcagcccctgccggatcttgacgactctctagacttctggctcgaggctaatgcgcatctgttcccggccgaggaaatccgcgtcatccagcaggatatggtcttcctgcgcgcgccagacagtcccgcgagacgggttctggccgacttgtttgctgcccacgcgcgagacgatgacccaggccacagttggctaaatgaggtcctcactgatgcgcgcttcttgtgccagcgcgacccccttgcaccatatcatagcatcatggcctcgcatcgggatgttggcgaggaaagggtgctagaacagcacggacaggctgaacgggcagccatcattacacaggctacgctggcatttaaacggtctatgcaggccgggactgtggcgcctctcgaggtcgcgggtcgacccgagtgtacgtggcggtggaggtggctgtttcactcggtgcgggtgccccgaactgggtgtgatgagatgatgcgctacgacgacaacaccggcgtgaagggggcagacgattatatcgccgtgctaaggcagggtcgagtgttcaaagtgatgctccaagatgagcagggccaggatcttccttttgccgtcctcaaggccacgttcgaggcaattgtgacccaggtgatagacgatgcagtctggtcaggtatcctgaccacggataaccgagactcttgggctaaggtaagaggaacacttgagagtaccagtccggacaatatcaagtacttccagctcatcgacactgcaatgttcgtcttgtgcttggatgacagcagtccagagacagcggaggagagggcacgacaaggttaccttggtgacggtttcaatcggtggtatgacaaagtgttgcaattctacgtgcacgctaatggacgatccggcttcattactgagcatggagctgtcgacggaaccacaccagctcgtctgcaggagctaattggtaggtatatagaggagcatgctaagcgcgagaagccgagcgagccgaatggtcatcatcaaaccaatagcatcgtgctcgaggagacggttctacaaacaacacccgagatcgagatacatatacaggctcttcgcaaacgctacctcggatacacatccccagaaaccacaacctatacccaagaatatcttgatgagttcggtactgagttcctcatgcaccaccgcgtagccgttaagagcgtcgttgacttaaccttccaacttgcactgcgtcttttctttgggcgtactctgccagcctgggaacccgtcagcgcagcccactaccacactgggcgctctgacggtgtgcaacgtgcgacgcccgccgtggtctcgttctgcgatatggtggcgtctttacatcaggacggttgcgagtcgcaccaacaactagacagcgagatctctggcgtgctactcgaagagagcgagcgcctaaaggacctggttacattacttaccgcagctacgaagcagatgaacgctggtatgcgcgagatgctaaacggacgcagctacctccgcgtcatggagctgctgaactggctgtggccggcggacacacccaagccgcgcttcttgagcgagcacgtcttctttggcaggcaattcccgcccgtgttcgtgcagagcaacgcagtcgagacggacatgccgatcgaggatcttgttcacgtcatgccgtcccctgagggtctgtgggccatcatgtttccagaaaagaacaggatacgaatctgccttaccactggtgcccccgcaagggcagcggcttttatggaacagttgcgacatgcggcgaggattatgcgagctattgttgaatccacgtgatgttttttttggataggaaccatagaagatctactacggtagtaatgtaatactgttatatagacacaaccgaaatgaaaatgctcattgcgcattaaattatgtcggcaaacgcatggtagcgctacaag

SEQ ID NO: 30821 - DNA, 3444 bp, Muscodor strobelii
  misc_feature: SGI cDNA ID NO. 570605
  misc_feature: Elevated expression when VOC is produced
  misc_feature: Encodes the peptide sequence at SEQ ID NO 30822
atggatgctgacgagattaatgccgtctctaaagacgaggtcgatacgactgggtccttggatatcactgccgatcagaggattcaatttgctcctaacgtcaagccagggcagcgaaaatttggcggcccgaatgatggaatcccgatcaccactcgctctcaaagtattcaatccattccacccgtgttaacggagaaagaaaaacagcgcagagagcaagaacaggaacatgagaagaaacaggtcaatatagacgagcacctgatgccacatgaagaggtggcagctcggtatcagacaagcatcaatctggaaaggccaggagactcaccagggttgaccactacgcaggtccaagcactaactcagcagtacggcgccaatgttttaactccaccgaagaagagacatccactgcttaaatttctcgataagctcacaagcttgtttaatttgctactaatacttgctggtgtgcttgagtacatcttgctaggcatcaattataaggaaaattttccgaatacctacttgggagccatcctgatagtcgtcgcccacatcaatgctttcatcgagttttaccaggagcagaagtcgcaagccatcctcgagtcattcttgaatatgataccggccaaatgcatgtctattcgggagtctaagcttgctcaagtcgaagcttcaagtttagtaccaggcgacgtcgtgtttattcgcatgggcgacaagacccctgctgatttgctcatattcgcggcatcggactgcaaggtagacaactcgtctttaactggcgaatccgagccgcaggagcgaaccaaggacaatagcatgcgaaatcccttggaagcgtccaatgtcatgttcaacagcactcttgtcgtgtccggtgaagcatatggtatcgtgatccgcactggcgacagcactatgctcggccagatcgctcacctaacagccggggaagaaaaagggagatcaccattatctcgcgagatcggagacttcgtcaagatcatcgcgacgatcgctattgtgaccgctctcgtattcttcggtatcgcatttccagtgaacaacaacaacgtgtctctggcactcaactttgcgatcggcatatttgtcgcttgggtgccagaaggtctacctgccactgtaaccatccttttgactatagccgcaaagcgtatggctgatcaaaatgtactcgtcaaagatttgcaaggcgtagaaaccctgggcgccatcacccttcttgccacggataagacgggaacgctgactcgcaatcaaatgaccgcaactaacctatggacatgtggacaactatacgcaacttctgctaatgctacgggcgataagaatgccagccttgacaaccctggggtatcagagatctgtcacatttctgctttgtgttctcgtgccaagtttgatagaaccgatgtgcccgttcgagatcgtgagattctcggggacgcaacagagtctggattggttcgatatgccggcgaaaagctgtcagactttgaccaaatgggggacaagtaccctaaagtcttcgagctcccgttcaactctgaaacgaaatggcacatgagtattcacaggaaggctcatgctaatggcgtcttgacgctatatatgaaaggtgcaccagagcgtgtctggaagctgtgcacgcgcatactttcaggatctgacggggaatccgagccgatgaacgactctcaccaagatgcttataacgctatgtacgagcatatggcaagtcaaggacatcgagtgctgggttttgcggagttgttgttaccaggcggccagtaccctgaagactttcactttgacaagaagactcaaaattatccacgaggcgaatttgtctttgtaggccttgcatccctccaggacccaccaaagcatggcgttcgtgaagccattgggcgctgtcgtgctgccggtgtcaaggtcatgatggtcaccggtgaccatcctctcaccgccgaagctattggtcgcaagatcaatctcatgataggagaaacgagagaaggtgtggcgaaacgaaccgggagagcactagactcaatacaggacaacgagtataaggccatcgtgatccatggggagcagattgataagctcacggatctcgagtgggataacattttttggaaagatgaaatcatattcgctcgcacatctcccaagcacaaactggagattgtccgtcgtgctcagagtatgggtcacatcgttggcgtaacaggtgacggtgtcaatgattcgcctgcgctcaaaaaagccgatcttggaattgcgatgaacaagtccggttcagatgtatccaaggaggccgcatcaatgattctccttgacgacaacttcgcctcttgtgtgcatggtatcgaacagggccggctgatttttgtcaatctcaagaagtcgatcaagtacactatttcgcattcgactccagaggttatcccaaacttactctatgttatcgttcccataccgttgcctctatctgcaatcttgatccttgtcattgaccttgggttcgagctcatcgccgcgctctccttcgcgtgggatccgccggagactgatgaaggtttgatgaggctcccgcctcgaaaaccggtcacacctgaaacgaccgacattttccgtcgacgtgctcttcgtgccactagatctcgcttcgatgaagaagcgggtgttgtgattggccccgaacaaacatcgaagttacagaacatcgtctggcggtttagaagactattcggacgtgaatactgggcagacaaacttcggaatactggcgcggaagtcttggttgatggtccactactttcttgggcatatcttgagattggtacgatagaggcaatcggcgcgctcgtcggcttcttcattatccttcatgtgcggggaatttctccttatgatgcacgcgcgatgcagaaggggtctggtgcgccgactcattacttcgctaaaaatgccgagccttacaagggtatcgacgcgtcggcacaagtagacatactcgctgaggcgcaaagcttatattactggtctatcatgaccatgcaaatgttcaatttgtttgcatcgaagacccggttcaccatcccctttggtagctacatgtttagcaatcgcatcactttttattctatattcggtggagtgtcgcttgcaacgttcatcgtctacactccaggggttgagattgtcttcggcacgacgcgaagcctctcgccgctgtactggctcgttcctattgcatttggtacgatcatcattgcatatgcgactcttcgtatggtcattcagcagcgcgctacgccaccccattggaatccggaagtgtctggattgcagatgtttccgacaattcggacatggagaagtcgcgattcgcgctga

SEQ ID NO: 30822 - protein, 1147 aa, Muscodor strobelii
  misc_feature: SGI Peptide ID NO. 570605
  misc_feature (418)..(781): Pfam Id: PF00702 Pfam Desc: haloacid dehalogenase-like hydrolase
  misc_feature (940)..(1120): Pfam Id: PF00689 Pfam Desc: Cation transporting ATPase, C-terminus
  misc_feature (77)..(167): Pfam Id: PF00690 Pfam Desc: Cation transporter/ATPase, N-terminus
  misc_feature (182)..(414): Pfam Id: PF00122 Pfam Desc: E1-E2 ATPase
  misc_feature (729)..(781): Pfam Id: PF00702 Pfam Desc: haloacid dehalogenase-like hydrolase
  misc_feature (586)..(701): Pfam Id: PF00702 Pfam Desc: haloacid dehalogenase-like hydrolase
  misc_feature (180)..(1138): NCBI GI: 171678629 Blast Desc: protein product [Podospora anserina] gi|170937384|emb|CAP62042.1| protein product [Podospora anserina]
  misc_feature (68)..(1134): NCBI GI: 170093894 Blast Desc: aminophospholipid-transporting P-type ATPase [Laccaria bicolor S238N-H82] gi|164646622|gb|EDR10867.1| aminophospholipid-transporting P-type ATPase [Laccaria bicolor
  misc_feature (74)..(1137): NCBI GI: 6453299 Blast Desc: P-type cation-transporting ATPase [Blastocladiella emersonii]
  misc_feature (74)..(1137): NCBI GI: 6636502 Blast Desc: AF205944_1 P-Type cation-transporting ATPase [Blastocladiella emersonii]
  misc_feature (66)..(1119): NCBI GI: 166240123 Blast Desc: P-type ATPase [Dictyostelium discoideum AX4] gi|165988754|gb|EAL73415.2| P-type ATPase [Dictyostelium discoideum AX4]
  misc_feature (61)..(1125): NCBI GI: 167621414 Blast Desc: Na+/K+ -ATPase alpha 1 subunit precursor [Equus caballus] gi|114373|sp|P18907.1|AT1A1_HORSE RecName: Full=Sodium/potassium-transporting ATPase subunit alpha-1; pump
  misc_feature (80)..(1125): NCBI GI: 18858299 Blast Desc: ATPase, Na+/K+ transporting, alpha 1a.3 polypeptide [Danio rerio] gi|11096275|gb|AAG30274.1|AF308598_1 Na+/K+ ATPase alpha subunit isoform 4 [Danio rerio]
  misc_feature (66)..(1125): NCBI GI: 1364218 Blast Desc: protein product [Ovis aries]
  misc_feature (69)..(1125): NCBI GI: 227450 Blast Desc: protein product [Ovis aries]
  misc_feature (66)..(1125): NCBI GI: 116003819 Blast Desc: Na+/K+ -ATPase alpha 1 subunit precursor [Bos taurus] gi|122132194|sp|Q08DA1.1|AT1A1_BOVIN RecName: Full=Sodium/potassium-transporting ATPase subunit alpha-1; ATPase
  misc_feature (83)..(1125): SWISSPROT Homolog: EC 3.6.3.9 Sodium/potassium-exchanging ATPase
  misc_feature: Useful for introducing or modulating the production of volatile compounds
MDADEINAVSKDEVDTTGSLDITADQRIQFAPNVKPGQRKFGGPNDGIPITTRSQSIQSIPPVLTEKEKQRREQEQEHEKKQVNIDEHLMPHEEVAARYQTSINLERPGDSPGLTTTQVQALTQQYGANVLTPPKKRHPLLKFLDKLTSLFNLLLILAGVLEYILLGINYKENFPNTYLGAILIVVAHINAFIEFYQEQKSQAILESFLNMIPAKCMSIRESKLAQVEASSLVPGDVVFIRMGDKTPADLLIFAASDCKVDNSSLTGESEPQERTKDNSMRNPLEASNVMFNSTLVVSGEAYGIVIRTGDSTMLGQIAHLTAGEEKGRSPLSREIGDFVKIIATIAIVTALVFFGIAFPVNNNNVSLALNFAIGIFVAWVPEGLPATVTILLTIAAKRMADQNVLVKDLQGVETLGAITLLATDKTGTLTRNQMTATNLWTCGQLYATSANATGDKNASLDNPGVSEICHISALCSRAKFDRTDVPVRDREILGDATESGLVRYAGEKLSDFDQMGDKYPKVFELPFNSETKWHMSIHRKAHANGVLTLYMKGAPERVWKLCTRILSGSDGESEPMNDSHQDAYNAMYEHMASQGHRVLGFAELLLPGGQYPEDFHFDKKTQNYPRGEFVFVGLASLQDPPKHGVREAIGRCRAAGVKVMMVTGDHPLTAEAIGRKINLMIGETREGVAKRTGRALDSIQDNEYKAIVIHGEQIDKLTDLEWDNIFWKDEIIFARTSPKHKLEIVRRAQSMGHIVGVTGDGVNDSPALKKADLGIAMNKSGSDVSKEAASMILLDDNFASCVHGIEQGRLIFVNLKKSIKYTISHSTPEVIPNLLYVIVPIPLPLSAILILVIDLGFELIAALSFAWDPPETDEGLMRLPPRKPVTPETTDIFRRRALRATRSRFDEEAGVVIGPEQTSKLQNIVWRFRRLFGREYWADKLRNTGAEVLVDGPLLSWAYLEIGTIEAIGALVGFFIILHVRGISPYDARAMQKGSGAPTHYFAKNAEPYKGIDASAQVDILAEAQSLYYWSIMTMQMFNLFASKTRFTIPFGSYMFSNRITFYSIFGGVSLATFIVYTPGVEIVFGTTRSLSPLYWLVPIAFGTIIIAYATLRMVIQQRATPPHWNPEVSGLQMFPTIRTWRSRDSR

SEQ ID NO: 30823 - DNA, 4259 bp, Muscodor strobelii
  misc_feature: SGI EST ID NO. CUFF.73066.0
  misc_feature: Variant of the nucleotide sequence at SEQ ID NO 30821
acgcccgccactagagaacacaatcatgcgaccagagtggatgttgcattcctctcgagggccaattctcaattttccagcgccattggtcttgccgccgttttcaagtcatcaccaaggccgacttgcaccttcaggatgcaatcgattgagttcagctgacattcgtagacaacagcaatctgctgtaccaaattcttcacgacttcgccatctgaacagcaccgtgcgtgtattgaagttccacccgacataaatattcccacgttcaagcttgatatgttctatcacagtacaacacagctgtaatccggaaacgagcataaggactcggtgtagtgaaaggtcatcgcgagtttccgtctattgatcatccgcataaagtcacaatttagcttatcttctccagtatcagcgcagccaccaaatacgtcaatatggatgctgacgagattaatgccgtctctaaagacgaggtcgatacgactgggtccttggatatcactgccgatcagaggattcaatttgctcctaacgtcaagccagggcagcgaaaatttggcggcccgaatgatggaatcccgatcaccactcgctctcaaagtattcaatccattccacccgtgttaacggagaaagaaaaacagcgcagagagcaagaacaggaacatgagaagaaacaggtcaatatagacgagcacctgatgccacatgaagaggtggcagctcggtatcagacaagcatcaatctggaaaggccaggagactcaccagggttgaccactacgcaggtccaagcactaactcagcagtacggcgccaatgttttaactccaccgaagaagagacatccactgcttaaatttctcgataagctcacaagcttgtttaatttgctactaatacttgctggtgtgcttgagtacatcttgctaggcatcaattataaggaaaattttccgaatacctacttgggagccatcctgatagtcgtcgcccacatcaatgctttcatcgagttttaccaggagcagaagtcgcaagccatcctcgagtcattcttgaatatgataccggccaaatgcatgtctattcgggagtctaagcttgctcaagtcgaagcttcaagtttagtaccaggcgacgtcgtgtttattcgcatgggcgacaagacccctgctgatttgctcatattcgcggcatcggactgcaaggtagacaactcgtctttaactggcgaatccgagccgcaggagcgaaccaaggacaatagcatgcgaaatcccttggaagcgtccaatgtcatgttcaacagcactcttgtcgtgtccggtgaagcatatggtatcgtgatccgcactggcgacagcactatgctcggccagatcgctcacctaacagccggggaagaaaaagggagatcaccattatctcgcgagatcggagacttcgtcaagatcatcgcgacgatcgctattgtgaccgctctcgtattcttcggtatcgcatttccagtgaacaacaacaacgtgtctctggcactcaactttgcgatcggcatatttgtcgcttgggtgccagaaggtctacctgccactgtaaccatccttttgactatagccgcaaagcgtatggctgatcaaaatgtactcgtcaaagatttgcaaggcgtagaaaccctgggcgccatcacccttcttgccacggataagacgggaacgctgactcgcaatcaaatgaccgcaactaacctatggacatgtggacaactatacgcaacttctgctaatgctacgggcgataagaatgccagccttgacaaccctggggtatcagagatctgtcacatttctgctttgtgttctcgtgccaagtttgatagaaccgatgtgcccgttcgagatcgtgagattctcggggacgcaacagagtctggattggttcgatatgccggcgaaaagctgtcagactttgaccaaatgggggacaagtaccctaaagtcttcgagctcccgttcaactctgaaacgaaatggcacatgagtattcacaggaaggctcatgctaatggcgtcttgacgctatatatgaaaggtgcaccagagcgtgtctggaagctgtgcacgcgcatactttcaggatctgacggggaatccgagccgatgaacgactctcaccaagatgcttataacgctatgtacgagcatatggcaagtcaaggacatcgagtgctgggttttgcggagttgttgttaccaggcggccagtaccctgaagactttcactttgacaagaagactcaaaattatccacgaggcgaatttgtctttgtaggccttgcatccctccaggacccaccaaagcatggcgttcgtgaagccattgggcgctgtcgtgctgccggtgtcaaggtcatgatggtcaccggtgaccatcctctcaccgccgaagctattggtcgcaagatcaatctcatgataggagaaacgagagaaggtgtggcgaaacgaaccgggagagcactagactcaatacaggacaacgagtataaggccatcgtgatccatggggagcagattgataagctcacggatctcgagtgggataacattttttggaaagatgaaatcatattcgctcgcacatctcccaagcacaaactggagattgtccgtcgtgctcagagtatgggtcacatcgttggcgtaacaggtgacggtgtcaatgattcgcctgcgctcaaaaaagccgatcttggaattgcgatgaacaagtccggttcagatgtatccaaggaggccgcatcaatgattctccttgacgacaacttcgcctcttgtgtgcatggtatcgaacagggccggctgatttttgtcaatctcaagaagtcgatcaagtacactatttcgcattcgactccagaggttatcccaaacttactctatgttatcgttcccataccgttgcctctatctgcaatcttgatccttgtcattgaccttgggttcgagctcatcgccgcgctctccttcgcgtgggatccgccggagactgatgaaggtttgatgaggctcccgcctcgaaaaccggtcacacctgaaacgaccgacattttccgtcgacgtgctcttcgtgccactagatctcgcttcgatgaagaagcgggtgttgtgattggccccgaacaaacatcgaagttacagaacatcgtctggcggtttagaagactattcggacgtgaatactgggcagacaaacttcggaatactggcgcggaagtcttggttgatggtccactactttcttgggcatatcttgagattggtacgatagaggcaatcggcgcgctcgtcggcttcttcattatccttcatgtgcggggaatttctccttatgatgcacgcgcgatgcagaaggggtctggtgcgccgactcattacttcgctaaaaatgccgagccttacaagggtatcgacgcgtcggcacaagtagacatactcgctgaggcgcaaagcttatattactggtctatcatgaccatgcaaatgttcaatttgtttgcatcgaagacccggttcaccatcccctttggtagctacatgtttagcaatcgcatcactttttattctatattcggtggagtgtcgcttgcaacgttcatcgtctacactccaggggttgagattgtcttcggcacgacgcgaagcctctcgccgctgtactggctcgttcctattgcatttggtacgatcatcattgcatatgcgactcttcgtatggtcattcagcagcgcgctacgccaccccattggaatccggaagtgtctggattgcagatgtttccgacaattcggacatggagaagtcgcgattcgcgctgaggctggtgacgttagctaccgcgaatgtgataagaaattacaattctggcaatcaaatcgttatgtagccttatttctctgggggcccatacggtccttacgtctgaggctgtttaaagcatgtggaacttgcatgtggttttgttgatgcgcaaagcacacgatacgcgtccttttttatgcggggcttctttcccgcctagattggatgcttttgagagttctcatgggactcggtccaaatgacaatcaacgagcctagtctgatctcgttgtagtactcatcttttttccgtctggatgtggaataagagtcgcaaacataacagagagacgacgcatagtatacagccaaatataagttattgaaaactagaa

SEQ ID NO: 30824 - DNA, 1389 bp, Muscodor strobelii
  misc_feature: SGI cDNA ID NO. 570606
  misc_feature: Reduced expression when VOC is produced
  misc_feature: Encodes the peptide sequence at SEQ ID NO 30825
atgagcatccggaagcttttcctgctctgtgcgttaacagtgttgagtcttccggccgtcgtgcatggtggcgaccctttgccaacagagacccctgagcgcacgccagacggagccgccgcattcatcacacccgacccatctccaccaaaagcacccaaggagaaaaaagatattcatcctgaatatccgaagaaataccccgatgtccctgttctaggctatgtaacaccgtggaactcgagaggcaagcaacttgccgaggactttcgaatcaagttcgacatcatctcgccggtatggtacacaattcatcctgatacagaccccagcaaagtgtaccgggttgaaggcggaccacccagtgaagatgatatcgcctggtataagagactgcagaaaccctctgtatcagcctccaacgtcgtcaaaataaccccgcgcttcatccttgaaaattggaatcaagacgaatacaacaatctcgtcttcaatcagacaaggtgggagatactgtcctcttccgtctggcaggttatcaaggacatgtcattcgacggaatcgtcttcgagtcaggcgccactcatgctatgggaggagccctagaaccattgtcaacattgttacactctcatgacaagattctaactctggtaatgcctcctttacgaaccgcccccggtcacagctcgcagaacaaagtcatcttagagtctatcccgtcgctcgccaagatcacggactacttcagtatcatgacatacgatttcaccgggccgggcggggtggagtccgctcgatcgtttccggctggaagcactatggcggaatcaaagaaacacggcaaagtgcgcgaaccgggcccgaacacaagtctcgagtggatcaaattgaacatgggcgctctaagtcacctgctgactctagattcgcaatccgtgatcggagagcagttccaattctcagaagaaatcacagctagaatgctcatgggaatgccgctgtatggatacacttatccgattaccttcgtaaatgccaagacaggttctgtacttaagaagaaggcccaggagcaaagagacatcatacccatattagttggcccaggaaaaccgttgaccgcgctagaagccgagaagctgctggatgagcatgggtcggaattccagcaagattccgatgaagaatatttcttctactacgttgagaacggcgcatactggagagcgactgttcccaccccacaaagcttatcaagtgcgttggctgctcttgatcagggtatcgatgtctcgaagcaggatccgactgttcagccgttaaaggcaggtgtagcgctgtgggaagtaggtcagagctcttcagaacttcttagcatattataa

SEQ ID NO: 30825 - protein, 462 aa, Muscodor strobelii
  misc_feature: SGI Peptide ID NO. 570606
  misc_feature (72)..(300): NCBI GI: 71022415 Blast Desc: UM05290.1 [Ustilago maydis 521] gi|46101306|gb|EAK86539.1| UM05290.1 [Ustilago maydis 521]
  misc_feature (72)..(462): NCBI GI: 74227609 Blast Desc: protein product [Mus musculus]
  misc_feature (72)..(462): NCBI GI: 218083710 Blast Desc: chitinase domain containing 1 isoform 1 [Mus musculus] gi|38174317|gb|AAH61063.1| Chid1 protein [Mus musculus] gi|148686168|gb|EDL18115.1| RIKEN cDNA 3110023E09, isoform CRA_c
  misc_feature (72)..(462): NCBI GI: 81902615 Blast Desc: CHID1_MOUSE RecName: Full=Chitinase domain-containing protein 1; Flags: Precursor gi|13905168|gb|AAH06876.1| Chid1 protein [Mus musculus]
  misc_feature (72)..(462): NCBI GI: 124248495 Blast Desc: chitinase domain containing 1 [Rattus norvegicus] gi|117558599|gb|AAI27547.1| Chitinase domain containing 1 [Rattus norvegicus] gi|149061672|gb|EDM12095.1| similar to Cc1-9 [Rattus
  misc_feature (72)..(462): NCBI GI: 134035401 Blast Desc: chitinase domain containing 1 [Rattus norvegicus] gi|117558599|gb|AAI27547.1| Chitinase domain containing 1 [Rattus norvegicus] gi|149061672|gb|EDM12095.1| similar to Cc1-9 [Rattus
  misc_feature (72)..(453): NCBI GI: 221043528 Blast Desc: protein product [Homo sapiens]
  misc_feature (72)..(453): NCBI GI: 194387458 Blast Desc: protein product [Homo sapiens]
  misc_feature (57)..(453): NCBI GI: 242015378 Blast Desc: Spore germination protein yaaH, [Pediculus humanus corporis] gi|212512932|gb|EEB15598.1| Spore germination protein yaaH, [Pediculus humanus corporis]
  misc_feature (72)..(462): NCBI GI: 13182739 Blast Desc: AF212229_1 GL008 [Homo sapiens] gi|63102439|gb|AAH95409.1| Chitinase domain containing 1 [Homo sapiens] gi|193784919|dbj|BAG54072.1| protein product [Homo
  misc_feature: Useful for introducing or modulating the production of volatile compounds
MSIRKLFLLCALTVLSLPAVVHGGDPLPTETPERTPDGAAAFITPDPSPPKAPKEKKDIHPEYPKKYPDVPVLGYVTPWNSRGKQLAEDFRIKFDIISPVWYTIHPDTDPSKVYRVEGGPPSEDDIAWYKRLQKPSVSASNVVKITPRFILENWNQDEYNNLVFNQTRWEILSSSVWQVIKDMSFDGIVFESGATHAMGGALEPLSTLLHSHDKILTLVMPPLRTAPGHSSQNKVILESIPSLAKITDYFSIMTYDFTGPGGVESARSFPAGSTMAESKKHGKVREPGPNTSLEWIKLNMGALSHLLTLDSQSVIGEQFQFSEEITARMLMGMPLYGYTYPITFVNAKTGSVLKKKAQEQRDIIPILVGPGKPLTALEAEKLLDEHGSEFQQDSDEEYFFYYVENGAYWRATVPTPQSLSSALAALDQGIDVSKQDPTVQPLKAGVALWEVGQSSSELLSIL

SEQ ID NO: 30826 - DNA, 2495 bp, Muscodor strobelii
  misc_feature: SGI EST ID NO. CUFF.73027.0
  misc_feature: Variant of the nucleotide sequence at SEQ ID NO 30824
tacggatgtaggcgaattgccgtgtgtaatcccaattctcagctctcccgatcgacgcttgtcggtatcaccagatggtcttggtcacgcaaacagtattcatttagatagcgatgagcatccggaagcttttcctgctctgtgcgttaacagtgttgagtcttccggccgtcgtgcatggtggcgaccctttgccaacagagacccctgagcgcacgccagacggagccgccgcattcatcacacccgacccatctccaccaaaagcacccaaggagaaaaaagatattcatcctgaatatccgaagaaataccccgatgtccctgttctaggctatgtaacaccgtggaactcgagaggcaagcaacttgccgaggactttcgaatcaagttcgacatcatctcgccggtatggtacacaattcatcctgatacagaccccagcaaagtgtaccgggttgaaggcggaccacccagtgaagatgatatcgcctggtataagagactgcagaaaccctctgtatcagcctccaacgtcgtcaaaataaccccgcgcttcatccttgaaaattggaatcaagacgaatacaacaatctcgtcttcaatcagacaaggtgggagatactgtcctcttccgtctggcaggttatcaaggacatgtcattcgacggaatcgtcttcgagtcaggcgccactcatgctatgggaggagccctagaaccattgtcaacattgttacactctcatgacaagattctaactctggtaatgcctcctttacgaaccgcccccggtcacagctcgcagaacaaagtcatcttagagtctatcccgtcgctcgccaagatcacggactacttcagtatcatgacatacgatttcaccgggccgggcggggtggagtccgctcgatcgtttccggctggaagcactatggcggaatcaaagaaacacggcaaagtgcgcgaaccgggcccgaacacaagtctcgagtggatcaaattgaacatgggcgctctaagtcacctgctgactctagattcgcaatccgtgatcggagagcagttccaattctcagaagaaatcacagctagaatgctcatgggaatgccgctgtatggatacacttatccgattaccttcgtaaatgccaagacaggttctgtacttaagaagaaggcccaggagcaaagagacatcatacccatattagttggcccaggaaaaccgttgaccgcgctagaagccgagaagctgctggatgagcatgggtcggaattccagcaagattccgatgaagaatatttcttctactacgttgagaacggcgcatactggagagcgactgttcccaccccacaaagcttatcaagtgcgttggctgctcttgatcagggtatcgatgtctcgaagcaggatccgactgttcagccgttaaaggcaggtgtagcgctgtgggaagtaggtcagagctcttcagaacttcttagcatattataaacgaggatggtcttgaatgagcccagtgaataggcgtgctatggcgactaaaattgtttgtttggtgttcgcagatagttgatgggcaaaacggtacaggtgttgcgaacattgctatggtcgagcaggcgtcatatatacatgaatgtaggtaggtatgtacttacgacttgaatagtaattttcgcttgattgcttctgataggattaagcaatccgggctctacttagccctagagagatattaccgagggactacatatcttcagcaaagaggtaactatagtatgctgtatttctaggtacttctagctgataggcacctatactgcagtgcgcatgatgccttagcgctacgtatatatttacttgaacttcaatcctaggcgcgcatgcgacagccactacgtcggaggattacagcgtgtccaagtcctccctcgtaaaatataaactctccatctcgcacaatatattctatccaacctgaaacatactctgaagaccccgcccaccatcttgatacatcttctaagttattcgtgtatcaggtcctaaagaatgacatcaaccacggatggacttagaaacgatacgcctcaatcaacgcatctctcgagatcctccacgcccagtttcatcgaaacgctctgctttgtagcgttgctcttggggctaagtcttgggtcgctgctcgtgggtctccatgaaggatgggtaaaaggcttggtgtttgaattcttgtcggtcttgctgtggagtgcaggaattacttgggcagaagagggtgtgctttgtggcattgtataccccttcgtatccaggacgccgaatgacatggatcaaagtctcgacaaccatgttttagagatgcaaccggttgacggcgacagagtgcatgtcatcgctgattcatagtttgctcaaatacaaatagtaagatatatttacaatcaatgcagcaagctgctcgggatcctggacttatttctt

SEQ ID NO: 30827 - DNA, 999 bp, Muscodor strobelii
  misc_feature: SGI cDNA ID NO. 570607
  misc_feature: Encodes the peptide sequence at SEQ ID NO 30828
atgatttttcctcgaaaaccgttccttgatatacagggtacaggcacctggtatcactatttcaaagcgctcagtctgcttcgccagagactactggttgataacgacgacctgcgcctttctgattatacacttaatgttgtacttagtctaacgggtcaggcttttgcagctggtgatgtgaaatccgcgtccaatcatatggaagggatggctaggatggtggacctgcgtggagggtggtccactttccaacgcagcgagaagctcgctatcgaactaattcgctgtgacctaggtattgcagtgtacaatggtgttcgaccagcgatgtttcgcaactctgctccacctcctttccctgaccttaccatatatttccacgatgcctgcctagcgccgaaccttgccgaaccgcatgagctccttcactgtaacaatctcggtcaagaactgacctctatcatgatcacactatcgggcacttgtgctctcgtcaataacgctgcaatttcggggcagaaactcccactggatattttcgttcagtcaatggcgtctatcatgtatagactcattcaaatggacttggaggacggacataaattcgaagctattcgtctaggcctcctatccttctcatgcagcacgtttctctactggcataatctgggaatcacataccatcatcttgccgccagcgtcaagaccgcgatgtgtcaacttactctcggctccgctataatttctccacagctgtcactatggcttgcaatggcaactgcctgttctattcccgatgactccgacgcatactggctgcatccattgatccgccaagcagcgaaagcgagcgacattcagtcttggaccgaattaagggcgcttctcacttcatcgatgtggattggcctccttcatgacgaagccggagagcgcatcttcgacgcagcgatgcggatggctttgccggatatagaatccgtatatgattcttga

SEQ ID NO: 30828 - protein, 332 aa, Muscodor strobelii
  misc_feature: SGI Peptide ID NO. 570607
  misc_feature (19)..(331): NCBI GI: 145256372 Blast Desc: An19g00360 [Aspergillus niger CBS 513.88] gi|134084771|emb|CAK47359.1| protein product [Aspergillus niger]
  misc_feature (16)..(321): NCBI GI: 145240003 Blast Desc: An08g05310 [Aspergillus niger] gi|134077162|emb|CAK45503.1| protein product [Aspergillus niger]
  misc_feature (19)..(317): NCBI GI: 212529582 Blast Desc: conserved [Penicillium marneffei ATCC 18224] gi|210074346|gb|EEA28433.1| conserved [Penicillium marneffei ATCC 18224]
  misc_feature (12)..(319): NCBI GI: 256727322 Blast Desc: NECHADRAFT_76080 [Nectria haematococca mpVI 77-13-4]
  misc_feature (163)..(330): NCBI GI: 238505795 Blast Desc: conserved [Aspergillus flavus NRRL3357] gi|220690216|gb|EED46566.1| conserved [Aspergillus flavus NRRL3357]
  misc_feature (33)..(318): NCBI GI: 256734956 Blast Desc: NECHADRAFT_75734 [Nectria haematococca mpVI 77-13-4]
  misc_feature (163)..(330): NCBI GI: 169780142 Blast Desc: [Aspergillus oryzae RIB40] gi|83773275|dbj|BAE63402.1| protein product [Aspergillus oryzae]
  misc_feature (18)..(316): NCBI GI: 119479299 Blast Desc: NFIA_077140 [Neosartorya fischeri NRRL 181] gi|119407832|gb|EAW17781.1| NFIA_077140 [Neosartorya fischeri NRRL 181]
  misc_feature (19)..(308): NCBI GI: 256720804 Blast Desc: NECHADRAFT_85486 [Nectria haematococca mpVI 77-13-4]
  misc_feature (24)..(328): NCBI GI: 46138011 Blast Desc: FG10520.1 [Gibberella zeae PH-1]
MIFPRKPFLDIQGTGTWYHYFKALSLLRQRLLVDNDDLRLSDYTLNVVLSLTGQAFAAGDVKSASNHMEGMARMVDLRGGWSTFQRSEKLAIELIRCDLGIAVYNGVRPAMFRNSAPPPFPDLTIYFHDACLAPNLAEPHELLHCNNLGQELTSIMITLSGTCALVNNAAISGQKLPLDIFVQSMASIMYRLIQMDLEDGHKFEAIRLGLLSFSCSTFLYWHNLGITYHHLAASVKTAMCQLTLGSAIISPQLSLWLAMATACSIPDDSDAYWLHPLIRQAAKASDIQSWTELRALLTSSMWIGLLHDEAGERIFDAAMRMALPDIESVYDS

SEQ ID NO: 30829 - DNA, 1246 bp, Muscodor strobelii
  misc_feature: SGI EST ID NO. CUFF.73033.0
  misc_feature: Variant of the nucleotide sequence at SEQ ID NO 30827
tacaggcacctggtatcactatttcaaagcgctcagtctgcttcgccagagactactggttgataacgacgacctgcgcctttctgattatacacttaatgttgtacttagtctaacgggtcaggcttttgcagctggtgatgtgaaatccgcgtccaatcatatggaagggatggctaggatggtggacctgcgtggagggtggtccactttccaacgcagcgagaagctcgctatcgaactaattcgctgtgacctaggtattgcagtgtacaatggtgttcgaccagcgatgtttcgcaactctgctccacctcctttccctgaccttaccatatatttccacgatgcctgcctagcgccgaaccttgccgaaccgcatgagctccttcactgtaacaatctcggtcaagaactgacctctatcatgatcacactatcgggcacttgtgctctcgtcaataacgctgcaatttcggggcagaaactcccactggatattttcgttcagtcaatggcgtctatcatgtatagactcattcaaatggacttggaggacggacataaattcgaagctattcgtctaggcctcctatccttctcatgcagcacgtttctctactggcataatctgggaatcacataccatcatcttgccgccagcgtcaagaccgcgatgtgtcaacttactctcggctccgctataatttctccacagctgtcactatggcttgcaatggcaactgcctgttctattcccgatgactccgacgcatactggctgcatccattgatccgccaagcagcgaaagcgagcgacattcagtcttggaccgaattaagggcgcttctcacttcatcgatgtggattggcctccttcatgacgaagccggagagcgcatcttcgacgcagcgatgcggatggctttgccggatatagaatccgtatatgattcttgaaagatgaattcgaataaacagccgaataacgctggcatatagacacattcaaatctgtgtattcctttctgcggagtatgtcagtttacactaaagaagaatccgagaaccaggctcgtacataacaaactattctagaataaagcatcagatatggcttgcaaatagggaacatatttcaagcaatatgtgttgaaatagaactgttcactggctcaaacactgctgaccagagaaccaaccgtatccattgactgttattatgagacagtaagtggaccaatt

SEQ ID NO: 30830 - DNA, 1329 bp, Muscodor strobelii
  misc_feature: SGI cDNA ID NO. 570608
  misc_feature: Encodes the peptide sequence at SEQ ID NO 30831
atgacgaactactatcccgcctcgaccgtcatacccatctactcggtatatctcggagtaggcatattcctgacgggcctccggatatgggttcgcacatcattctcccggcaaacattcggtctcgacgactatgcaattttgttaggacttgcaacatcggcagcatgcacggctattcagtactataacgtcttgaaaggtacggggggcgctgcgacgaaggatgcgaactctcaagagcgggcggccataattgggcatcaaatcgattgggcgatgatagtcattgaaaaggtcgggtttggatccgtcaagttgtccatcttgttcttctatcgacgcatctttggcgtatgggtcagtttccggcgggtgaacaacattctaatatggatcgttgcggcatggacactggcattcctgctctccgatatccttctttgcggtgcgcatcccgaatatatctggggttatgaccagacgtttgcaaaggagcattgcgccaatcgcggcgcggacctcctggccttctctgtcacaagtcttgcgaccgatctcccgatcctcgcgctgcctttcttttatatcagtcggctgcagatggcgaagcagaagaaatgggcttcactttttgtattcggtctcggaactatttccgtcggagcaagcgttatccgcttgatcttccttattgtttcctatcccgtcggtcgtctgaatttcgcttaccaagcaccgccggacgccgagacgccactcgttctacaaatattcaacccgacattctgggcattaacagagttatggctcggtctgtgggccgcgaatcttccgccctgcggccctctacttcgcaacttcaacatccacccttaccagatcatcgacagcgtgcgccgctcatggcaatcccgcaagtcatccagcgcctcggaatggtcatggagatccacattcagaagaccatcggaagctgtcggcagcaatgggagcaagccctcgatgcgaaagccatcggaagcgcccatctcgtcacgaaagatgtcatcacgagacgatgcgcctcttgtcacgataggtggtggtatcagatatccaaatcagagcgacggcagcagtagcttcccgggcaaaggccacgtgcgatggccaagtcaaaccgatagctatgcgacacagagtatgacccagaccttgacgccgcccgaggaggagaggctcagcaccgagcaacctcctaccttgaagcctgttgattggacaggcgggcgactatctgtgtttgatcacttgaggtctcataactcttcgcctgaccggggctag

SEQ ID NO: 30831 - protein, 442 aa, Muscodor strobelii
  misc_feature: SGI Peptide ID NO. 570608
  misc_feature (25)..(325): NCBI GI: 242816288 Blast Desc: conserved [Talaromyces stipitatus ATCC 10500] gi|218715084|gb|EED14507.1| conserved [Talaromyces stipitatus ATCC 10500]
  misc_feature (23)..(346): NCBI GI: 242809618 Blast Desc: conserved [Talaromyces stipitatus ATCC 10500] gi|218716033|gb|EED15455.1| conserved [Talaromyces stipitatus ATCC 10500]
  misc_feature (11)..(353): NCBI GI: 145244817 Blast Desc: An11g07030 [Aspergillus niger] gi|134079370|emb|CAK96999.1| protein product [Aspergillus niger]
  misc_feature (3)..(279): NCBI GI: 242784989 Blast Desc: conserved [Talaromyces stipitatus ATCC 10500] gi|218720648|gb|EED20067.1| conserved [Talaromyces stipitatus ATCC 10500]
  misc_feature (96)..(300): NCBI GI: 242816292 Blast Desc: conserved [Talaromyces stipitatus ATCC 10500] gi|218715085|gb|EED14508.1| conserved [Talaromyces stipitatus ATCC 10500]
  misc_feature (5)..(287): NCBI GI: 169611618 Blast Desc: SNOG_08924 [Phaeosphaeria nodorum SN15] gi|111062972|gb|EAT84092.1| SNOG_08924 [Phaeosphaeria nodorum SN15]
  misc_feature (20)..(279): NCBI GI: 115388555 Blast Desc: [Aspergillus terreus NIH2624] gi|114195867|gb|EAU37567.1| [Aspergillus terreus NIH2624]
  misc_feature (20)..(286): NCBI GI: 85092407 Blast Desc: NCU04931 [Neurospora crassa OR74A] gi|28920784|gb|EAA30143.1| [Neurospora crassa OR74A]
  misc_feature (42)..(285): NCBI GI: 169621825 Blast Desc: SNOG_14125 [Phaeosphaeria nodorum SN15] gi|160704631|gb|EAT78362.2| SNOG_14125 [Phaeosphaeria nodorum SN15]
  misc_feature (25)..(279): NCBI GI: 156057509 Blast Desc: [Sclerotinia sclerotiorum 1980] gi|154702271|gb|EDO02010.1| [Sclerotinia sclerotiorum 1980]
MTNYYPASTVIPIYSVYLGVGIFLTGLRIWVRTSFSRQTFGLDDYAILLGLATSAACTAIQYYNVLKGTGGAATKDANSQERAAIIGHQIDWAMIVIEKVGFGSVKLSILFFYRRIFGVWVSFRRVNNILIWIVAAWTLAFLLSDILLCGAHPEYIWGYDQTFAKEHCANRGADLLAFSVTSLATDLPILALPFFYISRLQMAKQKKWASLFVFGLGTISVGASVIRLIFLIVSYPVGRLNFAYQAPPDAETPLVLQIFNPTFWALTELWLGLWAANLPPCGPLLRNFNIHPYQIIDSVRRSWQSRKSSSASEWSWRSTFRRPSEAVGSNGSKPSMRKPSEAPISSRKMSSRDDAPLVTIGGGIRYPNQSDGSSSFPGKGHVRWPSQTDSYATQSMTQTLTPPEEERLSTEQPPTLKPVDWTGGRLSVFDHLRSHNSSPDRG

SEQ ID NO: 30832 - DNA, 2287 bp, Muscodor strobelii
  misc_feature: SGI EST ID NO. CUFF.73057.0
  misc_feature: Variant of the nucleotide sequence at SEQ ID NO 30830
cgttcaccacgggataggactctcttgagtggctgggcttcggtcgcacccaagtgtgagaggagctattggttttaggcccttgccagaaccctgccgattgcatcactggtcaatgataaatgttttgaggcccacgtttctggccctatgcgggcccggtacaaggaagtatcctagaattggcagtggctattgcccaccacccatggcgattctacctataatcagtccaaagggatagagtatcttcaccgtctctcactatcccgtgagaaatagtggacctagactcattgagcatcggtaattctttgctctcgtttataattcttacgaatcctaccagtgctcacttgccaactctggggcagcttctctggcctggacagggcctgatgccaagtgacagatcaaagaagaccacagcccccggaagagagtcagcccgtcagacgaccgccttcaatcagtgaacccatgcgaaaggatgcatctcggtttccagggtcatttctgtaagcactgccaaagcagccagcttaagtaatgtagatcatgccttgaagcatggcgatgatccacatcgccctccggcctattggaatatatgaacagtaagatatctgtcgtgcgaccagcgatcgcatcgggccctcattgaccttcggtgtgagatgcattgatgccgtaggagtagtaccacccatatctacttgagggtgtccttcccacgtgagatcgtcaactgcagtacaacctcgcatatcgtgtcccttgagacactcacatgaagggaccatgacgaactactatcccgcctcgaccgtcatacccatctactcggtatatctcggagtaggcatattcctgacgggcctccggatatgggttcgcacatcattctcccggcaaacattcggtctcgacgactatgcaattttgttaggacttgcaacatcggcagcatgcacggctattcagtactataacgtcttgaaaggtacggggggcgctgcgacgaaggatgcgaactctcaagagcgggcggccataattgggcatcaaatcgattgggcgatgatagtcattgaaaaggtcgggtttggatccgtcaagttgtccatcttgttcttctatcgacgcatctttggcgtatgggtcagtttccggcgggtgaacaacattctaatatggatcgttgcggcatggacactggcattcctgctctccgatatccttctttgcggtgcgcatcccgaatatatctggggttatgaccagacgtttgcaaaggagcattgcgccaatcgcggcgcggacctcctggccttctctgtcacaagtcttgcgaccgatctcccgatcctcgcgctgcctttcttttatatcagtcggctgcagatggcgaagcagaagaaatgggcttcactttttgtattcggtctcggaactatttccgtcggagcaagcgttatccgcttgatcttccttattgtttcctatcccgtcggtcgtctgaatttcgcttaccaagcaccgccggacgccgagacgccactcgttctacaaatattcaacccgacattctgggcattaacagagttatggctcggtctgtgggccgcgaatcttccgccctgcggccctctacttcgcaacttcaacatccacccttaccagatcatcgacagcgtgcgccgctcatggcaatcccgcaagtcatccagcgcctcggaatggtcatggagatccacattcagaagaccatcggaagctgtcggcagcaatgggagcaagccctcgatgcgaaagccatcggaagcgcccatctcgtcacgaaagatgtcatcacgagacgatgcgcctcttgtcacgataggtggtggtatcagatatccaaatcagagcgacggcagcagtagcttcccgggcaaaggccacgtgcgatggccaagtcaaaccgatagctatgcgacacagagtatgacccagaccttgacgccgcccgaggaggagaggctcagcaccgagcaacctcctaccttgaagcctgttgattggacaggcgggcgactatctgtgtttgatcacttgaggtctcataactcttcgcctgaccggggctaggtgtagtatgacggaatggtataacgttttctttcttgtcactttttataatgttagcgacttaggataccccaatggaatggatggacacgcgggagatagaatctcgcgaaaaaaatgggaacaggatacccaaaatacacaaaatctaacatca

SEQ ID NO: 30833 - DNA, 1086 bp, Muscodor strobelii
  misc_feature: SGI cDNA ID NO. 570609
  misc_feature: Encodes the peptide sequence at SEQ ID NO 30834
atggccgaaagcaactatgtctcgtacactgagaatctcatgaagtacatgaagctcgaccagaagggaaacgccatggcggagtacatctggatcgacgctgacggccatgtgcgatccaagagcaagacagtcaccaagatccccgagaacggcaaattcaagcctgatgatcttcccgtctggaacttcgacggttcctcgacggaacaggcccccggcgacaactcagatgtctacctccgacctgttgccgtcttccctgaccccatgcgtggcgtgcccaacatcctcgttctctgcgaatgctggaacgccgatggcacccccaacaagtacaaccaccgccacgagtgtgccaagctgatggaggctcatgccgagcacgtcccttggttcggcctcgagcaggagtacaccctgttcgacatggaggacaggccatacggctggcctaagaacggttaccctgccccccagggtccctactactgcggtgtaggcgccggccgtgtcatgtgccgtgatatcgtcgatgcccactacaaggcctgcctctatgccggcatcaagatctcaggtaccaacgccgaggtcatgcccgctcagtgggagttccaggtcggcccgtgtgagggcatcgagatgggtgatcatctgtggatggcccgcttcctgctccaccgtgtcgccgaggagtttggtgccaagatctccctcgagcccaagcctatccccggagactggaacggcgccggcctgcattccaacttctccaccaaggagatgcgtgttgagggtggcatgaaacacattgaggctgccatcaagaagcttgagggtcgtcaccaggagcacattgcagtctacggcaagggtaatgagcttcgtttgactggtagacatgagactggtgccatcgacacattcaactatggtattgccaaccgtggcgcatccatccgtatccccagggagtgtgccgccaagggctacggatacttcgaggaccgacgacccgcttctaatgccgacccctaccagattactggtatcatcatggagacgatctatggcgccgtttag

SEQ ID NO: 30834 - protein, 361 aa, Muscodor strobelii
  misc_feature: SGI Peptide ID NO. 570609
  misc_feature (112)..(361): Pfam Id: PF00120 Pfam Desc: Glutamine synthetase, catalytic domain
  misc_feature (23)..(106): Pfam Id: PF03951 Pfam Desc: Glutamine synthetase, beta-Grasp domain
  misc_feature (1)..(361): NCBI GI: 156044640 Blast Desc: glutamine synthetase [Sclerotinia sclerotiorum 1980] gi|154694812|gb|EDN94550.1| glutamine synthetase [Sclerotinia sclerotiorum 1980]
  misc_feature (1)..(361): NCBI GI: 154298092 Blast Desc: glutamine synthetase [Botryotinia fuckeliana B05.10] gi|150858197|gb|EDN33389.1| glutamine synthetase [Botryotinia fuckeliana B05.10]
  misc_feature (1)..(359): NCBI GI: 145601515 Blast Desc: glutamine synthetase [Magnaporthe grisea 70-15] gi|145009577|gb|EDJ94233.1| glutamine synthetase [Magnaporthe grisea 70-15]
  misc_feature (2)..(361): NCBI GI: 171693817 Blast Desc: protein product [Podospora anserina] gi|170946857|emb|CAP73661.1| protein product [Podospora anserina]
  misc_feature (2)..(361): NCBI GI: 2494743 Blast Desc: GLNA_COLGL RecName: Full=Glutamine synthetase; Short=GS; AltName: Full=Glutamate--ammonia ligase gi|1322275|gb|AAB00322.1| glutamine synthetase [Colletotrichum
  misc_feature (2)..(361): NCBI GI: 164424707 Blast Desc: glutamine synthetase [Neurospora crassa OR74A] gi|46395792|sp|Q86ZF9.1|GLNA_NEUCR RecName: Full=Glutamine synthetase; Short=GS; AltName: Full=Glutamate--ammonia ligase
  misc_feature (17)..(361): NCBI GI: 145605740 Blast Desc: glutamine synthetase [Magnaporthe grisea 70-15] gi|145013543|gb|EDJ98184.1| glutamine synthetase [Magnaporthe grisea 70-15]
  misc_feature (5)..(361): NCBI GI: 171684649 Blast Desc: protein product [Podospora anserina] gi|170942285|emb|CAP67937.1| protein product [Podospora anserina]
  misc_feature (2)..(361): NCBI GI: 164425751 Blast Desc: glutamine synthetase [Neurospora crassa OR74A] gi|157071049|gb|EAA29877.2| glutamine synthetase [Neurospora crassa OR74A]
  misc_feature (15)..(361): NCBI GI: 116192545 Blast Desc: glutamine synthetase [Chaetomium globosum CBS 148.51] gi|88181903|gb|EAQ89371.1| glutamine synthetase [Chaetomium globosum CBS 148.51]
  misc_feature (2)..(361): SWISSPROT Homolog: EC 6.3.1.2 Glutamate--ammonia ligase
MAESNYVSYTENLMKYMKLDQKGNAMAEYIWIDADGHVRSKSKTVTKIPENGKFKPDDLPVWNFDGSSTEQAPGDNSDVYLRPVAVFPDPMRGVPNILVLCECWNADGTPNKYNHRHECAKLMEAHAEHVPWFGLEQEYTLFDMEDRPYGWPKNGYPAPQGPYYCGVGAGRVMCRDIVDAHYKACLYAGIKISGTNAEVMPAQWEFQVGPCEGIEMGDHLWMARFLLHRVAEEFGAKISLEPKPIPGDWNGAGLHSNFSTKEMRVEGGMKHIEAAIKKLEGRHQEHIAVYGKGNELRLTGRHETGAIDTFNYGIANRGASIRIPRECAAKGYGYFEDRRPASNADPYQITGIIMETIYGAV

SEQ ID NO: 30835 - DNA, 2057 bp, Muscodor strobelii
  misc_feature: SGI EST ID NO. CUFF.73539.1
  misc_feature: Variant of the nucleotide sequence at SEQ ID NO 30833
aacagtttcgtggtgatgagttttgactatatcaggacagccatgcaataaaatgaaactcagatggtgtcgtgctagtctgtagatgcagggcctgcgtcccaactctagatcgaccgacccccaaccatcgccaattagatgatacgtaattctgcagtgccttaccttagatatcacctagacacatggtggtgcattggggagggttgcgtcctcccttatctttgaatgtctcgggctcccccaatcagatgtggcagagccgagctctgaatgacccgacatcatctatttattcacaaagcactcaggccgactgcggtcccgacctgtgcctgcccacataaaagcactcagctccctcaccccgccgcccgccgcgcgactctttcaactcacatcttcaccattttctatttccttccgctgcgtgtcgttgttcttttccagacttcaagtcgcgtcgcatcatcttcaaggccctgcgcaacctaaaattacacaattagagatcgttcctctcgtcaatcgccaaaatggccgaaagcaactatgtctcgtacactgagaatctcatgaagtacatgaagctcgaccagaagggaaacgccatggcggagtacatctggatcgacgctgacggccatgtgcgatccaagagcaagacagtcaccaagatccccgagaacggcaaattcaagcctgatgatcttcccgtctggaacttcgacggttcctcgacggaacaggcccccggcgacaactcagatgtctacctccgacctgttgccgtcttccctgaccccatgcgtggcgtgcccaacatcctcgttctctgcgaatgctggaacgccgatggcacccccaacaagtacaaccaccgccacgagtgtgccaagctgatggaggctcatgccgagcacgtcccttggttcggcctcgagcaggagtacaccctgttcgacatggaggacaggccatacggctggcctaagaacggttaccctgccccccagggtccctactactgcggtgtaggcgccggccgtgtcatgtgccgtgatatcgtcgatgcccactacaaggcctgcctctatgccggcatcaagatctcaggtaccaacgccgaggtcatgcccgctcagtgggagttccaggtcggcccgtgtgagggcatcgagatgggtgatcatctgtggatggcccgcttcctgctccaccgtgtcgccgaggagtttggtgccaagatctccctcgagcccaagcctatccccggagactggaacggcgccggcctgcattccaacttctccaccaaggagatgcgtgttgagggtggcatgaaacacattgaggctgccatcaagaagcttgagggtcgtcaccaggagcacattgcagtctacggcaagggtaatgagcttcgtttgactggtagacatgagactggtgccatcgacacattcaactatggtattgccaaccgtggcgcatccatccgtatccccagggagtgtgccgccaagggctacggatacttcgaggaccgacgacccgcttctaatgccgacccctaccagattactggtatcatcatggagacgatctatggcgccgtttagaggaagtaagaagatgcgattggggatgatgaagttctggtcccgcatgacccttgttacatagataaaccagcctctgcgtgctgagtcgcgatgaatataaatggataccccttgcagctacgttaagatgcatgcatccgtactttgcttcggcttaagacgtgtagacaccaatgggagaaggacaggtcttcgagaagctatggatgacgacctcacgcgttcagacaagtagtatgactgtataccagtatggatatagttatccgttctcctgtatgattattaaatgaaagcaagcagcaaaatttcatactatcagcaatccaactatgtcgtctcattcgtggtcgtagacatcttcgtacttgcgccactgcttagcttagggtccgtagtataggatagttgaggcatctaaacatgatg

SEQ ID NO: 30836 - DNA, 1137 bp, Muscodor strobelii
  misc_feature: SGI cDNA ID NO. 570610
  misc_feature: Encodes the peptide sequence at SEQ ID NO 30837
atggccgaaagcaactatgtctcgtacactgagaatctcatgaagtacatgaagctcgaccagaagggaaacgccatggcggagtacatctggatcgacgctgacggccatgtgcgatccaagagcaagacagtcaccaagatccccgagaacggcaaattcaagcctgatgatcttcccgtctggaacttcgacggttcctcgacggaacaggcccccggcgacaactcagatgtctacctccgacctgttgccgtcttccctgaccccatgcgtggcgtgcccaacatcctcgttctctgcgaatgctggaacgccgatggcacccccaacaagtacaaccaccgccacgagtgtgccaagctgatggaggctcatgccgagcacgtcccttggttcggcctcgagcaggagtacaccctgttcgacatggaggacaggccatacggctggcctaagaacggttaccctgccccccagggtccctactactgcggtgtaggcgccggccgtgtcatgtgccgtgatatcgtcgatgcccactacaaggcctgcctctatgccggcatcaagatctcaggtaccaacgccgaggtcatgcccgctcagtgggagttccaggtcggcccgtgtgagggcatcgagatgggtgatcatctgtggatggcccgcttcctgctccaccgtgtcgccgaggagtttggtgccaagatctccctcgagcccaagcctatccccggagactggaacggcgccggcctgcattccaacttctccaccaaggagatgcgtgttgagggtggcatgaaacacattgaggctgccatcaagaagcttgagggtcgtcaccaggagcacattgcagtctacggcaagggtaatgagcttcgtttgactggtagacatgagactggtgccatcgacacattcaactatggtattgccaaccgtggcgcatccatccgtatccccagggagtgtgccgccaagggctacggatacttcgaggaccgacgacccgcttctaatgccgacccctaccagattactggtatcatcatgtacgcaatccatcagacatgcatttttgaggccttgctaacaattcacagggagacgatctatggcgccgtttag

SEQ ID NO: 30837 - protein, 378 aa, Muscodor strobelii
  misc_feature: SGI Peptide ID NO. 570610
  misc_feature (112)..(361): Pfam Id: PF00120 Pfam Desc: Glutamine synthetase, catalytic domain
  misc_feature (23)..(106): Pfam Id: PF03951 Pfam Desc: Glutamine synthetase, beta-Grasp domain
  misc_feature (112)..(358): Pfam Id: PF00120 Pfam Desc: Glutamine synthetase, catalytic domain
  misc_feature (1)..(357): NCBI GI: 156044640 Blast Desc: glutamine synthetase [Sclerotinia sclerotiorum 1980] gi|154694812|gb|EDN94550.1| glutamine synthetase [Sclerotinia sclerotiorum 1980]
  misc_feature (1)..(357): NCBI GI: 154298092 Blast Desc: glutamine synthetase [Botryotinia fuckeliana B05.10] gi|150858197|gb|EDN33389.1| glutamine synthetase [Botryotinia fuckeliana B05.10]
  misc_feature (1)..(365): NCBI GI: 145601515 Blast Desc: glutamine synthetase [Magnaporthe grisea 70-15] gi|145009577|gb|EDJ94233.1| glutamine synthetase [Magnaporthe grisea 70-15]
  misc_feature (2)..(362): NCBI GI: 171693817 Blast Desc: protein product [Podospora anserina] gi|170946857|emb|CAP73661.1| protein product [Podospora anserina]
  misc_feature (2)..(361): NCBI GI: 2494743 Blast Desc: GLNA_COLGL RecName: Full=Glutamine synthetase; Short=GS; AltName: Full=Glutamate--ammonia ligase gi|1322275|gb|AAB00322.1| glutamine synthetase [Colletotrichum
  misc_feature (2)..(362): NCBI GI: 164424707 Blast Desc: glutamine synthetase [Neurospora crassa OR74A] gi|46395792|sp|Q86ZF9.1|GLNA_NEUCR RecName: Full=Glutamine synthetase; Short=GS; AltName: Full=Glutamate--ammonia ligase
  misc_feature (17)..(362): NCBI GI: 145605740 Blast Desc: glutamine synthetase [Magnaporthe grisea 70-15] gi|145013543|gb|EDJ98184.1| glutamine synthetase [Magnaporthe grisea 70-15]
  misc_feature (5)..(362): NCBI GI: 171684649 Blast Desc: protein product [Podospora anserina] gi|170942285|emb|CAP67937.1| protein product [Podospora anserina]
  misc_feature (2)..(362): NCBI GI: 164425751 Blast Desc: glutamine synthetase [Neurospora crassa OR74A] gi|157071049|gb|EAA29877.2| glutamine synthetase [Neurospora crassa OR74A]
  misc_feature (15)..(357): NCBI GI: 116192545 Blast Desc: glutamine synthetase [Chaetomium globosum CBS 148.51] gi|88181903|gb|EAQ89371.1| glutamine synthetase [Chaetomium globosum CBS 148.51]
  misc_feature (2)..(361): SWISSPROT Homolog: EC 6.3.1.2 Glutamate--ammonia ligase
MAESNYVSYTENLMKYMKLDQKGNAMAEYIWIDADGHVRSKSKTVTKIPENGKFKPDDLPVWNFDGSSTEQAPGDNSDVYLRPVAVFPDPMRGVPNILVLCECWNADGTPNKYNHRHECAKLMEAHAEHVPWFGLEQEYTLFDMEDRPYGWPKNGYPAPQGPYYCGVGAGRVMCRDIVDAHYKACLYAGIKISGTNAEVMPAQWEFQVGPCEGIEMGDHLWMARFLLHRVAEEFGAKISLEPKPIPGDWNGAGLHSNFSTKEMRVEGGMKHIEAAIKKLEGRHQEHIAVYGKGNELRLTGRHETGAIDTFNYGIANRGASIRIPRECAAKGYGYFEDRRPASNADPYQITGIIMYAIHQTCIFEALLTIHRETIYGAV

SEQ ID NO: 30838 - DNA, 2057 bp, Muscodor strobelii; identical to SEQ ID NO: 30835
  misc_feature: SGI EST ID NO. CUFF.73539.1
  misc_feature: Variant of the nucleotide sequence at SEQ ID NO 30836

SEQ ID NO: 30839 - DNA, 1170 bp, Muscodor strobelii
  misc_feature: SGI cDNA ID NO. 570611
  misc_feature: Encodes the peptide sequence at SEQ ID NO 30840
atggccgaaagcaactatgtctcgtacactgagaataatggatgtgctgacccggagtgtgtgctgcagctcatgaagtacatgaagctcgaccagaagggaaacgccatggcggagtacatctggatcgacgctgacggccatgtgcgatccaagagcaagacagtcaccaagatccccgagaacggcaaattcaagcctgatgatcttcccgtctggaacttcgacggttcctcgacggaacaggcccccggcgacaactcagatgtctacctccgacctgttgccgtcttccctgaccccatgcgtggcgtgcccaacatcctcgttctctgcgaatgctggaacgccgatggcacccccaacaagtacaaccaccgccacgagtgtgccaagctgatggaggctcatgccgagcacgtcccttggttcggcctcgagcaggagtacaccctgttcgacatggaggacaggccatacggctggcctaagaacggttaccctgccccccagggtccctactactgcggtgtaggcgccggccgtgtcatgtgccgtgatatcgtcgatgcccactacaaggcctgcctctatgccggcatcaagatctcaggtaccaacgccgaggtcatgcccgctcagtgggagttccaggtcggcccgtgtgagggcatcgagatgggtgatcatctgtggatggcccgcttcctgctccaccgtgtcgccgaggagtttggtgccaagatctccctcgagcccaagcctatccccggagactggaacggcgccggcctgcattccaacttctccaccaaggagatgcgtgttgagggtggcatgaaacacattgaggctgccatcaagaagcttgagggtcgtcaccaggagcacattgcagtctacggcaagggtaatgagcttcgtttgactggtagacatgagactggtgccatcgacacattcaactatggtattgccaaccgtggcgcatccatccgtatccccagggagtgtgccgccaagggctacggatacttcgaggaccgacgacccgcttctaatgccgacccctaccagattactggtatcatcatgtacgcaatccatcagacatgcatttttgaggccttgctaacaattcacagggagacgatctatggcgccgtttag

SEQ ID NO: 30840 - protein, 389 aa, Muscodor strobelii
  misc_feature: SGI Peptide ID NO. 570611
  misc_feature (123)..(372): Pfam Id: PF00120 Pfam Desc: Glutamine synthetase, catalytic domain
  misc_feature (34)..(117): Pfam Id: PF03951 Pfam Desc: Glutamine synthetase, beta-Grasp domain
  misc_feature (123)..(369): Pfam Id: PF00120 Pfam Desc: Glutamine synthetase, catalytic domain
  misc_feature (1)..(368): NCBI GI: 156044640 Blast Desc: glutamine synthetase [Sclerotinia sclerotiorum 1980] gi|154694812|gb|EDN94550.1| glutamine synthetase [Sclerotinia sclerotiorum 1980]
  misc_feature (1)..(368): NCBI GI: 154298092 Blast Desc: glutamine synthetase [Botryotinia fuckeliana B05.10] gi|150858197|gb|EDN33389.1| glutamine synthetase [Botryotinia fuckeliana B05.10]
  misc_feature (1)..(376): NCBI GI: 145601515 Blast Desc: glutamine synthetase [Magnaporthe grisea 70-15] gi|145009577|gb|EDJ94233.1| glutamine synthetase [Magnaporthe grisea 70-15]
  misc_feature (24)..(372): NCBI GI: 2494743 Blast Desc: GLNA_COLGL RecName: Full=Glutamine synthetase; Short=GS; AltName: Full=Glutamate--ammonia ligase gi|1322275|gb|AAB00322.1| glutamine synthetase [Colletotrichum
  misc_feature (2)..(373): NCBI GI: 171693817 Blast Desc: protein product [Podospora anserina] gi|170946857|emb|CAP73661.1| protein product [Podospora anserina]
  misc_feature (28)..(373): NCBI GI: 145605740 Blast Desc: glutamine synthetase [Magnaporthe grisea 70-15] gi|145013543|gb|EDJ98184.1| glutamine synthetase [Magnaporthe grisea 70-15]
  misc_feature (2)..(373): NCBI GI: 164424707 Blast Desc: glutamine synthetase [Neurospora crassa OR74A] gi|46395792|sp|Q86ZF9.1|GLNA_NEUCR RecName: Full=Glutamine synthetase; Short=GS; AltName: Full=Glutamate--ammonia ligase
  misc_feature (24)..(373): NCBI GI: 171684649 Blast Desc: protein product [Podospora anserina] gi|170942285|emb|CAP67937.1| protein product [Podospora anserina]
  misc_feature (24)..(373): NCBI GI: 164425751 Blast Desc: glutamine synthetase [Neurospora crassa OR74A] gi|157071049|gb|EAA29877.2| glutamine synthetase [Neurospora crassa OR74A]
  misc_feature (26)..(368): NCBI GI: 116192545 Blast Desc: glutamine synthetase [Chaetomium globosum CBS 148.51] gi|88181903|gb|EAQ89371.1| glutamine synthetase [Chaetomium globosum CBS 148.51]
  misc_feature (24)..(372): SWISSPROT Homolog: EC 6.3.1.2 Glutamate--ammonia ligase
MAESNYVSYTENNGCADPECVLQLMKYMKLDQKGNAMAEYIWIDADGHVRSKSKTVTKIPENGKFKPDDLPVWNFDGSSTEQAPGDNSDVYLRPVAVFPDPMRGVPNILVLCECWNADGTPNKYNHRHECAKLMEAHAEHVPWFGLEQEYTLFDMEDRPYGWPKNGYPAPQGPYYCGVGAGRVMCRDIVDAHYKACLYAGIKISGTNAEVMPAQWEFQVGPCEGIEMGDHLWMARFLLHRVAEEFGAKISLEPKPIPGDWNGAGLHSNFSTKEMRVEGGMKHIEAAIKKLEGRHQEHIAVYGKGNELRLTGRHETGAIDTFNYGIANRGASIRIPRECAAKGYGYFEDRRPASNADPYQITGIIMYAIHQTCIFEALLTIHRETIYGAV

SEQ ID NO: 30841 - DNA, 2057 bp, Muscodor strobelii; identical to SEQ ID NO: 30835
  misc_feature: SGI EST ID NO. CUFF.73539.1
  misc_feature: Variant of the nucleotide sequence at SEQ ID NO 30839

SEQ ID NO: 30842 - DNA, 915 bp, Muscodor strobelii
  misc_feature: SGI cDNA ID NO. 570612
  misc_feature: Encodes the peptide sequence at SEQ ID NO 30843
atgcaagtggaaatagaacgaccaacccgtccagtcccggtgtcgcaggagactgaacagcgcaagtggaaagagtggctcttatctgacgatgatggtctgagttcgcgaccagaaacttgcgtttcgttggcgaagttgtgcaacggctctacccgagattcaagaagcagcactgcgttgccctctcacctccagcgtgagctgccccatttcagcctatcttccgacccgcacatccaagcagagaaggagcccagaagtcctttcggagcccgagtgactcattgtctgaccaccgaccctttgcccgacgtcagcggcaacaaggacgatcgtcgagatgactatcacctaaatctcaaactgaagaaaaaggagacggatgacgacctgaacgagatttggaagcgttttgtctgcattgatgacgaggacagagatgagttgttctctaatgcgtttaaagaagctgcgcatcaggctgccagagagcttcgaccatccgacacccctgatattgtcgacagccagacagacacgggcgctacctgcgggacagaactatcaagtatcagcgagagtttgttcaacgaaacactcgatcccgacgcctctatatcgagtgctatattgacgcagagggctgggggttcggaagcagtctggagtagtaaagcgacagtcggatcctcggatgacccgccaagcgccactctattcacgatcccgaagtcttttgtaggaaagaactcgacttctaatgtgacaatcacagctctgcctcttttaaaagaagtggtaggcgggaagcggaaagggagaaagcaaaagagaattgcagatggcagaactgatattcgacgtttacctgattttgagggagatccaatcgaagatagtggagaggaatag

SEQ ID NO: 30843 - protein, 304 aa, Muscodor strobelii
  misc_feature: SGI Peptide ID NO. 570612
  misc_feature (239)..(300): NCBI GI: 171693819 Blast Desc: protein product [Podospora anserina] gi|170946858|emb|CAP73662.1| protein product [Podospora anserina]
MQVEIERPTRPVPVSQETEQRKWKEWLLSDDDGLSSRPETCVSLAKLCNGSTRDSRSSTALPSHLQRELPHFSLSSDPHIQAEKEPRSPFGARVTHCLTTDPLPDVSGNKDDRRDDYHLNLKLKKKETDDDLNEIWKRFVCIDDEDRDELFSNAFKEAAHQAARELRPSDTPDIVDSQTDTGATCGTELSSISESLFNETLDPDASISSAILTQRAGGSEAVWSSKATVGSSDDPPSATLFTIPKSFVGKNSTSNVTITALPLLKEVVGGKRKGRKQKRIADGRTDIRRLPDFEGDPIEDSGEE

SEQ ID NO: 30844 - DNA, 3117 bp, Muscodor strobelii
  misc_feature: SGI EST ID NO. CUFF.73072.0
  misc_feature: Variant of the nucleotide sequence at SEQ ID NO 30842
gcctgttcctgtatgtgtaagtgagagatcaattgagtaagaatgataataagcgacgtttcttttgcatccaatcatggcgcataggattactagtagcgtgtgggttgacagaaaagtgtggtgttcggagatgttcctctgtcgcggttccgcattaacgcccggggatgtcgcgtgccatccaggaccaaacgccggggttgcttgtctgaagccgtcatgaatttcaatacacgttatcgcaatgttgctattggccgcctcactgatagagtcgaacacacacgtgcgaaatgactgaatcttagctttcttaccagcctgtccatcccgccctcagtccaaggcttgtgactgtgcaatgatccatcgttcaacatacggtcattgaagaattgctggtcttattcggcaggtctatgatcagacgaggcccagaccgcatagattgtcaattctggttcggcgcgaccctccaaatctgcacagatgatgcttggtgttgacaaagactcatcaatacatctgatttcgatctccccatgcatgattgctgacatgcagacggccctgcaatgctacattaagcttactgcccgggataatcgtctcaccgtccaccttttcaagttgtgatccagaccgagcgatcgtgaataacgtgaaccggtatgagagtcgcctcctgcttcgtctctctgacttgtacagagagtttttgagattctcaccgtccgcctcaagatatcctactgcttcgacacaatggagacgcccgcgcattcgatgagatcctgttcaaaagcttgagaacctggaacatcgctatactcctcttggtgctcgtaccgaacagcttcaaacgaggtaccggccgttggaggcatcggagcaatgtcaattagacatactaaataccgtattgacgacgtggtagagttgcgtgcggatccagtatcgccttacccacaagtgccgcttggacgtgcgtcaagattataggtaatcaagagcactagggctcccgtatgtgcgggaaagagcgctatgtgcttttcaatcatctagaaggagcgtgcctaatttgacgtgagtatcacaggaggcaagtgccaacagccgactcgtctacagctagaaaaattggttcgtcgggtcgtcaatcggttgcattccctcgcatgtactaagatttcagtagccatggcgcgccattgttctgctcgtgctattggcctctgtactatagtctctatttgacaggtattcatattgactgttcgtgatgaattggacagaagggcggttggctcgtcattcacgagccaggcagcaaaatgcgctgctcattcgacagaagcagcatttcgcaaaagtccgcaacaacatcctcaattcgactaaccagcggggtcctatcgcgatttcattcatgaatcaagagtctcccaggccttcaagcccttcgcagtcggttgttccagcgactcggaacgtaaggcaagttagcagctttacgcctattagctccctccaaaagcgcgaacgacctgggagtgcggcaggagatggtgacgacatcagactcatgaagagaatgaaactacttgacaagtccgattggacggggctagcaatgcaagagccattggacattgtctttccgggtcagttctactcgacgaagagatgggggagattttctggggcctgtgacaaaccacgacatagaaacaataaacatgccccctttgtcgaagaggagtccgccagtccgtacgggaaagcacccgtaaggatccaaattggaagcgaagagattcgaccaagtcttgcgacggggtcgctgccaagtacaggacacgccgaatcaaaacatgcgtctatggcaggaacgcatcgtcaacaatcgacacccggaagcagccaatacgaaagctcgatatcaaaattccttgagtcaaatcacacctggcgaacaccttgggcaaaaggggagacgccacctcatgtagttcattcttcatcaataatccatgcaccaaaaccgcgaagggttgtttttccgatcctcgactggtccgattcgataaccgagactgacagaacctctatctcggaagaccgaggaagtatgcaagtggaaatagaacgaccaacccgtccagtcccggtgtcgcaggagactgaacagcgcaagtggaaagagtggctcttatctgacgatgatggtctgagttcgcgaccagaaacttgcgtttcgttggcgaagttgtgcaacggctctacccgagattcaagaagcagcactgcgttgccctctcacctccagcgtgagctgccccatttcagcctatcttccgacccgcacatccaagcagagaaggagcccagaagtcctttcggagcccgagtgactcattgtctgaccaccgaccctttgcccgacgtcagcggcaacaaggacgatcgtcgagatgactatcacctaaatctcaaactgaagaaaaaggagacggatgacgacctgaacgagatttggaagcgttttgtctgcattgatgacgaggacagagatgagttgttctctaatgcgtttaaagaagctgcgcatcaggctgccagagagcttcgaccatccgacacccctgatattgtcgacagccagacagacacgggcgctacctgcgggacagaactatcaagtatcagcgagagtttgttcaacgaaacactcgatcccgacgcctctatatcgagtgctatattgacgcagagggctgggggttcggaagcagtctggagtagtaaagcgacagtcggatcctcggatgacccgccaagcgccactctattcacgatcccgaagtcttttgtaggaaagaactcgacttctaatgtgacaatcacagctctgcctcttttaaaagaagtggtaggcgggaagcggaaagggagaaagcaaaagagaattgcagatggcagaactgatattcgacgtttacctgattttgagggagatccaatcgaagatagtggagaggaatagatctgcaaaaatatagagcaatcaactagcaatgtagcaaagctcagcccctatagggtaaaatc

SEQ ID NO: 30845 - DNA, 1677 bp, Muscodor strobelii
  misc_feature: SGI cDNA ID NO. 570613
  misc_feature: Encodes the peptide sequence at SEQ ID NO 30846
atggccccagtagcagacacagacctgttcaacgcaacggatgccgatctcactgcaccgttcgagtcagatgtgatccttgagatacgaactgccaaaatgaaggcaatgcctggtctcaccattcaatctggtattgataagaaattgcgagacggcaagatacctgtcactttcaccggacttgatgccgacgaacacgatctcaccttccacggcggacgcgacaaagcaatacacggatattgctcgtcgcattaccctcgatggagacaggaatttcccgaggcgggggaacggttcgcacctggtgggtttggcgagaatttcgtcacccgccgtatgaatgagcgcaacatctgcataggcgacgtcgtctccgtaggcaatgatggagtactcctacagatcagtctaccacgacaaccatgcttcaaactcaatcatcgctttaagctcaagaacttcgcgccaaacacttacagattgagccgcacggggtggtactaccgagtgcttcacgagggaaccgtgcaagcgggtgatgagatccgccttgtcgagcgaaagtggcctaagtggactattgagcgcgtacaggagtatctgcatcgcacacaagataatgcggaaatgaatgaggagctgtcgcagattgtcgatatgggcgatgagagtaggaaggcgttcgagacccgtgttgcgaagttaaaggcgaagcgaagacgtgctgcgggtaaggaggaaaatgagtggcgcgactacaggcttgttgaaaagaagatacagacggaacgcattagctcgtttgtcttcgagtcgctaaagcctgatcccgaagccgacaaggatacgaaattgggtgctcatgttcggcttaagctaccgaatggactggtgcggtcttattcgattgtttctgggagtgacaaccgctttgagcttggcatcgcactcgatgaagcgagcagaggtggctcggcatacttacatgatgacgcgaaagaggatgatgttattcaagtcggtcgcatcacaactgatctcaagccggcttcggcagctagcaaccatgtatttattgtcggaggtatcggcatcacggcatttctcagcatgatggaactataccgtcttatcaattttgagactacccttcatttcggcatacgcagcgaagacgagattccctttcgagatcggatagatggactcaaagagtcggtgagattatacgacaagagtaaaggacagcgtcttgatatatctgctatcctacgctcattgagttggaactcacatgtctacgtatgtggaccgagtcgcatgcttgaagaagcaaaggtaaaggcgaagaagtgtggacttggggaagacgaaattcattacgaggcatttggggccgataccaccggcgatcctttcgaagtcgaggtcgcgaaccgcgacggtaagatcctcaaggttgaggaagaagagtcattgctagatgtcttgaaagagcattttggcgacatcgcgagtagttgtgaggttggcaattgtggcacatgcaaggtctcgctcaaatgcggccaagtcgagcataggggcacggcgcttactgaagaggacaagaagaattccttgctaagctgtgttagtcggggtattggtaggatcgctattgagatatag

SEQ ID NO: 30846 - protein, 558 aa, Muscodor strobelii
  misc_feature: SGI Peptide ID NO. 570613
  misc_feature (478)..(552): Pfam Id: PF00111 Pfam Desc: 2Fe-2S iron-sulfur cluster binding domain
  misc_feature (60)..(186): Pfam Id: PF03473 Pfam Desc: MOSC domain
  misc_feature (359)..(449): Pfam Id: PF00175 Pfam Desc: Oxidoreductase NAD-binding domain
  misc_feature (478)..(549): Pfam Id: PF00111 Pfam Desc: 2Fe-2S iron-sulfur cluster binding domain
  misc_feature (13)..(558): NCBI GI: 85090971 Blast Desc: NCU04575 [Neurospora crassa OR74A] gi|28920053|gb|EAA29438.1| conserved [Neurospora crassa OR74A] gi|28950015|emb|CAD70770.1| related to PHTHALATE 4, 5-DIOXYGENASE
  misc_feature (55)..(546): NCBI GI: 256732064 Blast Desc: NECHADRAFT_80304 [Nectria haematococca mpVI 77-13-4]
  misc_feature (14)..(558): NCBI GI: 171691781 Blast Desc: protein product [Podospora anserina] gi|170945839|emb|CAP72640.1| protein product [Podospora anserina]
  misc_feature (13)..(546): NCBI GI: 145610963 Blast Desc: MGG_00769 [Magnaporthe grisea 70-15] gi|145018296|gb|EDK02575.1| MGG_00769 [Magnaporthe grisea 70-15]
  misc_feature (4)..(558): NCBI GI: 116179844 Blast Desc: CHGG_00550 [Chaetomium globosum CBS 148.51] gi|88184847|gb|EAQ92315.1| CHGG_00550 [Chaetomium globosum CBS 148.51]
  misc_feature (28)..(558): NCBI GI: 145230708 Blast Desc: An01g12100 [Aspergillus niger] gi|134055737|emb|CAK44110.1| protein product [Aspergillus niger]
  misc_feature (10)..(558): NCBI GI: 169763868 Blast Desc: [Aspergillus oryzae RIB40] gi|83770862|dbj|BAE60995.1| protein product [Aspergillus oryzae]
  misc_feature (10)..(558): NCBI GI: 238489845 Blast Desc: vanillate O-demethylase oxidoreductase, [Aspergillus flavus NRRL3357] gi|220698548|gb|EED54888.1| vanillate O-demethylase oxidoreductase, [Aspergillus flavus NRRL3357]
  misc_feature (27)..(558): NCBI GI: 189201397 Blast Desc: 3-chlorobenzoate-3,4-dioxygenase reductase subunit [Pyrenophora tritici-repentis Pt-1C-BFP] gi|187984134|gb|EDU49622.1| 3-chlorobenzoate-3,4-dioxygenase
  misc_feature (20)..(558): NCBI GI: 169619912 Blast Desc: SNOG_13156 [Phaeosphaeria nodorum SN15] gi|111058363|gb|EAT79483.1| SNOG_13156 [Phaeosphaeria nodorum SN15]
  misc_feature (270)..(550): SWISSPROT Homolog: EC 1.14.12.7 Phthalate 4,5-dioxygenase
MAPVADTDLFNATDADLTAPFESDVILEIRTAKMKAMPGLTIQSGIDKKLRDGKIPVTFTGLDADEHDLTFHGGRDKAIHGYCSSHYPRWRQEFPEAGERFAPGGFGENFVTRRMNERNICIGDVVSVGNDGVLLQISLPRQPCFKLNHRFKLKNFAPNTYRLSRTGWYYRVLHEGTVQAGDEIRLVERKWPKWTIERVQEYLHRTQDNAEMNEELSQIVDMGDESRKAFETRVAKLKAKRRRAAGKEENEWRDYRLVEKKIQTERISSFVFESLKPDPEADKDTKLGAHVRLKLPNGLVRSYSIVSGSDNRFELGIALDEASRGGSAYLHDDAKEDDVIQVGRITTDLKPASAASNHVFIVGGIGITAFLSMMELYRLINFETTLHFGIRSEDEIPFRDRIDGLKESVRLYDKSKGQRLDISAILRSLSWNSHVYVCGPSRMLEEAKVKAKKCGLGEDEIHYEAFGADTTGDPFEVEVANRDGKILKVEEEESLLDVLKEHFGDIASSCEVGNCGTCKVSLKCGQVEHRGTALTEEDKKNSLLSCVSRGIGRIAIEI

SEQ ID NO: 30847 - DNA, 3009 bp, Muscodor strobelii
  misc_feature: SGI EST ID NO. CUFF.73075.0
  misc_feature: Variant of the nucleotide sequence at SEQ ID NO 30845
gctacttggctcggcggagtcggatgcgaatctagaacttttatgatctcatgcgtcgcttttatagataaatctccgcgggaggttcaatctttcccttcccaattacatacgcttctttcgcaccatttgccagcatatatgcttctgcacacattttagatacattgtcacattttaatagagcgcggattttgagataatcaaagctattccaattaacatggccccagtagcagacacagacctgttcaacgcaacggatgccgatctcactgcaccgttcgagtcagatgtgatccttgagatacgaactgccaaaatgaaggcaatgcctggtctcaccattcaatctggtattgataagaaattgcgagacggcaagatacctgtcactttcaccggacttgatgccgacgaacacgatctcaccttccacggcggacgcgacaaagcaatacacggatattgctcgtcgcattaccctcgatggagacaggaatttcccgaggcgggggaacggttcgcacctggtgggtttggcgagaatttcgtcacccgccgtatgaatgagcgcaacatctgcataggcgacgtcgtctccgtaggcaatgatggagtactcctacagatcagtctaccacgacaaccatgcttcaaactcaatcatcgctttaagctcaagaacttcgcgccaaacacttacagattgagccgcacggggtggtactaccgagtgcttcacgagggaaccgtgcaagcgggtgatgagatccgccttgtcgagcgaaagtggcctaagtggactattgagcgcgtacaggagtatctgcatcgcacacaagataatgcggaaatgaatgaggagctgtcgcagattgtcgatatgggcgatgagagtaggaaggcgttcgagacccgtgttgcgaagttaaaggcgaagcgaagacgtgctgcgggtaaggaggaaaatgagtggcgcgactacaggcttgttgaaaagaagatacagacggaacgcattagctcgtttgtcttcgagtcgctaaagcctgatcccgaagccgacaaggatacgaaattgggtgctcatgttcggcttaagctaccgaatggactggtgcggtcttattcgattgtttctgggagtgacaaccgctttgagcttggcatcgcactcgatgaagcgagcagaggtggctcggcatacttacatgatgacgcgaaagaggatgatgttattcaagtcggtcgcatcacaactgatctcaagccggcttcggcagctagcaaccatgtatttattgtcggaggtatcggcatcacggcatttctcagcatgatggaactataccgtcttatcaattttgagactacccttcatttcggcatacgcagcgaagacgagattccctttcgagatcggatagatggactcaaagagtcggtgagattatacgacaagagtaaaggacagcgtcttgatatatctgctatcctacgctcattgagttggaactcacatgtctacgtatgtggaccgagtcgcatgcttgaagaagcaaaggtaaaggcgaagaagtgtggacttggggaagacgaaattcattacgaggcatttggggccgataccaccggcgatcctttcgaagtcgaggtcgcgaaccgcgacggtaagatcctcaaggttgaggaagaagagtcattgctagatgtcttgaaagagcattttggcgacatcgcgagtagttgtgaggttggcaattgtggcacatgcaaggtctcgctcaaatgcggccaagtcgagcataggggcacggcgcttactgaagaggacaagaagaattccttgctaagctgtgttagtcggggtattggtaggatcgctattgagatataggggcgtagccacccaatgcagcaacaaatgagatgtcccggaaggcagagcgctactaggaatgacgttttagaacaccacttgatctttatacacaccatcgtgaacaacattcccactcgtaacattgagaatactggcgccttgtccgcgtgccatcttcgtctcataaatttagaatgattccgctcatcgattagaaagagccctgttagcgttgcatcaggcttcttgtcctgcatgtcggtggctgagtacccctgtcaggggtttcgtccatcgccgcgtctgggaccgacgcaattgcgcagtcttcatcgcaacttcgatttcttgcgggactaaatcaacagcatcgaatatgcgtcttgaagacgagagccacgttcaggatcgtcagcacctctgcagagctttcacatcggggttcacaacgaaaagtctaacaaaatggaaccacctcctccacctatgtcgcggccagtatcttcgcagcctacggtgaaatacaagccagtgcctagcagaacttctagggctaggaagggtattcctgtacatgtttgcgacatgtgcaatccgccaaaggtgacaatgtttcacgctccttggtgtttccgcaagagcgcgcagtgtactataagctaaggcaacatagacttttactcggccagagcacttgaggtagctatcaccctctccatacttgagtattcttgccaacacatcttgttgtttttacagacgacaccagctatctcatagacccgctgcatttccatgtacccatcctggatgcgacaagacatttcaccgtgcagatcttttatcccgacaccttcaaagacatgaacaagacaatcgcatgtatagtgaacaagacaatgctgtctcacgtgccgattctgttttttcctacgagtggccctcgttcgactacaacagtctcatgtactatcctcaatatccatctccgatgatcccagtaactaccgtagactataaacaggacaatcttgaagaaatagccgaagacgaaataaatgagctacatcgatttgttctccagatcattcagaggaatgtgccgagcgaaaacaaggctcgcg

SEQ ID NO: 30848 - DNA, 1872 bp, Muscodor strobelii
  misc_feature: SGI cDNA ID NO. 570614
  misc_feature: Encodes the peptide sequence at SEQ ID NO 30849
atgatcccagtaactaccgtagactataaacaggacaatcttgaagaaatagccgaagacgaaataaatgagctacatcgatttgttctccagatcattcagaggaatgtgccgagcgaaaacaaggctcgcgagattatggctctccttatcgagcgagagctcccgctagacatgcttgaagacgtgacaaatcgtgaaacctcattcaaaaggaggatggagagatcattcatcttggataagtatttgaatcatactgttggcaaatcctatgcgccaaccttagcagattccggtttcgaatctaacccagcaacgacacctttccccactgaaactcacacaggattgagatcgcctgatgcaacattttcaccaatgcaaaactataatagggctgcgtggccatctattccgcctcgttcgcctactcctaacccgtctctgatcgataggcccggaagcttagagaatacagctcgaggaaaagacacggcaggcgaactgagttcaattcttcctcgaagacctgaggagttacaatgtcagcctaatcatgcctccgaggaacaagctgcgaactgggcgcaagggaatgctcaggatttcacagtcgacaaaatgtcgccccagaccacaacctctatgggcgaagatacggacttttccgagcaaactgtagattccccgagcataattgaatttgtcttgggacacagagcccagaaattattcactaagctcgaggcatattttggaaagattgtggaaagtcgattgagcatttctcaatgcacagacgattcaactattgggaacggacagcagccgtcggcattatgcgcatcatctcaactgacgtatgatcaaaatgacaggacgtcaagaccaaagagaagtagagcagcagatgatcaagacaatgatgaaaatcagacgccaggaaagggcgatggcaatggcaaccctcgccagaagcggcaaaaacccaatatttcttcgtgttcaaagattgcatgcccattcatgaaacgatacccctcccaattcgcttcttggagaacttgtgtcgggcctgggttcgatggtttcaaccggatgaaggaacatttaaagcgccgacactataaagaacgatcttgtgggagatgcctcacccagtttgagactagtcgtttgctgcaagagcacgtgcttctacctaagccttgtgcggtgatcgagagacctattacttctgggttcatgtcgcagctccagtggaatgagatcaacgagaagagacgcgcgggcaagaatgacttatcagaaaggtggaggcacctatatcttacgctcttctctgacaccaatgaaaatgcgattccgggaccttatttcatggagaccgaagtagcgaatgtgttgcagcaagacatcgaccccaatgagttcgagaaccatataaagcaagctctcccggggcgtgtgctgatcaggctaaacgaggagttcagtttcatggcggaaagagcaaaggagaggctattaagtatcattcaggaggagagctctgaaattcttaaatcgtacttacaaggaaaaggtatcagaactaccgactcgcaaaccagtctaaccgcgttccaacaacagcaacaccatttcgagcagccccgcacacaatctgatctcatagaccctcaaggaccccatattgaggaaccacgtgctggcttccaactagggttggctcctgacccgttctcctgttgggagcataatgatctcctccaagatttctcatggcttgacgatgacaaggacgttgaagactcggcatatggctcgaacatgatggacatgaatggttctacttatggcaattga

SEQ ID NO: 30849 - protein, 623 aa, Muscodor strobelii
  misc_feature: SGI Peptide ID NO. 570614
  misc_feature (313)..(548): NCBI GI: 116194256 Blast Desc: CHGG_03726 [Chaetomium globosum CBS 148.51] gi|88179639|gb|EAQ87107.1| CHGG_03726 [Chaetomium globosum CBS 148.51]
  misc_feature (319)..(461): NCBI GI: 145604543 Blast Desc: MGG_07776 [Magnaporthe grisea 70-15] gi|145012548|gb|EDJ97202.1| MGG_07776 [Magnaporthe grisea 70-15]
  misc_feature (244)..(448): NCBI GI: 145608210 Blast Desc: MGG_03279 [Magnaporthe grisea 70-15] gi|145015716|gb|EDK00206.1| MGG_03279 [Magnaporthe grisea 70-15]
  misc_feature (307)..(556): NCBI GI: 256726722 Blast Desc: NECHADRAFT_76012 [Nectria haematococca mpVI 77-13-4]
  misc_feature (333)..(516): NCBI GI: 171683689 Blast Desc: protein product [Podospora anserina] gi|170941804|emb|CAP67458.1| protein product [Podospora anserina]
  misc_feature (298)..(525): NCBI GI: 116205235 Blast Desc: CHGG_10501 [Chaetomium globosum CBS 148.51] gi|88176629|gb|EAQ84097.1| CHGG_10501 [Chaetomium globosum CBS 148.51]
  misc_feature (326)..(526): NCBI GI: 171689708 Blast Desc: protein product [Podospora anserina] gi|170944816|emb|CAP70928.1| protein product [Podospora anserina]
  misc_feature (339)..(546): NCBI GI: 256724972 Blast Desc: [Nectria haematococca mpVI 77-13-4]
  misc_feature (309)..(463): NCBI GI: 85088369 Blast Desc: NCU10070 [Neurospora crassa OR74A] gi|28919067|gb|EAA28616.1| NCU10070 [Neurospora crassa OR74A]
  misc_feature (338)..(461): NCBI GI: 16416005 Blast Desc: conserved [Neurospora crassa]
MIPVTTVDYKQDNLEEIAEDEINELHRFVLQIIQRNVPSENKAREIMALLIERELPLDMLEDVTNRETSFKRRMERSFILDKYLNHTVGKSYAPTLADSGFESNPATTPFPTETHTGLRSPDATFSPMQNYNRAAWPSIPPRSPTPNPSLIDRPGSLENTARGKDTAGELSSILPRRPEELQCQPNHASEEQAANWAQGNAQDFTVDKMSPQTTTSMGEDTDFSEQTVDSPSIIEFVLGHRAQKLFTKLEAYFGKIVESRLSISQCTDDSTIGNGQQPSALCASSQLTYDQNDRTSRPKRSRAADDQDNDENQTPGKGDGNGNPRQKRQKPNISSCSKIACPFMKRYPSQFASWRTCVGPGFDGFNRMKEHLKRRHYKERSCGRCLTQFETSRLLQEHVLLPKPCAVIERPITSGFMSQLQWNEINEKRRAGKNDLSERWRHLYLTLFSDTNENAIPGPYFMETEVANVLQQDIDPNEFENHIKQALPGRVLIRLNEEFSFMAERAKERLLSIIQEESSEILKSYLQGKGIRTTDSQTSLTAFQQQQHHFEQPRTQSDLIDPQGPHIEEPRAGFQLGLAPDPFSCWEHNDLLQDFSWLDDDKDVEDSAYGSNMMDMNGSTYGN

SEQ ID NO: 30850 - DNA, 2285 bp, Muscodor strobelii
  misc_feature: SGI EST ID NO. CUFF.73099.0
  misc_feature: Variant of the nucleotide sequence at SEQ ID NO 30848
agatcattcatcttggataagtatttgaatcatactgttggcaaatcctatgcgccaaccttagcagattccggtttcgaatctaacccagcaacgacacctttccccactgaaactcacacaggattgagatcgcctgatgcaacattttcaccaatgcaaaactataatagggctgcgtggccatctattccgcctcgttcgcctactcctaacccgtctctgatcgataggcccggaagcttagagaatacagctcgaggaaaagacacggcaggcgaactgagttcaattcttcctcgaagacctgaggagttacaatgtcagcctaatcatgcctccgaggaacaagctgcgaactgggcgcaagggaatgctcaggatttcacagtcgacaaaatgtcgccccagaccacaacctctatgggcgaagatacggacttttccgagcaaactgtagattccccgagcataattgaatttgtcttgggacacagagcccagaaattattcactaagctcgaggcatattttggaaagattgtggaaagtcgattgagcatttctcaatgcacagacgattcaactattgggaacggacagcagccgtcggcattatgcgcatcatctcaactgacgtatgatcaaaatgacaggacgtcaagaccaaagagaagtagagcagcagatgatcaagacaatgatgaaaatcagacgccaggaaagggcgatggcaatggcaaccctcgccagaagcggcaaaaacccaatatttcttcgtgttcaaagattgcatgcccattcatgaaacgatacccctcccaattcgcttcttggagaacttgtgtcgggcctgggttcgatggtttcaaccggatgaaggaacatttaaagcgccgacactataaagaacgatcttgtgggagatgcctcacccagtttgagactagtcgtttgctgcaagagcacgtgcttctacctaagccttgtgcggtgatcgagagacctattacttctgggttcatgtcgcagctccagtggaatgagatcaacgagaagagacgcgcgggcaagaatgacttatcagaaaggtggaggcacctatatcttacgctcttctctgacaccaatgaaaatgcgattccgggaccttatttcatggagaccgaagtagcgaatgtgttgcagcaagacatcgaccccaatgagttcgagaaccatataaagcaagctctcccggggcgtgtgctgatcaggctaaacgaggagttcagtttcatggcggaaagagcaaaggagaggctattaagtatcattcaggaggagagctctgaaattcttaaatcgtacttacaaggaaaaggtatcagaactaccgactcgcaaaccagtctaaccgcgttccaacaacagcaacaccatttcgagcagccccgcacacaatctgatctcatagaccctcaaggaccccatattgaggaaccacgtgctggcttccaactagggttggctcctgacccgttctcctgttgggagcataatgatctcctccaagatttctcatggcttgacgatgacaaggacgttgaagactcggcatatggctcgaacatgatggacatgaatggttctacttatggcaattgaaaacgcccgtttctctaccgcctaatgtggtctgttctccgccgcggaatgagacaaggacagaaccacttaattttcggcacggcgcgcacttgctcatttgttcgatgcaactatctaacgaatatatactgatgctataaatcgataacataagaatcgatacagcggtgatctacgcagctgactctcggttatttcaatgcagtaatcgagaataattgcgacaggtgatcatcgcagcctgtatttatgaatcaatttgcgagatagtaggcgtgatctaccgcgtcacattgcatgcgataatgccattaatttgtgttctcggcgcagctggtaagtcgcagcgttagggcgatggccagctccaaaatggatcctctagtggggttttggggaacatatgtgctaaggtgcaattatgccaagaacatccggcacttcagagcagcgctcatagctcactattacaagatttcgatactctatcatgcttcattttacattcaaagaagcgaaaaagtgggttgtatagaatggctgagtctgaaaaggcattgcaagagatcgccacggcagcgaagcagaacgcagggtcctacctaacagagattccaccggaacttgaaccagca

SEQ ID NO: 30851 - DNA, 807 bp, Muscodor strobelii
  misc_feature: SGI cDNA ID NO. 570615
  misc_feature: Encodes the peptide sequence at SEQ ID NO 30852
atggctgagtctgaaaaggcattgcaagagatcgccacggcagcgaagcagaacgcagggtcctacctaacagagattccaccggaacttgaaccagcacgccgcttacttgagcactatagcgggattgcacccgctgagattgacactcacattcgcagaatacgtgacaaagcgtgggctgtgttcccatatggcgggattggttcattcaagttcttagacatgacagcgacaattggagatcccatggttcacactgttaccaatcgcctcaaagttcctgggaatactgagcggttacttgatgttggctgctgtcttggtcacgttgtccgccagctcgctgtcgcgggtattcctagcgaacatctgtatggaattgacttgcagcctcgctttcttgattttggatatgacttgttctgtgatcgcgaaaagacaaaggcgacctacatatctggagatatgatgcaggaggactcaaacttagacgtattgagagacgagattgacatcatctatgcgtctgcttttttccatctatttgagcggcctggccagatcatggctgctaagcgcatggtcgagtttttaaatcccaagaatccgaatgtgttgatattcgggcagaatggtgggccgaagatcgatggatgggagaaatacgtacttgatggaaatgcatggaagtgcatgtgggatgaggttggtaagatgacaggaactgcttgggaaacgacaatgagctcagaggaggacgacaagagaatcatgacgagattcacagttcagagagctatgtag

SEQ ID NO: 30852 - protein, 268 aa, Muscodor strobelii
  misc_feature: SGI Peptide ID NO. 570615
  misc_feature (102)..(191): Pfam Id: PF08241 Pfam Desc: Methyltransferase domain
  misc_feature (22)..(255): NCBI GI: 169615148 Blast Desc: SNOG_10728 [Phaeosphaeria nodorum SN15] gi|111061002|gb|EAT82122.1| SNOG_10728 [Phaeosphaeria nodorum SN15]
  misc_feature (21)..(249): NCBI GI: 46128027 Blast Desc: FG08391.1 [Gibberella zeae PH-1]
  misc_feature (10)..(256): NCBI GI: 242809401 Blast Desc: conserved [Talaromyces stipitatus ATCC 10500] gi|218715986|gb|EED15408.1| conserved [Talaromyces stipitatus ATCC 10500]
  misc_feature (1)..(253): NCBI GI: 255936301 Blast Desc: Pc13g07470 [Penicillium chrysogenum Wisconsin 54-1255] gi|211583797|emb|CAP91816.1| Pc13g07470 [Penicillium chrysogenum Wisconsin 54-1255]
  misc_feature (22)..(262): NCBI GI: 189207667 Blast Desc: conserved [Pyrenophora tritici-repentis Pt-1C-BFP] gi|187976260|gb|EDU42886.1| conserved [Pyrenophora tritici-repentis Pt-1C-BFP]
  misc_feature (1)..(253): NCBI GI: 145246226 Blast Desc: An12g02830 [Aspergillus niger] gi|134080076|emb|CAK41122.1| protein product [Aspergillus niger]
  misc_feature (33)..(264): NCBI GI: 238501122 Blast Desc: conserved [Aspergillus flavus NRRL3357] gi|220692032|gb|EED48379.1| conserved [Aspergillus flavus NRRL3357]
  misc_feature (22)..(255): NCBI GI: 255950838 Blast Desc: Pc22g22920 [Penicillium chrysogenum Wisconsin 54-1255] gi|211593203|emb|CAP99580.1| Pc22g22920 [Penicillium chrysogenum Wisconsin 54-1255]
  misc_feature (13)..(266): NCBI GI: 238483841 Blast Desc: conserved [Aspergillus flavus NRRL3357] gi|220701209|gb|EED57547.1| conserved [Aspergillus flavus NRRL3357]
  misc_feature (24)..(248): NCBI GI: 169596538 Blast Desc: SNOG_01034 [Phaeosphaeria nodorum SN15] gi|111071409|gb|EAT92529.1| SNOG_01034 [Phaeosphaeria nodorum SN15]
MAESEKALQEIATAAKQNAGSYLTEIPPELEPARRLLEHYSGIAPAEIDTHIRRIRDKAWAVFPYGGIGSFKFLDMTATIGDPMVHTVTNRLKVPGNTERLLDVGCCLGHVVRQLAVAGIPSEHLYGIDLQPRFLDFGYDLFCDREKTKATYISGDMMQEDSNLDVLRDEIDIIYASAFFHLFERPGQIMAAKRMVEFLNPKNPNVLIFGQNGGPKIDGWEKYVLDGNAWKCMWDEVGKMTGTAWETTMSSEEDDKRIMTRFTVQRAM

SEQ ID NO: 30853 - DNA, 561 bp, Muscodor strobelii
  misc_feature: SGI cDNA ID NO. 570616
  misc_feature: Encodes the peptide sequence at SEQ ID NO 30854
atgcactcaaaattgatcgtcaccgctgggctactcctgctcgtcaattccgtctgtgccgcaccgtcggaaaacatcctgagtcaacctgatggggtgtacgtggtagagcataatgaagacagcacacacaccatcattgactttgtcgcttcggcagatatcgctgggcccgagctctcagctcttgcaatcgagcgttcagtcttggacccaagaggggttaccgtagcttgcgaaggcgtttttctcgatcgaaaaaacctcgttgatgcctggaccaacttgatgaacttcttaggaagcgggaagagcattaagaaggatgtcgctgcttacgccaaggtgggatccgttgtagcttatgcgtgcagttatactaccacgaataccatctccgcggctactatccagagtgcattgaccgcagtgagttcgtcttgcggtgatctgtcgaatggatacttgcactgcgtgggtgcttgcggagtcgcagatagtaccattggtagggatgtcaatggtgcggctttctgttggccggggttcaatccgtcttaa

SEQ ID NO: 30854 - protein, 186 aa, Muscodor strobelii
  misc_feature: SGI Peptide ID NO. 570616
MHSKLIVTAGLLLLVNSVCAAPSENILSQPDGVYVVEHNEDSTHTIIDFVASADIAGPELSALAIERSVLDPRGVTVACEGVFLDRKNLVDAWTNLMNFLGSGKSIKKDVAAYAKVGSVVAYACSYTTTNTISAATIQSALTAVSSSCGDLSNGYLHCVGACGVADSTIGRDVNGAAFCWPGFNPS

SEQ ID NO: 30855 - DNA, 909 bp, Muscodor strobelii
  misc_feature: SGI cDNA ID NO. 570617
  misc_feature: Encodes the peptide sequence at SEQ ID NO 30856
atgcataccatatctcctcttctgcttgcattcgtcgcctcggtcgctggacaagcatgggaatgtaatcacctccaagcacccaacgaggaggattgcgagtcgcttaacaacgatatcggtatcacggaaaacgcagtgccacctctctgccatgatcactcctctgattgcacaatctggttcaaaggtaactgtcaagtcggcctctgtctcgcgagcatcgattgtctcactggcggcgagatgtacaccgactatcagattatcaaggcggattgcatcgacgccttggattctggcggtaagatctatgtctataatcaagacaacggggccaactaccacgagtggatcaacaactctaacgaggagaaattacgccgtcgcggcattgctacggaacgagtgggcaatgtgacgaaagccagcatgtctcgcgcagagtatgaggccatgaagagagactttcaggaacctagtcctcgctctatgcgtcttggtcgacgggatgacacagatttcacccttatccaaaaagcgacccaagtcatcaacccagacaagaaatatcaggtctcagcaaatctccctgcaggtagcacctacacaatccagaaatctgagtcgtacaccgaaggcgtcacagtatcagcagaagtctcggctggtttcttggacatcatcggcgccagtctgtccatctctaccacccaggagtggtcctactctacgaccgtaggttttgaagtcccgattgattgtgaagatgaccagtccggcgttgtgtattactatccttcttttaacaagtatgatggtactgcggagcccagcgggactttccttacaatttggcagtctattgatgggaacttgggcgaatatcaggtcacttgcctcggctga

SEQ ID NO: 30856 - protein, 302 aa, Muscodor strobelii
  misc_feature: SGI Peptide ID NO. 570617
  misc_feature (21)..(302): NCBI GI: 256725332 Blast Desc: NECHADRAFT_83103 [Nectria haematococca mpVI 77-13-4]
  misc_feature (22)..(302): NCBI GI: 46109792 Blast Desc: FG01778.1 [Gibberella zeae PH-1]
  misc_feature (21)..(302): NCBI GI: 261354003 Blast Desc: [Verticillium albo-atrum VaMs.102]
MHTISPLLLAFVASVAGQAWECNHLQAPNEEDCESLNNDIGITENAVPPLCHDHSSDCTIWFKGNCQVGLCLASIDCLTGGEMYTDYQIIKADCIDALDSGGKIYVYNQDNGANYHEWINNSNEEKLRRRGIATERVGNVTKASMSRAEYEAMKRDFQEPSPRSMRLGRRDDTDFTLIQKATQVINPDKKYQVSANLPAGSTYTIQKSESYTEGVTVSAEVSAGFLDIIGASLSISTTQEWSYSTTVGFEVPIDCEDDQSGVVYYYPSFNKYDGTAEPSGTFLTIWQSIDGNLGEYQVTCLG

SEQ ID NO: 30857 - DNA, 2004 bp, Muscodor strobelii
  misc_feature: SGI cDNA ID NO. 570618
  misc_feature: Encodes the peptide sequence at SEQ ID NO 30858
atggaggatcagggcataaagtccctttgctcactttgcaagcaatttacaaccgatcttcagtcctttaatttcacgaaacgggacgattatcctgccggttgggtcaagaatgcgcgtagcaccacctctagttatgttataccatggcgcgacgcctttcagcaccacttgtcttactcggcccttgcagaatcagcactctcgtgtgccctatgcaatgtctttgtcgaggatctatccgacgttgaagatgtaacgtcggtcggggcactccaactcctaccgtttgcgagggcggggacaaaccacgcgttcggaacctttaccgccgctttcgaggaggatcgaacgagggccgttatctggggcccgcagccgcactccttccaattcggacaactgcatccgggtgatcaaggggcggaacgacaagcgcacgaggagccactgagggcgattcctgtaagcggatgggacgaagaagtatttacgaccgctcgagcctggatgaagaagtgtgtcgaggggcatgagaactgtcgcccgcaagtcggagctcgcggaggctttctaccccctcggctcattgacgtgggtcaggatgacagcaacggagcgcgtcttgtgattacatctcagctgccacactcccagcagaatggctcaacatcatatgcagcacttagccactgctggggaggcgacattccgtttcgactcacaacgcagacgctcccagaaaaatgcgagatcatgctgttggaacacatgccaaacaacttccgtgacgctatatatatcacccggaagctcggcattcgctacctctggatcgacgcgctctgcatcatacaggattctaccacggactgggcgagcgaggccggccacatgctgtcatgctacgcaggctcgtccttgaccatctcagctttggactctccatctagcgagtctggtattattcccgctcgccgaggtgcccgcgccgttcttcccggcggttccttcgctattcagaagatccctgacatattctcggacgtcatggcacaatgtcagctcagccaccgcggatggtgtctgcaagagcgtctcatggccccgcggattctacatattgcaaactcgcagatatattgggagtgtcaccgcggatttgagcaggagaatgctccgtacgattcaaagactcaagtcgatgggttcacctcggtgaggcagcgatacgctacaggtatgggtaatggcgaggtctggcccaattggtatctcatcgtagaggagttcacatctcgcgagctcacatacgcaagcgacacgttcccggccctggccggtgttgcggagctattccgcagatcgtcgtcggaaccccgtacctacgccgctgggctttgggtcgaggatattcgcgagggtctactttggggtgcaagaaaggtagtcgaaagaatgcgcaaggcaccggggttcagtcaatgtgctgtgcttgaacgtcgtgaggaacctagggcgccgtcctggagctgggcttctgtcgctggacccgttcaatttgactacaagtctcgtggtacagaaacctgtgacattctcggtgtgacattgaccaatggtatgaatgaccccatggctaatggagcgctcgagggcgtgatccacattcgcggactcgttgccaagatgcgttacttacccccggattatacaagttctaacgtggggaaacttgcttttgatgacattgacgccaagccgattttcttctcttgtgtcatggatttcgatcgtatggcacctcgtagctgctttgcgctgttggttcgctggtcggtcgcggagggcaacatcacagctacctccttgctaatcttagaccggttgccaggcaaaagggcacaattccgtcgtattggtatatgtcagtcgtcggatgccgggagggacatggtggagaggataaagagattctctgagatggagatctatattatgtga

SEQ ID NO: 30858 - protein, 667 aa, Muscodor strobelii
  misc_feature: SGI Peptide ID NO. 570618
  misc_feature (226)..(365): Pfam Id: PF06985 Pfam Desc: Heterokaryon incompatibility protein (HET)
  misc_feature (226)..(323): Pfam Id: PF06985 Pfam Desc: Heterokaryon incompatibility protein (HET)
  misc_feature (167)..(583): NCBI GI: 256724255 Blast Desc: NECHADRAFT_87557 [Nectria haematococca mpVI 77-13-4]
  misc_feature (147)..(521): NCBI GI: 238502093 Blast Desc: conserved [Aspergillus flavus NRRL3357] gi|220691090|gb|EED47438.1| conserved [Aspergillus flavus NRRL3357]
  misc_feature (166)..(642): NCBI GI: 46138087 Blast Desc: FG10558.1 [Gibberella zeae PH-1]
  misc_feature (63)..(524): NCBI GI: 256721585 Blast Desc: NECHADRAFT_78531 [Nectria haematococca mpVI 77-13-4]
  misc_feature (6)..(522): NCBI GI: 171677566 Blast Desc: protein product [Podospora anserina] gi|170936851|emb|CAP61509.1| protein product [Podospora anserina]
  misc_feature (161)..(523): NCBI GI: 169613657 Blast Desc: SNOG_09961 [Phaeosphaeria nodorum SN15] gi|111061176|gb|EAT82296.1| SNOG_09961 [Phaeosphaeria nodorum SN15]
  misc_feature (46)..(662): NCBI GI: 46126545 Blast Desc: FG07650.1 [Gibberella zeae PH-1]
  misc_feature (139)..(581): NCBI GI: 46136391 Blast Desc: FG09711.1 [Gibberella zeae PH-1]
  misc_feature (127)..(534): NCBI GI: 171680135 Blast Desc: protein product [Podospora anserina] gi|170939694|emb|CAP64920.1| protein product [Podospora anserina]
  misc_feature (164)..(525): NCBI GI: 154304664 Blast Desc: BC1G_08071 [Botryotinia fuckeliana B05.10] gi|150853971|gb|EDN29163.1| BC1G_08071 [Botryotinia fuckeliana B05.10]
MEDQGIKSLCSLCKQFTTDLQSFNFTKRDDYPAGWVKNARSTTSSYVIPWRDAFQHHLSYSALAESALSCALCNVFVEDLSDVEDVTSVGALQLLPFARAGTNHAFGTFTAAFEEDRTRAVIWGPQPHSFQFGQLHPGDQGAERQAHEEPLRAIPVSGWDEEVFTTARAWMKKCVEGHENCRPQVGARGGFLPPRLIDVGQDDSNGARLVITSQLPHSQQNGSTSYAALSHCWGGDIPFRLTTQTLPEKCEIMLLEHMPNNFRDAIYITRKLGIRYLWIDALCIIQDSTTDWASEAGHMLSCYAGSSLTISALDSPSSESGIIPARRGARAVLPGGSFAIQKIPDIFSDVMAQCQLSHRGWCLQERLMAPRILHIANSQIYWECHRGFEQENAPYDSKTQVDGFTSVRQRYATGMGNGEVWPNWYLIVEEFTSRELTYASDTFPALAGVAELFRRSSSEPRTYAAGLWVEDIREGLLWGARKVVERMRKAPGFSQCAVLERREEPRAPSWSWASVAGPVQFDYKSRGTETCDILGVTLTNGMNDPMANGALEGVIHIRGLVAKMRYLPPDYTSSNVGKLAFDDIDAKPIFFSCVMDFDRMAPRSCFALLVRWSVAEGNITATSLLILDRLPGKRAQFRRIGICQSSDAGRDMVERIKRFSEMEIYIM

SEQ ID NO: 30859 - DNA, 2322 bp, Muscodor strobelii
  misc_feature: SGI EST ID NO. CUFF.73093.0
  misc_feature: Variant of the nucleotide sequence at SEQ ID NO 30857
caacagatgccgtttgacatgttatgaacgatattaactctaccactcaattgagcttcttccgtcgttctctgcgtcggatacatagatggtagtgggtttctcataaacttccgccgcaattagttaacgtgggacgacgcccttacgggctgtctccactttccgccagaagctctaaccttagtactctaccgaccggcgtaaccatattgcccacgtgcttaccatggaggatcagggcataaagtccctttgctcactttgcaagcaatttacaaccgatcttcagtcctttaatttcacgaaacgggacgattatcctgccggttgggtcaagaatgcgcgtagcaccacctctagttatgttataccatggcgcgacgcctttcagcaccacttgtcttactcggcccttgcagaatcagcactctcgtgtgccctatgcaatgtctttgtcgaggatctatccgacgttgaagatgtaacgtcggtcggggcactccaactcctaccgtttgcgagggcggggacaaaccacgcgttcggaacctttaccgccgctttcgaggaggatcgaacgagggccgttatctggggcccgcagccgcactccttccaattcggacaactgcatccgggtgatcaaggggcggaacgacaagcgcacgaggagccactgagggcgattcctgtaagcggatgggacgaagaagtatttacgaccgctcgagcctggatgaagaagtgtgtcgaggggcatgagaactgtcgcccgcaagtcggagctcgcggaggctttctaccccctcggctcattgacgtgggtcaggatgacagcaacggagcgcgtcttgtgattacatctcagctgccacactcccagcagaatggctcaacatcatatgcagcacttagccactgctggggaggcgacattccgtttcgactcacaacgcagacgctcccagaaaaatgcgagatcatgctgttggaacacatgccaaacaacttccgtgacgctatatatatcacccggaagctcggcattcgctacctctggatcgacgcgctctgcatcatacaggattctaccacggactgggcgagcgaggccggccacatgctgtcatgctacgcaggctcgtccttgaccatctcagctttggactctccatctagcgagtctggtattattcccgctcgccgaggtgcccgcgccgttcttcccggcggttccttcgctattcagaagatccctgacatattctcggacgtcatggcacaatgtcagctcagccaccgcggatggtgtctgcaagagcgtctcatggccccgcggattctacatattgcaaactcgcagatatattgggagtgtcaccgcggatttgagcaggagaatgctccgtacgattcaaagactcaagtcgatgggttcacctcggtgaggcagcgatacgctacaggtatgggtaatggcgaggtctggcccaattggtatctcatcgtagaggagttcacatctcgcgagctcacatacgcaagcgacacgttcccggccctggccggtgttgcggagctattccgcagatcgtcgtcggaaccccgtacctacgccgctgggctttgggtcgaggatattcgcgagggtctactttggggtgcaagaaaggtagtcgaaagaatgcgcaaggcaccggggttcagtcaatgtgctgtgcttgaacgtcgtgaggaacctagggcgccgtcctggagctgggcttctgtcgctggacccgttcaatttgactacaagtctcgtggtacagaaacctgtgacattctcggtgtgacattgaccaatggtatgaatgaccccatggctaatggagcgctcgagggcgtgatccacattcgcggactcgttgccaagatgcgttacttacccccggattatacaagttctaacgtggggaaacttgcttttgatgacattgacgccaagccgattttcttctcttgtgtcatggatttcgatcgtatggcacctcgtagctgctttgcgctgttggttcgctggtcggtcgcggagggcaacatcacagctacctccttgctaatcttagaccggttgccaggcaaaagggcacaattccgtcgtattggtatatgtcagtcgtcggatgccgggagggacatggtggagaggataaagagattctctgagatggagatctatattatgtgaatttatggtctggatttgtgcgtaagggtgaattttgataattacgccacttttaattcagcagctatcaaattgttccgattggcaac

SEQ ID NO: 30860 - DNA, 774 bp, Muscodor strobelii
  misc_feature: SGI cDNA ID NO. 570619
  misc_feature: Elevated expression when VOC is produced
  misc_feature: Encodes the peptide sequence at SEQ ID NO 30861
atgggcaagccggtttttgttctcctccacggtgcttggcatagccccaagtgctggagtcgtctcatcgcggagcttgaaaccacgggccacacggccgtcgccccgtcacttccctcatgcggttccgttccacccactccagattgggcaggcgatatccaagtcattcaaaaaaccgtcacggagctagccacagagcatgatgtggttgtagttactcacagcttcagtggcatgacagccggaacggcactagatggccttgataaagagagctgcgtcgcgaaaggattgaaaggcggcgtcgtcaggctggtttacatctgtgctttcattgtaccagaaggatttcagcacacacctcgtggtacgcgacttaacatgagacccgagatgaaaaccgatctagcgaagggaacagtcacggtgttgcctgaagatgcaaaagagttcttctatcaggacttcaccgatgaagctgttgctgatcttgctcaagacttgcgaccacaaagcttagggtcattttggtgcacgacagcgcatgctgcctggcgtgtcatcccgacaacctacatgttgaccctcaaagacagtccttcaaccgtggttgcagctagatatcttgtggaaacggccaaggcaagcggtagtcacaagatcgacaatattatcgaagttgattctggtcactccccttttatcaacatgcctggatggctagctacaactttgatcaaggaggctagtcgaacaaggatgacaatgtaa

SEQ ID NO: 30861 - protein, 257 aa, Muscodor strobelii
  misc_feature: SGI Peptide ID NO. 570619
  misc_feature (1)..(253): NCBI GI: 171691042 Blast Desc: protein product [Podospora anserina] gi|170945469|emb|CAP71581.1| protein product [Podospora anserina]
  misc_feature (1)..(246): NCBI GI: 169616230 Blast Desc: SNOG_11286 [Phaeosphaeria nodorum SN15] gi|111059874|gb|EAT80994.1| SNOG_11286 [Phaeosphaeria nodorum SN15]
  misc_feature (1)..(231): NCBI GI: 154311391 Blast Desc: BC1G_06548 [Botryotinia fuckeliana B05.10] gi|150850945|gb|EDN26138.1| BC1G_06548 [Botryotinia fuckeliana B05.10]
  misc_feature (1)..(250): NCBI GI: 156042460 Blast Desc: SS1G_11027 [Sclerotinia sclerotiorum 1980] gi|154695414|gb|EDN95152.1| SS1G_11027 [Sclerotinia sclerotiorum 1980]
  misc_feature (7)..(253): NCBI GI: 145251583 Blast Desc: An15g07840 [Aspergillus niger] gi|134082840|emb|CAK42671.1| protein product [Aspergillus niger]
  misc_feature (1)..(225): NCBI GI: 156065213 Blast Desc: SS1G_00617 [Sclerotinia sclerotiorum 1980] gi|154691476|gb|EDN91214.1| SS1G_00617 [Sclerotinia sclerotiorum 1980]
  misc_feature (7)..(252): NCBI GI: 145240765 Blast Desc: An08g09180 [Aspergillus niger] gi|134077553|emb|CAK96697.1| protein product [Aspergillus niger]
  misc_feature (3)..(253): NCBI GI: 154319608 Blast Desc: BC1G_02285 [Botryotinia fuckeliana B05.10] gi|150855943|gb|EDN31135.1| BC1G_02285 [Botryotinia fuckeliana B05.10]
  misc_feature (3)..(256): NCBI GI: 240107276 Blast Desc: CPC735_065610 [Coccidioides posadasii C735 delta SOWgp]
  misc_feature (3)..(253): NCBI GI: 238490416 Blast Desc: conserved [Aspergillus flavus NRRL3357] gi|220696858|gb|EED53199.1| conserved [Aspergillus flavus NRRL3357]
  misc_feature: Useful for introducing or modulating the production of volatile compounds
MGKPVFVLLHGAWHSPKCWSRLIAELETTGHTAVAPSLPSCGSVPPTPDWAGDIQVIQKTVTELATEHDVVVVTHSFSGMTAGTALDGLDKESCVAKGLKGGVVRLVYICAFIVPEGFQHTPRGTRLNMRPEMKTDLAKGTVTVLPEDAKEFFYQDFTDEAVADLAQDLRPQSLGSFWCTTAHAAWRVIPTTYMLTLKDSPSTVVAARYLVETAKASGSHKIDNIIEVDSGHSPFINMPGWLATTLIKEASRTRMTM

SEQ ID NO: 30862 - DNA, 1187 bp, Muscodor strobelii
  misc_feature: SGI EST ID NO. CUFF.73127.0
  misc_feature: Variant of the nucleotide sequence at SEQ ID NO 30860
tttagcatgacatgtatcacacgtcgctccctcttctcctactttctttgactgccatcaacgcgcgagatttattcgtttcggaaaatgggcaagccggtttttgttctcctccacggtgcttggcatagccccaagtgctggagtcgtctcatcgcggagcttgaaaccacgggccacacggccgtcgccccgtcacttccctcatgcggttccgttccacccactccagattgggcaggcgatatccaagtcattcaaaaaaccgtcacggagctagccacagagcatgatgtggttgtagttactcacagcttcagtggcatgacagccggaacggcactagatggccttgataaagagagctgcgtcgcgaaaggattgaaaggcggcgtcgtcaggctggtttacatctgtgctttcattgtaccagaaggatttcagcacacacctcgtggtacgcgacttaacatgagacccgagatgaaaaccgatctagcgaagggaacagtcacggtgttgcctgaagatgcaaaagagttcttctatcaggacttcaccgatgaagctgttgctgatcttgctcaagacttgcgaccacaaagcttagggtcattttggtgcacgacagcgcatgctgcctggcgtgtcatcccgacaacctacatgttgaccctcaaagacagtccttcaaccgtggttgcagctagatatcttgtggaaacggccaaggcaagcggtagtcacaagatcgacaatattatcgaagttgattctggtcactccccttttatcaacatgcctggatggctagctacaactttgatcaaggaggctagtcgaacaaggatgacaatgtaaaattttgattgtagagagatctcgtagactatgaagacgagagactgttagtgtggaagcttacgaaatagtatagacgctcatgcgaaaggagttacaatgagttaactttcgaacgagctgtcgaatgatctaccgagcaaccccaggacatattcctattcaacgtcttgtattatgttctaaaagctaggccgtattattctaaagtggtgtcccaatcattgggcatctccgggataaaagagccatagtattcctacatccccgtcttccattgctcaggaaagcaataataagcgctttaaggctgagcgaatgccgcc

SEQ ID NO: 30863 - DNA, 876 bp, Muscodor strobelii
  misc_feature: SGI cDNA ID NO. 570620
  misc_feature: Encodes the peptide sequence at SEQ ID NO 30864
atggctactcaatcaagcatccagggaactctccgtattctcgaaaaaggaagagaaatgttcgcaaatgaggccaagcatggcgatgacaacacgttgtgggataccatgggagcctgcatccgcggtcttacgcgtcggcttatgaagccagatgccggtgacaggccaacggatgtcacgatagcagagcttcacaatatatggtatatcttcactctggcggcgtccaacattgatgcagatcattgtggacaagatcgtctcgtcagaatcgtgctatgggcaagagagttgggtacgatgggtgatcctaagggagaggcagtgatcaatgttgccgttacgcctggaggcaaagtgtggtctgatctaccttttctccacgaagatattcgggacgcttggatcaaagtcacctcttcaaatgatccttcggctccagtggaagctagaaacctcgccgccgctatcgctcgtctcgatggacttagtgtctgcgatggcaagcttactggatgtgggttggatattatgagacgtgccctggaagaagagccgtcggggcagtttacccatgctcagctacttgcagtggctgaagtatggcttcgatatgcaggagacaagcttctagctgtcgcccgcaacggcgccaccgtcaccaccacgtggagtgcagcaggtgcttcaacgtcgcagtacagaagcctaagccggaaagcagtcttggcttggatggaacgcctttctgagctcaaagaaagcgagtctcaagaactcaaagtcgtcgctgagcgctgttttaacatactggattggtgctgtgtgactcgatggggaaaaggaattgagccatgggccagcgacgagtaa

SEQ ID NO: 30864 - protein, 291 aa, Muscodor strobelii
  misc_feature: SGI Peptide ID NO. 570620
  misc_feature (27)..(266): NCBI GI: 238505072 Blast Desc: conserved [Aspergillus flavus NRRL3357] gi|220689879|gb|EED46229.1| conserved [Aspergillus flavus NRRL3357]
  misc_feature (65)..(273): NCBI GI: 255938961 Blast Desc: Pc15g00220 [Penicillium chrysogenum Wisconsin 54-1255] gi|211584872|emb|CAP82908.1| Pc15g00220 [Penicillium chrysogenum Wisconsin 54-1255]
  misc_feature (65)..(273): NCBI GI: 70985536 Blast Desc: conserved [Aspergillus fumigatus Af293] gi|66845902|gb|EAL86236.1| conserved [Aspergillus fumigatus Af293]
  misc_feature (65)..(273): NCBI GI: 159125795 Blast Desc: conserved [Aspergillus fumigatus A1163]
  misc_feature (9)..(270): NCBI GI: 238845128 Blast Desc: conserved [Microsporum canis CBS 113480]
  misc_feature (65)..(270): NCBI GI: 238839214 Blast Desc: conserved [Microsporum canis CBS 113480]
  misc_feature (1)..(270): NCBI GI: 169784492 Blast Desc: [Aspergillus oryzae RIB40] gi|83775454|dbj|BAE65574.1| protein product [Aspergillus oryzae]
  misc_feature (59)..(273): NCBI GI: 189191080 Blast Desc: conserved [Pyrenophora tritici-repentis Pt-1C-BFP] gi|187973485|gb|EDU40984.1| conserved [Pyrenophora tritici-repentis Pt-1C-BFP]
  misc_feature (52)..(215): NCBI GI: 238844347 Blast Desc: conserved [Microsporum canis CBS 113480]
  misc_feature (65)..(186): NCBI GI: 169594734 Blast Desc: SNOG_00096 [Phaeosphaeria nodorum SN15] gi|111070471|gb|EAT91591.1| SNOG_00096 [Phaeosphaeria nodorum SN15]
MATQSSIQGTLRILEKGREMFANEAKHGDDNTLWDTMGACIRGLTRRLMKPDAGDRPTDVTIAELHNIWYIFTLAASNIDADHCGQDRLVRIVLWARELGTMGDPKGEAVINVAVTPGGKVWSDLPFLHEDIRDAWIKVTSSNDPSAPVEARNLAAAIARLDGLSVCDGKLTGCGLDIMRRALEEEPSGQFTHAQLLAVAEVWLRYAGDKLLAVARNGATVTTTWSAAGASTSQYRSLSRKAVLAWMERLSELKESESQELKVVAERCFNILDWCCVTRWGKGIEPWASDE

SEQ ID NO: 30865 - DNA, 201 bp, Muscodor strobelii
  misc_feature: SGI cDNA ID NO. 570621
  misc_feature: Encodes the peptide sequence at SEQ ID NO 30866
atgaaattcactctatccttcctcgccatccttagcctttcaggatgggctgctgcacaagcaggaccttgctataaccacgctgatcctgaccacaacattggaaactattgtgaatgcgagggagatgggctttgttatttcgacagtccagacacaggctgcgaccctcctgagtctggatcaatcccatgtccttaa

SEQ ID NO: 30866 - protein, 66 aa, Muscodor strobelii
  misc_feature: SGI Peptide ID NO. 570621
MKFTLSFLAILSLSGWAAAQAGPCYNHADPDHNIGNYCECEGDGLCYFDSPDTGCDPPESGSIPCP

SEQ ID NO: 30867 - DNA, 2155 bp, Muscodor strobelii
  misc_feature: SGI EST ID NO. CUFF.73113.0
  misc_feature: Variant of the nucleotide sequence at SEQ ID NO 30865
cttcattcgattgaagttgcatgaacgtctatttcggagattctgttcctcgcgcctttttcctttcactggtgcactgtcgatcgacttagtcacgttgattgtaagtggacacacataatgactaacaagtgagattgatcctagaaggcttatgaaggattcttctttcgtcacgattgagcaatgatgttaattgatatggtaatgaagactgcattcgaacgaggctcaagctaacttagagtgccggaaggcttgcctatttgatcaacgatcgccgattgtgttcagctgcgccggcatccgatggtaggattcgcgagaataggcagaggagccagaccggctcggtagagcgggaacgagccacacagtcatcccggagtatgtgccgttggtatgcgtcgcactcatctcgtaagccggatggggcggggtgtagcatgatattacgccttcgacgcaacgcattagaacatcggaccaaactctcctgaataataacatcatttgaccatttgaacctttccttgcagaaccatggctgatgtaggactgtaattgttgagtggaatagtgcatttccttcctcatatggacgtcgtggctggacatggagcgacgtcaagaactgatgattcgtcgagttcgaaaaggagctgaccgaaaccgccgatcttggggtgtcgagttgcggaggactctgatgactcttgcttttgagcgcggaagaaccgatgacaattctgaagtatgctttcggtgtcatctcgattacgaatgttgttgagggattcatggaggttgtcaatggatgtgatggtatgtcattggagtctcaaaccaacattagcatcagtgtatataaggcgcatgaaaatccaaatttctagtctttgatacaatacaactcaccaacatcctcgtctacacttctgcatcgttaccatcatgaaattcactctatccttcctcgccatccttagcctttcaggatgggctgctgcacaagcaggaccttgctataaccacgctgatcctgaccacaacattggaaactattgtgaatgcgagggagatggtaagtgctcagatgcgtccgtaagtaacttgcaaattgctgacctctcgtccagggctttgttatttcgacagtccagacacaggctgcgaccctcctgagtctggatcaatcccatgtccttaaagccaatgcaagtgaaagaaggacgatttcaacataagtaggacacaatgttgtcacaaacaggagtgggaagcgagtatctcacaagcaatcagtgctgagaagacagaagtagctatcttagttcacggtggaacctacactccgtaacttcaatacaattgcgtcaacccattctgaatggcgagtgttttactcgtcgctggcccatggctcaattccttttccccatcgagtcacacagcaccaatccagtatgttaaaacagcgctcagcgacgactttgagttcttgagactcgctttctttgagctcagaaaggcgttccatccaagccaagactgctttccggcttaggcttctgtactgcgacgttgaagcacctgctgcactccacgtggtggtgacggtggcgccgttgcgggcgacagctagaagcttgtctcctgcatatcgaagccatacttcagccactgcaagtagctgagcatgggtaaactgccccgacggctcttcttccagggcacgtctcataatatccaacccacatccagtaagcttgccatcgcagacactaagtccatcgagacgagcgatagcggcggcgaggtttctagcttccactggagccgaaggatcatttgaagaggtgactttgatccaagcgtcccgaatatcttcgtggagaaaaggtagatcagaccacactttgcctccaggcgtaacggcaacattgatcactgcctctcccttaggatcacccatcgtacccaactctcttgcccatagcacgattctgacgagacgatcttgtccacaatgatctgcatcaatgttggacgccgccagagtgaagatataccatatattgtgaagctctgctatcgtgacatccgttggcctgtcaccggcatctggcttcataagccgacgcgtaagaccgcg

SEQ ID NO: 30868 - DNA, 384 bp, Muscodor strobelii
  misc_feature: SGI cDNA ID NO. 570622
  misc_feature: Encodes the peptide sequence at SEQ ID NO 30869
atggtcgtcagtcaatcaatcctcgccctgacagtagggatttggacttcctactgtatggctactcctgttgcggaggccgactttactgttcgaggcgtcgactcgtttagtggcgtttcctacaccctttttggtggcaaagattgcgtcggtgacgaccagggtaacaccaacatcggcatcggtaaaagcttctgcctcaacgtcagtaacatggtgtcgtatcgtatcacggccgacctctgctcatcggccaaaatcgagtactatacgcagctcaattgcggcgagtatcgcggaagctccacactcgatgacggttgttacgccaagacagggccttacaatagcgtttgtgtcactccacaggactgtatgtaa

SEQ ID NO: 30869 - protein, 127 aa, Muscodor strobelii
  misc_feature: SGI Peptide ID NO. 570622
MVVSQSILALTVGIWTSYCMATPVAEADFTVRGVDSFSGVSYTLFGGKDCVGDDQGNTNIGIGKSFCLNVSNMVSYRITADLCSSAKIEYYTQLNCGEYRGSSTLDDGCYAKTGPYNSVCVTPQDCM

SEQ ID NO: 30870 - DNA, 1305 bp, Muscodor strobelii
  misc_feature: SGI cDNA ID NO. 570623
  misc_feature: Encodes the peptide sequence at SEQ ID NO 30871
atgggtcataagatgaagaagacgacggggaacggcccgaaacatggagtagctcaatggctatttgagaaccagacgagcttgtcattcagcatcgtcgctggtttattcacagcacatacttgtattccacaagcacagccattcacatccagatttattacgctttctggcttcaactcgaagactgggaaatatgctattggacataatgacttatatttcgtcctgttctgcatcgtgcttttcaccggcattcgtgcggggtcgatgagatacgttctcgcgcctttcgcccgacgatggggtatctcaaaggagaagacggtcactcgattttcggagcagggttggatgatactgtacaatgcattattctggacaacgggaatgtatatctacactcattcgccgcactacctgaatttgcaagagttgtggaccgattggccgcagagggagctggatggcctcatgaagggctacattctggcacagtgggcttactggacacaacagttgcttgttgtgaacatcgaggctcgccgacatgattacaaccagatgattgtgcatcacttcacgacgatagctctcattgggtcagcatacgcctatcaccacactcgagtcaccaacttgattatggtcctcatggatgtgatcgaattgatattccccgttgcgaaatgtctcaaatacctaggcttcacaacactgtgcgacgtcatcttcggtatctttatggtaacgtggctcttcacacgccacatcttctacatgatggccacctggagcgcatacaaagactcaccacggctcatgccaagtgcctgttggaagggcactcaggacactctcaaggggccattaccagtacctacaagtggatggtctcatctcttcgagcccttccgcgacccgaagggcatagtgtgcatgaacgacaacctccgtgtcggattcgtggtctatctcctcatcctacaatgcgtaatgattgtctggtctgcagctattgtgcgagtcgctgtcaaggtgctgaaaggagaaaatgcagacgacgttaggagcgatgacgactcggaggagatcgaggacgaactagatgtcgaagcggtcgaaagcgaaaaggcgcaattactagaggaagaagttggcgtcgaggcgattgatttcgaggtttggaaaaggcgtacaggagtcaaggctggaacatcgagaacgagcggcgtaagggtaccgggacacagcgatcggaaggagttactgaatagaattggatgcgaaaagcagatcgactaa

SEQ ID NO: 30871 - protein, 434 aa, Muscodor strobelii
  misc_feature: SGI Peptide ID NO. 570623
  misc_feature (131)..(365): Pfam Id: PF03798 Pfam Desc: Longevity-assurance protein (LAG1)
  misc_feature (49)..(109): Pfam Id: PF08390 Pfam Desc: TRAM1-like protein
  misc_feature (131)..(260): Pfam Id: PF03798 Pfam Desc: Longevity-assurance protein (LAG1)
  misc_feature (322)..(365): Pfam Id: PF03798 Pfam Desc: Longevity-assurance protein (LAG1)
  misc_feature (4)..(434): NCBI GI: 46135815 Blast Desc: FG09423.1 [Gibberella zeae PH-1]
  misc_feature (4)..(434): NCBI GI: 256727071 Blast Desc: NECHADRAFT_32956 [Nectria haematococca mpVI 77-13-4]
  misc_feature (7)..(434): NCBI GI: 116193995 Blast Desc: CHGG_06715 [Chaetomium globosum CBS 148.51] gi|88182628|gb|EAQ90096.1| CHGG_06715 [Chaetomium globosum CBS 148.51]
  misc_feature (7)..(434): NCBI GI: 85116500 Blast Desc: NCU02468 [Neurospora crassa OR74A] gi|28926864|gb|EAA35826.1| conserved [Neurospora crassa OR74A] gi|38567119|emb|CAE76415.1| related to protein LAC1 [Neurospora
  misc_feature (4)..(434): NCBI GI: 171683189 Blast Desc: protein product [Podospora anserina] gi|170941554|emb|CAP67206.1| protein product [Podospora anserina]
  misc_feature (1)..(433): NCBI GI: 154303168 Blast Desc: BC1G_09604 [Botryotinia fuckeliana B05.10] gi|150855067|gb|EDN30259.1| BC1G_09604 [Botryotinia fuckeliana B05.10]
  misc_feature (16)..(434): NCBI GI: 39971247 Blast Desc: MGG_03090 [Magnaporthe grisea 70-15] gi|149210841|ref|XP_001522795.1| MGCH7_ch7g893 [Magnaporthe grisea 70-15] gi|86196848|gb|EAQ71486.1| MGCH7_ch7g893 grisea
  misc_feature (1)..(433): NCBI GI: 156058610 Blast Desc: SS1G_03317 [Sclerotinia sclerotiorum 1980] gi|154701104|gb|EDO00843.1| SS1G_03317 [Sclerotinia sclerotiorum 1980]
  misc_feature (28)..(416): NCBI GI: 145259463 Blast Desc: An04g10300 [Aspergillus niger] gi|134075009|emb|CAK44810.1| protein product [Aspergillus niger]
  misc_feature (30)..(432): NCBI GI: 25294142 Blast Desc: Fum18p [Gibberella moniliformis]
  misc_feature (25)..(350): SWISSPROT Homolog: EC 2.3.1.24 Sphingosine N-acyltransferase
MGHKMKKTTGNGPKHGVAQWLFENQTSLSFSIVAGLFTAHTCIPQAQPFTSRFITLSGFNSKTGKYAIGHNDLYFVLFCIVLFTGIRAGSMRYVLAPFARRWGISKEKTVTRFSEQGWMILYNALFWTTGMYIYTHSPHYLNLQELWTDWPQRELDGLMKGYILAQWAYWTQQLLVVNIEARRHDYNQMIVHHFTTIALIGSAYAYHHTRVTNLIMVLMDVIELIFPVAKCLKYLGFTTLCDVIFGIFMVTWLFTRHIFYMMATWSAYKDSPRLMPSACWKGTQDTLKGPLPVPTSGWSHLFEPFRDPKGIVCMNDNLRVGFVVYLLILQCVMIVWSAAIVRVAVKVLKGENADDVRSDDDSEEIEDELDVEAVESEKAQLLEEEVGVEAIDFEVWKRRTGVKAGTSRTSGVRVPGHSDRKELLNRIGCEKQID

SEQ ID NO: 30872 - DNA, 3273 bp, Muscodor strobelii
  misc_feature: SGI EST ID NO. CUFF.73137.0
  misc_feature: Variant of the nucleotide sequence at SEQ ID NO 30870
ctttgacatatcgcacgaatgcatatattgatcgattataccactagttcggcaagccaaagaaagtcatcattatgtactgtcttcgcgacatctgcgccaagcgatatcttggcagcaacgagagagaggagggagagaatttccccgacttcagtcaccgctggtggcagtaccgaaaggagatcttggacattcgccgacattactgcgccactgtccagtcggtatgtgggaaagctccttcgacacggttttgcagctctttattgacctctgagtagatcctcatgaacggaaacttcgacgaatgccttgatgagatgatccgttaccgtcctcgttaccgaggagagccaaccgcttgaggcgtggactatcacagctgcacaagcacttagacctctgcacgtactgaagtaagaatacccgagaaaacagaaaggagtgaatggtgagaagggatggcgaatgtgttcacgtcgggctattgactgcagctgctgaggatagactagcccgttcttttgcagctgtgacagtcacaggtcgcaaaatgcatgagtgtacttatgaatcacaatttgcgttcatttgatctccctttctgtgtgtcaggctcttcagaaacgtgatgacatctgtgcggtgagcctgtagggtcccttttcgatattttatatgatcgtggagtaagatatcatcgaacgaataagcagggcataagacaaacttgatttattattgcatcatgagacgtgaaacagcgaatgaagaaataacaaaaattcccgataactgttcgaatagttagtcgcaccgagttttacttaattgttagactgcatgtttgcttcgttcaacgatagcaaaggtcaacaccaaggcttgtgcgaagggttatactgctgattccggtggtttatgaatgtagagaatccgaaaggctgatcttactgactcgtttctgatccgcgtcgccattgactggcgcgattctggagagccgcggcttggattcgttcgtttattctgtatcaatcttgtgcctgttcacccttttcacctatatcgcgagcctcgagtgatactctattaccctgtcttcaatacggctgattatcgtgcctctagaacgtcgtcaattggcctgcgccaaaatatatccctgtaaccttacttcggtgttttcttaccttttcttttgtggtcctgcataccggtcaagctcttcattcgggctgcagcactcgagcggtttcgagatgccgcagctcctcggaatggtgacgttgaacgtgcatttcatcgtttcgaagggggttcggtcatcaaaggaatgagtcgcgacgggccgatactcgattccattattcaataatcgatcaaccctgaagagggggcaatgtcgtttaaaatcacgatccccgcatgaatctctcaatcgcaaatcaccttcgatccattcgtcgccgaacgtcccatttgcgacaaacatctagttgatcagccgcaaatggggtggacaacatttggcgtcccctacaagtccctagaaatagggagtcaaccccacccggatgaactaaccctgcagattccggtggtatgaaacacccatgcagaaaaagttcgagccaagtaccgtaccgaccacgaattgttgggaggtctcaaaaaggcggtgactggacacaatcgctcaagaaaactaaacctattcgctcgctcaacacctcctcgctggtcgtggagacaagactcaagaaagggatacaaaatgggtcataagatgaagaagacgacggggaacggcccgaaacatggagtagctcaatggctatttgagaaccagacgagcttgtcattcagcatcgtcgctggtttattcacagcacatacttgtattccacaagcacagccattcacatccagatttattacgctttctggcttcaactcgaagactgggaaatatgctattggacataatgacttatatttcgtcctgttctgcatcgtgcttttcaccggcattcgtgcggggtcgatgagatacgttctcgcgcctttcgcccgacgatggggtatctcaaaggagaagacggtcactcgattttcggagcagggttggatgatactgtacaatgcattattctggacaacgggaatgtatatctacactcattcgccgcactacctgaatttgcaagagttgtggaccgattggccgcagagggagctggatggcctcatgaagggctacattctggcacagtgggcttactggacacaacagttgcttgttgtgaacatcgaggctcgccgacatgattacaaccagatgattgtgcatcacttcacgacgatagctctcattgggtcagcatacgcctatcaccacactcgagtcaccaacttgattatggtcctcatggatgtgatcgaattgatattccccgttgcgaaatgtctcaaatacctaggcttcacaacactgtgcgacgtcatcttcggtatctttatggtaacgtggctcttcacacgccacatcttctacatgatggccacctggagcgcatacaaagactcaccacggctcatgccaagtgcctgttggaagggcactcaggacactctcaaggggccattaccagtacctacaagtggatggtctcatctcttcgagcccttccgcgacccgaagggcatagtgtgcatgaacgacaacctccgtgtcggattcgtggtctatctcctcatcctacaatgcgtaatgattgtctggtctgcagctattgtgcgagtcgctgtcaaggtgctgaaaggagaaaatgcagacgacgttaggagcgatgacgactcggaggagatcgaggacgaactagatgtcgaagcggtcgaaagcgaaaaggcgcaattactagaggaagaagttggcgtcgaggcgattgatttcgaggtttggaaaaggcgtacaggagtcaaggctggaacatcgagaacgagcggcgtaagggtaccgggacacagcgatcggaaggagttactgaatagaattggatgcgaaaagcagatcgactaaggggtatattggcagagcgatatttgggcccagtgcacaattacggtatggcatgcagcatctcagacacacagttagcttttagcgatttccgtcatagcatgtcatcaattatcaggagagaaatctgacatcatcttggcacagaatctttatcgtgaattaggactctaataactctggctctg

SEQ ID NO: 30873 - DNA, 639 bp, Muscodor strobelii
  misc_feature: SGI cDNA ID NO. 570624
  misc_feature: Encodes the peptide sequence at SEQ ID NO 30874
atggccacgacatcaaccgagttcggagacgtcgtcttcgttatcggccctccgggatgcggtaagactactactactagcaagttcactcgcgagttcaagtccaacactggtcaaaattaccttcacctctcgatcgagcatgacctacagaacttgcctgagaatggcaacctcactgctcatgctacagtccgctcttgcccggctaaggaagttgcgatgctcccacctcacgtgttgctgccgttgatagagcagagaatgaagatcatgcttgacaagatcggcaacaacattgacaagaaatacatcacgtttttcctcgatggatttcccatgagcatagaggctgctcgtgcctttgaccagaagttcggcaagccaaagaaagtcatcattatgtactgtcttcgcgacatctgcgccaagcgatatcttggcagcaacgagagagaggagggagagaatttccccgacttcagtcaccgctggtggcagtaccgaaaggagatcttggacattcgccgacattactgcgccactgtccagtcgatcctcatgaacggaaacttcgacgaatgccttgatgagatgatccgttaccgtcctcgttaccgaggagagccaaccgcttga

SEQ ID NO: 30874 - protein, 212 aa, Muscodor strobelii
  misc_feature: SGI Peptide ID NO. 570624
  misc_feature (11)..(179): NCBI GI: 3184188 Blast Desc: UMP-CMP kinase [Lentinula edodes]
  misc_feature (11)..(168): NCBI GI: 254568692 Blast Desc: Uridylate kinase, catalyzes the seventh enzymatic step in the de novo biosynthesis of pyrimidines [Pichia pastoris GS115] gi|238031253|emb|CAY69176.1| Uridylate kinase, catalyzes
  misc_feature (11)..(199): NCBI GI: 260811354 Blast Desc: BRAFLDRAFT_269132 [Branchiostoma floridae] gi|229285674|gb|EEN56399.1| BRAFLDRAFT_269132 [Branchiostoma floridae]
  misc_feature (11)..(179): NCBI GI: 50293579 Blast Desc: protein product [Candida glabrata] gi|49528514|emb|CAG62171.1| protein product [Candida glabrata]
  misc_feature (11)..(179): NCBI GI: 190409797 Blast Desc: uridylate kinase [Saccharomyces cerevisiae RM11-1a] gi|207343455|gb|EDZ70909.1| YKL024Cp-like protein [Saccharomyces cerevisiae AWRI1631]
  misc_feature (11)..(179): NCBI GI: 158298225 Blast Desc: AGAP003968-PA [Anopheles gambiae str. PEST] gi|157014421|gb|EAA13639.4| AGAP003968-PA [Anopheles gambiae str. PEST]
  misc_feature (7)..(199): NCBI GI: 170578284 Blast Desc: UMP-CMP kinase family protein [Brugia malayi] gi|158599117|gb|EDP36812.1| UMP-CMP kinase family protein [Brugia malayi]
  misc_feature (10)..(189): NCBI GI: 149244894 Blast Desc: uridylate kinase [Lodderomyces elongisporus NRRL YB-4239] gi|146449384|gb|EDK43640.1| uridylate kinase [Lodderomyces elongisporus NRRL YB-4239]
  misc_feature (11)..(199): NCBI GI: 212532467 Blast Desc: uridylate kinase Ura6 [Penicillium marneffei ATCC 18224] gi|210071754|gb|EEA25843.1| uridylate kinase Ura6 [Penicillium marneffei ATCC 18224]
  misc_feature (10)..(179): NCBI GI: 226467456 Blast Desc: uridylate kinase [Schistosoma japonicum]
  misc_feature (11)..(184): SWISSPROT Homolog: EC 2.7.4.3 Adenylate kinase
MATTSTEFGDVVFVIGPPGCGKTTTTSKFTREFKSNTGQNYLHLSIEHDLQNLPENGNLTAHATVRSCPAKEVAMLPPHVLLPLIEQRMKIMLDKIGNNIDKKYITFFLDGFPMSIEAARAFDQKFGKPKKVIIMYCLRDICAKRYLGSNEREEGENFPDFSHRWWQYRKEILDIRRHYCATVQSILMNGNFDECLDEMIRYRPRYRGEPTA

SEQ ID NO: 30875 - DNA, 3342 bp, Muscodor strobelii
  misc_feature: SGI cDNA ID NO. 570625
  misc_feature: Reduced expression when VOC is produced
  misc_feature: Encodes the peptide sequence at SEQ ID NO 30876
atgtcgttcgacttttccgacttcaactcgtccaggttcagctccccgcccgcgacgcccgaccggagctccaagaagggctccaatcccttcgccttcagtgtcgaccacccatccaccacccctgccggcccgcctccgccctcctctgccgcctccttcacccccatcggcgaaccctccccctccttcctgcagagctccattggtgccatgaccaacaagcccaaagccccaagcttcggcaagcctggtctacgaagctcaaccaagtctagccccaagagatccagtgcgccactgggacgatccctccgcggctctactcgccagccatccagtctgagtagagagtatcactacgaggaagaggacgacgacgacgacgaggaagaagaggaggaagtcgaagaggaagacgaagaagacgaggaggatgaagatgaagaatatcacggacgcgatccccgctcccgaacattcactatgccttacgacgacaccaccgagcccgaggacgacactggccctctggatgaagatgaacaagaggacgacgaagacgcagaaggagaagaagatgatgtcgaaggaatggtccaggacgcagtcgagtacgacatcgaggaggacctattgcgagagattggcggcaccggcgaatacggcgcctcccctcgagatgcagatggtgacacggatctcatgttcatggcaaccacggcggccgacgagcggatcgagagggaggccggagacatctatcgtgcctctatgatgcgctcctctgtgcgaagaagggagctcaaattctgtaccctggctaaggacctctacagtcatcagggctttgccagcatcgccgagcccgacgatgtcatcatccagaccgagacccttgtgaataagctgtacgacgaaggagtcggccccgaggacaacgaagagcagcttgacaccaccttgtcgcaggcctgcgttcgacttatcaacgatatttggacgccctacgtcgaatccctgcccagagctggcgatgagcattcagcaaaggtagggcctggttctttcgcccctgcgtttgagaaggccctctacctcgcgactctcatcttccgcatacaccacacgccacccatcacggacgatcgcggccgcatgcgtgttcctctacttccagagatccttttccagtggcaggaggatgagcacaacatcgatcgcgacacatttcacgaggtaatccatcatcgaccctctccagcggcccaccatctattctggacatccactttcaacaccctcgtgcgcggtaatctctctgggactatccgattattgagaagtgcctcctgggaaggcgtgaggaaatcctcaagaggcgaagccgcgtacattggacaagcattggcgaacatcaagcgtgtggtagaagatttgtgtcaaatcatagcagtctgtccagctgtcactgatgccaactgggatatccgaagcagcgattggaccttgttccgtctgaaagcaaaggctgccaaggaagccctcatcagcttcaccgagggcaaagaccgcccacatgcaggttccaaccggttcaatgattcagaaatatctaactctccaggccggggatccatcactgggcttgcgcgaaaggccgagagccagatcccctgggacatctatgaaaatctccaatccctctatgcaattctcattggggatccggaagctattcttgccgcatcgcaggattggtgtgaggccaccattggcttgttcggctggtgggatgacggacacaacaagcgcaagcggggaccttcacgcagtcgatcaatactgctgtcagcagaagccgatgacgacttctttgatcgcctttcttttgctctgcagaccgcgaccgagtccgaataccatttcaactccgccgatcccgtagaggttggcgtagcctgtgcttttgagggcaatgtcgaaggtgtcattggattccttcgtctctggtccctacccgtcgcatccagtgtcgctgaaatcgcgtctctgggacgatggttgccgccgccagagccccagaacctaatcgctatggatgagtttgacatggaagatctcgaagtactgggtgtaaagaagagccagagccccgatgaggaagacggtatcaaagacaatacacttattcactatgcccgaagcttgagagactgcagacagatcaccgcacatacgccacgcggcacgatatcccgagatggctgggaattggccgtccaggtcgtgggccgaatggactcccatgaacggtctgaacagatggtacaagagcttctacaagacgtggtaaaaaatatcgacgaggagtctcgcgcgaccgttgacaagatttgggccttgctgaatgatctcggcatgattaacttcgccgaagacacagcagagacttttggtgacatccttgctaaagacactttccgcttcggcgagacattatggtattatgcccttgcacaccgaccaggcaaagttcgagacgttctcaacaccctcatgtctctctcacttgttgaatctaccgcatatccccaggataaggaactagacgaaaccttgcgagggctactcaaagagcgaacgactacactggaggattttgctaagcaagatctggaggctgccgagcttcttggcaagatgttaagtggatatgcaacgctaagaaggttctacgagcttcgcgacggtgacggtaaaagcaataatagatctcttcttcgacgccaacaagccgcagccgccttgacaactgttatcgccagtgccgatgacaacatccgaggcggcttatacgacgatacgcgtgacgccgtcgttagcgaagacttccttctcgccttactgggcgaaatgtctgtcttcgtgggacagtcatcgccggtcatatctctagagcaaatcgacacgctactcaaaactgttgaggatatccagactgtcggtagcagagtgtaccaagcagccgatgaattcttcaagctcgttctaacaccaggccaaggaaagggatctacccctgcaaacctccttagccagtcgacgtcatcgctgggtggaagttacgtgatgacgggcagttctatgattgcctctcagcttcataagtctgtagtcaggagcggtatgattcagggaagggttcggagagcgtgggactggcggactactgtctttgccggcagtagctctgccgatgtgctgaagaagctgagattaggtcttacgagggatttggcgagcctatggcttgagcaggcggattcggtgatggtctag

SEQ ID NO: 30876 - protein, 1113 aa, Muscodor strobelii
  misc_feature: SGI Peptide ID NO. 570625
  misc_feature (14)..(1112): NCBI GI: 156065771 Blast Desc: SS1G_00896 [Sclerotinia sclerotiorum 1980] gi|154691755|gb|EDN91493.1| SS1G_00896 [Sclerotinia sclerotiorum 1980]
  misc_feature (19)..(1113): NCBI GI: 256731747 Blast Desc: [Nectria haematococca mpVI 77-13-4]
  misc_feature (31)..(1112): NCBI GI: 46137367 Blast Desc: FG10199.1 [Gibberella zeae PH-1]
  misc_feature (82)..(1112): NCBI GI: 116180184 Blast Desc: CHGG_00720 [Chaetomium globosum CBS 148.51] gi|88185017|gb|EAQ92485.1| CHGG_00720 [Chaetomium globosum CBS 148.51]
  misc_feature (16)..(1110): NCBI GI: 39976115 Blast Desc: MGG_06016 [Magnaporthe grisea 70-15] gi|145011709|gb|EDJ96365.1| MGG_06016 [Magnaporthe grisea 70-15]
  misc_feature (49)..(1112): NCBI GI: 18307434 Blast Desc: [Neurospora crassa]
  misc_feature (232)..(1111): NCBI GI: 171692045 Blast Desc: protein product [Podospora anserina] gi|170945971|emb|CAP72772.1| protein product [Podospora anserina]
  misc_feature (49)..(1112): NCBI GI: 85099986 Blast Desc: NCU06649 [Neurospora crassa OR74A] gi|28922412|gb|EAA31646.1| [Neurospora crassa OR74A]
  misc_feature (14)..(1112): NCBI GI: 154301813 Blast Desc: BC1G_10058 [Botryotinia fuckeliana B05.10] gi|150855720|gb|EDN30912.1| BC1G_10058 [Botryotinia fuckeliana B05.10]
  misc_feature (265)..(1101): NCBI GI: 240280960 Blast Desc: nuclear pore complex subunit Nup85 [Ajellomyces capsulatus H143]
  misc_feature: Useful for introducing or modulating the production of volatile compounds
MSFDFSDFNSSRFSSPPATPDRSSKKGSNPFAFSVDHPSTTPAGPPPPSSAASFTPIGEPSPSFLQSSIGAMTNKPKAPSFGKPGLRSSTKSSPKRSSAPLGRSLRGSTRQPSSLSREYHYEEEDDDDDEEEEEEVEEEDEEDEEDEDEEYHGRDPRSRTFTMPYDDTTEPEDDTGPLDEDEQEDDEDAEGEEDDVEGMVQDAVEYDIEEDLLREIGGTGEYGASPRDADGDTDLMFMATTAADERIEREAGDIYRASMMRSSVRRRELKFCTLAKDLYSHQGFASIAEPDDVIIQTETLVNKLYDEGVGPEDNEEQLDTTLSQACVRLINDIWTPYVESLPRAGDEHSAKVGPGSFAPAFEKALYLATLIFRIHHTPPITDDRGRMRVPLLPEILFQWQEDEHNIDRDTFHEVIHHRPSPAAHHLFWTSTFNTLVRGNLSGTIRLLRSASWEGVRKSSRGEAAYIGQALANIKRVVEDLCQIIAVCPAVTDANWDIRSSDWTLFRLKAKAAKEALISFTEGKDRPHAGSNRFNDSEISNSPGRGSITGLARKAESQIPWDIYENLQSLYAILIGDPEAILAASQDWCEATIGLFGWWDDGHNKRKRGPSRSRSILLSAEADDDFFDRLSFALQTATESEYHFNSADPVEVGVACAFEGNVEGVIGFLRLWSLPVASSVAEIASLGRWLPPPEPQNLIAMDEFDMEDLEVLGVKKSQSPDEEDGIKDNTLIHYARSLRDCRQITAHTPRGTISRDGWELAVQVVGRMDSHERSEQMVQELLQDVVKNIDEESRATVDKIWALLNDLGMINFAEDTAETFGDILAKDTFRFGETLWYYALAHRPGKVRDVLNTLMSLSLVESTAYPQDKELDETLRGLLKERTTTLEDFAKQDLEAAELLGKMLSGYATLRRFYELRDGDGKSNNRSLLRRQQAAAALTTVIASADDNIRGGLYDDTRDAVVSEDFLLALLGEMSVFVGQSSPVISLEQIDTLLKTVEDIQTVGSRVYQAADEFFKLVLTPGQGKGSTPANLLSQSTSSLGGSYVMTGSSMIASQLHKSVVRSGMIQGRVRRAWDWRTTVFAGSSSADVLKKLRLGLTRDLASLWLEQADSVMV

SEQ ID NO: 30877 - DNA, 3927 bp, Muscodor strobelii
  misc_feature: SGI EST ID NO. CUFF.73134.0
  misc_feature: Variant of the nucleotide sequence at SEQ ID NO 30875
gggccatgtacctaaaacttttggttcgctcacgccaatcaatgtcaacacataacttgcgacgccaaggccgatagtcgacattcccagctgtgtctcaactcaacaacaccttctacaccgaccgtgcgggggatcagactctaggaatcgtgctatctatgtcggtctgcaaaggcctgatgttctttttccatctcacgcgtttctgaccaacccgccctcgccagcacattcccgtcgcatacccacgttgcacaccgacgtcgcataaggcccccccaggagccttgcttctttgtcgccagcatgtcgttcgacttttccgacttcaactcgtccaggttcagctccccgcccgcgacgcccgaccggagctccaagaagggctccaatcccttcgccttcagtgtcgaccacccatccaccacccctgccggcccgcctccgccctcctctgccgcctccttcacccccatcggcgaaccctccccctccttcctgcagagctccattggtgccatgaccaacaagcccaaagccccaagcttcggcaagcctggtctacgaagctcaaccaagtctagccccaagagatccagtgcgccactgggacgatccctccgcggctctactcgccagccatccagtctgagtagagagtatcactacgaggaagaggacgacgacgacgacgaggaagaagaggaggaagtcgaagaggaagacgaagaagacgaggaggatgaagatgaagaatatcacggacgcgatccccgctcccgaacattcactatgccttacgacgacaccaccgagcccgaggacgacactggccctctggatgaagatgaacaagaggacgacgaagacgcagaaggagaagaagatgatgtcgaaggaatggtccaggacgcagtcgagtacgacatcgaggaggacctattgcgagagattggcggcaccggcgaatacggcgcctcccctcgagatgcagatggtgacacggatctcatgttcatggcaaccacggcggccgacgagcggatcgagagggaggccggagacatctatcgtgcctctatgatgcgctcctctgtgcgaagaagggagctcaaattctgtaccctggctaaggacctctacagtcatcagggctttgccagcatcgccgagcccgacgatgtcatcatccagaccgagacccttgtgaataagctgtacgacgaaggagtcggccccgaggacaacgaagagcagcttgacaccaccttgtcgcaggcctgcgttcgacttatcaacgatatttggacgccctacgtcgaatccctgcccagagctggcgatgagcattcagcaaaggtagggcctggttctttcgcccctgcgtttgagaaggccctctacctcgcgactctcatcttccgcatacaccacacgccacccatcacggacgatcgcggccgcatgcgtgttcctctacttccagagatccttttccagtggcaggaggatgagcacaacatcgatcgcgacacatttcacgaggtaatccatcatcgaccctctccagcggcccaccatctattctggacatccactttcaacaccctcgtgcgcggtaatctctctgggactatccgattattgagaagtgcctcctgggaaggcgtgaggaaatcctcaagaggcgaagccgcgtacattggacaagcattggcgaacatcaagcgtgtggtagaagatttgtgtcaaatcatagcagtctgtccagctgtcactgatgccaactgggatatccgaagcagcgattggaccttgttccgtctgaaagcaaaggctgccaaggaagccctcatcagcttcaccgagggcaaagaccgcccacatgcaggttccaaccggttcaatgattcagaaatatctaactctccaggccggggatccatcactgggcttgcgcgaaaggccgagagccagatcccctgggacatctatgaaaatctccaatccctctatgcaattctcattggggatccggaagctattcttgccgcatcgcaggattggtgtgaggccaccattggcttgttcggctggtgggatgacggacacaacaagcgcaagcggggaccttcacgcagtcgatcaatactgctgtcagcagaagccgatgacgacttctttgatcgcctttcttttgctctgcagaccgcgaccgagtccgaataccatttcaactccgccgatcccgtagaggttggcgtagcctgtgcttttgagggcaatgtcgaaggtgtcattggattccttcgtctctggtccctacccgtcgcatccagtgtcgctgaaatcgcgtctctgggacgatggttgccgccgccagagccccagaacctaatcgctatggatgagtttgacatggaagatctcgaagtactgggtgtaaagaagagccagagccccgatgaggaagacggtatcaaagacaatacacttattcactatgcccgaagcttgagagactgcagacagatcaccgcacatacgccacgcggcacgatatcccgagatggctgggaattggccgtccaggtcgtgggccgaatggactcccatgaacggtctgaacagatggtacaagagcttctacaagacgtggtaaaaaatatcgacgaggagtctcgcgcgaccgttgacaagatttgggccttgctgaatgatctcggcatgattaacttcgccgaagacacagcagagacttttggtgacatccttgctaaagacactttccgcttcggcgagacattatggtattatgcccttgcacaccgaccaggcaaagttcgagacgttctcaacaccctcatgtctctctcacttgttgaatctaccgcatatccccaggataaggaactagacgaaaccttgcgagggctactcaaagagcgaacgactacactggaggattttgctaagcaagatctggaggctgccgagcttcttggcaagatgttaagtggatatgcaacgctaagaaggttctacgagcttcgcgacggtgacggtaaaagcaataatagatctcttcttcgacgccaacaagccgcagccgccttgacaactgttatcgccagtgccgatgacaacatccgaggcggcttatacgacgatacgcgtgacgccgtcgttagcgaagacttccttctcgccttactgggcgaaatgtctgtcttcgtgggacagtcatcgccggtcatatctctagagcaaatcgacacgctactcaaaactgttgaggatatccagactgtcggtagcagagtgtaccaagcagccgatgaattcttcaagctcgttctaacaccaggccaaggaaagggatctacccctgcaaacctccttagccagtcgacgtcatcgctgggtggaagttacgtgatgacgggcagttctatgattgcctctcagcttcataagtctgtagtcaggagcggtatgattcagggaagggttcggagagcgtgggactggcggactactgtctttgccggcagtagctctgccgatgtgctgaagaagctgagattaggtcttacgagggatttggcgagcctatggcttgagcaggcggattcggtgatggtctagggtaccaagtaaatatgagggcctccctgttttgagaaagaaaaggccgaggcggaatgggatggcgtttagcaaggaagcacgtatgcattgactacaaccagtgtaataataccaatgtgtaaacgacctatggcgttttgatgtctccatatgcattgactaatgatgcgcatgtaggcgatcttcttagaatgggtcgagatcagcatcctaactactaatgaaacgtgatgatgcgaatgatgagagttgaagcaaagcttcaagtcactc

SEQ ID NO: 30878 - DNA, 1146 bp, Muscodor strobelii
  misc_feature: SGI cDNA ID NO. 570626
  misc_feature: Encodes the peptide sequence at SEQ ID NO 30879
atggctgacaccgttggcaagacaattacctgcaaggccgctgtcgcctgggaagctggcaaggacctgagcattgaggatattgaggtcgcacccccgaaggcgcatgaggtgcgcatccagatctactacacaggcgtttgccataccgatgcctacacattatctggcaaggatccggagggcgcattccccatcgtcttgggccatgaaggagctggtatcgtcgagtcggtcggtgagggcgtgactaacgtcaagcctggcgaccatgttgtcgccctctacacaccagaatgcaaggagtgcaagttctgcaagtccggcaagacgaatctgtgtggaaagattcgcgcgacgcaaggaaagggcgtgatgcctgacggaacatccagattcaagtgcaagggcaaggatctactacacttcatgggcacatcaaccttctctcagtacaccgtcgttgccgacatctccgttgttgccgttcagcaggatgctcctatggaccgaacatgcttgttgggctgcggtatcaccaccggttatggcgctgccagaattaccgccaattgcgaggagggatccaacgtcgccattttcggtgctgggtgtgtcggtttgtccgtcgtccagggtgctgtcatgcagaaggccgggaagatcattgttgttgacgttaacccgacaaaggaggagtgggccaagaaattcggagctaccgacttcgtcaaccctaccaaattaccggagggacagactatcgtagacaagctgattgagatgacggatggtggatgtgactatactttcgactgcaccggcaacgtaaatgtcatgcgtaccgctcttgaagcttgccacaagggctggggacagagtatcgttattggggtcgctgctgctggtcaggagattgccacccgaccattccaactggttaccggtcgtgtgtggaagggctgcgctttcggtggtgtaaagggtcgatcacagatgggcggcctcgtctcagattaccttgatggcaagttgaaggtcgatgagttcatcacccaccgtgaatcgctggccaatatcaacactgccttcgagcagatgaaggcaggtgactgcattcgctgcgtcgtaacgatgaaggaatga

SEQ ID NO: 30879 - protein, 381 aa, Muscodor strobelii
  misc_feature: SGI Peptide ID NO. 570626
  misc_feature (35)..(163): Pfam Id: PF08240 Pfam Desc: Alcohol dehydrogenase GroES-like domain
  misc_feature (194)..(339): Pfam Id: PF00107 Pfam Desc: Zinc-binding dehydrogenase
  misc_feature (1)..(381): NCBI GI: 171692081 Blast Desc: protein product [Podospora anserina] gi|170945989|emb|CAP72790.1| protein product [Podospora anserina]
  misc_feature (4)..(380): NCBI GI: 145603502 Blast Desc: MGG_06011 [Magnaporthe grisea 70-15] gi|145011714|gb|EDJ96370.1| MGG_06011 [Magnaporthe grisea 70-15]
  misc_feature (2)..(381): NCBI GI: 169614650 Blast Desc: SNOG_10471 [Phaeosphaeria nodorum SN15] gi|160702792|gb|EAT81865.2| SNOG_10471 [Phaeosphaeria nodorum SN15]
  misc_feature (1)..(380): NCBI GI: 116180188 Blast Desc: glutathione-dependent formaldehyde dehydrogenase [Chaetomium globosum CBS 148.51] gi|88185019|gb|EAQ92487.1| glutathione-dependent formaldehyde dehydrogenase [Chaetomium CBS
  misc_feature (1)..(380): NCBI GI: 119191642 Blast Desc: glutathione-dependent formaldehyde dehydrogenase [Coccidioides immitis RS] gi|240106397|gb|EER24590.1| Glutathione-dependent formaldehyde dehydrogenase, [Coccidioides
  misc_feature (1)..(379): NCBI GI: 67901290 Blast Desc: AN7632.2 [Aspergillus nidulans FGSC A4] gi|40742628|gb|EAA61818.1| AN7632.2 [Aspergillus nidulans FGSC A4] gi|259483964|tpe|CBF79783.1| TPA: formaldehyde dehydrogenase
  misc_feature (1)..(380): NCBI GI: 212527358 Blast Desc: formaldehyde dehydrogenase [Penicillium marneffei ATCC 18224] gi|210073234|gb|EEA27321.1| formaldehyde dehydrogenase [Penicillium marneffei ATCC 18224]
  misc_feature (1)..(380): NCBI GI: 242783508 Blast Desc: formaldehyde dehydrogenase [Talaromyces stipitatus ATCC 10500] gi|218720348|gb|EED19767.1| formaldehyde dehydrogenase [Talaromyces stipitatus ATCC 10500]
  misc_feature (1)..(381): NCBI GI: 225559221 Blast Desc: glutathione-dependent formaldehyde dehydrogenase [Ajellomyces capsulatus G186AR]
  misc_feature (4)..(381): NCBI GI: 46137369 Blast Desc: FG10200.1 [Gibberella zeae PH-1]
  misc_feature (4)..(379): SWISSPROT Homolog: EC 1.1.1.284 S-(hydroxymethyl)glutathione dehydrogenase
MADTVGKTITCKAAVAWEAGKDLSIEDIEVAPPKAHEVRIQIYYTGVCHTDAYTLSGKDPEGAFPIVLGHEGAGIVESVGEGVTNVKPGDHVVALYTPECKECKFCKSGKTNLCGKIRATQGKGVMPDGTSRFKCKGKDLLHFMGTSTFSQYTVVADISVVAVQQDAPMDRTCLLGCGITTGYGAARITANCEEGSNVAIFGAGCVGLSVVQGAVMQKAGKIIVVDVNPTKEEWAKKFGATDFVNPTKLPEGQTIVDKLIEMTDGGCDYTFDCTGNVNVMRTALEACHKGWGQSIVIGVAAAGQEIATRPFQLVTGRVWKGCAFGGVKGRSQMGGLVSDYLDGKLKVDEFITHRESLANINTAFEQMKAGDCIRCVVTMKE

SEQ ID NO: 30880 - DNA, 2447 bp, Muscodor strobelii
  misc_feature: SGI EST ID NO. CUFF.73416.1
  misc_feature: Variant of the nucleotide sequence at SEQ ID NO 30878
gtggcagcagaattgccaccaaggtcctcattctttctttaaacaccgatatttatagtcatcatcgttccgctcaattatagaagtgaactaccacagtatattcgtacttcaacaaagcagggccgccttgttgtctcgatctcctacgtttttcttccgcccaataccaaacgccttatctagagcaagtcgcaaacttattgtttgagatcggtgatccaaagacctacgttagtggcgggcactagccccgagcgttgtccgttgcaccgagatctaaggatgtcaatgagattctatttcttgtcttgccgccactgggctctcgtgagaaaagcttggcgatacatattatagaagctactaatagaaattactgattatgagcctctcatatccagcacttcattctagaccttcggccaacctcttttggatgctccttgccgttaccgcaacgcccagcttatagcagatcccgagtttcgtccatccgcctcctcttatctccttgacttcgactagtgtctgggtcttgagtatactctctccattgccgcttttgccccagcccgccaagttggcatgctagtaatctactaataacctagagataaaggtcgatgttgtgaaatgtgtggaatacggagccgcaatgcccactatttcacggtgaaaacgatccttcgtacgcgtacaggccgtctctgcccaaccattgttgccgtgttatacctggagatatgtgtgccatctccgattctaggaggtagtgttgcacccgacaccactgcttcgctgcgcattcaaggcatgacatcagtataactctacggctatatgccgactccccacttgtcgcgcgcccagatggatggttgaaacaagtcggcttcatatacatatccagcggggtataacttcgcctccgcagcaagccgtcgttcagtcaataaagcaattgcattcctaaaaccttgcaacgatctgactttttcaccatattcatcttatgccctccatctcctaggttattcgccatttcaatcttcgcagaaaatcgaccaaaccaaagacttccacgacgatggctgacaccgttggcaagacaattacctgcaaggccgctgtcgcctgggaagctggcaaggacctgagcattgaggatattgaggtcgcacccccgaaggcgcatgaggtgcgcatccagatctactacacaggcgtttgccataccgatgcctacacattatctggcaaggatccggagggcgcattccccatcgtcttgggccatgaaggagctggtatcgtcgagtcggtcggtgagggcgtgactaacgtcaagcctggcgaccatgttgtcgccctctacacaccagaatgcaaggagtgcaagttctgcaagtccggcaagacgaatctgtgtggaaagattcgcgcgacgcaaggaaagggcgtgatgcctgacggaacatccagattcaagtgcaagggcaaggatctactacacttcatgggcacatcaaccttctctcagtacaccgtcgttgccgacatctccgttgttgccgttcagcaggatgctcctatggaccgaacatgcttgttgggctgcggtatcaccaccggttatggcgctgccagaattaccgccaattgcgaggagggatccaacgtcgccattttcggtgctgggtgtgtcggtttgtccgtcgtccagggtgctgtcatgcagaaggccgggaagatcattgttgttgacgttaacccgacaaaggaggagtgggccaagaaattcggagctaccgacttcgtcaaccctaccaaattaccggagggacagactatcgtagacaagctgattgagatgacggatggtggatgtgactatactttcgactgcaccggcaacgtaaatgtcatgcgtaccgctcttgaagcttgccacaagggctggggacagagtatcgttattggggtcgctgctgctggtcaggagattgccacccgaccattccaactggttaccggtcgtgtgtggaagggctgcgctttcggtggtgtaaagggtcgatcacagatgggcggcctcgtctcagattaccttgatggcaagttgaaggtcgatgagttcatcacccaccgtgaatcgctggccaatatcaacactgccttcgagcagatgaaggcaggtgactgcattcgctgcgtcgtaacgatgaaggaatgagtatgtgaaaaaaatcgtctgtaaataatgatcgaggcgttgtattaatggaaaagaaagggggcaatgaacaatatctaattttaaaatgatcggtgatgtgagagacttgtcgctaaacacgaatgggtatcagactcgccaggtcaatacataactcaagcgccagcatagtcgtcaataagaaatgaagccacaacgatgaaaccga

SEQ ID NO: 30881 - DNA, 315 bp, Muscodor strobelii
  misc_feature: SGI cDNA ID NO. 570627
  misc_feature: Reduced expression when VOC is produced
  misc_feature: Encodes the peptide sequence at SEQ ID NO 30882
atggctggaaaaccgcgctgcacattcaaggagtgcaagaccgccgcacagcggattgttggagactgtggattctgcgacggccacttctgcgccaagcaccgtctattagaagaccacaagtgcacgggtctcgaggacgtaagtctctcatctccagactccaacagcagcgccaactgtggctcgcaagtcacctcgccaccagccaaatctcctgtcacagaagatttcggcaacacccagtggtggctgatcggtcttgccgagtacctctcggaaagcgatttgcttcccctagatcctaagctgtga

SEQ ID NO: 30882 - protein, 104 aa, Muscodor strobelii
  misc_feature: SGI Peptide ID NO. 570627
  misc_feature (4)..(57): NCBI GI: 169617666 Blast Desc: SNOG_12015 [Phaeosphaeria nodorum SN15] gi|160703450|gb|EAT80427.2| SNOG_12015 [Phaeosphaeria nodorum SN15]
  misc_feature (4)..(57): NCBI GI: 67516791 Blast Desc: AN0677.2 [Aspergillus nidulans FGSC A4] gi|40746297|gb|EAA65453.1| AN0677.2 [Aspergillus nidulans FGSC A4] gi|259489053|tpe|CBF89006.1| TPA: conserved [Aspergillus FGSC
  misc_feature (2)..(57): NCBI GI: 212532069 Blast Desc: nuclear protein, [Penicillium marneffei ATCC 18224] gi|210071555|gb|EEA25644.1| nuclear protein, [Penicillium marneffei ATCC 18224]
  misc_feature (4)..(57): NCBI GI: 225561130 Blast Desc: AN1 zinc finger protein [Ajellomyces capsulatus G186AR]
  misc_feature (4)..(99): NCBI GI: 154277440 Blast Desc: conserved [Ajellomyces capsulatus NAm1] gi|150413146|gb|EDN08529.1| conserved [Ajellomyces capsulatus NAm1]
  misc_feature (4)..(57): NCBI GI: 121701301 Blast Desc: conserved [Aspergillus clavatus NRRL 1] gi|119397058|gb|EAW07489.1| conserved [Aspergillus clavatus NRRL 1]
  misc_feature (4)..(57): NCBI GI: 255937159 Blast Desc: Pc13g11890 [Penicillium chrysogenum Wisconsin 54-1255] gi|211584226|emb|CAP92258.1| Pc13g11890 [Penicillium chrysogenum Wisconsin 54-1255]
  misc_feature (4)..(57): NCBI GI: 261189245 Blast Desc: zinc finger protein [Ajellomyces dermatitidis SLH14081] gi|239591819|gb|EEQ74400.1| zinc finger protein [Ajellomyces dermatitidis SLH14081] gi|239614739|gb|EEQ91726.1|
  misc_feature (4)..(57): NCBI GI: 240280313 Blast Desc: AN1 zinc finger protein [Ajellomyces capsulatus H143]
  misc_feature (4)..(57): NCBI GI: 242774645 Blast Desc: nuclear protein, [Talaromyces stipitatus ATCC 10500] gi|218722101|gb|EED21519.1| nuclear protein, [Talaromyces stipitatus ATCC 10500]
  misc_feature: Useful for introducing or modulating the production of volatile compounds
MAGKPRCTFKECKTAAQRIVGDCGFCDGHFCAKHRLLEDHKCTGLEDVSLSSPDSNSSANCGSQVTSPPAKSPVTEDFGNTQWWLIGLAEYLSESDLLPLDPKL

SEQ ID NO: 30883 - DNA, 2309 bp, Muscodor strobelii
  misc_feature: SGI EST ID NO. CUFF.73311.0
  misc_feature: Variant of the nucleotide sequence at SEQ ID NO 30881
gccgcttcttctggctacgggatgtacacatacagacgctggctacgtggagtcccagggacagggaacatcgctggtgtccgttgtcccaaggtttctcccaatatgcgtcgccttggtcattcgcctgcatgccaggctaaaacagccaaggtcctgtatgtgcaccaaacacgtatgtgctgagtcgtccgcctcgcctcatcctccacctccaacgcatcgcaatctagactagacggcgctgctagactgcatatgtcttacagcatagcataatacccgcgtctcctatcgcttctcgttattcattgccggcgatgcttgccttattggcattgactacgccaggcctcgtgagatgcagtgtctgggcctcgctgcactcagaccttgtggtacgtagacactcgtaatagcttggtgataattgagcattgaagcatcgatccatgcgtggactgggatcgtggatggacagtagagcggtccaacatgaggtcgacacaatgcacagtaggacggtgcctatctgttcttcatcattccattcattgcgcccgagccccaacgtcgggacaaatggacggaactaggagtcagttgacctctcatactagacccagaccagcctgtgttccaatgcatgcgctcccattccctccttctccggagtagtgtctgacccagctggccatctctacctaagtctttatctgccactattcccaacgttttgactttctagcttttcttctcttccctttatctcttccctcctgctcagaatcttcggcctcgcctcatctgcatccgccacatcgctaacaaagcttaatccttcacgacacggtcatccgcggacctggcactcaagtaagtttgccctagtagtctgattccgcatacctcatcgtctattccgtacactttgcacccttgcgccgctccccgaatggtgccccgttcatgcatttttggatccttcattcctgtctcggtcatccctttcgacgtggccgaaagtatcgtcatccggtgcctagcagcgagccgagcagcctggatactctacgtagtctactttacctgttgtccacttgcccacctgccccagcgacgtgcatacatagcagtcaccccggccagggtcccactgagggtcgccatccgagcttccattgtgtcatttcgccatcttactctcataatcttattaatggcccgagtcagctaacattccgtttctatttgacacagatagacgagacacttctctctccttccaccttctcataacctctcaagttgcacaacggccacaccctgcgaaacagttgttgtttgacaatctcacgacaaagacgagccaacagttcactactggttctttgatcggccacctaaccaacggccgttttaccacgaaaccggctggcctcgtgactcacggctcacccaacatccgacgacttcctcgcctgacgaacaaacctacctacctacacattcgcaacaacaaccacattatcacatccgaatcatactagctaccatggctggaaaaccgcgctgcacattcaaggagtgcaagaccgccgcacagcggattgttggagactgtggattctgcgacggccacttctgcgccaagcaccgtctattagaagaccacaagtgcacgggtctcgaggactgcaagaaggagtctcacgagcgcaatgccgcacagctcaacgctgagagaacacaagttattcgaggcgtataagccgatcgatcactcttccttctgcctctgcaccaactctggtcccacacttgtgatgatcggttcgatcgatttccacggcacgagctaagaatggtatcggactacctatatcatccgtccacattcacgccgttcccacgagcctgaatcatcaccatcacaacatctcactccccttcctcggctccactccatatggacgacgaaaacatcaccacccggccaaatattagatccacgcttcttcatttttacaagcgcaaggcgtctcgcgcatggcattacggcgtaggaggcttttgcattactgccgattctcatcgctagtgccttcatctgcttcatccgcctttcactctctgtctcgattgtgagaccacgaacggcgttctgagaaggatatccttcccaatatcttgcaatggcttggaggacaaacatattcgcatgcctactatagatagagtaggatgcgtaggcgataggccagcttttgctagctaaagattaataacacaccgctaaacacttaaag

SEQ ID NO: 30884 - DNA, 1305 bp, Muscodor strobelii
  misc_feature: SGI cDNA ID NO. 570628
  misc_feature: Encodes the peptide sequence at SEQ ID NO 30885
atggcgggcactaccgtctcaccaccgcggcgtattacgcggggttcacttgctcgttttgcatacaatgccgcgtctacaagcacgacaaagatcaaagtcgaagaagagagtctcgaagtcgaagacacaatacccgatcttacgcagtcatcaacacgaaagcgaaagcgtaccaccatctcaaagatagaacaacctggttctatccccatcaaacttggactatccccatcgccactgccgtcaagtccagagcgtacgcgatccggccgacggaccaagcgtgaagaaaaggcgagtccagatatcgaagacataattcccgacctatcgcaacgctccaaacggacgcatcagcgcaccaccacctcgacatcaaaaacctcaatatcaaccacgaccacaaaaatagacgaaatagacaaaccacgcaagaacccccgcaaaccagcacgaaaagtcacaaacccttccacgggaaccacgacaatcaaaccaccgtcagattggcaagagatctacgccctaatccgaaccatgcgagcgccaggaggaatcgcctccaacgccccagtcgacacgatgggctgcgagcgactcgcactcacaagcgcccctcccatcgtccaacgattccaaaccctcgtcgcactcatgctatcctctcaaaccaaagacaccgtaaacgccgtcgccatgcacaaactacaaaccgagctccccgctcactctccagatgcagagatcggactcacagtggacaacatcatcgcagtcgcgccagagaagttgaacgagttgatctacgcagtaggcttccacaacaacaaaacgaaatacatcaaagccgcagccttgatctgcaaatcccaatacgccggcgatataccgcccacattcgagggtctagtggcgctccccggcgtgggacccaagatggcacatctttgtctatcagcggcgtggggaagaacagaggggattggtgtagatgtgcatgtccaccgcataacgaatctctggggttggcatgggaaaggtgggagtaagaaccccgaggatacgagggttaagctggagagttggctgcctagggagaattggcatgaaatcaatacgctgctcgtcggtttgggtcagactgtttgtttgcctgtgggaagacggtgtggggattgtgaggttggacttagggggctttgtaggagtgcggatagggcgaaagttaatgagggacgtcggaggagagaggttgaggacgacgatgcagagaatttgaaggatgaagagatgaaaggatag

SEQ ID NO: 30885 - protein, 434 aa, Muscodor strobelii
  misc_feature: SGI Peptide ID NO. 570628
  misc_feature (217)..(366): Pfam Id: PF00730 Pfam Desc: HhH-GPD superfamily base excision DNA repair protein
  misc_feature (292)..(321): Pfam Id: PF00633 Pfam Desc: Helix-hairpin-helix motif
  misc_feature (98)..(430): NCBI GI: 256732134 Blast Desc: NECHADRAFT_41785 [Nectria haematococca mpVI 77-13-4]
  misc_feature (95)..(418): NCBI GI: 154304871 Blast Desc: BC1G_09021 [Botryotinia fuckeliana B05.10] gi|150853883|gb|EDN29075.1| BC1G_09021 [Botryotinia fuckeliana B05.10]
  misc_feature (97)..(418): NCBI GI: 156065713 Blast Desc: SS1G_00867 [Sclerotinia sclerotiorum 1980] gi|154691726|gb|EDN91464.1| SS1G_00867 [Sclerotinia sclerotiorum 1980]
  misc_feature (2)..(418): NCBI GI: 171692077 Blast Desc: protein product [Podospora anserina] gi|170945987|emb|CAP72788.1| protein product [Podospora anserina]
  misc_feature (94)..(433): NCBI GI: 46137371 Blast Desc: FG10201.1 [Gibberella zeae PH-1]
  misc_feature (132)..(417): NCBI GI: 145603496 Blast Desc: MGG_06014 [Magnaporthe grisea 70-15] gi|145011711|gb|EDJ96367.1| MGG_06014 [Magnaporthe grisea 70-15]
  misc_feature (145)..(419): NCBI GI: 18307439 Blast Desc: related to DNA repair protein NTG1 [Neurospora crassa]
  misc_feature (145)..(419): NCBI GI: 164424761 Blast Desc: NCU06654 [Neurospora crassa OR74A] gi|157070649|gb|EAA31463.2| conserved [Neurospora crassa OR74A]
  misc_feature (103)..(422): NCBI GI: 226286273 Blast Desc: endonuclease III [Paracoccidioides brasiliensis Pb01]
  misc_feature (103)..(422): NCBI GI: 226291738 Blast Desc: endonuclease III [Paracoccidioides brasiliensis Pb18]
  misc_feature (167)..(409): SWISSPROT Homolog: EC 4.2.99.18 DNA-(apurinic or apyrimidinic site) lyase
MAGTTVSPPRRITRGSLARFAYNAASTSTTKIKVEEESLEVEDTIPDLTQSSTRKRKRTTISKIEQPGSIPIKLGLSPSPLPSSPERTRSGRRTKREEKASPDIEDIIPDLSQRSKRTHQRTTTSTSKTSISTTTTKIDEIDKPRKNPRKPARKVTNPSTGTTTIKPPSDWQEIYALIRTMRAPGGIASNAPVDTMGCERLALTSAPPIVQRFQTLVALMLSSQTKDTVNAVAMHKLQTELPAHSPDAEIGLTVDNIIAVAPEKLNELIYAVGFHNNKTKYIKAAALICKSQYAGDIPPTFEGLVALPGVGPKMAHLCLSAAWGRTEGIGVDVHVHRITNLWGWHGKGGSKNPEDTRVKLESWLPRENWHEINTLLVGLGQTVCLPVGRRCGDCEVGLRGLCRSADRAKVNEGRRRREVEDDDAENLKDEEMKG

SEQ ID NO: 30886 - DNA, 1771 bp, Muscodor strobelii
  misc_feature: SGI EST ID NO. CUFF.73152.0
  misc_feature: Variant of the nucleotide sequence at SEQ ID NO 30884
gcgtgacatgcctccggacacaccatacacgtcgacgcacgtagccaatccggattcatcggcttttcaactagatcctcacgggcgactatctttgggaccacacaactaggttcgactataccgctcaatatatgttatgatcacatcccacatttcacatcgaccaattctcaacattctcaccacaatggcgggcactaccgtctcaccaccgcggcgtattacgcggggttcacttgctcgttttgcatacaatgccgcgtctacaagcacgacaaagatcaaagtcgaagaagagagtctcgaagtcgaagacacaatacccgatcttacgcagtcatcaacacgaaagcgaaagcgtaccaccatctcaaagatagaacaacctggttctatccccatcaaacttggactatccccatcgccactgccgtcaagtccagagcgtacgcgatccggccgacggaccaagcgtgaagaaaaggcgagtccagatatcgaagacataattcccgacctatcgcaacgctccaaacggacgcatcagcgcaccaccacctcgacatcaaaaacctcaatatcaaccacgaccacaaaaatagacgaaatagacaaaccacgcaagaacccccgcaaaccagcacgaaaagtcacaaacccttccacgggaaccacgacaatcaaaccaccgtcagattggcaagagatctacgccctaatccgaaccatgcgagcgccaggaggaatcgcctccaacgccccagtcgacacgatgggctgcgagcgactcgcactcacaagcgcccctcccatcgtccaacgattccaaaccctcgtcgcactcatgctatcctctcaaaccaaagacaccgtaaacgccgtcgccatgcacaaactacaaaccgagctccccgctcactctccagatgcagagatcggactcacagtggacaacatcatcgcagtcgcgccagagaagttgaacgagttgatctacgcagtaggcttccacaacaacaaaacgaaatacatcaaagccgcagccttgatctgcaaatcccaatacgccggcgatataccgcccacattcgagggtctagtggcgctccccggcgtgggacccaagatggcacatctttgtctatcagcggcgtggggaagaacagaggggattggtgtagatgtgcatgtccaccgcataacgaatctctggggttggcatgggaaaggtgggagtaagaaccccgaggatacgagggttaagctggagagttggctgcctagggagaattggcatgaaatcaatacgctgctcgtcggtttgggtcagactgtttgtttgcctgtgggaagacggtgtggggattgtgaggttggacttagggggctttgtaggagtgcggatagggcgaaagttaatgagggacgtcggaggagagaggttgaggacgacgatgcagagaatttgaaggatgaagagatgaaaggataggaggtgaaacttgaatagatactcggtgaagagacaagtttaaggcctctcagtagggtgctgtaagctagtggctcctgagcttcgaggagacgatgattcggttcaccttgggcacgaagtgtaaatgttgaaggtcatgtcgaaattggaggcatgaggacatgaacatctacttgtcccatagttgtatcgcgagaacgaaattgatacctaggccatgaacagaataagtgatacacctgatataaatattaaaaatctcgctaagctagc

SEQ ID NO: 30887 - DNA, 1305 bp, Muscodor strobelii
  misc_feature: SGI cDNA ID NO. 570629
  misc_feature: Reduced expression when VOC is produced
  misc_feature: Encodes the peptide sequence at SEQ ID NO 30888
atggagtttgacggtggaagcatatcggcaaatcacctttgcgtcctggtccatggactatgggggaacccaagtcatatgacccaggttgcaaaagccattcgcgccacatacaccgaagaccaactttacctactccttgcgaaacgaaacagcggcagcttcacgtacgatggcattgagcttggcggcgagagagtgtgtcgagaaatagaagacgagcttgaaaagatacagagtaaaggcggcaagatcacaaaactcagcattgtcggatactctttaggtggggtggtcgcgcgctatgcgattggacttctttatgcgaatggtgtcttcgatcaagttgaaccagtgaactttactacattcgcgtcaccgcatattggagtacgatcacctctgcgcggcttatataatactcttttcaatggtattggagcaagaacactttcagagtcaggccgtcaagtcttcacggtcgacaagttccgagatacgggtcgaccgcttctcgcggtcatggcagatcccgattctatatttattaccgggctaaagaaattcaagcgccggacactttactcaaatatcatcaacgacaggactgtcgtccactatacttccatgattagcaaagtcgatccctacaccgacttgagcaaaatcaaacctaaattcgtgcaaggctacgaagatgttatcttggatcccgatcacccatactcgccacgtgttccgagtaccgaacaatcattactcacgaatagtatgtcaatagtgaaaaatggaccatatatagcagcccttgcagtctttctgccgttaggaataacggcaatgattctcacgtcgatcgtgcagaccgttcggagctcacagcgcattaaactccacgagatgggtcaggcaggcatacagatcgaaaagtatcgcatgccactttggatcaacgaattacgaggaacggtcgaagacacctacgagaatctcaactctgcacaaaagcaagcatacctttcagcagacagtgaaagtgacgatgatgcgcttgaggatggtgaccatcaaatcttatctctcgaacgacgacagtctcatccacaattcccaacacttgccttggctccttgccagttcaacatgattaccgctctcgacaatgttggctggcggaagtatccagtgtggatacaccgcgtcaggcatagccacgcagctatcattgttcgcatggacaaggagacattcagtgaaggacacattgtgctcaagcactggcttaatgaagaatttctcgtataa

SEQ ID NO: 30888 - protein, 434 aa, Muscodor strobelii
  misc_feature: SGI Peptide ID NO. 570629
  misc_feature (7)..(216): Pfam Id: PF05057 Pfam Desc: serine esterase (DUF676)
  misc_feature (2)..(434): NCBI GI: 85098994 Blast Desc: NCU06655 [Neurospora crassa OR74A] gi|18307440|emb|CAD21503.1| conserved [Neurospora crassa] gi|28922217|gb|EAA31464.1| conserved [Neurospora crassa OR74A]
  misc_feature (2)..(434): NCBI GI: 171692075 Blast Desc: protein product [Podospora anserina] gi|170945986|emb|CAP72787.1| protein product [Podospora anserina]
  misc_feature (5)..(434): NCBI GI: 46137585 Blast Desc: FG10308.1 [Gibberella zeae PH-1]
  misc_feature (2)..(434): NCBI GI: 256731845 Blast Desc: NECHADRAFT_40576 [Nectria haematococca mpVI 77-13-4]
  misc_feature (1)..(420): NCBI GI: 261352071 Blast Desc: conserved [Verticillium albo-atrum VaMs.102]
  misc_feature (1)..(434): NCBI GI: 156044342 Blast Desc: SS1G_10274 [Sclerotinia sclerotiorum 1980] gi|154694663|gb|EDN94401.1| SS1G_10274 [Sclerotinia sclerotiorum 1980]
  misc_feature (5)..(434): NCBI GI: 145603506 Blast Desc: MGG_06006 [Magnaporthe grisea 70-15] gi|145011720|gb|EDJ96376.1| MGG_06006 [Magnaporthe grisea 70-15]
  misc_feature (2)..(415): NCBI GI: 116180194 Blast Desc: CHGG_00725 [Chaetomium globosum CBS 148.51] gi|88185022|gb|EAQ92490.1| CHGG_00725 [Chaetomium globosum CBS 148.51]
  misc_feature (3)..(434): NCBI GI: 242815735 Blast Desc: lipase/serine esterase, [Talaromyces stipitatus ATCC 10500] gi|218714967|gb|EED14390.1| lipase/serine esterase, [Talaromyces stipitatus ATCC 10500]
  misc_feature (10)..(429): NCBI GI: 189208077 Blast Desc: lipid particle protein [Pyrenophora tritici-repentis Pt-1C-BFP] gi|187976465|gb|EDU43091.1| lipid particle protein [Pyrenophora tritici-repentis Pt-1C-BFP]
  misc_feature: Useful for introducing or modulating the production of volatile compounds
MEFDGGSISANHLCVLVHGLWGNPSHMTQVAKAIRATYTEDQLYLLLAKRNSGSFTYDGIELGGERVCREIEDELEKIQSKGGKITKLSIVGYSLGGVVARYAIGLLYANGVFDQVEPVNFTTFASPHIGVRSPLRGLYNTLFNGIGARTLSESGRQVFTVDKFRDTGRPLLAVMADPDSIFITGLKKFKRRTLYSNIINDRTVVHYTSMISKVDPYTDLSKIKPKFVQGYEDVILDPDHPYSPRVPSTEQSLLTNSMSIVKNGPYIAALAVFLPLGITAMILTSIVQTVRSSQRIKLHEMGQAGIQIEKYRMPLWINELRGTVEDTYENLNSAQKQAYLSADSESDDDALEDGDHQILSLERRQSHPQFPTLALAPCQFNMITALDNVGWRKYPVWIHRVRHSHAAIIVRMDKETFSEGHIVLKHWLNEEFLV

SEQ ID NO: 30889 - DNA, 3377 bp, Muscodor strobelii
  misc_feature: SGI EST ID NO. CUFF.73180.0
  misc_feature: Variant of the nucleotide sequence at SEQ ID NO 30887
aagcgacatcatacattttattgtccctccaatacaaagtgacatcttccgcacttgtattggcaggtttcagctcttctttcactcatttgcacacatcgatatcaactgtcttctattccaaccgattgttgcagaattgagcagatcccatacagtatggagtttgacggtggaagcatatcggcaaatcacctttgcgtcctggtccatggactatgggggaacccaagtcatatgacccaggttgcaaaagccattcgcgccacatacaccgaagaccaactttacctactccttgcgaaacgaaacagcggcagcttcacgtacgatggcattgagcttggcggcgagagagtgtgtcgagaaatagaagacgagcttgaaaagatacagagtaaaggcggcaagatcacaaaactcagcattgtcggatactctttaggtggggtggtcgcgcgctatgcgattggacttctttatgcgaatggtgtcttcgatcaagttgaaccagtgaactttactacattcgcgtcaccgcatattggagtacgatcacctctgcgcggcttatataatactcttttcaatggtattggagcaagaacactttcagagtcaggccgtcaagtcttcacggtcgacaagttccgagatacgggtcgaccgcttctcgcggtcatggcagatcccgattctatatttattaccgggctaaagaaattcaagcgccggacactttactcaaatatcatcaacgacaggactgtcgtccactatacttccatgattagcaaagtcgatccctacaccgacttgagcaaaatcaaacctaaattcgtgcaaggctacgaagatgttatcttggatcccgatcacccatactcgccacgtgttccgagtaccgaacaatcattactcacgaatagtatgtcaatagtgaaaaatggaccatatatagcagcccttgcagtctttctgccgttaggaataacggcaatgattctcacgtcgatcgtgcagaccgttcggagctcacagcgcattaaactccacgagatgggtcaggcaggcatacagatcgaaaagtatcgcatgccactttggatcaacgaattacgaggaacggtcgaagacacctacgagaatctcaactctgcacaaaagcaagcatacctttcagcagacagtgaaagtgacgatgatgcgcttgaggatggtgaccatcaaatcttatctctcgaacgacgacagtctcatccacaattcccaacacttgccttggctccttgccagttcaacatgattaccgctctcgacaatgttggctggcggaagtatccagtgtggatacaccgcgtcaggcatagccacgcagctatcattgttcgcatggacaaggagacattcagtgaaggacacattgtgctcaagcactggcttaatgaagaatttctcgtataatatctggtcgtcatctagaagcatggtgttggaggcgttcagcgttgttgcattgtgggagaagcatttacatctatatatggcaacacataattagagagctttctgtaatcgagcattgacaaataattactgccgccgaccagtgatgctacaatatgaccgtttattggattcgtggaggcagtcaggtctgggcaatgggtacccaagtatcgcgttctctgcatgcattacagaaagatccattagtccgcatacgctaaaatctagtgctactatcggcccatcaggacaacactttatttaacccagcaacattacatccaggttacacagacgacaatatacgaaaagaatacctaacaatacttgaaaaccagctttaggttagaagttcaccttgacctgcagaaggaaatgatgacagctgtcaccaggtggtctcacgccgtggcttcatagcccatgccccaatccgacagactgaaccaaggatagcaagctccgtgttgcgaataggtgaaggcgatcttctcgaagacgattaaagtcaatataaatgctgcaatggagtgaagagaatgacatactgcaacacgtaaaggcaggtgcgcgatacttgctccgcgtttcatttcaacatgatactacgaaggcttgcaacacctcaaacgggcgcaacggcggcgggagcccaaggcctattaacaactcgcctacttcgacaaatacccctattcaacacaactagtcgtgttggacaaccgcgagtactactctcgaaataccatacgcctcgtcaaaagtccaacactcgtgcagcgagagagccagggcctaagcggcattcacagtcatacggtgcccccaagaccaaacctagtttcaatggactcatggtgctgatttgcatcgccctagcaattcaagtagtcgttgaattattaagaccagctgtaatgcgcggattagaggaggagatggcgaagaagactcgcgacttcgaggaatactacttattaaccaaacatggtggttggcacaaagatcccacgatggctcggacgtatttcgaatatgccaggtctgttctcgctttgcatcaccaatacgtctcctgccgcctgcgtgaatataaccacctatggtctctggcatggataaaaataccactccccgaggatctcggcccattgcccagaactctgccggacgagccagaacatggcaccagtatcgatctcactaacgacccggacgagctggaatctttggttctcctgggtccggcatcccatataacgaagtctcaagctcggcgcacaagcgccagaacgggagagacaactagttccgacctgaaatgccggagtctgtacgtcatcataaacaaagagggacaagatatcgataatgacgcctctcttgagattgcgagggaccttaggcgggtgcaacacgtaattgaagacttgagacgttcgggaaaggtggatagaaatcagcagtgggtgattcatcttctgcttcgagaccaatgcatatcagttattcaagaggacagtgtgggagaattcccacataatattcttagaaattccagagtcaatctgccgtttgtgtggggagctacaggaacgaggaaggtcatcccgtcaaagggagatacctatccatacgatggcgagtcgcccattgggtctcaagggaagtggtaacagaggatacagtagcaacatctatatattgaactctctatgttcctcttcacttaagttatcctgtaacgagatggttattctttcgaacaacgagacaaggatggtcctcgaaatttaaagatggccgtcgtcattgctagcatcgaaattctgcccaattacatgagacttgatgagaatagttttcgc

SEQ ID NO: 30890 - DNA, 2052 bp, Muscodor strobelii
  misc_feature: SGI cDNA ID NO. 570630
  misc_feature: Encodes the peptide sequence at SEQ ID NO 30891
atggcaggttcgctggctgtcctgaaaaatcttgaatgccctgctggtgatacttgcactgcattccagtgcctcttcaagcacgccagagatgatcagccagcgaacaatgaaggcagcgccagtcacacagacattcatcccactgagtctgtatcgcgatcccaaccatcgcggtctcgatcagctgcatctcacgttgaatcatccgctcatatagagcaggacactccaaggaagcgtgtaaagattgatccaaccagcaattcccgggctcagctttcttcggcaatctctagtcctcaaaagctcggagcctcggaacaaagaaaagtcgcattgaaccctacgtccgcaaccataacaaagaatggctcacctaagtcctcgacccggatgaccaccgcattggcgcaagtgaaaccccagagcagtgaccagcagaccagtgcgcagaaagcgttggacgtcacagcatcaacacccgataagaatattgtcactgcgaaagtgatcaagcccaaacaaaccaacaaacaatccgaaacgctcaaccctcgacttctcaaaaaggcacccagcagtcattccactcgggttgctctagtcaaagccttgcacaaggaatacgagcgactcaacaatgaagtaaagaaaacagcgaaggatggggatgctaagaagctgttgctatctgatcaggagcttattgtgaagacgcttgatgatgaacaagatatcgcactcaagaacacagctatctacaataccaaaattaggaacctgatcatgcgatacaagaagatgcctgtctcggactgggaagccgagcggataaaggctgtgcaggaaaaggaccctggcagcacgaagtcaacgactaccgcacctctcgctactattgagacaggactcaccacacaacaggagatcaagtttctcccgcaacttgcttgggacctgagcgcattggctatctatggctatgtctcgactatcccctccgatgatgatatcgcagctgcaaaagctggcgtcgcaacatcacgaaacacagagagttgcgatcggtgcacgcgacgctttcagacctttcctggccgcagagaagaagacggtgccttggcatctaatggatcatgtacattccatccgggcaagcgatattacatcgacaatgcgcccggagacagatctaagccgaagcagaagtatcgctgctgccacagagatatcgacgatgactcagggggatgcactacggcgccaacccatgtcttcaagacaaccgatccgaagagacttgctgctatcttaaactttgttaagactcctgtaaatcctgccgtgcccaaggaccgtgctgttggcttcgattgtgaaatgggctacacagtctacggtttagagctcatccgcatgaccttggtatcttggccagacggagaggagctccttgacatcctggtccagcctgtcggcgaattattggaccccaatacccgctactcaggggtcacagctgaagcaatggctacggccgagcgctacaaagtcggcggcgaccacaaacctacgataatcccttcgcctgactcctctaaacaacctctgcgcaaactcaagatcgcaccttcacccgagatcgcccgagacctcctcttcagcatagtcagtgccgagaccccacttatcggccatggtctcgagaacgacttgaatgcaacacgcatcattcacccgaaatgcatcgacaccgtccttcttttcccgcacaagcgtggtctgccagtacgcaatggattgaagtacctgatggagacaaaactcggacggcggatccagatggatcccacggaaggatcgcccgagggccatgacagcgcggaggatgctcgtgctgcgggagatcttgttcgacttaagatccgtgatgagtggaagtcaaagcagatgaaaggatggacattgggagctgatggagaaatcgttgctcctgcgcaggagtggacgattgttggtggtgcgaaggtcaagagacctggattttag

SEQ ID NO: 30891 - protein, 683 aa, Muscodor strobelii
  misc_feature: SGI Peptide ID NO. 570630
  misc_feature (455)..(639): Pfam Id: PF00929 Pfam Desc: Exonuclease
  misc_feature (563)..(639): Pfam Id: PF00929 Pfam Desc: Exonuclease
  misc_feature (8)..(668): NCBI GI: 46137583 Blast Desc: FG10307.1 [Gibberella zeae PH-1]
  misc_feature (8)..(666): NCBI GI: 256732233 Blast Desc: [Nectria haematococca mpVI 77-13-4]
  misc_feature (1)..(668): NCBI GI: 39976137 Blast Desc: MGG_06005 [Magnaporthe grisea 70-15] gi|145011721|gb|EDJ96377.1| MGG_06005 [Magnaporthe grisea 70-15]
  misc_feature (6)..(666): NCBI GI: 116197707 Blast Desc: CHGG_07009 [Chaetomium globosum CBS 148.51] gi|88178288|gb|EAQ85756.1| CHGG_07009 [Chaetomium globosum CBS 148.51]
  misc_feature (7)..(666): NCBI GI: 85099564 Blast Desc: NCU08945 [Neurospora crassa OR74A] gi|28922337|gb|EAA31576.1| conserved [Neurospora crassa OR74A] gi|28950147|emb|CAD71005.1| conserved [Neurospora crassa]
  misc_feature (1)..(680): NCBI GI: 171694341 Blast Desc: protein product [Podospora anserina] gi|170947119|emb|CAP73924.1| protein product [Podospora anserina]
  misc_feature (174)..(666): NCBI GI: 261352070 Blast Desc: RNA exonuclease [Verticillium albo-atrum VaMs.102]
  misc_feature (1)..(657): NCBI GI: 121705930 Blast Desc: RNA exonuclease Rex3, [Aspergillus clavatus NRRL 1] gi|119399374|gb|EAW09802.1| RNA exonuclease Rex3, [Aspergillus clavatus NRRL 1]
  misc_feature (1)..(680): NCBI GI: 169766594 Blast Desc: [Aspergillus oryzae RIB40] gi|83765623|dbj|BAE55766.1| protein product [Aspergillus oryzae]
  misc_feature (1)..(666): NCBI GI: 145233135 Blast Desc: An02g08070 [Aspergillus niger] gi|134056866|emb|CAK37770.1| protein product [Aspergillus niger]
MAGSLAVLKNLECPAGDTCTAFQCLFKHARDDQPANNEGSASHTDIHPTESVSRSQPSRSRSAASHVESSAHIEQDTPRKRVKIDPTSNSRAQLSSAISSPQKLGASEQRKVALNPTSATITKNGSPKSSTRMTTALAQVKPQSSDQQTSAQKALDVTASTPDKNIVTAKVIKPKQTNKQSETLNPRLLKKAPSSHSTRVALVKALHKEYERLNNEVKKTAKDGDAKKLLLSDQELIVKTLDDEQDIALKNTAIYNTKIRNLIMRYKKMPVSDWEAERIKAVQEKDPGSTKSTTTAPLATIETGLTTQQEIKFLPQLAWDLSALAIYGYVSTIPSDDDIAAAKAGVATSRNTESCDRCTRRFQTFPGRREEDGALASNGSCTFHPGKRYYIDNAPGDRSKPKQKYRCCHRDIDDDSGGCTTAPTHVFKTTDPKRLAAILNFVKTPVNPAVPKDRAVGFDCEMGYTVYGLELIRMTLVSWPDGEELLDILVQPVGELLDPNTRYSGVTAEAMATAERYKVGGDHKPTIIPSPDSSKQPLRKLKIAPSPEIARDLLFSIVSAETPLIGHGLENDLNATRIIHPKCIDTVLLFPHKRGLPVRNGLKYLMETKLGRRIQMDPTEGSPEGHDSAEDARAAGDLVRLKIRDEWKSKQMKGWTLGADGEIVAPAQEWTIVGGAKVKRPGF

SEQ ID NO: 30892 - DNA, 1525 bp, Muscodor strobelii
  misc_feature: SGI EST ID NO. CUFF.73164.0
  misc_feature: Variant of the nucleotide sequence at SEQ ID NO 30890
gtgcaggaaaaggaccctggcagcacgaagtcaacgactaccgcacctctcgctactattgagacaggactcaccacacaacaggagatcaagtttctcccgcaacttgcttgggacctgagcgcattggctatctatggctatgtctcgactatcccctccgatgatgatatcgcagctgcaaaagctggcgtcgcaacatcacgaaacacagagagttgcgatcggtgcacgcgacgctttcagacctttcctggccgcagagaagaagacggtgccttggcatctaatggatcatgtacattccatccgggcaagcgatattacatcgacaatgcgcccggagacagatctaagccgaagcagaagtatcgctgctgccacagagatatcgacgatgactcagggggatgcactacggcgccaacccatgtcttcaagacaaccgatccgaagagacttgctgctatcttaaactttgttaagactcctgtaaatcctgccgtgcccaaggaccgtgctgttggcttcgattgtgaaatgggctacacagtctacggtttagagctcatccgcatgaccttggtatcttggccagacggagaggagctccttgacatcctggtccagcctgtcggcgaattattggaccccaatacccgctactcaggggtcacagctgaagcaatggctacggccgagcgctacaaagtcggcggcgaccacaaacctacgataatcccttcgcctgactcctctaaacaacctctgcgcaaactcaagatcgcaccttcacccgagatcgcccgagacctcctcttcagcatagtcagtgccgagaccccacttatcggccatggtctcgagaacgacttgaatgcaacacgcatcattcacccgaaatgcatcgacaccgtccttcttttcccgcacaagcgtggtctgccagtacgcaatggattgaagtacctgatggagacaaaactcggacggcggatccagatggatcccacggaaggatcgcccgagggccatgacagcgcggaggatgctcgtgctgcgggagatcttgttcgacttaagatccgtgatgagtggaagtcaaagcagatgaaaggatggacattgggagctgatggagaaatcgttgctcctgcgcaggagtggacgattgttggtggtgcgaaggtcaagagacctggattttaggaagcgattcaaggttcttcgccaagcaccaggaacaagagcagaaactaagaaggaattactaacatacaacagcggacggagctcgcggaggaactcacgtctccaggagcagcgaaataactgtattgcatttgacagggcgatctcaattgctgtcgagggcgcaagatcacgttcgacgcaagacaaagacaaagcagctatcgacacagtcaagcagagactcagatgattaaactagtatagttactgagcgacatcgtagccgtcactgctgatccagctcttgatagctaggttatgaagcaaattc

SEQ ID NO: 30893 - DNA, 1440 bp, Muscodor strobelii
  misc_feature: SGI cDNA ID NO. 570631
  misc_feature: Encodes the peptide sequence at SEQ ID NO 30894
atggtagtttccaagcaggctgctacgtcgaatcaaaccatagatgatgtagctacgacatttcccatcaaccgagatccttccgccatagtcaaattctcggaagatgatcctacgtttcttcttgggtctctgaaagatgccgagctcaactggagacatgagaacatcgaagaaaagtccagtttcacctccgaatggatctatgacaacgagaggattaagggcacactgcgtgcaagactcacatcgtatgtctggacccagcagcagcttgggaaggcacttcgcctaatactgcaacagcagtcagaagagctgcacatccgctttgttctcgatgcattagacgagtttgcaggatcaccagagattattgccgattttctagacgatgttctagaggaagggaatgctggaaagacaacaataaagatatgtttctcgagtcggccttgggatgttttttcaagaaaatttcaccgcagcttaggttttgccacccatgaccataccgccgcagacatcaagcattactgctaccatgtcatcggtcaagctagaaaacagctttcagagctcgagcagcagcttagagcactcccaccgaccctccgcgaatattacgaagagatcctgaacagatgtccagtcacgctcagggaccaggcatatgtgcttctagaggttgtcacccgcagtctcgagtcgttagatgtctccaaggctcgcatcgaacaacatcgcatcgaagcacccgagtctcaaaaatctgcatacgaaggatctacaatagaagatcccatcagcattcatttcaagcaagccgaacttactacaggggaagatcaatcgaatttcctgaaaagcatacccacactctttctgattgctgacgcgcctagctacatcacccgagatactacaaatgctacgttctggtttgcactgcgccatgggcttcatttgtctctcaagaaactactaatggatttggacaacgagatcgtgacgcgactcttcaaggagtttctgttacgcggcaaattcctaaatatttcgaaatgggacgactttgcaatatctctagatttgcttcagaacaatggcatggattttgacggctgtctgcagagcacgttcggcgccctgccttgggctcgcggacggaactttcggggcgggttaccgcgccaagctacttacggtgcgtgggagaaagcacaacaatttcttttgcccattgaaacccacgagaaggccaaccagcaagcccaaatggaaatacaaatggaaatacgaagatcacacacacaagaaatgatgtctaggttctcgactgtccgggacgttctaccgcctgaacctcagcaacctgagcaacagatcactcgcttaataagaaacttccagaaattttacgggaaggacgaaaactag

SEQ ID NO: 30894 - protein, 479 aa, Muscodor strobelii
  misc_feature: SGI Peptide ID NO. 570631
  misc_feature (80)..(234): NCBI GI: 116198787 Blast Desc: CHGG_07549 [Chaetomium globosum CBS 148.51] gi|88178828|gb|EAQ86296.1| CHGG_07549 [Chaetomium globosum CBS 148.51]
  misc_feature (91)..(233): NCBI GI: 116191799 Blast Desc: CHGG_05617 [Chaetomium globosum CBS 148.51] gi|88181530|gb|EAQ88998.1| CHGG_05617 [Chaetomium globosum CBS 148.51]
  misc_feature (87)..(197): NCBI GI: 169768460 Blast Desc: [Aspergillus oryzae RIB40] gi|238497764|ref|XP_002380117.1| conserved [Aspergillus flavus NRRL3357] gi|83766558|dbj|BAE56698.1| protein product oryzae]
  misc_feature (102)..(233): NCBI GI: 116201887 Blast Desc: CHGG_08828 [Chaetomium globosum CBS 148.51] gi|88177346|gb|EAQ84814.1| CHGG_08828 [Chaetomium globosum CBS 148.51]
  misc_feature (87)..(179): NCBI GI: 46139445 Blast Desc: FG11237.1 [Gibberella zeae PH-1]
  misc_feature (87)..(205): NCBI GI: 46111055 Blast Desc: FG02409.1 [Gibberella zeae PH-1]
  misc_feature (87)..(179): NCBI GI: 256732148 Blast Desc: NECHADRAFT_93635 [Nectria haematococca mpVI 77-13-4]
  misc_feature (82)..(179): NCBI GI: 238501160 Blast Desc: conserved [Aspergillus flavus NRRL3357] gi|220692051|gb|EED48398.1| conserved [Aspergillus flavus NRRL3357]
  misc_feature (87)..(179): NCBI GI: 256721251 Blast Desc: NECHADRAFT_34792 [Nectria haematococca mpVI 77-13-4]
  misc_feature (83)..(181): NCBI GI: 261190024 Blast Desc: conserved [Ajellomyces dermatitidis SLH14081] gi|239591250|gb|EEQ73831.1| conserved [Ajellomyces dermatitidis SLH14081]
MVVSKQAATSNQTIDDVATTFPINRDPSAIVKFSEDDPTFLLGSLKDAELNWRHENIEEKSSFTSEWIYDNERIKGTLRARLTSYVWTQQQLGKALRLILQQQSEELHIRFVLDALDEFAGSPEIIADFLDDVLEEGNAGKTTIKICFSSRPWDVFSRKFHRSLGFATHDHTAADIKHYCYHVIGQARKQLSELEQQLRALPPTLREYYEEILNRCPVTLRDQAYVLLEVVTRSLESLDVSKARIEQHRIEAPESQKSAYEGSTIEDPISIHFKQAELTTGEDQSNFLKSIPTLFLIADAPSYITRDTTNATFWFALRHGLHLSLKKLLMDLDNEIVTRLFKEFLLRGKFLNISKWDDFAISLDLLQNNGMDFDGCLQSTFGALPWARGRNFRGGLPRQATYGAWEKAQQFLLPIETHEKANQQAQMEIQMEIRRSHTQEMMSRFSTVRDVLPPEPQQPEQQITRLIRNFQKFYGKDEN

SEQ ID NO: 30895 - DNA, 2058 bp, Muscodor strobelii
  misc_feature: SGI cDNA ID NO. 570632
  misc_feature: Encodes the peptide sequence at SEQ ID NO 30896
atggcgccccgtctatttgagctgctcggtctcggaaataagcacggttatcctggcaagaaatttctgtcgcgcacggcaggagagattcgcctcttgtcgctcaagactatttccgatgagagactcgactgtaggttggaaaacattgttgtgacatctcatggtgaccgatgcgagcatccgcgttacgatgcggtgtcttatagatggggcgatactgccgaccccaaggtcatgtattgcaatggtgtcgcgttcactgttcaacgcagcctgtactttgcactcacgtacatatggacgaacgatcccaacatatcgctttgggtcgatgcaatctgcattgatcagacttccttaagtgagatttctgatcagatcagacttatgagcatcatataccaggaagctcgtcaggtgatcatctggctcggcgaagctgaccgcgacaccccgctcgcgtggaaaacgttgctgaacatcgcatctctcgacaaacaccttgcccccagcgaagtgcgtcgtcaaatgtctttttgggggccactcgaagacatttgcttctccctacacaatcttggtcggcgagaatggttctacagggcctggacattccaggagttgcatctagcaaatcgtgggacagtcttctgttccgaatggcaaatgagctgggacatatttctcggcgctttgaagtcgtttacgagtattctacaagatagtgctccctcggaacattctacgagggcaaaagacacgctcaataagcttcttgcttctgttgaaacatacgggtctttaacactcacagatcttctcgttaggacggtttaccgagattgtgatgagccgcatgacaagatcaacgctttacatggtgttttgtttagaaaaaaggggattcagtttctaacgaaatctttgaccggcgattatagcgtgagcccggaaccattctacactacaattgcgcgtgccctagctactcgagcagaatggactgagccggaacgcgaggtttccatgccactcgatctcaatatcctgcatggagccgggttggacacgcaccatcggagataccagaccacgtggtataagaatcccaaagtgaacaagaaactgggattgcttccttcctgggtggctgattggaccgacacagaagctactgcatcttggggagacaaaacgtatatcagacggtctaagtggaggccaatcatcagaatcgaaggcctgagactaggagccgcagtaaacgcaaatgctagaggtatcgaagaacgagagctccatgtgtacggcgtcgttattgcccgtctactgccatctgccgagtttgcgcccacgaagagagctaccatactcaaaaccgataccagaatgcattttcaagagtttcctcgctgtgtatacggcagcacttcaaagtcatgcgaaccattcgagaatgagtacgcaagatggactgcctcggcccccctcgaagaggaactccgatatcccagtaagcctgcgactttcattttcgacccgtcaagtgttttgcatggattgacatcccacgatcggggcaaatgcatatgttcgcgagcaccatatcagaagactattctggcggcagccattgccctcgccgtatcgctgctcttcagattcttgcgtataggggcttttatgtatgtgtgctggtctttgtttacggacgcccagatacagcgtggcaagccggcgagcaaattcagcttggagatgacggcttcgcgagaacgtccaacggtcgctgcgcctggcgattggattgtcgcacttgcgggtgaacaaggactattcctacttaaaccaacgaaagacggcaaattccaggtcgtccgtggtttgcttgacgaggctggggtttcgccagccatgaaggtgtccagaatcaatgatgaaggtgcaacaatgactggttgggtttctgaattcgtcgatcaagatggcaacccgtcgactactccatcgtggcaggactttcgcgtcttcctagtccgcttgagaattatatga

SEQ ID NO: 30896 - protein, 685 aa, Muscodor strobelii
  misc_feature: SGI Peptide ID NO. 570632
  misc_feature (64)..(208): Pfam Id: PF06985 Pfam Desc: Heterokaryon incompatibility protein (HET)
  misc_feature (109)..(150): Pfam Id: PF06985 Pfam Desc: Heterokaryon incompatibility protein (HET)
  misc_feature (28)..(454): NCBI GI: 256722564 Blast Desc: NECHADRAFT_49740 [Nectria haematococca mpVI 77-13-4]
  misc_feature (27)..(390): NCBI GI: 115449831 Blast Desc: [Aspergillus terreus NIH2624] gi|114187656|gb|EAU29356.1| [Aspergillus terreus NIH2624]
  misc_feature (29)..(318): NCBI GI: 256721216 Blast Desc: NECHADRAFT_101059 [Nectria haematococca mpVI 77-13-4]
  misc_feature (60)..(387): NCBI GI: 189211862 Blast Desc: conserved [Pyrenophora tritici-repentis Pt-1C-BFP] gi|187979458|gb|EDU46084.1| conserved [Pyrenophora tritici-repentis Pt-1C-BFP]
  misc_feature (29)..(494): NCBI GI: 39976177 Blast Desc: MGG_05985 [Magnaporthe grisea 70-15] gi|145011741|gb|EDJ96397.1| MGG_05985 [Magnaporthe grisea 70-15]
  misc_feature (17)..(297): NCBI GI: 168042194 Blast Desc: [Physcomitrella patens subsp. patens] gi|162675113|gb|EDQ61612.1| [Physcomitrella patens subsp. patens]
  misc_feature (29)..(441): NCBI GI: 67538668 Blast Desc: AN5504.2 [Aspergillus nidulans FGSC A4] gi|40743474|gb|EAA62664.1| AN5504.2 [Aspergillus nidulans FGSC A4] gi|259485046|tpe|CBF81783.1| TPA: HET domain protein nidulans
  misc_feature (30)..(325): NCBI GI: 238508078 Blast Desc: AFLA_009950 [Aspergillus flavus NRRL3357] gi|220688759|gb|EED45111.1| AFLA_009950 [Aspergillus flavus NRRL3357]
  misc_feature (6)..(413): NCBI GI: 145237892 Blast Desc: An07g05100 [Aspergillus niger] gi|134076070|emb|CAK39429.1| protein product [Aspergillus niger]
  misc_feature (62)..(327): NCBI GI: 46120346 Blast Desc: FG04820.1 [Gibberella zeae PH-1]
MAPRLFELLGLGNKHGYPGKKFLSRTAGEIRLLSLKTISDERLDCRLENIVVTSHGDRCEHPRYDAVSYRWGDTADPKVMYCNGVAFTVQRSLYFALTYIWTNDPNISLWVDAICIDQTSLSEISDQIRLMSIIYQEARQVIIWLGEADRDTPLAWKTLLNIASLDKHLAPSEVRRQMSFWGPLEDICFSLHNLGRREWFYRAWTFQELHLANRGTVFCSEWQMSWDIFLGALKSFTSILQDSAPSEHSTRAKDTLNKLLASVETYGSLTLTDLLVRTVYRDCDEPHDKINALHGVLFRKKGIQFLTKSLTGDYSVSPEPFYTTIARALATRAEWTEPEREVSMPLDLNILHGAGLDTHHRRYQTTWYKNPKVNKKLGLLPSWVADWTDTEATASWGDKTYIRRSKWRPIIRIEGLRLGAAVNANARGIEERELHVYGVVIARLLPSAEFAPTKRATILKTDTRMHFQEFPRCVYGSTSKSCEPFENEYARWTASAPLEEELRYPSKPATFIFDPSSVLHGLTSHDRGKCICSRAPYQKTILAAAIALAVSLLFRFLRIGAFMYVCWSLFTDAQIQRGKPASKFSLEMTASRERPTVAAPGDWIVALAGEQGLFLLKPTKDGKFQVVRGLLDEAGVSPAMKVSRINDEGATMTGWVSEFVDQDGNPSTTPSWQDFRVFLVRLRII

SEQ ID NO: 30897 - DNA, 1734 bp, Muscodor strobelii
  misc_feature: SGI cDNA ID NO. 570633
  misc_feature: Reduced expression when VOC is produced
  misc_feature: Encodes the peptide sequence at SEQ ID NO 30898
atggcaaacacaatcaagcttgccgactatctattcgcccgactaaagcagctaggcatactggcagtccacggcgtcccaggcgactttaacctgactctcttggactacgtcgagccagcgggtctactctgggtcggcaacgctaatgagttgaacgcggggtatgcggcggacggctatgcacggataaaaggcattggtgcactcatcacgaccttcggtgtcggcgagctatcggcaatcaatgcgatagctggcgcgtatgccgagcgcgcaccggtcgtccacatcgtgggcacgcccgatcgtgcgacgcaggacggcaaacgccgtgtccaccacactttcaacgatggcgagttcgggcgctttgcgaagatggctgtccatgtcactgctgcgcaaacagacttaagggacccgcggacgagtccagagcagattgatcacgtgttgctacaatgcattctgcagagccggccggtatacatctcgatccccgttgacatggtgggagcacccgttgcggcggatcgactcgagcaagtcccgatctgccgacctctcactgcgtcgaccccgtataacaccggcgtggtagatgcgatactcgagaagatatatgcagcgaagcagcctatgattcttgtcgatggagagacacgcgctcttggcatcgtcccggacgttcagaagttggtcgacattacaggatggccgacttggttaaccgctttcagctggggtcttgtcaatcagacatctcgtaatgtccatggtatatggacggggatgtttgacgatgagaaagtgaagacttttgtcaatgatgttgacctcatcttgtgctttggaccgcatttcagcaccacgaacagctattcccagtcatcaatgcctaaggcacatcagaataccatatacgtgacggacacggagattagacttcagggccaagaggaacagatattcagagacatacctgcaactttcttcatctctcaattgcttgaaaagctgaaacccgaagcagcagcgagttgctactcaactacgtacccagatcttcccaatcgacagctcaacggtacctcttccggtgtatcatataaagacgactcggccattacgcaggcgtcattctggcccatgatcgagggtatcgtccagaaaggggacatcctactcggcgagacgggcagcgccgggcatggatgccgaattttctcattgcctgaaagagtgagaacattccttcccgtgacatggttatcaatcggatatatgctcggtgcgacgcaaggagcggcacttgctctccgagagatgcaaaaaggcggtcgcaccattctcttcataggcgacgggagtttccagatgacggtacaggagttaggtacgatcattcggcataatctcgatgtcactgtaatattgctcaataacgacggctacacgatcgagcgtgtgattcatggattgaaacagaaatacaacgatgtcgcggcttggagatacacacaagcgcctagcttttttggtgcgaataacacgtttaccgctacggctaggacttgtggcgagctgaagcaggtcttgctgtctggtgaactgacaaaaggctcaggtttgaagatgttagaagttatcatgcagcgtgaggatgtccctgcaggccctctacagtggttactcgatagacaaacagaaacagagggttcaaagaagtag

SEQ ID NO: 30898 - protein, 577 aa, Muscodor strobelii
  misc_feature: SGI Peptide ID NO. 570633
  misc_feature (399)..(550): Pfam Id: PF02775 Pfam Desc: Thiamine pyrophosphate enzyme, C-terminal TPP binding domain
  misc_feature (201)..(337): Pfam Id: PF00205 Pfam Desc: Thiamine pyrophosphate enzyme, central domain
  misc_feature (5)..(180): Pfam Id: PF02776 Pfam Desc: Thiamine pyrophosphate enzyme, N-terminal TPP binding domain
  misc_feature (421)..(486): Pfam Id: PF02775 Pfam Desc: Thiamine pyrophosphate enzyme, C-terminal TPP binding domain
  misc_feature (201)..(296): Pfam Id: PF00205 Pfam Desc: Thiamine pyrophosphate enzyme, central domain
  misc_feature (4)..(572): NCBI GI: 145241548 Blast Desc: An09g01030 [Aspergillus niger] gi|134077959|emb|CAK49024.1| protein product [Aspergillus niger]
  misc_feature (1)..(574): NCBI GI: 256723809 Blast Desc: NECHADRAFT_59608 [Nectria haematococca mpVI 77-13-4]
  misc_feature (4)..(569): NCBI GI: 169778530 Blast Desc: [Aspergillus oryzae RIB40] gi|238499085|ref|XP_002380777.1| pyruvate decarboxylase, [Aspergillus flavus NRRL3357] gi|83772468|dbj|BAE62597.1| protein
  misc_feature (2)..(577): NCBI GI: 70981398 Blast Desc: pyruvate decarboxylase [Aspergillus fumigatus Af293] gi|66843850|gb|EAL84191.1| pyruvate decarboxylase, [Aspergillus fumigatus Af293] gi|159122698|gb|EDP47819.1| pyruvate fumigatus
  misc_feature (3)..(576): NCBI GI: 121704274 Blast Desc: pyruvate decarboxylase, [Aspergillus clavatus NRRL 1] gi|119398545|gb|EAW08975.1| pyruvate decarboxylase, [Aspergillus clavatus NRRL 1]
  misc_feature (3)..(577): NCBI GI: 119467089 Blast Desc: pyruvate decarboxylase, [Neosartorya fischeri NRRL 181] gi|119405503|gb|EAW15454.1| pyruvate decarboxylase, [Neosartorya fischeri NRRL 181]
  misc_feature (1)..(573): NCBI GI: 255942449 Blast Desc: Pc18g01490 [Penicillium chrysogenum Wisconsin 54-1255] gi|211586726|emb|CAP94373.1| Pc18g01490 [Penicillium chrysogenum Wisconsin 54-1255]
  misc_feature (4)..(576): NCBI GI: 169763628 Blast Desc: [Aspergillus oryzae RIB40] gi|83770742|dbj|BAE60875.1| protein product [Aspergillus oryzae]
  misc_feature (4)..(576): NCBI GI: 238489573 Blast Desc: pyruvate decarboxylase, [Aspergillus flavus NRRL3357] gi|220698412|gb|EED54752.1| pyruvate decarboxylase, [Aspergillus flavus NRRL3357]
  misc_feature (4)..(574): NCBI GI: 67902818 Blast Desc: AN8396.2 [Aspergillus nidulans FGSC A4] gi|40747862|gb|EAA67018.1| AN8396.2 [Aspergillus nidulans FGSC A4]
  misc_feature (4)..(576): SWISSPROT Homolog: EC 4.1.1.1 Pyruvate decarboxylase
  misc_feature: Useful for introducing or modulating the production of volatile compounds
  misc_feature: Useful for fungicidal and/or biocontrol applications
  misc_feature: Useful for production of fusel alcohols
MANTIKLADYLFARLKQLGILAVHGVPGDFNLTLLDYVEPAGLLWVGNANELNAGYAADGYARIKGIGALITTFGVGELSAINAIAGAYAERAPVVHIVGTPDRATQDGKRRVHHTFNDGEFGRFAKMAVHVTAAQTDLRDPRTSPEQIDHVLLQCILQSRPVYISIPVDMVGAPVAADRLEQVPICRPLTASTPYNTGVVDAILEKIYAAKQPMILVDGETRALGIVPDVQKLVDITGWPTWLTAFSWGLVNQTSRNVHGIWTGMFDDEKVKTFVNDVDLILCFGPHFSTTNSYSQSSMPKAHQNTIYVTDTEIRLQGQEEQIFRDIPATFFISQLLEKLKPEAAASCYSTTYPDLPNRQLNGTSSGVSYKDDSAITQASFWPMIEGIVQKGDILLGETGSAGHGCRIFSLPERVRTFLPVTWLSIGYMLGATQGAALALREMQKGGRTILFIGDGSFQMTVQELGTIIRHNLDVTVILLNNDGYTIERVIHGLKQKYNDVAAWRYTQAPSFFGANNTFTATARTCGELKQVLLSGELTKGSGLKMLEVIMQREDVPAGPLQWLLDRQTETEGSKK

SEQ ID NO: 30899 - DNA, 846 bp, Muscodor strobelii
  misc_feature: SGI cDNA ID NO. 570634
  misc_feature: Reduced expression when VOC is produced
  misc_feature: Encodes the peptide sequence at SEQ ID NO 30900
atggacgccctgacgagaagactgggccagtacgccgtcggcctgttcatcggcgcttcggtgtggcaagccagcatctacgatgttcgcggcggcacgcgcgctgttatcttcgacagactacagggtgtgagagaggaggtcatcagcgagggcacacacttcttagtaccatacctgcagaagaagatcttgtttgatgtacggacgaagccccgaaacatcgccaccacgaccggctccaaggatctccagatggtcagcttgaccctccgagtgctgcacaggccagaggtccagaacctgcccaagatctaccagaacctcggcaccgactacgacgagcgtgtgctcccctccatcggcaacgaggtcctcaagtccatcgtcgcgcagttcgacgccgccgagctcatcacccagcgcgaggccgtctcccagcgcatccgccaggacctgacccgccgcgccaaggagttcaacatcgccctcgaggacgtctccatcacccacatgaccttcggcaaggagttcaccaaggccgtcgagcagaagcagatcgcccagcaggacgccgagcgcgcccgcttcatcgtcgagaaggccgagcaggagcgccaggccaacgtcatccgcgccgagggcgaggccgagtccgccgacaccatctccaaggccatcgccaagttcggcgacggcctcatcatgatccgcaagatcgaggcgtcgagggagattgcccagacgctcgccacgaaccccaacgtctcctacttgccgggtagcaataagcaaggcggtggaagcggtgggagcagtctcttgctctccgtaggaagggcgtaa

SEQ ID NO: 30900 - protein, 281 aa, Muscodor strobelii
  misc_feature: SGI Peptide ID NO. 570634
  misc_feature (27)..(206): Pfam Id: PF01145 Pfam Desc: SPFH domain / Band 7 family
  misc_feature (1)..(280): NCBI GI: 261352069 Blast Desc: prohibitin-1 [Verticillium albo-atrum VaMs.102]
  misc_feature (10)..(278): NCBI GI: 119181211 Blast Desc: conserved [Coccidioides immitis RS] gi|240108912|gb|EER27081.1| SPFH domain / Band 7 family protein [Coccidioides posadasii C735 delta SOWgp]
  misc_feature (8)..(281): NCBI GI: 164423754 Blast Desc: NCU08946 [Neurospora crassa OR74A] gi|157070222|gb|EAA31577.2| NCU08946 [Neurospora crassa OR74A]
  misc_feature (1)..(281): NCBI GI: 28950148 Blast Desc: prohibitin PHB1 [Neurospora crassa]
  misc_feature (10)..(276): NCBI GI: 258572550 Blast Desc: prohibitin [Uncinocarpus reesii 1704] gi|237905307|gb|EEP79708.1| prohibitin [Uncinocarpus reesii 1704]
  misc_feature (23)..(281): NCBI GI: 145603508 Blast Desc: conserved [Magnaporthe grisea 70-15] gi|145011722|gb|EDJ96378.1| conserved [Magnaporthe grisea 70-15]
  misc_feature (10)..(278): NCBI GI: 226277842 Blast Desc: prohibitin-1 [Paracoccidioides brasiliensis Pb01]
  misc_feature (8)..(260): NCBI GI: 156044834 Blast Desc: SS1G_10521 [Sclerotinia sclerotiorum 1980] gi|154694909|gb|EDN94647.1| SS1G_10521 [Sclerotinia sclerotiorum 1980]
  misc_feature (10)..(278): NCBI GI: 225561146 Blast Desc: prohibitin [Ajellomyces capsulatus G186AR]
  misc_feature (8)..(260): NCBI GI: 154289954 Blast Desc: prohibitin [Botryotinia fuckeliana B05.10] gi|150848538|gb|EDN23731.1| prohibitin [Botryotinia fuckeliana B05.10]
  misc_feature: Useful for introducing or modulating the production of volatile compounds
MDALTRRLGQYAVGLFIGASVWQASIYDVRGGTRAVIFDRLQGVREEVISEGTHFLVPYLQKKILFDVRTKPRNIATTTGSKDLQMVSLTLRVLHRPEVQNLPKIYQNLGTDYDERVLPSIGNEVLKSIVAQFDAAELITQREAVSQRIRQDLTRRAKEFNIALEDVSITHMTFGKEFTKAVEQKQIAQQDAERARFIVEKAEQERQANVIRAEGEAESADTISKAIAKFGDGLIMIRKIEASREIAQTLATNPNVSYLPGSNKQGGGSGGSSLLLSVGRA

SEQ ID NO: 30901 - DNA, 1315 bp, Muscodor strobelii
  misc_feature: SGI EST ID NO. CUFF.73293.1
  misc_feature: Variant of the nucleotide sequence at SEQ ID NO 30899
gctgattcggagcttcgattgcacctcgacttttggaacttccgagagctccataccttagccgtccagagtacatctgagcaaccgacacctgcaactctaaacaatctctcgactctgcaccacctccgactattccaccggtgcaatatccagtcagtagagttgcatgagaacacagtcatagtactcccaacatggacgccctgacgagaagactgggccagtacgccgtcggcctgttcatcggcgcttcggtgtggcaagccagcatctacgatgttcgcggcggcacgcgcgctgttatcttcgacagactacagggtgtgagagaggaggtcatcagcgagggcacacacttcttagtaccatacctgcagaagaagatcttgtttgatgtacggacgaagccccgaaacatcgccaccacgaccggctccaaggatctccagatggtcagcttgaccctccgagtgctgcacaggccagaggtccagaacctgcccaagatctaccagaacctcggcaccgactacgacgagcgtgtgctcccctccatcggcaacgaggtcctcaagtccatcgtcgcgcagttcgacgccgccgagctcatcacccagcgcgaggccgtctcccagcgcatccgccaggacctgacccgccgcgccaaggagttcaacatcgccctcgaggacgtctccatcacccacatgaccttcggcaaggagttcaccaaggccgtcgagcagaagcagatcgcccagcaggacgccgagcgcgcccgcttcatcgtcgagaaggccgagcaggagcgccaggccaacgtcatccgcgccgagggcgaggccgagtccgccgacaccatctccaaggccatcgccaagttcggcgacggcctcatcatgatccgcaagatcgaggcgtcgagggagattgcccagacgctcgccacgaaccccaacgtctcctacttgccgggtagcaataagcaaggcggtggaagcggtgggagcagtctcttgctctccgtaggaagggcgtaaggagagaaggagtgtacgatgtaggcgtgggaagtatatgggaatatcagaaaatgaggtaggcgtgtgtactacctcttgtacattaggaaactcacccgatctccactcgggagtatgattaatatgtgctattatcatgtggaacacgagaagaaagcgttgaaaatgtgctgtgctgcttggcaagatcgttaaatttcctcatgtgcctcgacattatattccacatactccaaactagcttttgcaagcctcatcctcgatacgca

SEQ ID NO: 30902 - DNA, 318 bp, Muscodor strobelii
  misc_feature: SGI cDNA ID NO. 570635
  misc_feature: Reduced expression when VOC is produced
  misc_feature: Encodes the peptide sequence at SEQ ID NO 30903
atgcgtcctacacaagctctccgcggcggcggcgatatcgaggtcggcaagtacggcaaacttctcggcggctggggccacttcggcggccgtccccagaagggcatcgtgacgtacgccatgagccccaacaagcagaacccctttgccggcgccggccacgatgccgtcttcaacacctggcgccgcttcagcaagcaggtcctctacgtcgctccccccttgatcttcttctactacgccatggactgggccacccacagaaaccactacctcaactccaagcaaggccgcaaggagtatgctggctcggaataa

SEQ ID NO: 30903 - protein, 105 aa, Muscodor strobelii
  misc_feature: SGI Peptide ID NO. 570635
  misc_feature (24)..(103): Pfam Id: PF02939 Pfam Desc: UcrQ family
  misc_feature (1)..(105): NCBI GI: 156044832 Blast Desc: SS1G_10520 [Sclerotinia sclerotiorum 1980] gi|154694908|gb|EDN94646.1| SS1G_10520 [Sclerotinia sclerotiorum 1980]
  misc_feature (1)..(105): NCBI GI: 154289952 Blast Desc: ubiquinol-cytochrome c reductase complex ubiquinone-binding protein [Botryotinia fuckeliana B05.10] gi|150848537|gb|EDN23730.1| ubiquinol-cytochrome c reductase
  misc_feature (1)..(105): NCBI GI: 171694337 Blast Desc: protein product [Podospora anserina] gi|170947117|emb|CAP73922.1| protein product [Podospora anserina]
  misc_feature (1)..(105): NCBI GI: 85099572 Blast Desc: ubiquinol-cytochrome-C oxidoreductase complex III subunit VIII, 11kD protein of the UcrQ family [Neurospora crassa OR74A] gi|1351364|sp|P48503.1|QCR8_NEUCR RecName: Full=Cytochrome
  misc_feature (1)..(105): NCBI GI: 39976141 Blast Desc: MGG_06003 [Magnaporthe grisea 70-15] gi|145011723|gb|EDJ96379.1| MGG_06003 [Magnaporthe grisea 70-15]
  misc_feature (1)..(105): NCBI GI: 256732232 Blast Desc: [Nectria haematococca mpVI 77-13-4]
  misc_feature (1)..(105): NCBI GI: 261352068 Blast Desc: cytochrome b-c1 complex subunit 8 [Verticillium albo-atrum VaMs.102]
  misc_feature (1)..(105): NCBI GI: 46137579 Blast Desc: FG10305.1 [Gibberella zeae PH-1]
  misc_feature (10)..(105): NCBI GI: 119181209 Blast Desc: CIMG_05742 [Coccidioides immitis RS] gi|240108911|gb|EER27080.1| Ubiquinol-cytochrome C reductase complex ubiquinone-binding proteinQP-C precursor , [Coccidioides
  misc_feature (17)..(105): NCBI GI: 238489155 Blast Desc: ubiquinol-cytochrome C reductase complex subunit UcrQ, [Aspergillus flavus NRRL3357] gi|220698203|gb|EED54543.1| ubiquinol-cytochrome C reductase complex subunit UcrQ, flavus
  misc_feature: Useful for introducing or modulating the production of volatile compounds
MRPTQALRGGGDIEVGKYGKLLGGWGHFGGRPQKGIVTYAMSPNKQNPFAGAGHDAVFNTWRRFSKQVLYVAPPLIFFYYAMDWATHRNHYLNSKQGRKEYAGSE

SEQ ID NO: 30904 - DNA, 701 bp, Muscodor strobelii
  misc_feature: SGI EST ID NO. CUFF.73326.0
  misc_feature: Variant of the nucleotide sequence at SEQ ID NO 30902
caggcggctaacctaattcagacaggtgctcgagccagcagcgagacatcgtcaatttcgagatcgcgagctccatcatccaacactcacttccaatcctctgcgacacgatcaatcgaccccaattgactccaacatccttgtcaattgcacctctcccccacaatgcgtcctacacaagctctccgcggcggcggcgatatcgaggtcggcaagtacggcaaacttctcggcggctggggccacttcggcggccgtccccagaagggcatcgtgacgtacgccatgagccccaacaagcagaacccctttgccggcgccggccacgatgccgtcttcaacacctggcgccgcttcagcaagcaggtcctctacgtcgctccccccttgatcttcttctactacgccatggactgggccacccacagaaaccactacctcaactccaagcaaggccgcaaggagtatgctggctcggaataaaggcagagctgggataccggagtgtagacaaaaaccttgtacatcaatagactggcgtgccgacaagcgcaattatgatacaataccattccctatgttcaacaactcattactgcaatgtttcgatgatttgtagactaccattgcgttgaaaatgacagtgtgtagtatggttattttctttcttatccgacacggccatccctccacgtccagag

SEQ ID NO: 30905 - DNA, 585 bp, Muscodor strobelii
  misc_feature: SGI cDNA ID NO. 570636
  misc_feature: Encodes the peptide sequence at SEQ ID NO 30906
atggcctccaaagccgtagccaaagctgtaggcggcgtcatccccgtcagccagaaacaaaccctccagtccgtcggaatctgggagcgcgtccgccgtgtcttcgccgtagaccccaaccgctcctccggcgtcccccttaacccctacttccgcaatcccacccccggtgctctcgaccctctcacctacgacgaccccgtcaccatccctgccggagacatcgcagataatccctactggaagcgcgacgtgcgccgtgcctacccgcgactcagctacgtcaaccagagcgatgccgtggctctgctctccgtcggaagcgctgcggccccgaaacaggagttgattggggatgcgggcaagaagcaacttgttgccgttcaggaggagggcgagggtggattggctgtcttctttgagaagaatgggaaggctgggttggagacgcttgttgatggattaccgccgttgcccagtggtcagagggtgaagacagatggaaagtgggaggcgtataagtatgatttgacggagcagagctatccggatcaagatacatacccgtgccgaactttccagtag

SEQ ID NO: 30906 - protein, 194 aa, Muscodor strobelii
  misc_feature: SGI Peptide ID NO. 570636
  misc_feature (1)..(194): NCBI GI: 85099504 Blast Desc: NADH:ubiquinone oxidoreductase 21.3kD subunit 21.3a [Neurospora crassa OR74A] gi|67477356|sp|P19968.2|NUZM_NEUCR RecName: Full=NADH-ubiquinone oxidoreductase 21.3 kDa subunit
  misc_feature (1)..(194): NCBI GI: 168779 Blast Desc: complex I 29/21-kDa subunit (EC 1.6.5.3) [Neurospora crassa]
  misc_feature (1)..(193): NCBI GI: 28950133 Blast Desc: NADH dehydrogenase (ubiquinone) 29/21K chain precursor [Neurospora crassa]
  misc_feature (11)..(194): NCBI GI: 39972405 Blast Desc: conserved [Magnaporthe grisea 70-15] gi|59802942|gb|AAX07675.1| NADH-ubiquinone oxidoreductase-like protein [Magnaporthe grisea] gi|145016699|gb|EDK01129.1| grisea
  misc_feature (3)..(194): NCBI GI: 46137563 Blast Desc: FG10297.1 [Gibberella zeae PH-1]
  misc_feature (1)..(194): NCBI GI: 256731840 Blast Desc: [Nectria haematococca mpVI 77-13-4]
  misc_feature (7)..(193): NCBI GI: 115400837 Blast Desc: NADH-ubiquinone oxidoreductase 21.3 kDa subunit [Aspergillus terreus NIH2624] gi|114191673|gb|EAU33373.1| NADH-ubiquinone oxidoreductase 21.3 kDa subunit [Aspergillus
  misc_feature (1)..(194): NCBI GI: 154310242 Blast Desc: BC1G_07041 [Botryotinia fuckeliana B05.10] gi|150851602|gb|EDN26795.1| BC1G_07041 [Botryotinia fuckeliana B05.10]
  misc_feature (1)..(182): NCBI GI: 116197689 Blast Desc: NADH-ubiquinone oxidoreductase [Chaetomium globosum CBS 148.51] gi|88178279|gb|EAQ85747.1| NADH-ubiquinone oxidoreductase [Chaetomium globosum CBS 148.51]
  misc_feature (13)..(194): NCBI GI: 156059432 Blast Desc: SS1G_03728 [Sclerotinia sclerotiorum 1980] gi|154701515|gb|EDO01254.1| SS1G_03728 [Sclerotinia sclerotiorum 1980]
  misc_feature (14)..(194): SWISSPROT Homolog: EC 1.6.5.3 NADH dehydrogenase (ubiquinone)
  misc_feature (14)..(194): SWISSPROT Homolog: EC 1.6.99.3 NADH dehydrogenase
MASKAVAKAVGGVIPVSQKQTLQSVGIWERVRRVFAVDPNRSSGVPLNPYFRNPTPGALDPLTYDDPVTIPAGDIADNPYWKRDVRRAYPRLSYVNQSDAVALLSVGSAAAPKQELIGDAGKKQLVAVQEEGEGGLAVFFEKNGKAGLETLVDGLPPLPSGQRVKTDGKWEAYKYDLTEQSYPDQDTYPCRTFQ

SEQ ID NO: 30907 - DNA, 1865 bp, Muscodor strobelii
  misc_feature: SGI EST ID NO. CUFF.73203.0
  misc_feature: Variant of the nucleotide sequence at SEQ ID NO 30905
ggacaacgtcacgttcagcaacaatctcccctctccacaccgccatcatggcctccaaagccgtagccaaagctgtaggcggcgtcatccccgtcagccagaaacaaaccctccagtccgtcggaatctgggagcgcgtccgccgtgtcttcgccgtagaccccaaccgctcctccggcgtcccccttaacccctacttccgcaatcccacccccggtgctctcgaccctctcacctacgacgaccccgtcaccatccctgccggagacatcgcagataatccctactggaagcgcgacgtgcgccgtgcctacccgcgactcagctacgtcaaccagagcgatgccgtggctctgctctccgtcggaagcgctgcggccccgaaacaggagttgattggggatgcgggcaagaagcaacttgttgccgttcaggaggagggcgagggtggattggctgtcttctttgagaagaatgggaaggctgggttggagacgcttgttgatggattaccgccgttgcccagtggtcagagggtgaagacagatggaaagtgggaggcgtataagtatgatttgacggagcagagctatccggatcaagatacatacccgtgccgaactttccagtagagaatacgaaagagggagggtgtaagagagaatgaagtggcattagagaagagggactttgtacatatccagagaacgggacaccaaacaaatcacacatcactagattccctagagtctgagcctgggctcaacaacagagaggcgtttcttgagttcacagatcagcttacgatgaagatttgcctctcacctccgcataaatgtccattacgatgcttagtggctatttgatcaaactagccatctatgctcatcacgcaggttttcctcaatttctcctctccgtactaatcgtcgtcccccgtgtcctatgcaataatttcaacaccctcagatctcattcttacccaccacacccgaaactgtccctccaccaccgctccccgtccctcccccaactccagatcctttgccatgcgcaccctccccgatagcgcgctcaataatcctgactttgccctgtgcgcccttcaacctactatcaaaatcattaacagcctcatcgtcattcttcgtagatagcgtcccaggctcgacaagtccgtacagcgtcgtgatgttcttctctagtctcgcattgctcttaatcggcggcagagtcctatctggcgcgtttggtagttcctctggagctgcgtccttggcctgtgaagcattttcttctcgcttctcttgatctattatctcctcatcgcctttctctatcttctcatccttctcatttccttccgtgcgttgagtcttgacttgcgccttccgtcgtagagccggaacgcgattcgcccagatcgtcgccttactccttaatcgtcctgcctcgacgaatttctcgaacccctttgtgagacctagtgagtatccctctagtcggccggcttcggctccgtctgcgagtccggcggtgtagccttcgttgtagtattgttcttcgaggttgagtagctcgtcgaagtcgaagagatcttcttgtggcattttattgaatgttggctgcgattttgagatgtggagaggtaagcaattgtgaaggtggaagttttgtactgttttgagggtgaaactgagtgttggtcacctgggggtgtgagttttgaggccgagctagattggtgatacaaaatgagggcagtagttggcgttctagggaaccacaatgaagcctacgactgtgttttgagggtttcaagctgctagtttgatttcgttggattttgtatgcgtttatctgag

SEQ ID NO: 30908 - DNA, 645 bp, Muscodor strobelii
  misc_feature: SGI cDNA ID NO. 570637
  misc_feature: Encodes the peptide sequence at SEQ ID NO 30909
atgccacaagaagatctcttcgacttcgacgagctactcaacctcgaagaacaatactacaacgaaggctacaccgccggactcgcagacggagccgaagccggccgactagagggatactcactaggtctcacaaaggggttcgagaaattcgtcgaggcaggacgattaaggagtaaggcgacgatctgggcgaatcgcgttccggctctacgacggaaggcgcaagtcaagactcaacgcacggaaggaaatgagaaggatgagaagatagagaaaggcgatgaggagataatagatcaagagaagcgagaagaaaatgcttcacaggccaaggacgcagctccagaggaactaccaaacgcgccagataggactctgccgccgattaagagcaatgcgagactagagaagaacatcacgacgctgtacggacttgtcgagcctgggacgctatctacgaagaatgacgatgaggctgttaatgattttgatagtaggttgaagggcgcacagggcaaagtcaggattattgagcgcgctatcggggagggtgcgcatggcaaaggatctggagttgggggagggacggggagcggtggtggagggacagtttcgggtgtggtgggtaagaatgagatctga

SEQ ID NO: 30909 - protein, 214 aa, Muscodor strobelii
  misc_feature: SGI Peptide ID NO. 570637
  misc_feature (9)..(109): Pfam Id: PF08215 Pfam Desc: Eukaryotic domain of function (DUF1715)
  misc_feature (9)..(69): Pfam Id: PF08215 Pfam Desc: Eukaryotic domain of function (DUF1715)
  misc_feature (3)..(190): NCBI GI: 46137565 Blast Desc: FG10298.1 [Gibberella zeae PH-1]
  misc_feature (9)..(184): NCBI GI: 145609313 Blast Desc: MGG_07505 [Magnaporthe grisea 70-15] gi|145016700|gb|EDK01130.1| MGG_07505 [Magnaporthe grisea 70-15]
  misc_feature (13)..(192): NCBI GI: 261352082 Blast Desc: conserved [Verticillium albo-atrum VaMs.102]
  misc_feature (9)..(203): NCBI GI: 156043245 Blast Desc: SS1G_10625 [Sclerotinia sclerotiorum 1980] gi|154695013|gb|EDN94751.1| SS1G_10625 [Sclerotinia sclerotiorum 1980]
  misc_feature (9)..(185): NCBI GI: 256732228 Blast Desc: NECHADRAFT_80618 [Nectria haematococca mpVI 77-13-4]
  misc_feature (9)..(203): NCBI GI: 154316458 Blast Desc: BC1G_04160 [Botryotinia fuckeliana B05.10] gi|150845960|gb|EDN21153.1| BC1G_04160 [Botryotinia fuckeliana B05.10]
  misc_feature (9)..(184): NCBI GI: 255939614 Blast Desc: Pc16g02030 [Penicillium chrysogenum Wisconsin 54-1255] gi|211585199|emb|CAP92873.1| Pc16g02030 [Penicillium chrysogenum Wisconsin 54-1255]
  misc_feature (7)..(194): NCBI GI: 240110001 Blast Desc: CPC735_035060 [Coccidioides posadasii C735 delta SOWgp]
  misc_feature (9)..(184): NCBI GI: 189196446 Blast Desc: PTRG_04228 [Pyrenophora tritici-repentis Pt-1C-BFP] gi|187980440|gb|EDU47066.1| PTRG_04228 [Pyrenophora tritici-repentis Pt-1C-BFP]
  misc_feature (9)..(184): NCBI GI: 119496183 Blast Desc: NFIA_016640 [Neosartorya fischeri NRRL 181] gi|119413027|gb|EAW22968.1| conserved [Neosartorya fischeri NRRL 181]
MPQEDLFDFDELLNLEEQYYNEGYTAGLADGAEAGRLEGYSLGLTKGFEKFVEAGRLRSKATIWANRVPALRRKAQVKTQRTEGNEKDEKIEKGDEEIIDQEKREENASQAKDAAPEELPNAPDRTLPPIKSNARLEKNITTLYGLVEPGTLSTKNDDEAVNDFDSRLKGAQGKVRIIERAIGEGAHGKGSGVGGGTGSGGGGTVSGVVGKNEI

SEQ ID NO: 30910 - DNA, 534 bp, Muscodor strobelii
  misc_feature: SGI cDNA ID NO. 570638
  misc_feature: Encodes the peptide sequence at SEQ ID NO 30911
atgcaatgcgccaccgactcgagtgtcgcccacatatatcttgttaacaagctgataatagcccttgatgggttttccgatgccggtgtcatagcattccctatcgtcatcacttggcgaacgaaactgagcttacgccaaaagctagtcctctccagtgtattcttgctggccgccttcacgatcattgtaacaatcatacgaggaagtatctttggtgcagtctacaagaacgcgaaagaggcggatcgcaaggtgtttgatactgcatgggtgttattctggctatacgtggaatatttcgtatcgttccttatcaactgcatcatttcattccgttcgttgtgggtggcccagaggcaaaaggcgaaggacgatgcattggagcgcgataaacaacgacaagctatcgaagctggacacatgaagaatggtccccaacctagatggcgagttttgaggcgaagtatactggatacgcttgcgcaacttgagggcactgtgcttgaacaagacgacgcagatttcatgtag

SEQ ID NO: 30911 - protein, 177 aa, Muscodor strobelii
  misc_feature: SGI Peptide ID NO. 570638
  misc_feature (2)..(156): NCBI GI: 255940532 Blast Desc: Pc16g07010 [Penicillium chrysogenum Wisconsin 54-1255] gi|211585658|emb|CAP93371.1| Pc16g07010 [Penicillium chrysogenum Wisconsin 54-1255]
  misc_feature (2)..(103): NCBI GI: 116204309 Blast Desc: [Chaetomium globosum CBS 148.51] gi|88176166|gb|EAQ83634.1| [Chaetomium globosum CBS 148.51]
  misc_feature (2)..(175): NCBI GI: 154305703 Blast Desc: BC1G_07666 [Botryotinia fuckeliana B05.10] gi|150853185|gb|EDN28377.1| BC1G_07666 [Botryotinia fuckeliana B05.10]
  misc_feature (2)..(148): NCBI GI: 171681283 Blast Desc: protein product [Podospora anserina] gi|170940600|emb|CAP65828.1| protein product [Podospora anserina]
  misc_feature (1)..(146): NCBI GI: 242813625 Blast Desc: conserved [Talaromyces stipitatus ATCC 10500] gi|218714543|gb|EED13966.1| conserved [Talaromyces stipitatus ATCC 10500]
  misc_feature (2)..(145): NCBI GI: 145246718 Blast Desc: An12g05390 [Aspergillus niger] gi|134080329|emb|CAK46251.1| protein product [Aspergillus niger]
  misc_feature (2)..(148): NCBI GI: 156031118 Blast Desc: SS1G_14167 [Sclerotinia sclerotiorum 1980] gi|154700558|gb|EDO00297.1| SS1G_14167 [Sclerotinia sclerotiorum 1980]
  misc_feature (21)..(174): NCBI GI: 226291345 Blast Desc: [Paracoccidioides brasiliensis Pb18]
  misc_feature (21)..(174): NCBI GI: 226285870 Blast Desc: [Paracoccidioides brasiliensis Pb01]
  misc_feature (21)..(174): NCBI GI: 225679610 Blast Desc: [Paracoccidioides brasiliensis Pb03]
MQCATDSSVAHIYLVNKLIIALDGFSDAGVIAFPIVITWRTKLSLRQKLVLSSVFLLAAFTIIVTIIRGSIFGAVYKNAKEADRKVFDTAWVLFWLYVEYFVSFLINCIISFRSLWVAQRQKAKDDALERDKQRQAIEAGHMKNGPQPRWRVLRRSILDTLAQLEGTVLEQDDADFM

SEQ ID NO: 30912 - DNA, 979 bp, Muscodor strobelii
  misc_feature: SGI EST ID NO. CUFF.73238.0
  misc_feature: Variant of the nucleotide sequence at SEQ ID NO 30910
ggcgaacgaaactgagcttacgccaaaagctagtcctctccagtgtattcttgctggccgccttcacgatcattgtaacaatcatacgaggaagtatctttggtgcagtctacaagaacgcgaaagaggcggatcgcaaggtgtttgatactgcatgggtgttattctggctatacgtggaatatttcgtatcgttccttatcaactgcatcatttcattccgttcgttgtgggtggcccagaggcaaaaggcgaaggacgatgcattggagcgcgataaacaacgacaagctatcgaagctggacacatgaagaatggtccccaacctagatggcgagttttgaggcgaagtatactggatacgcttgcgcaacttgagggcactgtgcttgaacaagacgacgcagatttcatgtagatgcacccccaattggatgatggtgatttctcccacttgggtaatttcctacatcctgatctctgcactaaaatgttctttggttctaggtagtgtctcaatgggtttcgcgttattaatgatgtatcggaaatagtgagcgaattcctggtggaagagttagtataatactatgagctaggtagagtagagatgtatcattgatctcatgcgcaaagatcagccttgatttcctggcgtaggatgcgtcacaatcaatgaacctttgagcgaagactcgacaaaaaaatcatcaaatctgatgatgctgttcacacgctcctattctagcatagtgtctctaatgacgcatgtcgccttttcctctagtggagcataagcattcctccattggcacagacgacctgtcccgtacaccacgcggcatcctcgccaaccaacatggcgacgatacctgcgatctcatggacatagcctggtcgtccgccgctcgtcttggcgtcttcgactagctcaggggcatcgatgcctggccgtgcgcgcatgaggggagcgtgctc

SEQ ID NO: 30913 - DNA, 855 bp, Muscodor strobelii
  misc_feature: SGI cDNA ID NO. 570639
  misc_feature: Encodes the peptide sequence at SEQ ID NO 30914
atggctcgaacactcgagggaaagcttgccattgtgaccggtggctcgagaggcatcggagaagcaatagccattaagctcgcctcatacggcgcaaacctagtgataggctacacctcagagtcctccaagacgagcgcagaatctctagccacagacctcgcgagcaaacacaacatacaaactctggctattcaagcagatcttggaactatcgaaggtcccaagcaactcatctcgaccgcaaagtcaaccaccaagctccagaagccaaatggcactttccagatcgacatcctcgtcaacaacgccggcgtagctaagaacgatctcctacctgccataaagcctgaagatttcgacttcacctaccgcgtcaacgttttgggtcccttacttgttacacaggcagcagaaccatatctcccgaaagatagatccgggcggattgtgaacttgtctagtgttagctcgtcgactggcttcattgagcagagtgtatatggggggaccaaagctgcgctggaggcaatgaccaggacgtggtcacgcgagctttccgagagagccacggtcaatgctattaatcctgggccggttttgggtcctatgtattccgccaacagcgacgagttcaagcgggaaatcaagggctggatcgagcacgctcccctcatgcgcgcacggccaggcatcgatgcccctgagctagtcgaagacgccaagacgagcggcggacgaccaggctatgtccatgagatcgcaggtatcgtcgccatgttggttggcgaggatgccgcgtggtgtacgggacaggtcgtctgtgccaatggaggaatgcttatgctccactag

SEQ ID NO: 30914 - protein, 284 aa, Muscodor strobelii
  misc_feature: SGI Peptide ID NO. 570639
  misc_feature (8)..(187): Pfam Id: PF00106 Pfam Desc: short chain dehydrogenase
  misc_feature (11)..(203): Pfam Id: PF08659 Pfam Desc: KR domain
  misc_feature (97)..(187): Pfam Id: PF00106 Pfam Desc: short chain dehydrogenase
  misc_feature (1)..(282): NCBI GI: 261352061 Blast Desc: 3-oxoacyl-[acyl-carrier-protein] reductase [Verticillium albo-atrum VaMs.102]
  misc_feature (1)..(282): NCBI GI: 145609301 Blast Desc: MGG_13404 [Magnaporthe grisea 70-15] gi|145016687|gb|EDK01117.1| MGG_13404 [Magnaporthe grisea 70-15]
  misc_feature (1)..(282): NCBI GI: 116197691 Blast Desc: CHGG_07001 [Chaetomium globosum CBS 148.51] gi|88178280|gb|EAQ85748.1| CHGG_07001 [Chaetomium globosum CBS 148.51]
  misc_feature (1)..(283): NCBI GI: 46137565 Blast Desc: FG10298.1 [Gibberella zeae PH-1]
  misc_feature (1)..(284): NCBI GI: 85099556 Blast Desc: NCU08943 [Neurospora crassa OR74A] gi|28922335|gb|EAA31574.1| NCU08943 [Neurospora crassa OR74A] gi|28950145|emb|CAD71003.1| related to reductase [Neurospora
  misc_feature (1)..(282): NCBI GI: 256732228 Blast Desc: NECHADRAFT_80618 [Nectria haematococca mpVI 77-13-4]
  misc_feature (1)..(284): NCBI GI: 171694321 Blast Desc: protein product [Podospora anserina] gi|170947109|emb|CAP73914.1| protein product [Podospora anserina]
  misc_feature (3)..(282): NCBI GI: 154316412 Blast Desc: BC1G_04137 [Botryotinia fuckeliana B05.10] gi|150845937|gb|EDN21130.1| BC1G_04137 [Botryotinia fuckeliana B05.10]
  misc_feature (3)..(282): NCBI GI: 156043199 Blast Desc: SS1G_10602 [Sclerotinia sclerotiorum 1980] gi|154694990|gb|EDN94728.1| SS1G_10602 [Sclerotinia sclerotiorum 1980]
  misc_feature (3)..(280): NCBI GI: 189196532 Blast Desc: 3-oxoacyl-(acyl-carrier-protein) reductase 1 [Pyrenophora tritici-repentis Pt-1C-BFP] gi|187980483|gb|EDU47109.1| 3-oxoacyl-(acyl-carrier-protein) 1
  misc_feature (8)..(282): SWISSPROT Homolog: EC 1.1.1.100 3-oxoacyl-[acyl-carrier-protein] reductase
MARTLEGKLAIVTGGSRGIGEAIAIKLASYGANLVIGYTSESSKTSAESLATDLASKHNIQTLAIQADLGTIEGPKQLISTAKSTTKLQKPNGTFQIDILVNNAGVAKNDLLPAIKPEDFDFTYRVNVLGPLLVTQAAEPYLPKDRSGRIVNLSSVSSSTGFIEQSVYGGTKAALEAMTRTWSRELSERATVNAINPGPVLGPMYSANSDEFKREIKGWIEHAPLMRARPGIDAPELVEDAKTSGGRPGYVHEIAGIVAMLVGEDAAWCTGQVVCANGGMLMLH

SEQ ID NO: 30915 - DNA, 1406 bp, Muscodor strobelii
  misc_feature: SGI EST ID NO. CUFF.73239.1
  misc_feature: Variant of the nucleotide sequence at SEQ ID NO 30913
gctcgagaggcatcggagaagcaatagccattaagctcgcctcatacggcgcaaacctagtgataggctacacctcagagtcctccaagacgagcgcagaatctctagccacagacctcgcgagcaaacacaacatacaaactctggctattcaagcagatcttggaactatcgaaggtcccaagcaactcatctcgaccgcaaagtcaaccaccaagctccagaagccaaatggcactttccagatcgacatcctcgtcaacaacgccggcgtagctaagaacgatctcctacctgccataaagcctgaagatttcgacttcacctaccgcgtcaacgttttgggtcccttacttgttacacaggcagcagaaccatatctcccgaaagatagatccgggcggattgtgaacttgtctagtgttagctcgtcgactggcttcattgagcagagtgtatatggggggaccaaagctgcgctggaggcaatgaccaggacgtggtcacgcgagctttccgagagagccacggtcaatgctattaatcctgggccggttttgggtcctatgtattccgccaacagcgacgagttcaagcgggaaatcaagggctggatcgagcacgctcccctcatgcgcgcacggccaggcatcgatgcccctgagctagtcgaagacgccaagacgagcggcggacgaccaggctatgtccatgagatcgcaggtatcgtcgccatgttggttggcgaggatgccgcgtggtgtacgggacaggtcgtctgtgccaatggaggaatgcttatgctccactagaggaaaaggcgacatgcgtcattagagacactatgctagaataggagcgtgtgaacagcatcatcagatttgatgatttttttgtcgagtcttcgctcaaaggttcattgattgtgacgcatcctacgccaggaaatcaaggctgatctttgcgcatgagatcaatgatacatctctactctacctagctcatagtattatactaactcttccaccaggaattcgctcactatttccgatacatcattaataacgcgaaacccattgagacactacctagaaccaaagaacattttagtgcagagatcaggatgtaggaaattacccaagtgggagaaatcaccatcatccaattgggggtgcatctacatgaaatctgcgtcgtcttgttcaagcacagtgccctcaagttgcgcaagcgtatccagtatacttcgcctcaaaactcgccatctaggttggggaccattcttcatgtgtccagcttcgatagcttgtcgttgtttatcgcgctccaatgcatcgtccttcgccttttgcctctgggccacccacaacgaacggaatgaaatgatgcagttgataaggaacgct

SEQ ID NO: 30916 - DNA, 681 bp, Muscodor strobelii
  misc_feature: SGI cDNA ID NO. 570640
  misc_feature: Encodes the peptide sequence at SEQ ID NO 30917
atggatatccgacgcctcgagctctcggacatcccgctgattcagcatgccaacctcgagaacttgcccgagaactacttcatgaagtactatctctaccatgccctgtcctggccccagctcagctacgttgccgtcgatgtctcccgtcccaagtccacgccctacgactaccccaagattgtcggctatgtcctcgccaagatggaggaggagccctctgacggcatccctcacggccacatcacatcgttgtctgtcatgcgcacccaccgcagactcggcattgctgagaagctgatgcgccagagccaacttgccatggtcgagaccttcggtgccaagtatgtctctctccacgtccgccagtccaacaaagctgccatccacctctacaccaagaccctcggcttcgaccaggagaagaccgagtcatcctactatgccgacggtgaagatgcctacagcatgaagctcgacttgtctgagatcaaagcccagatcgaagccgctgaggattctgaagaagatctggacgagggagagcccgtcggtgaggctggcagcaagaaggcagacctcgccatacgtgagaaggagaaggatctcaagaaggtcaaggtcggtagagcactcggcgtccagggtctagtcgagaaggacgagagcaagcattcttag

SEQ ID NO: 30917 - protein, 226 aa, Muscodor strobelii
  misc_feature: SGI Peptide ID NO. 570640
  misc_feature (56)..(139): Pfam Id: PF00583 Pfam Desc: Acetyltransferase (GNAT) family
  misc_feature (60)..(139): Pfam Id: PF00583 Pfam Desc: Acetyltransferase (GNAT) family
  misc_feature (1)..(224): NCBI GI: 261352062 Blast Desc: N-terminal acetyltransferase A complex catalytic subunit ard1 [Verticillium albo-atrum VaMs.102]
  misc_feature (1)..(225): NCBI GI: 171694323 Blast Desc: protein product [Podospora anserina] gi|170947110|emb|CAP73915.1| protein product [Podospora anserina]
  misc_feature (1)..(224): NCBI GI: 39972389 Blast Desc: MGG_07496 [Magnaporthe grisea 70-15] gi|145016688|gb|EDK01118.1| MGG_07496 [Magnaporthe grisea 70-15]
  misc_feature (1)..(225): NCBI GI: 85099560 Blast Desc: NCU08944 [Neurospora crassa OR74A] gi|28922336|gb|EAA31575.1| NCU08944 [Neurospora crassa OR74A] gi|28950146|emb|CAD71004.1| related to N-terminal complex subunit
  misc_feature (1)..(225): NCBI GI: 256731841 Blast Desc: [Nectria haematococca mpVI 77-13-4]
  misc_feature (1)..(222): NCBI GI: 156043197 Blast Desc: SS1G_10601 [Sclerotinia sclerotiorum 1980] gi|154694989|gb|EDN94727.1| SS1G_10601 [Sclerotinia sclerotiorum 1980]
  misc_feature (1)..(225): NCBI GI: 46137567 Blast Desc: FG10299.1 [Gibberella zeae PH-1]
  misc_feature (1)..(223): NCBI GI: 154316410 Blast Desc: BC1G_04136 [Botryotinia fuckeliana B05.10] gi|150845936|gb|EDN21129.1| BC1G_04136 [Botryotinia fuckeliana B05.10]
  misc_feature (1)..(223): NCBI GI: 189195704 Blast Desc: N-acetyltransferase complex ARD1 subunit [Pyrenophora tritici-repentis Pt-1C-BFP] gi|187980069|gb|EDU46695.1| N-acetyltransferase complex ARD1 subunit [Pyrenophora Pt-1C-BFP]
  misc_feature (1)..(222): NCBI GI: 169604098 Blast Desc: SNOG_05059 [Phaeosphaeria nodorum SN15] gi|160706504|gb|EAT87450.2| SNOG_05059 [Phaeosphaeria nodorum SN15]
  misc_feature (1)..(165): SWISSPROT Homolog: EC 2.3.1.88 Peptide alpha-N-acetyltransferase
MDIRRLELSDIPLIQHANLENLPENYFMKYYLYHALSWPQLSYVAVDVSRPKSTPYDYPKIVGYVLAKMEEEPSDGIPHGHITSLSVMRTHRRLGIAEKLMRQSQLAMVETFGAKYVSLHVRQSNKAAIHLYTKTLGFDQEKTESSYYADGEDAYSMKLDLSEIKAQIEAAEDSEEDLDEGEPVGEAGSKKADLAIREKEKDLKKVKVGRALGVQGLVEKDESKHS

SEQ ID NO: 30918 - DNA, 2111 bp, Muscodor strobelii
  misc_feature: SGI EST ID NO. CUFF.73274.0
  misc_feature: Variant of the nucleotide sequence at SEQ ID NO 30916
cttctcagccagttgttatttgtcaagatcagtcctgatgaaagagaatattactgatacaagtgacacttcagagcagtatgataacagaaaagaccgatagacttgaaatgtgatatgaattgtgaaagtgaagctcagaatgcagagatgaaagctagttcagtcttgtagaatacaacactatcctaagtcgtcctcaaggtggcacgaaacatagctttatataaatcctccaatcgaacaaaccgagaaccgacatccccgtgatcgactaattctccgattgtgcagtcaataaatcgagctgttattcaggagaatgccccgcattggagtatatttggagtgggcgaagtgggagcttaagtgggataggggtgggagtgggagttctttggcggtgatgtggacaatgtttcgagtcgaagcagcagacttaccccgcgctagacccgatggccattagcgtgagcccaccatcaacagctccagggtgaattcggcggaaggtgtcccgccatccgacctttgtcgtgctttcttaatcgtgcgcttctcattgaatggagctgcaattcacttggattcacacgctattgactccaccgtgtttctgcaatgacatcggaatagcggcttggtcgcattacagctgtgtcgatacaaacgctctgccttgcagatccaacgccgcggttacaggactcgaccatcagcccctgcagattgtgccctgcacctgttgccgtgtccagagatagtctagagcatcaagaggctgtcgcatctgagcttgcggtcctgtcccaccacatcacatctctcccgcgatatacatcccgctccacacacaagacacgatggatatccgacgcctcgagctctcggacatcccgctgattcagcatgccaacctcgagaacttgcccgagaactacttcatgaagtactatctctaccatgccctgtcctggccccagctcagctacgttgccgtcgatgtctcccgtcccaagtccacgccctacgactaccccaagattgtcggctatgtcctcgccaagatggaggaggagccctctgacggcatccctcacggccacatcacatcgttgtctgtcatgcgcacccaccgcagactcggcattgctgagaagctgatgcgccagagccaacttgccatggtcgagaccttcggtgccaagtatgtctctctccacgtccgccagtccaacaaagctgccatccacctctacaccaagaccctcggcttcgaccaggagaagaccgagtcatcctactatgccgacggtgaagatgcctacagcatgaagctcgacttgtctgagatcaaagcccagatcgaagccgctgaggattctgaagaagatctggacgagggagagcccgtcggtgaggctggcagcaagaaggcagacctcgccatacgtgagaaggagaaggatctcaagaaggtcaaggtcggtagagcactcggcgtccagggtctagtcgagaaggacgagagcaagcattcttaggcggagtgtacctgtccccatccgctgccgctgcgacagccggagcctaagtctcaacctcaacctcaacctcagtctcaggctcagcctcaagtcaaacatattttgaagaccaatcgtccttaggcaggagctaatcagtctctatatgtcttgaatccccgacgcaacacgaccaggatgccaaatggaggagaggagaaagaggaaaaggggggcggtaagaaggggaagaaggaagaggagaagaccggatatcgtcatgcaggccctacttggagcgagtgtcctcctgctctttggcgttggcgctgatgcattggccagcctacgcatggtggagtgtggggaccaaaaaagggggtaacgtctgtgggatgaggatggcaaaagcacggtgtggttaagacgaaacggttcatgaacttgcatgttgcataaggcgtcgcatcgctgatagataaaaaattcacttgacgataacttgagacgaatgaatgattgccttgtttgtcatagataagtgaataaacggtaggatggacactgaacatgagtgcggcttgc

SEQ ID NO: 30919 - DNA, 1965 bp, Muscodor strobelii
  misc_feature: SGI cDNA ID NO. 570641
  misc_feature: Reduced expression when VOC is produced
  misc_feature: Encodes the peptide sequence at SEQ ID NO 30920
atggagcctcatatcccgaacgaggcaccaccaccatactcggagacagatatatactccgtctctcaccgcacaggaccccaatctcaaccctcacaccactcggacaacgcatcaatcgccccatcctcatcacaaagtaatataatctacacacctccagaatcccccacatcaaccttatcccccaacgtccaggatccattctccccaggctccgcatcagcaaagctctacttcgcgacgcgtcccccgctaccacaaaccctctcacagaatgagataagagtgcaaattaaacacactatcaccatccacaatcatcctctctcgaatgcaacgagaggattagaatatccagcatgggcgccaactcacgacacaacacaccaggattggcggacatttctcaatttcttgcagcctgaacatgctgcacgagttaatggagagattagggagaggaagatacgcgccgctgaccagagcgagagggagagcgtttctgcgcaattaagtgggcttgggactggtgatagaaagggaaatgaagctggtggttatggaggagatgtggaggatgttgttagggagtggaacgaggggttctttggacccagaggcgtgatgatacggattgatgatggcactttcaacagtggtgcgacgaggagtgctgagccggagacacagcagagacaaggcggccgctcgtggtgggcgccttgggcagatgccgcagcttcagccttagccgctagtcagttcgacgggcgtggtggtagaggcggacggggaagaggcagagatcgtgagcaccatggaagagaacgtcgtcgttctcgcagcagttccagctcctcttcctctagctccagttcttccgagtcctcggtcggcagtctacccgattacgacgacctgcgggagtcgcaattgcccatcgcgaggcagtcaatagcagcatggctagcgcaccctgaacaacctgtcacgaaggagggactcaaaagagtgaaagctgagatcaaagccgcgaagcggaataacacttctacttcaatctctggtaacggggccggcggtatatgtcccagcaatagaagtgcagaggatttacgaaaagaagttagagagatgttccagcagttcaagacgctcaagcgcgcacaacgagatgcgagacgcaaggagaagagagagagaagagctgcaaaacgggagaagaaacgggagcggaaacaacatcgaagggaaagacgacataccgaacggcatgcacgcagacatggcggtggaccttttgggggagggatgggtatgggtggccacgttaatgtcccgggtgttcatgtcaacgtcccaggggcaaacgtgagcattccaggtcaacatattcatgcgcatattcctcatgttcaacctccggttatcaatgttcccggcgcaccacaatttccgccggggttcccatttcataacaccgggagaggccgtggtttcggccgttatggccacgatcacgaccaaggacgtggtggcccatggggtcgtaacaaccacggtcccggacgaggcaatttcttcgaaggtggtggattttggggagcgggaagaggaggccgtgggttctgggcacgcggacaagagtctcagccccaggaacaaggtgttcactaccatgagcaggatcgtggtgttagctcaagcagccaagcaaccagttcagcgagagcagaagctctcgagtcgcagatctctgaaaaggctgcgcaagcccaaggcatcgaagagatgattgctgagcaaggaatcgaggctgcgaaaaatggaaaaggcgataagaaaggttgggttgatacggaggcgaagaaacgtcttgaggatcttgagcgagagatggaagaacttggccatgaggttgaaaggattaggttcgaagagcaagagaggcggacaaattga

SEQ ID NO: 30920 - protein, 654 aa, Muscodor strobelii
  misc_feature: SGI Peptide ID NO. 570641
  misc_feature (10)..(425): NCBI GI: 46137569 Blast Desc: FG10300.1 [Gibberella zeae PH-1]
  misc_feature (1)..(214): NCBI GI: 116197695 Blast Desc: CHGG_07003 [Chaetomium globosum CBS 148.51] gi|88178282|gb|EAQ85750.1| CHGG_07003 [Chaetomium globosum CBS 148.51]
  misc_feature (13)..(213): NCBI GI: 256732229 Blast Desc: NECHADRAFT_100637 [Nectria haematococca mpVI 77-13-4]
  misc_feature (9)..(214): NCBI GI: 154300918 Blast Desc: BC1G_10597 [Botryotinia fuckeliana B05.10] gi|150856345|gb|EDN31537.1| BC1G_10597 [Botryotinia fuckeliana B05.10]
  misc_feature (10)..(211): NCBI GI: 145603566 Blast Desc: MGG_05951 [Magnaporthe grisea 70-15] gi|145011780|gb|EDJ96436.1| MGG_05951 [Magnaporthe grisea 70-15]
  misc_feature (299)..(448): NCBI GI: 156043081 Blast Desc: SS1G_10543 [Sclerotinia sclerotiorum 1980] gi|154694931|gb|EDN94669.1| SS1G_10543 [Sclerotinia sclerotiorum 1980]
  misc_feature (299)..(436): NCBI GI: 116197695 Blast Desc: CHGG_07003 [Chaetomium globosum CBS 148.51] gi|88178282|gb|EAQ85750.1| CHGG_07003 [Chaetomium globosum CBS 148.51]
  misc_feature (298)..(431): NCBI GI: 171694327 Blast Desc: protein product [Podospora anserina] gi|170947112|emb|CAP73917.1| protein product [Podospora anserina]
  misc_feature (43)..(214): NCBI GI: 156043081 Blast Desc: SS1G_10543 [Sclerotinia sclerotiorum 1980] gi|154694931|gb|EDN94669.1| SS1G_10543 [Sclerotinia sclerotiorum 1980]
  misc_feature (10)..(213): NCBI GI: 171694327 Blast Desc: protein product [Podospora anserina] gi|170947112|emb|CAP73917.1| protein product [Podospora anserina]
  misc_feature: Useful for introducing or modulating the production of volatile compounds
MEPHIPNEAPPPYSETDIYSVSHRTGPQSQPSHHSDNASIAPSSSQSNIIYTPPESPTSTLSPNVQDPFSPGSASAKLYFATRPPLPQTLSQNEIRVQIKHTITIHNHPLSNATRGLEYPAWAPTHDTTHQDWRTFLNFLQPEHAARVNGEIRERKIRAADQSERESVSAQLSGLGTGDRKGNEAGGYGGDVEDVVREWNEGFFGPRGVMIRIDDGTFNSGATRSAEPETQQRQGGRSWWAPWADAAASALAASQFDGRGGRGGRGRGRDREHHGRERRRSRSSSSSSSSSSSSSESSVGSLPDYDDLRESQLPIARQSIAAWLAHPEQPVTKEGLKRVKAEIKAAKRNNTSTSISGNGAGGICPSNRSAEDLRKEVREMFQQFKTLKRAQRDARRKEKRERRAAKREKKRERKQHRRERRHTERHARRHGGGPFGGGMGMGGHVNVPGVHVNVPGANVSIPGQHIHAHIPHVQPPVINVPGAPQFPPGFPFHNTGRGRGFGRYGHDHDQGRGGPWGRNNHGPGRGNFFEGGGFWGAGRGGRGFWARGQESQPQEQGVHYHEQDRGVSSSSQATSSARAEALESQISEKAAQAQGIEEMIAEQGIEAAKNGKGDKKGWVDTEAKKRLEDLEREMEELGHEVERIRFEEQERRTN

SEQ ID NO: 30921 - DNA, 2476 bp, Muscodor strobelii
  misc_feature: SGI EST ID NO. CUFF.73236.0
  misc_feature: Variant of the nucleotide sequence at SEQ ID NO 30919
cttgaaataaacgctgattcattgagtacttgaagtttttgttgtctcatcttagtttttgacatatctatcctgaaactgaaatcgaagggagtgattgagcagtgtagtgatattcatcgaacgagtcagtcggagacatctcaatcatagtctcgggcataagcatcaggcatcacaccacccaattcacacaacacctcatagatcagcattcaaaagatcaaatcgcactcaatctccaaacttatcaaaaaaatctctcaagccaagaatagatcgcgaaatctggaaatttcagacaagatggagcctcatatcccgaacgaggcaccaccaccatactcggagacagatatatactccgtctctcaccgcacaggaccccaatctcaaccctcacaccactcggacaacgcatcaatcgccccatcctcatcacaaagtaatataatctacacacctccagaatcccccacatcaaccttatcccccaacgtccaggatccattctccccaggctccgcatcagcaaagctctacttcgcgacgcgtcccccgctaccacaaaccctctcacagaatgagataagagtgcaaattaaacacactatcaccatccacaatcatcctctctcgaatgcaacgagaggattagaatatccagcatgggcgccaactcacgacacaacacaccaggattggcggacatttctcaatttcttgcagcctgaacatgctgcacgagttaatggagagattagggagaggaagatacgcgccgctgaccagagcgagagggagagcgtttctgcgcaattaagtgggcttgggactggtgatagaaagggaaatgaagctggtggttatggaggagatgtggaggatgttgttagggagtggaacgaggggttctttggacccagaggcgtgatgatacggattgatgatggcactttcaacagtggtgcgacgaggagtgctgagccggagacacagcagagacaaggcggccgctcgtggtgggcgccttgggcagatgccgcagcttcagccttagccgctagtcagttcgacgggcgtggtggtagaggcggacggggaagaggcagagatcgtgagcaccatggaagagaacgtcgtcgttctcgcagcagttccagctcctcttcctctagctccagttcttccgagtcctcggtcggcagtctacccgattacgacgacctgcgggagtcgcaattgcccatcgcgaggcagtcaatagcagcatggctagcgcaccctgaacaacctgtcacgaaggagggactcaaaagagtgaaagctgagatcaaagccgcgaagcggaataacacttctacttcaatctctggtaacggggccggcggtatatgtcccagcaatagaagtgcagaggatttacgaaaagaagttagagagatgttccagcagttcaagacgctcaagcgcgcacaacgagatgcgagacgcaaggagaagagagagagaagagctgcaaaacgggagaagaaacgggagcggaaacaacatcgaagggaaagacgacataccgaacggcatgcacgcagacatggcggtggaccttttgggggagggatgggtatgggtggccacgttaatgtcccgggtgttcatgtcaacgtcccaggggcaaacgtgagcattccaggtcaacatattcatgcgcatattcctcatgttcaacctccggttatcaatgttcccggcgcaccacaatttccgccggggttcccatttcataacaccgggagaggccgtggtttcggccgttatggccacgatcacgaccaaggacgtggtggcccatggggtcgtaacaaccacggtcccggacgaggcaatttcttcgaaggtggtggattttggggagcgggaagaggaggccgtgggttctgggcacgcggacaagagtctcagccccaggaacaaggtgttcactaccatgagcaggatcgtggtgttagctcaagcagccaagcaaccagttcagcgagagcagaagctctcgagtcgcagatctctgaaaaggctgcgcaagcccaaggcatcgaagagatgattgctgagcaaggaatcgaggctgcgaaaaatggaaaaggcgataagaaaggttgggttgatacggaggcgaagaaacgtcttgaggatcttgagcgagagatggaagaacttggccatgaggttgaaaggattaggttcgaagagcaagagaggcggacaaattgagggacttacatctagtgatcctttggtgtttaggtatgatagctacatgtatggaatgaacaacctccaaatcaccatattggagctttctttacctttagtattcctcttgacacaactatagctactgtctaccaattttgacgagatgcccagtaaagtaaacagttttgaccaagcagatgataataggtcatgcaaggag

SEQ ID NO: 30922 - DNA, 1338 bp, Muscodor strobelii
  misc_feature: SGI cDNA ID NO. 570642
  misc_feature: Reduced expression when VOC is produced
  misc_feature: Encodes the peptide sequence at SEQ ID NO 30923
atgatacggattgatgatggcactttcaacagtggtgcgacgaggagtgctgagccggagacacagcagagacaaggcggccgctcgtggtgggcgccttgggcagatgccgcagcttcagccttagccgctagtcagttcgacgggcgtggtggtagaggcggacggggaagaggcagagatcgtgagcaccatggaagagaacgtcgtcgttctcgcagcagttccagctcctcttcctctagctccagttcttccgagtcctcggtcggcagtctacccgattacgacgacctgcgggagtcgcaattgcccatcgcgaggcagtcaatagcagcatggctagcgcaccctgaacaacctgtcacgaaggagggactcaaaagagtgaaagctgagatcaaagccgcgaagcggaataacacttctacttcaatctctggtaacggggccggcggtatatgtcccagcaatagaagtgcagaggatttacgaaaagaagttagagagatgttccagcagttcaagacgctcaagcgcgcacaacgagatgcgagacgcaaggagaagagagagagaagagctgcaaaacgggagaagaaacgggagcggaaacaacatcgaagggaaagacgacataccgaacggcatgcacgcagacatggcggtggaccttttgggggagggatgggtatgggtggccacgttaatgtcccgggtgttcatgtcaacgtcccaggggcaaacgtgagcattccaggtcaacatattcatgcgcatattcctcatgttcaacctccggttatcaatgttcccggcgcaccacaatttccgccggggttcccatttcataacaccgggagaggccgtggtttcggccgttatggccacgatcacgaccaaggacgtggtggcccatggggtcgtaacaaccacggtcccggacgaggcaatttcttcgaaggtggtggattttggggagcgggaagaggaggccgtgggttctgggcacgcggacaagagtctcagccccaggaacaaggtgttcactaccatgagcaggatcgtggtgttagctcaagcagccaagcaaccagttcagcgagagcagaagctctcgagtcgcagatctctgaaaaggctgcgcaagcccaaggcatcgaagagatgattgctgagcaaggaatcgaggctgcgaaaaatggaaaaggcgataagaaaggttgggttgatacggaggcgaagaaacgtcttgaggatcttgagcgagagatggaagaacttggccatgaggttgaaaggattaggttcgaagagcaagagaggcggacaaattga

SEQ ID NO: 30923 - protein, 445 aa, Muscodor strobelii
  misc_feature: SGI Peptide ID NO. 570642
  misc_feature (90)..(277): NCBI GI: 156043081 Blast Desc: SS1G_10543 [Sclerotinia sclerotiorum 1980] gi|154694931|gb|EDN94669.1| SS1G_10543 [Sclerotinia sclerotiorum 1980]
  misc_feature (90)..(227): NCBI GI: 116197695 Blast Desc: CHGG_07003 [Chaetomium globosum CBS 148.51] gi|88178282|gb|EAQ85750.1| CHGG_07003 [Chaetomium globosum CBS 148.51]
  misc_feature (56)..(216): NCBI GI: 46137569 Blast Desc: FG10300.1 [Gibberella zeae PH-1]
  misc_feature (89)..(222): NCBI GI: 171694327 Blast Desc: protein product [Podospora anserina] gi|170947112|emb|CAP73917.1| protein product [Podospora anserina]
  misc_feature (97)..(212): NCBI GI: 154300918 Blast Desc: BC1G_10597 [Botryotinia fuckeliana B05.10] gi|150856345|gb|EDN31537.1| BC1G_10597 [Botryotinia fuckeliana B05.10]
  misc_feature (93)..(207): NCBI GI: 256732229 Blast Desc: NECHADRAFT_100637 [Nectria haematococca mpVI 77-13-4]
  misc_feature (94)..(179): NCBI GI: 261352063 Blast Desc: conserved [Verticillium albo-atrum VaMs.102]
  misc_feature (90)..(208): NCBI GI: 145603566 Blast Desc: MGG_05951 [Magnaporthe grisea 70-15] gi|145011780|gb|EDJ96436.1| MGG_05951 [Magnaporthe grisea 70-15]
  misc_feature: Useful for introducing or modulating the production of volatile compounds
MIRIDDGTFNSGATRSAEPETQQRQGGRSWWAPWADAAASALAASQFDGRGGRGGRGRGRDREHHGRERRRSRSSSSSSSSSSSSSESSVGSLPDYDDLRESQLPIARQSIAAWLAHPEQPVTKEGLKRVKAEIKAAKRNNTSTSISGNGAGGICPSNRSAEDLRKEVREMFQQFKTLKRAQRDARRKEKRERRAAKREKKRERKQHRRERRHTERHARRHGGGPFGGGMGMGGHVNVPGVHVNVPGANVSIPGQHIHAHIPHVQPPVINVPGAPQFPPGFPFHNTGRGRGFGRYGHDHDQGRGGPWGRNNHGPGRGNFFEGGGFWGAGRGGRGFWARGQESQPQEQGVHYHEQDRGVSSSSQATSSARAEALESQISEKAAQAQGIEEMIAEQGIEAAKNGKGDKKGWVDTEAKKRLEDLEREMEELGHEVERIRFEEQERRTN

SEQ ID NO: 30924 - DNA, 2476 bp, Muscodor strobelii; identical to SEQ ID NO: 30921
  misc_feature: SGI EST ID NO. CUFF.73236.0
  misc_feature: Variant of the nucleotide sequence at SEQ ID NO 30922

SEQ ID NO: 30925 - DNA, 1029 bp, Muscodor strobelii
  misc_feature: SGI cDNA ID NO. 570643
  misc_feature: Encodes the peptide sequence at SEQ ID NO 30926
atgcccatcatcaagtttcttgagacttgtcgaagggaattcaagtcatactcgaggaagaaacctcaaatgtgtatttacgtgcatagttattactatgcttcatcctggcacttccactgcaagttaccggctcgcccccttcggactattcacctcgaggaagaagtgcttagagatctaatcatggatatcgagaattatctacagccttctaccagagttcgctatgtgaagagagatctgccttggcagagaggctatcttctatatggcccacctggcacaggcaagagtactctcgcctgtgttctggctggtcgctatgatttgagcctacatttgctaaggctagacctggttaacgacgataatttggagcgtctgttcaacaatctcccatcccgatccattgtccttatagaggatgtggacgccgccacagtagatcgcgatgatcgcgatgacaacgagaagtcggaggattccagttccacgtcatcgtcatcaagtgtgaccaacaacaagaagaagaaaaagcgcaaaatcgcatgcacactgtcaggtatcctcaacgttcttgatggcgtcggcgcgcaggagggccgtatcgtcatcatgacaactaactacatcgaagaccttgatccagccttaattcgaccaggtcgcatcgacaaacagttctacctcggctatatcacgtttgagtgtgccaagaagatgtttatacgcatgttcgcatccttggagcaaggtgacagcagcaggaaaaagggggctaacgagtctggcgacaacaaatgggccgaaatagagcacttggcttcagagttcgcgaagctggttccgaaagacgcgatgactgctgcagagcttcagggcttctttcagttgaatctcgactcgcccgaagaggcattgaccaagtttgacggctggttggtagggtggtatgagttacgaaagtcgagagaatccccgacatctccgtctccttcggagacttcttcctcgcctgcaaaatga

SEQ ID NO: 30926 - protein, 342 aa, Muscodor strobelii
  misc_feature: SGI Peptide ID NO. 570643
  misc_feature (87)..(292): Pfam Id: PF00004 Pfam Desc: ATPase family associated with various cellular activities (AAA)
  misc_feature (87)..(237): Pfam Id: PF00004 Pfam Desc: ATPase family associated with various cellular activities (AAA)
  misc_feature (2)..(326): NCBI GI: 46110661 Blast Desc: FG02212.1 [Gibberella zeae PH-1]
  misc_feature (2)..(315): NCBI GI: 256724970 Blast Desc: [Nectria haematococca mpVI 77-13-4]
  misc_feature (2)..(315): NCBI GI: 261360566 Blast Desc: mitochondrial chaperone BCS1 [Verticillium albo-atrum VaMs.102]
  misc_feature (2)..(315): NCBI GI: 116191483 Blast Desc: CHGG_05459 [Chaetomium globosum CBS 148.51] gi|88181372|gb|EAQ88840.1| CHGG_05459 [Chaetomium globosum CBS 148.51]
  misc_feature (2)..(315): NCBI GI: 242796075 Blast Desc: metalloprotease m41 ftsh, [Talaromyces stipitatus ATCC 10500] gi|218719311|gb|EED18731.1| metalloprotease m41 ftsh, [Talaromyces stipitatus ATCC 10500]
  misc_feature (2)..(315): NCBI GI: 212536558 Blast Desc: mitochondrial chaperone bcs1, [Penicillium marneffei ATCC 18224] gi|210070834|gb|EEA24924.1| mitochondrial chaperone bcs1, [Penicillium marneffei ATCC 18224]
  misc_feature (2)..(297): NCBI GI: 39941778 Blast Desc: MGG_10738 [Magnaporthe grisea 70-15] gi|145012189|gb|EDJ96845.1| MGG_10738 [Magnaporthe grisea 70-15]
  misc_feature (5)..(315): NCBI GI: 46126333 Blast Desc: FG07544.1 [Gibberella zeae PH-1]
  misc_feature (3)..(315): NCBI GI: 212541735 Blast Desc: mitochondrial chaperone bcs1, [Penicillium marneffei ATCC 18224] gi|210065929|gb|EEA20022.1| mitochondrial chaperone bcs1, [Penicillium marneffei ATCC 18224]
  misc_feature (36)..(326): NCBI GI: 256727737 Blast Desc: NECHADRAFT_1988 [Nectria haematococca mpVI 77-13-4]
MPIIKFLETCRREFKSYSRKKPQMCIYVHSYYYASSWHFHCKLPARPLRTIHLEEEVLRDLIMDIENYLQPSTRVRYVKRDLPWQRGYLLYGPPGTGKSTLACVLAGRYDLSLHLLRLDLVNDDNLERLFNNLPSRSIVLIEDVDAATVDRDDRDDNEKSEDSSSTSSSSSVTNNKKKKKRKIACTLSGILNVLDGVGAQEGRIVIMTTNYIEDLDPALIRPGRIDKQFYLGYITFECAKKMFIRMFASLEQGDSSRKKGANESGDNKWAEIEHLASEFAKLVPKDAMTAAELQGFFQLNLDSPEEALTKFDGWLVGWYELRKSRESPTSPSPSETSSSPAK

SEQ ID NO: 30927 - DNA, 3264 bp, Muscodor strobelii
  misc_feature: SGI cDNA ID NO. 570644
  misc_feature: Encodes the peptide sequence at SEQ ID NO 30928
atggcaacaacgcattccgagatagcccgttggcagaatgacttacttcccaatattgtcgacagaatagctcgtgacgcaccgagcacctcgtacggtctttggccgatcgtgtcgaagtcatatgatcagggatatcaaaccattacctatgcacagttcgcgaatgccgtcaatgcgttagcatggtggattgagaataaccttggccctggaaagggggacatttttgcttatgtcgggcccaacgatctgcgtctaactgcgttgcttattgcagctatcaagacaaactatgttattttctttccgtcgccgcgaaatagcgcagcagcacataatgcattgctcgagagtctcaagtgcaagatattcataacgacttctcctgtaccgcccgcggctctcacgattcttgaggctgccaacccgcgcatgttcactattcccgatgcccagcagctgcttgaacagacgtatgagcagtatagatgtgaaaggacttacgaggaaaattgccgagagcctgcttgggccatactcattgtagacagacacacatcggggtcaacaggtttcccgaaaccaatcatttggacgttggaagcaatttctcggcaccataacggcacgaacgtggcgccacctgaggggatccgatctcttgatcatttccagcgtggaaagagagtcttgacgacgttacccccgtttcatgtatgccaattcactcttgacggcctgtatattctgtcaggcatcccatttggcagcataccaattgcgcctgttgcgacggcaattcctacggctaaaggggtagtagaagctctgaaacaaacgccagctgattatgtgtggctcgtcccctcggtagtagcggagttggctgaggatccggagagtttggattatgttgcggagaatgttgaattgcttgtgtatcttggcggtgacttgccgcaggatattggggatagggtggcagccaaagtcccactccgcagccaatatggaagctcagaaatgggctttcctcatcaactctggctcgagtcactatcatcgcaagactggcggtacataagcttccatccatgcacgggtgctgtgtttgaggaaacagttgacggtaattacgagctggtatttcggaaacaagactctctgcttgcgacccagacagcgtggagcattttaggacaggagcaacttgaagaataccacactcgtgatctcttcgctccacatccgactgtgcccgatgcttggtgttggcgggcgcgggctgatgacattatcgtctttctcaatggagaaaagacgaatcctgtcacgatggagcaaagcattgtcgccagtaacagcgaggtgaccggcgcgctcgtggtaggaaaccaaagattccaggccgcgcttatcgttgaaccggccagtagtgtatcaatcaagggcacggctgatgaggcggcgctaatagaacgtatttggccgagtatcaaacaagcaaatagcctcgcgcccgctcatgcacgagttgaaaagtatatggtgcttatcgcggactcgaatagaccgttccaacgcgtagcgaagggcacgattcaacgagctgcaaccattgctcaatattcagcagagcttgataaactgtattccaatgcagatgctgacattgatgtggacactgaagtatacagctcaataagctcagaaacgatgaagcaacggactcgagagattgtgctcagaaccacgggccggaatgatctggaggattcagccgatttcttcgataatggcatggattcgctacaagcactacggatcactcgcgccctacgacgaggtctaggggcgaatcacctcgccctatcgactctatatcagaacccttcgatcgaactgctctcgactgcgttgctcataagcaagcacagtgaaagtgatagcgatctgatgcagccgctactgtctacatactcaaaactcctacatcagatcgagccgataaaagagattactgatgacaacgataagactatggaaactgtaaatgtcgtcttgactggctctaccggaaccgtgggaacacatcttctacgagcgctccttaatcggcaagatataggacatatattctgcttgaaccgtggatccgacggcggactagccgtccaagcggcgcggttccaagccgctggtcttatagttgaattgctcaatgatcgagttacatttttgcaggcggacttctcgcaaccgttcctgggttttgatcaagcgacatacgaaatgcttcgatctcgagtaaacgtcatcattcacaatgcctggccagtcaatttcaatttgaacttgctagcctttcgaccgcagctagccgggctagtgaaccttcttgcactctctaatgcagcaagatcgcgagggaagaaaatgaggttcttattcgtgtcatccgtaggtgtcatcatgaatggaggaccagaacctgcaccagaggccctagttccgctcgagcagcagctacgacgatatggcggcagcaacggatattcaatgagcaagcttattgcagaacatctgtgtgatcttgcagcacgtcactttgcagctcctgtgctcgtcgcgcgcgtgggtcaggtagccggtgccattaactacaaaggcatttggaatccggcggagtggctgccaagtctggtcattagctcacggtacctcggatgtctaccaggtagcttgggtaggcgactttgcaatgtcgactgggtaccggtcgatgccctcgccgacgttattgtagacctcatgatacatgtgaatgagagagatgcagcaacggagggttgcaaagtgttcaatatccgaaatccgacagatgtcagctgggcagacatcttgcccgcgataaaggagcgtatcgaagcaggatcaagtcggaccgttgatattgtgccttccaagacgtggttagcacgactggacaagagcactgatgctattactaccaacgatgatggacttgacacagcagcatctaatccggcgattaagctggttgatttctaccggaacggtttgtggaatgttgagcatgaccagtcaggctcagtgacgacaccatgtgcgtcgatggctatcgagaagactctcgatgcctgcccaacgctacgagacatgtctccagtaaatcctcgctggattcacaaatggattgatgaatggttaggcccttcgactggatcaggatcagattga

SEQ ID NO: 30928 - protein, 1087 aa, Muscodor strobelii
  misc_feature: SGI Peptide ID NO. 570644
  misc_feature (687)..(958): Pfam Id: PF01370 Pfam Desc: NAD dependent epimerase/dehydratase family
  misc_feature (689)..(935): Pfam Id: PF07993 Pfam Desc: Male sterility protein
  misc_feature (576)..(641): Pfam Id: PF00550 Pfam Desc: Phosphopantetheine attachment site
  misc_feature (50)..(344): Pfam Id: PF00501 Pfam Desc: AMP-binding enzyme
  misc_feature (11)..(1079): NCBI GI: 156046697 Blast Desc: SS1G_09449 [Sclerotinia sclerotiorum 1980] gi|154693844|gb|EDN93582.1| SS1G_09449 [Sclerotinia sclerotiorum 1980]
  misc_feature (1)..(1078): NCBI GI: 169766506 Blast Desc: [Aspergillus oryzae RIB40] gi|83765579|dbj|BAE55722.1| protein product [Aspergillus oryzae]
  misc_feature (12)..(1078): NCBI GI: 145239907 Blast Desc: An08g04820 [Aspergillus niger] gi|134077114|emb|CAK45455.1| protein product [Aspergillus niger]
  misc_feature (12)..(1079): NCBI GI: 145241446 Blast Desc: An09g00450 [Aspergillus niger] gi|134077907|emb|CAL00305.1| protein product [Aspergillus niger]
  misc_feature (15)..(1078): NCBI GI: 154308659 Blast Desc: BC1G_07752 [Botryotinia fuckeliana B05.10] gi|150852703|gb|EDN27895.1| BC1G_07752 [Botryotinia fuckeliana B05.10]
  misc_feature (101)..(1078): NCBI GI: 238483233 Blast Desc: NRPS-like enzyme, [Aspergillus flavus NRRL3357] gi|220700905|gb|EED57243.1| NRPS-like enzyme, [Aspergillus flavus NRRL3357]
  misc_feature (13)..(1081): NCBI GI: 154314562 Blast Desc: BC1G_03990 [Botryotinia fuckeliana B05.10] gi|150848612|gb|EDN23805.1| BC1G_03990 [Botryotinia fuckeliana B05.10]
  misc_feature (13)..(1078): NCBI GI: 242810029 Blast Desc: NRPS-like enzyme, [Talaromyces stipitatus ATCC 10500] gi|218716122|gb|EED15544.1| NRPS-like enzyme, [Talaromyces stipitatus ATCC 10500]
  misc_feature (12)..(1078): NCBI GI: 156062202 Blast Desc: SS1G_01217 [Sclerotinia sclerotiorum 1980] gi|154696553|gb|EDN96291.1| SS1G_01217 [Sclerotinia sclerotiorum 1980]
  misc_feature (10)..(1083): NCBI GI: 189200292 Blast Desc: ochratoxin A non-ribosomal peptide synthetase [Pyrenophora tritici-repentis Pt-1C-BFP] gi|187983582|gb|EDU49070.1| ochratoxin A non-ribosomal peptide
MATTHSEIARWQNDLLPNIVDRIARDAPSTSYGLWPIVSKSYDQGYQTITYAQFANAVNALAWWIENNLGPGKGDIFAYVGPNDLRLTALLIAAIKTNYVIFFPSPRNSAAAHNALLESLKCKIFITTSPVPPAALTILEAANPRMFTIPDAQQLLEQTYEQYRCERTYEENCREPAWAILIVDRHTSGSTGFPKPIIWTLEAISRHHNGTNVAPPEGIRSLDHFQRGKRVLTTLPPFHVCQFTLDGLYILSGIPFGSIPIAPVATAIPTAKGVVEALKQTPADYVWLVPSVVAELAEDPESLDYVAENVELLVYLGGDLPQDIGDRVAAKVPLRSQYGSSEMGFPHQLWLESLSSQDWRYISFHPCTGAVFEETVDGNYELVFRKQDSLLATQTAWSILGQEQLEEYHTRDLFAPHPTVPDAWCWRARADDIIVFLNGEKTNPVTMEQSIVASNSEVTGALVVGNQRFQAALIVEPASSVSIKGTADEAALIERIWPSIKQANSLAPAHARVEKYMVLIADSNRPFQRVAKGTIQRAATIAQYSAELDKLYSNADADIDVDTEVYSSISSETMKQRTREIVLRTTGRNDLEDSADFFDNGMDSLQALRITRALRRGLGANHLALSTLYQNPSIELLSTALLISKHSESDSDLMQPLLSTYSKLLHQIEPIKEITDDNDKTMETVNVVLTGSTGTVGTHLLRALLNRQDIGHIFCLNRGSDGGLAVQAARFQAAGLIVELLNDRVTFLQADFSQPFLGFDQATYEMLRSRVNVIIHNAWPVNFNLNLLAFRPQLAGLVNLLALSNAARSRGKKMRFLFVSSVGVIMNGGPEPAPEALVPLEQQLRRYGGSNGYSMSKLIAEHLCDLAARHFAAPVLVARVGQVAGAINYKGIWNPAEWLPSLVISSRYLGCLPGSLGRRLCNVDWVPVDALADVIVDLMIHVNERDAATEGCKVFNIRNPTDVSWADILPAIKERIEAGSSRTVDIVPSKTWLARLDKSTDAITTNDDGLDTAASNPAIKLVDFYRNGLWNVEHDQSGSVTTPCASMAIEKTLDACPTLRDMSPVNPRWIHKWIDEWLGPSTGSGSD

SEQ ID NO: 30929 - DNA, 259 bp, Muscodor strobelii
  misc_feature: SGI EST ID NO. CUFF.73227.0
  misc_feature: Variant of the nucleotide sequence at SEQ ID NO 30927
tcgtacggtctttggccgatcgtgtcgaagtcatatgatcagggatatcaaaccattacctatgcacagttcgcgaatgccgtcaatgcgttagcatggtggattgagaataaccttggccctggaaagggggacatttttgcttatgtcgggcccaacgatctgcgtctaactgcgttgcttattgcagctatcaagacaaactatgttattttctttccgtcgccgcgaaatagcgcagcagcacataatgcattgc

SEQ ID NO: 30930 - DNA, 525 bp, Muscodor strobelii
  misc_feature: SGI cDNA ID NO. 570645
  misc_feature: Elevated expression when VOC is produced
  misc_feature: Encodes the peptide sequence at SEQ ID NO 30931
atgcagttctcagtctcgttcttcaccaccatcctcgcactctcttcaagcgcacttgccgtgcccgccagcacaaatcaagggaacaatgggcgggacgtccattgtgaccccgagtcaaaatcgactctgagccgccgagactttgcacacctgttttccaaaggtttcggaagcggcaaaaagtccagcgtgcctgacagcaagcggagctacccggaatccacatataccacttcttattattatcctacgtcgacatccagctattattcttcttatcccacgaccacatcgagctattcttcttatccttatcctacacagtcatcgtctccaagctccgacgaggtttacctgagtcccgaccaggaagaaatacttgagctcgcgctcgaaaacttgttcgatagcggaaatgagctgttcgagggcatcagtgccatttgcgatgtatttgaacttgacatttgctgggagtggtttggtccctactctggcagctctgatgagggggatgcttag

SEQ ID NO: 30931 - protein, 174 aa, Muscodor strobelii
  misc_feature: SGI Peptide ID NO. 570645
  misc_feature: Useful for introducing or modulating the production of volatile compounds
MQFSVSFFTTILALSSSALAVPASTNQGNNGRDVHCDPESKSTLSRRDFAHLFSKGFGSGKKSSVPDSKRSYPESTYTTSYYYPTSTSSYYSSYPTTTSSYSSYPYPTQSSSPSSDEVYLSPDQEEILELALENLFDSGNELFEGISAICDVFELDICWEWFGPYSGSSDEGDA

SEQ ID NO: 30932 - DNA, 964 bp, Muscodor strobelii
  misc_feature: SGI EST ID NO. CUFF.73250.0
  misc_feature: Variant of the nucleotide sequence at SEQ ID NO 30930
caaacatcattctctattttccttggtcttttccttgagtatcactttcatatcttacgtctcatttttcatattttccataagtctactcttctcccattccctaatcaacaaaaaccatttacgactttcgatcttcaaaatgcagttctcagtctcgttcttcaccaccatcctcgcactctcttcaagcgcacttgccgtgcccgccagcacaaatcaagggaacaatgggcgggacgtccattgtgaccccgagtcaaaatcgactctgagccgccgagactttgcacacctgttttccaaaggtttcggaagcggcaaaaagtccagcgtgcctgacagcaagcggagctacccggaatccacatataccacttcttattattatcctacgtcgacatccagctattattcttcttatcccacgaccacatcgagctattcttcttatccttatcctacacagtcatcgtctccaagctccgacgaggtttacctgagtcccgaccaggaagaaatacttgagctcgcgctcgaaaacttgttcgatagcggaaatgagctgttcgagggcatcagtgccatttgcgatgtatttgaacttgacatttgctgggagtggtttggtccctactctggcagctctgatgagggggatgcttagacaaagctgagcagccattggaagatatacctggtactgagcttgatcgataatatgggtttggagcatggaatctgggttgagggggtgcatattgtggcccttcctacttgtctctactcgtgtgatcttacgaagattgtacatcatagcattcactactcggacgtaacttaattgaacccaatcatgcagaatttgtcacaaactggcccacctattcgggataaccacttgaggtaatgtggtacgcttaagggagcatgatataagggtctaggtgtgtatatatacagg

SEQ ID NO: 30933 - DNA, 1272 bp, Muscodor strobelii
  misc_feature: SGI cDNA ID NO. 570646
  misc_feature: Encodes the peptide sequence at SEQ ID NO 30934
atgccgggtacgaaatggggccacgcccccggccttgatggctttttggactccctcaagctcagaaaagtcgatgcctcgatcgagcatctcgttgccctcttgaggagacggcagatcaagggctccgaagcttgtgccaccgccaccgcccatatcctcctccaagtcgtcgccaaagacaagtggaccgacgtcgacgacctcctcacgcgcatccagctcaccggccggagactcgtcgctgcccagccccgcgagctcgtcatcggcaacatcgtcaggagagtcttgggtctgatccgcgatgaagcctccgaagagaggaacgacaactcgactacatctcccgccgtcgaatctcctccaaagcccaccccccgcccgcatgccctcgcctccttgggttcctttatccgcacaccttccaacttcaatctcctgtctatcgccggcgacatcacacccaccaccgccaggtcaaacgcctccacccctaagatcggctcgggcacctccacccccttgggccctgctcagtctacaaatgtccaggccctgcgctctgaggttatagatggcatcgaggagatcatggacgagatcagacaggtcgatgaacagatccagagctacgccgacaccttcataaaccccggagactacgtcctcgtccaccagccacccaagacggtacagaagttcctgacacgcgcctcgttgaagaggaaatttaccgtcttcgttgccgtgaatccgtcgacgacaacgaagcccgaagaccgatatgcctctctgcgcaagtcgctggcctctcatggctccagcgtcattaccatcgtgaatgccggcctcatggtctacatgtccagagtcaacaaggtcatcttgagtggaagggctatcaccgcccaggggggtgtcgtagtcgatggaggtgccgtcgccattgcccaagcggcccgagagaaacagcgtgatgtcatgatcctcgcaggtgtttacacagtctgccctgacacctctttcgtggccgaggacctcgttgagtggggtgatccttccaaacatgtcagctatggagatggagttttggtatcgaaggctatggttaggtaccctgttacggaatatctgccgggtgatagtgtcaacacctacatcacgaatcttggcgcacacgtgcaagataatctgccgacgattattgctgaacactacaaggaggaagatatcgacttcgatctctatacgttaccacatcggaaatga

SEQ ID NO: 30934 - protein, 423 aa, Muscodor strobelii
  misc_feature: SGI Peptide ID NO. 570646
  misc_feature (39)..(396): Pfam Id: PF01008 Pfam Desc: Initiation factor 2 subunit family
  misc_feature (39)..(250): Pfam Id: PF01008 Pfam Desc: Initiation factor 2 subunit family
  misc_feature (7)..(418): NCBI GI: 46137571 Blast Desc: FG10301.1 [Gibberella zeae PH-1]
  misc_feature (12)..(417): NCBI GI: 261352064 Blast Desc: translation initiation factor eIF-2B subunit beta [Verticillium albo-atrum VaMs.102]
  misc_feature (1)..(417): NCBI GI: 171694329 Blast Desc: protein product [Podospora anserina] gi|170947113|emb|CAP73918.1| protein product [Podospora anserina]
  misc_feature (1)..(416): NCBI GI: 116197697 Blast Desc: CHGG_07004 [Chaetomium globosum CBS 148.51] gi|88178283|gb|EAQ85751.1| CHGG_07004 [Chaetomium globosum CBS 148.51]
  misc_feature (1)..(417): NCBI GI: 85098856 Blast Desc: NCU08952 [Neurospora crassa OR74A] gi|28922191|gb|EAA31440.1| conserved [Neurospora crassa OR74A] gi|28950153|emb|CAD71011.1| related to translation initiation
  misc_feature (1)..(394): NCBI GI: 145603568 Blast Desc: MGG_13245 [Magnaporthe grisea 70-15] gi|145011781|gb|EDJ96437.1| MGG_13245 [Magnaporthe grisea 70-15]
  misc_feature (1)..(414): NCBI GI: 119496093 Blast Desc: translation regulator GCD7 [Neosartorya fischeri NRRL 181] gi|119412982|gb|EAW22923.1| translation regulator GCD7 [Neosartorya fischeri NRRL 181]
  misc_feature (1)..(414): NCBI GI: 169763936 Blast Desc: [Aspergillus oryzae RIB40] gi|83770896|dbj|BAE61029.1| protein product [Aspergillus oryzae]
  misc_feature (1)..(414): NCBI GI: 70995092 Blast Desc: translation regulator GCD7 [Aspergillus fumigatus Af293] gi|66849947|gb|EAL90274.1| translation regulator GCD7 [Aspergillus fumigatus Af293] gi|159131068|gb|EDP56181.1| GCD7
  misc_feature (1)..(414): NCBI GI: 259488323 Blast Desc: TPA: translation regulator GCD7 (AFU_orthologue; AFUA_1G09450) [Aspergillus nidulans FGSC A4]
MPGTKWGHAPGLDGFLDSLKLRKVDASIEHLVALLRRRQIKGSEACATATAHILLQVVAKDKWTDVDDLLTRIQLTGRRLVAAQPRELVIGNIVRRVLGLIRDEASEERNDNSTTSPAVESPPKPTPRPHALASLGSFIRTPSNFNLLSIAGDITPTTARSNASTPKIGSGTSTPLGPAQSTNVQALRSEVIDGIEEIMDEIRQVDEQIQSYADTFINPGDYVLVHQPPKTVQKFLTRASLKRKFTVFVAVNPSTTTKPEDRYASLRKSLASHGSSVITIVNAGLMVYMSRVNKVILSGRAITAQGGVVVDGGAVAIAQAAREKQRDVMILAGVYTVCPDTSFVAEDLVEWGDPSKHVSYGDGVLVSKAMVRYPVTEYLPGDSVNTYITNLGAHVQDNLPTIIAEHYKEEDIDFDLYTLPHRK

SEQ ID NO: 30935 - DNA, 2024 bp, Muscodor strobelii
  misc_feature: SGI EST ID NO. CUFF.73254.2
  misc_feature: Variant of the nucleotide sequence at SEQ ID NO 30933
caagcagcagctttgcgcccctcatgcaacggcattcttatcaaagtacttttttttgagtcacaccacgatctgccaccaaacgggtgtcccaatccacgatattgttaacctcactctcacttctccacgctctacatacagcattcgatcaattcagattttgcgacgcgaccccagtggattttcaacggacccaagctgaacagcagattggaacgccagttgcgcatatcgctcgctaactcacatcggccgcaacccacttcagcccgccatcaccccgcgatatcttcacccgcgaattacctacagagcaacaccgagactccttagcaccaaaggagatgccgggtacgaaatggggccacgcccccggccttgatggctttttggactccctcaagctcagaaaagtcgatgcctcgatcgagcatctcgttgccctcttgaggagacggcagatcaagggctccgaagcttgtgccaccgccaccgcccatatcctcctccaagtcgtcgccaaagacaagtggaccgacgtcgacgacctcctcacgcgcatccagctcaccggccggagactcgtcgctgcccagccccgcgagctcgtcatcggcaacatcgtcaggagagtcttgggtctgatccgcgatgaagcctccgaagagaggaacgacaactcgactacatctcccgccgtcgaatctcctccaaagcccaccccccgcccgcatgccctcgcctccttgggttcctttatccgcacaccttccaacttcaatctcctgtctatcgccggcgacatcacacccaccaccgccaggtcaaacgcctccacccctaagatcggctcgggcacctccacccccttgggccctgctcagtctacaaatgtccaggccctgcgctctgaggttatagatggcatcgaggagatcatggacgagatcagacaggtcgatgaacagatccagagctacgccgacaccttcataaaccccggagactacgtcctcgtccaccagccacccaagacggtacagaagttcctgacacgcgcctcgttgaagaggaaatttaccgtcttcgttgccgtgaatccgtcgacgacaacgaagcccgaagaccgatatgcctctctgcgcaagtcgctggcctctcatggctccagcgtcattaccatcgtgaatgccggcctcatggtctacatgtccagagtcaacaaggtcatcttgagtggaagggctatcaccgcccaggggggtgtcgtagtcgatggaggtgccgtcgccattgcccaagcggcccgagagaaacagcgtgatgtcatgatcctcgcaggtgtttacacagtctgccctgacacctctttcgtggccgaggacctcgttgagtggggtgatccttccaaacatgtcagctatggagatggagttttggtatcgaaggctatggttaggtaccctgttacggaatatctgccgggtgatagtgtcaacacctacatcacgaatcttggcgcacacgtgcaagataatctgccgacgattattgctgaacactacaaggaggaagatatcgacttcgatctctatacgttaccacatcggaaatgaggagagatcttagggactgcacgcgcatggcgcatgtttctacgttgatcttactccttcgtgaccgtgatcacgcaatgaaggtgaaaacagcgagggatggaatactacggcagcatcggatgtatgaatctccagatggaggaaatcatagagacgcagcagatattaatgcatggctcagtcgtctctcggtgtcttggatgctctatgtttctcagaatctaggcagggttccagcgcggtcagtagggagctcagaccggcaacgtcgccagtcaagaataaatccagttaaatcataaaccttgtgccagcaaatatgcgatgctttattggtattcaatttttgaagcgagaagcctcaacctaaaggacggccaaacagtcgtccctaaagaagca

SEQ ID NO: 30936 - DNA, 1569 bp, Muscodor strobelii
  misc_feature: SGI cDNA ID NO. 570647
  misc_feature: Encodes the peptide sequence at SEQ ID NO 30937
atgaactccctgaacatcatatccgccagagtctcgcccacatccagccctgccccctcacgatccaactcgctatcccacgtcggccttgctgccatctctccctccgacgatccaagccccgtatcggatccgcccgcgtccggcgacagagacaccacggctagccaacgcagcgatcatgttataaccaccaaaactgaccatgatgatgacacttcctttcggcatatagacgagaagactccattgatagaccggggcagtagcagtacaaaagacatggggactcggagccggacgtggcacaccttcccggcgcgagtcgcaaacagcttgatcaactccctacgctgggtgctgtccaccatagccgcccccggcgtgtatctcatcgcttgcttctacgacgagaacggctactttgctcccttgcgccagctcaaatctctctttggccattacggaggagatccgaagaatctggccgccgactatcatgaagccatcgcacaaaaggagaaggactcggcctcgcggagtggtagtaagaatgccaagggcaaacacggacacgctgcatcgcgccccgccaggtcgtcaggctcatcgtcttcgggcttctcttcagaatccgaatcggacgtgagcagaacaactgagagtagtactcacacttcttccagctccgcccgccatgcccgatccaagtcgctacagcccaccgaggagctcgagccgtccggcagatccattcgtatcaaactgcacagtgaaggcggcatgcgccgagggaaacataggaaggcacagtcaaccaataccaccaatgcttccgcgagtggcagtgccgcagaggacctctcggcccagctcaagtctcccacgtcccctatcggtgctctgaccaaatatcccaagactcctgctcctccacgacctctaataccgagacgacagccctcctacatcccctacgaacccacggacccgaaacagctgaagactctgatcctcgacctcgacgagaccttgatccattccatgtctaaagggggcaggatgggctcggggcacatggtcgaagtgcgactgaacactgcctacgggagcggcatgctgggtcctcagcatcccatcctgtactatgtgcacaaacggccgcactgcgacgagttcctccgaaaggtttgcaaatggttcaatctcgtcgtcttcaccgcgtcggttcaagaatatgccgaccctgtcatcgactggctcgagtcggaaaggaagtatttctcgggacggtattaccggcaacactgtacctttaggcatggtgcctttatcaaggatctgagctccatcgagcccgacctaagtaaagtcatgatattggataacagccccttgagctacatgttccatcaagacaatgccattccaatacagggctggatcagtgatccaacagataatgacttgcttcatctggtaccatttctagaagggctgcagtacgtttccgatgtccgggcgttattagcattgcgaggcggggaggacggccagcatgtgacatga

SEQ ID NO: 30937 - protein, 522 aa, Muscodor strobelii
  misc_feature: SGI Peptide ID NO. 570647
  misc_feature (326)..(512): Pfam Id: PF03031 Pfam Desc: NLI interacting factor-like phosphatase
  misc_feature (333)..(512): Pfam Id: PF03031 Pfam Desc: NLI interacting factor-like phosphatase
  misc_feature (1)..(500): NCBI GI: 116197703 Blast Desc: CHGG_07007 [Chaetomium globosum CBS 148.51] gi|88178286|gb|EAQ85754.1| CHGG_07007 [Chaetomium globosum CBS 148.51]
  misc_feature (1)..(521): NCBI GI: 171694335 Blast Desc: protein product [Podospora anserina] gi|170947116|emb|CAP73921.1| protein product [Podospora anserina]
  misc_feature (1)..(520): NCBI GI: 164423757 Blast Desc: NCU08948 [Neurospora crassa OR74A] gi|28950150|emb|CAD71008.1| related to nuclear envelope protein NEM1 [Neurospora crassa] gi|157070223|gb|EAA31436.2| conserved
  misc_feature (1)..(521): NCBI GI: 256731842 Blast Desc: NECHADRAFT_61347 [Nectria haematococca mpVI 77-13-4]
  misc_feature (125)..(508): NCBI GI: 261352065 Blast Desc: nuclear envelope morphology protein [Verticillium albo-atrum VaMs.102]
  misc_feature (1)..(501): NCBI GI: 46137573 Blast Desc: FG10302.1 [Gibberella zeae PH-1]
  misc_feature (1)..(522): NCBI GI: 156043075 Blast Desc: SS1G_10540 [Sclerotinia sclerotiorum 1980] gi|154694928|gb|EDN94666.1| SS1G_10540 [Sclerotinia sclerotiorum 1980]
  misc_feature (1)..(516): NCBI GI: 70995094 Blast Desc: NIF domain protein [Aspergillus fumigatus Af293] gi|66849948|gb|EAL90275.1| NIF domain protein [Aspergillus fumigatus Af293] gi|159131069|gb|EDP56182.1| NIF domain protein
  misc_feature (1)..(516): NCBI GI: 119496091 Blast Desc: NIF domain protein [Neosartorya fischeri NRRL 181] gi|119412981|gb|EAW22922.1| NIF domain protein [Neosartorya fischeri NRRL 181]
  misc_feature (1)..(516): NCBI GI: 115402157 Blast Desc: conserved [Aspergillus terreus NIH2624] gi|114189001|gb|EAU30701.1| conserved [Aspergillus terreus NIH2624]
MNSLNIISARVSPTSSPAPSRSNSLSHVGLAAISPSDDPSPVSDPPASGDRDTTASQRSDHVITTKTDHDDDTSFRHIDEKTPLIDRGSSSTKDMGTRSRTWHTFPARVANSLINSLRWVLSTIAAPGVYLIACFYDENGYFAPLRQLKSLFGHYGGDPKNLAADYHEAIAQKEKDSASRSGSKNAKGKHGHAASRPARSSGSSSSGFSSESESDVSRTTESSTHTSSSSARHARSKSLQPTEELEPSGRSIRIKLHSEGGMRRGKHRKAQSTNTTNASASGSAAEDLSAQLKSPTSPIGALTKYPKTPAPPRPLIPRRQPSYIPYEPTDPKQLKTLILDLDETLIHSMSKGGRMGSGHMVEVRLNTAYGSGMLGPQHPILYYVHKRPHCDEFLRKVCKWFNLVVFTASVQEYADPVIDWLESERKYFSGRYYRQHCTFRHGAFIKDLSSIEPDLSKVMILDNSPLSYMFHQDNAIPIQGWISDPTDNDLLHLVPFLEGLQYVSDVRALLALRGGEDGQHVT

SEQ ID NO: 30938 - DNA, 2555 bp, Muscodor strobelii
  misc_feature: SGI EST ID NO. CUFF.73320.0
  misc_feature: Variant of the nucleotide sequence at SEQ ID NO 30936
cttttttcctcacatcatccatcgtcgctctttcagcaaagatacacctcggcactctaaaactgccattgtgttacacagcttaagtctccctttgcaagaatacagacgaattgcaactttggcatctgcgggcctcctgatttgtccaaaacaacaccaccccgtcccgcgataccccgacccagcttttgcctccgtatccaaccatcacctcgggatcttgggtctgacttgaagcaccctcatcgtctccaacactcccccatctccgtaatagtcgtagccctcctcttcgcgcgtcccgtcccacctcgtgctcgtttgctcccacgccgatacggtacatgcttgcacattagtccgatttccaatctccttcagacagtatcgagtcctaacatcttccgacatctccttaccttgccagcgcgccgtctgtttggttgcttggtgcgaacgtcgtctggatggctggccggtccgtcagaagatgaactccctgaacatcatatccgccagagtctcgcccacatccagccctgccccctcacgatccaactcgctatcccacgtcggccttgctgccatctctccctccgacgatccaagccccgtatcggatccgcccgcgtccggcgacagagacaccacggctagccaacgcagcgatcatgttataaccaccaaaactgaccatgatgatgacacttcctttcggcatatagacgagaagactccattgatagaccggggcagtagcagtacaaaagacatggggactcggagccggacgtggcacaccttcccggcgcgagtcgcaaacagcttgatcaactccctacgctgggtgctgtccaccatagccgcccccggcgtgtatctcatcgcttgcttctacgacgagaacggctactttgctcccttgcgccagctcaaatctctctttggccattacggaggagatccgaagaatctggccgccgactatcatgaagccatcgcacaaaaggagaaggactcggcctcgcggagtggtagtaagaatgccaagggcaaacacggacacgctgcatcgcgccccgccaggtcgtcaggctcatcgtcttcgggcttctcttcagaatccgaatcggacgtgagcagaacaactgagagtagtactcacacttcttccagctccgcccgccatgcccgatccaagtcgctacagcccaccgaggagctcgagccgtccggcagatccattcgtatcaaactgcacagtgaaggcggcatgcgccgagggaaacataggaaggcacagtcaaccaataccaccaatgcttccgcgagtggcagtgccgcagaggacctctcggcccagctcaagtctcccacgtcccctatcggtgctctgaccaaatatcccaagactcctgctcctccacgacctctaataccgagacgacagccctcctacatcccctacgaacccacggacccgaaacagctgaagactctgatcctcgacctcgacgagaccttgatccattccatgtctaaagggggcaggatgggctcggggcacatggtcgaagtgcgactgaacactgcctacgggagcggcatgctgggtcctcagcatcccatcctgtactatgtgcacaaacggccgcactgcgacgagttcctccgaaaggtttgcaaatggttcaatctcgtcgtcttcaccgcgtcggttcaagaatatgccgaccctgtcatcgactggctcgagtcggaaaggaagtatttctcgggacggtattaccggcaacactgtacctttaggcatggtgcctttatcaaggatctgagctccatcgagcccgacctaagtaaagtcatgatattggataacagccccttgagctacatgttccatcaagacaatgccattccaatacagggctggatcagtgatccaacagataatgacttgcttcatctggtaccatttctagaagggctgcagtacgtttccgatgtccgggcgttattagcattgcgaggcggggaggacggccagcatgtgacatgaagcgtgttttgcttttaagatgaacgataagtagtagatatgtacaacgaagcgttgttgaaataatgccgcaaggatctgacaggcgacagctcgaggaccttgctttggaacatgatggctcaattgcttctaccgaatgatgttcagtacaatcgtacaaacatacctagtacagactacatgtgatcgaggcaaagcactcagcccgatgagttctcacgtagactacaacgaatgctgcacttggcctgggataaaagtattgccagaacttatcttatccgtagaacaactaccaaacgaagccggaaccgtttcatgtccactgttctatttttccctcgccaaaccgtcgctacagtgatgacacgaaaaccaatcactaagtaaaaaaattgcaacgcggatgatggcctcctttatctagatctcacgtgttccagcgcattgtcagatagaaatgcgggttgagtctaaaagatgatctaat

SEQ ID NO: 30939 - DNA, 453 bp, Muscodor strobelii
  misc_feature: SGI cDNA ID NO. 570648
  misc_feature: Encodes the peptide sequence at SEQ ID NO 30940
atgtctctgcactaccttcctcccgtcaagccttcggctatcgccctcggcaccgtcttcaaccacggcatcgagctcgccgttctctcccctctcctcggagacacctaccgccgcgccaaggtcgccaacaccaaggaggaatttctccactcccgtgaggccagcggcgccgccgtcgcctggggcacctccctcgtcggttccgccctccaggcctacggtgtcggtgctctcatcaacgccaccggaaccctcagctacaagggcgccgcttacctcggatccttgatcttccttgctacctctgctcctacttacctcaaccagctcttcaccgagaagcgcgccgtcgacaccgtcgccgttggcgccacggccaagatcgccgagacacttggtctatcgctgttcctcacgtggtggggaactcgcacgaaccccttcgagtaa

SEQ ID NO: 30940 - protein, 150 aa, Muscodor strobelii
  misc_feature: SGI Peptide ID NO. 570648
  misc_feature (3)..(145): Pfam Id: PF08570 Pfam Desc: Domain of function (DUF1761)
  misc_feature (1)..(150): NCBI GI: 46137575 Blast Desc: FG10303.1 [Gibberella zeae PH-1]
  misc_feature (1)..(150): NCBI GI: 50313410 Blast Desc: conserved [Chaetomium globosum]
  misc_feature (1)..(150): NCBI GI: 164423759 Blast Desc: NCU08949 [Neurospora crassa OR74A] gi|28950151|emb|CAD71009.1| conserved [Neurospora crassa] gi|157070224|gb|EAA31437.2| conserved [Neurospora crassa OR74A]
  misc_feature (6)..(150): NCBI GI: 261352066 Blast Desc: conserved [Verticillium albo-atrum VaMs.102]
  misc_feature (1)..(150): NCBI GI: 156043191 Blast Desc: SS1G_10598 [Sclerotinia sclerotiorum 1980] gi|154694986|gb|EDN94724.1| SS1G_10598 [Sclerotinia sclerotiorum 1980]
  misc_feature (5)..(150): NCBI GI: 116197701 Blast Desc: conserved [Chaetomium globosum CBS 148.51] gi|88178285|gb|EAQ85753.1| conserved [Chaetomium globosum CBS 148.51]
  misc_feature (1)..(150): NCBI GI: 39976147 Blast Desc: MGG_06000 [Magnaporthe grisea 70-15] gi|145011726|gb|EDJ96382.1| MGG_06000 [Magnaporthe grisea 70-15]
  misc_feature (2)..(150): NCBI GI: 169603618 Blast Desc: SNOG_04817 [Phaeosphaeria nodorum SN15] gi|111066088|gb|EAT87208.1| SNOG_04817 [Phaeosphaeria nodorum SN15]
  misc_feature (1)..(150): NCBI GI: 154316406 Blast Desc: BC1G_04134 [Botryotinia fuckeliana B05.10] gi|150845934|gb|EDN21127.1| BC1G_04134 [Botryotinia fuckeliana B05.10]
  misc_feature (2)..(150): NCBI GI: 189196210 Blast Desc: PTRG_04110 [Pyrenophora tritici-repentis Pt-1C-BFP] gi|187980322|gb|EDU46948.1| PTRG_04110 [Pyrenophora tritici-repentis Pt-1C-BFP]
MSLHYLPPVKPSAIALGTVFNHGIELAVLSPLLGDTYRRAKVANTKEEFLHSREASGAAVAWGTSLVGSALQAYGVGALINATGTLSYKGAAYLGSLIFLATSAPTYLNQLFTEKRAVDTVAVGATAKIAETLGLSLFLTWWGTRTNPFE

SEQ ID NO: 30941 - DNA, 981 bp, Muscodor strobelii
  misc_feature: SGI EST ID NO. CUFF.73418.1
  misc_feature: Variant of the nucleotide sequence at SEQ ID NO 30939
ttcagctagcaggagtattccactaggtgaggtagagaggtatcgtagtacaacggacgggattatcccattgttcctgccctttcgtcatcgccagctcagctttgcccagtggtagcattcctggtataaagcctctgtcctcccataattgctcctctgtctacatcatacaccaccttcaacgacgaacaaataccatctttgcctacatcgcaatcatcaagaccaaccacaaacaacatgtctctgcactaccttcctcccgtcaagccttcggctatcgccctcggcaccgtcttcaaccacggcatcgagctcgccgttctctcccctctcctcggagacacctaccgccgcgccaaggtcgccaacaccaaggaggaatttctccactcccgtgaggccagcggcgccgccgtcgcctggggcacctccctcgtcggttccgccctccaggcctacggtgtcggtgctctcatcaacgccaccggaaccctcagctacaagggcgccgcttacctcggatccttgatcttccttgctacctctgctcctacttacctcaaccagctcttcaccgagaagcgcgccgtcgacaccgtcgccgttggcgccacggccaagatcgccgagacacttggtctatcgctgttcctcacgtggtggggaactcgcacgaaccccttcgagtaatttcgcagtcggaatgaagcgagtttgatctgacgacgtaatgaagttattctgaaatggagtcgttggactgggatcaggcgtgatggacaaaatctgatactggaggaacgcatgcgagtttgcggtcctgtctgtagtgtataattagtgaatgaattaataactattcagccaaatgatttttgtttgtcccgtgttcggatttgtatgtctctgatggagccaaccagaataattctccgatttcgagactgaagagcgcagttatctccacttagttcc

SEQ ID NO: 30942 - DNA, 690 bp, Muscodor strobelii
  misc_feature: SGI cDNA ID NO. 570649
  misc_feature: Reduced expression when VOC is produced
  misc_feature: Encodes the peptide sequence at SEQ ID NO 30943
atgggcgccacaaaacccgaaaaaaaagaaaagaaggagaagaagcgcagcgacgaagccggcgtcggaaaagtaaagaaggacaagaaggagaaaaaagagaagaaagagaagctcaaagccgccatcgaggcctcggacgaagtccccaccgacgcacccgtcaagaccacagacgacgatgacgagaaggacgaaaagtccgccgttgcgcccgtgctagtcggcgcactcgtgccctttgctagaccgctcgctgatgagaaggctacgaagaaggtcatgaagagtgtacggaaagcggcgaagaacaaaaccctaaagcgaggcgtaaaagaagtcgtcaaatcccttcgaaaatctccggcggccggtccatccaacacatccttcccgggcgtagtaattctcgcaggcgacatctcccccatggacgtcatatcgcacatccccgttctctgcgaagacgtcaacgttccctacatcttcgtgaattcccgcgccgagttgggcgccgcgggctcgacgaagagacctacgagcgttgttatggtcacagagaaacgtatggggggtaagaaggggaaggaagaggccattgatgaggaggcgcagaaggagtttgaggagacgtatagggatcttgtgaagcttgtggagaaggagacgaggagtcaagtcaagttgtga

SEQ ID NO: 30943 - protein, 229 aa, Muscodor strobelii
  misc_feature: SGI Peptide ID NO. 570649
  misc_feature (92)..(195): Pfam Id: PF01248 Pfam Desc: Ribosomal protein L7Ae/L30e/S12e/Gadd45 family
  misc_feature (92)..(187): Pfam Id: PF01248 Pfam Desc: Ribosomal protein L7Ae/L30e/S12e/Gadd45 family
  misc_feature (37)..(225): NCBI GI: 154289950 Blast Desc: BC1G_15916 [Botryotinia fuckeliana B05.10] gi|150848536|gb|EDN23729.1| BC1G_15916 [Botryotinia fuckeliana B05.10]
  misc_feature (65)..(225): NCBI GI: 156044830 Blast Desc: SS1G_10519 [Sclerotinia sclerotiorum 1980] gi|154694907|gb|EDN94645.1| SS1G_10519 [Sclerotinia sclerotiorum 1980]
  misc_feature (1)..(226): NCBI GI: 46137577 Blast Desc: FG10304.1 [Gibberella zeae PH-1]
  misc_feature (70)..(226): NCBI GI: 261352067 Blast Desc: H/ACA ribonucleoprotein complex subunit 2 [Verticillium albo-atrum VaMs.102]
  misc_feature (75)..(229): NCBI GI: 258572552 Blast Desc: UREG_04555 [Uncinocarpus reesii 1704] gi|237905308|gb|EEP79709.1| UREG_04555 [Uncinocarpus reesii 1704]
  misc_feature (75)..(229): NCBI GI: 119181207 Blast Desc: CIMG_05741 [Coccidioides immitis RS]
  misc_feature (75)..(229): NCBI GI: 240108910 Blast Desc: H/ACA ribonucleoprotein complex subunit, [Coccidioides posadasii C735 delta SOWgp]
  misc_feature (78)..(194): NCBI GI: 256732231 Blast Desc: NECHADRAFT_9395 [Nectria haematococca mpVI 77-13-4]
  misc_feature (48)..(229): NCBI GI: 67516827 Blast Desc: AN0695.2 [Aspergillus nidulans FGSC A4] gi|40746315|gb|EAA65471.1| AN0695.2 [Aspergillus nidulans FGSC A4] gi|259489032|tpe|CBF88968.1| TPA: small nuclear complex Nhp2,
  misc_feature (75)..(224): NCBI GI: 119495223 Blast Desc: small nuclear ribonucleoprotein complex protein Nhp2, [Neosartorya fischeri NRRL 181] gi|119412563|gb|EAW22504.1| small nuclear ribonucleoprotein complex protein Nhp2, [Neosartorya NRRL
  misc_feature: Useful for introducing or modulating the production of volatile compounds
MGATKPEKKEKKEKKRSDEAGVGKVKKDKKEKKEKKEKLKAAIEASDEVPTDAPVKTTDDDDEKDEKSAVAPVLVGALVPFARPLADEKATKKVMKSVRKAAKNKTLKRGVKEVVKSLRKSPAAGPSNTSFPGVVILAGDISPMDVISHIPVLCEDVNVPYIFVNSRAELGAAGSTKRPTSVVMVTEKRMGGKKGKEEAIDEEAQKEFEETYRDLVKLVEKETRSQVKL

SEQ ID NO: 30944 - DNA, 1297 bp, Muscodor strobelii
  misc_feature: SGI EST ID NO. CUFF.73505.1
  misc_feature: Variant of the nucleotide sequence at SEQ ID NO 30942
aaaatttcgaggtgccaaagcttgctacccatcgaattggcacaccacagcatcgcctctcactctcgaatctcgactcggttcgactactcgccacaacattgtcgcagcgtcgagtcctcgagcttcagcaccgctttctcatatcgcaacggaagctgacgcctttctgtcgcgtatctgcttctcatctgaagtaataccccttcagacctctgcaccaaatcaactagtccgcaacagcatccgcaatcatgggcgccacaaaacccgaaaaaaaagaaaagaaggagaagaagcgcagcgacgaagccggcgtcggaaaagtaaagaaggacaagaaggagaaaaaagagaagaaagagaagctcaaagccgccatcgaggcctcggacgaagtccccaccgacgcacccgtcaagaccacagacgacgatgacgagaaggacgaaaagtccgccgttgcgcccgtgctagtcggcgcactcgtgccctttgctagaccgctcgctgatgagaaggctacgaagaaggtcatgaagagtgtacggaaagcggcgaagaacaaaaccctaaagcgaggcgtaaaagaagtcgtcaaatcccttcgaaaatctccggcggccggtccatccaacacatccttcccgggcgtagtaattctcgcaggcgacatctcccccatggacgtcatatcgcacatccccgttctctgcgaagacgtcaacgttccctacatcttcgtgaattcccgcgccgagttgggcgccgcgggctcgacgaagagacctacgagcgttgttatggtcacagagaaacgtatggggggtaagaaggggaaggaagaggccattgatgaggaggcgcagaaggagtttgaggagacgtatagggatcttgtgaagcttgtggagaaggagacgaggagtcaagtcaagttgtgaggacaccgagtcgacttcctgagcttctctttttggttggagtggggatcgatggtcggcgatgtggaatggctgtctgtctgtctgcatgtagcagagcagtcatcgagactctgttgactctaccgtgtggtttgccagggtccagccacattcgacgaatgttcctggccacgctgcacattgtcattgtcgacgttgcgcttggcgaagagaagaggagagacaattgtgtattacattgaccgccaacagtgcgcggtcatgggcgtttaggggtgttaatgttcatgtttataggacggatggtcaaaatgaataaatacctttcatggtttatatctttccctgcc

SEQ ID NO: 30945 - DNA, 477 bp, Muscodor strobelii
  misc_feature: SGI cDNA ID NO. 570650
  misc_feature: Encodes the peptide sequence at SEQ ID NO 30946
atggtccgaaagggcttcctcccacttccgccccggctgctgcccccggatcttcggccggggcaccacagcaactcccgatacgtcgcattgcttaaagagctgaataagtatgggtctgtaaatcaagacataagcgaaggtcttgacgaagatgccatggatatcgatgatcccgaggacgatcatgtaccagcgctcgatgacgaagacgaaacagacgatgaaatcgacgacgacgattttctcggtagagaccctaatgatgcgactttaacgggcatggcgaaggaaaagaagattttgaattgggaccctgtatcagtttctgcgaagagcaaagagagatccagttacgggacacatgctcccaaaccggttgctctggaaagtcttcttgtgcctcgtgagaatagcttgcgcgcaaatgtatccaccgaagcgaccacggggaagacctccgaagctcgtgcctga

SEQ ID NO: 30946 - protein, 158 aa, Muscodor strobelii
  misc_feature: SGI Peptide ID NO. 570650
MVRKGFLPLPPRLLPPDLRPGHHSNSRYVALLKELNKYGSVNQDISEGLDEDAMDIDDPEDDHVPALDDEDETDDEIDDDDFLGRDPNDATLTGMAKEKKILNWDPVSVSAKSKERSSYGTHAPKPVALESLLVPRENSLRANVSTEATTGKTSEARA

SEQ ID NO: 30947 - DNA, 783 bp, Muscodor strobelii
  misc_feature: SGI cDNA ID NO. 570651
  misc_feature: Encodes the peptide sequence at SEQ ID NO 30948
atgaagacgtggtttcttccacccgaggcgaagggcatgcggcgccaaggcaactccgggcgagtgcagcccgctcgcgactcgccgtcattgatggagaacatctggtgggacagcaacatgtcttctctggctggtgcttcgttgttcaactttcgcaatgtaatgcatttcgttgaagttatttgtcctttgcagtacggattctcttcactgcgctatcatcctaagtacgaggatcacaagtggctggtaaacgagatcgtggaaaacgagtctctctaccatgctgccactggcttgagtctctgccttgaatcaggccgagaagatggaaacacaagtggtttctgtaatgcctcgatgaacgttcgaaagtcgcagattaaggctatacaaggcttgcagattcgtgttaatgaccttgcgactgaaagacagcaatctgccatcgcaccggtacggatggtctctggggtcctcgcccccatcttgcatctcctcagtctggagatattcaactcgcttgggggagaatgggatatgcatctgaatgcagccagtactatactgggtctttttcaaaaaccctggctttccaaagccgctccttcgcaaggattccagcccgagcctgatcctatccgcgtaattctgaccaatccatctcgttcgcgggaatcgaaagcgttctcgttctatgtaaatgcatttgtctggacggacattagtaagtatcatttgtcacttcagaaccagcaacttgatgtggaagcatgttaa

SEQ ID NO: 30948 - protein, 260 aa, Muscodor strobelii
  misc_feature: SGI Peptide ID NO. 570651
  misc_feature (7)..(243): NCBI GI: 256733323 Blast Desc: NECHADRAFT_77283 [Nectria haematococca mpVI 77-13-4]
  misc_feature (55)..(206): NCBI GI: 121712527 Blast Desc: conserved [Aspergillus clavatus NRRL 1] gi|119402027|gb|EAW12449.1| conserved [Aspergillus clavatus NRRL 1]
  misc_feature (41)..(187): NCBI GI: 242779071 Blast Desc: C6 transcription factor, [Talaromyces stipitatus ATCC 10500] gi|218722987|gb|EED22405.1| C6 transcription factor, [Talaromyces stipitatus ATCC 10500]
  misc_feature (55)..(242): NCBI GI: 154311114 Blast Desc: BC1G_06675 [Botryotinia fuckeliana B05.10] gi|150851079|gb|EDN26272.1| BC1G_06675 [Botryotinia fuckeliana B05.10]
  misc_feature (41)..(204): NCBI GI: 212533889 Blast Desc: C6 transcription factor, [Penicillium marneffei ATCC 18224] gi|210072465|gb|EEA26554.1| C6 transcription factor, [Penicillium marneffei ATCC 18224]
MKTWFLPPEAKGMRRQGNSGRVQPARDSPSLMENIWWDSNMSSLAGASLFNFRNVMHFVEVICPLQYGFSSLRYHPKYEDHKWLVNEIVENESLYHAATGLSLCLESGREDGNTSGFCNASMNVRKSQIKAIQGLQIRVNDLATERQQSAIAPVRMVSGVLAPILHLLSLEIFNSLGGEWDMHLNAASTILGLFQKPWLSKAAPSQGFQPEPDPIRVILTNPSRSRESKAFSFYVNAFVWTDISKYHLSLQNQQLDVEAC

SEQ ID NO: 30949 - DNA, 1976 bp, Muscodor strobelii
  misc_feature: SGI EST ID NO. CUFF.73263.0
  misc_feature: Variant of the nucleotide sequence at SEQ ID NO 30947
cctaattggcgactgcaacatgcgcaaagtctgtcgtgatgtctggatcgagaaccacgacaggttgctacacctgccgcctaagacgcaagaaatgcgatgaaaggaggcccttctgtctctcttgctcctcgcgagatattccatgtctcgggtatgacgccaagccagcctggatgttaggtttagggagttggcaagaggtactacagtcggaagaggcaagaacaataagaaaagccgctgtcagaaattataatctccgacggggtatcagccgccgcgccgatcaaggacaggatgaagacgtggtttcttccacccgaggcgaagggcatgcggcgccaaggcaactccgggcgagtgggccgatagtgcagcccgctcgcgactcgccgtcattgatggagaacatctggtgggacagcaacatgtcttctctggctggtgcttcgttgttcaactttcgcaatgtaatgcatttcgttgaagttatttgtcctttgcagtacggattctcttcactgcgctatcatcctaagtacgaggatcacaagtggctggtaaacgagatcgtggaaaacgagtctctctaccatgctgccactggcttgagtctctgccttgaatcaggccgagaagatggaaacacaagtggtttctgtaatgcctcgatgaacgttcgaaagtcgcagattaaggctatacaaggcttgcagattcgtgttaatgaccttgcgactgaaagacagcaatctgccatcgcaccggtacggatggtctctggggtcctcgcccccatcttgcatctcctcagtctggagatattcaactcgcttgggggagaatgggatatgcatctgaatgcagccagtactatactgggtctttttcaaaaaccctggctttccaaagccgctccttcgcaaggattccagcccgagcctgatcctatccgcgtaattctgaccaatccatctcgttcgcgggaatcgaaagcgttctcgttctatgtaaatgcatttgtctggacggacattagtaagtatcatttgtcacttcagaaccagcaacttgatgtggaagcatgttaaggacatacttcaatccgtcatcaggtactgatattaggcagtggccaatgcctcccgtcggcaacgtgatcccaatgtcgccagctttgactatgtcgcctttctcaaggaagggctgatctgcccaagtcaaatcatgggatgccacgatacgataatgactgctatttgcgacataaatatactggaagcggagaaaaatgtgttgcaaatacgacaggacttgcaatccgtgcgatttatcgagagggtatcactcatagaacgagcaatcgaggaatgcctacaaaataccctcaacgatacgccccaccagccaagcgggatcgcttctacggacagcagatcagtcaccgagatattcagcttcgctgcactcatatacctctcccatgtatctttagacgataataagcttgcgatcactgtgcgacattgcctggagaaattggaggcattgccgtcttaccttttcattcgcgtctgctggccctttgctgttgctgggtgcatggcagaggaaagtgaccatgatagatttagatcattagttgcgcgagttgttgcagagagtcaggtgctaggtttcacatggaaggcgctgattctcatggaggagtgctggcgattacggcgcgaagaccggtactggtgttggaagactacaatggatcatatgaggttgagcatcctgttcatatagacaaactatcattcgctgtctgcccctgcagtgagtccatagcttcgcctactctgttcgtgtgtgtttaatatctgtgtgcgtctgttatcgcaatcgatgacatgttgagccctaccagcagtcagaactgtgacagttccgattctctcgtggccttcaggtgtcggcatttttcc

SEQ ID NO: 30950 - DNA, 366 bp, Muscodor strobelii
  misc_feature: SGI cDNA ID NO. 570652
  misc_feature: Encodes the peptide sequence at SEQ ID NO 30951
atggcacctcttgtcttgggacttggcattccggctacatcgccattgactccctgggcttttcgtgccggtgttaagaaggccattgactttatgaatcgcgatatgaatgcatccccatatgattgggagatgttctacctcgaccaagacatggacttttctcttatagccgcgaagctaaaagaaaaaccttgggatctggtgatgattggacgcggtatgcgaactatggatgcgctggctcccctcatggaaaggattgtgaatacggtacatgcggagttgccaaaggctaagattgtgttcaatacgaccatcgaaaagacgcgcgaatcctgcaaccgcgttctacccgtcgagtag

SEQ ID NO: 30951 - protein, 121 aa, Muscodor strobelii
  misc_feature: SGI Peptide ID NO. 570652
  misc_feature (16)..(116): NCBI GI: 208779092 Blast Desc: conserved [Francisella novicida FTG] gi|208744892|gb|EDZ91190.1| conserved [Francisella novicida FTG]
  misc_feature (44)..(118): NCBI GI: 256770576 Blast Desc: StreC_28859 [Streptomyces sp. C]
  misc_feature (1)..(116): NCBI GI: 255531669 Blast Desc: Phep_1770 [Pedobacter heparinus DSM 2366] gi|255344653|gb|ACU03979.1| conserved [Pedobacter heparinus DSM 2366]
  misc_feature (21)..(119): NCBI GI: 115373005 Blast Desc: conserved [Stigmatella aurantiaca DW4/3-1] gi|115369917|gb|EAU68849.1| conserved [Stigmatella aurantiaca DW4/3-1]
  misc_feature (57)..(119): NCBI GI: 256677452 Blast Desc: SSPB78_14053 [Streptomyces sp. SPB78]
  misc_feature (18)..(119): NCBI GI: 254376878 Blast Desc: conserved [Streptomyces sp. SPB74] gi|197696688|gb|EDY43621.1| conserved [Streptomyces sp. SPB74]
  misc_feature (45)..(116): NCBI GI: 256779523 Blast Desc: ShygA5_32010 [Streptomyces hygroscopicus ATCC 53653]
  misc_feature (57)..(116): NCBI GI: 159043311 Blast Desc: Dshi_0759 [Dinoroseobacter shibae DFL 12] gi|157911071|gb|ABV92504.1| conserved [Dinoroseobacter shibae DFL 12]
  misc_feature (64)..(118): NCBI GI: 111220337 Blast Desc: FRAAL0866 [Frankia alni ACN14a] gi|111147869|emb|CAJ59534.1| [Frankia alni ACN14a]
  misc_feature (58)..(118): NCBI GI: 85708661 Blast Desc: NAP1_05460 [Erythrobacter sp. NAP1] gi|85690195|gb|EAQ30198.1| NAP1_05460 [Erythrobacter sp. NAP1]
MAPLVLGLGIPATSPLTPWAFRAGVKKAIDFMNRDMNASPYDWEMFYLDQDMDFSLIAAKLKEKPWDLVMIGRGMRTMDALAPLMERIVNTVHAELPKAKIVFNTTIEKTRESCNRVLPVE

SEQ ID NO: 30952 - DNA, 342 bp, Muscodor strobelii
  misc_feature: SGI EST ID NO. CUFF.73265.0
  misc_feature: Variant of the nucleotide sequence at SEQ ID NO 30950
ctggctcccctcatggaaaggattgtgaatacggtacatgcggagttgccaaaggctaagattgtgttcaatacgaccatcgaaaagacgcgcgaatcctgcaaccgcgttctacccgtcgagtagcatgtgaatctagttaaagagagaaatgtaatttcgattgttgccggcctgcttactcgggttaccacctgggtcaatacggtgcgttccgcgcagcatgatataggggctcaagtgtagatttgtatacgattcttattcgccggcttaatcagaggatgattggaaagttatcccatcattattcttcccacataagcgtctacaaaacttccg

SEQ ID NO: 30953 - DNA, 585 bp, Muscodor strobelii
  misc_feature: SGI cDNA ID NO. 570653
  misc_feature: Encodes the peptide sequence at SEQ ID NO 30954
atcggcaacagcggccgcaacgcctcccgccaggccgcccagaagatcagcaacggcagcagcgccaacggcaacggcaacggccacgacaacaacacgccgccctcgagccagaagggcacgccactgcccgggtcgcgcgccggcagccccagcaagaagcgcgacggcgacgacctcgacaacgacgacgccgccaccgacaacgacggccacaagaagaagaagctcaagccctccctccccgccatcggccccggcaagaaggtcgtcgtcaagcccaaggccgccgccgccgcgctcggcaagaaggacaagctgcaaaagacgagtagtagccagagccagagccagaacgacgacgacgagggctcgaccgtcgaggtggcgcccaagaagaaggtcaccaagatccccagccccgccaagaagctcaagctcggcgtcaagcccctgcagtcctcgcccctggccaagagcaacgcgaaggccgtgcccgccgctgccggcaacaacaatggagggggaggagacgactctggggccgagagttcgggaacattgtcctcgccgcctggtccttga

SEQ ID NO: 30954 - protein, 194 aa, Muscodor strobelii
  misc_feature: SGI Peptide ID NO. 570653
  misc_feature (1)..(192): NCBI GI: 46128797 Blast Desc: FG08776.1 [Gibberella zeae PH-1]
  misc_feature (1)..(192): NCBI GI: 256734018 Blast Desc: NECHADRAFT_35320 [Nectria haematococca mpVI 77-13-4]
  misc_feature (1)..(192): NCBI GI: 85114656 Blast Desc: NCU00577 [Neurospora crassa OR74A] gi|28926530|gb|EAA35502.1| conserved [Neurospora crassa OR74A] gi|38567329|emb|CAE76617.1| [Neurospora crassa]
  misc_feature (1)..(148): NCBI GI: 116192963 Blast Desc: CHGG_06199 [Chaetomium globosum CBS 148.51] gi|88182112|gb|EAQ89580.1| CHGG_06199 [Chaetomium globosum CBS 148.51]
  misc_feature (1)..(164): NCBI GI: 171684007 Blast Desc: protein product [Podospora anserina] gi|170941964|emb|CAP67616.1| protein product [Podospora anserina]
  misc_feature (1)..(192): NCBI GI: 145609764 Blast Desc: MGG_02996 [Magnaporthe grisea 70-15] gi|145017161|gb|EDK01524.1| MGG_02996 [Magnaporthe grisea 70-15]
  misc_feature (1)..(192): NCBI GI: 149210609 Blast Desc: MGCH7_ch7g777 [Magnaporthe grisea 70-15] gi|86196732|gb|EAQ71370.1| MGCH7_ch7g777 [Magnaporthe grisea 70-15]
IGNSGRNASRQAAQKISNGSSANGNGNGHDNNTPPSSQKGTPLPGSRAGSPSKKRDGDDLDNDDAATDNDGHKKKKLKPSLPAIGPGKKVVVKPKAAAAALGKKDKLQKTSSSQSQSQNDDDEGSTVEVAPKKKVTKIPSPAKKLKLGVKPLQSSPLAKSNAKAVPAAAGNNNGGGGDDSGAESSGTLSSPPGP

SEQ ID NO: 30955 - DNA, 1104 bp, Muscodor strobelii
  misc_feature: SGI EST ID NO. CUFF.73299.1
  misc_feature: Variant of the nucleotide sequence at SEQ ID NO 30953
catcggcaacagcggccgcaacgcctcccgccaggccgcccagaagatcagcaacggcagcagcgccaacggcaacggcaacggccacgacaacaacacgccgccctcgagccagaagggcacgccactgcccgggtcgcgcgccggcagccccagcaagaagcgcgacggcgacgacctcgacaacgacgacgccgccaccgacaacgacggccacaagaagaagaagctcaagccctccctccccgccatcggccccggcaagaaggtcgtcgtcaagcccaaggccgccgccgccgcgctcggcaagaaggacaagctgcaaaagacgagtagtagccagagccagagccagaacgacgacgacgagggctcgaccgtcgaggtggcgcccaagaagaaggtcaccaagatccccagccccgccaagaagctcaagctcggcgtcaagcccctgcagtcctcgcccctggccaagagcaacgcgaaggccgtgcccgccgctgccggcaacaacaatggagggggaggagacgactctggggccgagagttcgggaacattgtcctcgccgcctggtccttgacgacaggatccctaagggggcacaatctagctcacgagggcaagggcgagatcgagttccaacttcccgactcaaggatttctacgagcatgtgccatatctactcttccttcgagagtcactgatcacgacaacttctattttctcccgacactcgtctacctgatccaagatccgacacaattttccaccaccgtctgtataatgccaaaatagggtttgcattaaaaaggggggttcacaggcgtttctgcattgcataggtggaaggggaccatcatcaacaacatcatcaccatcatcaccggcgttatggggggctctacactgactttgaaatctagatggattggtcgaagtcggaattctgtatacatacacacctacctactacctatcttccatcttcaacatccctatcatggggcacttgcacatagtactactcacttacccgccttctttcgagatgaaagatgaataagagctgggccgcgttggtcaatgccattgattct

SEQ ID NO: 30956 - DNA, 1038 bp, Muscodor strobelii
  misc_feature: SGI cDNA ID NO. 570654
  misc_feature: Encodes the peptide sequence at SEQ ID NO 30957
atggctttcaatttcgaagaatttatggctgaggagcgtctgagggagcgtcgcaaaatagttgcccttgaccccaacttcttcctgcgtggcctccccttcccctggcgtgacaacgcagatgcccccaacttctcgtctatgcccaactcccgtatccctagccatgccgatgtccttcacagggctctacttacagccaacgacgtggtcgctaaaagaatcttctccattggagaatttttcgtaaagatcggcacggacgtgagccgggtcgaaggcgagaccatgttctgcctccgctacacagttgcgaacatcgatatccccgccgtctacgccatctatccgtgtggtcctaacaacgagatgacttgtatcatcatggaacgtatccgtgggcgaaatttacataacttactcctggagatggcggacccagatggcacggatggggacgagaaccacatcacagaattcattgacccgaatgattatttcacctgggatcctgacagatgggagcatgactttcagatcatccagcacagacttatgaatgctctgacgctacttaggacgagagttcaaccgcaaacgagatatggctcaattggtcatcagcccttccgtagacggacggaggcagaccggacttcaaggctcgggcctcatgacgcgggctcaggggccatggcgcattttatgttcagacgtctgttaaaagcgggtgataggcgggagccctggatcatggcagcacgcgttgattacggccaacgaattcgtgacctatcgagtcaactcaacctaccaacgtttagccatggaagtttccgaccaaggaatgtcattgtccgaaatggcaatctccctgtactagttgactggaaggacgcaggttggtacccggcgtactacgagaatctctatgccagaatatatgggcgggaaattgtgccctgtacggtcgagtacggggctgcggttcgcatacacaatcgtgtattaaggactttcagggaacatggccgatag

SEQ ID NO: 30957 - protein, 345 aa, Muscodor strobelii
  misc_feature: SGI Peptide ID NO. 570654
  misc_feature (44)..(312): NCBI GI: 261354367 Blast Desc: phosphotransferase enzyme family protein [Verticillium albo-atrum VaMs.102]
  misc_feature (72)..(308): NCBI GI: 256733749 Blast Desc: NECHADRAFT_6430 [Nectria haematococca mpVI 77-13-4]
  misc_feature (80)..(312): NCBI GI: 189192394 Blast Desc: phosphotransferase enzyme family protein [Pyrenophora tritici-repentis Pt-1C-BFP] gi|187974142|gb|EDU41641.1| phosphotransferase enzyme family protein [Pyrenophora Pt-1C-BFP]
  misc_feature (181)..(328): NCBI GI: 240107314 Blast Desc: Phosphotransferase family protein [Coccidioides posadasii C735 delta SOWgp]
  misc_feature (181)..(328): NCBI GI: 119190801 Blast Desc: [Coccidioides immitis RS]
  misc_feature (54)..(313): NCBI GI: 255955165 Blast Desc: Pc21g13160 [Penicillium chrysogenum Wisconsin 54-1255] gi|211590046|emb|CAP96213.1| Pc21g13160 [Penicillium chrysogenum Wisconsin 54-1255]
  misc_feature (72)..(312): NCBI GI: 67901978 Blast Desc: AN7976.2 [Aspergillus nidulans FGSC A4] gi|40740440|gb|EAA59630.1| AN7976.2 [Aspergillus nidulans FGSC A4] gi|259480726|tpe|CBF73633.1| TPA: conserved [Aspergillus FGSC
  misc_feature (181)..(340): NCBI GI: 225555170 Blast Desc: conserved [Ajellomyces capsulatus G186AR]
  misc_feature (258)..(308): NCBI GI: 255930383 Blast Desc: Pc06g01460 [Penicillium chrysogenum Wisconsin 54-1255] gi|211581364|emb|CAP79139.1| Pc06g01460 [Penicillium chrysogenum Wisconsin 54-1255]
  misc_feature (60)..(308): NCBI GI: 225558265 Blast Desc: conserved [Ajellomyces capsulatus G186AR]
MAFNFEEFMAEERLRERRKIVALDPNFFLRGLPFPWRDNADAPNFSSMPNSRIPSHADVLHRALLTANDVVAKRIFSIGEFFVKIGTDVSRVEGETMFCLRYTVANIDIPAVYAIYPCGPNNEMTCIIMERIRGRNLHNLLLEMADPDGTDGDENHITEFIDPNDYFTWDPDRWEHDFQIIQHRLMNALTLLRTRVQPQTRYGSIGHQPFRRRTEADRTSRLGPHDAGSGAMAHFMFRRLLKAGDRREPWIMAARVDYGQRIRDLSSQLNLPTFSHGSFRPRNVIVRNGNLPVLVDWKDAGWYPAYYENLYARIYGREIVPCTVEYGAAVRIHNRVLRTFREHGR

SEQ ID NO: 30958 - DNA, 228 bp, Muscodor strobelii
  misc_feature: SGI EST ID NO. CUFF.73286.0
  misc_feature: Variant of the nucleotide sequence at SEQ ID NO 30956
gacttcgttaacttcagacagccttcacaaccccaatactaagctacattcccgtcttgtcttgaattgagcatggctttcaatttcgaagaatttatggctgaggagcgtctgagggagcgtcgcaaaatagttgcccttgaccccaacttcttcctgcgtggcctccccttcccctggcgtgacaacgcagatgcccccaacttctcgtctatgcccaactcccgt

SEQ ID NO: 30959 - DNA, 486 bp, Muscodor strobelii
  misc_feature: SGI cDNA ID NO. 570655
  misc_feature: Encodes the peptide sequence at SEQ ID NO 30960
atggctagcaacgttgcgctcgagacgtcgatgggcaccatcaccgtcgagctgtacacgcagcacgcgcccaagacgtgccagaacttcgtgacgctgtcgcagcgcggctactacaacgacaccgtcttccaccgcatcatcccctccttcatgatccagggcggcgacccctccggcaccggccgcggcggctcctccatctacggcgacaagttcgccgacgagatctccgacgagctgcgccacacgggcgccggcgtcctgagcatggccaacgccggccccgacaccaacggcagccagttcttcatcacccttgccccgacgccctggctcgaccgcaagcacaccatcttcggccgcgtcaagagcggcatgggcgtcgtcaagcgcatgggactcgtcaagacgggggacggcgacaggccagtcgaggaggtcaagatcctcaaggccaaggtgttggaggacggtgacgagtga

SEQ ID NO: 30960 - protein, 161 aa, Muscodor strobelii
  misc_feature: SGI Peptide ID NO. 570655
  misc_feature (4)..(156): Pfam Id: PF00160 Pfam Desc: Cyclophilin type peptidyl-prolyl cis-trans isomerase/CLD
  misc_feature (1)..(159): NCBI GI: 225678123 Blast Desc: peptidyl-prolyl cis-trans isomerase cypE [Paracoccidioides brasiliensis Pb03] gi|226287620|gb|EEH43133.1| peptidyl-prolyl cis-trans isomerase cypE [Paracoccidioides Pb18]
  misc_feature (1)..(159): NCBI GI: 226279555 Blast Desc: peptidyl-prolyl cis-trans isomerase cypE [Paracoccidioides brasiliensis Pb01]
  misc_feature (1)..(161): NCBI GI: 70984713 Blast Desc: peptidyl prolyl cis-trans isomerase (CypC) [Aspergillus fumigatus Af293] gi|74667323|sp|Q4WCR3.1|PPIL1_ASPFU RecName: Full=Peptidyl-prolyl cis-trans isomerase-like 1; prolyl
  misc_feature (1)..(161): NCBI GI: 169778787 Blast Desc: [Aspergillus oryzae RIB40] gi|238499359|ref|XP_002380914.1| peptidyl prolyl cis-trans isomerase (CypC), [Aspergillus flavus NRRL3357] RecName: 1;
  misc_feature (1)..(161): NCBI GI: 121704106 Blast Desc: peptidyl prolyl cis-trans isomerase (CypC), [Aspergillus clavatus NRRL 1] gi|119398461|gb|EAW08891.1| peptidyl prolyl cis-trans isomerase (CypC), [Aspergillus clavatus
  misc_feature (1)..(161): NCBI GI: 119467178 Blast Desc: peptidyl prolyl cis-trans isomerase (CypC), [Neosartorya fischeri NRRL 181] gi|119405547|gb|EAW15498.1| peptidyl prolyl cis-trans isomerase (CypC), [Neosartorya fischeri
  misc_feature (1)..(161): NCBI GI: 46128799 Blast Desc: FG08777.1 [Gibberella zeae PH-1] gi|93140603|sp|Q4I1Y1.1|PPIL1_GIBZE RecName: Full=Peptidyl-prolyl cis-trans isomerase-like 1; Short=PPIase; Short=Rotamase
  misc_feature (1)..(161): NCBI GI: 67903386 Blast Desc: AN8680.2 [Aspergillus nidulans FGSC A4] gi|74656814|sp|Q5ASQ0.1|PPIL1_EMENI RecName: Full=Peptidyl-prolyl cis-trans isomerase-like 1; Short=PPIase; Short=Rotamase AN8680.2
  misc_feature (1)..(161): NCBI GI: 145247340 Blast Desc: An12g08680 [Aspergillus niger] gi|134080653|emb|CAK41318.1| protein product [Aspergillus niger]
  misc_feature (1)..(159): NCBI GI: 115386764 Blast Desc: peptidyl-prolyl cis-trans isomerase ppi1 [Aspergillus terreus NIH2624] gi|114190921|gb|EAU32621.1| peptidyl-prolyl cis-trans isomerase ppi1 [Aspergillus terreus NIH2624]
  misc_feature (1)..(161): SWISSPROT Homolog: EC 5.2.1.8 Peptidylprolyl isomerase
MASNVALETSMGTITVELYTQHAPKTCQNFVTLSQRGYYNDTVFHRIIPSFMIQGGDPSGTGRGGSSIYGDKFADEISDELRHTGAGVLSMANAGPDTNGSQFFITLAPTPWLDRKHTIFGRVKSGMGVVKRMGLVKTGDGDRPVEEVKILKAKVLEDGDE

SEQ ID NO: 30961 - DNA, 3796 bp, Muscodor strobelii
  misc_feature: SGI EST ID NO. CUFF.73297.0
  misc_feature: Variant of the nucleotide sequence at SEQ ID NO 30959
ctgcttcaaccatcaccaactcgacattctggcattctggcatcaatcgattctggcatcctgatcctgcggctctgagactttgcgtttctgatcttacagcgtcgtaactctacattcgcaaagcagaagtacattggccggcaacatggctagcaacgttgcgctcgagacgtcgatgggcaccatcaccgtcgagctgtacacgcagcacgcgcccaagacgtgccagaacttcgtgacgctgtcgcagcgcggctactacaacgacaccgtcttccaccgcatcatcccctccttcatgatccagggcggcgacccctccggcaccggccgcggcggctcctccatctacggcgacaagttcgccgacgagatctccgacgagctgcgccacacgggcgccggcgtcctgagcatggccaacgccggccccgacaccaacggcagccagttcttcatcacccttgccccgacgccctggctcgaccgcaagcacaccatcttcggccgcgtcaagagcggcatgggcgtcgtcaagcgcatgggactcgtcaagacgggggacggcgacaggccagtcgaggaggtcaagatcctcaaggccaaggtgttggaggacggtgacgagtgatcgcacgagatgacgttcttcgagtgtgcatagaagtgtcttcttgcctctctccagaacagcatagcaaggctctgcaatgaacatgagctggcggcctggtatgcagtgcgcagtgcatatagcgtggcgtacggcgtacggtcaattatgacggctacagagagtcaatcgtagcatgctcacggacagtatctgataggcagactactaacaagagacgcggttcaccacgtaggcacgacccctcaagtcatccaagcgtcgtcggcaaccaacgcgtcttatacttagcgtctttcaaccaacttggtacatctgaaatctgccgattactccacaatcaaccaagccatctaattgaattataattagaagactatttggccgatgaaaattgcatcatacatcgcactggcgtaagggagcatcatctagtttgtccatagccgcaactaaaccatcgtctacaaacatcttgtttactaacgcgaattttgatatgtctacacaagtaggaaacaatctaatggattctctttacatacgcttggcgtattgtgtacctcttcagtctccatcgctattttctttagccacggttgctatcatatatggcacatatgtggctgtcggacccgcattgctctgtatcaagacatagacgaagggcgtcttcccctctgcattagtaatgtgagcatcttgcgtcttgcttccctcttctgctgttgcttttccttctctctcacacgcagccatttaagctcgtgttgcaccgaacagtgtttgacaagatagaatgagatatggaataatctagcccatttatgcaaggcgctacagcggcatactgtaggctattccaggtaacggggaatggaaacctctgaagttcagtttcatcgtgccatcatcagggccactaggtaggaacacttgcagaagaaagacaatttatacaacgtcgagaaagccacaaatgctagcatctcatttgcgtctaatcgatcgaatcaccacgtcaatacacacatcggcacttcaacatttggcaccgggaaaagttgtttctccagattggacaatcctgggtaacctccagtaatttgcctcagtgcaaatttatacaggcgtcattcctcgacggaaacgtccttacttttgggacgacctcatatgtctggggagatgcgtggcggaaagcacaagtcgaaatcgatggagctgtcgttgacattccggtcagcgcaggtgaagccaccaagcagatagcctttacagacacgcacagaaccgtctggactgatgccattgcatcgataagatcgacttggatgaaagactaacccaagttacccttatatctactcgggcggcacatgcgatctgatctgtcacagtattgctgacagtgagctatcatttggttccgtgaggcgctcaatgtagtttgcgcagggaaccatcgccgtgtagataccaagcttcttcaacgcttctcattttgaatagacccctcgacgagttgagcgccgccgtcgcatggacatgatcgcccgtaatacgaaacgcttcttcctcttttcgagcactcatggttcactccaatctagacgtagcaaaattttgtgctactcaagaggaaacgtctatgtatccggcaatatcgggtgtgggcctaaactgcgcgtggtcttataagtcgcttcccagatgcaccaagtgttcacagccaaatacaacgacatccaatattttaagaggcttatgaggcacgttctatctatgtcacatgactctaattccacagtacgggatagcctagactttgtgcggctttaatacgttgaacagggcgagctctcgtatggccgtgattcgagggatagagttgtgggaacgggttgcggccattatgcagaatcgcccatccctggacttcgggtagtcaattatcggaacccgagggtcgcatgttctctgcaatgcttacaaagacttgttgctgttcgacgaagatagagcttaccttacgatcagcatgttgcattatgagcacagggagctactggacaagtgctatcgatcgttcatgcccaggatgcgtgggaatctctgaaatacgagtccagaacaccccgcttgttgatgagaagaggtgcagtaatatgaaccgcatgatatagcccgggcgggcgcagacggcgacattgcgctcacgacacaagatagacccgttggcatgaatgaagaacttcttctatcaaggaatatatttcaccgagagtgctggtgctggctggttaaaggagcacattgcctggccacgaagtctagtgcatctgctcttgtccaccaactctttcaaccgcgcagcatgattttcagtatcgagagaaagcgtagcggggtgccagacgtcctaagacattacgaggatagccgcaatgtcgctggagggtgctgttatgtggcaagatgcgaggccccggggtacattctacgtggaccagattttgatagcagaaggaaattcagggtcttcgaattattgatagtcaagcaaaaatattcggtttacaaccccttcgcgcgcaaaaatgctaacggacaatgctcagaaatttgcagaaagaggaactctgcacattctttctaccggattgtcttagcatcgtctccgattctcgaactattaagaggttatacaaatccctcgaagatctgtacggacagatatgaaatgagtaggaaaagcagtatgaagaaatgggagtctgctgcgtagcctgtgcgacctcaaacagtaaaatcaaggagttggagtttacaaagaacgaggttagcaacctccagggagccgagcaagaactaagtgagatcttgaataagtcgacttgcgtatcggaaggagaactattccgtatgattgtcatttcagatggcgcaagtaatacagagactggggcatgccatcactctgatcgtgcttcttgaccattcttcatccacatgaattttgaaaagtagaacagcttgaactttctcgacaatatcgctacatagaggcctcatgtcaaccttcacgttgcccaggcaagggagctgggcctcgactgggtcgattggagaaggctttcttcatttagcaggcttgcg

SEQ ID NO: 30962 - DNA, 1740 bp, Muscodor strobelii
  misc_feature: SGI cDNA ID NO. 570656
  misc_feature: Encodes the peptide sequence at SEQ ID NO 30963
atggcggccaaccactctgtgaacggcgctatggacggtgtctcgatttccaataccagcacctctctcaaccaaacgttctacgacaagctcggcagcgtgccgactgtgctgctacagaatacagatctgctcattctcgagatccgcatagtattcacggccctcgccatcatttacatcggctgccacgctgcccttcgccgtcctccgtccgctgcagtcccccagaagaaaggtcgggacgataagggcaaggatgatgtctttgtccagggcatgctaccatcagacatcatcctattccccattttggccggcaccgttctcatcgggctgtactaccttatcaaatggcttgaagacccagacattctcaataagatcctcaaggtctacttctccgtcatgtctcttgcttctctcggtaaattgttcgccgacggattacacttcctgaccacatttgtcttccccaccgtctgggtcacgtcaaacggtcgcgtgtatcacattgatgggagaaagcaacagcaatggtacagtcaggagagttcaacggggactgcccaggtccgggatgatgggaagaggtcccctctgcctggtcgcctgtccagtctccagctatcggcacgcacgaacaacctattgtggagcgttcgccatctactcaccgaacaatggaccgttcgactcgcgatacatggtatcatgtacgaaaaggtcaaggctagcttcaacgatatcctcggcattgtcctcgcagtctgcgcaaatgtcgtgtatcacaccctgccatccaatttcatttcaaacgttatgggatatgccttctcgtacttcggtatcatcgttatgtcacctaccactttcggaatcggcagcggtgtgcttttcgggctcttcttctacgatattgtgatggtcttctacaccccatacatggtgacggttgccaccaagctcgacgccccaatcaagcttgtcttcgaaggccctacacgcgctagtatgctcgggcttggtgacatcgttgttcctggcatgttcattggattgtgtctgcgattcgacctatacatgtactatcaccggcaacgaaagctccagcctgttgaactcagcacatccgacgagaatgcaactacgatcgaaacacaacgcatggtcatcaagccggactatgtgaatccgcaaggacaatggggagatcgtttctgggctacctcactcttcaataccttctctccggatgccacgccgagactcaaggcctcggcatttcctaagccgtatttccacgctgcgatattcggctatctgattgcaatggtcgtcacactcgtgatgctgctagccttccagcacgcgcaacctgcactgttgtacctcgttccgggggtcgtggcagctgtatggctaacgggtataatcagaggcgaagtcaaagatatgtggagatacactgaagacggatcgctagatcagaaagacgtgcttgtcgaagttgacggagaaggaagaatcgtgaagactatcgagcccgagaagaaaagtgatggggatgagaagaagaatgaggcagcccagggtaggaaggagaaatcggatgacaaaagcacgctaaaggcggcagatggaatcgtagatgatgaacataaagccaaggccaagtcgtacccggtgttccttctcagcatcgaggcgccgatgtctggcgaggagaagatcgaatag

SEQ ID NO: 30963 - protein, 579 aa, Muscodor strobelii
  misc_feature: SGI Peptide ID NO. 570656
  misc_feature (86)..(491): Pfam Id: PF04258 Pfam Desc: Signal peptide peptidase
  misc_feature (271)..(361): Pfam Id: PF04258 Pfam Desc: Signal peptide peptidase
  misc_feature (433)..(491): Pfam Id: PF04258 Pfam Desc: Signal peptide peptidase
  misc_feature (49)..(571): NCBI GI: 171684025 Blast Desc: protein product [Podospora anserina] gi|170941973|emb|CAP67625.1| protein product [Podospora anserina]
  misc_feature (51)..(571): NCBI GI: 116192951 Blast Desc: CHGG_06193 [Chaetomium globosum CBS 148.51] gi|88182106|gb|EAQ89574.1| CHGG_06193 [Chaetomium globosum CBS 148.51]
  misc_feature (38)..(527): NCBI GI: 85114615 Blast Desc: NCU00568 [Neurospora crassa OR74A] gi|28926521|gb|EAA35493.1| [Neurospora crassa OR74A]
  misc_feature (3)..(514): NCBI GI: 256734017 Blast Desc: NECHADRAFT_99610 [Nectria haematococca mpVI 77-13-4]
  misc_feature (10)..(514): NCBI GI: 46128806 Blast Desc: FG08778.1 [Gibberella zeae PH-1]
  misc_feature (40)..(579): NCBI GI: 261353099 Blast Desc: signal peptide peptidase family protein [Verticillium albo-atrum VaMs.102]
  misc_feature (40)..(575): NCBI GI: 149210613 Blast Desc: MGCH7_ch7g779 [Magnaporthe grisea 70-15] gi|86196734|gb|EAQ71372.1| MGCH7_ch7g779 [Magnaporthe grisea 70-15]
  misc_feature (40)..(575): NCBI GI: 145609762 Blast Desc: MGG_02998 [Magnaporthe grisea 70-15] gi|145017159|gb|EDK01522.1| MGG_02998 [Magnaporthe grisea 70-15]
  misc_feature (29)..(541): NCBI GI: 154305717 Blast Desc: BC1G_07673 [Botryotinia fuckeliana B05.10] gi|150853192|gb|EDN28384.1| BC1G_07673 [Botryotinia fuckeliana B05.10]
  misc_feature (36)..(496): NCBI GI: 156031130 Blast Desc: SS1G_14173 [Sclerotinia sclerotiorum 1980] gi|154700564|gb|EDO00303.1| SS1G_14173 [Sclerotinia sclerotiorum 1980]
MAANHSVNGAMDGVSISNTSTSLNQTFYDKLGSVPTVLLQNTDLLILEIRIVFTALAIIYIGCHAALRRPPSAAVPQKKGRDDKGKDDVFVQGMLPSDIILFPILAGTVLIGLYYLIKWLEDPDILNKILKVYFSVMSLASLGKLFADGLHFLTTFVFPTVWVTSNGRVYHIDGRKQQQWYSQESSTGTAQVRDDGKRSPLPGRLSSLQLSARTNNLLWSVRHLLTEQWTVRLAIHGIMYEKVKASFNDILGIVLAVCANVVYHTLPSNFISNVMGYAFSYFGIIVMSPTTFGIGSGVLFGLFFYDIVMVFYTPYMVTVATKLDAPIKLVFEGPTRASMLGLGDIVVPGMFIGLCLRFDLYMYYHRQRKLQPVELSTSDENATTIETQRMVIKPDYVNPQGQWGDRFWATSLFNTFSPDATPRLKASAFPKPYFHAAIFGYLIAMVVTLVMLLAFQHAQPALLYLVPGVVAAVWLTGIIRGEVKDMWRYTEDGSLDQKDVLVEVDGEGRIVKTIEPEKKSDGDEKKNEAAQGRKEKSDDKSTLKAADGIVDDEHKAKAKSYPVFLLSIEAPMSGEEKIE

SEQ ID NO: 30964 - DNA, 2192 bp, Muscodor strobelii
  misc_feature: SGI EST ID NO. CUFF.73338.1
  misc_feature: Variant of the nucleotide sequence at SEQ ID NO 30962
gtaaacccttctactctcatctaatattttcgtatgggcaggtcccgggccacaaatatcatctatacaggttgccacactgtcctcctcccggagactcaagttccagcagcagacatacgcaactggcaagacctgctagtaggtccgcaacagtacatggagcagaagcatccggtttgcacgacgttgttgcatgcgaactgaattatatgtttatgctgcccgctcggtgtcgtcatctttaatagccgactctgcctgtcagtccgcttagaaggcattagggagatttatcgcgacggcagccacggccaccgtggccacatcgaccttctcactacggtgtagggtcgacctgcaagaagctaattgccgacaagatggcggccaaccactctgtgaacggcgctatggacggtgtctcgatttccaataccagcacctctctcaaccaaacgttctacgacaagctcggcagcgtgccgactgtgctgctacagaatacagatctgctcattctcgagatccgcatagtattcacggccctcgccatcatttacatcggctgccacgctgcccttcgccgtcctccgtccgctgcagtcccccagaagaaaggtcgggacgataagggcaaggatgatgtctttgtccagggcatgctaccatcagacatcatcctattccccattttggccggcaccgttctcatcgggctgtactaccttatcaaatggcttgaagacccagacattctcaataagatcctcaaggtctacttctccgtcatgtctcttgcttctctcggtaaattgttcgccgacggattacacttcctgaccacatttgtcttccccaccgtctgggtcacgtcaaacggtcgcgtgtatcacattgatgggagaaagcaacagcaatggtacagtcaggagagttcaacggggactgcccaggtccgggatgatgggaagaggtcccctctgcctggtcgcctgtccagtctccagctatcggcacgcacgaacaacctattgtggagcgttcgccatctactcaccgaacaatggaccgttcgactcgcgatacatggtatcatgtacgaaaaggtcaaggctagcttcaacgatatcctcggcattgtcctcgcagtctgcgcaaatgtcgtgtatcacaccctgccatccaatttcatttcaaacgttatgggatatgccttctcgtacttcggtatcatcgttatgtcacctaccactttcggaatcggcagcggtgtgcttttcgggctcttcttctacgatattgtgatggtcttctacaccccatacatggtgacggttgccaccaagctcgacgccccaatcaagcttgtcttcgaaggccctacacgcgctagtatgctcgggcttggtgacatcgttgttcctggcatgttcattggattgtgtctgcgattcgacctatacatgtactatcaccggcaacgaaagctccagcctgttgaactcagcacatccgacgagaatgcaactacgatcgaaacacaacgcatggtcatcaagccggactatgtgaatccgcaaggacaatggggagatcgtttctgggctacctcactcttcaataccttctctccggatgccacgccgagactcaaggcctcggcatttcctaagccgtatttccacgctgcgatattcggctatctgattgcaatggtcgtcacactcgtgatgctgctagccttccagcacgcgcaacctgcactgttgtacctcgttccgggggtcgtggcagctgtatggctaacgggtataatcagaggcgaagtcaaagatatgtggagatacactgaagacggatcgctagatcagaaagacgtgcttgtcgaagttgacggagaaggaagaatcgtgaagactatcgagcccgagaagaaaagtgatggggatgagaagaagaatgaggcagcccagggtaggaaggagaaatcggatgacaaaagcacgctaaaggcggcagatggaatcgtagatgatgaacataaagccaaggccaagtcgtacccggtgttccttctcagcatcgaggcgccgatgtctggcgaggagaagatcgaatagataccaaactgctcaccaccttagaactgtaattgcataatcaacaaactaagtagtgttttcgtaatg

SEQ ID NO: 30965 - DNA, 1056 bp, Muscodor strobelii
  misc_feature: SGI cDNA ID NO. 570657
  misc_feature: Encodes the peptide sequence at SEQ ID NO 30966
atgtctcaatctgagttttcatcttccgccagcgtcatgtggacagcccagcaggaggaggccgaggttaatccttttggcgatctggatttgctacaagaattgtctggcgtctcgctatatgagtctcctctagaggggatctctttttccgatgacttctcagacctcgcttttgcacaggctttcccgagccctccggattcagctcgagctagcgtcctaaatgaggaacgattgcctgctccagcccagcctgtacaggtttcccatgcacccaagcctaccacacccttagctcccgagagcattggtagcgaattgcaggaccgtgcctcagtcaagcaacctgcccgtcagcgaggcaagcatcagaccgcctcaagttcgcgacccaaaggagttaaaaagcctagcaaacgacagctagaatcaagatggcctgtccttgacgcggttccacctctgacttcatatccgggcccaatacctgctatagtgagaaaatttccactcgcggctggatatcaaccacaagtcgattcacaggctggacaaggctggcaaatccagccccagcaattacagcagtttcagaatcagccgacagagcaaggtaacaatttacgacagcggcagggcttgtcatatcaagtgcaacaatggccaccgcaattacctatccaagctcatgcgcctgttggtcagcccctgaatcttccccatggacagcctacgcacatgcctttgcagatacccgagtggcagcaaccgcaatgggcgggttctcatccgagcctgcaaactatccatctacctaccttgccaccgcagccaatcgccattgcccagatacagaatatgcagcagcaacagcagcagcctgttttcatcacacagaatgtattcccatatggatactatgctcctcagactgctccggagatggcgccacagcaacagaatacaatgctgcaaccgtgggtcaccggcccgcgtagcgcgcaacctatgagccgtgatgctgggaatcatgatgagccagcagtgtcctga

SEQ ID NO: 30966 - protein, 351 aa, Muscodor strobelii
  misc_feature: SGI Peptide ID NO. 570657
MSQSEFSSSASVMWTAQQEEAEVNPFGDLDLLQELSGVSLYESPLEGISFSDDFSDLAFAQAFPSPPDSARASVLNEERLPAPAQPVQVSHAPKPTTPLAPESIGSELQDRASVKQPARQRGKHQTASSSRPKGVKKPSKRQLESRWPVLDAVPPLTSYPGPIPAIVRKFPLAAGYQPQVDSQAGQGWQIQPQQLQQFQNQPTEQGNNLRQRQGLSYQVQQWPPQLPIQAHAPVGQPLNLPHGQPTHMPLQIPEWQQPQWAGSHPSLQTIHLPTLPPQPIAIAQIQNMQQQQQQPVFITQNVFPYGYYAPQTAPEMAPQQQNTMLQPWVTGPRSAQPMSRDAGNHDEPAVS

SEQ ID NO: 30967 - DNA, 389 bp, Muscodor strobelii
  misc_feature: SGI EST ID NO. CUFF.73305.0
  misc_feature: Variant of the nucleotide sequence at SEQ ID NO 30965
attgcaggaccgtgcctcagtcaagcaacctgcccgtcagcgaggcaagcatcagaccgcctcaagttcgcgacccaaaggagttaaaaagcctagcaaacgacagctagaatcaagatggcctgtccttgacgcggttccacctctgacttcatatccgggcccaatacctgctatagtgagaaaatttccactcgcggctggatatcaaccacaagtcgattcacaggctggacaaggctggcaaatccagccccagcaattacagcagtttcagaatcagccgacagagcaaggtaacaatttacgacagcggcagggcttgtcatatcaagtgcaacaatggccaccgcaattacctatccaagctcatgcgcctgttggtcagc

SEQ ID NO: 30968 - DNA, 942 bp, Muscodor strobelii
  misc_feature: SGI cDNA ID NO. 570658
  misc_feature: Encodes the peptide sequence at SEQ ID NO 30969
atggccgccaccaagcctgtgcagctcatccagtacattgtagacacacgaaaactatggccgtccgccaacaagacggccgatcttgccacggctgcgtcccgtgctttcgcacttctcacagatgatgagcgtaagggcgtagcaaaatactactttctatctgacgccaagatggcgctggcatcgcacttactcaagcactgggtcgtgagcaaatacgccgatgtaccttggcgctcgacgacactcacccgcgactcgaacaagaagccgatctttgtcgacgcggaagggaagcaacccgtcgttttcaacgtctctcatcaagccggcctcgtaacccttgtcgccgtcgcgaactacgagggcgtgcagatcggcacggacatcgtgtgcacgagcgagcgggcaaagagggactggcagatgattcagaacgaagggtggcccaagtttgtggacatgcacgctgatgtctttggccggacggaggcggcatatctgaagacgggattgacgacacatcacagattccccgtgctggggacggagagtcaacatagggactacaagctgcgggccttttacacgctgtggtgtctacgggaggcttatgtcaagatgacgggcgaagcactgcttgcggagtggttgggcgatttaatcttccagggcttcgagccgcctgagcctggaaaggcgttcaagcagagggtcgacgacgatgagactacgattgtgacacgacacgacgtggtattcaaaggatctccggtagaggacgcgaacatctgtctgagggcattgggcccggactatatgacctgcacagcggtgcggactccaagtaagaaggaagatgcgctgggctgggagttgggtccatatgagttcctagacattgagactatattggctcatggggaagctacatcttga

SEQ ID NO: 30969 - protein, 313 aa, Muscodor strobelii
  misc_feature: SGI Peptide ID NO. 570658
  misc_feature (1)..(310): NCBI GI: 149210735 Blast Desc: MGCH7_ch7g840 [Magnaporthe grisea 70-15] gi|86196795|gb|EAQ71433.1| MGCH7_ch7g840 [Magnaporthe grisea 70-15]
  misc_feature (9)..(311): NCBI GI: 70608334 Blast Desc: phosphopantetheinyl transferase [Glomerella graminicola]
  misc_feature (9)..(312): NCBI GI: 171684027 Blast Desc: protein product [Podospora anserina] gi|170941974|emb|CAP67626.1| protein product [Podospora anserina]
  misc_feature (8)..(313): NCBI GI: 261353097 Blast Desc: phosphopantetheinyl transferase [Verticillium albo-atrum VaMs.102]
  misc_feature (59)..(310): NCBI GI: 145609708 Blast Desc: MGG_03046 [Magnaporthe grisea 70-15] gi|145017106|gb|EDK01469.1| MGG_03046 [Magnaporthe grisea 70-15]
  misc_feature (1)..(310): NCBI GI: 256734015 Blast Desc: NECHADRAFT_35672 [Nectria haematococca mpVI 77-13-4]
  misc_feature (4)..(313): NCBI GI: 116192949 Blast Desc: CHGG_06192 [Chaetomium globosum CBS 148.51] gi|88182105|gb|EAQ89573.1| CHGG_06192 [Chaetomium globosum CBS 148.51]
  misc_feature (10)..(310): NCBI GI: 46128822 Blast Desc: FG08779.1 [Gibberella zeae PH-1]
  misc_feature (59)..(306): NCBI GI: 85074707 Blast Desc: NCU00581 [Neurospora crassa OR74A] gi|28927534|gb|EAA36485.1| [Neurospora crassa OR74A] gi|38567325|emb|CAE76613.1| related to null pigmentation protein
  misc_feature (4)..(313): NCBI GI: 156061177 Blast Desc: SS1G_02731 [Sclerotinia sclerotiorum 1980] gi|154700135|gb|EDN99873.1| SS1G_02731 [Sclerotinia sclerotiorum 1980]
MAATKPVQLIQYIVDTRKLWPSANKTADLATAASRAFALLTDDERKGVAKYYFLSDAKMALASHLLKHWVVSKYADVPWRSTTLTRDSNKKPIFVDAEGKQPVVFNVSHQAGLVTLVAVANYEGVQIGTDIVCTSERAKRDWQMIQNEGWPKFVDMHADVFGRTEAAYLKTGLTTHHRFPVLGTESQHRDYKLRAFYTLWCLREAYVKMTGEALLAEWLGDLIFQGFEPPEPGKAFKQRVDDDETTIVTRHDVVFKGSPVEDANICLRALGPDYMTCTAVRTPSKKEDALGWELGPYEFLDIETILAHGEATS

SEQ ID NO: 30970 - DNA, 2265 bp, Muscodor strobelii
  misc_feature: SGI EST ID NO. CUFF.73317.0
  misc_feature: Variant of the nucleotide sequence at SEQ ID NO 30968
cgcattcgtacatcgagttgatcttataggtgacagactgaagcatatacaggagtctcgctctccgaagctgactctatttcattccaacattactgattctctgatcgcttcagtaccacagctcgcaccgttacaatggccgccaccaagcctgtgcagctcatccagtacattgtagacacacgaaaactatggccgtccgccaacaagacggccgatcttgccacggctgcgtcccgtgctttcgcacttctcacagatgatgagcgtaagggcgtagcaaaatactactttctatctgacgccaagatggcgctggcatcgcacttactcaagcactgggtcgtgagcaaatacgccgatgtaccttggcgctcgacgacactcacccgcgactcgaacaagaagccgatctttgtcgacgcggaagggaagcaacccgtcgttttcaacgtctctcatcaagccggcctcgtaacccttgtcgccgtcgcgaactacgagggcgtgcagatcggcacggacatcgtgtgcacgagcgagcgggcaaagagggactggcagatgattcagaacgaagggtggcccaagtttgtggacatgcacgctgatgtctttggccggacggaggcggcatatctgaagacgggattgacgacacatcacagattccccgtgctggggacggagagtcaacatagggactacaagctgcgggccttttacacgctgtggtgtctacgggaggcttatgtcaagatgacgggcgaagcactgcttgcggagtggttgggcgatttaatcttccagggcttcgagccgcctgagcctggaaaggcgttcaagcagagggtcgacgacgatgagactacgattgtgacacgacacgacgtggtattcaaaggatctccggtagaggacgcgaacatctgtctgagggcattgggcccggactatatgacctgcacagcggtgcggactccaagtaagaaggaagatgcgctgggctgggagttgggtccatatgagttcctagacattgagactatattggctcatggggaagctacatcttgaaatgtgaggcatgcagtgcagtcgcattgtggccttcacattactagctatgaaacagaaatgaatcacatgcgtgtaaattcatcttgatgtaggttacgaccgacgtcgtgtgtctttgtacgaatgctccccgagctgggcatcgcattcgcaacaaactaccgcatcctgacatgaaatatgattacatgttgacttcgttattactgttggtttacgagcaacagctgggtattgtgtacactagaccgctctcgatctctaagctgtggcggaaggattctatctatacgataaaaactcctattgttcttatcttgaaagctaacgatgcccaggcagtcagcttacccacagacagagggagagtacggctgcgcagcgaacacgaatacaacgaatctagtatgtgcggacggttgagccaaagctgccattgggagtgcaattgccaacaaaatcagctcgtatgcgaacagccgtgcaccgacagccattgaagaggtatcagctgcacacaccagtgacggtgcatcacatatcattatctgcacatcactgggcatagccgcactactggacattcatttcgttcaagtccttatccgaaatacgtacgacacgcgtgcgcattcggccccccatgtcctctcgcgtacagttttctttcaatacagctgaggcagttggtgaaaacacagttaattcggcgatgcgcactaccggacactcccatgtgaactttgtgtagtgtggaagatttgtcagtgcctagcatatacatctacaaaaacatacgatgacgtgagagaagacaagaagctacctgagttgtggtagctctttggcatgtggcagagtggacagagccattcgctcgaccgtagtgggcactttttgcaccagctatcccagccagtgcatggcgggaaagaggttctggaactcttaagccgcacatgctggaggtgagaattcagtgactcaaccctgtgcctgttagtaatggcgcccccaggatgggaggttccgtgtcgtcggaaacggagctgggactcgcgaacgacttgtatattgataggcactgtggcgctgtgcttggtagtgtcattccgtcgtgctgaattaaggcattgaacgcgaacgattagatatgaagtatgctaaggatagaaatcgttg

SEQ ID NO: 30971 - DNA, 516 bp, Muscodor strobelii
  misc_feature: SGI cDNA ID NO. 570659
  misc_feature: Reduced expression when VOC is produced
  misc_feature: Encodes the peptide sequence at SEQ ID NO 30972
atgtatactctggcagtagcgaaatcggccacaggtctacaatgggggcaagattacctatacgaccagaaatacaaggacaagaagccattacagctggcaacagatatcgcaaagaaagttgttaagggtctttatgcacaggccgtgacgcgtggaactgtggtagatgagtatcttgaggatcagttggtagtcttccaggccctggcagaagggcgaacacaattcccagtctcagccgtcggcggcgataatgatgccaaagagctcccttctgtcaatagtgccgatgatttggcagttgaacttgcagatctgcacgttgaggcaaagctaaggcaggacaaaacgaatggccccattggcgatggttctacgcacaccactacagcacgatgggttgcgagcgagttgttgcctaatctaaagtggttcaacaaaggttccatttgcgatggtgttggcatttcgttcgatctctacaataaagccaccacgcctgcttcgagatga

SEQ ID NO: 30972 - protein, 171 aa, Muscodor strobelii
  misc_feature: SGI Peptide ID NO. 570659
  misc_feature (1)..(168): NCBI GI: 154310584 Blast Desc: BC1G_06766 [Botryotinia fuckeliana B05.10] gi|150851306|gb|EDN26499.1| BC1G_06766 [Botryotinia fuckeliana B05.10]
  misc_feature (1)..(160): NCBI GI: 171683917 Blast Desc: protein product [Podospora anserina] gi|170941919|emb|CAP67571.1| protein product [Podospora anserina]
  misc_feature (2)..(159): NCBI GI: 46124045 Blast Desc: FG06400.1 [Gibberella zeae PH-1]
  misc_feature (1)..(160): NCBI GI: 164428460 Blast Desc: NCU00604 [Neurospora crassa OR74A] gi|157072155|gb|EAA36508.2| conserved [Neurospora crassa OR74A]
  misc_feature (1)..(160): NCBI GI: 38567304 Blast Desc: related to RNA-3'-phosphate cyclase 1 [Neurospora crassa]
  misc_feature (2)..(156): NCBI GI: 256727628 Blast Desc: NECHADRAFT_32251 [Nectria haematococca mpVI 77-13-4]
  misc_feature (1)..(158): NCBI GI: 261353279 Blast Desc: conserved [Verticillium albo-atrum VaMs.102]
  misc_feature (2)..(156): NCBI GI: 169600239 Blast Desc: SNOG_02949 [Phaeosphaeria nodorum SN15] gi|111068560|gb|EAT89680.1| SNOG_02949 [Phaeosphaeria nodorum SN15]
  misc_feature (1)..(113): NCBI GI: 116193003 Blast Desc: CHGG_06219 [Chaetomium globosum CBS 148.51] gi|88182132|gb|EAQ89600.1| CHGG_06219 [Chaetomium globosum CBS 148.51]
  misc_feature (1)..(76): NCBI GI: 189192088 Blast Desc: RNA 3'-terminal phosphate cyclase [Pyrenophora tritici-repentis Pt-1C-BFP] gi|187973989|gb|EDU41488.1| RNA 3'-terminal phosphate cyclase [Pyrenophora tritici-repentis
  misc_feature: Useful for introducing or modulating the production of volatile compounds
MYTLAVAKSATGLQWGQDYLYDQKYKDKKPLQLATDIAKKVVKGLYAQAVTRGTVVDEYLEDQLVVFQALAEGRTQFPVSAVGGDNDAKELPSVNSADDLAVELADLHVEAKLRQDKTNGPIGDGSTHTTTARWVASELLPNLKWFNKGSICDGVGISFDLYNKATTPASR

SEQ ID NO: 30973 - DNA, 1988 bp, Muscodor strobelii
  misc_feature: SGI EST ID NO. CUFF.73401.1
  misc_feature: Variant of the nucleotide sequence at SEQ ID NO 30971
ctgggagcaaaggtgcaagcacgttgttgatcttccaagcagtctttccgttcttactatttgcgtcaaacgaggacggggatccgattgagctcgagatacacggaggcacgaattgttccttctcaccgtcatatgagtacttggatcaaattatactgcccacgttgcaagatagatatggaatttcggttcaacgaaagctcaaagcacgtgcctggaccctagggccccaagagaaaggatgcatatgggtcaagttccaaccaatttctccaggacagaaactcaaactcctaaggccatggggcgaacagaacgaccctaaggatttcgagatcatgcatatcgatctcagtatcctggtacctcacgagctgcttgcgccccttgagaaaaagttaacggattaccttgctgcagcgttccctggagttgatttgaactttgtttattcgaagctagtagccatccagcaaggatgtatactctggcagtagcgaaatcggccacaggtctacaatgggggcaagattacctatacgaccagaaatacaaggacaagaagccattacagctggcaacagatatcgcaaagaaagttgttaagggtctttatgcacaggccgtgacgcgtggaactgtggtagatgagtatcttgaggatcagttggtagtcttccaggccctggcagaagggcgaacacaattcccagtctcagccgtcggcggcgataatgatgccaaagagctcccttctgtcaatagtgccgatgatttggcagttgaacttgcagatctgcacgttgaggcaaagctaaggcaggacaaaacgaatggccccattggcgatggttctacgcacaccactacagcacgatgggttgcgagcgagttgttgcctaatctaaagtggttcaacaaaggttccatttgcgatggtgttggcatttcgttcgatctctacaataaagccaccacgcctgcttcgagatgacttttcgaaagatctcacacatgagaataatcccatattggtcgtgtttaatcgattcgatatgcactgtcgtcggataacttcagcacccttccgcatcccactcccaacccacatcaccttgttcacgagatgcgcgtatcgtgaatcacccgtctccatcgtgacaacaagcctgaacttatattgtgaaggttctatagaatcagccttggccggatcttgcaaagcttccaaaacttcttttgggcccgttctgcttccactcgtacgaatctcgatgcttcattcgacccattcagcaatgttgcgttttatggtcaatgacgcacttctacttactacgctggttccgtatcgtttgtctgtaagagatacatagtctccatctttacttcatacgactctggatcaactacttgtgaatcctggccgccaggcaggactgttccagagccccacgtcgctgaccaagtaccgcccaagaaggagatccagtttcttatacccccagacggcacgacgcctaagacaagcttcggattcaactctaccgacattcgaaagtcgaacgctagactcggaactggtagcctcaagttcgagtgcggtagattagatttgtgaatactcatatttgtcattagttcttgacacacatatagcactgcgaaaggaaactaccgtaacttcgtattattgctttgaagtatacagaaggcgcattagcgtatttccttagactaaggtgattagatatacactaagctcctagacagcaacaagcgtgatgttcaacaaatacgggtgatcccgtggtcgctccccgcagtccggcccccctcatccgattgcctcggaacaatctaccgagacgaaatgccgaccaatatcgttccgcacatgtattcttctctacattttcttcatagtttaatgactgcgagagggtattatccgtatggggttaaatcctggggcttcagagtcc

SEQ ID NO: 30974 - DNA, 1539 bp, Muscodor strobelii
  misc_feature: SGI cDNA ID NO. 570660
  misc_feature: Reduced expression when VOC is produced
  misc_feature: Encodes the peptide sequence at SEQ ID NO 30975
atggccgaagaggagtcgatcctcccgaaagggattgtacaaaataggatcaacatctacgaagagattgcagaaaacgacaccatcccagaggagatgatctttcaagtacaaaaggtgttcgtgacaacgtctcgcaagctatacgatcctaccgctagaaggctagaaaacttttggacgcgtatactcgggggggatctccgaaaacttcctgcaggacaaatcgcaaaactgttcaaggaattctcggacgaaacgagcgcatttgtcaagctacgcggcccagacaaccgatatgaaccgccttccccagaggctcgagcttctagtccgaagagaaatgtaatcagcccggaacgacctttgagtaattctgaccacgcggcttcagtttccaggagtaaggtcgcggaagtcccgcgaccgattctgaagaagcctagaggaccttcagcatcgggcccacgacctacagctcggtttgtctcacctccagggtctggtatggacgaaagcggtaacacggaagcggagactccactacaagataacttggctgcgaatcttagtaatgagaaggactccagcagttcgacggccagagaggatcataaaaagagtactaatgttagagctaaaaagaagtcaagtggattcgtggcatcttcggcatcgagacgacgaccagcgatgccccgacggtccagttcgcaatcctcaaacactgcttctgagataggatccaaagaaggaaactcttcacttggcggctcacaaagctctgttccgacgattatggaacagtcagagcagtcactaaacagtaaagatgtcgagagggaaggtgccagcagggccagcactaaaactgcaaagaagcgttcagagaagcagccaaacatcgttgatagggaaagcacaagattaagtgctaaagcagctggcaaacgcccagagaggcggctgaatactgagagaactcccgcatcggaacccctaaccacatcccaagagcaatcccaagtcacgcgtaccgatactgatagaggcgaaaccgcaaaccgaaacgacactactggcaagactgcgggaagtgctgtgaatagctcaagaatctcccaaaaagcggcagcgtattcggacagcaaagatccgaaagatcgttctcgccctcgagtcacgcccaacatcaatcgatctgcctcagatatcggctacaagcgctcaggctctcgggaaccgagccgttcagtccctcatctgtccggctcatatacccaagccaaagtcgacacttcggttgttggacaaggcaccattaccgggtttacagataatgtctttaatgaagcaaagactacgaatgagtctaacgtcctcagctgcagcgtcggcgaggccgctgaaaattctcgcccagtggcccaattctcgcctacgaaaccgactaacaccacctcgattcctctagcccgttcgaaaagccagcttactttgcttcttgatcgacagggcgagagaaaacccaagcgatga

SEQ ID NO: 30975 - protein, 512 aa, Muscodor strobelii
  misc_feature: SGI Peptide ID NO. 570660
  misc_feature (7)..(508): NCBI GI: 46128271 Blast Desc: FG08513.1 [Gibberella zeae PH-1]
  misc_feature (7)..(508): NCBI GI: 256733490 Blast Desc: NECHADRAFT_91799 [Nectria haematococca mpVI 77-13-4]
  misc_feature (7)..(235): NCBI GI: 154310744 Blast Desc: BC1G_06846 [Botryotinia fuckeliana B05.10] gi|150851386|gb|EDN26579.1| BC1G_06846 [Botryotinia fuckeliana B05.10]
  misc_feature (7)..(165): NCBI GI: 171685071 Blast Desc: protein product [Podospora anserina] gi|170942496|emb|CAP68148.1| protein product [Podospora anserina]
  misc_feature (5)..(166): NCBI GI: 116193391 Blast Desc: CHGG_06413 [Chaetomium globosum CBS 148.51] gi|88182326|gb|EAQ89794.1| CHGG_06413 [Chaetomium globosum CBS 148.51]
  misc_feature (144)..(341): NCBI GI: 261352189 Blast Desc: [Verticillium albo-atrum VaMs.102]
  misc_feature: Useful for introducing or modulating the production of volatile compounds
MAEEESILPKGIVQNRINIYEEIAENDTIPEEMIFQVQKVFVTTSRKLYDPTARRLENFWTRILGGDLRKLPAGQIAKLFKEFSDETSAFVKLRGPDNRYEPPSPEARASSPKRNVISPERPLSNSDHAASVSRSKVAEVPRPILKKPRGPSASGPRPTARFVSPPGSGMDESGNTEAETPLQDNLAANLSNEKDSSSSTAREDHKKSTNVRAKKKSSGFVASSASRRRPAMPRRSSSQSSNTASEIGSKEGNSSLGGSQSSVPTIMEQSEQSLNSKDVEREGASRASTKTAKKRSEKQPNIVDRESTRLSAKAAGKRPERRLNTERTPASEPLTTSQEQSQVTRTDTDRGETANRNDTTGKTAGSAVNSSRISQKAAAYSDSKDPKDRSRPRVTPNINRSASDIGYKRSGSREPSRSVPHLSGSYTQAKVDTSVVGQGTITGFTDNVFNEAKTTNESNVLSCSVGEAAENSRPVAQFSPTKPTNTTSIPLARSKSQLTLLLDRQGERKPKR

SEQ ID NO: 30976 - DNA, 6522 bp, Muscodor strobelii
  misc_feature: SGI EST ID NO. CUFF.73344.0
  misc_feature: Variant of the nucleotide sequence at SEQ ID NO 30974
gccggacaggtgggtaaggtaggcccttctagcgctgtcagtcccctagatggatgcagctaagcctggaacgagcctagacagcgagaattttcagggccatggccgtgagtcgcaccttgccagacataattactgccatattagtacctgccccttgcctcgcaccgcaacatcatgtagattgccagcatccacggccacgtcgtgatgacttcctcaccgcgctgacttgcaggcagaccaacagcttttcaacagcgtctctaagcaaatacaaccttggccgtctgaaccacctgtcattcgtccgtcacttacgcccttcacatcccgcggacaactgaaagctcccagaactttctttatgtgtactcccgcttccgtacgcttacatagcgtcatcgagcccatgcccttctaaaccacttgcacctaaccctcggttttgcctcgcaccatgaccgaatttcccatgtcacaacaacagcttctatattaggtaccgtgcttaatatcccaaaagtctcccatcaacgtctccagctgctctttcaaaagtacatttcctctaggtttttaatctgttacatttcctccttctgatcctctttgtatccgctgtggtcatcatacctctgccgtgtgcccctgccacaacttcattgactcctaaaaggacgctcatgtttgtgtgcttaaggcattccaaacacctctccattatcaagcctagcaagtctatatgtctgttgacggactctaatcaccactaatcgagagtggctctcggcactggtctattttacgcattttagactttcttgagaggtctcctcttggtaaactgcgctagcagatgaccacatggttgacctgatacccctctgttgtttaccttcattgtcgtgccccaacagctcatacaatctgagcattggtgctttgcctgagcggactatattcatcctctgtggttgactattgttagccaattccgacattcatcgtgtagatgtatcatgggtatatgattccatcctaaacaccaaatcggatagcagcgtctccagcattgtctatgagctatgattcagaggcacaagaccatcggtttcgaaacgtacttgtgtatcgataggcattgggcagcaggacgagtttctaaatacacggcacctggagcatccactgctcttctgattagacatggccgaagaggagtcgatcctcccgaaagggattgtacaaaataggatcaacatctacgaagagattgcagaaaacgacaccatcccagaggagatgatctttcaagtacaaaaggtgttcgtgacaacgtctcgcaagctatacgatcctaccgctagaaggctagaaaacttttggacgcgtatactcgggggggatctccgaaaacttcctgcaggacaaatcgcaaaactgttcaaggaattctcggacgaaacgagcgcatttgtcaagctacgcggcccagacaaccgatatgaaccgccttccccagaggctcgagcttctagtccgaagagaaatgtaatcagcccggaacgacctttgagtaattctgaccacgcggcttcagtttccaggagtaaggtcgcggaagtcccgcgaccgattctgaagaagcctagaggaccttcagcatcgggcccacgacctacagctcggtttgtctcacctccagggtctggtatggacgaaagcggtaacacggaagcggagactccactacaagataacttggctgcgaatcttagtaatgagaaggactccagcagttcgacggccagagaggatcataaaaagagtactaatgttagagctaaaaagaagtcaagtggattcgtggcatcttcggcatcgagacgacgaccagcgatgccccgacggtccagttcgcaatcctcaaacactgcttctgagataggatccaaagaaggaaactcttcacttggcggctcacaaagctctgttccgacgattatggaacagtcagagcagtcactaaacagtaaagatgtcgagagggaaggtgccagcagggccagcactaaaactgcaaagaagcgttcagagaagcagccaaacatcgttgatagggaaagcacaagattaagtgctaaagcagctggcaaacgcccagagaggcggctgaatactgagagaactcccgcatcggaacccctaaccacatcccaagagcaatcccaagtcacgcgtaccgatactgatagaggcgaaaccgcaaaccgaaacgacactactggcaagactgcgggaagtgctgtgaatagctcaagaatctcccaaaaagcggcagcgtattcggacagcaaagatccgaaagatcgttctcgccctcgagtcacgcccaacatcaatcgatctgcctcagatatcggctacaagcgctcaggctctcgggaaccgagccgttcagtccctcatctgtccggctcatatacccaagccaaagtcgacacttcggttgttggacaaggcaccattaccgggtttacagataatgtctttaatgaagcaaagactacgaatgagtctaacgtcctcagctgcagcgtcggcgaggccgctgaaaattctcgcccagtggcccaattctcgcctacgaaaccgactaacaccacctcgattcctctagcccgttcgaaaagccagcttactttgcttcttgatcgacagggcgagagaaaacccaagcgatgacgatatggaaccaagccactccgccagagtctccattatcacatacggatgtcttgccggaggagggtggattccatatgatactcgtcgatggtatagagagagatcacctgctatcatctcgtccgatttattcgcgaatgaccaagcatgagaccagaaaaatgtacatgttcacagcctatgtatttgtaaaaatcgctatcatcctagcgataggggttatggtgctcatacaaggtggccggtgttacaggagtcgcatcccatatcagcattttatcggcgttatttggcacaaagaaatagttctgcgatcttgtgatgagcaccactgtatcgcgtcgttgtggcggaagaaaaagctagaagcgtcctaccaaaagtctatcttgtccgggctagaagcacacgaagagtagggtagattctccaatactcttcgtgaattgctaatcggttgaatctcaaaaacaccaaaggaagcaaaccctatactgccccatcgttcttgtgacacgttgtctgggtcgtattgttcgagaccacggtcccagccgcgtacgtgactgtggacacagtaaacgggtaccacttgttattcctcgccaccttgctaaagccaatgaaagcttctcaggctgagcgagagccattttcaatatccctgttgctcgagatcttttcggatcatttggtaatgatcaatcgctaggtcctggagtgtatcaaatgaatcttattccgtcgtaaaaatttcactaattgatctcttcgaatcggaacgtgcgtgggtgtgtggctcggacgtattcgggacgagtggaggccgtgataacccgatatgcgaagaaccatgtaagaaattcctaattctacagcgacgacaaactacagcatgaccacacgagtgctttagccacggaaacaccgatcattaaaacaagttgagaggcatcatggtgaaaagccgacggttttctacacataccgaccgagcttataggaccatgctttctcatgatattacaggattttaataatttcaaaattccaaaactgagcaaggtgcttagatacggctttccgtattcatcaaatgcatgtttgcaatgtgcttgttaagtgttttgcctataatgttttgcctgccaaataggccagtactagtgtgcgttgtacgagcgactatacatagcacgaccgagtatctcgaaaggggttcggtgtcgttcagaaattccaaaaatgttttgcagacttcttctcgaacaaagtgatgcacgggcgatcgatgatcgtcaatgcgacaagtttccacgatcccagttgcaacacgggatgcgcttcagatttttgtgcagatttctagccgacgcccccacgtttagcccatgtctcccgtaacccggtgttgcccgggatgcaagacctatgcacggacggcatcaccgggtattgtatgtcgatcacgaaacatggccagactccagcttagatatttgtgaggtgataagtcaaaaatctcaaacagacttgcggtgatcaagatccgagttctcagacccgccgtcgctttgcttttttatgttgtaatatttatgccacgcgcccgcgacgctggagttattatttgcctattgacgatatctccaaccgatgtttcaactatcgacgcacctacgtatgaaggcttcctaagcgcatcgccatttcaagaacagcaagacaatggtagaatatggagcaaaccacaagagtcctaaacacattgcctacctccattccagtaaatcttttgagatttggcgtatgatacatataggcaactcaccgctcgccaaaccatacatagccccagctgccgtttttcgctcaccgtctctgccacagaacggaaacaggcccgcctcaaattccagaccgctcttcgggatcggtttcccttgtaggcgtggggccgcggtggtggcgacaccgtcccggtatacttatcttctatgttcctgaatccacttgtcgaagtattcgacgtcgacgtacatgcagactctgcaaatttcgtggcgtcggcgacgatgacgatgactcttacttcgtgatagctgaaggcgaattgccccgttttatgtgacagtgctggcgtagtaaacaatcacctgccagtttttgtattttactgccgctcgcctcgtgaactccagccgagctgcagctatccactcagctgccgtagggttccgggccctgttgtcggtctgtttcgagacgtggactcaccaaagccgcaaacctcaccgtatatgcttgtagctgactcgcttcgcatacacaacataccatacatacaggcaccttgaactcgatttgggcatcactcaccgacgtggctacctgacttcacagcctctaaagcaaggatttaaattaaactaatgattcatatacacgccctgtagtcggcgttccgttcatttctttctttggtacgcaaggttcaagatataagcgtagggaaatgtcgtgcttccgtccgaaatgcatgcgtcgagaccgacccgagggttgttttgaacaaaaaatagacgagatatgacgtcagtgctggacgtaaacagcttgtgaaagacagacctcttcaggctctctactttcatgaacatgcaatgtccaaatcccgagctgaaccaactggcgaaattggccggggcacttcacgggtgacggtgtaacgcgtggtacatcctgtagatattctgtactggcaaattatcatttgagtggaacgttgccaacaaagacgactagagaggcgacgtgtctagctcaaaatgaagaacatagatggcaggttcaacgaggaattttgctagtagcattgcccaaccgagctcgccgaggtcagctgttaggctgatcatgcccaatttcacggccattcgacagacctgcctaccgagtcgtccgaggttattcggtcaaaattttttaggatattttcctctccgttctattctacccaactcattcttcgataaaagtcgttactgtattatcacgatgtaggaggcgctctctccttcactgagccatgttggactagcgcagcccatgaattagacacttatagatgcggaagacttattggcatagaaccttttttggcattgactgcctttgccacgaaaacatataaattcgatgtgaaggttgtccatatctgctctagctgatagtgtctcaacttaatacacgctctcctaacttgaaattgatactccctcgatgctatggagattgttctgagggcaagagcaggaattcaacatttatcgtgatggtgcgggatgatacggttgtagttctcatccttcattatggtttcagtatataggaggatatatccgatagtcatacttccaaaactattttcgtgttcatcgagtgttgagtatgctgtacacgtctgtaatctagatcatgaagagatctacagtgttaaagtatctcccctactcttaatccttctcagcgctacttctagcccccggtctggtatctgttgaggaaccacacgtaatttttctttcccattctgctacccttttcgtctaagacagaataattcggatccgcaatatcaagcaatgagagttgaacatttggatccctaagtgcaatattttccaccccgaggccgctcccatccgccgtatgcctgaatgtatgtaggctcatatgcaagagtctaaagttgaatactctgactcgtcg

SEQ ID NO: 30977 - DNA, 1533 bp, Muscodor strobelii
  misc_feature: SGI cDNA ID NO. 570661
  misc_feature: Encodes the peptide sequence at SEQ ID NO 30978
atggccgaagaggagtcgatcctcccgaaagggattgtacaaaataggatcaacatctacgaagagattgcagaaaacgacaccatcccagaggagatgatctttcaagtacaaaaggtgttcgtgacaacgtctcgcaagctatacgatcctaccgctagaaggctagaaaacttttggacgcgtatactcgggggggatctccgaaaacttcctgcaggacaaatcgcaaaactgttcaaggaattctcggacgaaacgagcgcatttgtcaagctacgcggcccagacaaccgatatgaaccggtagaggctcgagcttctagtccgaagagaaatgtaatcagcccggaacgacctttgagtaattctgaccacgcggcttcagtttccaggagtaaggtcgcggaagtcccgcgaccgattctgaagaagcctagaggaccttcagcatcgggcccacgacctacagctcggtttgtctcacctccagggtctggtatggacgaaagcggtaacacggaagcggagactccactacaagataacttggctgcgaatcttagtaatgagaaggactccagcagttcgacggccagagaggatcataaaaagagtactaatgttagagctaaaaagaagtcaagtggattcgtggcatcttcggcatcgagacgacgaccagcgatgccccgacggtccagttcgcaatcctcaaacactgcttctgagataggatccaaagaaggaaactcttcacttggcggctcacaaagctctgttccgacgattatggaacagtcagagcagtcactaaacagtaaagatgtcgagagggaaggtgccagcagggccagcactaaaactgcaaagaagcgttcagagaagcagccaaacatcgttgatagggaaagcacaagattaagtgctaaagcagctggcaaacgcccagagaggcggctgaatactgagagaactcccgcatcggaacccctaaccacatcccaagagcaatcccaagtcacgcgtaccgatactgatagaggcgaaaccgcaaaccgaaacgacactactggcaagactgcgggaagtgctgtgaatagctcaagaatctcccaaaaagcggcagcgtattcggacagcaaagatccgaaagatcgttctcgccctcgagtcacgcccaacatcaatcgatctgcctcagatatcggctacaagcgctcaggctctcgggaaccgagccgttcagtccctcatctgtccggctcatatacccaagccaaagtcgacacttcggttgttggacaaggcaccattaccgggtttacagataatgtctttaatgaagcaaagactacgaatgagtctaacgtcctcagctgcagcgtcggcgaggccgctgaaaattctcgcccagtggcccaattctcgcctacgaaaccgactaacaccacctcgattcctctagcccgttcgaaaagccagcttactttgcttcttgatcgacagggcgagagaaaacccaagcgatga

SEQ ID NO: 30978 - protein, 510 aa, Muscodor strobelii
  misc_feature: SGI Peptide ID NO. 570661
  misc_feature (7)..(506): NCBI GI: 46128271 Blast Desc: FG08513.1 [Gibberella zeae PH-1]
  misc_feature (7)..(506): NCBI GI: 256733490 Blast Desc: NECHADRAFT_91799 [Nectria haematococca mpVI 77-13-4]
  misc_feature (7)..(233): NCBI GI: 154310744 Blast Desc: BC1G_06846 [Botryotinia fuckeliana B05.10] gi|150851386|gb|EDN26579.1| BC1G_06846 [Botryotinia fuckeliana B05.10]
  misc_feature (7)..(163): NCBI GI: 171685071 Blast Desc: protein product [Podospora anserina] gi|170942496|emb|CAP68148.1| protein product [Podospora anserina]
  misc_feature (5)..(164): NCBI GI: 116193391 Blast Desc: CHGG_06413 [Chaetomium globosum CBS 148.51] gi|88182326|gb|EAQ89794.1| CHGG_06413 [Chaetomium globosum CBS 148.51]
  misc_feature (142)..(339): NCBI GI: 261352189 Blast Desc: [Verticillium albo-atrum VaMs.102]
MAEEESILPKGIVQNRINIYEEIAENDTIPEEMIFQVQKVFVTTSRKLYDPTARRLENFWTRILGGDLRKLPAGQIAKLFKEFSDETSAFVKLRGPDNRYEPVEARASSPKRNVISPERPLSNSDHAASVSRSKVAEVPRPILKKPRGPSASGPRPTARFVSPPGSGMDESGNTEAETPLQDNLAANLSNEKDSSSSTAREDHKKSTNVRAKKKSSGFVASSASRRRPAMPRRSSSQSSNTASEIGSKEGNSSLGGSQSSVPTIMEQSEQSLNSKDVEREGASRASTKTAKKRSEKQPNIVDRESTRLSAKAAGKRPERRLNTERTPASEPLTTSQEQSQVTRTDTDRGETANRNDTTGKTAGSAVNSSRISQKAAAYSDSKDPKDRSRPRVTPNINRSASDIGYKRSGSREPSRSVPHLSGSYTQAKVDTSVVGQGTITGFTDNVFNEAKTTNESNVLSCSVGEAAENSRPVAQFSPTKPTNTTSIPLARSKSQLTLLLDRQGERKPKR

SEQ ID NO: 30979 - DNA, 6522 bp, Muscodor strobelii; identical to SEQ ID NO: 30976
  misc_feature: SGI EST ID NO. CUFF.73344.0
  misc_feature: Variant of the nucleotide sequence at SEQ ID NO 30977

SEQ ID NO: 30980 - DNA, 1722 bp, Muscodor strobelii
  misc_feature: SGI cDNA ID NO. 570662
  misc_feature: Encodes the peptide sequence at SEQ ID NO 30981
atgtcgataccaagatcctcacgcgacctactaggtctctcccgccaattgcgccgacaatgcccctccgcccgccgcccttcgaacctcgcccgtccctgcgctcgatcgattgcttcctacaccgctccccaccaagccaatgccatatccgtcatacagaccaatgtcgattctacgtccgatgagttccgcgagaacgagcgcctcatgagcgaggccatggcccgtctggacaagctcacgcgcgccgcacagcagggtggttcggccaaggcaagggagaagcacattgccagaaagaagatactgcccagagaccgtgtcacggctttgatagaccaggggaccaccttcatggagctctcgcccttggctggccatgagctgtaccccgaggccgacgtgcccgccggcggtatcatcactggggtgggcgtggttgagggcgtcacctgtgtcattgttgcgaatgacagcacggtgaaaggcgggacatacttcccgatcactgtcaagaagcatctaagagcacaggctgtggcacaagaaaacaaactaccatgtatatacttggtggactcaggtggcgccaatcttccgaaccaggccgacgtcttcccagatcgcgaccatttcggtcgcatattttacaaccaggcgaggatgagctcgcagggcattcctcagatctccgtcgttatgggtctctgcaccgctggcggcgcctatgtacccgccatgagcgacgagagcattatagtagaaaagcagggtcacatcttcttagccggacctcccttagtaaaagctgctacgggtgaggaggtatcagctgaagagttaggtggtggcactatgcatacatcggtctctggagttgcagactacctcgctgtggacgacgcacacgctattgtgcttgcgcggcggagtatcaagaaccttaactggccacaaaaggcactgccgccagtcgagacatacgaagagccattatacccagagtccgagttgctaggcatcgcatcaacgaacttgagaaaaccattacctattcacgaagtaattgcgcgcatcgtcgacggctcacatttctcagagttcaagcgagatttcggaacgactctcgttacaggctttgccaagatatacggacaacccgtgggcatcgtggcgaacaacggcattctattcggcacatcttcacaaaaaggcgcgcatttcatcgagctatgcgcacagcgggggatcccgctagtcttcctacaaaacatcagcgggtttatggttggcgcacaggcagagcgcgagggtatcgcgaaacacggggctaagctcgtcacggctgtcgcttgcgccgacgtgcctaaattcaccgtcgtagttggcggctcattcggggctggaaattatggaatgtgtggccgtgcttattctcctcgcttcttgtggatgtggcctaatgcacgtatcggtgtcatgggtgctgagcagttgactaaggttatggagaccgttggtcaaaaaccggatcctgagctgagggatcggattgaggctgagagtgacgcggtgtactcgtccgctaggttatgggacgatggtgtgattccgccacagcatactagacgatatcttggattgggactgagagctgcgatgggtggtaagaatgaggtgaagcctggtgatactaagtttggtgtcttccgtatgtag

SEQ ID NO: 30981 - protein, 573 aa, Muscodor strobelii
  misc_feature: SGI Peptide ID NO. 570662
  misc_feature (92)..(571): Pfam Id: PF01039 Pfam Desc: Carboxyl transferase domain
  misc_feature (38)..(573): NCBI GI: 164429716 Blast Desc: methylcrotonoyl-CoA carboxylase beta chain, mitochondrial precursor [Neurospora crassa OR74A] gi|157073589|gb|EAA35049.2| methylcrotonoyl-CoA carboxylase beta
  misc_feature (1)..(573): NCBI GI: 39970149 Blast Desc: MGG_02541 [Magnaporthe grisea 70-15] gi|149209549|ref|XP_001522149.1| MGCH7_ch7g257 [Magnaporthe grisea 70-15] gi|86196212|gb|EAQ70850.1| MGCH7_ch7g257 grisea
  misc_feature (1)..(573): NCBI GI: 46128263 Blast Desc: FG08509.1 [Gibberella zeae PH-1]
  misc_feature (13)..(573): NCBI GI: 171685067 Blast Desc: protein product [Podospora anserina] gi|170942494|emb|CAP68146.1| protein product [Podospora anserina]
  misc_feature (1)..(573): NCBI GI: 154303960 Blast Desc: BC1G_08864 [Botryotinia fuckeliana B05.10] gi|150854448|gb|EDN29640.1| BC1G_08864 [Botryotinia fuckeliana B05.10]
  misc_feature (1)..(573): NCBI GI: 261353094 Blast Desc: methylcrotonoyl-CoA carboxylase beta chain [Verticillium albo-atrum VaMs.102]
  misc_feature (5)..(573): NCBI GI: 240277803 Blast Desc: methylcrotonoyl-CoA carboxylase subunit beta [Ajellomyces capsulatus H143]
  misc_feature (5)..(573): NCBI GI: 225554497 Blast Desc: methylcrotonoyl-CoA carboxylase subunit beta [Ajellomyces capsulatus G186AR]
  misc_feature (5)..(573): NCBI GI: 154285670 Blast Desc: methylcrotonoyl-CoA carboxylase beta chain, mitochondrial precursor [Ajellomyces capsulatus NAm1] gi|150407271|gb|EDN02812.1| methylcrotonoyl-CoA carboxylase beta
  misc_feature (5)..(573): NCBI GI: 226277484 Blast Desc: methylcrotonoyl-CoA carboxylase beta chain [Paracoccidioides brasiliensis Pb01]
  misc_feature (51)..(573): SWISSPROT Homolog: EC 6.4.1.4 Methylcrotonoyl-CoA carboxylase
MSIPRSSRDLLGLSRQLRRQCPSARRPSNLARPCARSIASYTAPHQANAISVIQTNVDSTSDEFRENERLMSEAMARLDKLTRAAQQGGSAKAREKHIARKKILPRDRVTALIDQGTTFMELSPLAGHELYPEADVPAGGIITGVGVVEGVTCVIVANDSTVKGGTYFPITVKKHLRAQAVAQENKLPCIYLVDSGGANLPNQADVFPDRDHFGRIFYNQARMSSQGIPQISVVMGLCTAGGAYVPAMSDESIIVEKQGHIFLAGPPLVKAATGEEVSAEELGGGTMHTSVSGVADYLAVDDAHAIVLARRSIKNLNWPQKALPPVETYEEPLYPESELLGIASTNLRKPLPIHEVIARIVDGSHFSEFKRDFGTTLVTGFAKIYGQPVGIVANNGILFGTSSQKGAHFIELCAQRGIPLVFLQNISGFMVGAQAEREGIAKHGAKLVTAVACADVPKFTVVVGGSFGAGNYGMCGRAYSPRFLWMWPNARIGVMGAEQLTKVMETVGQKPDPELRDRIEAESDAVYSSARLWDDGVIPPQHTRRYLGLGLRAAMGGKNEVKPGDTKFGVFRM

SEQ ID NO: 30982 - DNA, 3748 bp, Muscodor strobelii
  misc_feature: SGI EST ID NO. CUFF.73692.0
  misc_feature: Variant of the nucleotide sequence at SEQ ID NO 30980
tatacatccatctaagcccctgtatcatgctccctgagcatatcgaattacctccggtggggggagacgaatgagcaggccactttctgaaaaggtctcgatttatttatgcaaatgtctagtctagacaaacacgcccaatccaaacgccggcttgaatgcagtttttccaaatacaatgcccagtatcctgtttctctacgcactcaggtgtttatactccttgttgaaagccctgccgatgaccatgcgacgaatctctgatgtaccagccccgatctcatacagcttggcacttttaaatggtcagtaggaatacgggatttggcggtagatgataatgtagacttactctctcaatatcctcgaggcgggcatctcctcaacgtatcccataccaccaaggagctggatacagtcaagagcacactctgtggcgcgctcagcggcatacagaatggcgcctgcgcaatcctgcgtgcggatagtgccctcctcatcgaccgctttggcggtggcgtaagtgtaagcccgtgatgcctgtagcttcgtgtacatatcggcgagcttgccctggacaagctggttgtgagcaattgggctaccgaactgcttgcgctgatgcgtgaagggcaaggcaacgtcgagagaagcttgcataagaccgagaggtccagcgctaagaaccaagcgctcgagatcaagaccctccatcaagacgcgcacaccaccatcgatggcaccgaggatatgttcctcgggcacgaatacgttctcgaagacgagttcgccagtattgctgccacgcatacccatcttgtcgagcttgcgagcacagctaaagccctcggtcttggtgtcgacgataaaagcagtaatgcccttggaaccgccgtccggcttcgtcttggcatacacaaccacgacgtcagcatctgggccgttcgttatccacatcttggtgccgttcagcacatagccgccgtcgaccttcttcgcactcgttcgcatgctgacaacgtcgctgccagagcccgactcggacatggcgagcgcaccgacactagtaccggcaatcaagccagggaggaacttctgcttctgtgcctcggatccattgagctgcagctgattgacgcagagctgtgagtgcgcagcatagctcagagcaatactgccgctcgctcgtgatagctcctccatgacaacacaatgcgcttggtagcccatggcaagtccgccgacatcctcgtcggcagtcatccccaggaaaccagcttcacccagcttgggccagatctcgttggggaaagcattggtcttgtctgtgtttgaagcgacttcttcgggaatctcacggcgtgtgaattcttggacgcgctcacgtagctcggcgaggtcggcggacgagggcgcttcgaagcccttggggtgtttcttagaggcgtatgtccgccgaggttggcaggtgatgggggccgctggggatagcgatggtggggaggccctgggacggagtcgccctaacactcgaagggatcgcatgctagccattctcgcggcccaagattcacaatctacactttgtgcgtcctaattgataccaagaaatgagaattgaagcaacgcgcaagaagaaaatcgaagtgacgatgaagtgacttgtaagacaatggcaaaggatcgtagatttctggggatctggggtagctacggctaacagcggccccacgttggcaccgagggaagccgcgagcgctattcacgataccttccttccaaggcttattcacctttcctcccaccgagcttgcctcgttgttctgttgcagtttccctttgtgattttcatttgcgtcataaccaccgccgagtatgtcgataccaagatcctcacgcgacctactaggtctctcccgccaattgcgccgacaatgcccctccgcccgccgcccttcgaacctcgcccgtccctgcgctcgatcgattgcttcctacaccgctccccaccaagccaatgccatatccgtcatacagaccaatgtcgattctacgtccgatgagttccgcgagaacgagcgcctcatgagcgaggccatggcccgtctggacaagctcacgcgcgccgcacagcagggtggttcggccaaggcaagggagaagcacattgccagaaagaagatactgcccagagaccgtgtcacggctttgatagaccaggggaccaccttcatggagctctcgcccttggctggccatgagctgtaccccgaggccgacgtgcccgccggcggtatcatcactggggtgggcgtggttgagggcgtcacctgtgtcattgttgcgaatgacagcacggtgaaaggcgggacatacttcccgatcactgtcaagaagcatctaagagcacaggctgtggcacaagaaaacaaactaccatgtatatacttggtggactcaggtggcgccaatcttccgaaccaggccgacgtcttcccagatcgcgaccatttcggtcgcatattttacaaccaggcgaggatgagctcgcagggcattcctcagatctccgtcgttatgggtctctgcaccgctggcggcgcctatgtacccgccatgagcgacgagagcattatagtagaaaagcagggtcacatcttcttagccggacctcccttagtaaaagctgctacgggtgaggaggtatcagctgaagagttaggtggtggcactatgcatacatcggtctctggagttgcagactacctcgctgtggacgacgcacacgctattgtgcttgcgcggcggagtatcaagaaccttaactggccacaaaaggcactgccgccagtcgagacatacgaagagccattatacccagagtccgagttgctaggcatcgcatcaacgaacttgagaaaaccattacctattcacgaagtaattgcgcgcatcgtcgacggctcacatttctcagagttcaagcgagatttcggaacgactctcgttacaggctttgccaagatatacggacaacccgtgggcatcgtggcgaacaacggcattctattcggcacatcttcacaaaaaggcgcgcatttcatcgagctatgcgcacagcgggggatcccgctagtcttcctacaaaacatcagcgggtttatggttggcgcacaggcagagcgcgagggtatcgcgaaacacggggctaagctcgtcacggctgtcgcttgcgccgacgtgcctaaattcaccgtcgtagttggcggctcattcggggctggaaattatggaatgtgtggccgtgcttattctcctcgcttcttgtggatgtggcctaatgcacgtatcggtgtcatgggtgctgagcagttgactaaggttatggagaccgttggtcaaaaaccggatcctgagctgagggatcggattgaggctgagagtgacgcggtgtactcgtccgctaggttatgggacgatggtgtgattccgccacagcatactagacgatatcttggattgggactgagagctgcgatgggtggtaagaatgaggtgaagcctggtgatactaagtttggtgtcttccgtatgtagatagatcatttgaagcaatgttgatttgtctataccctgaattaggaaaactatgttttcccacttctctacagtacttaacgccacaaggtgaattagagtaagcaatatctaataatcaacgaaaagaagaatcgcttagcagtaacgg

SEQ ID NO: 30983 - DNA, 1722 bp, Muscodor strobelii
  misc_feature: SGI cDNA ID NO. 570663
  misc_feature: Encodes the peptide sequence at SEQ ID NO 30984
atggctagcatgcgatcccttcgagtgttagggcgactccgtcccagggcctccccaccatcgctatccccagcggcccccatcacctgccaacctcggcggacatacgcctctaagaaacaccccaagggcttcgaagcgccctcgtccgccgacctcgccgagctacgtgagcgcgtccaagaattcacacgccgtgagattcccgaagaagtcgcttcaaacacagacaagaccaatgctttccccaacgagatctggcccaagctgggtgaagctggtttcctggggatgactgccgacgaggatgtcggcggacttgccatgggctaccaagcgcattgtgttgtcatggaggagctatcacgagcgagcggcagtattgctctgagctatgctgcgcactcacagctctgcgtcaatcagctgcagctcaatggatccgaggcacagaagcagaagttcctccctggcttgattgccggtactagtgtcggtgcgctcgccatgtccgagtcgggctctggcagcgacgttgtcagcatgcgaacgagtgcgaagaaggtcgacggcggctatgtgctgaacggcaccaagatgtggataacgaacggcccagatgctgacgtcgtggttgtgtatgccaagacgaagccggacggcggttccaagggcattactgcttttatcgtcgacaccaagaccgagggctttagctgtgctcgcaagctcgacaagatgggtatgcgtggcagcaatactggcgaactcgtcttcgagaacgtattcgtgcccgaggaacatatcctcggtgccatcgatggtggtgtgcgcgtcttgatggagggtcttgatctcgagcgcttggttcttagcgctggacctctcggtcttatgcaagcttctctcgacgttgccttgcccttcacgcatcagcgcaagcagttcggtagcccaattgctcacaaccagcttgtccagggcaagctcgccgatatgtacacgaagctacaggcatcacgggcttacacttacgccaccgccaaagcggtcgatgaggagggcactatccgcacgcaggattgcgcaggcgccattctgtatgccgctgagcgcgccacagagtgtgctcttgactgtatccagctccttggtggtatgggatacgttgaggagatgcccgcctcgaggatattgagagatgccaagctgtatgagatcggggctggtacatcagagattcgtcgcatggtcatcggcagggctttcaacaaggagtataaacacctgaagcaactagtcgcatacggcagcgttgacagcgaggccgtttccggcctctcatacgcccggcccaacgactccgtcggcgagagcgccgccggcgagattgctggtgccgcgcgcaccgttgcctcgccttccgttgcatcgccttccgttgcatcgccttccgttgcctcgcccgccggagcctcgaccgttgccgacgagcatgcccccgtcaccgagaacgcaccagtgatccctaatatccaaatcactgcgcctctcgctgataagttcgttgctgctctcaactctcttcctcccccgcccacccacaatctctcgaccggggccgccaccccacgtgtcccaaattacgctctcccgactctttcgtcggagagttaccgactcccactggccgcgcaaaccttggttgaatgggctcaatga

SEQ ID NO: 30984 - protein, 573 aa, Muscodor strobelii
  misc_feature: SGI Peptide ID NO. 570663
  misc_feature (167)..(218): Pfam Id: PF02770 Pfam Desc: Acyl-CoA dehydrogenase, middle domain
  misc_feature (274)..(424): Pfam Id: PF00441 Pfam Desc: Acyl-CoA dehydrogenase, C-terminal domain
  misc_feature (289)..(413): Pfam Id: PF08028 Pfam Desc: Acyl-CoA dehydrogenase, C-terminal domain
  misc_feature (50)..(163): Pfam Id: PF02771 Pfam Desc: Acyl-CoA dehydrogenase, N-terminal domain
  misc_feature (1)..(430): NCBI GI: 261353093 Blast Desc: isovaleryl-CoA dehydrogenase [Verticillium albo-atrum VaMs.102]
  misc_feature (1)..(427): NCBI GI: 256733488 Blast Desc: [Nectria haematococca mpVI 77-13-4]
  misc_feature (1)..(427): NCBI GI: 46128265 Blast Desc: FG08510.1 [Gibberella zeae PH-1]
  misc_feature (17)..(430): NCBI GI: 116193399 Blast Desc: conserved [Chaetomium globosum CBS 148.51] gi|88182330|gb|EAQ89798.1| conserved [Chaetomium globosum CBS 148.51]
  misc_feature (2)..(427): NCBI GI: 154303962 Blast Desc: BC1G_08865 [Botryotinia fuckeliana B05.10] gi|150854449|gb|EDN29641.1| BC1G_08865 [Botryotinia fuckeliana B05.10]
  misc_feature (14)..(430): NCBI GI: 171685065 Blast Desc: protein product [Podospora anserina] gi|170942493|emb|CAP68145.1| protein product [Podospora anserina]
  misc_feature (28)..(430): NCBI GI: 85112132 Blast Desc: isovaleryl-CoA dehydrogenase, mitochondrial precursor [Neurospora crassa OR74A] gi|28926060|gb|EAA35048.1| isovaleryl-CoA dehydrogenase, mitochondrial precursor [Neurospora
  misc_feature (34)..(427): NCBI GI: 169780668 Blast Desc: [Aspergillus oryzae RIB40] gi|46430489|dbj|BAD16690.1| isovaleryl-coenzyme A dehydrogenase [Aspergillus oryzae] gi|83773538|dbj|BAE63665.1| protein product [Aspergillus oryzae]
  misc_feature (34)..(427): NCBI GI: 238505142 Blast Desc: isovaleryl-CoA dehydrogenase IvdA, [Aspergillus flavus NRRL3357] gi|220689914|gb|EED46264.1| isovaleryl-CoA dehydrogenase IvdA, [Aspergillus flavus NRRL3357]
  misc_feature (19)..(427): NCBI GI: 240277804 Blast Desc: isovaleryl-CoA dehydrogenase [Ajellomyces capsulatus H143]
  misc_feature (39)..(426): SWISSPROT Homolog: EC 1.3.99.10 Isovaleryl-CoA dehydrogenase
  misc_feature: Useful for introducing or modulating the production of volatile compounds
  misc_feature: Useful for fungicidal and/or biocontrol applications
MASMRSLRVLGRLRPRASPPSLSPAAPITCQPRRTYASKKHPKGFEAPSSADLAELRERVQEFTRREIPEEVASNTDKTNAFPNEIWPKLGEAGFLGMTADEDVGGLAMGYQAHCVVMEELSRASGSIALSYAAHSQLCVNQLQLNGSEAQKQKFLPGLIAGTSVGALAMSESGSGSDVVSMRTSAKKVDGGYVLNGTKMWITNGPDADVVVVYAKTKPDGGSKGITAFIVDTKTEGFSCARKLDKMGMRGSNTGELVFENVFVPEEHILGAIDGGVRVLMEGLDLERLVLSAGPLGLMQASLDVALPFTHQRKQFGSPIAHNQLVQGKLADMYTKLQASRAYTYATAKAVDEEGTIRTQDCAGAILYAAERATECALDCIQLLGGMGYVEEMPASRILRDAKLYEIGAGTSEIRRMVIGRAFNKEYKHLKQLVAYGSVDSEAVSGLSYARPNDSVGESAAGEIAGAARTVASPSVASPSVASPSVASPAGASTVADEHAPVTENAPVIPNIQITAPLADKFVAALNSLPPPPTHNLSTGAATPRVPNYALPTLSSESYRLPLAAQTLVEWAQ

SEQ ID NO: 30985 - DNA, 2379 bp, Muscodor strobelii
  misc_feature: SGI EST ID NO. CUFF.73691.1
  misc_feature: Variant of the nucleotide sequence at SEQ ID NO 30983
tacggtagtttgttttcttgtgccacagcctgtgctcttagatgcttcttgacagtgatcgggaagtatgtcccgcctttcaccgtgctgtcattcgcaacaatgacacaggtgacgccctcaaccacgcccaccccagtgatgataccgccggcgggcacgtcggcctcggggtacagctcatggccagccaagggcgagagctccatgaaggtggtcccctggtctatcaaagccgtgacacggtctctgggcagtatcttctttctggcaatgtgcttctcccttgccttggccgaaccaccctgctgtgcggcgcgcgtgagcttgtccagacgggccatggcctcgctcatgaggcgctcgttctcgcggaactcatcggacgtagaatcgacattggtctgtatgacggatatggcattggcttggtggggagcggtgtaggaagcaatcgatcgagcgcagggacgggcgaggttcgaagggcggcgggcggaggggcattgtcggcgcaattggcgggagagacctagtaggtcgcgtgaggatcttggtatcgacatactcggcggtggttatgacgcaaatgaaaatcacaaagggaaactgcaacagaacaacgaggcaagctcggtgggaggaaaggtgaataagccttggaaggaaggtatcgtgaatagcgctcgcggcttccctcggtgccaacgtggggccgctgttagccgtagctaccccagatccccagaaatctacgatcctttgccattgtcttacaagtcacttcatcgtcacttcgattttcttcttgcgcgttgcttcaattctcatttcttggtatcaattaggacgcacaaagtgtagattgtgaatcttgggccgcgagaatggctagcatgcgatcccttcgagtgttagggcgactccgtcccagggcctccccaccatcgctatccccagcggcccccatcacctgccaacctcggcggacatacgcctctaagaaacaccccaagggcttcgaagcgccctcgtccgccgacctcgccgagctacgtgagcgcgtccaagaattcacacgccgtgagattcccgaagaagtcgcttcaaacacagacaagaccaatgctttccccaacgagatctggcccaagctgggtgaagctggtttcctggggatgactgccgacgaggatgtcggcggacttgccatgggctaccaagcgcattgtgttgtcatggaggagctatcacgagcgagcggcagtattgctctgagctatgctgcgcactcacagctctgcgtcaatcagctgcagctcaatggatccgaggcacagaagcagaagttcctccctggcttgattgccggtactagtgtcggtgcgctcgccatgtccgagtcgggctctggcagcgacgttgtcagcatgcgaacgagtgcgaagaaggtcgacggcggctatgtgctgaacggcaccaagatgtggataacgaacggcccagatgctgacgtcgtggttgtgtatgccaagacgaagccggacggcggttccaagggcattactgcttttatcgtcgacaccaagaccgagggctttagctgtgctcgcaagctcgacaagatgggtatgcgtggcagcaatactggcgaactcgtcttcgagaacgtattcgtgcccgaggaacatatcctcggtgccatcgatggtggtgtgcgcgtcttgatggagggtcttgatctcgagcgcttggttcttagcgctggacctctcggtcttatgcaagcttctctcgacgttgccttgcccttcacgcatcagcgcaagcagttcggtagcccaattgctcacaaccagcttgtccagggcaagctcgccgatatgtacacgaagctacaggcatcacgggcttacacttacgccaccgccaaagcggtcgatgaggagggcactatccgcacgcaggattgcgcaggcgccattctgtatgccgctgagcgcgccacagagtgtgctcttgactgtatccagctccttggtggtatgggatacgttgaggagatgcccgcctcgaggatattgagagatgccaagctgtatgagatcggggctggtacatcagagattcgtcgcatggtcatcggcagggctttcaacaaggagtataaacacctgagtgcgtagagaaacaggatactgggcattgtatttggaaaaactgcattcaagccggcgtttggattgggcgtgtttgtctagactagacatttgcataaataaatcgagaccttttcagaaagtggcctgctcattcgtctccccccaccggaggtaattcgatatgctcagggagcatgatacaggggcttagatggat

SEQ ID NO: 30986 - DNA, 765 bp, Muscodor strobelii
  misc_feature: SGI cDNA ID NO. 570664
  misc_feature: Elevated expression when VOC is produced
  misc_feature: Encodes the peptide sequence at SEQ ID NO 30987
atgtctacaatgccagcttcacacgggcactctgaggcctgctgcaacatcccacctgtcgtctcgaagggttacgaggcgaagggaggctatgaggagctaggaggcttcaagagctacgtcaccggcccatccagcgcgaccaagggcgtagtcacaattttcgacatcttcggattctacccgcaaactctgcagggcgccgatatcatggccttttccgatgaaaccaagtaccgtgtcttcatcccagattggttccatggcgagccgtgccctctctccatcttccctccggataccccagagaagcagaagcaagtcggcgacttcttcggcaagaactcgccgcccagcgttgcttccaaggttcctgactacttcaaggccgtctctgtcaagtatcctgacatcaaggagtggggaatcctcggcttctgttggggtggcaaagtcgtctccctcgtcacttcgtccgatgacaaccccttcaaagccgccatcgaagcccaccccgccatggtcgaccccaccgatgctggaaagatcaaggtgccgattgctatgctcgcctccggagacgaggacgcggaggatgtcaagaagttcaaggagaacttgactgtgcccaaccatgttgagacctttagtgaccagatccacggttggatggcggctcgctcggatctcgaaaatgagcgtgtcaagagcgagtacaccagaggctatgagactgtcctcaagttcctttcgcagcatttgtag

SEQ ID NO: 30987 - protein, 254 aa, Muscodor strobelii
  misc_feature: SGI Peptide ID NO. 570664
  misc_feature (37)..(254): Pfam Id: PF01738 Pfam Desc: Dienelactone hydrolase family
  misc_feature (1)..(254): NCBI GI: 261353096 Blast Desc: dienelactone hydrolase family protein [Verticillium albo-atrum VaMs.102]
  misc_feature (1)..(253): NCBI GI: 171685061 Blast Desc: protein product [Podospora anserina] gi|170942491|emb|CAP68143.1| protein product [Podospora anserina]
  misc_feature (1)..(253): NCBI GI: 85112124 Blast Desc: NCU02124 [Neurospora crassa OR74A] gi|28926058|gb|EAA35046.1| conserved [Neurospora crassa OR74A]
  misc_feature (3)..(254): NCBI GI: 226442996 Blast Desc: C30D10.14 [Salmo salar] gi|221221092|gb|ACM09207.1| C30D10.14 [Salmo salar]
  misc_feature (1)..(253): NCBI GI: 39970207 Blast Desc: MGG_02570 [Magnaporthe grisea 70-15] gi|149209601|ref|XP_001522175.1| MGCH7_ch7g283 [Magnaporthe grisea 70-15] gi|86196238|gb|EAQ70876.1| MGCH7_ch7g283 grisea
  misc_feature (1)..(254): NCBI GI: 46128834 Blast Desc: FG08780.1 [Gibberella zeae PH-1]
  misc_feature (1)..(254): NCBI GI: 256733510 Blast Desc: [Nectria haematococca mpVI 77-13-4]
  misc_feature (1)..(253): NCBI GI: 116193405 Blast Desc: CHGG_06420 [Chaetomium globosum CBS 148.51] gi|88182333|gb|EAQ89801.1| CHGG_06420 [Chaetomium globosum CBS 148.51]
  misc_feature (2)..(253): NCBI GI: 121714607 Blast Desc: dienelactone hydrolase family protein [Aspergillus clavatus NRRL 1] gi|119403068|gb|EAW13488.1| dienelactone hydrolase family protein [Aspergillus clavatus NRRL 1]
  misc_feature (4)..(254): NCBI GI: 156055914 Blast Desc: SS1G_05309 [Sclerotinia sclerotiorum 1980] gi|154703093|gb|EDO02832.1| SS1G_05309 [Sclerotinia sclerotiorum 1980]
  misc_feature: Useful for introducing or modulating the production of volatile compounds
MSTMPASHGHSEACCNIPPVVSKGYEAKGGYEELGGFKSYVTGPSSATKGVVTIFDIFGFYPQTLQGADIMAFSDETKYRVFIPDWFHGEPCPLSIFPPDTPEKQKQVGDFFGKNSPPSVASKVPDYFKAVSVKYPDIKEWGILGFCWGGKVVSLVTSSDDNPFKAAIEAHPAMVDPTDAGKIKVPIAMLASGDEDAEDVKKFKENLTVPNHVETFSDQIHGWMAARSDLENERVKSEYTRGYETVLKFLSQHL

SEQ ID NO: 30988 - DNA, 2960 bp, Muscodor strobelii
  misc_feature: SGI EST ID NO. CUFF.73410.0
  misc_feature: Variant of the nucleotide sequence at SEQ ID NO 30986
agaaacaggggttgcagttcgtcctctgcgtcttcgattcggttccagatccacagtacccagatcacctcacacggcgatcgagaaggcatgtggcgttgaggacgtgaataccgggatcacacgaggtctcagcaacgaaatgattggagttagtgaatggtgagtatatcttctaccggttacgcgtattcttgcccgattaagctgtgtctgctctctggcaaccgatgcctctgacttcctctgacatgtagctgacttatgtccagttcgtcgacatgattacatgaaagagcgagactcgcgactgagtggttgactgacgtttgcgttgtagaccccgatcctgcaactggagcttggcgtaacattcattggtatgcggccaagccgagaggcgcccttacgcgggatgatgaaaatatgccgctccagggcgacagagagaaattttcaactttctggtacagtgaagcagaggcactcgataagctcaagttggatgacgaaaaatttatggttcgcgtagctttcacatacttacgtaatatgtcaaaggaggattggctaagcaacgcggaatttgagcagcaagaagatgttggtacaaatttggcatcaaacagacatgctcggacgacaacatctcaaggaccctgatcgggggtctgggcacgaacaatttgtcctaagtcctaagagatacttaggccctccctaggtagaatgaacgagagcaatatcgagaggcctcagcaatcaaacatggagaatatctgtttgtaagttacagtgtaattctaatactggtatgcgttatcggtgttcttgcgtcagggatgagagacggggctagcgagcggcgagcctcaaggccaggtttccgaaagagcactagggtagaggatccggcatccctggaatgagatgatcgtactaaattccgtaccgattccgtattcgtcgttgtcgagggttgtcagagggagatgaggcttcatcaaatgttttgcgacagggcagagagggcagggaagatcccagctgaacctgcggcccatgcgaactggcttcttggttccattcgtggcggaagcttccctgcagctgaggcaacggttaagaagggcacgcgatcctattgacctatcaaacgatgcatgataccatgtataatcatttacgcattattcagattgcaattggtatatatcttgaataatgaaacagctcgacataaaacttccggtctcaagtatgcaggttcttgacacagctttcaagtaatgctgacatcatcaagttaccccgccaaatcgcataccagatgatagaagctacccctcacaagttggagataacctgaggtcgtcgtcgtcatcttacgtttctataatatgaaaggcgtagatttacagataggtgacgctatcaattagatatctggaagtaggtaaggatgcgagacgatctccattgagcctagctgagcattgcactcgctacccacgagctgcccgccaattcgggtgcatagaatgtttgcaaatagcttccggtgacagctgccgaatctgctttagtatgagctcataggtaggacatagacccgaaaagagaaattaccaaatggcgacaaggagacgattgggggtatgttgcgctggtatgataagacaaccaagatcttgcatctgcgtatcatcaccatccacccctctcaaaccacaactactttccaacactcgccacttgattattccgcctcatcaaaccagactcaactcacaagcttccaatctaaccgtcgccaaaatgtctacaatgccagcttcacacgggcactctgaggcctgctgcaacatcccacctgtcgtctcgaagggttacgaggcgaagggaggctatgaggagctaggaggcttcaagagctacgtcaccggcccatccagcgcgaccaagggcgtagtcacaattttcgacatcttcggattctacccgcaaactctgcagggcgccgatatcatggccttttccgatgaaaccaagtaccgtgtcttcatcccagattggttccatggcgagccgtgccctctctccatcttccctccggataccccagagaagcagaagcaagtcggcgacttcttcggcaagaactcgccgcccagcgttgcttccaaggttcctgactacttcaaggccgtctctgtcaagtatcctgacatcaaggagtggggaatcctcggcttctgttggggtggcaaagtcgtctccctcgtcacttcgtccgatgacaaccccttcaaagccgccatcgaagcccaccccgccatggtcgaccccaccgatgctggaaagatcaaggtgccgattgctatgctcgcctccggagacgaggacgcggaggatgtcaagaagttcaaggagaacttgactgtgcccaaccatgttgagacctttagtgaccagatccacggttggatggcggctcgctcggatctcgaaaatgagcgtgtcaagagcgagtacaccagaggctatgagactgtcctcaagttcctttcgcagcatttgtagattgattgaaaggtttagaaggtatgaattagcgggagcatgtgagacggcattgcatcaggtgggctcgaggtagctctgactctacttggcattgtgatgagatggctagcagaagaacacgcggagctttgagtctacaagactggcgcgagttgcggaatatgatgctatcgagatacatctttggtggcacggtatatgatcatggacgaatcagacaatgtgagaagagaacacactttgctattatttgtgatagcagctatctaacttctcttacgtgaaacgatgtaagtgcgtatcaaacacacaaacagtcatgtctccatccatgaacagtcctgttcagtataatcaattaatcttattgtgcg

SEQ ID NO: 30989 - DNA, 405 bp, Muscodor strobelii
  misc_feature: SGI cDNA ID NO. 570665
  misc_feature: Encodes the peptide sequence at SEQ ID NO 30990
atgacgttccctccccgcccgctcgcccttggcgcgggtcgtccccagaatgagcaacccgctcttaccgcccagcccgatgcggacgccactttgaagctgttgcagtcgatctcagccaacattcgcaaagacattcagggtgccgctacaaaagaggacattcgtcgagttcgacacgaagttactcgaggcaatgagggcatcgacgacctctctattcagctccagatcgcgcgtgaattcgctgctagtatgtccgcggccgttattcgcctccaggagttggagaagctggaggaggccagacaccagcagaccctccgtctcttccttgtcgttgcgtgtgtctctttcttcacgctgctttgtgtcgtcgtccttgctcttggctgggacttctaa

SEQ ID NO: 30990 - protein, 134 aa, Muscodor strobelii
  misc_feature: SGI Peptide ID NO. 570665
MTFPPRPLALGAGRPQNEQPALTAQPDADATLKLLQSISANIRKDIQGAATKEDIRRVRHEVTRGNEGIDDLSIQLQIAREFAASMSAAVIRLQELEKLEEARHQQTLRLFLVVACVSFFTLLCVVVLALGWDF

SEQ ID NO: 30991 - DNA, 1608 bp, Muscodor strobelii
  misc_feature: SGI cDNA ID NO. 570666
  misc_feature: Encodes the peptide sequence at SEQ ID NO 30992
atggccgaagagccgacccttcccagtctaccaagagtccaatggaactctcaagctcaaacattcgacaatacgcggaagcggaatcgtggacctgtgccccagcctctcttctcaaactccagcgatcctgctgtcttctcgagcgacgatgatccagatgtcgagaactatgtcaatggccggcataaaaagaaacgctactacggctcatggtttcagcagcagcagcaacttcccgcgtcctcggattcgacgtttagcgaagataaggccccgctacccaaaccgaagaggactttcgagcggcaagtcgactcgggagtctggatgggcagcgacggatccgttggtctcgacgaagaattcggtgttgaattcgaggcgcctatcgaacccaagctttcctcgctgagggtcgtcaatcctgggccagctctttcatcagagcaggccttggttcgccaaaaagtggaagaagcaatcgaacaagggaatgagaacgtcgatctatcgtctctcggtctcttgtctatctctagtgagactatagcccgtctttccgaactctctgtcataccgtcaatcgacaaagacgtgcctttcgagcaaaaggcacccgaacttgggctctatttgtccggcaattatctcacacgcgcacctggtgctctattcaatctggaacacctgacacatctcacccttagaaataaccagatcacaaacctccctcccagtatcggcaagttacgcaatctgcgaaccatcaatatctccctcaaccgtcttcgctacttaccaggagagctgctcaatctattaaggttcccttcaaagctggaaacactaaatattcatccgaatccgttctatcgatcagaagaaaatacttctccacagccggaatttgacggtgcatttccacatgacgtcaaattttttgtcatgcaagacaacacaatcaccgaagaaactcgtcagaaagctattgagagtgggaggaattgggcgtggcaggctgcgattcttgcgcgaagccccttacaatacagtgatagccgtggaaccatactttccaagttcgctttgccagtctcggaacagaatcacgagtgcgaaggagaagagttagaaaatcaacagcaagtcgttctggcgactgaagatcttacctacgatccgcagctaagtcttcctagtcataatgttggtgcttctgtaaagccaagttctgttctatcgctgttcgagctggcgttacaatcttctgctcgtgcggctcagacatgggatcttggggatcttgtttcgtggcttcctccgactgcccatccaagcattctcagatgtctcgacagaatcaaggagcaaagccaatcaagcgccaatatgggcactttaccttgctcagtgtgtggtcgacatatagttacgccagtggttcagtgggttgagtggtggattatatccaaatggaggaataatgcggccgctgaacccctcagtaatgaccccctcgagaatactgtgcctttcttgaagcgtgggtgttcatggaattgtgtgccaaagccaatgaagaaaggagaggcggcaccattttga

SEQ ID NO: 30992 - protein, 535 aa, Muscodor strobelii
  misc_feature: SGI Peptide ID NO. 570666
  misc_feature (1)..(530): NCBI GI: 261353280 Blast Desc: conserved [Verticillium albo-atrum VaMs.102]
  misc_feature (2)..(530): NCBI GI: 256732271 Blast Desc: NECHADRAFT_69670 [Nectria haematococca mpVI 77-13-4]
  misc_feature (2)..(529): NCBI GI: 46124055 Blast Desc: FG06405.1 [Gibberella zeae PH-1]
  misc_feature (4)..(534): NCBI GI: 149210303 Blast Desc: MGCH7_ch7g629 [Magnaporthe grisea 70-15] gi|86196584|gb|EAQ71222.1| MGCH7_ch7g629 [Magnaporthe grisea 70-15]
  misc_feature (1)..(524): NCBI GI: 171683937 Blast Desc: protein product [Podospora anserina] gi|170941929|emb|CAP67581.1| protein product [Podospora anserina]
  misc_feature (3)..(387): NCBI GI: 164428465 Blast Desc: NCU11065 [Neurospora crassa OR74A] gi|157072157|gb|EDO65365.1| [Neurospora crassa OR74A]
  misc_feature (1)..(430): NCBI GI: 116193051 Blast Desc: CHGG_06243 [Chaetomium globosum CBS 148.51] gi|88182156|gb|EAQ89624.1| CHGG_06243 [Chaetomium globosum CBS 148.51]
  misc_feature (1)..(524): NCBI GI: 156061217 Blast Desc: SS1G_02751 [Sclerotinia sclerotiorum 1980] gi|154700155|gb|EDN99893.1| SS1G_02751 [Sclerotinia sclerotiorum 1980]
  misc_feature (1)..(524): NCBI GI: 154293248 Blast Desc: BC1G_14421 [Botryotinia fuckeliana B05.10] gi|150845566|gb|EDN20759.1| BC1G_14421 [Botryotinia fuckeliana B05.10]
  misc_feature (43)..(525): NCBI GI: 242785483 Blast Desc: Leucine Rich Repeat domain protein [Talaromyces stipitatus ATCC 10500] gi|218720751|gb|EED20170.1| Leucine Rich Repeat domain protein [Talaromyces stipitatus ATCC 10500]
MAEEPTLPSLPRVQWNSQAQTFDNTRKRNRGPVPQPLFSNSSDPAVFSSDDDPDVENYVNGRHKKKRYYGSWFQQQQQLPASSDSTFSEDKAPLPKPKRTFERQVDSGVWMGSDGSVGLDEEFGVEFEAPIEPKLSSLRVVNPGPALSSEQALVRQKVEEAIEQGNENVDLSSLGLLSISSETIARLSELSVIPSIDKDVPFEQKAPELGLYLSGNYLTRAPGALFNLEHLTHLTLRNNQITNLPPSIGKLRNLRTINISLNRLRYLPGELLNLLRFPSKLETLNIHPNPFYRSEENTSPQPEFDGAFPHDVKFFVMQDNTITEETRQKAIESGRNWAWQAAILARSPLQYSDSRGTILSKFALPVSEQNHECEGEELENQQQVVLATEDLTYDPQLSLPSHNVGASVKPSSVLSLFELALQSSARAAQTWDLGDLVSWLPPTAHPSILRCLDRIKEQSQSSANMGTLPCSVCGRHIVTPVVQWVEWWIISKWRNNAAAEPLSNDPLENTVPFLKRGCSWNCVPKPMKKGEAAPF

SEQ ID NO: 30993 - DNA, 6543 bp, Muscodor strobelii
  misc_feature: SGI EST ID NO. CUFF.73472.1
  misc_feature: Variant of the nucleotide sequence at SEQ ID NO 30991
ggcggggtgcctaaatgaggagatacaattgacaaacaatccgcaaaggcagcaacattatgcattttgagcctttctgacaaagacacttcatgaaaatccattgctcttctcttgtagaactgagaattccatttctatctgcccaattacccctaggataaactatcttcatcaagaagaggcatactgtttgagagcagccttgcagactcaccccactatcatggcggctcctatagaccagcggattgcggtccctattgatgacccaaatgcagacacagaatggaatgaaattctgaggaagcacggtgtcatccccgagaagcctccttctcccactcccatgatcgaagaagccctcctcgagggtcgacgaatagcgcatgagaatagattggaagggaaagagctcgacgaattggacgcgctcgaagatgaagaggacgaggcattcttggaacagtaccgccaaaagcgcatgcaggagctcaataaactcaccaagaagtctatccacggctccgtgtaccccatcaccaagcccgaatactcgcgcgaggtcaccgacgcatcaaacaaggggcacgtcttcgtcaatctaacatcctctatgggtaacaacgttcaatcgagggttctgtctgagctatggcggcaggccgccaaggagtatggtgatatcaagttctgcgagatccgagccgacaaagctatcgagaactatcccgaccggaattgcccgaccattctggtgtataagaacggcgacatcgcgaagcagattgtcactctggtcaccatgggcggagttcgtgtgagcatgctggaaatagacaacctgcttgttgaggtcggtgcggtggacagtaaggacatgagagtagtcaagaggaggagagaggctgagaatgcgaaggaggatctcgatgcattgagaggaatcaagagcggaaacaccaggcacgcgaccgtcgacgacgatgacgacgactgggattgagaaggatggaagtaatgactgaggcacaatatcaatcatccgacggttcgatcatgaatcgggaaacatgcaggccaggccgacatagctttcagttcatttgccgaaacggatgactgtaaagacaatacgaacatatttccccacgcgcgctgtgctgttgtgcggctcagctttcatattagctgctccaagcaacccttgggaacgatgcgacgatcgcatcgaaccaggcgaacgcaatttccagcggcactgaaacatcaagtggtattggtataagactattctcgcatcttcatatgggcttatggaataattagctcttggagtgtagtagcaaacggatccgaagataccaacgatcgaggtgcagaccctggatttgcagctccgggaagctatgaacgaagtggggccaccaacgtcacgtaccttgtcgcatcgcgtgctgcgaggcggggcaggcatcttgtcctgtttacacgcgccgacctctgctgcatacaactgacgcgatcacaactatcaattgaccatatatctcccaaaaacatggccgaagagccgacccttcccagtctaccaagagtccaatggaactctcaagctcaaacattcgacaatacgcggaagcggaatcgtggacctgtgccccagcctctcttctcaaactccagcgatcctgctgtcttctcgagcgacgatgatccagatgtcgagaactatgtcaatggccggcataaaaagaaacgctactacggctcatggtttcagcagcagcagcaacttcccgcgtcctcggattcgacgtttagcgaagataaggccccgctacccaaaccgaagaggactttcgagcggcaagtcgactcgggagtctggatgggcagcgacggatccgttggtctcgacgaagaattcggtgttgaattcgaggcgcctatcgaacccaagctttcctcgctgagggtcgtcaatcctgggccagctctttcatcagagcaggccttggttcgccaaaaagtggaagaagcaatcgaacaagggaatgagaacgtcgatctatcgtctctcggtctcttgtctatctctagtgagactatagcccgtctttccgaactctctgtcataccgtcaatcgacaaagacgtgcctttcgagcaaaaggcacccgaacttgggctctatttgtccggcaattatctcacacgcgcacctggtgctctattcaatctggaacacctgacacatctcacccttagaaataaccagatcacaaacctccctcccagtatcggcaagttacgcaatctgcgaaccatcaatatctccctcaaccgtcttcgctacttaccaggagagctgctcaatctattaaggttcccttcaaagctggaaacactaaatattcatccgaatccgttctatcgatcagaagaaaatacttctccacagccggaatttgacggtgcatttccacatgacgtcaaattttttgtcatgcaagacaacacaatcaccgaagaaactcgtcagaaagctattgagagtgggaggaattgggcgtggcaggctgcgattcttgcgcgaagccccttacaatacagtgatagccgtggaaccatactttccaagttcgctttgccagtctcggaacagaatcacgagtgcgaaggagaagagttagaaaatcaacagcaagtcgttctggcgactgaagatcttacctacgatccgcagctaagtcttcctagtcataatgttggtgcttctgtaaagccaagttctgttctatcgctgttcgagctggcgttacaatcttctgctcgtgcggctcagacatgggatcttggggatcttgtttcgtggcttcctccgactgcccatccaagcattctcagatgtctcgacagaatcaaggagcaaagccaatcaagcgccaatatgggcactttaccttgctcagtgtgtggtcgacatatagttacgccagtggttcagtgggttgagtggtggattatatccaaatggaggaataatgcggccgctgaacccctcagtaatgaccccctcgagaatactgtgcctttcttgaagcgtgggtgttcatggaattgtgtgccaaagccaatgaagaaaggagaggcggcaccattttgagagagatcgatcgcatttatgtgtcttgtgggcatgacggttttacatcaaacagaaagagggaaagaaggcgaaggctacagctgtaaaatgaaatgtaggatcacgcgaagcgggaagtgattgatatccagggatggatagggtgaataaaatcatcctcgatgcccaggcacgcgcagccaaatgaaggacaagcttcggaatgcgaacggatcaaaaacagcatggaatcgagaatggaaactgagatgtaatcgtcgacggtgttctgaaccgcgcatgtcagaaaacgtacttaataggggggctacgaagatatcaatgccagaaccgtcttacgcgcctggtcattaccatcaactccgtcacttatcaactggctcagtcggtacaagtctaagttcaagcgcaagcaaaatctactagacttcccgccatgtccgtagcttcgcaaatcttgatactggcatccaacagagaataaaaggtagtcggtaatcagtcatcagtcaacagcataagccacgatgcccgatccctccgactccgaatatccccggtcacccggcgcaatgggtattgtctgtgctgatcaatccatggttccgagagttccgaaaataaatctaccggtgattattggcttctttcgggttcgttgatttggtcccgtagcctattccccattttgatattatcacaatagcggatatgtttatgtgcactttgacagaccgtatggcttcttcgccgtaactttgggcggcttggagccagcgacttttagagtttgggctactgcatgaggccaccattgttggaattgtaccgttgaaaattttattgtcgacggtgtatctgctacccggatgttggggtccctccacatatataggcgctattataaataaacgtgtttgtccatcctatggggctatttcagtgccgacagtgccgaagatgatgtctggtgatgatccagtgtctgacaaactcggaggcatgggacggacttcagaatgaaggcagaagggatgttgtataaattcgatgcggctcttcgtgttattgaaatgtcgttctcaggatatttggatctatagtcactgcgcctcaagttaaatataaggtacctacatgaactcacaactcgatcatcttactatctacgtccaaaaccattgaactaaattcaagatggcatattcgtacacaaattacaaatctccctacagaccatcatcgacagaaactcccctcgacagtttcatccgctgggcccgtttgaagaaatatcgaatcgaagtcacatacggagtatacgtctacacaccaggagaaaaactagcattctggacattattcctatttctcttcgtcactatttcaacagccgggctagtcttcgcacatcgaaacctcgcgcttctcgtacgactagttgctagttcggcatctcatggatgggccacaagacagaatatgcccgagctgacagcaggagctgggaatatcctcagcacggcgaggaattctcaggtcgcgtgatggatggtcggatttagaagagaactgttgtctgaggagatgatacgatacccaatagcctattggctgaccgtggatgacggttgattcctctcggttccacggtacaaggacttatgcatgaggcaagcaagtaagtcccgtgcagcgaaccgctacgaaataagtgcgattgagcgaggctacaccacgtctaagatgtatggtgtacgacagggagataaggatttgatagcagcttttgcttgctttggaatcctaccgaacatatcctaccattttctctcactcccgtccgccctaccgcacttacaccggctctttatttcccattatagccgccaagcccgcttgccaaccacgagttcggcgcgtcgggcatgatgttgagcccgacaacatactagtttggtctgcacatccttttgcaaatacttttggggttattttgcgaactttgcttatagttgacgtgatgcccggtcaaatttgcagtggaatgggcacgattcgcgggcgctacctgatggcgcccatgtcagataatactacattttcgggtcccactaggttttccacatcatccggagcctgacatcctcggcccccaagatcgcggactattgcgtgggcggtttggcttcattacctactcgcctgctattggtgattcgagtcaggcgcatacatattggtggtttttgccttgcggctccggctgcaccaactgcatggcccttttggaaagcaaaggcgttcgtgggagagctcgttgcagttcgtggtacttttgggaactcgtgagtttgtaccttgattgtattggggaaggcgagcagaagtaaggcgcgatgcatagatgagttggcgtggatgactccggaattcggagttatggtcgtgttgcattccggtcgtgcttcacgagatggaggttcaaaatgtgttaggccatgtgcttcttatgagtcattcgaagaagcgagcggaaggtcgtggaccatatgtatgatagtaacaagtgtagcaactggtattagcactacatttgttagcttgagtcttttgttatgagcattttgttacttgcctagcatgttatcgcagtttaagaaagtgacactattgaaacacttcctgagtggaggggaggaggataatgacctttcgtctcgcgattggttttatggattagatatacgatcgaagatggcagttacgaagtaggctgggcaacgattgcatattcgctgaagagtgttgctgtagcagtagccaatattgcactacatttgcctatccaattatgacaattagttctgcttgttctacactggtttattgctgagggggaactcgggcgtgcaggaacagtcaagattgaacaaaataagaacaatcaggaaggtagacgtcctgaagatctcacacacttttctgatctacgcagtcgccatatacgaatgatgcaaatccgctgttggctgcattcacacacttattttgctgtccgacacaggcatttgtgacagcatcaggaaacgctgtctattgcatgttagcttgtgattccaacggattctctctgctctaactcacacatgcgtggccatctacaagatatggagattgggtgttgtttgaaggagtgatctgcttgtaatgagtacaacaataggtattcatgacacgctgacggaggcgatttgcagatggaaaatgtaacgtgcttactggcaaaggatcggccccaatatctcctataaagatctaacactgcatattagaatgagaagtagatatcgatcgataaaatattcatg

SEQ ID NO: 30994 - DNA, 249 bp, Muscodor strobelii
  misc_feature: SGI cDNA ID NO. 570668
  misc_feature: Reduced expression when VOC is produced
  misc_feature: Encodes the peptide sequence at SEQ ID NO 30995
atggttctcgccgttgatctcctcaaccccagcccggctgccgaggccaagaagcacaagctcaagactctggtccccgctccccgatccttcttcatggacgtcaagtgccccggctgcttcaccatcaccaccgtcttctcacacgcccagaccgtcgtcatctgccagggctgcaccaccgtcctctgccagcccagcggtggaaaggccagattaaccgagggctgctccttccgcagaaagtag

SEQ ID NO: 30995 - protein, 82 aa, Muscodor strobelii
  misc_feature: SGI Peptide ID NO. 570668
  misc_feature (28)..(82): Pfam Id: PF01667 Pfam Desc: Ribosomal protein S27
  misc_feature (1)..(82): NCBI GI: 39970811 Blast Desc: 40S ribosomal protein S27 [Magnaporthe grisea 70-15] gi|149210305|ref|XP_001522527.1| MGCH7_ch7g630 [Magnaporthe grisea 70-15] gi|86196585|gb|EAQ71223.1| MGCH7_ch7g630 grisea 40S
  misc_feature (1)..(82): NCBI GI: 171683947 Blast Desc: protein product [Podospora anserina] gi|170941934|emb|CAP67586.1| protein product [Podospora anserina]
  misc_feature (1)..(82): NCBI GI: 85074781 Blast Desc: 40S ribosomal protein S27 [Neurospora crassa OR74A] gi|74662429|sp|Q7RVN2.1|RS27_NEUCR RecName: Full=40S ribosomal protein S27 gi|28927571|gb|EAA36522.1| 40S ribosomal protein S27
  misc_feature (1)..(82): NCBI GI: 68137989 Blast Desc: 40S ribosomal protein S27 [Chaetomium globosum]
  misc_feature (1)..(82): NCBI GI: 256731885 Blast Desc: [Nectria haematococca mpVI 77-13-4]
  misc_feature (1)..(82): NCBI GI: 154313883 Blast Desc: 40S ribosomal protein S27 [Botryotinia fuckeliana B05.10] gi|156046479|ref|XP_001589701.1| 40S ribosomal protein S27 [Sclerotinia sclerotiorum 1980] gi|150849373|gb|EDN24566.1|
  misc_feature (1)..(82): NCBI GI: 119192190 Blast Desc: 40S ribosomal protein S27 [Coccidioides immitis RS] gi|240106187|gb|EER24380.1| 40S ribosomal protein S27, [Coccidioides posadasii C735 delta SOWgp]
  misc_feature (1)..(82): NCBI GI: 169596440 Blast Desc: SNOG_00983 [Phaeosphaeria nodorum SN15] gi|189202210|ref|XP_001937441.1| 40S ribosomal protein S27 [Pyrenophora tritici-repentis Pt-1C-BFP] SNOG_00983 nodorum SN15]
  misc_feature (1)..(82): NCBI GI: 71000517 Blast Desc: 40S ribosomal protein S27 [Aspergillus fumigatus Af293] gi|121704840|ref|XP_001270683.1| 40S ribosomal protein S27, [Aspergillus clavatus NRRL 1] gi|66852579|gb|EAL92904.1| 40S
  misc_feature (1)..(82): NCBI GI: 145245315 Blast Desc: An11g09670 [Aspergillus niger] gi|134079624|emb|CAK40840.1| protein product [Aspergillus niger]
  misc_feature: Useful for introducing or modulating the production of volatile compounds
MVLAVDLLNPSPAAEAKKHKLKTLVPAPRSFFMDVKCPGCFTITTVFSHAQTVVICQGCTTVLCQPSGGKARLTEGCSFRRK

SEQ ID NO: 30996 - DNA, 1189 bp, Muscodor strobelii
  misc_feature: SGI EST ID NO. CUFF.73404.0
  misc_feature: Variant of the nucleotide sequence at SEQ ID NO 30994
caccgctaagcctgttcagtacacaccagaacggtctacagcgctcttcgcctctgtgggccacagaagcctcgtccgccaaccaaaatcctcgcagctttggcttttcctaagagtgaactttcctcacacacgacctctcttcccctcacccgacaaccatcaccgcaagcacaaaaatctgtactcgtcatccagattttatctgccactcccacgcttgcccaatcgattcaccaagatacatctcttgacaatcagacaagatggttctcgccgttgatctcctcaaccccagcccggctgccgaggccaagaagcacaagctcaagactctggtccccgctccccgatccttcttcatggacgtcaagtgccccggctgcttcaccatcaccaccgtcttctcacacgcccagaccgtcgtcatctgccagggctgcaccaccgtcctctgccagcccagcggtggaaaggccagattaaccgagggctgctccttccgcagaaagtagaggctcaatggcttcctcctattttcttcgttagggcattggttacgacttgatggtataatggctcggatatctgcaaagcacttctcggtggcatggggcgcatagaaaactgggggtccccgcggggactctcacatctgtcacaatacgcaacagcaaactcgactttcctgacgaatcttcttaccgtcaactgcagatagacgacggataccaaaaagtactccaatacaaaaaggggcgtttggggtcctgatatctcgcattttcgcttgtctttcctgcgaagggtttccttctcttgtgcaacgggagacctcttatcgacatcacacgtttcagtgatgtgatagatctacaaagggtggatggctggaaacggcttcacattagcatctcggagggaaagtgcgatcccgagagggaacagcacggccgagacatgcgaggacatggaacgctgcttgaggattgctaaatacccgcaatggtcattgtttaggcaaattcacggagttccacggacaagcttgctgcatttttctctgcccgaagtgacgatgactggtgaaatgctcaatgatatcgtgacaggatgtggttgaagatagtgacaacggagttgaactctcgacatattgtagttgtcggtcttgagtcgtttcaaaaac

SEQ ID NO: 30997 - DNA, 1785 bp, Muscodor strobelii
  misc_feature: SGI cDNA ID NO. 570669
  misc_feature: Encodes the peptide sequence at SEQ ID NO 30998
cctccgccccagcagcagccccccaacacctacggccggcccgccgctgcgtccgaggtcgagggcaacagccggagtaaggctcagctgattgtcggcatcgacttcggcactactttctcgggtgtcgcattcgcttttgccaccaacaacgaagccaaggaggacatcattaccgagtggccgggcgcgggatcgtacacgaaacaaaagatccctactgttttgtactacgaccagtaccagaaagtcgtcggatggggccccgatatcgccgatgccctggcgccgactgggtatcccaagccaggcgtgcagaaggtcgagtggttcaagctgcagctgatgctcagcggcaacacgtacatcgaccccatcaacctgcccccgctgcccccaggcaagtcggagatcgacgtcgccgccgactacctcttcaagctgcggcaggccatgcgcgctgcgctccagaaaaccctcggcgaggtctttaacagagaggagcgcaacatccgctactacttgactgtcccggccatctggaacgacgccggcaaggctgccacgcgcgctgcggcgatccaagccggtttcttgcgcgacgagaacgacaaccgtctgactctggtcagcgagcccgaggccgcctcgctgttctgcgccaagaccggcctgctgaacctgaaggtgcacgacgccattcttattgtcgactgcggtggtggcactgtcgatttgattgcctacgaagtcgaggacgaaaaccctttcactgtcgccgaatgcactgcgggctcgggcgactcgtgcggctcgacggccctcaaccgcaatttcagcaacattctgcgcaccaagatccgcaagatgaagctgcccgacggatccaagacggccggccgtgtctacgctaagtgtatcatggacttcgagaaccggatcaaggccgatttccgcaacaacggacagaagtgggccgtcgacgtcggcattgaggccgagttcccggaggccggcattgaagagggctacatgacctttaccaacgaggagattctgcagtgcttcgagcccgtcgtgaacaggattctggagcttgtgcgcaaccagatcattgccatccaggcccagaaccgcacgctacagaacatcttggttgttggcggtttcggcgcttccgagtacctgttccagcagatcaagcttcacgttcctccgcagttccagtccaaggtggtcaggcccatggactcggtcgcagctattgtcaagggtgccgttactgccggcatcactgagagagtcatcacccatcgtgttgcccgccgccactacctcatggccactctgcagcccttcaaggagggctaccaccccgaggcgtaccgtgttccctccctcgacggcaaggaccgctgcaagttcacgcggcagatctttgtgcaaaagggccagaaagtcaagattggcgagccagtcaaggtttcattcttccggcaggtcgcccccggcgctactctcatgtacgaagatatcctgtacgcctgtgatgacgatgtgtgccccgaatacaccaaggatcctcgcataaaggaagtcgtcactcttacatccgatttgtcacggaagaacttggagaaagacttcgagcgcatggataccccacaaggcaccttctaccgcgtatacttcgatatctacctgacgctggacggttccgagttcagcgctgagcttgtatgtcaaggcgaggtcatgggtcgctgccgatcgaggttccggtaa

SEQ ID NO: 30998 - protein, 594 aa, Muscodor strobelii
  misc_feature: SGI Peptide ID NO. 570669
  misc_feature (15)..(594): NCBI GI: 149210717 Blast Desc: MGCH7_ch7g831 [Magnaporthe grisea 70-15] gi|86196786|gb|EAQ71424.1| MGCH7_ch7g831 [Magnaporthe grisea 70-15]
  misc_feature (4)..(594): NCBI GI: 116192957 Blast Desc: conserved [Chaetomium globosum CBS 148.51] gi|88182109|gb|EAQ89577.1| conserved [Chaetomium globosum CBS 148.51]
  misc_feature (15)..(594): NCBI GI: 164428438 Blast Desc: NCU00573 [Neurospora crassa OR74A] gi|157072147|gb|EAA35498.2| NCU00573 [Neurospora crassa OR74A]
  misc_feature (17)..(594): NCBI GI: 171684015 Blast Desc: protein product [Podospora anserina] gi|170941968|emb|CAP67620.1| protein product [Podospora anserina]
  misc_feature (15)..(594): NCBI GI: 38567333 Blast Desc: conserved [Neurospora crassa]
  misc_feature (12)..(594): NCBI GI: 261353104 Blast Desc: Hsp70-like protein [Verticillium albo-atrum VaMs.102]
  misc_feature (11)..(594): NCBI GI: 256734110 Blast Desc: [Nectria haematococca mpVI 77-13-4]
  misc_feature (11)..(594): NCBI GI: 46128341 Blast Desc: FG08548.1 [Gibberella zeae PH-1]
  misc_feature (3)..(594): NCBI GI: 154298057 Blast Desc: conserved [Botryotinia fuckeliana B05.10] gi|150858308|gb|EDN33500.1| conserved [Botryotinia fuckeliana B05.10]
  misc_feature (17)..(594): NCBI GI: 255930293 Blast Desc: Pc06g00970 [Penicillium chrysogenum Wisconsin 54-1255] gi|211581319|emb|CAP79090.1| Pc06g00970 [Penicillium chrysogenum Wisconsin 54-1255]
PPPQQQPPNTYGRPAAASEVEGNSRSKAQLIVGIDFGTTFSGVAFAFATNNEAKEDIITEWPGAGSYTKQKIPTVLYYDQYQKVVGWGPDIADALAPTGYPKPGVQKVEWFKLQLMLSGNTYIDPINLPPLPPGKSEIDVAADYLFKLRQAMRAALQKTLGEVFNREERNIRYYLTVPAIWNDAGKAATRAAAIQAGFLRDENDNRLTLVSEPEAASLFCAKTGLLNLKVHDAILIVDCGGGTVDLIAYEVEDENPFTVAECTAGSGDSCGSTALNRNFSNILRTKIRKMKLPDGSKTAGRVYAKCIMDFENRIKADFRNNGQKWAVDVGIEAEFPEAGIEEGYMTFTNEEILQCFEPVVNRILELVRNQIIAIQAQNRTLQNILVVGGFGASEYLFQQIKLHVPPQFQSKVVRPMDSVAAIVKGAVTAGITERVITHRVARRHYLMATLQPFKEGYHPEAYRVPSLDGKDRCKFTRQIFVQKGQKVKIGEPVKVSFFRQVAPGATLMYEDILYACDDDVCPEYTKDPRIKEVVTLTSDLSRKNLEKDFERMDTPQGTFYRVYFDIYLTLDGSEFSAELVCQGEVMGRCRSRFR

SEQ ID NO: 30999 - DNA, 2338 bp, Muscodor strobelii
  misc_feature: SGI EST ID NO. CUFF.73685.1
  misc_feature: Variant of the nucleotide sequence at SEQ ID NO 30997
ctccgccccagcagcagccccccaacacctacggccggcccgccgctgcgtccgaggtcgagggcaacagccggagtaaggctcagctgattgtcggcatcgacttcgtgcgtgccccctttcgcccctgtgtgaatgcccacgagttgcagcaccgctaactgcttgctccagggcactactttctcgggtgtcgcattcgcttttgccaccaacaacgaagccaaggaggacatcattaccgagtggccgggcgcgggatcgtacacgaaacaaaaggtatgaacaggaagcgccacagaccgcggcgagactgacgtgcgcacaagatccctactgttttgtactacgaccagtaccagaaagtcgtcggatggggccccgatatcgccgatgccctggcgccgactgggtatcccaagccaggcgtgcagaaggtcgagtggttcaagctgcagctgatgctcagcggcaacacgtacatcgaccccatcaacctgcccccgctgcccccaggcaagtcggagatcgacgtcgccgccgactacctcttcaagctgcggcaggccatgcgcgctgcgctccagaaaaccctcggcgaggtctttaacagagaggagcgcaacatccgctactacttgactgtcccggccatctggaacgacgccggcaaggctgccacgcgcgctgcggcgatccaagccggtttcttgcgcgacgagaacgacaaccgtctgactctggtcagcgagcccgaggccgcctcgctgttctgcgccaagaccggcctgctgaacctgaaggtgcacgacgccattcttattgtcgactgcggtggtggcactgtcgatttgattgcctacgaagtcgaggacgaaaaccctttcactgtcgccgaatgcactgcgggctcgggcgactcgtgcggctcgacggccctcaaccgcaatttcagcaacattctgcgcaccaagatccgcaagatgaagctgcccgacggatccaagacggccggccgtgtctacgctaagtgtatcatggacttcgagaaccggatcaaggccgatttccgcaacaacggacagaagtgggccgtcgacgtcggcattgaggccgagttcccggaggccggcattgaagagggctacatgacctttaccaacgaggagattctgcagtgcttcgagcccgtcgtgaacaggattctggagcttgtgcgcaaccagatcattgccatccaggcccagaaccgcacgctacagaacatcttggttgttggcggtttcggcgcttccgagtacctgttccagcagatcaagcttcacgttcctccgcagttccagtccaaggtggtcaggcccatggactcggtcgcagctattgtcaagggtgccgttactgccggcatcactgagagagtcatcacccatcgtgttgcccgccgccactacctcatggccactctgcagcccttcaaggagggctaccaccccgaggcgtaccgtgttccctccctcgacggcaaggaccgctgcaagttcacgcggcagatctttgtgcaaaagggccagaaagtcaagattggcgagccagtcaaggtttcattcttccggcaggtcgcccccggcgctactctcatgtacgaagatatcctgtacgcctgtgatgacgatgtgtgccccgaatacaccaaggatcctcgcataaaggaagtcgtcactcttacatccgatttgtcacggaagaacttggagaaagacttcgagcgcatggataccccacaaggcaccttctaccgcgtatacttcgatatctacctgacgctggacggttccgagttcagcgctgagcttgtatgtcaaggcgaggtcatgggtcgctgccgatcgaggttccggtaaagcgagcgagcgagcatttagacgcaagaccgagagagaagacgtcaagaggagtggggactgcattgccacatttggcaacaccaatgttgtttttctttgcggtttcacgacgtggattttgatttggtttgggttgcttgactgatacctccgcgaagagcaatggcgacgcatatttgacctacagagcccctgtcatacactacacaacgagaaactctcctgagaaagcatcctttgatttgagaagaatgtgggtagtgtgatgtctaatctagttgagagagcggttcatgaaaaggggaaagttgacgatacgaaatgatgatcaggatggctaaatatatcagcaaccggttaaactcattaattctacctgccgtgataagcaactattctctgtgacatgagcgaaaggagaaccccgagagatg

SEQ ID NO: 31000 - DNA, 1191 bp, Muscodor strobelii
  misc_feature: SGI cDNA ID NO. 570670
  misc_feature: Reduced expression when VOC is produced
  misc_feature: Encodes the peptide sequence at SEQ ID NO 31001
atggatgtactctcaattgccaccatgttcatgctgtgctctagcatcccacaggtagccgctgtcgtgtacccatcgaaccataaattatacaaattcgactatctgtcgccgaacccgaacaagggcattactcgccctctcaccaagcgcgacaacgccataccactgaaggtaacaaacaattgtcccgacaccatatggcccggcattgccacgcaagccggggatgcacccgaaatccatggcttcgagctacaaccggggaaatcggtgaaccagacagttggtccgacttgggcgggtagagtttggggccgcacgaattgcactgttagtggcaataccgcatcgtgtcagacaggagattgtctaggcaagctggactgcgagtatagtggctctgcacccgcgacgctcgccgagttcaacctggcgggcggtataaacggcgatcaaaacttctacgatatctcgctggtcgatggatacaacctgccagttggcatagtctacatcccagcctccaacacatcctatcttcccccaaatctcgtgaacccgtcatgcatcggaactcccgggtttctcagcacgatgaacacaacaggaacatactacactaactcctcctacccgatgccctacgagcccaccctgaccaaccagcaaatctccgactggtgtccctgggatctacaactcctcccaccaactaaaccaggcgatggcgtgtacccatatcccgatgacaacatccaacggccagtcttcgacccgtgtctcagcgcctgctcccacagccacaaacccgcggattgctgtacggggaaacacgactccgccgagacttgtcatccatccctgtactcgcagtatgcgaagagggtctgtccggatgcgtacagttatgcatacgacgatgcgacgagcacgtttgtcgtaccgatgggcgggggctgggaagttgtgttttgtcccgaggggcggagtacgaatatcctcaagacttttgctgagcagctgcctggcgtcgctgcagggaatttgagtgccaaggattacagagatgctatgaatgtctcgtttattgaacagtggagttctagcgccgagagaatgtttgccgggcagttggggcccttgatttgggcgttgtttgtgagctttgcgatgttggtccggggatga

SEQ ID NO: 31001 - protein, 396 aa, Muscodor strobelii
  misc_feature: SGI Peptide ID NO. 570670
  misc_feature (61)..(327): Pfam Id: PF00314 Pfam Desc: Thaumatin family
  misc_feature (61)..(170): Pfam Id: PF00314 Pfam Desc: Thaumatin family
  misc_feature (261)..(327): Pfam Id: PF00314 Pfam Desc: Thaumatin family
  misc_feature (55)..(388): NCBI GI: 85114632 Blast Desc: NCU00572 [Neurospora crassa OR74A] gi|28926525|gb|EAA35497.1| conserved [Neurospora crassa OR74A] gi|38567334|emb|CAE76622.1| related to pathogenesis-related PR5K
  misc_feature (55)..(365): NCBI GI: 171684017 Blast Desc: protein product [Podospora anserina] gi|170941969|emb|CAP67621.1| protein product [Podospora anserina]
  misc_feature (3)..(389): NCBI GI: 261353105 Blast Desc: thaumatin family protein [Verticillium albo-atrum VaMs.102]
  misc_feature (52)..(375): NCBI GI: 256734109 Blast Desc: NECHADRAFT_36233 [Nectria haematococca mpVI 77-13-4]
  misc_feature (55)..(371): NCBI GI: 39971155 Blast Desc: MGG_03044 [Magnaporthe grisea 70-15] gi|149210731|ref|XP_001522740.1| MGCH7_ch7g838 [Magnaporthe grisea 70-15] gi|86196793|gb|EAQ71431.1| MGCH7_ch7g838 grisea
  misc_feature (43)..(394): NCBI GI: 46128343 Blast Desc: FG08549.1 [Gibberella zeae PH-1]
  misc_feature (12)..(366): NCBI GI: 156056102 Blast Desc: SS1G_05403 [Sclerotinia sclerotiorum 1980] gi|154703187|gb|EDO02926.1| SS1G_05403 [Sclerotinia sclerotiorum 1980]
  misc_feature (16)..(388): NCBI GI: 154298063 Blast Desc: BC1G_12184 [Botryotinia fuckeliana B05.10] gi|150858311|gb|EDN33503.1| BC1G_12184 [Botryotinia fuckeliana B05.10]
  misc_feature (42)..(353): NCBI GI: 169599150 Blast Desc: SNOG_02391 [Phaeosphaeria nodorum SN15] gi|160704545|gb|EAT90603.2| SNOG_02391 [Phaeosphaeria nodorum SN15]
  misc_feature (50)..(353): NCBI GI: 189208714 Blast Desc: thaumatin family protein [Pyrenophora tritici-repentis Pt-1C-BFP] gi|187976783|gb|EDU43409.1| thaumatin family protein [Pyrenophora tritici-repentis Pt-1C-BFP]
  misc_feature: Useful for introducing or modulating the production of volatile compounds
MDVLSIATMFMLCSSIPQVAAVVYPSNHKLYKFDYLSPNPNKGITRPLTKRDNAIPLKVTNNCPDTIWPGIATQAGDAPEIHGFELQPGKSVNQTVGPTWAGRVWGRTNCTVSGNTASCQTGDCLGKLDCEYSGSAPATLAEFNLAGGINGDQNFYDISLVDGYNLPVGIVYIPASNTSYLPPNLVNPSCIGTPGFLSTMNTTGTYYTNSSYPMPYEPTLTNQQISDWCPWDLQLLPPTKPGDGVYPYPDDNIQRPVFDPCLSACSHSHKPADCCTGKHDSAETCHPSLYSQYAKRVCPDAYSYAYDDATSTFVVPMGGGWEVVFCPEGRSTNILKTFAEQLPGVAAGNLSAKDYRDAMNVSFIEQWSSSAERMFAGQLGPLIWALFVSFAMLVRG

SEQ ID NO: 31002 - DNA, 2255 bp, Muscodor strobelii
  misc_feature: SGI EST ID NO. CUFF.73456.1
  misc_feature: Variant of the nucleotide sequence at SEQ ID NO 31000
gcttagggtgcctgccagccagtcaggttgcgtcgctgaattcaggaggtgggagtctcaacctgggtttactcgctgatctcgctcaagcggttgttcattgtcaagactcaatcctctccgttgacttattccgtcttcctacctgcacaacgacctaccttgcagcatcatctgtacatatcctcaggctcggaatcgtatttccttctcttcatctagatacacttctttctatcgactatcccaccgctctccgcccattctagatcaaatcctggccaagacaaggatcgtccaacggccgaccggggtcttacgccaaccaccaacccttgattccgacgattggatatcatttcctacgtcactggtctccaacccggtattctggtctctctgcaaccttcgacaacgtgggcttgtacattagcttgcgactatctctggaatcgtgaagtcgcgctagattggacctgcatctggtcatttatttccggatttccattcgataagaagcgcctttaatataaagttccatatgcaacagtcgccctggtttggatttgttcgagcgaatccacgattctttaataagtgttcaagccattgctactcggagatacgcaatagcgagagactcgattccttggagcatcgtgaaatactgcttcacaccacaatgcctcgccaccaccgttgtcggcgcaagtcaaaaatggatgtactctcaattgccaccatgttcatgctgtgctctagcatcccacaggtagccgctgtcgtgtacccatcgaaccataaattatacaaattcgactatctgtcgccgaacccgaacaagggcattactcgccctctcaccaagcgcgacaacgccataccactgaaggtaacaaacaattgtcccgacaccatatggcccggcattgccacgcaagccggggatgcacccgaaatccatggcttcgagctacaaccggggaaatcggtgaaccagacagttggtccgacttgggcgggtagagtttggggccgcacgaattgcactgttagtggcaataccgcatcgtgtcagacaggagattgtctaggcaagctggactgcgagtatagtggctctgcacccgcgacgctcgccgagttcaacctggcgggcggtataaacggcgatcaaaacttctacgatatctcgctggtcgatggatacaacctgccagttggcatagtctacatcccagcctccaacacatcctatcttcccccaaatctcgtgaacccgtcatgcatcggaactcccgggtttctcagcacgatgaacacaacaggaacatactacactaactcctcctacccgatgccctacgagcccaccctgaccaaccagcaaatctccgactggtgtccctgggatctacaactcctcccaccaactaaaccaggcgatggcgtgtacccatatcccgatgacaacatccaacggccagtcttcgacccgtgtctcagcgcctgctcccacagccacaaacccgcggattgctgtacggggaaacacgactccgccgagacttgtcatccatccctgtactcgcagtatgcgaagagggtctgtccggatgcgtacagttatgcatacgacgatgcgacgagcacgtttgtcgtaccgatgggcgggggctgggaagttgtgttttgtcccgaggggcggagtacgaatatcctcaagacttttgctgagcagctgcctggcgtcgctgcagggaatttgagtgccaaggattacagagatgctatgaatgtctcgtttattgaacagtggagttctagcgccgagagaatgtttgccgggcagttggggcccttgatttgggcgttgtttgtgagctttgcgatgttggtccggggatgaatgtcgaattgggtatgagttatgaatgacgagagatgaagagttgggattcgatggcattttgtatggtccgtcaagaacgggagagacttgtggctgaagcatggattgccatcgtcggccgtccattgagggtctcattcgaattgggatgcagaccaatgtctacgggcatcatacacggcgcttactaggcgcttgattcgaggaccgcgaggatggaggtatctaggaggatggatgggcatggaaatcagaaattggtagcactgattttcttgcattagacctagagattatacccttcaattcaattttgattatgattatgaatacacttcgccgt

SEQ ID NO: 31003 - DNA, 2262 bp, Muscodor strobelii
  misc_feature: SGI cDNA ID NO. 570671
  misc_feature: Encodes the peptide sequence at SEQ ID NO 31004
atggactttgatacccagtgtttagccaaggactggacgagaacaaattggcgcagtgacgatttgactagaacgattccatggcaggacctcaagcgctcaactgtactccatgtagcacaggctctctataacgccgatcgcacaaacagcgagttcattacaattggccgaagcattgacgatttagctgaacgctcgcctgccgatctggagatataccgacgttgtatgctagatcaacagggacgtagcgcacgtgtaatcgagccgtggattgatgccctattccagccagatgacaaaacaagcgacgacccagcgcaccgaacgacatatgcgcctaccacagattatcaacatgcggagagccagggcacttatacactcggcatcaagttgaacttccttgttgcacgcctgtggaatggcgattggaattctcctgacccgcatccaagcgctcccggcaaagatctagtgcaagggcctgatgatcccccttatgtggacactctcgagattggtgatgcagaaatgtggaagcatattgttgcccttgccataagtaagtactcagacggcgatattgtagctattgcacaggatcaatccgaagatgctgacttcttccgccagagcttcgcctaccgacaggctctcgcatatggcgaggataaagccagcgcggacgaggcacgacgagaaggctggcaacgagacgaagaagatgttcctaatgacaaccacaacaacccgccgatcgagttccactatagtctaccgcgtggatacatcgacacccagatcaagactttcacagagcttgtccttgatgtaatggaagggggttcatcacgtgagaccgacatcccgccagagatttaccctttgattcgtggtcgaacaggctactggcaacagaattttcgctatgatatagtccgtgaatgtacgagaatccttgcctctcagcttacaacgagcaatccccgtgcggattacaaggatgaggatcgtgagaacatagcaagggaggtcatcgaccgtgtcatgggcgcggtctacgtctctcagcgtgatcccacggccaatgacctcccatcgatgaagccacgttaccgagcctggagcgtatcaacgaataaatgggcaaacctcaaacgcgttcactttcgcgattacttcggccatcctgatacgggacacccacaatacaaaggcgctttaactacgcacccgataaaacagtacgtatggatgccaatggagctcgcctctcctctctgggagcatcggaactgggacccgataaagaaatcaatgcaacgggtatgtcaaaccctcaaggacagtcttcgcgttcaccactgcggtctgcccagtctcgacatgacaactagcattttcatcggtcacagctcaggcttcactcttctcgagctgaagaagatcgtcacactgtacgtgctcatcgaaaaagatattgcacatctccaccgacggcgtcgttcaacatctgaaggtcagtggccctgtgagtctctgctgacgagatcgcggctcggctcagttctcagtcaaatcaacacagctagtggtcaagtgcacgacccgcagcgcattctgccacacccatccaaggcgacatttgacttctggacggatcagatgatgcagcacattcccgtctccacgtctttcgccagcgcgtctcaagaagcattctttcgcgcgctctggctctacacatctgtctccgagctctcccgcgctttagagactaccggaccaccctaccacaccaacctcgcagtccggtgtcaaggtcgaggccagcggtcctcccatctccgcactcagcaccaacgtaagcatcccgatcgagatccctacttaggagatgtagaccgtcaccgcggtgtgttggaattccgacagatgggacaatcactcgacgcgaatacgatcttatcctggtctcacatttgccatcgtattgtattgacagcaagagatagtagggcagatacttttgcgtactctcttttctccgtcatgagtggggcgcctgtgttagatgtccttggttgtctgcataaggctagtgttgtggacagattcaaggaggttgacggggagggaggttattaccaacccacgaggaatggagtggtgaggtgggactatccgttctatggtggtgttgatgatggaacccctcagctgacgggagatttgggtagtgtcaccttattgtaa

SEQ ID NO: 31004 - protein, 753 aa, Muscodor strobelii
  misc_feature: SGI Peptide ID NO. 570671
MDFDTQCLAKDWTRTNWRSDDLTRTIPWQDLKRSTVLHVAQALYNADRTNSEFITIGRSIDDLAERSPADLEIYRRCMLDQQGRSARVIEPWIDALFQPDDKTSDDPAHRTTYAPTTDYQHAESQGTYTLGIKLNFLVARLWNGDWNSPDPHPSAPGKDLVQGPDDPPYVDTLEIGDAEMWKHIVALAISKYSDGDIVAIAQDQSEDADFFRQSFAYRQALAYGEDKASADEARREGWQRDEEDVPNDNHNNPPIEFHYSLPRGYIDTQIKTFTELVLDVMEGGSSRETDIPPEIYPLIRGRTGYWQQNFRYDIVRECTRILASQLTTSNPRADYKDEDRENIAREVIDRVMGAVYVSQRDPTANDLPSMKPRYRAWSVSTNKWANLKRVHFRDYFGHPDTGHPQYKGALTTHPIKQYVWMPMELASPLWEHRNWDPIKKSMQRVCQTLKDSLRVHHCGLPSLDMTTSIFIGHSSGFTLLELKKIVTLYVLIEKDIAHLHRRRRSTSEGQWPCESLLTRSRLGSVLSQINTASGQVHDPQRILPHPSKATFDFWTDQMMQHIPVSTSFASASQEAFFRALWLYTSVSELSRALETTGPPYHTNLAVRCQGRGQRSSHLRTQHQRKHPDRDPYLGDVDRHRGVLEFRQMGQSLDANTILSWSHICHRIVLTARDSRADTFAYSLFSVMSGAPVLDVLGCLHKASVVDRFKEVDGEGGYYQPTRNGVVRWDYPFYGGVDDGTPQLTGDLGSVTLL

SEQ ID NO: 31005 - DNA, 760 bp, Muscodor strobelii
  misc_feature: SGI EST ID NO. CUFF.73431.0
  misc_feature: Variant of the nucleotide sequence at SEQ ID NO 31003
aggctggcaacgagacgaagaagatgttcctaatgacaaccacaacaacccgccgatcgagttccactatagtctaccgcgtggatacatcgacacccagatcaagactttcacagagcttgtccttgatgtaatggaagggggttcatcacgtgagaccgacatcccgccagagatttaccctttgattcgtggtcgaacaggctactggcaacagaattttcgctatgatatagtccgtgaatgtacgagaatccttgcctctcagcttacaacgagcaatccccgtgcggattacaaggatgaggatcgtgagaacatagcaagggaggtcatcgaccgtgtcatgggcgcggtctacgtctctcagcgtgatcccacggccaatgacctcccatcgatgaagccacgttaccgagcctggagcgtatcaacgaataaatgggcaaacctcaaacgcgttcactttcgcgattacttcggccatcctgatacgggacacccacaatacaaaggcgctttaactacgcacccgataaaacagtacgtatggatgccaatggagctcgcctctcctctctgggagcatcggaactgggacccgataaagaaatcaatgcaacgggtatgtcaaaccctcaaggacagtcttcgcgttcaccactgcggtctgcccagtctcgacatgacaactagcattttcatcggtcacagctcaggcttcactcttctcgagctgaagaagatcgtcacactgtac

SEQ ID NO: 31006 - DNA, 648 bp, Muscodor strobelii
  misc_feature: SGI cDNA ID NO. 570672
  misc_feature: Encodes the peptide sequence at SEQ ID NO 31007
atgaaatatagagaccacccaacatatacccaagaacgattccgtcgcaaacttaccatatccctaattctgacactgggcatattctctgtcacggccgtattactagtcatcgaggtctacgcgttactcgcgttgcaattctgctctggggaggacttgatgtccctgtactgggccacctggactatgctccagttgggatccgagatcgccgtcttaggtgtgagcttggctctttggcatcatctttgggactttgaacatccactctgggccctcgccctaggaacacccgtcctcgttgtcgcaggcttcggacatgtcctcgccctcatcgctaaacggttctacaagaaagccaagacgaacatgagctcaaaaggtgatagctccgcgaccactagcgacgaggaagcggaagaaggacagagcgagagagaaaagagacgagtcgagtctgtagcgaaagagagtttcctagagaccggtcagacttatttcttcatgcttgatactggggccgatgaacggatacaacagtggcctgcatttgttggactgtccgatggcaaggcagtggtgagactcacggctgtccccgagtcttctgttgggttgcctgtagagggcagggcgcaccggtag

SEQ ID NO: 31007 - protein, 215 aa, Muscodor strobelii
  misc_feature: SGI Peptide ID NO. 570672
  misc_feature (2)..(147): NCBI GI: 256728004 Blast Desc: NECHADRAFT_83355 [Nectria haematococca mpVI 77-13-4]
  misc_feature (12)..(110): NCBI GI: 164427310 Blast Desc: NCU10595 [Neurospora crassa OR74A] gi|157071689|gb|EDO65289.1| [Neurospora crassa OR74A]
  misc_feature (9)..(143): NCBI GI: 261356312 Blast Desc: conserved [Verticillium albo-atrum VaMs.102]
  misc_feature (2)..(144): NCBI GI: 46133787 Blast Desc: FG09033.1 [Gibberella zeae PH-1]
  misc_feature (11)..(201): NCBI GI: 116180404 Blast Desc: CHGG_00830 [Chaetomium globosum CBS 148.51] gi|88185127|gb|EAQ92595.1| CHGG_00830 [Chaetomium globosum CBS 148.51]
  misc_feature (14)..(110): NCBI GI: 171687837 Blast Desc: protein product [Podospora anserina] gi|170943880|emb|CAP69532.1| protein product [Podospora anserina]
  misc_feature (41)..(212): NCBI GI: 39951054 Blast Desc: MGG_01273 [Magnaporthe grisea 70-15] gi|145020918|gb|EDK05047.1| MGG_01273 [Magnaporthe grisea 70-15]
  misc_feature (28)..(131): NCBI GI: 156042982 Blast Desc: SS1G_11290 [Sclerotinia sclerotiorum 1980] gi|154695675|gb|EDN95413.1| SS1G_11290 [Sclerotinia sclerotiorum 1980]
  misc_feature (29)..(124): NCBI GI: 154313332 Blast Desc: BC1G_05363 [Botryotinia fuckeliana B05.10] gi|150849432|gb|EDN24625.1| BC1G_05363 [Botryotinia fuckeliana B05.10]
  misc_feature (6)..(107): NCBI GI: 154318405 Blast Desc: [Botryotinia fuckeliana B05.10] gi|150842893|gb|EDN18086.1| [Botryotinia fuckeliana B05.10]
MKYRDHPTYTQERFRRKLTISLILTLGIFSVTAVLLVIEVYALLALQFCSGEDLMSLYWATWTMLQLGSEIAVLGVSLALWHHLWDFEHPLWALALGTPVLVVAGFGHVLALIAKRFYKKAKTNMSSKGDSSATTSDEEAEEGQSEREKRRVESVAKESFLETGQTYFFMLDTGADERIQQWPAFVGLSDGKAVVRLTAVPESSVGLPVEGRAHR

SEQ ID NO: 31008 - DNA, 811 bp, Muscodor strobelii
  misc_feature: SGI EST ID NO. CUFF.73441.0
  misc_feature: Variant of the nucleotide sequence at SEQ ID NO 31006
ccttcttcttccttgttattggatcgttatttgttgcttcttggatctttcaatggacaatgaaatatagagaccacccaacatatacccaagaacgattccgtcgcaaacttaccatatccctaattctgacactgggcatattctctgtcacggccgtattactagtcatcgaggtctacgcgttactcgcgttgcaattctgctctggggaggacttgatgtccctgtactgggccacctggactatgctccagttgggatccgagatcgccgtcttaggtgtgagcttggctctttggcatcatctttgggactttgaacatccactctgggccctcgccctaggaacacccgtcctcgttgtcgcaggcttcggacatgtcctcgccctcatcgctaaacggttctacaagaaagccaagacgaacatgagctcaaaaggtgatagctccgcgaccactagcgacgaggaagcggaagaaggacagagcgagagagaaaagagacgagtcgagtctgtagcgaaagagagtttcctagagaccggtcagacttatttcttcatgcttgatactggggccgatgaacggatacaacagtggcctgcatttgttggactgtccgatggcaaggcagtggtgagactcacggctgtccccgagtcttctgttgggttgcctgtagagggcagggcgcaccggtagatttactagataatctttctcattagggtttcaaagcgttatagacttagttggttgttggagttaggagttactagcatgtattactgcatgatataccagca

SEQ ID NO: 31009 - DNA, 621 bp, Muscodor strobelii
  misc_feature: SGI cDNA ID NO. 570673
  misc_feature: Encodes the peptide sequence at SEQ ID NO 31010
atgggcgaggaggtagtcgagggcgcctccgtcaaggagcggctcgtggaagcctgccgccgcgacaacgtcgaattgctgaacgagatcatatcacaatgcaagagcgacgccgagatcaccgacctgctcaacaacaccacatccgtcatgggcaatcacctataccacgaagctgccttgcggggaaactacgacatcatcgacaccctcctcgaccagcccgacttcgaatgcgaccccgtaaaccgcgtcgaaggcgacacgcccctccacagcgccatccgctggatcaacagcgagcccccggcccagcgcgagtttggcaaccagctcgtcgagatgatgctcgaggccggctcctccacccgcgtcaagaacaagaacaggctcacacccatcatgctggtcgacccccgaaatcaggccctgaaggatctcatccagaaacacgagtacgccaacttgaatgcgggcgatttcgtggacgagagtgccaagagcaacgagaagaaggtggtacggcagcaagaggagagtgatgatgacggtgccgagttttcgggcagtgatgaggaagagagggctgagtgggagaggaggaggagggccaagaggtga

SEQ ID NO: 31010 - protein, 206 aa, Muscodor strobelii
  misc_feature: SGI Peptide ID NO. 570673
  misc_feature (86)..(128): Pfam Id: PF00023 Pfam Desc: Ankyrin repeat
  misc_feature (2)..(206): NCBI GI: 46128345 Blast Desc: FG08550.1 [Gibberella zeae PH-1]
  misc_feature (7)..(191): NCBI GI: 256733613 Blast Desc: [Nectria haematococca mpVI 77-13-4]
  misc_feature (7)..(192): NCBI GI: 85114627 Blast Desc: NCU00571 [Neurospora crassa OR74A] gi|28926524|gb|EAA35496.1| conserved [Neurospora crassa OR74A] gi|38567335|emb|CAE76623.1| conserved [Neurospora crassa]
  misc_feature (3)..(192): NCBI GI: 171684019 Blast Desc: protein product [Podospora anserina] gi|170941970|emb|CAP67622.1| protein product [Podospora anserina]
  misc_feature (3)..(192): NCBI GI: 261353106 Blast Desc: ankyrin repeat protein [Verticillium albo-atrum VaMs.102]
  misc_feature (7)..(205): NCBI GI: 39971157 Blast Desc: MGG_03045 [Magnaporthe grisea 70-15] gi|149210733|ref|XP_001522741.1| MGCH7_ch7g839 [Magnaporthe grisea 70-15] gi|86196794|gb|EAQ71432.1| MGCH7_ch7g839 grisea
  misc_feature (63)..(206): NCBI GI: 116192955 Blast Desc: CHGG_06195 [Chaetomium globosum CBS 148.51] gi|88182108|gb|EAQ89576.1| CHGG_06195 [Chaetomium globosum CBS 148.51]
  misc_feature (7)..(156): NCBI GI: 189188136 Blast Desc: ankyrin repeat domain containing protein [Pyrenophora tritici-repentis Pt-1C-BFP] gi|187972013|gb|EDU39512.1| ankyrin repeat domain containing protein [Pyrenophora tritici-repentis
  misc_feature (6)..(193): NCBI GI: 169617171 Blast Desc: SNOG_11762 [Phaeosphaeria nodorum SN15] gi|160703354|gb|EAT80806.2| SNOG_11762 [Phaeosphaeria nodorum SN15]
  misc_feature (7)..(153): NCBI GI: 242784631 Blast Desc: ankyrin repeat protein [Talaromyces stipitatus ATCC 10500] gi|218720573|gb|EED19992.1| ankyrin repeat protein [Talaromyces stipitatus ATCC 10500]
MGEEVVEGASVKERLVEACRRDNVELLNEIISQCKSDAEITDLLNNTTSVMGNHLYHEAALRGNYDIIDTLLDQPDFECDPVNRVEGDTPLHSAIRWINSEPPAQREFGNQLVEMMLEAGSSTRVKNKNRLTPIMLVDPRNQALKDLIQKHEYANLNAGDFVDESAKSNEKKVVRQQEESDDDGAEFSGSDEEERAEWERRRRAKR

SEQ ID NO: 31011 - DNA, 2959 bp, Muscodor strobelii
  misc_feature: SGI EST ID NO. CUFF.73535.2
  misc_feature: Variant of the nucleotide sequence at SEQ ID NO 31009
ccgcaacccgacgcgggtacctaaaggtgcaggacgtaagggtcccttcgccaagcacttctcattgtaaccacgtcccactacaccatactactaactaattgacagcaccaagcctccgacgcactcccgtcttcttgcatatcaacactttgccgaacctctccatccgtccgcttacgctttcacccacgacatcggcgagcatggcatccaacgacatcgccatgggcggacaggaccctcccaaacccgacgaggagcccaagtacggcggctactcgcgcttcgagatcgagctcgagtttgtgtcggccctcgccaaccccttctacctgaaccacctcgcatcccagaagctgctgaacgatccggcctttgtcgcatacctcgcctacctccagtactgggctcgcccgccctacctcaagtacctcaactatcccggcccgacgctcaagcacctcgagctgctgcaggaagagagattccgcaacgacatcatctcccccgagctcgtgcagactttggctgccgagggcgtcaaggccagcgtcgagtggcaccgcgatgagtgacgtagctcgattcggcctgagccgggtgagatgtatcccgggatgcgagtggacatgcacatcgttcgataatactacagtatgacatcgtctggaacattggcgtagacacatgggcaagctgacggcaccgaacacgatctgcgacaagaggtattatgcatcacgactatggattggctggcttcgtatcgttcctcggtcggcctgacctccagttttctatgatctctcttgtcacatctgatgcatcaaaaccaaacacccaacgcctgagaatgccgccacacgcaaaagccgaccctcgacctccctcgagcgactactagttctctcgccacttggtcatacaggtcatgcactgcatttcacatcagcaaacccagactattcatcatcttcggaaattagtgcaagcttacctggaagaaactggtcatgggctcatcggcggagcggatctgcatctggtagaaggcggcctcgcggccctcgcaggtgtcgttggggcactgggcggcgatcttgttggcggtcttgaatttgtcggcgccgccgaagacatcctcgcgctctttcttcttgaagtggcggcggtggtacatggcttcctcgatggcgtgctggtagggacatgtccggcactccagacggttgcggcccgagtcgctggaggccgagacggtcaggatgttgctgcaccgggggcagactgggaattgcagggttagctgagttgagctgtcctaggctcaaaccgagatcgagaatgatattgagctcaatgcagtgaagtttgactcacagagcagcatcttggtgatgggtgtgagagacttgtgtataatgtgtgtttatggcactctcgagcccctgtattgttttatatcccagctacaacatatcttgcgacgactgggagacggtgagcggcgtcggcccgggcgtgagcagtgagtgtgtgactttgagctccgagctatctaaaacgatcactgccgactacctcttgctgtaaaactttggtggggcagaagggtgccactgacgatgggaaattcacatgcagatgcacagtgcactgtccgcattgccccgatacagtcatattctaccggcctaccacatgcattccactgaaccccgcggtggggtcgctgtttgcaggtggccgttaggtacgctggagattgcgactctaggagtttggaggggctgctgaggctcgtcgggttgctgcgtcactgccacctcctttgccgtttcgcggtcaaagaagcctgactagctgacctacaaccacgcgtttacgtctcctttttcgcctcagcaacttgaactacgctgtgtgatacttgtctgggttcctcgtgttattcttcaacgtgaacgcattatctttccgtatccctctcctcggagacagctccaaacagccctaaacagtcatgggcgaggaggtagtcgagggcgcctccgtcaaggagcggctcgtggaagcctgccgccgcgacaacgtcgaattgctgaacgagatcatatcacaatgcaagagcgacgccgagatcaccgacctgctcaacaacaccacatccgtcatgggcaatcacctataccacgaagctgccttgcggggaaactacgacatcatcgacaccctcctcgaccagcccgacttcgaatgcgaccccgtaaaccgcgtcgaaggcgacacgcccctccacagcgccatccgctggatcaacagcgagcccccggcccagcgcgagtttggcaaccagctcgtcgagatgatgctcgaggccggctcctccacccgcgtcaagaacaagaacaggctcacacccatcatgctggtcgacccccgaaatcaggccctgaaggatctcatccagaaacacgagtacgccaacttgaatgcgggcgatttcgtggacgagagtgccaagagcaacgagaagaaggtggtacggcagcaagaggagagtgatgatgacggtgccgagttttcgggcagtgatgaggaagagagggctgagtgggagaggaggaggagggccaagaggtgaggtgagcatgtgtggtgccgaaagactaagaatctcaaggaggggtagcgagtatgggttgggtaacggaaccaaccagtcgcttttagagatgcttcaagagatgcatcgagagaggtgttgtaagggggatcgcatttgtttcactgcggcatagagttgagttgtcaatataccacgcgttggctggccctgagcccacttcgacttcctagtgctatctaacaatactcatgcactgggtgctcttgggaacgacctcagatctcgatcacattacagttacggtatcgcggagaagatgacatatca

SEQ ID NO: 31012 - DNA, 471 bp, Muscodor strobelii
  misc_feature: SGI cDNA ID NO. 570674
  misc_feature: Encodes the peptide sequence at SEQ ID NO 31013
atgggcaatcacctataccacgaagctgccttgcggggaaactacgacatcatcgacaccctcctcgaccagcccgacttcgaatgcgaccccgtaaaccgcgtcgaaggcgacacgcccctccacagcgccatccgctggatcaacagcgagcccccggcccagcgcgagtttggcaaccagctcgtcgagatgatgctcgaggccggctcctccacccgcgtcaagaacaagaacaggctcacacccatcatgctggtcgacccccgaaatcaggccctgaaggatctcatccagaaacacgagtacgccaacttgaatgcgggcgatttcgtggacgagagtgccaagagcaacgagaagaaggtggtacggcagcaagaggagagtgatgatgacggtgccgagttttcgggcagtgatgaggaagagagggctgagtgggagaggaggaggagggccaagaggtga

SEQ ID NO: 31013 - protein, 156 aa, Muscodor strobelii
  misc_feature: SGI Peptide ID NO. 570674
  misc_feature (36)..(78): Pfam Id: PF00023 Pfam Desc: Ankyrin repeat
  misc_feature (1)..(156): NCBI GI: 46128345 Blast Desc: FG08550.1 [Gibberella zeae PH-1]
  misc_feature (1)..(141): NCBI GI: 256733613 Blast Desc: [Nectria haematococca mpVI 77-13-4]
  misc_feature (1)..(142): NCBI GI: 171684019 Blast Desc: protein product [Podospora anserina] gi|170941970|emb|CAP67622.1| protein product [Podospora anserina]
  misc_feature (1)..(142): NCBI GI: 85114627 Blast Desc: NCU00571 [Neurospora crassa OR74A] gi|28926524|gb|EAA35496.1| conserved [Neurospora crassa OR74A] gi|38567335|emb|CAE76623.1| conserved [Neurospora crassa]
  misc_feature (1)..(142): NCBI GI: 261353106 Blast Desc: ankyrin repeat protein [Verticillium albo-atrum VaMs.102]
  misc_feature (13)..(156): NCBI GI: 116192955 Blast Desc: CHGG_06195 [Chaetomium globosum CBS 148.51] gi|88182108|gb|EAQ89576.1| CHGG_06195 [Chaetomium globosum CBS 148.51]
  misc_feature (1)..(155): NCBI GI: 39971157 Blast Desc: MGG_03045 [Magnaporthe grisea 70-15] gi|149210733|ref|XP_001522741.1| MGCH7_ch7g839 [Magnaporthe grisea 70-15] gi|86196794|gb|EAQ71432.1| MGCH7_ch7g839 grisea
  misc_feature (2)..(155): NCBI GI: 154302234 Blast Desc: BC1G_09900 [Botryotinia fuckeliana B05.10] gi|150855389|gb|EDN30581.1| BC1G_09900 [Botryotinia fuckeliana B05.10]
  misc_feature (1)..(143): NCBI GI: 169617171 Blast Desc: SNOG_11762 [Phaeosphaeria nodorum SN15] gi|160703354|gb|EAT80806.2| SNOG_11762 [Phaeosphaeria nodorum SN15]
  misc_feature (1)..(106): NCBI GI: 189188136 Blast Desc: ankyrin repeat domain containing protein [Pyrenophora tritici-repentis Pt-1C-BFP] gi|187972013|gb|EDU39512.1| ankyrin repeat domain containing protein [Pyrenophora tritici-repentis
MGNHLYHEAALRGNYDIIDTLLDQPDFECDPVNRVEGDTPLHSAIRWINSEPPAQREFGNQLVEMMLEAGSSTRVKNKNRLTPIMLVDPRNQALKDLIQKHEYANLNAGDFVDESAKSNEKKVVRQQEESDDDGAEFSGSDEEERAEWERRRRAKR

SEQ ID NO: 31014 - DNA, 2959 bp, Muscodor strobelii; identical to SEQ ID NO: 31011
  misc_feature: SGI EST ID NO. CUFF.73535.2
  misc_feature: Variant of the nucleotide sequence at SEQ ID NO 31012

SEQ ID NO: 31015 - DNA, 336 bp, Muscodor strobelii
  misc_feature: SGI cDNA ID NO. 570675
  misc_feature: Encodes the peptide sequence at SEQ ID NO 31016
atgctgctcttctgcccccggtgcagcaacatcctgaccgtctcggcctccagcgactcgggccgcaaccgtctggagtgccggacatgtccctaccagcacgccatcgaggaagccatgtaccaccgccgccacttcaagaagaaagagcgcgaggatgtcttcggcggcgccgacaaattcaagaccgccaacaagatcgccgcccagtgccccaacgacacctgcgagggccgcgaggccgccttctaccagatgcagatccgctccgccgatgagcccatgaccagtttcttccagtgcatgacctgtatgaccaagtggcgagagaactag

SEQ ID NO: 31016 - protein, 111 aa, Muscodor strobelii
  misc_feature: SGI Peptide ID NO. 570675
  misc_feature (2)..(55): Pfam Id: PF02150 Pfam Desc: RNA polymerases M/15 Kd subunit
  misc_feature (69)..(109): Pfam Id: PF01096 Pfam Desc: Transcription factor S-II (TFIIS)
  misc_feature (1)..(111): NCBI GI: 39971211 Blast Desc: MGG_03072 [Magnaporthe grisea 70-15] gi|149210805|ref|XP_001522777.1| MGCH7_ch7g875 [Magnaporthe grisea 70-15] gi|86196830|gb|EAQ71468.1| MGCH7_ch7g875 grisea
  misc_feature (1)..(111): NCBI GI: 46128347 Blast Desc: FG08551.1 [Gibberella zeae PH-1]
  misc_feature (2)..(111): NCBI GI: 116192953 Blast Desc: conserved [Chaetomium globosum CBS 148.51] gi|88182107|gb|EAQ89575.1| conserved [Chaetomium globosum CBS 148.51]
  misc_feature (2)..(111): NCBI GI: 38567336 Blast Desc: DNA-directed RNA polymerase III subunit C11 [Neurospora crassa]
  misc_feature (2)..(111): NCBI GI: 256734108 Blast Desc: [Nectria haematococca mpVI 77-13-4]
  misc_feature (2)..(111): NCBI GI: 171684021 Blast Desc: protein product [Podospora anserina] gi|170941971|emb|CAP67623.1| protein product [Podospora anserina]
  misc_feature (2)..(111): NCBI GI: 238838443 Blast Desc: DNA-directed RNA polymerase III subunit RPC10 [Microsporum canis CBS 113480]
  misc_feature (1)..(111): NCBI GI: 261353107 Blast Desc: DNA-directed RNA polymerase III subunit RPC10 [Verticillium albo-atrum VaMs.102]
  misc_feature (2)..(111): NCBI GI: 225556478 Blast Desc: DNA-directed RNA polymerase III polypeptide [Ajellomyces capsulatus G186AR] gi|240273584|gb|EER37104.1| DNA-directed RNA polymerase III [Ajellomyces capsulatus H143]
  misc_feature (1)..(111): NCBI GI: 255935413 Blast Desc: Pc13g02950 [Penicillium chrysogenum Wisconsin 54-1255] gi|211583353|emb|CAP91364.1| Pc13g02950 [Penicillium chrysogenum Wisconsin 54-1255]
  misc_feature (2)..(109): SWISSPROT Homolog: EC 2.7.7.6 DNA-directed RNA polymerase
MLLFCPRCSNILTVSASSDSGRNRLECRTCPYQHAIEEAMYHRRHFKKKEREDVFGGADKFKTANKIAAQCPNDTCEGREAAFYQMQIRSADEPMTSFFQCMTCMTKWREN

SEQ ID NO: 31017 - DNA, 3117 bp, Muscodor strobelii
  misc_feature: SGI EST ID NO. CUFF.73534.0
  misc_feature: Variant of the nucleotide sequence at SEQ ID NO 31015
tgatatgtcatcttctccgcgataccgtaactgtaatgtgatcgagatctgaggtcgttcccaagagcacccagtgcatgagtattgttagatagcactaggaagtcgaagtgggctcagggccagccaacgcgtggtatattgacaactcaactctatgccgcagtgaaacaaatgcgatcccccttacaacacctctctcgatgcatctcttgaagcatctctaaaagcgactggttggttccgttacccaacccatactcgctacccctccttgagattcttagtctttcggcaccacacatgctcacctcacctcttggccctcctcctcctctcccactcagccctctcttcctcatcactgcccgaaaactcggcaccgtcatcatcactctcctcttgctgccgtaccaccttcttctcgttgctcttggcactctcgtccacgaaatcgcccgcattcaagttggcgtactcgtgtttctggatgagatccttcagggcctgatttcgggggtcgaccagcatgatgggtgtgagcctgttcttgttcttgacgcgggtggaggagccggcctcgagcatcatctcgacgagctggttgccaaactcgcgctgggccgggggctcgctgttgatccagcggatggcgctgtggaggggcgtgtcgccttcgacgcggtttacggggtcgcattcgaagtcgggctggtcgaggagggtgtcgatgatgtcgtctgtgtagagatatcattatcagtaggatatcaatatatggatacaaatattctatatagaaggggccagaaggaagggctcggttggcagcgcgcaggtggacatacagtttccccgcaaggcagcttcgtggtataggtgattgcccatgacggatgtggtgttgttgagcaggtcggtgatctcggcgtcgctcttgcattgtgatatgatctcgttcagcaattcgacgttgtcgcggcggcaggcttccacgagccgctccttgacggaggcgccctgcgtcggtcgagctcgtcaggaacaaacttgacaatatcgcaggcctcaagttctcgtgctagttcctctactgtccatgttagattaggggaatatgacatacctcgactacctcctcgcccatgactgtttagggctgtttggagctgtctccgaggagagggatacggaaagataatgcgttcacgttgaagaataacacgaggaacccagacaagtatcacacagcgtagttcaagttgctgaggcgaaaaaggagacgtaaacgcgtggttgtaggtcagctagtcaggcttctttgaccgcgaaacggcaaaggaggtggcagtgacgcagcaacccgacgagcctcagcagcccctccaaactcctagagtcgcaatctccagcgtacctaacggccacctgcaaacagcgaccccaccgcggggttcagtggaatgcatgtggtaggccggtagaatatgactgtatcggggcaatgcggacagtgcactgtgcatctgcatgtgaatttcccatcgtcagtggcacccttctgccccaccaaagttttacagcaagaggtagtcggcagtgatcgttttagatagctcggagctcaaagtcacacactcactgctcacgcccgggccgacgccgctcaccgtctcccagtcgtcgcaagatatgttgtagctgggatataaaacaatacaggggctcgagagtgccataaacacacattatacacaagtctctcacacccatcaccaagatgctgctcttctgcccccggtgcagcaacatcctgaccgtctcggcctccagcgactcgggccgcaaccgtctggagtgccggacatgtccctaccagcacgccatcgaggaagccatgtaccaccgccgccacttcaagaagaaagagcgcgaggatgtcttcggcggcgccgacaaattcaagaccgccaacaagatcgccgcccagtgccccaacgacacctgcgagggccgcgaggccgccttctaccagatgcagatccgctccgccgatgagcccatgaccagtttcttccagtgcatgacctgtatgaccaagtggcgagagaactagtagtcgctcgagggaggtcgagggtcggcttttgcgtgtggcggcattctcaggcgttgggtgtttggttttgatgcatcagatgtgacaagagagatcatagaaaactggaggtcaggccgaccgaggaacgatacgaagccagccaatccatagtcgtgatgcataatacctcttgtcgcagatcgtgttcggtgccgtcagcttgcccatgtgtctacgccaatgttccagacgatgtcatactgtagtattatcgaacgatgtgcatgtccactcgcatcccgggatacatctcacccggctcaggccgaatcgagctacgtcactcatcgcggtgccactcgacgctggccttgacgccctcggcagccaaagtctgcacgagctcgggggagatgatgtcgttgcggaatctctcttcctgcagcagctcgaggtgcttgagcgtcgggccgggatagttgaggtacttgaggtagggcgggcgagcccagtactggaggtaggcgaggtatgcgacaaaggccggatcgttcagcagcttctgggatgcgaggtggttcaggtagaaggggttggcgagggccgacacaaactgcaaagttatcggatggttagctgtgcaatggggcctgcgattgggggctaaggtgggtagagaagcatgtagcgggtgtcgcgatggggacgtacctcgagctcgatctcgaagcgcgagtagccgccgtacttgggctcctcgtcgggtttgggagggtcctgtccgcccatggcgatgtcgttggatgccatgctcgccgatgtcgtgggtgaaagcgtaagcggacggatggagaggttcggcaaagtgttgatatgcaagaagacgggagtgcgtcggaggcttggtgctgtcaattagttagtagtatggtgtagtgggacgtggttacaatgagaagtgcttggcgaagggacccttacgtcctgcacctttaggtacccgcgtcgggttgcgg

SEQ ID NO: 31018 - DNA, 372 bp, Muscodor strobelii
  misc_feature: SGI cDNA ID NO. 570676
  misc_feature: Encodes the peptide sequence at SEQ ID NO 31019
atggcatccaacgacatcgccatgggcggacaggaccctcccaaacccgacgaggagcccaagtacggcggctactcgcgcttcgagatcgagctcgagtttgtgtcggccctcgccaaccccttctacctgaaccacctcgcatcccagaagctgctgaacgatccggcctttgtcgcatacctcgcctacctccagtactgggctcgcccgccctacctcaagtacctcaactatcccggcccgacgctcaagcacctcgagctgctgcaggaagagagattccgcaacgacatcatctcccccgagctcgtgcagactttggctgccgagggcgtcaaggccagcgtcgagtggcaccgcgatgagtga

SEQ ID NO: 31019 - protein, 123 aa, Muscodor strobelii
  misc_feature: SGI Peptide ID NO. 570676
  misc_feature (23)..(121): Pfam Id: PF05669 Pfam Desc: SOH1
  misc_feature (23)..(99): Pfam Id: PF05669 Pfam Desc: SOH1
  misc_feature (4)..(122): NCBI GI: 46128349 Blast Desc: FG08552.1 [Gibberella zeae PH-1]
  misc_feature (1)..(122): NCBI GI: 74618368 Blast Desc: FG08552.1 [Gibberella zeae PH-1]
  misc_feature (5)..(122): NCBI GI: 164428434 Blast Desc: NCU00569 [Neurospora crassa OR74A] gi|157072146|gb|EAA35494.2| conserved [Neurospora crassa OR74A]
  misc_feature (4)..(123): NCBI GI: 261353108 Blast Desc: mediator of RNA polymerase II transcription subunit 31 [Verticillium albo-atrum VaMs.102]
  misc_feature (7)..(123): NCBI GI: 39971209 Blast Desc: MGG_03071 [Magnaporthe grisea 70-15] gi|149210803|ref|XP_001522776.1| MGCH7_ch7g874 [Magnaporthe grisea 70-15] gi|86196829|gb|EAQ71467.1| MGCH7_ch7g874 grisea
  misc_feature (1)..(122): NCBI GI: 38567337 Blast Desc: related to SOH1 protein [Neurospora crassa]
  misc_feature (1)..(122): NCBI GI: 171684023 Blast Desc: protein product [Podospora anserina] gi|170941972|emb|CAP67624.1| protein product [Podospora anserina]
  misc_feature (15)..(122): NCBI GI: 169617065 Blast Desc: SNOG_11707 [Phaeosphaeria nodorum SN15] gi|182676438|sp|Q0U957.3|MED31_PHANO RecName: Full=Mediator of RNA polymerase II transcription subunit 31; AltName: complex 31
  misc_feature (5)..(122): NCBI GI: 156056092 Blast Desc: SS1G_05398 [Sclerotinia sclerotiorum 1980] gi|154703182|gb|EDO02921.1| SS1G_05398 [Sclerotinia sclerotiorum 1980]
  misc_feature (20)..(122): NCBI GI: 189188052 Blast Desc: conserved [Pyrenophora tritici-repentis Pt-1C-BFP] gi|187971971|gb|EDU39470.1| conserved [Pyrenophora tritici-repentis Pt-1C-BFP]
MASNDIAMGGQDPPKPDEEPKYGGYSRFEIELEFVSALANPFYLNHLASQKLLNDPAFVAYLAYLQYWARPPYLKYLNYPGPTLKHLELLQEERFRNDIISPELVQTLAAEGVKASVEWHRDE

SEQ ID NO: 31020 - DNA, 2959 bp, Muscodor strobelii; identical to SEQ ID NO: 31011
  misc_feature: SGI EST ID NO. CUFF.73535.2
  misc_feature: Variant of the nucleotide sequence at SEQ ID NO 31018

SEQ ID NO: 31021 - DNA, 567 bp, Muscodor strobelii
  misc_feature: SGI cDNA ID NO. 570677
  misc_feature: Encodes the peptide sequence at SEQ ID NO 31022
atgaagtcgtcaatccttgttgccctgagctctgctgctcttgtcttcgcagacgctccagccacgggatacttcccaggccaaccctcatgcgctcttccctgcctgagctcggccatcagcaaggtcggctgtgccctcagtgacatcggctgcctgtgtggaaccaaatacacggccgtcgagaccaatgccgccacctgcctgctcaccgagtgtgctgccaccgccctggctcaggctcagtcggctggtgaggctgtctgctccagcttcagcgccggcgagctttctttcaccactccagcgcccaccacgcagcctggcggtccagtccagaacgttagcaccgcctctgggtcgatgagcatcacctcggctcccggttccgagacttctggctctggcaccaccaagaccgagacgcttggcgggacgtcgtctctctccggctctctgtcgatcgagtcaacacccagttccactcccaccggtgctgcggccacccctgcgatgatcggtgccggcatggtggctggtatgctggctgctgttgcgatgctgtaa

SEQ ID NO: 31022 - protein, 188 aa, Muscodor strobelii
  misc_feature: SGI Peptide ID NO. 570677
  misc_feature (24)..(90): Pfam Id: PF05730 Pfam Desc: CFEM domain
  misc_feature (9)..(112): NCBI GI: 171684003 Blast Desc: protein product [Podospora anserina] gi|170941962|emb|CAP67614.1| protein product [Podospora anserina]
  misc_feature (25)..(165): NCBI GI: 154299627 Blast Desc: [Botryotinia fuckeliana B05.10] gi|150857268|gb|EDN32460.1| [Botryotinia fuckeliana B05.10]
  misc_feature (29)..(110): NCBI GI: 145609670 Blast Desc: [Magnaporthe grisea 70-15] gi|149210801|ref|XP_001522775.1| MGCH7_ch7g873 [Magnaporthe grisea 70-15] gi|86196828|gb|EAQ71466.1| MGCH7_ch7g873 grisea
  misc_feature (25)..(80): NCBI GI: 209570408 Blast Desc: [Glomerella graminicola]
  misc_feature (1)..(93): NCBI GI: 256733611 Blast Desc: expressed protein [Nectria haematococca mpVI 77-13-4]
  misc_feature (1)..(89): NCBI GI: 189204526 Blast Desc: PTRG_08266 [Pyrenophora tritici-repentis Pt-1C-BFP] gi|187985697|gb|EDU51185.1| PTRG_08266 [Pyrenophora tritici-repentis Pt-1C-BFP]
  misc_feature (1)..(84): NCBI GI: 156060875 Blast Desc: [Sclerotinia sclerotiorum 1980] gi|154699984|gb|EDN99722.1| [Sclerotinia sclerotiorum 1980]
MKSSILVALSSAALVFADAPATGYFPGQPSCALPCLSSAISKVGCALSDIGCLCGTKYTAVETNAATCLLTECAATALAQAQSAGEAVCSSFSAGELSFTTPAPTTQPGGPVQNVSTASGSMSITSAPGSETSGSGTTKTETLGGTSSLSGSLSIESTPSSTPTGAAATPAMIGAGMVAGMLAAVAML

SEQ ID NO: 31023 - DNA, 1461 bp, Muscodor strobelii
  misc_feature: SGI EST ID NO. CUFF.73466.0
  misc_feature: Variant of the nucleotide sequence at SEQ ID NO 31021
gtgtgtggattgaaacggcaaccacaacacgcagcagtgacgttctggacaaggaaatgagaggagccaattgatggtgccctgccgagccgtctcctgcatcttgccattggagattcattgacgggcttgactagcttgactagggcaggcaagctctggctatcggcactcagcttccttctcctgcatcaaacgtattggtcgcgccgtcgagctgggcgtgttggcgcaggttcgatcaagcctcccccctctcgttgtctccaatgaaggtcccttcctaccctagcgcacgggtgatcattaaaaggtagcagacgaggacactacgatgagcgcgaccgggtctggatcgacatgtctttggaatgtaacctccgcggcattcttcacattttcccatattgtcctgagagccctccaggtctaatagcttctcttctcctcctgttcatccttcagcatcctctgaaaaccccgttcacatcatcgtgacctttggcagtcaattgaaaccgtgtccctcgttcagatattcaactcaattcctactacttgacactctccctaccacctagtacctgatatactacccaccacctgactgtgtcactgccgtgcattgcacccaacaagcattcaagatgaagtcgtcaatccttgttgccctgagctctgctgctcttgtcttcgcagacgctccagccacgggatacttcccaggccaaccctcatgcgctcttccctgcctgagctcggccatcagcaaggtcggctgtgccctcagtgacatcggctgcctgtgtggaaccaaatacacggccgtcgagaccaatgccgccacctgcctgctcaccgagtgtgctgccaccgccctggctcaggctcagtcggctggtgaggctgtctgctccagcttcagcgccggcgagctttctttcaccactccagcgcccaccacgcagcctggcggtccagtccagaacgttagcaccgcctctgggtcgatgagcatcacctcggctcccggttccgagacttctggctctggcaccaccaagaccgagacgcttggcgggacgtcgtctctctccggctctctgtcgatcgagtcaacacccagttccactcccaccggtgctgcggccacccctgcgatgatcggtgccggcatggtggctggtatgctggctgctgttgcgatgctgtaagatgagcgttatgtggcgtttcgattgactctgtttgttgagaaatccccacgagagcaggcgtttaatcagtggaagaagaaaagcttgcactttattgttgtttgggggctttgggcgtttttggtttggcgacgtgccagtctgcacttatgtactgtatcgagatattcatgagtcaccgagtatgatttttcaatgaaaacttcctttctatccttactgaatgatacttgcttgtatccca

SEQ ID NO: 31024 - DNA, 2754 bp, Muscodor strobelii
  misc_feature: SGI cDNA ID NO. 570678
  misc_feature: Encodes the peptide sequence at SEQ ID NO 31025
atgctcgtcgactgggaggaagagacaaagcggttccgccgctccttcgactcacgccgctcgtccgacaccgagtccgacatcgatgcgaccgactatctccagtccgaccctctcacctcctccaagccctccgtcggcttccagacacgcacccgccgcagaacctgctgctgtggctgctgcgccactgcctgctccgcacgatgcatcatcgtatccatcgccgtcttctccctcgtatggctcgtcattgccgcgggcggcttcttcgccttccgaaaatacaagggagcgccgcccgatgggctgtcaccgccgtggtaccccacgcctaagggcggaacgacaaagggatgggccgagagctaccggaaggcgagcgagatggtagccaagatgactctgcccgagaaggtcaacatcaccaccggcacgggatggcagatggggccggcagtagggaacacgggtcctgccgtcaacgttggtttcccctcgctcgccctccaagatggccccctgggcatccgcttcgccgacaatgccaccgccttcccggctggtatcacggtgggagccacgtggaacagagacctcatgtaccagtggggcaacgcccatgcggttgaggctaggaagaagggagtcaatgccattcttggtccctgcatcggcccgctagggcgtatgccggccgcgggtcgtaattgggagggcttcggagcagatccgtatcttcagggcgttgctgctgcggcgtctatccagggcatgcaggacgaaggtgtcatggccacaataaagcatctggtcggcaatgaacaagaacacttcagacagccctacgaatgggggctcgcaaacgccatatcttccaatatcgatgatcgaacaatgcacgagttgtatctctggccatttggcaatgccgtcaaagccggcgtggccagcgtcatgtgcagttacaaccagatcaacaactcgtatgcctgtggcaattcgaagctgctgaatggcctcctcagagatgagatgggcttccagggtttcgtcatgagtgactggctcgcccagagatcaggcgtctctactgcgttggcaggtctcgacatgacaatgcctggtgatggtctcttctgggcagagggtaaatcactttggggccccgagttgacgaggtccattttgaatggctctgtgccagttgatcgcctgaatgatatggtgacccgaattgttgctgcctggtatcagatgggccaagatgacaagaccaagtttgaccgtaaaggtcccaacttctcttcctggactgatgacgaaacagacgtttttgctcccggaagcccgacagaacagaggaagcagaaggtcaacgactacaatggcataactccgaacaacgaccggaagaataaaggtccgctgcagatagccatctttggcgaagacgctggacccggccaaggagccaatcactgcccagatcgcagctgcaatcaggggactctcgcatcaggttggggttcaggatctgttgagttcccataccttgtgaccccggacgaagctctctctagagcgtggtatccgatatctgtcaacgtctccaagtatttgacgaacgatcctccgttcgcaaggaagcctgatattctcaaggatgctgagatctgtatcgtgtttgccaacgccgattctggtgaagggtataaggcatgggataaggtcatgggcgaccgacctgatctactcctgcagaaaggcggcgatgatctgattgttgaagtggcagaaggctgtcatggtggagatggcgacgtgctggttgttatccataccgtcggtcccatagtgacggaacgatggatcgatttaccaaacgtgaaagccgtgctcctcgccaatcttcctggccaggagagcggcaacgccctcgccgatgtcattctcggagacgtgaaccccagcggcagactcccttggaccattgggcgcagcctagaggactacggcgagggcgcgaaggtcatgtacttgcccaatggcgtcgtacctcagcaggattttagcgaagggctgtataccgattaccgtcactttgacaagtataacatcgagcccagattcgaatttggctttggattgagttacacgacgttcagcttcgaggatcttgttgtgaaggagttgaagagcaagagtgctttcccggctgctcggcccaaggacttcacaacacctccatcctacgatactaagatccccgattcgaaagaggcacttttcccttcaggcatccggaaattggagaagttcgtgtatccgtacctcgacaccgtcgacaatatcggttcgggttcttatccttatccggatggctatgacgttgagcagccactgtccggcgcaggaggtgatgagggcggaaaccccgatctgtgggagacgtacgtcaaggttttcgtagacgtaaagaataccggcaatatggatgggcaggttgttccgcaactttatctttcctatcccgaggaggagggtgtggacttccccgtaagagtcttgagaggctttgaaaagcttgaaatcgaagaaggtcacacgaggactgtggcgttcaacatcacgagacgagacttgagctattgggatgtggtaagccagaactggaagatggtaacggagggacagtatacatttcaagtcggtgctagttcgagagacttacctgtttccgcgacatggtga

SEQ ID NO: 31025 - protein, 917 aa, Muscodor strobelii
  misc_feature: SGI Peptide ID NO. 570678
  misc_feature (157)..(375): Pfam Id: PF00933 Pfam Desc: Glycosyl hydrolase family 3 N terminal domain
  misc_feature (472)..(699): Pfam Id: PF01915 Pfam Desc: Glycosyl hydrolase family 3 C terminal domain
  misc_feature (479)..(699): Pfam Id: PF01915 Pfam Desc: Glycosyl hydrolase family 3 C terminal domain
  misc_feature (13)..(917): NCBI GI: 256732000 Blast Desc: glycoside hydrolase family 3 [Nectria haematococca mpVI 77-13-4]
  misc_feature (22)..(917): NCBI GI: 46105076 Blast Desc: FG00166.1 [Gibberella zeae PH-1]
  misc_feature (67)..(917): NCBI GI: 85068386 Blast Desc: NCU08054 [Neurospora crassa OR74A] gi|28926990|gb|EAA35949.1| NCU08054 [Neurospora crassa OR74A]
  misc_feature (4)..(917): NCBI GI: 145609584 Blast Desc: MGG_09160 [Magnaporthe grisea 70-15] gi|145017001|gb|EDK01364.1| MGG_09160 [Magnaporthe grisea 70-15]
  misc_feature (6)..(843): NCBI GI: 261353709 Blast Desc: beta-glucosidase [Verticillium albo-atrum VaMs.102]
  misc_feature (4)..(917): NCBI GI: 149210995 Blast Desc: MGCH7_ch7g960 [Magnaporthe grisea 70-15] gi|86196915|gb|EAQ71553.1| MGCH7_ch7g960 [Magnaporthe grisea 70-15]
  misc_feature (2)..(917): NCBI GI: 189198678 Blast Desc: beta-glucosidase 1 precursor [Pyrenophora tritici-repentis Pt-1C-BFP] gi|187982775|gb|EDU48263.1| beta-glucosidase 1 precursor [Pyrenophora tritici-repentis
  misc_feature (102)..(917): NCBI GI: 239614661 Blast Desc: beta-glucosidase [Ajellomyces dermatitidis ER-3]
  misc_feature (102)..(917): NCBI GI: 261196329 Blast Desc: beta-glucosidase [Ajellomyces dermatitidis SLH14081] gi|239587701|gb|EEQ70344.1| beta-glucosidase [Ajellomyces dermatitidis SLH14081]
  misc_feature (83)..(911): NCBI GI: 242780701 Blast Desc: beta-glucosidase, [Talaromyces stipitatus ATCC 10500] gi|218719798|gb|EED19217.1| beta-glucosidase, [Talaromyces stipitatus ATCC 10500]
  misc_feature (104)..(915): SWISSPROT Homolog: EC 3.2.1.21 Beta-glucosidase
MLVDWEEETKRFRRSFDSRRSSDTESDIDATDYLQSDPLTSSKPSVGFQTRTRRRTCCCGCCATACSARCIIVSIAVFSLVWLVIAAGGFFAFRKYKGAPPDGLSPPWYPTPKGGTTKGWAESYRKASEMVAKMTLPEKVNITTGTGWQMGPAVGNTGPAVNVGFPSLALQDGPLGIRFADNATAFPAGITVGATWNRDLMYQWGNAHAVEARKKGVNAILGPCIGPLGRMPAAGRNWEGFGADPYLQGVAAAASIQGMQDEGVMATIKHLVGNEQEHFRQPYEWGLANAISSNIDDRTMHELYLWPFGNAVKAGVASVMCSYNQINNSYACGNSKLLNGLLRDEMGFQGFVMSDWLAQRSGVSTALAGLDMTMPGDGLFWAEGKSLWGPELTRSILNGSVPVDRLNDMVTRIVAAWYQMGQDDKTKFDRKGPNFSSWTDDETDVFAPGSPTEQRKQKVNDYNGITPNNDRKNKGPLQIAIFGEDAGPGQGANHCPDRSCNQGTLASGWGSGSVEFPYLVTPDEALSRAWYPISVNVSKYLTNDPPFARKPDILKDAEICIVFANADSGEGYKAWDKVMGDRPDLLLQKGGDDLIVEVAEGCHGGDGDVLVVIHTVGPIVTERWIDLPNVKAVLLANLPGQESGNALADVILGDVNPSGRLPWTIGRSLEDYGEGAKVMYLPNGVVPQQDFSEGLYTDYRHFDKYNIEPRFEFGFGLSYTTFSFEDLVVKELKSKSAFPAARPKDFTTPPSYDTKIPDSKEALFPSGIRKLEKFVYPYLDTVDNIGSGSYPYPDGYDVEQPLSGAGGDEGGNPDLWETYVKVFVDVKNTGNMDGQVVPQLYLSYPEEEGVDFPVRVLRGFEKLEIEEGHTRTVAFNITRRDLSYWDVVSQNWKMVTEGQYTFQVGASSRDLPVSATW

SEQ ID NO: 31026 - DNA, 2102 bp, Muscodor strobelii
  misc_feature: SGI EST ID NO. CUFF.73468.0
  misc_feature: Variant of the nucleotide sequence at SEQ ID NO 31024
attcgactctcaattatcttctgatcttctaccaccatcattctctctctgcccaagatgcacaagctatctactatacttcagttgctccaaaaatgcgtctcaggcatccggcgctttcaggcgatgcggggtacacctccagtgtttggaacgggcaattgtcgccaaccggggtccgccaggggtgcatttcgtattacaggtacctatctcagctcgtcttccaccaatagtgttggcgttgggagtgggagaaggcacgagcagcgaagacaacattagatctcggggtgttgatggtagtttgacatctatctggggcctcaatttcatcttgttctgcacacctgtggtttatgtactcggttccgtcaacctatgtcttccactccacctaattcacgcgcgtagattgtttgtgtccttgataaccgcagctacctagatcctaagatttcattctagcttgcgttgggctttcaaaatatcgtctttccagtcttcagcccgccatcgcttctctcgcgtgaaataggcggcgactagcataatcttgccggcaagtttaggccaggaagttggggcaggcttttgagccagtgggcacgagttccaccggattgaggtggtccattcgcggcgcccctgggcactcgaccgtcgggcatcgaaggcgcttcagcgtgggaagtggaagctggcctcgcccatcatgctcgtcgactgggaggaagagacaaagcggttccgccgctccttcgactcacgccgctcgtccgacaccgagtccgacatcgatgcgaccgactatctccagtccgaccctctcacctcctccaagccctccgtcggcttccagacacgcacccgccgcagaacctgctgctgtggctgctgcgccactgcctgctccgcacgatgcatcatcgtatccatcgccgtcttctccctcgtatggctcgtcattgccgcgggcggcttcttcgccttccgaaaatacaagggagcgccgcccgatgggctgtcaccgccgtggtaccccacgcctaagggcggaacgacaaagggatgggccgagagctaccggaaggcgagcgagatggtagccaagatgactctgcccgagaaggtcaacatcaccaccggcacgggatggcagatggggccggcagtagggaacacgggtcctgccgtcaacgttggtttcccctcgctcgccctccaagatggccccctgggcatccgcttcgccgacaatgccaccgccttcccggctggtatcacggtgggagccacgtggaacagagacctcatgtaccagtggggcaacgcccatgcggttgaggctaggaagaagggagtcaatgccattcttggtccctgcatcggcccgctagggcgtatgccggccgcgggtcgtaattgggagggcttcggagcagatccgtatcttcagggcgttgctgctgcggcgtctatccagggcatgcaggacgaaggtgtcatggccacaataaagcatctggtcggcaatgaacaagaacacttcagacagccctacgaatgggggctcgcaaacgccatatcttccaatatcgatgatcgaacaatgcacgagttgtatctctggccatttggcaatgccgtcaaagccggcgtggccagcgtcatgtgcagttacaaccagatcaacaactcgtatgcctgtggcaattcgaagctgctgaatggcctcctcagagatgagatgggcttccagggtttcgtcatgagtgactggctcgcccagagatcaggcgtctctactgcgttggcaggtctcgacatgacaatgcctggtgatggtctcttctgggcagagggtaaatcactttggggccccgagttgacgaggtccattttgaatggctctgtgccagttgatcgcctgaatgatatggtgacccgaattgttgctgcctggtatcagatgggccaagatgacaagaccaagtttgaccgtaaaggtcccaacttctcttcctggactgatgacgaaacagacgtttttgctcccggaagcccgacagaacagaggaagcagaaggtcaacgactagt

SEQ ID NO: 31027 - DNA, 777 bp, Muscodor strobelii
  misc_feature: SGI cDNA ID NO. 570679
  misc_feature: Encodes the peptide sequence at SEQ ID NO 31028
atgaagttcctttctttcgcccttctggcaatctctcctctgctgcctgttgtctgggctgatgccacgacgggttttctcgcggaacaatgcggaaccgactggcaggtcgcggctggaccatccggcaagaaagatgcctccggtcaggacattcccggcataggatcggtaatcactgccacctgcttcgaccataagtgtggcaaaactagaacgacaggaataaacctggacctctgtcttgagaaccacgacggagacctggtggctcagaaaggcggactgatgagcagtacttgcagagcctgtcataaaaacagagatcaaagtaacttgctcacttgcgagtgcgacggaccaaacaagaaaaattcaacaatcgatctcaataccgtcctatacaactggttcggcaatctcgcttgccatgatcagatcgacccatttttccagaccgaatacacttgccaagacgacgtgacgtggcagccatcatccacagtatctgacgaatggcccggcagcacaacaccaggttactcagccacaccttatccgtccccgagttcaagtcagaccacaaccacaagtagtagccagagcattccagctgcatcgcgcctccacggacaccacgacatccgcgaccagcgcgtcatcctcaagtaccactccggcagctacaggcgcgagctcacgccgccgagttcgtctgcttcgggcttgattgaatcaactcccagagagcatgatccaggccccgcggcatcttga

SEQ ID NO: 31028 - protein, 258 aa, Muscodor strobelii
  misc_feature: SGI Peptide ID NO. 570679
  misc_feature (47)..(143): Pfam Id: PF08881 Pfam Desc: CVNH domain
MKFLSFALLAISPLLPVVWADATTGFLAEQCGTDWQVAAGPSGKKDASGQDIPGIGSVITATCFDHKCGKTRTTGINLDLCLENHDGDLVAQKGGLMSSTCRACHKNRDQSNLLTCECDGPNKKNSTIDLNTVLYNWFGNLACHDQIDPFFQTEYTCQDDVTWQPSSTVSDEWPGSTTPGYSATPYPSPSSSQTTTTSSSQSIPAASRLHGHHDIRDQRVILKYHSGSYRRELTPPSSSASGLIESTPREHDPGPAAS

SEQ ID NO: 31029 - DNA, 1851 bp, Muscodor strobelii
  misc_feature: SGI cDNA ID NO. 570680
  misc_feature: Elevated expression when VOC is produced
  misc_feature: Encodes the peptide sequence at SEQ ID NO 31030
atgacatccgttcactcatcgaggagcgatcgagggggagagtttgacaacatgaagacggccaatgagcatgtagaggaatcagatgaggcctcggcctacgaacataagcttaaaattgtcatgactgacggtactgtcaactatatcgaccgcaaaattgtcggtggcgatgccgccgagatgcccgacggatacttcaccagcccagatttcatcttgacagtcgtcgcccaatgtttgggcaacatctgcgcttatgctggatgggtaatgccagcaaacacactcactctcatcaatgcagatctgggcaattcgccggatatcaactgggtcgcgacggcatggacgctcggcagctcaattggctttctgttattcggtcgtctctcagatatattcggtcgtaaagccctggtcgtcggctcatctgttctgggtctcatcggatacatcatcggcgcagtcgcaccgaacgtcaatgctcttattgccgccgagcttatcattggtatagcggcagccggtcagctatcgtttggcatcgttctcggcgagcttgttcccaataagatgagaggacccatcataacattagtgttcctagcggcgttaccctttgctgtgttcggtcccgtcattgctcgtctacttatccagaatacgggacctggctggcgttggtgctattacatggccattatctttggagctattgctgttgtgattaacatctttttctaccacccgccatcttacgagcaattacacgtcggcggcaagactcgatgggagcaaatcaaggaacaagactatatcggcatgtttctgtacgtagcaggtgttctgctgtttatcattggtctttcatggggtggtactgcatatccgtggactgatgctaaggttctggtaactttgatcgttgggttctttacaatcattagcttcggcctatatgaaaaatacttgtgcaaggttcccccgctgatgccgccgcgacttttcactgccgccaggggtggatatactgcaaccgtcatcgtcgcctctattggtgctgcagtctactactcttttacggtactatggccaacaatcatttcgtccctttatacagccgacagtattcaggtcggcctcaagagctctgtcgtaggtggcgctattcttcttggacagacagttggcggtatctcaatatcctatgtcccgaaggttaaatggcaggccgtcggtgtcagcgttgcagcattcgggttcattaccgccatgtacaccattgacccctatcatgaagcaactactcttgctctggctatcctcggaattttctttgtcggcattgtcgacaacattactttcgccggtgttactttaatccttccgccgcaagacatcggtctcgccaccggtgttctgggttctattcgcgccattggtggtgtggtcgctcagtcgctctacgtatccgtcctcggaaacaagcttacagaattgcaaccaaaatatgtcactgatgcagcaatcaatgctggccttgccgagtcatccttgcaacagttgttttcggcgcttacatctggtgacttttcaagtgttcctgggattaactctgatattatcgcttctgtcacgactgccgtgaagtgggcatatgccgattcattcaagctcgtattcctcgtcaccataccgttctccgtcattctaatcattgcatgctgcttcatccctgacttggagaagatgttaggcgacaatgtggctaagaaactacagagacgaacaaagaatctcaatacaaatctggcggaaaagtcgaccagatcacaggaggccgtttag

SEQ ID NO: 31030 - protein, 616 aa, Muscodor strobelii
  misc_feature: SGI Peptide ID NO. 570680
  misc_feature (79)..(487): Pfam Id: PF07690 Pfam Desc: Major Facilitator Superfamily
  misc_feature (31)..(615): Pfam Id: PF06609 Pfam Desc: Fungal trichothecene efflux pump (TRI12)
  misc_feature (59)..(366): Pfam Id: PF06609 Pfam Desc: Fungal trichothecene efflux pump (TRI12)
  misc_feature (19)..(545): NCBI GI: 169614029 Blast Desc: SNOG_10149 [Phaeosphaeria nodorum SN15] gi|160707263|gb|EAT82484.2| SNOG_10149 [Phaeosphaeria nodorum SN15]
  misc_feature (18)..(609): NCBI GI: 189208644 Blast Desc: trichothecene efflux pump [Pyrenophora tritici-repentis Pt-1C-BFP] gi|187976748|gb|EDU43374.1| trichothecene efflux pump [Pyrenophora tritici-repentis
  misc_feature (8)..(318): NCBI GI: 261353464 Blast Desc: trichothecene efflux pump [Verticillium albo-atrum VaMs.102]
  misc_feature (18)..(608): NCBI GI: 169595438 Blast Desc: SNOG_00458 [Phaeosphaeria nodorum SN15] gi|160701097|gb|EAT91953.2| SNOG_00458 [Phaeosphaeria nodorum SN15]
  misc_feature (58)..(595): NCBI GI: 242771562 Blast Desc: siderophore iron transporter, [Talaromyces stipitatus ATCC 10500] gi|218721486|gb|EED20904.1| siderophore iron transporter, [Talaromyces stipitatus ATCC 10500]
  misc_feature (6)..(601): NCBI GI: 261361349 Blast Desc: conserved [Verticillium albo-atrum VaMs.102]
  misc_feature (58)..(595): NCBI GI: 145241974 Blast Desc: An09g03170 [Aspergillus niger] gi|134078176|emb|CAK40256.1| protein product [Aspergillus niger]
  misc_feature (7)..(596): NCBI GI: 255944063 Blast Desc: Pc20g02450 [Penicillium chrysogenum Wisconsin 54-1255] gi|211587534|emb|CAP85574.1| Pc20g02450 [Penicillium chrysogenum Wisconsin 54-1255]
  misc_feature (91)..(600): NCBI GI: 189192566 Blast Desc: conserved [Pyrenophora tritici-repentis Pt-1C-BFP] gi|187974228|gb|EDU41727.1| conserved [Pyrenophora tritici-repentis Pt-1C-BFP]
  misc_feature (75)..(614): NCBI GI: 261354676 Blast Desc: trichothecene efflux pump [Verticillium albo-atrum VaMs.102]
  misc_feature: Useful for introducing or modulating the production of volatile compounds
MTSVHSSRSDRGGEFDNMKTANEHVEESDEASAYEHKLKIVMTDGTVNYIDRKIVGGDAAEMPDGYFTSPDFILTVVAQCLGNICAYAGWVMPANTLTLINADLGNSPDINWVATAWTLGSSIGFLLFGRLSDIFGRKALVVGSSVLGLIGYIIGAVAPNVNALIAAELIIGIAAAGQLSFGIVLGELVPNKMRGPIITLVFLAALPFAVFGPVIARLLIQNTGPGWRWCYYMAIIFGAIAVVINIFFYHPPSYEQLHVGGKTRWEQIKEQDYIGMFLYVAGVLLFIIGLSWGGTAYPWTDAKVLVTLIVGFFTIISFGLYEKYLCKVPPLMPPRLFTAARGGYTATVIVASIGAAVYYSFTVLWPTIISSLYTADSIQVGLKSSVVGGAILLGQTVGGISISYVPKVKWQAVGVSVAAFGFITAMYTIDPYHEATTLALAILGIFFVGIVDNITFAGVTLILPPQDIGLATGVLGSIRAIGGVVAQSLYVSVLGNKLTELQPKYVTDAAINAGLAESSLQQLFSALTSGDFSSVPGINSDIIASVTTAVKWAYADSFKLVFLVTIPFSVILIIACCFIPDLEKMLGDNVAKKLQRRTKNLNTNLAEKSTRSQEAV

SEQ ID NO: 31031 - DNA, 3085 bp, Muscodor strobelii
  misc_feature: SGI EST ID NO. CUFF.73481.0
  misc_feature: Variant of the nucleotide sequence at SEQ ID NO 31029
atatggccagagagcatattgattggtcttagtgatacactacgcgtgaaagatgtgggctatgtcgcaagaaaataacacctctaatctgaatctagaccttggatgacattaccttcacggccgagacggcgcagagacgatttccgttaaagtcagccaggctgacaggctctcaccaggggtatttcaaagtacttggaaaacagttgccacgcgttggaggacacacatggacgatagggacgatcgagaagacgcgtgttcctctatgtggcattcgagctgtgtaatgcgaagaaattgtataccgccgtggattgaatcgcctggcttgtttgaccgaacgcagcgcaccgaaggcaagatttgtggcaaagctggaccggaggactcggaagacggtagatcggccttgacagcttacagattgtaagaccctctttccccagggcttcattctccccatattcggccccgtcatcttccccatcgcgttctccatcactctcccccgcatcggcttgtttgtctcgatttgtctctaaagcatctccaacaccggccaagactccagcgccacggcaagccttgctagtgcttgggcatgctatcgaatgaaactggacccatcaacaatgcagacttgtacatcgactagtcttgtttcagatcttatgggtcgtagttaaaacgatcttgtttcctgcccatgtttctctcctgcgggacaagtctctatcagtcaggctcaccttcgcatttggttccttgtctcggttttgaatttgacatcgcccacacgtggtttgtgtggcagactgcgagggccagtctactgaagcgttcattcatcatttcaaatcggctgttagcaacatgacatccgttcactcatcgaggagcgatcgagggggagagtttgacaacatgaagacggccaatgagcatgtagaggaatcagatgaggcctcggcctacgaacataagcttaaaattgtcatgactgacggtactgtcaactatatcgaccgcaaaattgtcggtggcgatgccgccgagatgcccgacggatacttcaccagcccagatttcatcttgacagtcgtcgcccaatgtttgggcaacatctgcgcttatgctggatgggtaatgccagcaaacacactcactctcatcaatgcagatctgggcaattcgccggatatcaactgggtcgcgacggcatggacgctcggcagctcaattggctttctgttattcggtcgtctctcagatatattcggtcgtaaagccctggtcgtcggctcatctgttctgggtctcatcggatacatcatcggcgcagtcgcaccgaacgtcaatgctcttattgccgccgagcttatcattggtatagcggcagccggtcagctatcgtttggcatcgttctcggcgagcttgttcccaataagatgagaggacccatcataacattagtgttcctagcggcgttaccctttgctgtgttcggtcccgtcattgctcgtctacttatccagaatacgggacctggctggcgttggtgctattacatggccattatctttggagctattgctgttgtgattaacatctttttctaccacccgccatcttacgagcaattacacgtcggcggcaagactcgatgggagcaaatcaaggaacaagactatatcggcatgtttctgtacgtagcaggtgttctgctgtttatcattggtctttcatggggtggtactgcatatccgtggactgatgctaaggttctggtaactttgatcgttgggttctttacaatcattagcttcggcctatatgaaaaatacttgtgcaaggttcccccgctgatgccgccgcgacttttcactgccgccaggggtggatatactgcaaccgtcatcgtcgcctctattggtgctgcagtctactactcttttacggtactatggccaacaatcatttcgtccctttatacagccgacagtattcaggtcggcctcaagagctctgtcgtaggtggcgctattcttcttggacagacagttggcggtatctcaatatcctatgtcccgaaggttaaatggcaggccgtcggtgtcagcgttgcagcattcgggttcattaccgccatgtacaccattgacccctatcatgaagcaactactcttgctctggctatcctcggaattttctttgtcggcattgtcgacaacattactttcgccggtgttactttaatccttccgccgcaagacatcggtctcgccaccggtgttctgggttctattcgcgccattggtggtgtggtcgctcagtcgctctacgtatccgtcctcggaaacaagcttacagaattgcaaccaaaatatgtcactgatgcagcaatcaatgctggccttgccgagtcatccttgcaacagttgttttcggcgcttacatctggtgacttttcaagtgttcctgggattaactctgatattatcgcttctgtcacgactgccgtgaagtgggcatatgccgattcattcaagctcgtattcctcgtcaccataccgttctccgtcattctaatcattgcatgctgcttcatccctgacttggagaagatgttaggcgacaatgtggctaagaaactacagagacgaacaaagaatctcaatacaaatctggcggaaaagtcgaccagatcacaggaggccgtttagagaaaaagaggtcatgttcaatagcgcattttgatgtgtcttcggcttagccgagctaatatactggttataagatcaagcatgaacgcgccacccgtgtaatgacatctcgaaacgcaaatccgaataatattactgtgtattctctatcatggcagtatggctatatgagatttgatcacaaagtggccctcttagtctgcgttctccaggaggtaattcggcacgtacctaagagcatggtgcaaaggctggaacgtatgtatttacttgccttgtttgctagtctattcggtgattagttagaaagtcattccactataactcttactgtataagcatccatagtacttcc

SEQ ID NO: 31032 - DNA, 1605 bp, Muscodor strobelii
  misc_feature: SGI cDNA ID NO. 570681
  misc_feature: Encodes the peptide sequence at SEQ ID NO 31033
atgggctggcgcagcctctacccgagaccggcatgcgacattccggatctaattcctataatcaaagccaagaatgagttctctgtttctgtattcactgtgactactcagaaattaggcacgccgattgcacagttgctcttccctggtatccgaaagccactcatcatcttagaagatccaagagaaattgaggacattgtgatgaggcgcaacaaagaattcgataaaggtcctatgacgattgacttgttgaggcccatgtttccaagcgggactatcagtcaatacacaacccccaagctcagggcgcagaaacgtctttgggctgacgtcatgagcactgaatttctacggaaagctgctgctccaaacatacacaaagctgcaatgcagcttattgagctctgggctctcaaatcgtccacaatataccatgataaggctttcaacgtatacgatgatcttctgaattcagccctcgacgcaatttgggttgcggtggtcgggaaagagccaggtgtgacgagacataatatcaagacagtccaaagccaaatctctggcgaggatttgactgacgagcctttacctcgcggtttattcctaaagagagaaatactctatattggcgacaccatggccaaaaacgccgggagcccaagcccgaaatgggcgcagagaatggaaatgttgactcctcgttatcgccagttccgacgcatcgttacaaccgagatcactcggactatgcaaacggcagtcaagaggtttgagcggctccaagcgggccacttagaagccgatgatcacgatacttgcatgatggatctagttctgcgtaaacagattctcgaggctaaaaaaactaggataccaacgacagacccaaccaaagatccaacaatgattgatgagctgtttacaatgctagttgggggccatgactcaacggcaaatgtgctaacttggttcgtaagatttctggaagcatacccagcagtacagaccgagcttcgtaccacactgaagaaagcattccagactaatcgcccatcggttgaggaaattttggggttggatattccgtatcttgaggccacatgtgaagaatcattccgtctcgccggtgttgccaagggcaatctgcggcaggccttggtagataccgaaatcctggggtgcaaagttccgaagggggctgaaatcttcatgaactttcatgtcgaccggtcacccgtggcagttgacccatcgagacgcggcgccggtagccttgctgcaattgacaagcacggagatagctttcagagtaaagctggaagagatcttgctacttttgaaccgagaagatttctcacattcgacgaagagtcgggcaaagaagtttttaactattttgcgctaccatcactagcatttggaggtggtttcaggggttgccccggtcgtaaattagcaacgatggagtttagaattattgctacactattggttttgaattttgagttcttggaccttcctgagaatctaagagcatggtctgcaagcgagagaactttccggcgaccggatatgccttacgcccgactgaaatctgtatga

SEQ ID NO: 31033 - protein, 534 aa, Muscodor strobelii
  misc_feature: SGI Peptide ID NO. 570681
  misc_feature (8)..(531): Pfam Id: PF00067 Pfam Desc: Cytochrome P450
  misc_feature (306)..(406): Pfam Id: PF00067 Pfam Desc: Cytochrome P450
  misc_feature (471)..(509): Pfam Id: PF00067 Pfam Desc: Cytochrome P450
  misc_feature (2)..(532): NCBI GI: 171683027 Blast Desc: protein product [Podospora anserina] gi|170941473|emb|CAP67124.1| protein product [Podospora anserina]
  misc_feature (4)..(452): NCBI GI: 116201423 Blast Desc: CHGG_08596 [Chaetomium globosum CBS 148.51] gi|88177114|gb|EAQ84582.1| CHGG_08596 [Chaetomium globosum CBS 148.51]
  misc_feature (13)..(524): NCBI GI: 145606867 Blast Desc: MGG_03811 [Magnaporthe grisea 70-15] gi|145014497|gb|EDJ99065.1| MGG_03811 [Magnaporthe grisea 70-15]
  misc_feature (13)..(534): NCBI GI: 269856267 Blast Desc: cytochrome P450 monooxygenase [Fusarium sp. NRRL 13405]
  misc_feature (36)..(531): NCBI GI: 121711960 Blast Desc: Cytochrome P450 oxidoreductase, [Aspergillus clavatus NRRL 1] gi|119401747|gb|EAW12169.1| Cytochrome P450 oxidoreductase, [Aspergillus clavatus NRRL 1]
  misc_feature (13)..(534): NCBI GI: 29126007 Blast Desc: P450 monooxygenase for C-4 hydroxylation of trichothecene [Fusarium sporotrichioides]
  misc_feature (13)..(532): NCBI GI: 169610165 Blast Desc: SNOG_08178 [Phaeosphaeria nodorum SN15] gi|111063334|gb|EAT84454.1| SNOG_08178 [Phaeosphaeria nodorum SN15]
  misc_feature (13)..(531): NCBI GI: 189191520 Blast Desc: cytochrome P450 monooxygenase [Pyrenophora tritici-repentis Pt-1C-BFP] gi|187973705|gb|EDU41204.1| cytochrome P450 monooxygenase [Pyrenophora tritici-repentis
  misc_feature (38)..(530): NCBI GI: 91771577 Blast Desc: cytochrome P450 monooxygenase [Hypocrea virens]
  misc_feature (13)..(534): NCBI GI: 18026284 Blast Desc: cytochrome P450 [Gibberella zeae]
MGWRSLYPRPACDIPDLIPIIKAKNEFSVSVFTVTTQKLGTPIAQLLFPGIRKPLIILEDPREIEDIVMRRNKEFDKGPMTIDLLRPMFPSGTISQYTTPKLRAQKRLWADVMSTEFLRKAAAPNIHKAAMQLIELWALKSSTIYHDKAFNVYDDLLNSALDAIWVAVVGKEPGVTRHNIKTVQSQISGEDLTDEPLPRGLFLKREILYIGDTMAKNAGSPSPKWAQRMEMLTPRYRQFRRIVTTEITRTMQTAVKRFERLQAGHLEADDHDTCMMDLVLRKQILEAKKTRIPTTDPTKDPTMIDELFTMLVGGHDSTANVLTWFVRFLEAYPAVQTELRTTLKKAFQTNRPSVEEILGLDIPYLEATCEESFRLAGVAKGNLRQALVDTEILGCKVPKGAEIFMNFHVDRSPVAVDPSRRGAGSLAAIDKHGDSFQSKAGRDLATFEPRRFLTFDEESGKEVFNYFALPSLAFGGGFRGCPGRKLATMEFRIIATLLVLNFEFLDLPENLRAWSASERTFRRPDMPYARLKSV

SEQ ID NO: 31034 - DNA, 463 bp, Muscodor strobelii
  misc_feature: SGI EST ID NO. CUFF.73490.0
  misc_feature: Variant of the nucleotide sequence at SEQ ID NO 31032
cattcgacgaagagtcgggcaaagaagtttttaactattttgcgctaccatcactagcatttggaggtggtttcaggggttgccccggtcgtaaattagcaacgatggagtttagaattattgctacactattggttttgaattttgagttcttggaccttcctgagaatctaagagcatggtctgcaagcgagagaactttccggcgaccggatatgccttacgcccgactgaaatctgtatgaataaggaggcgagggtaaagagcataatttgcagtatcgctagtgtttataagatctcggtgtcaccacatctgattttctcatgatgagagaatttcctctgatcctaattgagtagatcgatgttagcgtacaatgtagtcctgacgaaaaaatctcattatgtcggctttagattttcggaccgaacaggagtatgctacccccgcttgcaaaag

SEQ ID NO: 31035 - DNA, 618 bp, Muscodor strobelii
  misc_feature: SGI cDNA ID NO. 570682
  misc_feature: Elevated expression when VOC is produced
  misc_feature: Encodes the peptide sequence at SEQ ID NO 31036
atggctttgaacatcgccgctgcacatgcacatggtctcgacctcggcaacaacttcgctcctcagatcacacccgctcctaaattgttggccagacaagataatgctccccaagtcaacctgttcattgatggcgagggtgcggatttcgagtacgctgcctcggtcgtgtcagcctgttctgacgcaaccgtatgggcaatccgatgcacagatggaagcgtaggttcagctacctgcggtcccaacgctgaggttgtcactgtcacggagagtgctggtggataccgtgtgtcgagctcgacgtcaactcaggtcgatggcaccgccgcaaagtatgaactgatcgagacctgcaagatcgccaatgacgccgcgacatgcacagctactatctctggctcggcggccggccaaagcaccaagacgagcgacactgtcacctacaccggtgctgacttctctgccaaaaagtacgacgtagctgttaccggtggtgctgagaagactgcgtcgccctccggcaaatgcaatgccgcttccggcttcaacacacgtgctgttgcgctctggggtatgctcggtgccgtcggcgtcgtcggcgttcttgccctctaa

SEQ ID NO: 31036 - protein, 205 aa, Muscodor strobelii
  misc_feature: SGI Peptide ID NO. 570682
  misc_feature: Useful for introducing or modulating the production of volatile compounds
MALNIAAAHAHGLDLGNNFAPQITPAPKLLARQDNAPQVNLFIDGEGADFEYAASVVSACSDATVWAIRCTDGSVGSATCGPNAEVVTVTESAGGYRVSSSTSTQVDGTAAKYELIETCKIANDAATCTATISGSAAGQSTKTSDTVTYTGADFSAKKYDVAVTGGAEKTASPSGKCNAASGFNTRAVALWGMLGAVGVVGVLAL

SEQ ID NO: 31037 - DNA, 2012 bp, Muscodor strobelii
  misc_feature: SGI EST ID NO. CUFF.73515.0
  misc_feature: Variant of the nucleotide sequence at SEQ ID NO 31035
gtctgcatctcgatacaagacgccattctcaatactatgaaactaagatgacaagaattcctagatagaaaccccacaagaggaatgctatattcgcggattggtagctatgagcccagggggcttggttctgcttggcagagggcccttctaaataaaggacatcagggtagtaatgtttgcggagattggttcggcagtgtatccagcaatgtttaaggtcaaaaatgctcaaagacattttgtgcggaaagtgcgatcctctcggattctctagttttgggcggtctgagtctcggtcacttggtgacctcgcagctgagcccaactactcagcccccattgttccagactcgcggttttttgcggcgagaattctgtgacactttggctgaagaactgaacattcaggcacatcccctgccgatttccgaacttcactaactattcggtccatgctaatcctgaacaggctggcgatgggatcgaacgtgggccgacaagtctcgcttctccacgtctattaatctcagccctagcttagtgacagtcttggcgcctccttcacgaatcgccagcgacgatgcgcccgtgtaatgaatagccaactccactgctaggctctcgcccaatctcggacgctgtgaaagtccccaatgacatcgttcgtacactagtggcgggccaacagctcattcagctcctgcgttttgtttgcgagcatcgagcattggcgatttggcgcagcttgtgaatgccttggcgcaaatttagtatcccaggcttgcatgacgagcatgcgagatggtgttcgatggcactgaagagccatgttcagcccgtatgacggggaaggaccaaggacgtataagaaggaggcgcatcccacgttgaggtcgtgttggaaagtgcgaagctcgtgacacatgacataaataaagacacaaacgacttacatttctcacgacctatccaacgatccagattcaattatcgtcaacctcgtcaatctcttaataattcgccatggctttgaacatcgccgctgcacatgcacatggtctcgacctcggcaacaacttcgctcctcagatcacacccgctcctaaattgttggccagacaagataatgctccccaagtcaacctgttcattgatggcgagggtgcggatttcgagtacgctgcctcggtcgtgtcagcctgttctgacgcaaccgtatgggcaatccgatgcacagatggaagcgtaggttcagctacctgcggtcccaacgctgaggttgtcactgtcacggagagtgctggtggataccgtgtgtcgagctcgacgtcaactcaggtcgatggcaccgccgcaaagtatgaactgatcgagacctgcaagatcgccaatgacgccgcgacatgcacagctactatctctggctcggcggccggccaaagcaccaagacgagcgacactgtcacctacaccggtgctgacttctctgccaaaaagtacgacgtagctgttaccggtggtgctgagaagactgcgtcgccctccggcaaatgcaatgccgcttccggcttcaacacacgtgctgttgcgctctggggtatgctcggtgccgtcggcgtcgtcggcgttcttgccctctaagcgggctctggggaaggaggcttgattcaatcaagcatgggcaccatcctcatggccctacgagtaacgtgacgattgagtaatcttgggaaaacggcgttagaacttagcgatcagacattgtctgagcacatttgaaatataccccgattgttcttgacaccgtcccgctgttcacgtactcatgggttactggagtgtccgcccgtgctaagcgatacgcgattgttcttgaatattactcaactattacggaaattcgattgtgtctatgatcatagtaaatagaaaggtgaggtgaagttgaagtcagatcggcaaatttcgcagccttgctgttacgcgtcattcaaactgcgccacttaat

SEQ ID NO: 31038 - DNA, 2091 bp, Muscodor strobelii
  misc_feature: SGI cDNA ID NO. 570683
  misc_feature: Encodes the peptide sequence at SEQ ID NO 31039
atgctggcggaacctagccacgagcctcttcggtacatccgagagcgggttgcaaacgcatgcgacaactgtaagcagcgaaaagtaaaatgtgatggcaacctcccgtgcggatactgcaagagacggcaacgcagccatgcgtgccatttctcgcctccggttcgccgacggcctcgtcccgagaagagccgtgcatccgcgcagcagtccccaagaccatcatcctctgcctccggatttggaggcgtcggtgtctcaacgccgatcccgagtccccgcgggacagcgaccattgtaacctcgccgacgcttacgagacagagtgatgtctcgactgaggaggccgaggttccccgggatgcacgactaatttgcgatacgcaggggaaactagtattcatcggcgactgcgcacctttgtcattattccagaccgtgcggcagatcgtgacatctcgcgttgatccacatgccttcaccacagagacaagtcgagtctccatgctcgagaacgtcagcacagagaacaatgcccccttgaacaacgcagagccggagatcaatcctcgtgcgatcgctccgtttgtggaaaattatctcttagctacaaacgccctggtagaccttttcaacaccagaactctcacgacagaaatcacagcctgggcgtcttcaccttcccggtcgtctaaaccttcagcatcagtctattacctactcctctccatcggatcgcaaacctcttcagaaaaactcgcctcctcctacttcacccacggcaaatcgctcgctctttcaggcttatcaggaaacctaagtatatcgaccgtgcagtcctttctcctgacaaccttgtatatgctgcgcagttgccaaatcaacgccgcatttcttttctacgggattgccgcccgcgccgcctacgccatcggtcttcaccgcaccgaagtaaatgatcggttcggccctgatgtacgacttcggcgggatcggctgtggaagagtgtccgagttctggatttgtatctaagtatttccatgggtcggcctcccgcagcagcagacgctgattgtactgtaccgtaccactgtacagaggacgacggaagtgaaaagtgggatctcctgaatgcaagtatacagattctttctattatcgaggggataatccatgaggtctactcgcggaggaagatatcgttgcagtcaacggagggtatatcacgacagctgcgcgactggtctgggaactggctctcgcccttgcatcgtgctctgcatgatcgggagaatgcaagggagagtacgggcgcgtgtcaggtgctgagctcgtattattatgctgttatgttggtttcgaggccgttccttatgtacgagatttgcaagcgacttcccgagccgcaatcaacgaatcgtccgatggcggatattgcatccggacggtcaaagctggcgaatgcttgtattgacgctgcgacactgatgataggcatcgtatctgatctcgtcgagaatagaacattgcaagatggacgtatgccgctgattgtctcgtggctcttcgcggcctcgctggttgtcggtgtaggacttctcggcgggttcggtcgcgcactggagaagcacgcttctatgtccgtcgcggccttgacccatttttccaaagacgacgcccacgcatctcaatacgcacggatcgccgagtctctgcgtgtctgtgcactgggatacttgacgaagcaagaagcagaggatcggcgacgtatagccgaagattctacacgactcttcggtctcctgcccagcaagacccgctgggaaagcaactcgatacagaaccagcgcacggtgcctgaacaagctccagaagttcctgcacccactgagcctagtttatgggagtatgagggctttgataatttcgacccggcgatattttcatttaatgactcgatgatagcgcatagtgattttcatactacgcctggcgaccaagaggggagcgcggaccaggtcttcggggcattgaatttgtttccgttgcttgatggcaatggacatatcgatttggcgcattggtcatga

SEQ ID NO: 31039 - protein, 696 aa, Muscodor strobelii
  misc_feature: SGI Peptide ID NO. 570683
  misc_feature (19)..(58): Pfam Id: PF00172 Pfam Desc: Fungal Zn(2)-Cys(6) binuclear cluster domain
  misc_feature (274)..(368): Pfam Id: PF04082 Pfam Desc: Fungal specific transcription factor domain
  misc_feature (2)..(694): NCBI GI: 46120366 Blast Desc: FG04830.1 [Gibberella zeae PH-1]
  misc_feature (11)..(695): NCBI GI: 116200798 Blast Desc: CHGG_10944 [Chaetomium globosum CBS 148.51] gi|88175658|gb|EAQ83126.1| CHGG_10944 [Chaetomium globosum CBS 148.51]
  misc_feature (109)..(605): NCBI GI: 85092513 Blast Desc: NCU02214 [Neurospora crassa OR74A] gi|28920849|gb|EAA30193.1| conserved [Neurospora crassa OR74A]
  misc_feature (4)..(604): NCBI GI: 189191832 Blast Desc: conserved [Pyrenophora tritici-repentis Pt-1C-BFP] gi|187973861|gb|EDU41360.1| conserved [Pyrenophora tritici-repentis Pt-1C-BFP]
  misc_feature (13)..(447): NCBI GI: 171680689 Blast Desc: protein product [Podospora anserina] gi|170939972|emb|CAP65198.1| protein product [Podospora anserina]
  misc_feature (118)..(685): NCBI GI: 169599977 Blast Desc: SNOG_02816 [Phaeosphaeria nodorum SN15] gi|111068427|gb|EAT89547.1| SNOG_02816 [Phaeosphaeria nodorum SN15]
  misc_feature (14)..(639): NCBI GI: 115491075 Blast Desc: ATEG_00079 [Aspergillus terreus NIH2624] gi|114197025|gb|EAU38725.1| ATEG_00079 [Aspergillus terreus NIH2624]
  misc_feature (14)..(600): NCBI GI: 255945301 Blast Desc: Pc20g09220 [Penicillium chrysogenum Wisconsin 54-1255] gi|211588153|emb|CAP86251.1| Pc20g09220 [Penicillium chrysogenum Wisconsin 54-1255]
  misc_feature (14)..(632): NCBI GI: 169772845 Blast Desc: [Aspergillus oryzae RIB40] gi|83768752|dbj|BAE58889.1| protein product [Aspergillus oryzae]
  misc_feature (5)..(632): NCBI GI: 145253260 Blast Desc: An16g08450 [Aspergillus niger] gi|134083705|emb|CAK42944.1| protein product [Aspergillus niger]
MLAEPSHEPLRYIRERVANACDNCKQRKVKCDGNLPCGYCKRRQRSHACHFSPPVRRRPRPEKSRASAQQSPRPSSSASGFGGVGVSTPIPSPRGTATIVTSPTLTRQSDVSTEEAEVPRDARLICDTQGKLVFIGDCAPLSLFQTVRQIVTSRVDPHAFTTETSRVSMLENVSTENNAPLNNAEPEINPRAIAPFVENYLLATNALVDLFNTRTLTTEITAWASSPSRSSKPSASVYYLLLSIGSQTSSEKLASSYFTHGKSLALSGLSGNLSISTVQSFLLTTLYMLRSCQINAAFLFYGIAARAAYAIGLHRTEVNDRFGPDVRLRRDRLWKSVRVLDLYLSISMGRPPAAADADCTVPYHCTEDDGSEKWDLLNASIQILSIIEGIIHEVYSRRKISLQSTEGISRQLRDWSGNWLSPLHRALHDRENARESTGACQVLSSYYYAVMLVSRPFLMYEICKRLPEPQSTNRPMADIASGRSKLANACIDAATLMIGIVSDLVENRTLQDGRMPLIVSWLFAASLVVGVGLLGGFGRALEKHASMSVAALTHFSKDDAHASQYARIAESLRVCALGYLTKQEAEDRRRIAEDSTRLFGLLPSKTRWESNSIQNQRTVPEQAPEVPAPTEPSLWEYEGFDNFDPAIFSFNDSMIAHSDFHTTPGDQEGSADQVFGALNLFPLLDGNGHIDLAHWS

SEQ ID NO: 31040 - DNA, 4689 bp, Muscodor strobelii
  misc_feature: SGI EST ID NO. CUFF.73530.1
  misc_feature: Variant of the nucleotide sequence at SEQ ID NO 31038
gcatttgctagcaacagcttgcacccatgggaaaccggaagagctgaggaagttctagttcagattctagtccatcaagctataaccgctgatatgcgaatcgcggccgaactaccttcgacagcggcaggcctagtgatcatgccaatccaacaattttcaagcaggcgatagttaggaacaacattttgcaattagtaaaaccacgctgtttacatacccaaaatctaacttgtcaaggatgccaatactcgtcgcgcaaggaactctaatgggcgccaagcgattgcgctgggtacgtgggtttgtttccccaagacgcaagactcgcagatcctgttgtatcgtcttgaacgatcatgatcgagagaatatgtcatcgtcctgagctcttgttgaacatcatctttccaaatgattaagcagttaagtcagcaactgacctcaatcacttgaaccttacgcaatgtccgacgattcccgagtgaagagtcctgtgcttagcgcatccgaagttccgatatccgcagataaagttccacaccttgtctctttctaccatgccagatagcgtcggcattgcaaaggtgcaagaggcagatacaattattcgagccgaataggtcacttctatgcctattatagttgtgacggcatggtcatatcttggagaatcaattaacaacctaaaatgctggcggaacctagccacgagcctcttcggtacatccgagagcgggttgcaaacgcatgcgacaactgtaagcagcgaaaagtaaaatgtgatggcaacctcccgtgcggatactgcaagagacggcaacgcagccatgcgtgccatttctcgcctccggttcgccgacggcctcgtcccgagaagagccgtgcatccgcgcagcagtccccaagaccatcatcctctgcctccggatttggaggcgtcggtgtctcaacgccgatcccgagtccccgcgggacagcgaccattgtaacctcgccgacgcttacgagacagagtgatgtctcgactgaggaggccgaggttccccgggatgcacgactaatttgcgatacgcaggggaaactagtattcatcggcgactgcgcacctttgtcattattccagaccgtgcggcagatcgtgacatctcgcgttgatccacatgccttcaccacagagacaagtcgagtctccatgctcgagaacgtcagcacagagaacaatgcccccttgaacaacgcagagccggagatcaatcctcgtgcgatcgctccgtttgtggaaaattatctcttagctgtaggtctatcactcaccactaatgcctcgcgcgcaaatcctgacatacacacagacaaacgccctggtagaccttttcaacaccagaactctcacgacagaaatcacagcctgggcgtcttcaccttcccggtcgtctaaaccttcagcatcagtctattacctactcctctccatcggatcgcaaacctcttcagaaaaactcgcctcctcctacttcacccacggcaaatcgctcgctctttcaggcttatcaggaaacctaagtatatcgaccgtgcagtcctttctcctgacaaccttgtatatgctgcgcagttgccaaatcaacgccgcatttcttttctacgggattgccgcccgcgccgcctacgccatcggtcttcaccgcaccgaagtaaatgatcggttcggccctgatgtacgacttcggcgggatcggctgtggaagagtgtccgagttctggatttgtatctaagtatttccatgggtcggcctcccgcagcagcagacgctgattgtactgtaccgtaccactgtacagaggacgacggaagtgaaaagtgggatctcctgaatgcaagtatacagattctttctattatcgaggggataatccatgaggtctactcgcggaggaagatatcgttgcagtcaacggagggtatatcacgacagctgcgcgactggtctgggaactggctctcgcccttgcatcgtgctctgcatgatcgggagaatgcaagggagagtacgggcgcgtgtcaggtgctgagctcgtattattatgctgttatgttggtttcgaggccgttccttatgtacgagatttgcaagcgacttcccgagccgcaatcaacgaatcgtccgatggcggatattgcatccggacggtcaaagctggcgaatgcttgtattgacgctgcgacactgatgataggcatcgtatctgatctcgtcgagaatagaacattgcaagatggacgtatgccgctgattgtctcgtggctcttcgcggcctcgctggttgtcggtgtaggacttctcggcgggttcggtcgcgcactggagaagcacgcttctatgtccgtcgcggccttgacccatttttccaaagacgacgcccacgcatctcaatacgcacggatcgccgagtctctgcgtgtctgtgcactgggatacttgacgaagcaagaagcagaggatcggcgacgtatagccgaagattctacacgactcttcggtctcctgcccagcaagacccgctgggaaagcaactcgatacagaaccagcgcacggtgcctgaacaagctccagaagttcctgcacccactgagcctagtttatgggagtatgagggctttgataatttcgacccggcgatattttcatttaatgactcgatgatagcgcatagtgattttcatactacgcctggcgaccaagaggggagcgcggaccaggtcttcggggcattgaatttgtttccgttgcttgatggcaatggacatatcgatttggcgcattggtcatgatttcatacgattagagtgtactctggactggtgggccgaacagactggcgaatatcgctgctatttacacgtcccagtatctggatcctgctctcgggagatgtcgaactttctcctggaggaagcggactaaggtaccatttcttgcccatatgatattcgatctcattgacgtcgaattcgtgtgtattacgttgcgaacgaggagatataagcaacctataataactgtgccagtgatcagtacaattggtagataacatttgtcaaggcggattttgcatgctctggctctggatgttatgagccaaaagggggccacaatgaaaatatatactcaccaccattgcaacgctaaacgtcgatccccatttgtgatactatcccggagtgatatccatgttcggaccaacgtcgccgcagaaaccctatgcttcgattctgctcaattcaacatcgtccgtggcgactttcctgtagcccttctcccgccttctcctactacaccacctacacccataaacacatgccaatatcaataatgtcaacaccacaatcgccccaaccacctctttaatcacaagtccaatatgacttccaatccacccaaaccacacattgtcccacgtatcccaactcccaccatgctcctgattccagaaaacgaatggatccggctcgcctggtcgcgtatccataaggatgtgtgtcaattttccccatctatccccaaaccccttgagtgtgccgtcaggacggagaagagagtgatagcgctcccatatcgatgtcacaaaccattgacccgatgtataggatacgacgatgtagggcaggatccagggccagttgtaggattgtaaagattctgtgaggaggacgaagaatgggtgagagggttgaccgccgattatgttattgctgagggttccgtggccgccgtctgttgtgaaagcgggaaattgacggatgggttcgagggactggagacaaccctaggccaaccatcagttagttggatgagcgcgagtattgccataggagcgtgaaactaatcaggtaggaaagattgaagtcgaaagatgatgatggtgagaaaatgggataagggaggtacagaaatgagaggaaagacacaaacgaacattatcaagatcgatataaatcccaccgaatgtccttagcgcaaaatacctaataacatcgaccctttgtatgggatatttatatccatcatatgcgtccaaaaaccaggggaattcctcctctatgaagtccctacttttctttgcggtccatagtttgtactcccagtctggattcaaatcgatacaactctgtcgtgctcgttcccagtcttcggggagactgacggcggtggatgtaggatcagtccagttatgaaagacctgatggagaatttttggaattgctagctcgggtgaagaagaggagttactagatgcttcagaggagggttgttggtcattccaggagtcgagaatttcttgctgggagatcttaagaccggagtgtgggcggaagaactgaaagaggttggcgaagttgtagagtcgaattgtgagcgagatgagaattgcgagaaggaagaatgtgagtaggtatttgacgatgcgtcttgctcgaggcgagagcgccatggccctgctaaaggcgaggccaatggtgataagaggtaaggagattctgtttgatgggtgtcggataaggggtatatacgttttgtcttgtcttgtcttgtaatgtctcacaaggaggtgtatcttcgttcatctatcaatgcagggaggcatattggtactaaaggtgatgacgaaataaaagagacgtg

SEQ ID NO: 31041 - DNA, 1083 bp, Muscodor strobelii
  misc_feature: SGI cDNA ID NO. 570684
  misc_feature: Reduced expression when VOC is produced
  misc_feature: Encodes the peptide sequence at SEQ ID NO 31042
atggcgctctcgcctcgagcaagacgcatcgtcaaatacctactcacattcttccttctcgcaattctcatctcgctcacaattcgactctacaacttcgccaacctctttcagttcttccgcccacactccggtcttaagatctcccagcaagaaattctcgactcctggaatgaccaacaaccctcctctgaagcatctagtaactcctcttcttcacccgagctagcaattccaaaaattctccatcaggtctttcataactggactgatcctacatccaccgccgtcagtctccccgaagactgggaacgagcacgacagagttgtatcgatttgaatccagactgggagtacaaactatggaccgcaaagaaaagtagggacttcatagaggaggaattcccctggtttttggacgcatatgatggatataaatatcccatacaaagggtcgatgttattaggtattttgcgctaaggacattcggtgggatttatatcgatcttgataatggttgtctccagtccctcgaacccatccgtcaatttcccgctttcacaacagacggcggccacggaaccctcagcaataacataatcggcggtcaaccctctcacccattcttcgtcctcctcacagaatctttacaatcctacaactggccctggatcctgccctacatcgtcgtatcctatacatcgggtcaatggtttgtgacatcgatatgggagcgctatcactctcttctccgtcctgacggcacactcaaggggtttggggatagatggggaaaattgacacacatccttatggatacgcgaccaggcgagccggatccattcgttttctggaatcaggagcatggtgggagttgggatacgtgggacaatgtgtggtttgggtggattggaagtcatattggacttgtgattaaagaggtggttggggcgattgtggtgttgacattattgatattggcatgtgtttatgggtgtaggtggtgtagtaggagaaggcgggagaagggctacaggaaagtcgccacggacgatgttgaattgagcagaatcgaagcatag

SEQ ID NO: 31042 - protein, 360 aa, Muscodor strobelii
  misc_feature: SGI Peptide ID NO. 570684
  misc_feature (117)..(199): Pfam Id: PF04488 Pfam Desc: Glycosyltransferase sugar-binding region containing DXD motif
  misc_feature (5)..(355): NCBI GI: 145602802 Blast Desc: MGG_13744 [Magnaporthe grisea 70-15] gi|145011190|gb|EDJ95846.1| MGG_13744 [Magnaporthe grisea 70-15]
  misc_feature (8)..(327): NCBI GI: 212525986 Blast Desc: mannosyl phosphorylinositol ceramide synthase CSH1, [Penicillium marneffei ATCC 18224] gi|210072548|gb|EEA26635.1| mannosyl phosphorylinositol ceramide synthase CSH1, [Penicillium
  misc_feature (9)..(358): NCBI GI: 171693011 Blast Desc: protein product [Podospora anserina] gi|170946454|emb|CAP73255.1| protein product [Podospora anserina]
  misc_feature (23)..(348): NCBI GI: 116198861 Blast Desc: CHGG_07586 [Chaetomium globosum CBS 148.51] gi|88178865|gb|EAQ86333.1| CHGG_07586 [Chaetomium globosum CBS 148.51]
  misc_feature (6)..(343): NCBI GI: 212544037 Blast Desc: conserved [Penicillium marneffei ATCC 18224] gi|210067080|gb|EEA21173.1| conserved [Penicillium marneffei ATCC 18224]
  misc_feature (17)..(343): NCBI GI: 242788380 Blast Desc: mannosyl phosphorylinositol ceramide synthase CSH1, [Talaromyces stipitatus ATCC 10500] gi|218721354|gb|EED20773.1| mannosyl phosphorylinositol ceramide synthase CSH1, [Talaromyces
  misc_feature (1)..(356): NCBI GI: 145603611 Blast Desc: MGG_13257 [Magnaporthe grisea 70-15] gi|145603619|ref|XP_369542.2| MGG_05922 [Magnaporthe grisea 70-15] gi|145011816|gb|EDJ96472.1| MGG_13257 [Magnaporthe grisea
  misc_feature (22)..(354): NCBI GI: 85090096 Blast Desc: NCU07761 [Neurospora crassa OR74A] gi|28919597|gb|EAA29019.1| [Neurospora crassa OR74A]
  misc_feature (55)..(359): NCBI GI: 242823662 Blast Desc: MIPC synthase subunit (SurA), [Talaromyces stipitatus ATCC 10500] gi|242823667|ref|XP_002488105.1| MIPC synthase subunit (SurA), [Talaromyces stipitatus ATCC 10500] MIPC synthase
  misc_feature (55)..(337): NCBI GI: 119467736 Blast Desc: MIPC synthase subunit (SurA), [Neosartorya fischeri NRRL 181] gi|119405826|gb|EAW15777.1| MIPC synthase subunit (SurA), [Neosartorya fischeri NRRL 181]
  misc_feature: Useful for introducing or modulating the production of volatile compounds
MALSPRARRIVKYLLTFFLLAILISLTIRLYNFANLFQFFRPHSGLKISQQEILDSWNDQQPSSEASSNSSSSPELAIPKILHQVFHNWTDPTSTAVSLPEDWERARQSCIDLNPDWEYKLWTAKKSRDFIEEEFPWFLDAYDGYKYPIQRVDVIRYFALRTFGGIYIDLDNGCLQSLEPIRQFPAFTTDGGHGTLSNNIIGGQPSHPFFVLLTESLQSYNWPWILPYIVVSYTSGQWFVTSIWERYHSLLRPDGTLKGFGDRWGKLTHILMDTRPGEPDPFVFWNQEHGGSWDTWDNVWFGWIGSHIGLVIKEVVGAIVVLTLLILACVYGCRWCSRRRREKGYRKVATDDVELSRIEA

SEQ ID NO: 31043 - DNA, 3411 bp, Muscodor strobelii
  misc_feature: SGI EST ID NO. CUFF.73531.2
  misc_feature: Variant of the nucleotide sequence at SEQ ID NO 31041
cacgtctcttttatttcgtcatcacctttagtaccaatatgcctccctgcattgatagatgaacgaagatacacctccttgtgagacattacaagacaagacaagacaaaacgtatataccccttatccgacacccatcaaacagaatctccttacctcttatcaccattggcctcgcctttagcagggccatggcgctctcgcctcgagcaagacgcatcgtcaaatacctactcacattcttccttctcgcaattctcatctcgctcacaattcgactctacaacttcgccaacctctttcagttcttccgcccacactccggtcttaagatctcccagcaagaaattctcgactcctggaatgaccaacaaccctcctctgaagcatctagtaactcctcttcttcacccgagctagcaattccaaaaattctccatcaggtctttcataactggactgatcctacatccaccgccgtcagtctccccgaagactgggaacgagcacgacagagttgtatcgatttgaatccagactgggagtacaaactatggaccgcaaagaaaagtagggacttcatagaggaggaattcccctggtttttggacgcatatgatggatataaatatcccatacaaagggtcgatgttattaggtattttgcgctaaggacattcggtgggatttatatcgatcttgataatggttgtctccagtccctcgaacccatccgtcaatttcccgctttcacaacagacggcggccacggaaccctcagcaataacataatcggcggtcaaccctctcacccattcttcgtcctcctcacagaatctttacaatcctacaactggccctggatcctgccctacatcgtcgtatcctatacatcgggtcaatggtttgtgacatcgatatgggagcgctatcactctcttctccgtcctgacggcacactcaaggggtttggggatagatggggaaaattgacacacatccttatggatacgcgaccaggcgagccggatccattcgttttctggaatcaggagcatggtgggagttgggatacgtgggacaatgtgtggtttgggtggattggaagtcatattggacttgtgattaaagaggtggttggggcgattgtggtgttgacattattgatattggcatgtgtttatgggtgtaggtggtgtagtaggagaaggcgggagaagggctacaggaaagtcgccacggacgatgttgaattgagcagaatcgaagcatagggtttctgcggcgacgttggtccgaacatggatatcactccgggatagtatcacaaatggggatcgacgtttagcgttgcaatggtgttattataggttgcttatatctcctcgttcgcaacgtaatacacacgaattcgacgtcaatgagatcgaatatcatatgggcaagaaatggtaccttagtccgcttcctccaggagaaagttcgacatctcccgagagcaggatccagatactgggacgtgtaaatagcagcgatattcgccagtctgttcggcccaccagtccagagtacactctaatcgtatgaaatcatgaccaatgcgccaaatcgatatgtccattgccatcaagcaacggaaacaaattcaatgccccgaagacctggtccgcgctcccctcttggtcgccaggcgtagtatgaaaatcactatgcgctatcatcgagtcattaaatgaaaatatcgccgggtcgaaattatcaaagccctcatactcccataaactaggctcagtgggtgcaggaacttctggagcttgttcaggcaccgtgcgctggttctgtatcgagttgctttcccagcgggtcttgctgggcaggagaccgaagagtcgtgtagaatcttcggctatacgtcgccgatcctctgcttcttgcttcgtcaagtatcccagtgcacagacacgcagagactcggcgatccgtgcgtattgagatgcgtgggcgtcgtctttggaaaaatgggtcaaggccgcgacggacatagaagcgtgcttctccagtgcgcgaccgaacccgccgagaagtcctacaccgacaaccagcgaggccgcgaagagccacgagacaatcagcggcatacgtccatcttgcaatgttctattctcgacgagatcagatacgatgcctatcatcagtgtcgcagcgtcaatacaagcattcgccagctttgaccgtccggatgcaatatccgccatcggacgattcgttgattgcggctcgggaagtcgcttgcaaatctcgtacataaggaacggcctcgaaaccaacataacagcataataatacgagctcagcacctgacacgcgcccgtactctcccttgcattctcccgatcatgcagagcacgatgcaagggcgagagccagttcccagaccagtcgcgcagctgtcgtgatataccctccgttgactgcaacgatatcttcctccgcgagtagacctcatggattatcccctcgataatagaaagaatctgtatacttgcattcaggagatcccacttttcacttccgtcgtcctctgtacagtggtacggtacagtacaatcagcgtctgctgctgcgggaggccgacccatggaaatacttagatacaaatccagaactcggacactcttccacagccgatcccgccgaagtcgtacatcagggccgaaccgatcatttacttcggtgcggtgaagaccgatggcgtaggcggcgcgggcggcaatcccgtagaaaagaaatgcggcgttgatttggcaactgcgcagcatatacaaggttgtcaggagaaaggactgcacggtcgatatacttaggtttcctgataagcctgaaagagcgagcgatttgccgtgggtgaagtaggaggaggcgagtttttctgaagaggtttgcgatccgatggagaggagtaggtaatagactgatgctgaaggtttagacgaccgggaaggtgaagacgcccaggctgtgatttctgtcgtgagagttctggtgttgaaaaggtctaccagggcgtttgtctgtgtgtatgtcaggatttgcgcgcgaggcattagtggtgagtgatagacctacagctaagagataattttccacaaacggagcgatcgcacgaggattgatctccggctctgcgttgttcaagggggcattgttctctgtgctgacgttctcgagcatggagactcgacttgtctctgtggtgaaggcatgtggatcaacgcgagatgtcacgatctgccgcacggtctggaataatgacaaaggtgcgcagtcgccgatgaatactacaatagcatatcagatatgaattcgaactcagatcattcttcgttatgtaaaaatgatgattagttctgg

SEQ ID NO: 31044 - DNA, 1428 bp, Muscodor strobelii
  misc_feature: SGI cDNA ID NO. 570685
  misc_feature: Encodes the peptide sequence at SEQ ID NO 31045
atggtcgagtccttccccggcgtcgaccacgacgaggtcgggctctatgtcggcatcctcgcctccgccttcgccctcgcccagctggccaccaacctgctatggggttacctgtcagacgtcgtcgggaggaagcctatcatgctcataggcacttcgatactgtgcatatgtttcgtcctgttcggcttctgcacgcgatactaccagatcatacttgtccacgtcgccatgggtctactcaatggcaatgctgccgttgttccgacttgcttaggggagctgaccgacaggaccaaccagagcaaggccttcacctggctccccgtcgtctacagcttgggaagcatcaccggccctgcgctcggcgggcttctcgtcggcaagatcgccagggacaaataccccttcctcgcccccaacattctcgctgcctcactactcgcagccgccgtgattattctcgccgtatggtttgaggagaccttggaggaaaggtacgaaaacccagactggacagactggtttccctggttgcgcaagctgttcaagcgagagaagagcaagtcctggacatggccaggcgggagagacacggacggggcaggtgacgaagcggattacgaagacgctggacaagagactggtctactcgggcctcaaggcgaagagaccgacgaccaagacacaaaactcccgtccgaccccgccacttggcgccaactcatgaaccgcaccaccgtcgtcctcctcatgacaagtctcatcttccagctatccaacagctccttcaacagcctctaccccatcttcgcatccggccaggaaccagcgggccgcaatctacatgcagacatcatcggtatctcactatctgtcgccggcgtcttcaccatcttcttccagctctttgccttccgatctctcaagtctcggctgggcaacgtcggcacctaccggggatcactgttgggtttcgcaatcactatggcgctcatgcccttcgttggctacgtgagctctgacccgccgtttggcgtgggaaaaagcaagatctggcttgctgttgagctggagatcatactcattatcaagaatatctgtgccgtcggcggattgtcgagcgttttgctgctcatcacaaactcagctccgtcacacgctagtctcggcactctgaacggagtcgcgcagaccctctccgcagccggccggagtgtaggacccttcctctcgggcgccatatatacagcctcgacacatgtacatcccaagggcgaggcgcttgcctggggattattcgggggcgttgcgctcttcggatggctctcgacgtatgctattcatggggagagtctcgagagtacggatgatgggtacgaacccgatgaggaggaagttcagggccagagggatggcacgccataa

SEQ ID NO: 31045 - protein, 475 aa, Muscodor strobelii
  misc_feature: SGI Peptide ID NO. 570685
  misc_feature (2)..(409): Pfam Id: PF07690 Pfam Desc: Major Facilitator Superfamily
  misc_feature (17)..(409): Pfam Id: PF07690 Pfam Desc: Major Facilitator Superfamily
  misc_feature (18)..(80): Pfam Id: PF00083 Pfam Desc: Sugar (and other) transporter
  misc_feature (1)..(457): NCBI GI: 85090215 Blast Desc: NCU09912 [Neurospora crassa OR74A] gi|28919660|gb|EAA29075.1| conserved [Neurospora crassa OR74A]
  misc_feature (1)..(457): NCBI GI: 256732409 Blast Desc: [Nectria haematococca mpVI 77-13-4]
  misc_feature (1)..(453): NCBI GI: 170940392 Blast Desc: protein product [Podospora anserina]
  misc_feature (1)..(457): NCBI GI: 145601386 Blast Desc: MGG_10289 [Magnaporthe grisea 70-15] gi|145009469|gb|EDJ94136.1| MGG_10289 [Magnaporthe grisea 70-15]
  misc_feature (1)..(465): NCBI GI: 46105048 Blast Desc: FG00152.1 [Gibberella zeae PH-1]
  misc_feature (48)..(466): NCBI GI: 261353705 Blast Desc: conserved [Verticillium albo-atrum VaMs.102]
  misc_feature (1)..(455): NCBI GI: 154302680 Blast Desc: BC1G_09455 [Botryotinia fuckeliana B05.10] gi|150855202|gb|EDN30394.1| BC1G_09455 [Botryotinia fuckeliana B05.10]
  misc_feature (1)..(467): NCBI GI: 238840630 Blast Desc: conserved [Microsporum canis CBS 113480]
  misc_feature (1)..(466): NCBI GI: 225561034 Blast Desc: conserved [Ajellomyces capsulatus G186AR]
  misc_feature (1)..(466): NCBI GI: 154277593 Blast Desc: conserved [Ajellomyces capsulatus NAm1] gi|150413221|gb|EDN08604.1| conserved [Ajellomyces capsulatus NAm1]
MVESFPGVDHDEVGLYVGILASAFALAQLATNLLWGYLSDVVGRKPIMLIGTSILCICFVLFGFCTRYYQIILVHVAMGLLNGNAAVVPTCLGELTDRTNQSKAFTWLPVVYSLGSITGPALGGLLVGKIARDKYPFLAPNILAASLLAAAVIILAVWFEETLEERYENPDWTDWFPWLRKLFKREKSKSWTWPGGRDTDGAGDEADYEDAGQETGLLGPQGEETDDQDTKLPSDPATWRQLMNRTTVVLLMTSLIFQLSNSSFNSLYPIFASGQEPAGRNLHADIIGISLSVAGVFTIFFQLFAFRSLKSRLGNVGTYRGSLLGFAITMALMPFVGYVSSDPPFGVGKSKIWLAVELEIILIIKNICAVGGLSSVLLLITNSAPSHASLGTLNGVAQTLSAAGRSVGPFLSGAIYTASTHVHPKGEALAWGLFGGVALFGWLSTYAIHGESLESTDDGYEPDEEEVQGQRDGTP

SEQ ID NO: 31046 - DNA, 2435 bp, Muscodor strobelii
  misc_feature: SGI EST ID NO. CUFF.73570.2
  misc_feature: Variant of the nucleotide sequence at SEQ ID NO 31044
cctcgccctcctctccctcgccgagcagtccgccctcaactccatctccccctacctgcccgagatggtcgagtccttccccggcgtcgaccacgacgaggtcgggctctatgtcggcatcctcgcctccgccttcgccctcgcccagctggccaccaacctgctatggggttacctgtcagacgtcgtcgggaggaagcctatcatgctcataggcacttcgatactgtgcatatgtttcgtcctgttcggcttctgcacgcgatactaccagatcatacttgtccacgtcgccatgggtctactcaatggcaatgctgccgttgttccgacttgcttaggggagctgaccgacaggaccaaccagagcaaggccttcacctggctccccgtcgtctacagcttgggaagcatcaccggccctgcgctcggcgggcttctcgtcggcaagatcgccagggacaaataccccttcctcgcccccaacattctcgctgcctcactactcgcagccgccgtgattattctcgccgtatggtttgaggagaccttggaggaaaggtacgaaaacccagactggacagactggtttccctggttgcgcaagctgttcaagcgagagaagagcaagtcctggacatggccaggcgggagagacacggacggggcaggtgacgaagcggattacgaagacgctggacaagagactggtctactcgggcctcaaggcgaagagaccgacgaccaagacacaaaactcccgtccgaccccgccacttggcgccaactcatgaaccgcaccaccgtcgtcctcctcatgacaagtctcatcttccagctatccaacagctccttcaacagcctctaccccatcttcgcatccggccaggaaccagcgggccgcaatctacatgcagacatcatcggtatctcactatctgtcgccggcgtcttcaccatcttcttccagctctttgccttccgatctctcaagtctcggctgggcaacgtcggcacctaccggggatcactgttgggtttcgcaatcactatggcgctcatgcccttcgttggctacgtgagctctgacccgccgtttggcgtgggaaaaagcaagatctggcttgctgttgagctggagatcatactcattatcaagaatatctgtgccgtcggcggattgtcgagcgttttgctgctcatcacaaactcagctccgtcacacgctagtctcggcactctgaacggagtcgcgcagaccctctccgcagccggccggagtgtaggacccttcctctcgggcgccatatatacagcctcgacacatgtacatcccaagggcgaggcgcttgcctggggattattcgggggcgttgcgctcttcggatggctctcgacgtatgctattcatggggagagtctcgagagtacggatgatgggtacgaacccgatgaggaggaagttcagggccagagggatggcacgccataagggaacataagcagaaacaaaagtggttgtgtatttatgtgcatctggttgacttacatagcgtgtacatataatatcgtcattgcgctaccgagatctgcacgaagcccccacagtccacgatgttgagctactcggcactatacccgtgatagggcgacgcaaccgtatctaaagaagagcatttcattacttgctgtaatggctacctatctgcgacaagcagaggagtatcgcgatcatgaactacctagtctgactttcaaataagcgacatgtttcccgttccgtagtaaatgtaactcaaaggttcgccttatctagatgccaagaccctcagctctcggcatgtcgtgccaattgtatagataggcacgaggcctccaagctcttactaaccccgacctcgacccctacggaggcggagcgagaaaaaagcaattgtgttctcacacaacattgataactgggtatatcactatttctttgttccatctcgcctacggtgtcgagcatcttgcaaacgtgatgaatagcctgctacttatgtagccgtagcacagattcgagtagctaatgacgaagttaagtacggtattattttcactccccccatactcaattaacattgacgtaacagcgttgagggtcttttgagggtcttacctcttttggtggttattcccatacccaggtttttgctttattcttattggaagttggacgatccccttctcccggatcagggtctgtaacgcgacgcattgagctctgattgagtggatttggagaaacaacattagtgaatgtctgtagttactgatgggcacctgcgctaataccaaaaaaaatctctgagtagattgagcgagtcttcaatgatatcaatattacgaaaccgtggagcggtaataacagtatccaggtagtggagatggagcca

SEQ ID NO: 31047 - DNA, 189 bp, Muscodor strobelii
  misc_feature: SGI cDNA ID NO. 570686
  misc_feature: Reduced expression when VOC is produced
  misc_feature: Encodes the peptide sequence at SEQ ID NO 31048
atgtcgaacgctgagctcgcctcttcctacgccgccctcatcttggccgatgacggtgttgagatcactgccgacaagctccagactctgatcaaggctgctggcgtcgccgatgtcgagcccatctggacacagctgttcgccaaggctcttgagggcaaggatgtaaaggagctcctgtccgctgtc

SEQ ID NO: 31048 - protein, 63 aa, Muscodor strobelii
  misc_feature: SGI Peptide ID NO. 570686
  misc_feature (21)..(63): Pfam Id: PF00428 Pfam Desc: 60s Acidic ribosomal protein
  misc_feature (1)..(60): NCBI GI: 156043249 Blast Desc: SS1G_10627 [Sclerotinia sclerotiorum 1980] gi|154695015|gb|EDN94753.1| SS1G_10627 [Sclerotinia sclerotiorum 1980]
  misc_feature (1)..(63): NCBI GI: 261352085 Blast Desc: 60S acidic ribosomal protein P1 [Verticillium albo-atrum VaMs.102]
  misc_feature (1)..(63): NCBI GI: 39975777 Blast Desc: ribosomal protein P1 [Magnaporthe grisea 70-15] gi|145011502|gb|EDJ96158.1| ribosomal protein P1 [Magnaporthe grisea 70-15]
  misc_feature (1)..(63): NCBI GI: 116197659 Blast Desc: 60S acidic ribosomal protein P1 [Chaetomium globosum CBS 148.51] gi|88178264|gb|EAQ85732.1| 60S acidic ribosomal protein P1 [Chaetomium globosum CBS 148.51]
  misc_feature (1)..(63): NCBI GI: 171694403 Blast Desc: protein product [Podospora anserina] gi|170947150|emb|CAP73955.1| protein product [Podospora anserina]
  misc_feature (1)..(63): NCBI GI: 256731875 Blast Desc: NECHADRAFT_80688 [Nectria haematococca mpVI 77-13-4]
  misc_feature (1)..(63): NCBI GI: 46137705 Blast Desc: RLA1_CLAHE 60S ACIDIC RIBOSOMAL PROTEIN P1 (ALLERGEN CLA H 12) (CLA H XII) [Gibberella zeae PH-1]
  misc_feature (1)..(60): NCBI GI: 189196334 Blast Desc: 60S acidic ribosomal protein P1 [Pyrenophora tritici-repentis Pt-1C-BFP] gi|187980384|gb|EDU47010.1| 60S acidic ribosomal protein P1 [Pyrenophora tritici-repentis
  misc_feature (1)..(60): NCBI GI: 225560593 Blast Desc: HCBG_02411 [Ajellomyces capsulatus G186AR] gi|240280160|gb|EER43664.1| HCDG_01694 [Ajellomyces capsulatus H143]
  misc_feature (1)..(60): NCBI GI: 154278505 Blast Desc: [Ajellomyces capsulatus NAm1] gi|150413651|gb|EDN09034.1| [Ajellomyces capsulatus NAm1]
  misc_feature: Useful for introducing or modulating the production of volatile compounds
MSNAELASSYAALILADDGVEITADKLQTLIKAAGVADVEPIWTQLFAKALEGKDVKELLSAV

SEQ ID NO: 31049 - DNA, 321 bp, Muscodor strobelii
  misc_feature: SGI EST ID NO. CUFF.73528.0
  misc_feature: Variant of the nucleotide sequence at SEQ ID NO 31047
cccaccaaaaaattccaggcccttgcagtgaagttcgggtaatatccaccagcgccagtcgacctacaacttcgacatcgaggcctcatccaacgcaacccatcgccattcaccacccgacaatcattcacaatgtcgaacgctgagctcgcctcttcctacgccgccctcatcttggccgatgacggtgttgagatcactgccgacaagctccagactctgatcaaggctgctggcgtcgccgatgtcgagcccatctggacacagctgttcgccaaggctcttgagggcaaggatgtaaaggagctcctgtccgctgtc

SEQ ID NO: 31050 - DNA, 1404 bp, Muscodor strobelii
  misc_feature: SGI cDNA ID NO. 570687
  misc_feature: Encodes the peptide sequence at SEQ ID NO 31051
atggagactcccaagtatccggcgccaagagatgccggcgagaaggaggtcctcagcgcccttgtctctcttcaggaccagcttctgcttcgcaagctagatcgcaccacctatgtccgcactcaagatgtcatggtcctctatgagcaagtcatcgagcaagtcaagcgtctcaacgagatacgtcatggcaagtccatcgaagagaatcgagtcgatagagttgtcgatagctgctttcagctcctgtccctcttcttcatgaccatcggaagaaacaacgaagcaccggctgcctatgctttgacctcgaccatcaagcgtctactagaccatctcagcgaagccaacttgttctctgccaaagacctcgacagcatgtcgcataccctcgaacgcctctccggcattatacagaatgcccctcccactgaatccgagcctttcctccaagacctgatccgaaaccggatcgagcgatgtcgcgcctcgttggcaaagctacagaaaaaggtagacgacatcgcagagccgctacgtcctacaactgagaagctcgtctccattctcagacagatggctgtagtcaacacaaagtccaagttctcgacggcggacattcacaaattcgaagcacagatcaacgaaattgccgagaaacgaaaggacggcaactttgtggacgacgaaggaaatgtcctcaagggcaacgacgatgtcaacgctctcatcgaacgatgcaagacgtacactggtatcatcctagagaaagaaggacgcattcctgacaaatggcggccgatttacgatgttctcttcggcattcgtaatgagcttgacaagctctcattgacacaagcatggtctctgcgcgagacagacttgtatgatttccagcgacagctcgacaagatcgacgagaaccgagtggacggcaattggttagacgagtctggtcaacctgctgagctctatgtccaaagagtatgcaccccaatttgtatcgaaagatgtcgaaactttatctcacagactgtacagacactcctctatcttattcgacgatcatatgggtacatctatcatcttatgatctcctccgagccagtttcggaggcactactgccggtttataatcagctgcaaacactgaagcgctgtctagtggaagtgaaaaaaagcggtggtgtcggctcggttcgcgagctctatccatacagcatgaagctcaactccatcgacaatatgagagtagatggaaaattcatcgtcagtgatgatatacctgagggtcaaggaagcgtcacggaactgctttcggaatgttttgacttgaattacgagcttcgagtcgccgcagaagaagctgccgccgctgcctccggattgcgtccccctgagtga

SEQ ID NO: 31051 - protein, 467 aa, Muscodor strobelii
  misc_feature: SGI Peptide ID NO. 570687
  misc_feature (1)..(455): NCBI GI: 171694405 Blast Desc: protein product [Podospora anserina] gi|170947151|emb|CAP73956.1| protein product [Podospora anserina]
  misc_feature (1)..(451): NCBI GI: 164423764 Blast Desc: NCU08959 [Neurospora crassa OR74A] gi|157070225|gb|EAA31447.2| conserved [Neurospora crassa OR74A]
  misc_feature (9)..(455): NCBI GI: 116197661 Blast Desc: CHGG_06986 [Chaetomium globosum CBS 148.51] gi|88178265|gb|EAQ85733.1| CHGG_06986 [Chaetomium globosum CBS 148.51]
  misc_feature (1)..(456): NCBI GI: 46137703 Blast Desc: FG10367.1 [Gibberella zeae PH-1]
  misc_feature (1)..(462): NCBI GI: 256732261 Blast Desc: [Nectria haematococca mpVI 77-13-4]
  misc_feature (2)..(459): NCBI GI: 154316460 Blast Desc: BC1G_04161 [Botryotinia fuckeliana B05.10] gi|150845961|gb|EDN21154.1| BC1G_04161 [Botryotinia fuckeliana B05.10]
  misc_feature (2)..(454): NCBI GI: 156043247 Blast Desc: SS1G_10626 [Sclerotinia sclerotiorum 1980] gi|154695014|gb|EDN94752.1| SS1G_10626 [Sclerotinia sclerotiorum 1980]
  misc_feature (1)..(452): NCBI GI: 255935435 Blast Desc: Pc13g03060 [Penicillium chrysogenum Wisconsin 54-1255] gi|211583364|emb|CAP91375.1| Pc13g03060 [Penicillium chrysogenum Wisconsin 54-1255]
  misc_feature (45)..(457): NCBI GI: 145603228 Blast Desc: MGG_06186 [Magnaporthe grisea 70-15] gi|145011501|gb|EDJ96157.1| MGG_06186 [Magnaporthe grisea 70-15]
  misc_feature (1)..(452): NCBI GI: 115389218 Blast Desc: conserved [Aspergillus terreus NIH2624] gi|114194510|gb|EAU36210.1| conserved [Aspergillus terreus NIH2624]
METPKYPAPRDAGEKEVLSALVSLQDQLLLRKLDRTTYVRTQDVMVLYEQVIEQVKRLNEIRHGKSIEENRVDRVVDSCFQLLSLFFMTIGRNNEAPAAYALTSTIKRLLDHLSEANLFSAKDLDSMSHTLERLSGIIQNAPPTESEPFLQDLIRNRIERCRASLAKLQKKVDDIAEPLRPTTEKLVSILRQMAVVNTKSKFSTADIHKFEAQINEIAEKRKDGNFVDDEGNVLKGNDDVNALIERCKTYTGIILEKEGRIPDKWRPIYDVLFGIRNELDKLSLTQAWSLRETDLYDFQRQLDKIDENRVDGNWLDESGQPAELYVQRVCTPICIERCRNFISQTVQTLLYLIRRSYGYIYHLMISSEPVSEALLPVYNQLQTLKRCLVEVKKSGGVGSVRELYPYSMKLNSIDNMRVDGKFIVSDDIPEGQGSVTELLSECFDLNYELRVAAEEAAAAASGLRPPE

SEQ ID NO: 31052 - DNA, 2746 bp, Muscodor strobelii
  misc_feature: SGI EST ID NO. CUFF.73614.1
  misc_feature: Variant of the nucleotide sequence at SEQ ID NO 31050
atcatcttccaatcaccatccccaacgcagccatctctgcccatctctgcccatccagatccatcgatatcctgcatgtccatcaggaacccctgcgcagaagcaccgtagaagtcccatacgcccgacgtcattggacaaacacgagagtgacctgtcgagcccgtctctgatatttttcccctacgcgcggcgggcacacgagccggaagaagctgcagagaagctgcttctcattaattgggagcccatcgtggtgggcaccatcagccttgcatcgctgcatccaagtcgagaccacacctgtccctcgagctacgcaacactgccccttacaaagaagaccaactcgctgaaagaggagcgctgtactttgaatttcctttcttatccctccttactctcatcaacacttcaatttcgttggactgcttttcagcaacacataccctcgttagtgttaatatcgttgtcgacacgatggagactcccaagtatccggcgccaagagatgccggcgagaaggaggtcctcagcgcccttgtctctcttcaggaccagcttctgcttcgcaagctagatcgcaccacctatgtccgcactcaagatgtcatggtcctctatgagcaagtcatcgagcaagtcaagcgtctcaacgagatacgtcatggcaagtccatcgaagagaatcgagtcgatagagttgtcgatagctgctttcagctcctgtccctcttcttcatgaccatcggaagaaacaacgaagcaccggctgcctatgctttgacctcgaccatcaagcgtctactagaccatctcagcgaagccaacttgttctctgccaaagacctcgacagcatgtcgcataccctcgaacgcctctccggcattatacagaatgcccctcccactgaatccgagcctttcctccaagacctgatccgaaaccggatcgagcgatgtcgcgcctcgttggcaaagctacagaaaaaggtagacgacatcgcagagccgctacgtcctacaactgagaagctcgtctccattctcagacagatggctgtagtcaacacaaagtccaagttctcgacggcggacattcacaaattcgaagcacagatcaacgaaattgccgagaaacgaaaggacggcaactttgtggacgacgaaggaaatgtcctcaagggcaacgacgatgtcaacgctctcatcgaacgatgcaagacgtacactggtatcatcctagagaaagaaggacgcattcctgacaaatggcggccgatttacgatgttctcttcggcattcgtaatgagcttgacaagctctcattgacacaagcatggtctctgcgcgagacagacttgtatgatttccagcgacagctcgacaagatcgacgagaaccgagtggacggcaattggttagacgagtctggtcaacctgctgagctctatgtccaaagaacactcctctatcttattcgacgatcatatgggtacatctatcatcttatgatctcctccgagccagtttcggaggcactactgccggtttataatcagctgcaaacactgaagcgctgtctagtggaagtgaaaaaaagcggtggtgtcggctcggttcgcgagctctatccatacagcatgaagctcaactccatcgacaatatgagagtagatggaaaattcatcgtcagtgatgatatacctgagggtcaaggaagcgtcacggaactgctttcggaatgttttgacttgaattacgagcttcgagtcgccgcagaagaagctgccgccgctgcctccggattgcgtccccctgagtgaacaacttcatatacacttgcgatattgaagactgtcacaccttcacccaaacatcagaagggtgaatatgtatacgattgcttgtaattgcgcgaaagacctatatgactaacgtcctcgctgtcgtgggatctcctaaatggattcagcatatcataacggatattggcccgcatctgatcacggcgttggtacgaataattctcggtgaggttgattgcttggcgccagcaatgaggacgcctggtaagccttgtggccatatcttatttgactacatgagctatcggatagcgctacctgtagataccttcttctttccccaaagttaccccgatttagggatttcggaacgcagcttttagctgtaggtcataacgagtcagtcaggaggtcacaatcatggtggggcaatcaggagattcaaacttacagcccagatttgtacctattagctcaacgtcagcaatgattcgggtgaagggacgtggagttgcccggaagtgagcggttttggcgaagaagaagaagggaaataattaggaagagagatcgcaacatcgatagcaccagagcagagactaagtatgagagcttaccttatccatatcccatacgccgctcgtggcgtaaatatcgcgacttagtaactcgataatttcctcgcgggatgaggcgaccaatgtgagcgtgctaccgtagaatgagaactttgtggcgtcgtcagaatcgggcttctcgttcagcaaagcgcctccggttttgaattttccagattctacgtgggttgttgttccggccagatgttttctaaggattgttagttacttaagtggtgagtttcgagtattaatgatacagagattgagtgagagtaagcattcctcgtatttaatagctatgtgctccaatgtcgttc

SEQ ID NO: 31053 - DNA, 1347 bp, Muscodor strobelii
  misc_feature: SGI cDNA ID NO. 570688
  misc_feature: Reduced expression when VOC is produced
  misc_feature: Encodes the peptide sequence at SEQ ID NO 31054
atggagactcccaagtatccggcgccaagagatgccggcgagaaggaggtcctcagcgcccttgtctctcttcaggaccagcttctgcttcgcaagctagatcgcaccacctatgtccgcactcaagatgtcatggtcctctatgagcaagtcatcgagcaagtcaagcgtctcaacgagatacgtcatggcaagtccatcgaagagaatcgagtcgatagagttgtcgatagctgctttcagctcctgtccctcttcttcatgaccatcggaagaaacaacgaagcaccggctgcctatgctttgacctcgaccatcaagcgtctactagaccatctcagcgaagccaacttgttctctgccaaagacctcgacagcatgtcgcataccctcgaacgcctctccggcattatacagaatgcccctcccactgaatccgagcctttcctccaagacctgatccgaaaccggatcgagcgatgtcgcgcctcgttggcaaagctacagaaaaaggtagacgacatcgcagagccgctacgtcctacaactgagaagctcgtctccattctcagacagatggctgtagtcaacacaaagtccaagttctcgacggcggacattcacaaattcgaagcacagatcaacgaaattgccgagaaacgaaaggacggcaactttgtggacgacgaaggaaatgtcctcaagggcaacgacgatgtcaacgctctcatcgaacgatgcaagacgtacactggtatcatcctagagaaagaaggacgcattcctgacaaatggcggccgatttacgatgttctcttcggcattcgtaatgagcttgacaagctctcattgacacaagcatggtctctgcgcgagacagacttgtatgatttccagcgacagctcgacaagatcgacgagaaccgagtggacggcaattggttagacgagtctggtcaacctgctgagctctatgtccaaagaacactcctctatcttattcgacgatcatatgggtacatctatcatcttatgatctcctccgagccagtttcggaggcactactgccggtttataatcagctgcaaacactgaagcgctgtctagtggaagtgaaaaaaagcggtggtgtcggctcggttcgcgagctctatccatacagcatgaagctcaactccatcgacaatatgagagtagatggaaaattcatcgtcagtgatgatatacctgagggtcaaggaagcgtcacggaactgctttcggaatgttttgacttgaattacgagcttcgagtcgccgcagaagaagctgccgccgctgcctccggattgcgtccccctgagtga

SEQ ID NO: 31054 - protein, 448 aa, Muscodor strobelii
  misc_feature: SGI Peptide ID NO. 570688
  misc_feature (1)..(436): NCBI GI: 171694405 Blast Desc: protein product [Podospora anserina] gi|170947151|emb|CAP73956.1| protein product [Podospora anserina]
  misc_feature (1)..(432): NCBI GI: 164423764 Blast Desc: NCU08959 [Neurospora crassa OR74A] gi|157070225|gb|EAA31447.2| conserved [Neurospora crassa OR74A]
  misc_feature (9)..(436): NCBI GI: 116197661 Blast Desc: CHGG_06986 [Chaetomium globosum CBS 148.51] gi|88178265|gb|EAQ85733.1| CHGG_06986 [Chaetomium globosum CBS 148.51]
  misc_feature (1)..(437): NCBI GI: 46137703 Blast Desc: FG10367.1 [Gibberella zeae PH-1]
  misc_feature (1)..(443): NCBI GI: 256732261 Blast Desc: [Nectria haematococca mpVI 77-13-4]
  misc_feature (2)..(440): NCBI GI: 154316460 Blast Desc: BC1G_04161 [Botryotinia fuckeliana B05.10] gi|150845961|gb|EDN21154.1| BC1G_04161 [Botryotinia fuckeliana B05.10]
  misc_feature (2)..(435): NCBI GI: 156043247 Blast Desc: SS1G_10626 [Sclerotinia sclerotiorum 1980] gi|154695014|gb|EDN94752.1| SS1G_10626 [Sclerotinia sclerotiorum 1980]
  misc_feature (1)..(433): NCBI GI: 255935435 Blast Desc: Pc13g03060 [Penicillium chrysogenum Wisconsin 54-1255] gi|211583364|emb|CAP91375.1| Pc13g03060 [Penicillium chrysogenum Wisconsin 54-1255]
  misc_feature (45)..(438): NCBI GI: 145603228 Blast Desc: MGG_06186 [Magnaporthe grisea 70-15] gi|145011501|gb|EDJ96157.1| MGG_06186 [Magnaporthe grisea 70-15]
  misc_feature (1)..(433): NCBI GI: 115389218 Blast Desc: conserved [Aspergillus terreus NIH2624] gi|114194510|gb|EAU36210.1| conserved [Aspergillus terreus NIH2624]
  misc_feature: Useful for introducing or modulating the production of volatile compounds
METPKYPAPRDAGEKEVLSALVSLQDQLLLRKLDRTTYVRTQDVMVLYEQVIEQVKRLNEIRHGKSIEENRVDRVVDSCFQLLSLFFMTIGRNNEAPAAYALTSTIKRLLDHLSEANLFSAKDLDSMSHTLERLSGIIQNAPPTESEPFLQDLIRNRIERCRASLAKLQKKVDDIAEPLRPTTEKLVSILRQMAVVNTKSKFSTADIHKFEAQINEIAEKRKDGNFVDDEGNVLKGNDDVNALIERCKTYTGIILEKEGRIPDKWRPIYDVLFGIRNELDKLSLTQAWSLRETDLYDFQRQLDKIDENRVDGNWLDESGQPAELYVQRTLLYLIRRSYGYIYHLMISSEPVSEALLPVYNQLQTLKRCLVEVKKSGGVGSVRELYPYSMKLNSIDNMRVDGKFIVSDDIPEGQGSVTELLSECFDLNYELRVAAEEAAAAASGLRPPE

SEQ ID NO: 31055 - DNA, 2746 bp, Muscodor strobelii; identical to SEQ ID NO: 31052
  misc_feature: SGI EST ID NO. CUFF.73614.1
  misc_feature: Variant of the nucleotide sequence at SEQ ID NO 31053

SEQ ID NO: 31056 - DNA, 351 bp, Muscodor strobelii
  misc_feature: SGI cDNA ID NO. 570689
  misc_feature: Encodes the peptide sequence at SEQ ID NO 31057
atggcgccagtatcaaccccaccaccaggccagtacgagtggctcgtcatactccccgataagccaggcgcccatgagaagcggttggaagttcgcccaaaacatctggccggaacaacaacccacgtagaatctggaaaattcaaaaccggaggcgctttgctgaacgagaagcccgattctgacgacgccacaaagttctcattctacggtagcacgctcacattggtcgcctcatcccgcgaggaaattatcgagttactaagtcgcgatatttacgccacgagcggcgtatgggatatggataaggtacaaatctgggctctaaaagctgcgttccgaaatccctaa

SEQ ID NO: 31057 - protein, 116 aa, Muscodor strobelii
  misc_feature: SGI Peptide ID NO. 570689
  misc_feature (20)..(111): Pfam Id: PF03795 Pfam Desc: YCII-related domain
  misc_feature (20)..(99): Pfam Id: PF03795 Pfam Desc: YCII-related domain
  misc_feature (5)..(116): NCBI GI: 171694407 Blast Desc: protein product [Podospora anserina] gi|170947152|emb|CAP73957.1| protein product [Podospora anserina]
  misc_feature (9)..(116): NCBI GI: 145603226 Blast Desc: MGG_06187 [Magnaporthe grisea 70-15] gi|145011500|gb|EDJ96156.1| MGG_06187 [Magnaporthe grisea 70-15]
  misc_feature (6)..(114): NCBI GI: 46137701 Blast Desc: FG10366.1 [Gibberella zeae PH-1]
  misc_feature (13)..(116): NCBI GI: 85098864 Blast Desc: NCU08954 [Neurospora crassa OR74A] gi|28922193|gb|EAA31442.1| [Neurospora crassa OR74A] gi|28950155|emb|CAD71013.1| conserved [Neurospora crassa]
  misc_feature (4)..(104): NCBI GI: 116197663 Blast Desc: CHGG_06987 [Chaetomium globosum CBS 148.51] gi|88178266|gb|EAQ85734.1| CHGG_06987 [Chaetomium globosum CBS 148.51]
  misc_feature (11)..(114): NCBI GI: 156043251 Blast Desc: [Sclerotinia sclerotiorum 1980] gi|154695016|gb|EDN94754.1| [Sclerotinia sclerotiorum 1980]
  misc_feature (9)..(114): NCBI GI: 255949846 Blast Desc: Pc22g17810 [Penicillium chrysogenum Wisconsin 54-1255] gi|211592707|emb|CAP99069.1| Pc22g17810 [Penicillium chrysogenum Wisconsin 54-1255]
  misc_feature (5)..(103): NCBI GI: 261352083 Blast Desc: conserved [Verticillium albo-atrum VaMs.102]
  misc_feature (8)..(103): NCBI GI: 154316462 Blast Desc: [Botryotinia fuckeliana B05.10] gi|150845962|gb|EDN21155.1| [Botryotinia fuckeliana B05.10]
  misc_feature (6)..(114): NCBI GI: 154308285 Blast Desc: BC1G_07888 [Botryotinia fuckeliana B05.10] gi|150852973|gb|EDN28165.1| BC1G_07888 [Botryotinia fuckeliana B05.10]
MAPVSTPPPGQYEWLVILPDKPGAHEKRLEVRPKHLAGTTTHVESGKFKTGGALLNEKPDSDDATKFSFYGSTLTLVASSREEIIELLSRDIYATSGVWDMDKVQIWALKAAFRNP

SEQ ID NO: 31058 - DNA, 1409 bp, Muscodor strobelii
  misc_feature: SGI EST ID NO. CUFF.73615.2
  misc_feature: Variant of the nucleotide sequence at SEQ ID NO 31056
gcaccaggttgcaccgaccccggactacacccgttctacgtgcaaaccgccgatttccccaacctactaactgttcagctcgagacgggacacaatcacacatcggcatctagtgaccagtgatctcacgcacgtcaccttaagctatcctataaacctgccctcccccattccgtagtacctatcgtaagaaatggcaacccgccgtatttccctcctatcctcacatctcaaactacaccgcctcaccctagttccaagaccctccgtcctttcatcactccaagctccaagaacgagtaccggtatatccaagctccaaatggcgccagtatcaaccccaccaccaggccagtacgagtggctcgtcatactccccgataagccaggcgcccatgagaagcggttggaagttcgcccaaaacatctggccggaacaacaacccacgtagaatctggaaaattcaaaaccggaggcgctttgctgaacgagaagcccgattctgacgacgccacaaagttctcattctacggtagcacgctcacattggtcgcctcatcccgcgaggaaattatcgagttactaagtcgcgatatttacgccacgagcggcgtatgggatatggataaggtaagctctcatacttagtctctgctctggtgctatcgatgttgcgatctctcttcctaattatttcccttcttcttcttcgccaaaaccgctcacttccgggcaactccacgtcccttcacccgaatcattgctgacgttgagctaataggtacaaatctgggctgtaagtttgaatctcctgattgccccaccatgattgtgacctcctgactgactcgttatgacctacagctaaaagctgcgttccgaaatccctaaatcggggtaactttggggaaagaagaaggtatctacaggtagcgctatccgatagctcatgtagtcaaataagatatggccacaaggcttaccaggcgtcctcattgctggcgccaagcaatcaacctcaccgagaattattcgtaccaacgccgtgatcagatgcgggccaatatccgttatgatatgctgaatccatttaggagatcccacgacagcgaggacgttagtcatataggtctttcgcgcaattacaagcaatcgtatacatattcacccttctgatgtttgggtgaaggtgtgacagtcttcaatatcgcaagtgtatatgaagttgttcactcagggggacgcaatccggaggcagcggcggcagcttcttctgcggcgactcgaagctcgtaattcaagtcaaaacattccgaaagcagttccgtgacgcttccttgaccctcaggtatatcatcactgacgatgaattttccatctactctcatattgtcgatggagttgagct

SEQ ID NO: 31059 - DNA, 1536 bp, Muscodor strobelii
  misc_feature: SGI cDNA ID NO. 570690
  misc_feature: Reduced expression when VOC is produced
  misc_feature: Encodes the peptide sequence at SEQ ID NO 31060
atggcggcagatccgcctcctcccccacgacccggtggactgtcgctctatgccaacctcctcgaacccgacagcaatgccccggcgtccatctcgcgggcccctgttgtgtcgcaggccgccatagatgccgcaaaggaacaggaggctgcgaaaaaggctgctgactcggccttacgcttccaacctcttcagcagatacgacgtcctcagcagaagtcccagaagcccaaagcgtttcccaaagtcccaccaccaggcacgagcaatggcgcaaacactaccggctccgcagctgctcctccgcctccgtcgaatccgccggccaagagttcactcgcagattgggcggccaccgaagacgacgagtacatgtacggcacgggcgagaagagagcacgcggcggccgcaggaagaagaagaagaagcaagaggctgcgcccatcgagacagactgggacgagatatacgaccccgcccgcccgacaaacgtagacgagtatcttaggagcgatgagcgcatacgtgaggtgcacgagtggaaggccatcctctacaggcacaggaggcgcgagcgcgagaaggacagctgggacagcgacgaagacgacgacgacgacggtcctagagggaccaacaaccaatttgcgcctccgccatcatactccttcgctcctccgccgccctcgccgccccgcgccgatctccccgacgataagaccggcgacgatgcatacgcacgacgaatggccatgtctcagggccaagcacctccgccacctcgctctgcctctcctcccccgccgccaccgcctcctcctcctcctcccgagcccgattctgcgacgatcatccgcgagcccgtccgctatgcgccaccccaaccacctccacagtccgagagcgagaaaatggacattgacgaagacgacacgggcgtacaatatgtcccgccagaagtagccacagaagattccgagtccggtccacgcgagaacagaccaggcaagaaaggcttcgcaaagcgcctcatggccaagtacggctgggccaagggtcaaggcctaggcgcgcagggcacaggtatagtccagcccatacgcgtcgaggtcgagaagcgaaagaagaaagccgacgcagacggcggcgggtgggccacgccaggcggtatgggcaagatcatcggcgccaagaatgccgcgggcgcatcttcatctaccacggagagtgctggcaagttcggcgcgatgagcaatgtcatcgtgctgcggggtatgctcagtgatatggaggatttacagaccgagatggagaatggtctgggccaagagattggagaggaatgtggtgataagtatggcagggttgagagactatatatcgatgttgaggggaagaatgtatacatcaagtttacggactcggtttccgctttgagggcagtgaacgccctcgatggccgcatctttgccggaaacgcaatcgcgcctcagtactacgatgcagagaagtttgagcagaggatctatgagtaa

SEQ ID NO: 31060 - protein, 511 aa, Muscodor strobelii
  misc_feature: SGI Peptide ID NO. 570690
  misc_feature (337)..(381): Pfam Id: PF01585 Pfam Desc: G-patch domain
  misc_feature (1)..(511): NCBI GI: 256732192 Blast Desc: NECHADRAFT_41503 [Nectria haematococca mpVI 77-13-4]
  misc_feature (1)..(510): NCBI GI: 46137145 Blast Desc: FG10088.1 [Gibberella zeae PH-1]
  misc_feature (14)..(511): NCBI GI: 145603224 Blast Desc: MGG_06188 [Magnaporthe grisea 70-15] gi|145011499|gb|EDJ96155.1| MGG_06188 [Magnaporthe grisea 70-15]
  misc_feature (7)..(511): NCBI GI: 28950144 Blast Desc: related to DNA-damage repair protein DRT111 precursor [Neurospora crassa]
  misc_feature (7)..(506): NCBI GI: 85099552 Blast Desc: NCU08942 [Neurospora crassa OR74A] gi|28922334|gb|EAA31573.1| conserved [Neurospora crassa OR74A]
  misc_feature (8)..(511): NCBI GI: 242766189 Blast Desc: G-patch DNA repair protein (Drt111), [Talaromyces stipitatus ATCC 10500] gi|218724319|gb|EED23736.1| G-patch DNA repair protein (Drt111), [Talaromyces stipitatus ATCC 10500]
  misc_feature (1)..(511): NCBI GI: 240107948 Blast Desc: G-patch domain containing protein [Coccidioides posadasii C735 delta SOWgp]
  misc_feature (12)..(510): NCBI GI: 261352073 Blast Desc: conserved [Verticillium albo-atrum VaMs.102]
  misc_feature (1)..(511): NCBI GI: 119188143 Blast Desc: CIMG_04119 [Coccidioides immitis RS]
  misc_feature (5)..(511): NCBI GI: 212528524 Blast Desc: G-patch DNA repair protein (Drt111), [Penicillium marneffei ATCC 18224] gi|210073817|gb|EEA27904.1| G-patch DNA repair protein (Drt111), [Penicillium marneffei ATCC 18224]
  misc_feature: Useful for introducing or modulating the production of volatile compounds
MAADPPPPPRPGGLSLYANLLEPDSNAPASISRAPVVSQAAIDAAKEQEAAKKAADSALRFQPLQQIRRPQQKSQKPKAFPKVPPPGTSNGANTTGSAAAPPPPSNPPAKSSLADWAATEDDEYMYGTGEKRARGGRRKKKKKQEAAPIETDWDEIYDPARPTNVDEYLRSDERIREVHEWKAILYRHRRREREKDSWDSDEDDDDDGPRGTNNQFAPPPSYSFAPPPPSPPRADLPDDKTGDDAYARRMAMSQGQAPPPPRSASPPPPPPPPPPPPEPDSATIIREPVRYAPPQPPPQSESEKMDIDEDDTGVQYVPPEVATEDSESGPRENRPGKKGFAKRLMAKYGWAKGQGLGAQGTGIVQPIRVEVEKRKKKADADGGGWATPGGMGKIIGAKNAAGASSSTTESAGKFGAMSNVIVLRGMLSDMEDLQTEMENGLGQEIGEECGDKYGRVERLYIDVEGKNVYIKFTDSVSALRAVNALDGRIFAGNAIAPQYYDAEKFEQRIYE

SEQ ID NO: 31061 - DNA, 2228 bp, Muscodor strobelii
  misc_feature: SGI EST ID NO. CUFF.73573.1
  misc_feature: Variant of the nucleotide sequence at SEQ ID NO 31059
cagtgatattagtggcatggaaacagcctagaacccctgtagcgccgggaagcttcgagctgtggatgcaagctggaagccagcgagtcgatcaattagactctcgtcgtgttttcgacgtcgcattgcagcagcatagattcagcctcttattccccattcccacctatctactactttcccttcaattatgattacagcacgctgtacatgccacactccttaatcaaaccaggacttcctcatccgcccaacagaggacaaggaaccgacccaaagcagacatccatggcggcagatccgcctcctcccccacgacccggtggactgtcgctctatgccaacctcctcgaacccgacagcaatgccccggcgtccatctcgcgggcccctgttgtgtcgcaggccgccatagatgccgcaaaggaacaggaggctgcgaaaaaggctgctgactcggccttacgcttccaacctcttcagcagatacgacgtcctcagcagaagtcccagaagcccaaagcgtttcccaaagtcccaccaccaggcacgagcaatggcgcaaacactaccggctccgcagctgctcctccgcctccgtcgaatccgccggccaagagttcactcgcagattgggcggccaccgaagacgacgagtacatgtacggcacgggcgagaagagagcacgcggcggccgcaggaagaagaagaagaagcaagaggctgcgcccatcgagacagactgggacgagatatacgaccccgcccgcccgacaaacgtagacgagtatcttaggagcgatgagcgcatacgtgaggtgcacgagtggaaggccatcctctacaggcacaggaggcgcgagcgcgagaaggacagctgggacagcgacgaagacgacgacgacgacggtcctagagggaccaacaaccaatttgcgcctccgccatcatactccttcgctcctccgccgccctcgccgccccgcgccgatctccccgacgataagaccggcgacgatgcatacgcacgacgaatggccatgtctcagggccaagcacctccgccacctcgctctgcctctcctcccccgccgccaccgcctcctcctcctcctcccgagcccgattctgcgacgatcatccgcgagcccgtccgctatgcgccaccccaaccacctccacagtccgagagcgagaaaatggacattgacgaagacgacacgggcgtacaatatgtcccgccagaagtagccacagaagattccgagtccggtccacgcgagaacagaccaggcaagaaaggcttcgcaaagcgcctcatggccaagtacggctgggccaagggtcaaggcctaggcgcgcagggcacaggtatagtccagcccatacgcgtcgaggtcgagaagcgaaagaagaaagccgacgcagacggcggcgggtgggccacgccaggcggtatgggcaagatcatcggcgccaagaatgccgcgggcgcatcttcatctaccacggagagtgctggcaagttcggcgcgatgagcaatgtcatcgtgctgcggggtatgctcagtgatatggaggatttacagaccgagatggagaatggtctgggccaagagattggagaggaatgtggtgataagtatggcagggttgagagactatatatcgatgttgaggggaagaatgtatacatcaagtttacggactcggtttccgctttgagggcagtgaacgccctcgatggccgcatctttgccggaaacgcaatcgcgcctcagtactacgatgcagagaagtttgagcagaggatctatgagtaatgacagggcacaagatgctcgtggcaggctaaaagaagcccgctgatgcattcagggatagatatacatacacacagagactactcaaatgataccctatccatcctgaccatatcttttaccacgataccagaggaaaatgcatccgacccatctgtgacattggatacacttgctcagtacatcgcacttggtagaagacacaacataatcaggtagcatagcataagcgatcatacaccaatgatagatgtcgtcttaccttgttgcactgacaatgtaccatacaaatgctgctaccaaagtgccttgcgtcgagttcacaacatgagcaaggtagaagtgccgtgagagacagtgcagtccatcgcaaacacggctgctgtggaatcttcctgtgctcc

SEQ ID NO: 31062 - DNA, 1215 bp, Muscodor strobelii
  misc_feature: SGI cDNA ID NO. 570691
  misc_feature: Encodes the peptide sequence at SEQ ID NO 31063
atgtacagccgtgagctcttctctgccgtcgtggccctcggcctcgtgtctggtgccgccgcacttggctgcagcgacgatcccgtcaccgtccagacccctggggatatcacagccgccgctggctgcacaactatcaagcacgatctcgtcatcgaggacggagctggtactactgtcgacctgagtggcgatctgaccgagatccagggtgacttgatcatcaagaacaacagtgccatccagacgctctccagcagctccatagagacaattggcggcatgttcgacttggaggaattgaagtcgttggctggtatctccttcactgctctgaatgaagtccagtcgatccagtggcttcaccttggaaacctcggctcggctgatttcggcaccaagggcattcagaaggctgagtcggtttggatctccgacactcgcattcccttgatcgagggtatcaacgtcgactcattgaccgacctcaagattgacaacaacttgcgtctgactcagttcacttccagcatcaaatctctcagcaacgttatgaacatcaactccaacggcctcaacttgagcatgacgctgcccaatcttgtctgggccgccaacttgaccattgccaacgtctcctcattctcttcgccctctctcgagaccatcaacggctctctgtacttcgatttcagctacttcgagaagttcgaggttgccaacctgacccagatcaaggacggtgccctgtccttcatcggctgcccctacgtccagaacatctctttccctgtgctcaagacgattggcggcggtttcaccattgccaacaacaccgatctccagaagctggacggctttggcaagctcgccgatatcggtggtgccatcattgttcgtggatctttcgatgagatcgacctgccttcgctcaacaatgttgtcggtgctgccgtcttcgtcagtgacggtgatattcaggactcttgtgacactctcaacggcctcggcaccagcgtcatccagggtggtatcacctcgtgcaagagcaacgactctcttgccaacaacagcactggcagctctactgacggcagctccggctctgatagcagcggtggcgacggtactggtgccgccggcttcaccagcgccagcatgaccaccgtgttcaccctcgctgctctggccggtgtcttcgccgccttcttgtaa

SEQ ID NO: 31063 - protein, 404 aa, Muscodor strobelii
  misc_feature: SGI Peptide ID NO. 570691
  misc_feature (1)..(403): NCBI GI: 171694387 Blast Desc: protein product [Podospora anserina] gi|170947142|emb|CAP73947.1| protein product [Podospora anserina]
  misc_feature (1)..(403): NCBI GI: 116197675 Blast Desc: CHGG_06993 [Chaetomium globosum CBS 148.51] gi|88178272|gb|EAQ85740.1| CHGG_06993 [Chaetomium globosum CBS 148.51]
  misc_feature (24)..(404): NCBI GI: 39975769 Blast Desc: conserved [Magnaporthe grisea 70-15] gi|59802883|gb|AAX07654.1| ECM33 protein-like protein [Magnaporthe grisea] gi|145011498|gb|EDJ96154.1| conserved grisea
  misc_feature (1)..(359): NCBI GI: 85099527 Blast Desc: , variant [Neurospora crassa OR74A] gi|164423746|ref|XP_001728082.1| NCU08936 [Neurospora crassa OR74A] gi|28922328|gb|EAA31567.1| , variant [Neurospora crassa to
  misc_feature (1)..(358): NCBI GI: 261352074 Blast Desc: ecm33 [Verticillium albo-atrum VaMs.102]
  misc_feature (1)..(316): NCBI GI: 154300984 Blast Desc: BC1G_10630 [Botryotinia fuckeliana B05.10] gi|150856378|gb|EDN31570.1| BC1G_10630 [Botryotinia fuckeliana B05.10]
  misc_feature (1)..(316): NCBI GI: 156043139 Blast Desc: SS1G_10572 [Sclerotinia sclerotiorum 1980] gi|154694960|gb|EDN94698.1| SS1G_10572 [Sclerotinia sclerotiorum 1980]
  misc_feature (1)..(387): NCBI GI: 46137147 Blast Desc: FG10089.1 [Gibberella zeae PH-1]
  misc_feature (9)..(384): NCBI GI: 169604612 Blast Desc: SNOG_05320 [Phaeosphaeria nodorum SN15] gi|160706607|gb|EAT87711.2| SNOG_05320 [Phaeosphaeria nodorum SN15]
  misc_feature (1)..(373): NCBI GI: 225032622 Blast Desc: ECM33 [Metarhizium anisopliae]
MYSRELFSAVVALGLVSGAAALGCSDDPVTVQTPGDITAAAGCTTIKHDLVIEDGAGTTVDLSGDLTEIQGDLIIKNNSAIQTLSSSSIETIGGMFDLEELKSLAGISFTALNEVQSIQWLHLGNLGSADFGTKGIQKAESVWISDTRIPLIEGINVDSLTDLKIDNNLRLTQFTSSIKSLSNVMNINSNGLNLSMTLPNLVWAANLTIANVSSFSSPSLETINGSLYFDFSYFEKFEVANLTQIKDGALSFIGCPYVQNISFPVLKTIGGGFTIANNTDLQKLDGFGKLADIGGAIIVRGSFDEIDLPSLNNVVGAAVFVSDGDIQDSCDTLNGLGTSVIQGGITSCKSNDSLANNSTGSSTDGSSGSDSSGGDGTGAAGFTSASMTTVFTLAALAGVFAAFL

SEQ ID NO: 31064 - DNA, 1303 bp, Muscodor strobelii
  misc_feature: SGI EST ID NO. CUFF.74097.1
  misc_feature: Variant of the nucleotide sequence at SEQ ID NO 31062
ttctggtccttgtctcgcatgactttccctctctcccttctctcttctccttcccgtatcccaagtccataacctctttttcagcttcttgcagttcggattcattcgtttgtccatattttctgagtatcagaggaagagcgttcgctagtcacttcctcccccctttaattccaaacaaagacctcacatcgcgtcgcgacctcctccccaagccgacccggtaatcccgcccacgcaacatcacccttccgatcagccagcttcacgtcaccgctgcgatccgacgcgtcgagtccgatatttacgacttgaactgacaagatatccatttgtgtaacgatcgagtagtcatcatgtacagccgtgagctcttctctgccgtcgtggccctcggcctcgtgtctggtgccgccgcacttggctgcagcgacgatcccgtcaccgtccagacccctggggatatcacagccgccgctggctgcacaactatcaagcacgatctcgtcatcgaggacggagctggtactactgtcgacctgagtggcgatctgaccgagatccagggtgacttgatcatcaagaacaacagtgccatccagacgctctccagcagctccatagagacaattggcggcatgttcgacttggaggaattgaagtcgttggctggtatctccttcactgctctgaatgaagtccagtcgatccagtggcttcaccttggaaacctcggctcggctgatttcggcaccaagggcattcagaaggctgagtcggtttggatctccgacactcgcattcccttgatcgagggtatcaacgtcgactcattgaccgacctcaagattgacaacaacttgcgtctgactcagttcacttccagcatcaaatctctcagcaacgttatgaacatcaactccaacggcctcaacttgagcatgacgctgcccaatcttgtctgggccgccaacttgaccattgccaacgtctcctcattctcttcgccctctctcgagaccatcaacggctctctgtacttcgatttcagctacttcgagaagttcgaggttgccaacctgacccagatcaaggacggtgccctgtccttcatcggctgcccctacgtccagaacatctctttccctgtgctcaagacgattggcggcggtttcaccattgccaacaacaccgatctccagaagctggacggctttggcaagctcgccgatatcggtggtgccatcattgttcgtggatctttcgatgagatcgacctgccttcgctcaacaatgttgtcgg

SEQ ID NO: 31065 - DNA, 1752 bp, Muscodor strobelii
  misc_feature: SGI cDNA ID NO. 570692
  misc_feature: Reduced expression when VOC is produced
  misc_feature: Encodes the peptide sequence at SEQ ID NO 31066
atgacaacgctgatcaaaatgctcgcccacgtcgctactggcctcatactcgggagcttagtcaccgctcaagcgacatctctctcggaactctgcacttcctcctatgcctcctccgcacttccaacggaagaccttggcttaggaataacgatcaacagcgattccgtgaccacatctctcacgacaaaccaaactgttacctctcagtggtttccgcgtagtgtcgtctcatactgcaacgtcacgttcgcatactctcacaatggacttataaacgacctcgtgcatgtcacatacctcgtcccagacccctcgctattcagcaaccggtacgtgtcaaccggcggaggtggtctggctataaattccggtatctcctttgcggctacagggctcatagcaggagctgtgagcggaatgacagacggcggctttggatcattcagcacacagtatgacgcagtctcgctcttggcgccgggagtgctgaattatcaagagctgtatatgttcggttacctcgctcaccacgagctcgcggtcctaggcaaagcgttcaccgcgaatttgttcagcgttgcgtcgtctgataagatatacagctattaccaagggtgctccgaagggggtcgcgaaggctggtcacaagctcagcgcttcgctgatcaattcgatggtctcgtgactggggcgccggcattccgcttcggacagttgcaggtgaatcacttgagcggcggcgtcatcgagaagcaactaggctacatcccgcccacgtgcgagctagaaaagatccggaacttgactattgctgcgtgtgacggtttggacggcaaattagacggagtcgtcgcacggtcggacctttgtaagctacatttcagctacaattcgacgatcggcacgccgtactcatgcgccgcgaggtctggtggtggttccggtggtcctccaggcggtgggagcacaacacctgctcagaatggcacaattaccgcgcagggagttgcagtcgcgcaagcattcaccgacggcttgatcgattcgcgtgggaaacaagtctatctcaacccgcagccgagttcaaatttcgccgacgcccaagcgacgtacaatagcatgacggggacatggcagccgcctatttcaagccttggcggcgaatgggtcgtacgatggctcaaattgcaagatgctaagaatctagccagcctcgaaaatgtgacagtcgatacattacgcgactggatgaacctgggcatgcagaagtactacgactccttgcagacaacatggccagacctgagctatttcagcgccgcaggtagcaagattctccacgtgcacggcgaggcagatagttcgattcctgccgggtcgagtgtccactactatcaagccgtacaggacgcgatgttcggtgacctaagccgtgatgatggaacggcggctatggatgacttctatcgactgttcatcgtgcccggaggcgagcactgcggaagtaactctgcacagccaaacggtggctggccggcgacaaccttgcagaccgtcatcgagtgggttgagaatggcgtggcgcctgctacgttgaataatacgggcactggtatcgggagtctttgtcggtggccattgagacctctatggtctgggaatggcacaagcctggattgtgtttatgatcaggcctcggttgatgcttggacatggaaattcgatgcatttgacttcccagtttattag

SEQ ID NO: 31066 - protein, 583 aa, Muscodor strobelii
  misc_feature: SGI Peptide ID NO. 570692
  misc_feature (80)..(569): Pfam Id: PF07519 Pfam Desc: Tannase and feruloyl esterase
  misc_feature (15)..(583): NCBI GI: 256724880 Blast Desc: NECHADRAFT_91463 [Nectria haematococca mpVI 77-13-4]
  misc_feature (9)..(583): NCBI GI: 154319069 Blast Desc: BC1G_02486 [Botryotinia fuckeliana B05.10] gi|150856917|gb|EDN32109.1| BC1G_02486 [Botryotinia fuckeliana B05.10]
  misc_feature (10)..(583): NCBI GI: 145231382 Blast Desc: An02g00350 [Aspergillus niger] gi|134056075|emb|CAK96250.1| protein product [Aspergillus niger]
  misc_feature (18)..(583): NCBI GI: 154321481 Blast Desc: BC1G_01615 [Botryotinia fuckeliana B05.10] gi|150852153|gb|EDN27345.1| BC1G_01615 [Botryotinia fuckeliana B05.10]
  misc_feature (1)..(583): NCBI GI: 145253599 Blast Desc: An17g00830 [Aspergillus niger] gi|134083880|emb|CAK43011.1| protein product [Aspergillus niger]
  misc_feature (1)..(583): NCBI GI: 238490238 Blast Desc: tannase, [Aspergillus flavus NRRL3357] gi|220696769|gb|EED53110.1| tannase, [Aspergillus flavus NRRL3357]
  misc_feature (23)..(583): NCBI GI: 70986699 Blast Desc: tannase [Aspergillus fumigatus Af293] gi|66846469|gb|EAL86801.1| tannase, [Aspergillus fumigatus Af293] gi|159123393|gb|EDP48513.1| tannase, [Aspergillus fumigatus
  misc_feature (19)..(583): NCBI GI: 119483188 Blast Desc: tannase and feruloyl esterase family protein [Neosartorya fischeri NRRL 181] gi|119409777|gb|EAW19725.1| tannase and feruloyl esterase family protein [Neosartorya NRRL
  misc_feature (1)..(583): NCBI GI: 169772335 Blast Desc: [Aspergillus oryzae RIB40] gi|83768497|dbj|BAE58634.1| protein product [Aspergillus oryzae]
  misc_feature (6)..(583): NCBI GI: 145240885 Blast Desc: An08g09800 [Aspergillus niger] gi|134077613|emb|CAK96757.1| protein product [Aspergillus niger]
  misc_feature (27)..(583): SWISSPROT Homolog: EC 3.1.1.20 Tannase
  misc_feature: Useful for introducing or modulating the production of volatile compounds
MTTLIKMLAHVATGLILGSLVTAQATSLSELCTSSYASSALPTEDLGLGITINSDSVTTSLTTNQTVTSQWFPRSVVSYCNVTFAYSHNGLINDLVHVTYLVPDPSLFSNRYVSTGGGGLAINSGISFAATGLIAGAVSGMTDGGFGSFSTQYDAVSLLAPGVLNYQELYMFGYLAHHELAVLGKAFTANLFSVASSDKIYSYYQGCSEGGREGWSQAQRFADQFDGLVTGAPAFRFGQLQVNHLSGGVIEKQLGYIPPTCELEKIRNLTIAACDGLDGKLDGVVARSDLCKLHFSYNSTIGTPYSCAARSGGGSGGPPGGGSTTPAQNGTITAQGVAVAQAFTDGLIDSRGKQVYLNPQPSSNFADAQATYNSMTGTWQPPISSLGGEWVVRWLKLQDAKNLASLENVTVDTLRDWMNLGMQKYYDSLQTTWPDLSYFSAAGSKILHVHGEADSSIPAGSSVHYYQAVQDAMFGDLSRDDGTAAMDDFYRLFIVPGGEHCGSNSAQPNGGWPATTLQTVIEWVENGVAPATLNNTGTGIGSLCRWPLRPLWSGNGTSLDCVYDQASVDAWTWKFDAFDFPVY

SEQ ID NO: 31067 - DNA, 3788 bp, Muscodor strobelii
  misc_feature: SGI EST ID NO. CUFF.73541.0
  misc_feature: Variant of the nucleotide sequence at SEQ ID NO 31065
ccatagctgcgactaaaagtattgtgtcacattcattaaggcggaatacgcgttttagatgtgatttacaaagaaataaagttagactgtacgggatattttgccatcagcttcccatgctttcaagcaaacttctctcatctacatgattgccattcttgcactgacaagcctcagtcacttaatatactcccgcagtatccatttatcgttctcatttcgttgaaagcaaacactgccaatgctataaatcaccttgaatcacatgaacgctcttcttcccagttcaggcgagaccacaatggtaggatcgaaatcataatgacaacttaatttgcagcatgcgacacattggtgtatctccgaattcccccttcttcaaacacctcgtagtccggacgcagaaaaacttccgtttctcaagctcttacccaattcgaacgctaattcctgacatctcaacctacacggcgaagcgaactcgtcatcacatacagacatttccagtgaggcagaatgttgtcccggcaagtatgcagacccctgctttaacacgcacaagagccggtgctgtggggagagatcagcagctaacagcctcaattactctcgctactcaagaaaacgcgcctcaatacaacggtgctcctgcctggaccctcaggttttctgctaatatcatactccccgcagtgctacatcagaagcgcagaacagaaaggggaggtagagcgggcagtagcgtcgctttcttaatatatttcctactcaaatcatactctctccgggcgtaagtccggcccaattaaacagacacgtaacgagacccgtttatacatgggagcttcgccggtgagaatggatcaaacatacgcgtacacactaggtaattataggtgtctctatagctaggaagacatatataagaacatatgcataaactactaatcctttcatgccgtccatcgtgcgtcttagcatgacaacgctgatcaaaatgctcgcccacgtcgctactggcctcatactcgggagcttagtcaccgctcaagcgacatctctctcggaactctgcacttcctcctatgcctcctccgcacttccaacggaagaccttggcttaggaataacgatcaacagcgattccgtgaccacatctctcacgacaaaccaaactgttacctctcagtggtttccgcgtagtgtcgtctcatactgcaacgtcacgttcgcatactctcacaatggacttataaacgacctcgtgcatgtcacatacctcgtcccagacccctcgctattcagcaaccggtacgtgtcaaccggcggaggtggtctggctataaattccggtatctcctttgcggctacagggctcatagcaggagctgtgagcggaatgacagacggcggctttggatcattcagcacacagtatgacgcagtctcgctcttggcgccgggagtgctgaattatcaagagctgtatatgttcggttacctcgctcaccacgagctcgcggtcctaggcaaagcgttcaccgcgaatttgttcagcgttgcgtcgtctgataagatatacagctattaccaagggtgctccgaagggggtcgcgaaggctggtcacaagctcagcgcttcgctgatcaattcgatggtctcgtgactggggcgccggcattccgcttcggacagttgcaggtgaatcacttgagcggcggcgtcatcgagaagcaactaggctacatcccgcccacgtgcgagctagaaaagatccggaacttgactattgctgcgtgtgacggtttggacggcaaattagacggagtcgtcgcacggtcggacctttgtaagctacatttcagctacaattcgacgatcggcacgccgtactcatgcgccgcgaggtctggtggtggttccggtggtcctccaggcggtgggagcacaacacctgctcagaatggcacaattaccgcgcagggagttgcagtcgcgcaagcattcaccgacggcttgatcgattcgcgtgggaaacaagtctatctcaacccgcagccgagttcaaatttcgccgacgcccaagcgacgtacaatagcatgacggggacatggcagccgcctatttcaagccttggcggcgaatgggtcgtacgatggctcaaattgcaagatgctaagaatctagccagcctcgaaaatgtgacagtcgatacattacgcgactggatgaacctgggcatgcagaagtactacgactccttgcagacaacatggccagacctgagctatttcagcgccgcaggtagcaagattctccacgtgcacggcgaggcagatagttcgattcctgccgggtcgagtgtccactactatcaagccgtacaggacgcgatgttcggtgacctaagccgtgatgatggaacggcggctatggatgacttctatcgactgttcatcgtgcccggaggcgagcactgcggaagtaactctgcacagccaaacggtggctggccggcgacaaccttgcagaccgtcatcgagtgggttgagaatggcgtggcgcctgctacgttgaataatacgggcactggtatcgggagtctttgtcggtggccattgagacctctatggtctgggaatggcacaagcctggattgtgtttatgatcaggcctcggttgatgcttggacatggaaattcgatgcatttgacttcccagtttattaggtacgtcgaagagttacatgcaagcgaaacatgcaaattcgagatctgcgtatgtcaattcctcacaatgcaacagtaagaattgtactcacttgggattcaaacgtgaaataaacatagccgaaagctcattgagcccagagccaaagtatgaaggcagtatacagacttgtctgcaccgccagctcatcgtcttaaagtgcattgccgttatctatcatcttaagaggcggctacagtacgggccgaggccagccagtagatatttggcatcatgtcgatgctgcagcatcgtcaatgatagatttggtccacgcctattcataataggcggatatacatctgcttgtcagtaattgacggtttccaaaccacatgaaaccaatagccggttcgcggaatatatcataataacactgtcagcttgtgatccaaaatcggcagtcatcggaggtttctgatctgcatgtttgagatgtcaatcatgatgcaacttcaatcaaaacgaatcaggaggtcaggggtgttctcgaggatttccccgatattcatctggtcatgttgtgtttacccagcatacattgtttgagacaggatgttgatgttgcaggtttcaaacagccggaatgagccacagatctgttatgacgtaagcaataatagcagatgggatactttcagacgccagtctagagagagccacatggtcatgggacggaaagtatctgctatgtaatagcttcttctatgtaggtccttatgcaagtggggagtggtgatgaaaaaaggcatttggagcatgcagctttttctcgtgttatcgcagttccgggtttgccattcgctcctcagatcacggacacacgcgtgcgtcagcaatggcgcaagctaactagcacaaagcaggtcaatgtgccagcaatgcaaagaatgcgtccaaaggtctttcaaggggacgccgccattagagacaaacaagcgtcgtcctgttgatatacagacagaaacatttatcaacgctttcagcctcttgtcagggggcttgagattgagtttg

SEQ ID NO: 31068 - DNA, 459 bp, Muscodor strobelii
  misc_feature: SGI cDNA ID NO. 570693
  misc_feature: Encodes the peptide sequence at SEQ ID NO 31069
atgcagtttctcacgacgctcgtggctgcccttgctgcaccatgcacttacgtcattgctttgccccgggcaggaaccggtcgagttaactctttcgaggcaacatgcacacattggagactcgcccaacaaggatctaatgcttggctttcagcttattgcagggacgagagcggtgctcagtgggattccgttttgaacctgaaccattgtatcgtcaacaacttcggtagcatggttgccggctctgatggcaacttcgctcatggctgtgataacctttacctccaagtagacactacccttagcggtcgctgcgacaacgcacagggatatgttgacactgagatccgacttggcgatttcattggcaataagaacggccaactcgcttgttacgattttgtaggttgtgcgaggctcagcaacggttgtgatgacaagccacataagagttga

SEQ ID NO: 31069 - protein, 152 aa, Muscodor strobelii
  misc_feature: SGI Peptide ID NO. 570693
  misc_feature (31)..(132): Pfam Id: PF08881 Pfam Desc: CVNH domain
  misc_feature (1)..(137): NCBI GI: 240106706 Blast Desc: CPC735_014910 [Coccidioides posadasii C735 delta SOWgp]
  misc_feature (32)..(133): NCBI GI: 46138215 Blast Desc: FG10622.1 [Gibberella zeae PH-1]
  misc_feature (1)..(137): NCBI GI: 119174132 Blast Desc: [Coccidioides immitis RS]
  misc_feature (22)..(137): NCBI GI: 145611548 Blast Desc: [Magnaporthe grisea 70-15] gi|145018814|gb|EDK03093.1| [Magnaporthe grisea 70-15]
  misc_feature (49)..(137): NCBI GI: 171687967 Blast Desc: protein product [Podospora anserina] gi|170943945|emb|CAP69597.1| protein product [Podospora anserina]
  misc_feature (19)..(132): NCBI GI: 255953119 Blast Desc: Pc21g02480 [Penicillium chrysogenum Wisconsin 54-1255] gi|211589023|emb|CAP95145.1| Pc21g02480 [Penicillium chrysogenum Wisconsin 54-1255]
MQFLTTLVAALAAPCTYVIALPRAGTGRVNSFEATCTHWRLAQQGSNAWLSAYCRDESGAQWDSVLNLNHCIVNNFGSMVAGSDGNFAHGCDNLYLQVDTTLSGRCDNAQGYVDTEIRLGDFIGNKNGQLACYDFVGCARLSNGCDDKPHKS

SEQ ID NO: 31070 - DNA, 1053 bp, Muscodor strobelii
  misc_feature: SGI cDNA ID NO. 570694
  misc_feature: Encodes the peptide sequence at SEQ ID NO 31071
atggcgcaggaaacagtgcttataaccggcgcaaacgggtatttggcacttcatgtcattcaaaaggctctaatcagggggtggaacgttgttggtactgtacgatctgaacgagccgcatcaacagtccgagcaattttcgccgatgcgggtcccagcttaagtttagtccatatcagcaacctcactcacgctgatgcatataaaagggcctacgagagtatgccaatcaccgcagtcatcaatgtcgcatctccattgttacacagccccaaggaccaaaagactgaggtcgtggatcctgctatcaacggcgcactggctgtcctcacagccgctgaaaaatatggtggtccaatggtgaagcgcgtggtccatgtgggcagcttcacttcatccatgaacccccagctaggagaatcacctggagttagatacggaccggacacgtggaaccccatcacgtacgaaggcgcaattagagggggcgatcgggaaggatatatgggctccaaggtgctagctgaacgtgccatgtgggagttcatgaaaaaggatcgagcatctccgctgacattcgaccttgtgaccgtattacccgctgcaatcttcgggccgcagcttgcaaccgtcgatatcggcaatttaaacctcagcagtcggatgctctgggagctgcccgcgcccagtgacagcccacccgtgtataactcataccatcttggcgcgtgggttgacgtccgcgatgctgcacttgccatgatcctggctattgctacacccgaggcaggtggcgagcggtttgtggcagcgcaacgcacacattggcagctcgtgcgggatgcagctcgctctctcaacgcagagctcgcggagcgaattgatccagggaaaccaggcagcgcagaagcggccaaagatacaacttatgatgttgatggaactaagctcgagcgcattcttcgcatgaggtatactgagctgctggtaacgatgcaggattcctacggacagctgttagaagcagaacatagtcgcgtaacaagatcataa

SEQ ID NO: 31071 - protein, 350 aa, Muscodor strobelii
  misc_feature: SGI Peptide ID NO. 570694
  misc_feature (6)..(271): Pfam Id: PF01370 Pfam Desc: NAD dependent epimerase/dehydratase family
  misc_feature (8)..(223): Pfam Id: PF07993 Pfam Desc: Male sterility protein
  misc_feature (1)..(345): NCBI GI: 238507686 Blast Desc: NAD dependent epimerase/dehydratase, [Aspergillus flavus NRRL3357] gi|220688563|gb|EED44915.1| NAD dependent epimerase/dehydratase, [Aspergillus flavus NRRL3357]
  misc_feature (1)..(345): NCBI GI: 169785072 Blast Desc: [Aspergillus oryzae RIB40] gi|83775744|dbj|BAE65864.1| protein product [Aspergillus oryzae]
  misc_feature (4)..(345): NCBI GI: 238490438 Blast Desc: NAD dependent epimerase/dehydratase, [Aspergillus flavus NRRL3357] gi|220696869|gb|EED53210.1| NAD dependent epimerase/dehydratase, [Aspergillus flavus NRRL3357]
  misc_feature (4)..(345): NCBI GI: 169772525 Blast Desc: [Aspergillus oryzae RIB40] gi|83768592|dbj|BAE58729.1| protein product [Aspergillus oryzae]
  misc_feature (5)..(341): NCBI GI: 242764980 Blast Desc: cinnamoyl-CoA reductase, [Talaromyces stipitatus ATCC 10500] gi|218724077|gb|EED23494.1| cinnamoyl-CoA reductase, [Talaromyces stipitatus ATCC 10500]
  misc_feature (6)..(341): NCBI GI: 255938496 Blast Desc: Pc14g00230 [Penicillium chrysogenum Wisconsin 54-1255] gi|211584639|emb|CAP74164.1| Pc14g00230 [Penicillium chrysogenum Wisconsin 54-1255]
  misc_feature (7)..(345): NCBI GI: 169785597 Blast Desc: [Aspergillus oryzae RIB40] gi|83776007|dbj|BAE66126.1| protein product [Aspergillus oryzae]
  misc_feature (6)..(345): NCBI GI: 238506623 Blast Desc: dihydroflavonal-4-reductase, [Aspergillus flavus NRRL3357] gi|220689226|gb|EED45577.1| dihydroflavonal-4-reductase, [Aspergillus flavus NRRL3357]
  misc_feature (6)..(270): NCBI GI: 212547096 Blast Desc: NAD dependent epimerase/dehydratase, [Penicillium marneffei ATCC 18224] gi|210064461|gb|EEA18557.1| NAD dependent epimerase/dehydratase, [Penicillium marneffei ATCC 18224]
  misc_feature (6)..(343): NCBI GI: 115390340 Blast Desc: [Aspergillus terreus NIH2624] gi|114195071|gb|EAU36771.1| [Aspergillus terreus NIH2624]
  misc_feature (5)..(343): SWISSPROT Homolog: EC 1.1.1.283 Methylglyoxal reductase (NADPH-dependent)
MAQETVLITGANGYLALHVIQKALIRGWNVVGTVRSERAASTVRAIFADAGPSLSLVHISNLTHADAYKRAYESMPITAVINVASPLLHSPKDQKTEVVDPAINGALAVLTAAEKYGGPMVKRVVHVGSFTSSMNPQLGESPGVRYGPDTWNPITYEGAIRGGDREGYMGSKVLAERAMWEFMKKDRASPLTFDLVTVLPAAIFGPQLATVDIGNLNLSSRMLWELPAPSDSPPVYNSYHLGAWVDVRDAALAMILAIATPEAGGERFVAAQRTHWQLVRDAARSLNAELAERIDPGKPGSAEAAKDTTYDVDGTKLERILRMRYTELLVTMQDSYGQLLEAEHSRVTRS

SEQ ID NO: 31072 - DNA, 1204 bp, Muscodor strobelii
  misc_feature: SGI EST ID NO. CUFF.73556.1
  misc_feature: Variant of the nucleotide sequence at SEQ ID NO 31070
gtcacataggcaaggagttgaaatataaaagcaccatgtcacgtttggaggtgcgacttgacctggtgagcagataggttcttgttctccacggaccacaatcaaatggcgcaggaaacagtgcttataaccggcgcaaacgggtatttggcacttcatgtcattcaaaaggctctaatcagggggtggaacgttgttggtactgtacgatctgaacgagccgcatcaacagtccgagcaattttcgccgatgcgggtcccagcttaagtttagtccatatcagcaacctcactcacgctgatgcatataaaagggcctacgagagtatgccaatcaccgcagtcatcaatgtcgcatctccattgttacacagccccaaggaccaaaagactgaggtcgtggatcctgctatcaacggcgcactggctgtcctcacagccgctgaaaaatatggtggtccaatggtgaagcgcgtggtccatgtgggcagcttcacttcatccatgaacccccagctaggagaatcacctggagttagatacggaccggacacgtggaaccccatcacgtacgaaggcgcaattagagggggcgatcgggaaggatatatgggctccaaggtgctagctgaacgtgccatgtgggagttcatgaaaaaggatcgagcatctccgctgacattcgaccttgtgaccgtattacccgctgcaatcttcgggccgcagcttgcaaccgtcgatatcggcaatttaaacctcagcagtcggatgctctgggagctgcccgcgcccagtgacagcccacccgtgtataactcataccatcttggcgcgtgggttgacgtccgcgatgctgcacttgccatgatcctggctattgctacacccgaggcaggtggcgagcggtttgtggcagcgcaacgcacacattggcagctcgtgcgggatgcagctcgctctctcaacgcagagctcgcggagcgaattgatccagggaaaccaggcagcgcagaagcggccaaagatacaacttatgatgttgatggaactaagctcgagcgcattcttcgcatgaggtatactgagctgctggtaacgatgcaggattcctacggacagctgttagaagcagaacatagtcgcgtaacaagatcataatagtgttgtgatggtatgtatgtacattgaaattgaggtacatgat

SEQ ID NO: 31073 - DNA, 1620 bp, Muscodor strobelii
  misc_feature: SGI cDNA ID NO. 570695
  misc_feature: Reduced expression when VOC is produced
  misc_feature: Encodes the peptide sequence at SEQ ID NO 31074
atggctaaagccccaagcacgctggaagccgaagaagctcgcgcgacagggcactttgccagggccctgcgacgcttggcaaagcgacgctacgctttgtcgcatgcgtccccgtatgttctgggaattgttggtctcgcggattcatacgagtttatcgatggcaagctatgctacattgttgaatcacggccaaagcggtggctcaggattctcgacctcaataaatcaactgattgggagctcgctgtcgatattccgacacttgtcagcattgctgtgcctcgagcgccaaacagtcgcaagtataagttcaaggtgctatatgaagccgcaggtatcgtcagctgccttttttcctatgcgacggaataccacttgataatattcaatcccaaggagcacaaactattgaaaacatatcacctggattcagctcaccgcattttcgttaggaacaatgacaagtatctctacgtcggcactcacactggagaaggtgccgatgggttccgtaaatgggtcctaaaaggcttggatctcatcagtctcgaatggcttcaacagccgcgaatgtacctgaatgacatgtcgggatatgagattggatcatctatctgttttgaaatatttgacgggtatttctatgggctttcgaaccagtctctttttgagattgatgacccggactggacttctcactattactgctttcgcttccccctcgacgaaccttcgcgcgagacaacccaagtcatgcataaagatgacagttggcgtcgtcaccatgtggaaggcccaattgatgacagatggggatttctcaaatttgagagagacgaggctacggggagcatttctattgtggaatgccgtagagagtggctgaagggcagaactggcagtcaacgcacctactacaccactcaagttgactttcaccgagaaaatccgcctataacagatgagcaaccggcaataaacatcaccatgggtggatttaacgaccctgccccctctgatgacgttgtcccatctcgatcagctcatcaagtacatgaaggtgacgacagctcagtaccatcaatgctgacgaatacgcagcagccgtattatgctaatgagatctctatgtggccacctgaacaggttgcgtcgcacctcaagccatgcttaaacaagattcaagaccttctacatcctgaaggtaatcaaggctgcatcgaagcaaccggagacgagcgatctattatctattcaaccagcgacggctctaaagatggggtcaaagtcttgatagtcctctcttttgaccctgcaatcgagttcgaagggatggaatttggcgggaatattctgggccaaagaacggagacctgcggcgagcgggaggtcttacagctgccaacacattgcgtttcaatgggggctgaaaccagtccacgcttctcgttcgagcaacgagttgatacgacgatcttcaaaggcgttgcagctgcgcgatcagcagaccagtttcttccacctagtatccctccttctcaggataccaagtcttgggctttcgtttctagagccatgcatcgcgggatgggacaaaagttcttcttcagtttgtaa

SEQ ID NO: 31074 - protein, 539 aa, Muscodor strobelii
  misc_feature: SGI Peptide ID NO. 570695
  misc_feature (15)..(313): NCBI GI: 156065869 Blast Desc: SS1G_00945 [Sclerotinia sclerotiorum 1980] gi|154691804|gb|EDN91542.1| SS1G_00945 [Sclerotinia sclerotiorum 1980]
  misc_feature (2)..(373): NCBI GI: 171691779 Blast Desc: protein product [Podospora anserina] gi|170945838|emb|CAP72639.1| protein product [Podospora anserina]
  misc_feature (2)..(365): NCBI GI: 145610965 Blast Desc: MGG_00768 [Magnaporthe grisea 70-15] gi|145018297|gb|EDK02576.1| MGG_00768 [Magnaporthe grisea 70-15]
  misc_feature (1)..(445): NCBI GI: 256732063 Blast Desc: NECHADRAFT_93516 [Nectria haematococca mpVI 77-13-4]
  misc_feature (1)..(313): NCBI GI: 154301733 Blast Desc: BC1G_10018 [Botryotinia fuckeliana B05.10] gi|150855680|gb|EDN30872.1| BC1G_10018 [Botryotinia fuckeliana B05.10]
  misc_feature (1)..(455): NCBI GI: 46137063 Blast Desc: FG10047.1 [Gibberella zeae PH-1]
  misc_feature (2)..(360): NCBI GI: 116179846 Blast Desc: CHGG_00551 [Chaetomium globosum CBS 148.51] gi|88184848|gb|EAQ92316.1| CHGG_00551 [Chaetomium globosum CBS 148.51]
  misc_feature (2)..(335): NCBI GI: 28950016 Blast Desc: [Neurospora crassa]
  misc_feature (2)..(335): NCBI GI: 85090973 Blast Desc: NCU04576 [Neurospora crassa OR74A] gi|28920054|gb|EAA29439.1| [Neurospora crassa OR74A]
  misc_feature (19)..(342): NCBI GI: 240106458 Blast Desc: F-box domain containing protein [Coccidioides posadasii C735 delta SOWgp]
  misc_feature: Useful for introducing or modulating the production of volatile compounds
MAKAPSTLEAEEARATGHFARALRRLAKRRYALSHASPYVLGIVGLADSYEFIDGKLCYIVESRPKRWLRILDLNKSTDWELAVDIPTLVSIAVPRAPNSRKYKFKVLYEAAGIVSCLFSYATEYHLIIFNPKEHKLLKTYHLDSAHRIFVRNNDKYLYVGTHTGEGADGFRKWVLKGLDLISLEWLQQPRMYLNDMSGYEIGSSICFEIFDGYFYGLSNQSLFEIDDPDWTSHYYCFRFPLDEPSRETTQVMHKDDSWRRHHVEGPIDDRWGFLKFERDEATGSISIVECRREWLKGRTGSQRTYYTTQVDFHRENPPITDEQPAINITMGGFNDPAPSDDVVPSRSAHQVHEGDDSSVPSMLTNTQQPYYANEISMWPPEQVASHLKPCLNKIQDLLHPEGNQGCIEATGDERSIIYSTSDGSKDGVKVLIVLSFDPAIEFEGMEFGGNILGQRTETCGEREVLQLPTHCVSMGAETSPRFSFEQRVDTTIFKGVAAARSADQFLPPSIPPSQDTKSWAFVSRAMHRGMGQKFFFSL

SEQ ID NO: 31075 - DNA, 3312 bp, Muscodor strobelii
  misc_feature: SGI EST ID NO. CUFF.73583.0
  misc_feature: Variant of the nucleotide sequence at SEQ ID NO 31073
ttacgacccttgttgaggctctggtgtagcagagccgcacttccataaccaacgcttaaagtcagacgcggtctgcaagctctgagcacgatggaggcggtatcgactatctgtaggaagggtgagtgcgcctttagaccaatgataacgcaagtgatagcccgcctgttcctggacggcaaggggttaggatcaggtatatgacgaatggctctattcaaacctcccggactcaggcgtctaccatacgaactcgtcgcatacatcgtgagggacttggacattgaggacgttttcaattggtcgctatgcagcaagcactttcagtacataattcgagaagaccgcttctgcaagccagtgatcatggctaaagccccaagcacgctggaagccgaagaagctcgcgcgacagggcactttgccagggccctgcgacgcttggcaaagcgacgctacgctttgtcgcatgcgtccccgtatgttctgggaattgttggtctcgcggattcatacgagtttatcgatggcaagctatgctacattgttgaatcacggccaaagcggtggctcaggattctcgacctcaataaatcaactgattgggagctcgctgtcgatattccgacacttgtcagcattgctgtgcctcgagcgccaaacagtcgcaagtataagttcaaggtgctatatgaagccgcaggaacaatgacaagtatctctacgtcggcactcacactggagaaggtgccgatgggttccgtaaatgggtcctaaaaggcttggatctcatcagtctcgaatggcttcaacagccgcgaatgtacctgaatgacatgtcgggatatgagattggatcatctatctgttttgaaatatttgacgggtatttctatgggctttcgaaccagtctctttttgagattgatgacccggactggacttctcactattactgctttcgcttccccctcgacgaaccttcgcgcgagacaacccaagtcatgcataaagatgacagttggcgtcgtcaccatgtggaaggcccaattgatgacagatggggatttctcaaatttgagagagacgaggctacggggagcatttctattgtggaatgccgtagagagtggctgaagggcagaactggcagtcaacgcacctactacaccactcaagttgactttcaccgagaaaatccgcctataacagatgagcaaccggcaataaacatcaccatgggtggatttaacgaccctgccccctctgatgacgttgtcccatctcgatcagctcatcaagtacatgaaggtgacgacagctcagtaccatcaatgctggtgcggagtaaaactcatcactgctcttatttccgttcatgtcaagcctttatcgatctgcttgacgacacttcacttaaaaacgatgacaaacaatgcatacgactcagagccggatgtaggcgtctaaagccgaccacgagcgttgcatcgagttcctgcacatctgactcgcggcaccaacctacccagacgaatacgcagcagccgtattatgctaatgagatctctatgtggccacctgaacaggttgcgtcgcacctcaagccatgcttaaacaagattcaagaccttctacatcctgaaggtaatcaaggctgcatcgaagcaaccggagacgagcgatctattatctattcaaccagcgacggctctaaagatggggtcaaagtcttgatagtcctctcttttgaccctgcaatcgagttcgaagggatggaatttggcgggaatattctgggccaaagaacggagacctgcggcgagcgggaggtcttacagctgccaacacattgcgtttcaatgggggctgaaaccagtccacgcttctcgttcgagcaacgagttgatacgacgatcttcaaaggcgttgcagctgcgcgatcagcagaccagtttcttccacctagtatccctccttctcaggataccaagtcttgggctttcgtttctagagccatgcatcgcgggatgggacaaaagttcttcttcagtttgtaatgtcacaaactgtgtggctctgagatgaagtgccattgggaaacaatgtgttggtattcggcagctcgacgatgcaagccgtgtcgtgatcggtttgccacatacaatggcccccaatcaagccatatcccgagcgctaatgaggagaaagatgcatttgtatgcaactcgatatcgaagatccacgaccaaatccaatagacaagaaaaagcaatatagttgggccggtcaaccgtggggtcggggccaacaagcatcgtacggttacatgaagatgatgtattgaagccccttttagaaacggtgcttagggcgtactcccgtcttggggaccgattggttacaaagccgaaacaggcgcagcattgtgcagatccagtgcgcgcccacccatgctcgaaaagtgaggcgatcataagtatggcatttcgttcgtcggaggtccccaatatctcagggatcatgtgaattccgactcacaatttgcttcaaatctgactaggcgagaaaaatatatagtcctggagagtctgaggcaagtccgtcgaactgtaagcctcaacgtccaaatcgactatctatgcacggcatatagcagctcgacgtggcagctgttcacaacaagacagttacagctcggcaagagttaccctacatattggctcgatacgagtcctaccgagaaacagaaagtcttgtcttgagaatctgccttgccctactcgtttaacctaaatatgctcagaagtgcatcttgcctatgtagtacatggttatcgtgatgcagcgaaccacattcctcttccgaccatttccttccatgacgcaagatgactccattgtatatcatttggcgctgctgcttacactaatgagcgcctttcgctgtagctttctgtggatgctgtctgacatgcattcttgaattacgataatagggtgttcatcgtcattccttgaaccaataaactgaagagactatgccatgatgattccatagcttgggtgccccaaacaagatgaaattttgcctcgatatactacattagcctccgaagatgaaaaatcatactacggaatattcatcaagtctcatcatacccgtgctagcgtgcatattaaatgagccttgataggaagcctccacatttgatcgcatttgcctgtcgtctgtcaatttgaattctaagcatttgtttcggttcttcttaagcccagacattttatagtgcttaagtctgtctttacaag

SEQ ID NO: 31076 - DNA, 924 bp, Muscodor strobelii
  misc_feature: SGI cDNA ID NO. 570696
  misc_feature: Reduced expression when VOC is produced
  misc_feature: Encodes the peptide sequence at SEQ ID NO 31077
atgacggcgaacagtcttacggacgttgatttgaagtcgctcccaagaatcgcatctggcaaagtccgcgatctcttctccataaatgatgatacgcttctcttcgtcacgtcagaccgcatatccgcgtttgatagtataatggccattggtgtgccccagaaaggactattacttacaatgctatcgaagcattggttcaatgtgcttcctcagctgatacttggtcttcgcacccatttgcttaccaccgatttgccaaggggtcttacaaattccgaaagggactgtctttcagggcgtagtatgcaagttcgaaagtataaagtcttcccattggaatgtatcgttcgcggatacttggctggctctgcctggaatgaatatgtagccagcggaacgatccacggcattgcactgccccccggccttcagcaatgcgcttccatcccggcaggacccatttacacgcccagtacgaaagctccggcaggccagcatgatcaaaacattcacccgaatcatgtggtcgacatcattggtgaaaactatgccaggcgtatcgaggaactggccttgaaaatcttcaaggccggacagaattacgctaataaacgaggtatcatcatcgccgatacaaagttcgaatttggactagacgagtctactgatgagatcgttctaattgacgaagtattcactcccgactcctctcgtatgtggcctaaagaccgatatgagcccgggcgtgaacaagaatcgctcgacaaagagccactacggcgatggcttcgaactatggacttggaaggtaaagagggcgtcataatgccggatcacgtctgtcttgcaataagcaagagatacagagatgtgctcgagctcataaccggacagtcgctagaaaaagccttgaccgactaa

SEQ ID NO: 31077 - protein, 307 aa, Muscodor strobelii
  misc_feature: SGI Peptide ID NO. 570696
  misc_feature (13)..(281): Pfam Id: PF01259 Pfam Desc: SAICAR synthetase
  misc_feature (1)..(305): NCBI GI: 85113727 Blast Desc: phosphoribosylaminoimidazole-succinocarboxamide synthase [Neurospora crassa OR74A] gi|22164052|dbj|BAC07276.1| 5'-phosphoribosyl-5-aminoimidazole-4-N-succinoca rboxamide crassa
  misc_feature (3)..(307): NCBI GI: 145609750 Blast Desc: MGG_12537 [Magnaporthe grisea 70-15] gi|145017146|gb|EDK01509.1| MGG_12537 [Magnaporthe grisea 70-15]
  misc_feature (2)..(307): NCBI GI: 149210651 Blast Desc: MGCH7_ch7g798 [Magnaporthe grisea 70-15] gi|86196753|gb|EAQ71391.1| MGCH7_ch7g798 [Magnaporthe grisea 70-15]
  misc_feature (3)..(298): NCBI GI: 212544818 Blast Desc: phosphoribosyl-aminoimidazole-succinocarboxamide synthase [Penicillium marneffei ATCC 18224] gi|210065532|gb|EEA19626.1| synthase [Penicillium marneffei ATCC
  misc_feature (3)..(298): NCBI GI: 242813941 Blast Desc: phosphoribosyl-aminoimidazole-succinocarboxamide synthase [Talaromyces stipitatus ATCC 10500] gi|218714609|gb|EED14032.1| synthase [Talaromyces stipitatus ATCC
  misc_feature (3)..(300): NCBI GI: 238505322 Blast Desc: phosphoribosyl-aminoimidazole-succinocarboxamide synthase [Aspergillus flavus NRRL3357] gi|37572664|dbj|BAC98505.1| ribotide synthetase [Aspergillus
  misc_feature (1)..(300): NCBI GI: 169780514 Blast Desc: [Aspergillus oryzae RIB40] gi|83773461|dbj|BAE63588.1| protein product [Aspergillus oryzae]
  misc_feature (5)..(298): NCBI GI: 115402633 Blast Desc: phosphoribosylaminoimidazole-succinocarboxamide synthase [Aspergillus terreus NIH2624] gi|114189239|gb|EAU30939.1| synthase [Aspergillus terreus
  misc_feature (3)..(298): NCBI GI: 121704752 Blast Desc: phosphoribosyl-aminoimidazole-succinocarboxamide synthase [Aspergillus clavatus NRRL 1] gi|119398785|gb|EAW09213.1| synthase [Aspergillus clavatus NRRL
  misc_feature (4)..(298): NCBI GI: 67537138 Blast Desc: AN4739.2 [Aspergillus nidulans FGSC A4] gi|40741591|gb|EAA60781.1| AN4739.2 [Aspergillus nidulans FGSC A4] gi|259482421|tpe|CBF76889.1| TPA: similar to ribotide FGSC
  misc_feature (5)..(302): SWISSPROT Homolog: EC 6.3.2.6 Phosphoribosylaminoimidazolesuccinocarboxamide synthase
  misc_feature: Useful for introducing or modulating the production of volatile compounds
MTANSLTDVDLKSLPRIASGKVRDLFSINDDTLLFVTSDRISAFDSIMAIGVPQKGLLLTMLSKHWFNVLPQLILGLRTHLLTTDLPRGLTNSERDCLSGRSMQVRKYKVFPLECIVRGYLAGSAWNEYVASGTIHGIALPPGLQQCASIPAGPIYTPSTKAPAGQHDQNIHPNHVVDIIGENYARRIEELALKIFKAGQNYANKRGIIIADTKFEFGLDESTDEIVLIDEVFTPDSSRMWPKDRYEPGREQESLDKEPLRRWLRTMDLEGKEGVIMPDHVCLAISKRYRDVLELITGQSLEKALTD

SEQ ID NO: 31078 - DNA, 1313 bp, Muscodor strobelii
  misc_feature: SGI EST ID NO. CUFF.73577.0
  misc_feature: Variant of the nucleotide sequence at SEQ ID NO 31076
ctcagatccgcattttgataccttgataaattttaactgcaagtacggagcctcatttgcaatgacggcgaacagtcttacggacgttgatttgaagtcgctcccaagaatcgcatctggcaaagtccgcgatctcttctccataaatgatgatacgcttctcttcgtcacgtcagaccgcatatccgcgtttgatagtataatggccattggtgtgccccagaaaggactattacttacaatgctatcgaagcattggttcaatgtgcttcctcagctgatacttggtcttcgcacccatttgcttaccaccgatttgccaaggggtcttacaaattccgaaagggactgtctttcagggcgtagtatgcaagttcgaaagtataaagtcttcccattggaatgtatcgttcgcggatacttggctggctctgcctggaatgaatatgtagccagcggaacgatccacggcattgcactgccccccggccttcagcaatgcgcttccatcccggcaggacccatttacacgcccagtacgaaagctccggcaggccagcatgatcaaaacattcacccgaatcatgtggtcgacatcattggtgaaaactatgccaggcgtatcgaggaactggccttgaaaatcttcaaggccggacagaattacgctaataaacgaggtatcatcatcgccgatacaaagttcgaatttggactagacgagtctactgatgagatcgttctaattgacgaagtattcactcccgactcctctcgtatgtggcctaaagaccgatatgagcccgggcgtgaacaagaatcgctcgacaaagagccactacggcgatggcttcgaactatggacttggaaggtaaagagggcgtcataatgccggatcacgtctgtcttgcaataagcaagagatacagagatgtgctcgagctcataaccggacagtcgctagaaaaagccttgaccgactaaccaaattgatgtgagctatcattgatcacatactgcagatgctatcttgcctgatcttttacgcacacgctggtgatggtacacatgctcgcgagccgtgccaacgcgtcatcgagatttggacgtccctgcaaatgcacgtaactggctctaaatagttgcttttcagatgtttcacaggtttctagtaagcatgatctgggaaatgttttcaacttgagccggcagttttacggctgttgatattttcccccattgtgctgattctatattggccacaatggtaaccatgctattaatatccaattattaaaaatgatactgccag

SEQ ID NO: 31079 - DNA, 1329 bp, Muscodor strobelii
  misc_feature: SGI cDNA ID NO. 570697
  misc_feature: Reduced expression when VOC is produced
  misc_feature: Encodes the peptide sequence at SEQ ID NO 31080
atgaaggttgtcattattggtgctggcataggcggtctcggtgccgctgttgcgttgacccgggctggacatgacgttgaggtctacgagcgctcgtcattctgcaatgaagttggtgccgctatccatgtccaaccgaattcaacacgcgttttgaaaagctggggttgcgatctaaggacattagcggctgttccatgcgagtccatagacagctattcaggcaaagacttgaatcttattgacaaaactgctattaaacgcgagcttcaagcactttctggtgtcgatgatccttggttattggtacatcgcgtggatttacacaacgccttacggaagatggtcgccgatgggttcaatggtaaagcagccaaaattcatctcaactcgaaagtgcaatctgtgaacgcagcaactggagaagttcggtttgaggatggcagcgtagcccagggcgatctagttgtaggagctgatggtcttcattctcgcgcagtcgaggccgtgtcaccagagggacgcgagaaaatcaccaccggccgagacgtgttccgattcatggtgcccgttgaaaaagcccaagcaaacccagttacacgagagctccttgctcgtgtcggattgaaatcatgtctacgattctatactcctggcctgcgtgttattgtatatccttgtcggtcgaacactttgatcaatattgtcgccgtttgcgcggccaagaaccctcaagcagcaaagaacgaaactagctgggtgaatcctggaactattgaagatcttctcacacggtttgacgaaatggcgccggagttacaggcattatttaagatggcagaagacttgaaatgctggagtctcgtaacgcgtctaccaccgaggacgttcatcaaacagaagctagctttgcttggtgacgcagcccatcctatgcttccacatcacggccaaggaagtgcacaagctctagaagatgctgcagcactcggagcactcttttcggcaccggccgcatcagatgaggttagcgacttgctgaagatctacaatgaggttcgatacaaccacgctgttacggtcagctttctatctcggataggcaacgtccactgccatgaggtattggatgacttgagggaattcgtgcctgctgcaactataccagaaaatgcatgggtctacgcttggacttcatatccagctgtcgaagtcaaacgacttcttgcaattaggagcactcgcaaagctctcagtgcccacagacttctttcccaaccctgggttacggcacagcccatacctgccctacggactctcagtgcctaa

SEQ ID NO: 31080 - protein, 442 aa, Muscodor strobelii
  misc_feature: SGI Peptide ID NO. 570697
  misc_feature (1)..(365): Pfam Id: PF01494 Pfam Desc: FAD binding domain
  misc_feature (10)..(32): Pfam Id: PF01593 Pfam Desc: Flavin containing amine oxidoreductase
  misc_feature (2)..(37): Pfam Id: PF01266 Pfam Desc: FAD dependent oxidoreductase
  misc_feature (1)..(409): NCBI GI: 145253198 Blast Desc: An16g08140 [Aspergillus niger] gi|134083672|emb|CAK47063.1| protein product [Aspergillus niger]
  misc_feature (17)..(410): NCBI GI: 259488030 Blast Desc: TPA: salicylate hydroxylase, (AFU_orthologue; AFUA_3G01600) [Aspergillus nidulans FGSC A4]
  misc_feature (17)..(409): NCBI GI: 238491924 Blast Desc: monoxygenase, [Aspergillus flavus NRRL3357] gi|220697612|gb|EED53953.1| monoxygenase, [Aspergillus flavus NRRL3357]
  misc_feature (26)..(413): NCBI GI: 259483894 Blast Desc: TPA: conserved [Aspergillus nidulans FGSC A4]
  misc_feature (26)..(385): NCBI GI: 67901172 Blast Desc: AN7573.2 [Aspergillus nidulans FGSC A4] gi|40742963|gb|EAA62153.1| AN7573.2 [Aspergillus nidulans FGSC A4]
  misc_feature (98)..(400): NCBI GI: 256724309 Blast Desc: NECHADRAFT_97659 [Nectria haematococca mpVI 77-13-4]
  misc_feature (98)..(409): NCBI GI: 169773897 Blast Desc: [Aspergillus oryzae RIB40] gi|83769278|dbj|BAE59415.1| protein product [Aspergillus oryzae]
  misc_feature (1)..(384): NCBI GI: 121712252 Blast Desc: salicylate hydroxylase, [Aspergillus clavatus NRRL 1] gi|119401893|gb|EAW12315.1| salicylate hydroxylase, [Aspergillus clavatus NRRL 1]
  misc_feature (1)..(391): NCBI GI: 159128386 Blast Desc: salicylate hydroxylase, [Aspergillus fumigatus A1163]
  misc_feature (1)..(391): NCBI GI: 146323165 Blast Desc: salicylate hydroxylase [Aspergillus fumigatus Af293] gi|129556497|gb|EAL86443.2| salicylate hydroxylase, [Aspergillus fumigatus Af293]
  misc_feature (21)..(366): SWISSPROT Homolog: EC 1.14.13.24 3-hydroxybenzoate 6-monooxygenase
  misc_feature: Useful for introducing or modulating the production of volatile compounds
MKVVIIGAGIGGLGAAVALTRAGHDVEVYERSSFCNEVGAAIHVQPNSTRVLKSWGCDLRTLAAVPCESIDSYSGKDLNLIDKTAIKRELQALSGVDDPWLLVHRVDLHNALRKMVADGFNGKAAKIHLNSKVQSVNAATGEVRFEDGSVAQGDLVVGADGLHSRAVEAVSPEGREKITTGRDVFRFMVPVEKAQANPVTRELLARVGLKSCLRFYTPGLRVIVYPCRSNTLINIVAVCAAKNPQAAKNETSWVNPGTIEDLLTRFDEMAPELQALFKMAEDLKCWSLVTRLPPRTFIKQKLALLGDAAHPMLPHHGQGSAQALEDAAALGALFSAPAASDEVSDLLKIYNEVRYNHAVTVSFLSRIGNVHCHEVLDDLREFVPAATIPENAWVYAWTSYPAVEVKRLLAIRSTRKALSAHRLLSQPWVTAQPIPALRTLSA

SEQ ID NO: 31081 - DNA, 2115 bp, Muscodor strobelii
  misc_feature: SGI EST ID NO. CUFF.73850.1
  misc_feature: Variant of the nucleotide sequence at SEQ ID NO 31079
cgcgagcgtactcgggtataataattgtctgatattaaaccacgatcgggaagtcccatcacaagttcgatcaagtcatctgtccccacaccaagctcgttttgtaagccctacccgcatgatacctactaaagccgtacgaaatcctgtacctacaggtactctacagttataacactgcctcagcataacgcgatactcgcgacttgtacaagtcgttggaaccttggcatagacccttggcccagcgaactggcaggggtacatcgatgcctcccgatacatgtgaataggatgatggatcatggtcccgatttttcaaagattctattagcgggagcccggacgagtggcgatccaacatgaagtggtatacatatatattcacacatcctgatctctgaccttgggcaagtagaacttcatcaagcatctctcatatcatatcatcatcgtctgatgaagtttgatcttcttttacctgtatcctcacatactatcttcatatctgaaaaacaaacgcattctgcctctacaatacatctgaaatcatgaaggttgtcattattggtgctggcataggcggtctcggtgccgctgttgcgttgacccgggctggacatgacgttgaggtctacgagcgctcgtcattctgcaatgaagttggtgccgctatccatgtccaaccgaattcaacacgcgttttgaaaagctggggttgcgatctaaggacattagcggctgttccatgcgagtccatagacagctattcaggcaaagacttgaatcttattgacaaaactgctgtaagaaaacgagtcttttcaacaatgaagcattcgctgatcgtcgatgaaacaatagattaaacgcgagcttcaagcactttctggtgtcgatgatccttggttattggtacatcgcgtggatttacacaacgccttacggaagatggtcgccgatgggttcaatggtaaagcagccaaaattcatctcaactcgaaagtgcaatctgtgaacgcagcaactggagaagttcggtttgaggatggcagcgtagcccagggcgatctagttgtaggagctgatggtcttcattctcgcgcagtcgaggccgtgtcaccagagggacgcgagaaaatcaccaccggccgagacgtgttccgattcatggtgcccgttgaaaaagcccaagcaaacccagttacacgagagctccttgctcgtgtcggattgaaatcatgtctacgattctatactcctggcctgcgtgttattgtatatccttgtcggtcgaacactttgatcaatattgtcgccgtttgcgcggccaagaaccctcaagcagcaaagaacgaaactagctgggtgaatcctggaactattgaagatcttctcacacggtttgacgaaatggcgccggagttacaggcattatttaagatggcagaagacttgaaatgctggagtctcgtaacgcgtctaccaccgaggacgttcatcaaacagaagctagctttgcttggtgacgcagcccatcctatgcttccacatcacggccaaggaagtgcacaagctctagaagatgctgcagcactcggagcactcttttcggcaccggccgcatcagatgaggttagcgacttgctgaagatctacaatgaggttcgatacaaccacgctgttacggtcagctttctatctcggataggcaacgtccactgccatgaggtattggatgacttgagggaattcgtgcctgctgcaactataccagaaaatgcatgggtctacgcttggacttcatatccagctgtcgaagtcaaacgacttcttgcaattaggagcactcgcaaagctctcagtgcccacagacttctttcccaaccctgggttacggcacagcccatacctgccctacggactctcagtgcctaagacggcaaattgttgcgggcgactgattacgtgcatctcacggggttatgcctgggtgttttaacgatgatgatgataatgacactaaagctatacctcgtagtctagaatattagaattaataatgctaatcgattttacaaacagacctgttcgtactagctatgtgaaagttcc

SEQ ID NO: 31082 - DNA, 810 bp, Muscodor strobelii
  misc_feature: SGI cDNA ID NO. 570698
  misc_feature: Elevated expression when VOC is produced
  misc_feature: Encodes the peptide sequence at SEQ ID NO 31083
atggccactaggctcacacttgacggagggtttgctctcgtcacaggagctgcgtctggcatcggcaaggaatcaactttcgcatttgccgcagcgggcgcgcaaggtgtcttatttgcagacatcgacgtggaaggagcgcaaaaagcggcagaggaaagcaaacagtatgctgtatcaatcaaataccgcgctgagtttgtcgaagtagatgttacgagcgatgaaagtgtcaaaaacatggtagaatttgctaaagcgaagtttggacggattgactacaatgtcaacagcgccgcgattggaaacatatcccgcgcaagggcaccgcatattaaagcagatgtattccggaagacaatcgagacaaatgtcacgggcaccatgctttgcgttagcgctgtcactcatctcatggtagaccaggaaccgaaaacttacactggtcgtcatggcactcgtagcctaggacgtggttcgatcgtcaatttaggctctctgaattcctatgttgcatttccaggcactttgtcgtacacaactgcgaagcatgcgattatggggctcaccaggtctgctgcaatggactgtctaagggaccagattcgcgtcaacgctgtgtgtccattttacgtagacacaccgatgatgcaaaagagtatcgaacgggtcccgggacttgacaacatgatcaagggcatctcgccacttggacgcgcagccactgttgacgaagttgcagactacatcgtttttctatgtagcccatctgcaagctatatcaatggaactggcttggcgatcgagtaa

SEQ ID NO: 31083 - protein, 269 aa, Muscodor strobelii
  misc_feature: SGI Peptide ID NO. 570698
  misc_feature (10)..(198): Pfam Id: PF00106 Pfam Desc: short chain dehydrogenase
  misc_feature (5)..(269): NCBI GI: 156048278 Blast Desc: SS1G_08870 [Sclerotinia sclerotiorum 1980] gi|154693267|gb|EDN93005.1| SS1G_08870 [Sclerotinia sclerotiorum 1980]
  misc_feature (16)..(269): NCBI GI: 154316211 Blast Desc: BC1G_03691 [Botryotinia fuckeliana B05.10] gi|150846477|gb|EDN21670.1| BC1G_03691 [Botryotinia fuckeliana B05.10]
  misc_feature (7)..(269): NCBI GI: 145259387 Blast Desc: An04g09990 [Aspergillus niger] gi|134074978|emb|CAK39058.1| protein product [Aspergillus niger]
  misc_feature (10)..(269): NCBI GI: 154294990 Blast Desc: BC1G_13361 [Botryotinia fuckeliana B05.10] gi|150844490|gb|EDN19683.1| BC1G_13361 [Botryotinia fuckeliana B05.10]
  misc_feature (10)..(269): NCBI GI: 242816340 Blast Desc: oxidoreductase, short-chain dehydrogenase/reductase family [Talaromyces stipitatus ATCC 10500] gi|218715096|gb|EED14519.1| oxidoreductase, short-chain family
  misc_feature (7)..(269): NCBI GI: 145241243 Blast Desc: An08g11680 [Aspergillus niger] gi|134077799|emb|CAK96788.1| protein product [Aspergillus niger]
  misc_feature (10)..(269): NCBI GI: 238840117 Blast Desc: short-chain dehydrogenase/reductase SDR [Microsporum canis CBS 113480]
  misc_feature (19)..(269): NCBI GI: 242773388 Blast Desc: short-chain dehydrogenase, [Talaromyces stipitatus ATCC 10500] gi|218721849|gb|EED21267.1| short-chain dehydrogenase, [Talaromyces stipitatus ATCC 10500]
  misc_feature (10)..(246): NCBI GI: 145238224 Blast Desc: An07g06820 [Aspergillus niger] gi|134076241|emb|CAK39527.1| protein product [Aspergillus niger]
  misc_feature (10)..(269): NCBI GI: 145602532 Blast Desc: MGG_12982 [Magnaporthe grisea 70-15] gi|145010941|gb|EDJ95597.1| MGG_12982 [Magnaporthe grisea 70-15]
  misc_feature (5)..(269): SWISSPROT Homolog: EC 1.1.1.100 3-oxoacyl-[acyl-carrier-protein] reductase
  misc_feature: Useful for introducing or modulating the production of volatile compounds
MATRLTLDGGFALVTGAASGIGKESTFAFAAAGAQGVLFADIDVEGAQKAAEESKQYAVSIKYRAEFVEVDVTSDESVKNMVEFAKAKFGRIDYNVNSAAIGNISRARAPHIKADVFRKTIETNVTGTMLCVSAVTHLMVDQEPKTYTGRHGTRSLGRGSIVNLGSLNSYVAFPGTLSYTTAKHAIMGLTRSAAMDCLRDQIRVNAVCPFYVDTPMMQKSIERVPGLDNMIKGISPLGRAATVDEVADYIVFLCSPSASYINGTGLAIE

SEQ ID NO: 31084 - DNA, 1242 bp, Muscodor strobelii
  misc_feature: SGI EST ID NO. CUFF.73603.0
  misc_feature: Variant of the nucleotide sequence at SEQ ID NO 31082
tttatttcgtgctcacgattcctcaatctatttatttttatccctttgatctgacaccaccagatccagttatatagtcttttcgatattttctccactgacccgaatatctggacgttcttaattaagattattgtgctgcagacatggccactaggctcacacttgacggagggtttgctctcgtcacaggagctgcgtctggcatcggcaaggaatcaactttcgcatttgccgcagcgggcgcgcaaggtgtcttatttgcagacatcgacgtggaaggagcgcaaaaagcggcagaggaaagcaaacagtatgctgtatcaatcaaataccgcgctgagtttgtcgaagtagatgttacgagcgatgaaagtgtcaaaaacatggtagaatttgctaaagcgaagtttggacggattgactacaatgtcaacagcgccgcggcaagtattctgtgttccacacatgggtcacaatagctgctgaacatgcacattgatctagattggaaacatatcccgcgcaagggcaccgcatattaaagcagatgtattccggaagacaatcgagacaaatgtcacgggcaccatgctttgcgttagcgctgtcactcatctcatggtagaccaggaaccgaaaacttacactggtcgtcatggcactcgtagcctaggacgtggttcgatcgtcaatttaggctctctgaattcctatgttgcatttccaggcactttgtcgtacacaactgcgaagcatgcgattatggggctcaccaggtctgctgcaatggactgtctaagggaccagattcgcgtcaacgctgtgtgtccattttacgtagacacaccgatgatgcaaaagagtatcgaacgggtcccgggacttgacaacatgatcaagggcatctcgccacttggacgcgcagccactgttgacgaagttgcagactacatcgtttttctatgtagcccatctgcaagctatatcaatggaactggcttggcgatcgatgctggaattactttgacagctcagactgtgtaatgcaacgaaaatgaaacgggcaatacatcttcatgtgtattggggtggatattttcgtcgacatgacaagtcgagacgcacaatagattgcacagtcatagcttctcgcctgaatagacgcgatgatttactttcccataatcatcaacagtagcgaaaatacgctgactcgatgcaactgagcattaaatgaag

SEQ ID NO: 31085 - DNA, 831 bp, Muscodor strobelii
  misc_feature: SGI cDNA ID NO. 570699
  misc_feature: Encodes the peptide sequence at SEQ ID NO 31086
atggccactaggctcacacttgacggagggtttgctctcgtcacaggagtatgcagacgtgcgaaggctgcgtctggcatcggcaaggaatcaactttcgcatttgccgcagcgggcgcgcaaggtgtcttatttgcagacatcgacgtggaaggagcgcaaaaagcggcagaggaaagcaaacagtatgctgtatcaatcaaataccgcgctgagtttgtcgaagtagatgttacgagcgatgaaagtgtcaaaaacatggtagaatttgctaaagcgaagtttggacggattgactacaatgtcaacagcgccgcggcaagtattctgtgttccacacatggggcaccgcatattaaagcagatgtattccggaagacaatcgagacaaatgtcacgggcaccatgctttgcgttagcgctgtcactcatctcatggtagaccaggaaccgaaaacttacactggtcgtcatggcactcgtagcctaggacgtggttcgatcgtcaatttaggctctctgaattcctatgttgcatttccaggcactttgtcgtacacaactgcgaagcatgcgattatggggctcaccaggtctgctgcaatggactgtctaagggaccagattcgcgtcaacgctgtgtgtccattttacgtagacacaccgatgatgcaaaagagtatcgaacgggtcccgggacttgacaacatgatcaagggcatctcgccacttggacgcgcagccactgttgacgaagttgcagactacatcgtttttctatgtagcccatctgcaagctatatcaatggaactggcttggcgatcgagtaa

SEQ ID NO: 31086 - protein, 276 aa, Muscodor strobelii
  misc_feature: SGI Peptide ID NO. 570699
  misc_feature (10)..(205): Pfam Id: PF00106 Pfam Desc: short chain dehydrogenase
  misc_feature (5)..(276): NCBI GI: 156048278 Blast Desc: SS1G_08870 [Sclerotinia sclerotiorum 1980] gi|154693267|gb|EDN93005.1| SS1G_08870 [Sclerotinia sclerotiorum 1980]
  misc_feature (25)..(276): NCBI GI: 154316211 Blast Desc: BC1G_03691 [Botryotinia fuckeliana B05.10] gi|150846477|gb|EDN21670.1| BC1G_03691 [Botryotinia fuckeliana B05.10]
  misc_feature (11)..(276): NCBI GI: 154294990 Blast Desc: BC1G_13361 [Botryotinia fuckeliana B05.10] gi|150844490|gb|EDN19683.1| BC1G_13361 [Botryotinia fuckeliana B05.10]
  misc_feature (7)..(276): NCBI GI: 145259387 Blast Desc: An04g09990 [Aspergillus niger] gi|134074978|emb|CAK39058.1| protein product [Aspergillus niger]
  misc_feature (10)..(276): NCBI GI: 242816340 Blast Desc: oxidoreductase, short-chain dehydrogenase/reductase family [Talaromyces stipitatus ATCC 10500] gi|218715096|gb|EED14519.1| oxidoreductase, short-chain family
  misc_feature (7)..(276): NCBI GI: 145241243 Blast Desc: An08g11680 [Aspergillus niger] gi|134077799|emb|CAK96788.1| protein product [Aspergillus niger]
  misc_feature (10)..(276): NCBI GI: 238840117 Blast Desc: short-chain dehydrogenase/reductase SDR [Microsporum canis CBS 113480]
  misc_feature (19)..(276): NCBI GI: 242773388 Blast Desc: short-chain dehydrogenase, [Talaromyces stipitatus ATCC 10500] gi|218721849|gb|EED21267.1| short-chain dehydrogenase, [Talaromyces stipitatus ATCC 10500]
  misc_feature (24)..(276): NCBI GI: 145602532 Blast Desc: MGG_12982 [Magnaporthe grisea 70-15] gi|145010941|gb|EDJ95597.1| MGG_12982 [Magnaporthe grisea 70-15]
  misc_feature (10)..(253): NCBI GI: 145238224 Blast Desc: An07g06820 [Aspergillus niger] gi|134076241|emb|CAK39527.1| protein product [Aspergillus niger]
  misc_feature (5)..(276): SWISSPROT Homolog: EC 1.1.1.100 3-oxoacyl-[acyl-carrier-protein] reductase
MATRLTLDGGFALVTGVCRRAKAASGIGKESTFAFAAAGAQGVLFADIDVEGAQKAAEESKQYAVSIKYRAEFVEVDVTSDESVKNMVEFAKAKFGRIDYNVNSAAASILCSTHGAPHIKADVFRKTIETNVTGTMLCVSAVTHLMVDQEPKTYTGRHGTRSLGRGSIVNLGSLNSYVAFPGTLSYTTAKHAIMGLTRSAAMDCLRDQIRVNAVCPFYVDTPMMQKSIERVPGLDNMIKGISPLGRAATVDEVADYIVFLCSPSASYINGTGLAIE

SEQ ID NO: 31087 - DNA, 1242 bp, Muscodor strobelii; identical to SEQ ID NO: 31084
  misc_feature: SGI EST ID NO. CUFF.73603.0
  misc_feature: Variant of the nucleotide sequence at SEQ ID NO 31085

SEQ ID NO: 31088 - DNA, 702 bp, Muscodor strobelii
  misc_feature: SGI cDNA ID NO. 570700
  misc_feature: Encodes the peptide sequence at SEQ ID NO 31089
atggtgccccaggagatgatcgcattgcagcgggctgctgcaaataagcccggggtcaaccagtggccggcagacggtgttacccctacgcaactcctgcataaggcattgaaaaccagtgcaacactagaagctatactatcacaggtagatattttcttcccccacacgaccgtcgatggcgatgaattggaggtacatgttactgcatatggaggccgagtgcatcaatatccacagttactcgacgcaaagcactgggtaggccgagcaatgttgcgtctgacccttaatgaagccattcatcgaggcttgaaccgatccgacacagctgttaccatttatcagcagcttaactcccagaatggcaacgagtttttcgatgcattgactaatagtaatgcgttcgatggtgattacatactgaccatacggaagcaagccttcgaccgcgtccaagacactatcacggacttactatacagcgttccctacttcttagagctctctagacgaccaacgctgtccgcaagaaatctgatttggccattgtcaataatagtagcttcgaaaatagcgtctccttcagctaaagcattcgcgctggagagacttcagttcatgggcactgaatacaatctcgaacaggcaagggaatgtgttacaatgttgcaaaagtctgatgacattgacgactggtaa

SEQ ID NO: 31089 - protein, 233 aa, Muscodor strobelii
  misc_feature: SGI Peptide ID NO. 570700
  misc_feature (24)..(233): NCBI GI: 242806133 Blast Desc: conserved [Talaromyces stipitatus ATCC 10500] gi|218715307|gb|EED14729.1| conserved [Talaromyces stipitatus ATCC 10500]
  misc_feature (71)..(233): NCBI GI: 212528002 Blast Desc: conserved [Penicillium marneffei ATCC 18224] gi|210073556|gb|EEA27643.1| conserved [Penicillium marneffei ATCC 18224]
  misc_feature (143)..(233): NCBI GI: 46117320 Blast Desc: FG04502.1 [Gibberella zeae PH-1]
  misc_feature (122)..(233): NCBI GI: 145608730 Blast Desc: MGG_06416 [Magnaporthe grisea 70-15] gi|145016170|gb|EDK00660.1| MGG_06416 [Magnaporthe grisea 70-15]
MVPQEMIALQRAAANKPGVNQWPADGVTPTQLLHKALKTSATLEAILSQVDIFFPHTTVDGDELEVHVTAYGGRVHQYPQLLDAKHWVGRAMLRLTLNEAIHRGLNRSDTAVTIYQQLNSQNGNEFFDALTNSNAFDGDYILTIRKQAFDRVQDTITDLLYSVPYFLELSRRPTLSARNLIWPLSIIVASKIASPSAKAFALERLQFMGTEYNLEQARECVTMLQKSDDIDDW

SEQ ID NO: 31090 - DNA, 2222 bp, Muscodor strobelii
  misc_feature: SGI EST ID NO. CUFF.73645.0
  misc_feature: Variant of the nucleotide sequence at SEQ ID NO 31088
ccgattgttgcgggcatgaccgatcaccacgccctgtcgccacattggtaggggcactggcttgatagagctatgagatcagttgctggccaagtaaggacgaatgggacacccagctactccatcaaaggcctgcgggccatgccgtgcgaagaggagacggtgtgacttgaaacttccggcatgcacacaatgcttaagaaccaaaagtatatgtacaggatatcgagacacgttctcactacgccaccggaacgagaatcatattgcagcattaaaagctaaagggaaatctaatacgaagtctgccgccagagacctcgaactgcgtcagacatgtgacccgagtgaccaagctcaacaagggcactctctatctacataccgttcagcaactgatcccagttacatgcagggtcgttgcgtaacggttaatgggccagagttaccgcttaacaaggacgacactgctctggggtacttcatatatgcatatgttcatgcaagtccgtttgactatctgtctcaacacatacccgcaattatcaaattggagcatgtgagaacagcactactcgcccctgctcttgtcttactttcacaaactctcagacagccatcactcgtcaactttgcgcgcgtcaaatatgcacagactctggcatatacaaacaatgcactttcatcgcctcgtgtcgcagtacaggatgacacactcctattagtgctcattttgacgcttttcgaatctatttcgtttcgaggacgccgcacgccgcagagctggattgcacatattgaaggtgccacaaccttgctaagtcggcgaggcgagaagcaatttgagaccaaattcgggtgggatctcttccaacatgctgcaagtcagatccgaactcactgcacagtcaggggcatcatggtgccccaggagatgatcgcattgcagcgggctgctgcaaataagcccggggtcaaccagtggtcggttcaatttgggcaattactcgacaatcacgcgagtttattggctggtatacacaggccggcagacggtgttacccctacgcaactcctgcataaggcattgaaaaccagtgcaacactagaagctatactatcacaggtagatattttcttcccccacacgaccgtcgatggcgatgaattggaggtacatgttactgcatatggaggccgagtgcatcaatatccacagttactcgacgcaaagcactgggtaggccgagcaatgttgcgtctgacccttaatgaagccattcatcgaggcttgaaccgatccgacacagctgttaccatttatcagcagcttaactcccagaatggcaacgagtttttcgatgcattgactaatagtaatgcgttcgatggtgattacatactgaccatacggaagcaagccttcgaccgcgtccaagacactatcacggacttactatacagcgttccctacttcttagagctctctagacgaccaacgctgtccgcaagaaatctgatttggccattgtcaataatagtagcttcgaaaatagcgtctccttcagctaaagcattcgcgctggagagacttcagttcatgggcactgaatacaatctcgaacaggcaagggaatgtgttacaatgttgcaaaagtctgatgacattgacgactgggtacatctcagcttcttcaattgagccttcggacaaaaaagcaagcaacaggtacccatcagtaatgactattgttgtagtacaaggagggaatcaaaaaccctcgctacttctaccttgggaatcaatttcgtgtactcaccccagaaactccatgtatgtgataagacgttgagtacctaattgatgtcattcaatgttacaagcagtttggtaagatcatgattcgcaaagtgagcggcagtctaggccttcaaatctgtctacacatcaatgatctgtacctatgcaatcaacgacgaacgtctttgttaatttgtttaaacattcaaccgagaactctatcaagattaatcatacagagatcgaagatgagttcccacagagatgaaatgtcaccgagcgccacgccggagtgtcaacaaacttggttacatttacactgacggccgtcaccttgaccgtgttgtcgaagacatcgatgcgtttatgtccgatgctctctccgctagaaagcaaagtccactataatataccagtgtca

SEQ ID NO: 31091 - DNA, 1479 bp, Muscodor strobelii
  misc_feature: SGI cDNA ID NO. 570701
  misc_feature: Reduced expression when VOC is produced
  misc_feature: Encodes the peptide sequence at SEQ ID NO 31092
atgtttttcaaacacctccaagtaacgagctgcctcggggcaatcttgttgagagcagctcatgcggaccctgagggtgtgagcacaacataccccaactaccgtatctctccaatcgatgggtctataatcgcattgcccacacaagaccagctagacttccaagacaaggagatgggcatactaatccatttcgagatcgcaacctacctcaacatagatggatgcaacggcgttccaggtctcgtcccagatccatcgctcttcgatccagagcaacttaataccgatcaatggatggagagtatcacggccttcggtgcgaaatacgcaacgctagtcgcgaagcacaattgcggatttctcaattggccgagtaacatcacgtttcttacgcgcgagaacgtgacgaatccttataattatagtacggagtacagccccgtcaagaaagatgttgtgagattattctcggattcagcgataaagtatggggttggtcatgggttctattacagtactatcgtgaataacttcctcaacgtgcagaagaatgttgtcaatgctacgtggggaccaggtgaggtgagggtcagtaatgagacgtatgatgagattgtctttgagcatttgacggatctctggactagttatggggagttgactgagctttggtttgatgggggatggagtgacagtcagaccgaacagcttcaggatatgcttttgcggtatcagcctcatgcgaacattttcaactcctgtacgacgaatggcacctgcctctcgagtaacgcgattaggtggattggcacggaaagcggtcttccgaatcaagagatctggtcaacaggagtaagcaacgatggaggcgatccgatgagcccttacttcgcgcccgcggaatgcgacacgacactgcagacaggtattcgatggttctggggagtcaaccagcctctgaggtccttagatgaaatgatcgatgtctatcatcagactgtcggtcggaactgtattcttgaacttgatctggcgcctgatcgaagtgggcttgtaccagaagctcatgcgacgaggtataaggagcttggggacttcattcgatcttgttacggaagtcctgttggttcggcgattaccaacatcactacttccacagacattgtgttcgcctttgaaggccccacggcgattgacagagtcgtattgatggaggaccagagcgctggacaggtcatcagggcttatgacgtttatgccaaagtcgtcgatgccaaaaatacggacgagacgtcagatgcgccgtggactttgctttctagcggagagagcatcggacataaacgcatcgatgtcttcgacaacacggtcaaggtgacggccgtcagtgtaaatgtaaccaagtttgttgacactccggcgtggcgctcggtgacatttcatctctgtgggaactcatcttcgatctctgtatga

SEQ ID NO: 31092 - protein, 492 aa, Muscodor strobelii
  misc_feature: SGI Peptide ID NO. 570701
  misc_feature (97)..(126): Pfam Id: PF01120 Pfam Desc: Alpha-L-fucosidase
  misc_feature (42)..(482): NCBI GI: 153807070 Blast Desc: BACCAC_01347 [Bacteroides caccae ATCC 43185] gi|149130190|gb|EDM21400.1| BACCAC_01347 [Bacteroides caccae ATCC 43185]
  misc_feature (33)..(486): NCBI GI: 261406480 Blast Desc: Alpha-L-fucosidase [Geobacillus sp. Y412MC10] gi|261282943|gb|ACX64914.1| Alpha-L-fucosidase [Geobacillus sp. Y412MC10]
  misc_feature (44)..(474): NCBI GI: 88710865 Blast Desc: FB2170_02105 [Flavobacteriales bacterium HTCC2170] gi|88709806|gb|EAR02038.1| FB2170_02105 [Flavobacteriales bacterium HTCC2170]
  misc_feature (44)..(483): NCBI GI: 261404870 Blast Desc: Alpha-L-fucosidase [Geobacillus sp. Y412MC10] gi|261281333|gb|ACX63304.1| Alpha-L-fucosidase [Geobacillus sp. Y412MC10]
  misc_feature (44)..(475): NCBI GI: 212692270 Blast Desc: BACDOR_01766 [Bacteroides dorei DSM 17855] gi|237711460|ref|ZP_04541941.1| glycoside hydrolase family 29 protein [Bacteroides sp. 9_1_42FAA] glycoside hydrolase family 29
  misc_feature (44)..(475): NCBI GI: 265752866 Blast Desc: glycoside hydrolase family 29 [Bacteroides sp. 3_1_33FAA] gi|263236052|gb|EEZ21547.1| glycoside hydrolase family 29 [Bacteroides sp. 3_1_33FAA]
  misc_feature (47)..(485): NCBI GI: 225872978 Blast Desc: Tat pathway signal sequence domain protein [Acidobacterium capsulatum ATCC 51196] gi|225791986|gb|ACO32076.1| Tat pathway signal sequence domain
  misc_feature (44)..(474): NCBI GI: 253571367 Blast Desc: conserved [Bacteroides sp. 1_1_6] gi|251839320|gb|EES67404.1| conserved [Bacteroides sp. 1_1_6]
  misc_feature (44)..(474): NCBI GI: 153809028 Blast Desc: BACCAC_03332 [Bacteroides caccae ATCC 43185] gi|149128361|gb|EDM19580.1| BACCAC_03332 [Bacteroides caccae ATCC 43185]
  misc_feature (47)..(454): NCBI GI: 198274929 Blast Desc: BACPLE_01088 [Bacteroides plebeius DSM 17135] gi|198272376|gb|EDY96645.1| BACPLE_01088 [Bacteroides plebeius DSM 17135]
  misc_feature (43)..(474): SWISSPROT Homolog: EC 3.2.1.51 Alpha-L-fucosidase
  misc_feature: Useful for introducing or modulating the production of volatile compounds
MFFKHLQVTSCLGAILLRAAHADPEGVSTTYPNYRISPIDGSIIALPTQDQLDFQDKEMGILIHFEIATYLNIDGCNGVPGLVPDPSLFDPEQLNTDQWMESITAFGAKYATLVAKHNCGFLNWPSNITFLTRENVTNPYNYSTEYSPVKKDVVRLFSDSAIKYGVGHGFYYSTIVNNFLNVQKNVVNATWGPGEVRVSNETYDEIVFEHLTDLWTSYGELTELWFDGGWSDSQTEQLQDMLLRYQPHANIFNSCTTNGTCLSSNAIRWIGTESGLPNQEIWSTGVSNDGGDPMSPYFAPAECDTTLQTGIRWFWGVNQPLRSLDEMIDVYHQTVGRNCILELDLAPDRSGLVPEAHATRYKELGDFIRSCYGSPVGSAITNITTSTDIVFAFEGPTAIDRVVLMEDQSAGQVIRAYDVYAKVVDAKNTDETSDAPWTLLSSGESIGHKRIDVFDNTVKVTAVSVNVTKFVDTPAWRSVTFHLCGNSSSISV

SEQ ID NO: 31093 - DNA, 1921 bp, Muscodor strobelii
  misc_feature: SGI EST ID NO. CUFF.73646.1
  misc_feature: Variant of the nucleotide sequence at SEQ ID NO 31091
gtcattgcttccgatggggtgaaagattctattgtcaagtcgtcctcctcaatgcgcgtcaaaacacgcgattcaagatgtttttcaaacacctccaagtaacgagctgcctcggggcaatcttgttgagagcagctcatgcggaccctgagggtgtgagcacaacataccccaactaccgtatctctccaatcgatgggtctataatcgcattgcccacacaagaccagctagacttccaagacaaggagatgggcatactaatccatttcgagatcgcaacctacctcaacatagatggatgcaacggcgttccaggtctcgtcccagatccatcgctcttcgatccagagcaacttaataccgatcaatggatggagagtatcacggccttcggtgcgaaatacgcaacgctagtcgcgaagcacaattgcggatttctcaattggccgagtaacatcacgtttcttacgcgcgagaacgtgacgaatccttataattatagtacggagtacagccccgtcaagaaagatgttgtgagattattctcggattcagcgataaagtatggggttggtcatgggttctattacagtactatcgtgaataacttcctcaacgtgcagaagaatgttgtcaatgctacgtggggaccaggtgaggtgagggtcagtaatgagacgtatgatgagattgtctttgagcatttgacggatctctggactagttatggggagttgactgagctttggtttgatgggggatggagtgacagtcagaccgaacagcttcaggatatgcttttgcggtatcagcctcatgcgaacattttcaactcctgtacgacgaatggcacctgcctctcgagtaacgcgattaggtggattggcacggaaagcggtcttccgaatcaagagatctggtcaacaggagtaagcaacgatggaggcgatccgatgagcccttacttcgcgcccgcggaatgcgacacgacactgcagacaggtattcgatggttctggggagtcaaccagcctctgaggtccttagatgaaatgatcgatgtctatcatcagactgtcggtcggaactgtattcttgaacttgatctggcgcctgatcgaagtgggcttgtaccagaagctcatgcgacgaggtataaggagcttggggacttcattcgatcttgttacggaagtcctgttggttcggcgattaccaacatcactacttccacagacattgtgttcgcctttgaaggccccacggcgattgacagagtcgtattgatggaggaccagagcgctggacaggtcatcagggcttatgacgtttatgccaaagtcgtcgatgccaaaaatacggacgagacgtcagatgcgccgtggactttgctttctagcggagagagcatcggacataaacgcatcgatgtcttcgacaacacggtcaaggtgacggccgtcagtgtaaatgtaaccaagtttgttgacactccggcgtggcgctcggtgacatttcatctctgtgggaactcatcttcgatctctgtatgattaatcttgatagagttctcggttgaatgtttaaacaaattaacaaagacgttcgtcgttgattgcataggtacagatcattgatgtgtagacagatttgaaggcctagactgccgctcactttgcgaatcatgatcttaccaaactgcttgtaacattgaatgacatcaattaggtactcaacgtcttatcacatacatggagtttctggggtgagtacacgaaattgattcccaaggtagaagtagcgagggtttttgattcccttagttatcagtctcagttcctgtcattattaagataacttttctcttacctccttgtactacaacaatagtcattactgatgggtacctgttgcttgc

SEQ ID NO: 31094 - DNA, 1515 bp, Muscodor strobelii
  misc_feature: SGI cDNA ID NO. 570702
  misc_feature: Reduced expression when VOC is produced
  misc_feature: Encodes the peptide sequence at SEQ ID NO 31095
atgatagcgccgccgagctcccggcgcttccgcatttttggcgccgtaaccgttataacgttaatcattaccgtagttcacctccggccccaatggcggttggaatatgcccgcgactactacgagaatgtctctaaatatttcaattcgtcaatacataacaacactctctattccgaaaagaatgaagattatgtccaaaaattctataactcgaccgatcaatgcgccagcttccccaatacggacggtgtcatgttggtgatgaagacgggggccactgaatcctatgaccggctaccaacgcagctcttgacaactctgtcatgccttcccgacatgctgctcttctccgatatggagcagcaaatcggcccacatcacatctacgatgtgcttgcagaagtgaacgaagaattcagggcgcagaacggcgatttcgatctctaccgcgctcagcaggactgtcctgtgtcgcagaaacagtgtatcgacccaaaggaacagggcaataaggcttgggtgttggataaatacaagttcatgcccatgctggagcaaacctggctgatgcgacctggccgtgattggtacgtctttgccgaagccgatacgtacgtcttttgggagaatttgatgtactggttgaaacacgagtctggcttcgaccctcacgacaagatctacctgggcagccgcagcttcatagcagggcgtccttttgcccacggtgggtctggttatattgtcagcggaacattgttgaagcatctcattgagttccatcatgactcaatccctaaactcaccgagcagggtactcaggagtgctgtggtgatttgttggttgccctggcgtttaacgagtacgaggagatcaaaattcgtcaaacttggcccatgatcaatggcgagaaaccaactaccctgccatacggtaacaaccattggtgcgagccgattttgacgatgcatcacatgaattccgaggagatcagcaacgtgtggcaatttgagaagagccgcaagacaaatgatatactgatgatcaaagacctatacgagagcctcattgcgcccaagatgaaagacactcgcgaaaattggaataacctgtccgacgacgtctgctatttgaatcctgatcaagaagcgcaagataaagcggaagatcgtgataaagaccgccagaagaaacaagaagatatgagcgaagtggaaaagagcgcgtggaaatcgccagaagactgcgctaaagtttgcgaatccgagattgccgaggaagatgcgaatgatcaagaaaagaaccgcgatcggaaatgcttccaataccgttggcacgataatgtctgttgtacctcgaagagcttcaaatttggcgaacccaaatcaaaaccaaaagatgacgactcgaaaacagaatggacgagtggatggtacctcaaaggaattgagaactggatagacgcaaaaggcccctgcgagacgccagcctggaaaattcccgaggaatga

SEQ ID NO: 31095 - protein, 504 aa, Muscodor strobelii
  misc_feature: SGI Peptide ID NO. 570702
  misc_feature (1)..(504): NCBI GI: 261351939 Blast Desc: conserved [Verticillium albo-atrum VaMs.102]
  misc_feature (71)..(502): NCBI GI: 256731721 Blast Desc: NECHADRAFT_106134 [Nectria haematococca mpVI 77-13-4]
  misc_feature (71)..(502): NCBI GI: 46136867 Blast Desc: FG09949.1 [Gibberella zeae PH-1]
  misc_feature (76)..(499): NCBI GI: 171678145 Blast Desc: protein product [Podospora anserina] gi|170937142|emb|CAP61799.1| protein product [Podospora anserina]
  misc_feature (76)..(494): NCBI GI: 116205842 Blast Desc: CHGG_02214 [Chaetomium globosum CBS 148.51] gi|88182811|gb|EAQ90279.1| CHGG_02214 [Chaetomium globosum CBS 148.51]
  misc_feature (76)..(499): NCBI GI: 85092897 Blast Desc: NCU02191 [Neurospora crassa OR74A] gi|28921028|gb|EAA30349.1| [Neurospora crassa OR74A]
  misc_feature (76)..(478): NCBI GI: 261357166 Blast Desc: conserved [Verticillium albo-atrum VaMs.102]
  misc_feature (5)..(502): NCBI GI: 119482363 Blast Desc: NFIA_092740 [Neosartorya fischeri NRRL 181] gi|119409364|gb|EAW19313.1| conserved [Neosartorya fischeri NRRL 181]
  misc_feature (5)..(502): NCBI GI: 71002772 Blast Desc: conserved [Aspergillus fumigatus Af293] gi|66853705|gb|EAL94029.1| conserved [Aspergillus fumigatus Af293] gi|159130120|gb|EDP55234.1| conserved [Aspergillus A1163]
  misc_feature (11)..(499): NCBI GI: 238491332 Blast Desc: conserved [Aspergillus flavus NRRL3357] gi|220697316|gb|EED53657.1| conserved [Aspergillus flavus NRRL3357]
  misc_feature: Useful for introducing or modulating the production of volatile compounds
MIAPPSSRRFRIFGAVTVITLIITVVHLRPQWRLEYARDYYENVSKYFNSSIHNNTLYSEKNEDYVQKFYNSTDQCASFPNTDGVMLVMKTGATESYDRLPTQLLTTLSCLPDMLLFSDMEQQIGPHHIYDVLAEVNEEFRAQNGDFDLYRAQQDCPVSQKQCIDPKEQGNKAWVLDKYKFMPMLEQTWLMRPGRDWYVFAEADTYVFWENLMYWLKHESGFDPHDKIYLGSRSFIAGRPFAHGGSGYIVSGTLLKHLIEFHHDSIPKLTEQGTQECCGDLLVALAFNEYEEIKIRQTWPMINGEKPTTLPYGNNHWCEPILTMHHMNSEEISNVWQFEKSRKTNDILMIKDLYESLIAPKMKDTRENWNNLSDDVCYLNPDQEAQDKAEDRDKDRQKKQEDMSEVEKSAWKSPEDCAKVCESEIAEEDANDQEKNRDRKCFQYRWHDNVCCTSKSFKFGEPKSKPKDDDSKTEWTSGWYLKGIENWIDAKGPCETPAWKIPEE

SEQ ID NO: 31096 - DNA, 2305 bp, Muscodor strobelii
  misc_feature: SGI EST ID NO. CUFF.73825.2
  misc_feature: Variant of the nucleotide sequence at SEQ ID NO 31094
tctcattctcctcgcctccctgcgacctgctctctttattccctactttctagttttgacatcttcaatctttgtttatccctttcttccttcttggccgtcgtgaacgtccctgaaacaacaacaacagcatcctactgtttcctccacccgcctctgtatctcttcccactcatgagttcatatccttgattttcgatctcgtacgaggtttgtcctcaagtatctctaataatttttctcgtgaccgcccgccacctacggagtgttgcaaatatgatagcgccgccgagctcccggcgcttccgcatttttggcgccgtaaccgttataacgttaatcattaccgtagttcacctccggccccaatggcggttggaatatgcccgcgactactacgagaatgtctctaaatatttcaattcgtcaatacataacaacactctctattccgaaaagaatgaagattatgtccaaaaattctataactcgaccgatcaatgcgccagcttccccaatacggacggtgtcatgttggtgatgaagacgggggccactgaatcctatgaccggctaccaacgcagctcttgacaactctgtcatgccttcccgacatgctgctcttctccgatatggagcagcaaatcggcccacatcacatctacgatgtgcttgcagaagtgaacgaagaattcagggcgcagaacggcgatttcgatctctaccgcgctcagcaggactgtcctgtgtcgcagaaacagtgtatcgacccaaaggaacagggcaataaggcttgggtgttggataaatacaagttcatgcccatgctggagcaaacctggctgatgcgacctggccgtgattggtacgtctttgccgaagccgatacgtacgtcttttgggagaatttgatgtactggttgaaacacgagtctggcttcgaccctcacgacaagatctacctgggcagccgcagcttcatagcagggcgtccttttgcccacggtgggtctggttatattgtcagcggaacattgttgaagcatctcattgagttccatcatgactcaatccctaaactcaccgagcagggtactcaggagtgctgtggtgatttgttggttgccctggcgtttaacgagtacgaggagatcaaaattcgtcaaacttggcccatgatcaatggcgagaaaccaactaccctgccatacggtaacaaccattggtgcgagccgattttgacgatgcatcacatgaattccgaggagatcagcaacgtgtggcaatttgagaagagccgcaagacaaatgtaagttcttacgtggatttatatcgtgtcatcccgcattgaaggtctcgatacttgtgggggatcgatgtatgggaggtgagactgacccgtgtctcaggatatactgatgatcaaagacctatacgagagcctcattgcgcccaagatgaaagacactcgcgaaaattggaataacctgtccgacgacgtctgctatttgaatcctgatcaagaagcgcaagataaagcggaagatcgtgataaagaccgccagaagaaacaagaagatatgagcgaagtggaaaagagcgcgtggaaatcgccagaagactgcgctaaagtttgcgaatccgagattgccgaggaagatgcgaatgatcaagaaaagaaccgcgatcggaaatgcttccaataccgttggcacgataatgtctgttgtacctcgaagagcttcaaatttggcgaacccaaatcaaaaccaaaagatgacgactcgaaaacagaatggacgagtggatggtacctcaaaggaattgagaactggatagacgcaaaaggcccctgcgagacgccagcctggaaaattcccgaggaatgagcaggctcaacgcaactctgcaagacaagatgcaaagagattcaacaagaatccacgataccgacgagacgacttatatgcgggccatccgagacgaacatacaccaaacctatacgacttttgctttgatacccttatgaagagacatcggtttcttgggctttacataccgaggcggattatgcatacccatggcgttaatggataaaacatagacattgcatagggttactggctttagcgactttggctcaaggggaacaaccatagagcctggaaaatatcgacgcccaggaatagagctcttgagcaaaggatagcatagtgtcgcttaccaacttggccaaggcgaattgaattgtatatcaaatgaaaagattaactcaaatgaattatttgacgatttggaagcg

SEQ ID NO: 31097 - DNA, 3054 bp, Muscodor strobelii
  misc_feature: SGI cDNA ID NO. 570703
  misc_feature: Reduced expression when VOC is produced
  misc_feature: Encodes the peptide sequence at SEQ ID NO 31098
atggttttatacaagcgcaagccagtgcagtttctgcaagaaccccacctccatgatgagagctcagatgtctggcacatcccccaaacaggagaggtcttcaactcatatgatgactatctgactcgcatggacttttataaccagaaaagattcatctgtcaaataactggacactccggcatgtctttcttcgaagctctcaagagcgagcttgcgggcgccgaagaagtcgaacaggccttccccgaagccctgaagggccccgttctccgacgcgttcagttccagacgatctctcgtatcgacacgttagtggacatggtatacgacgagttcaagaacgattactatcccggcgaagtggttacgattcaacttgcctcaggagaaagatgtacaggtatcgtgagagacaaggctaggcttggaagtaaggttttacctgacggcacactcacgcaacccttttcgcgatattccacgagcatcgacggtcgaccggacgaagaagcgcaggtcgatagcgaacatatcagccgagaccgcaaaatcttcaccaagttgattttgcgctcgttcatcaagaagaccgttacgcgcgaggcttggaacggagccccctggctcgtgaagcatgacgtggctgcgcaataccacatcgacactcgagttcctccccatttgcgttacgataataagcttctcgagcgcaaacaacacgcagcacagaaacgtgctatgcatccccagaccggactacaggacatgaatggacatgttattaatgggtatcacatgggccctgttcgaggaccgagtggaggacctgtccgactgcccgagctgaaacctgcgccgaagggacataaaatgcacagaggtcaccaccaggaccatatgccccaaattccctttggccgaggtgctccgagccaactgctaccacatggccatgacgcattcccatctactccaggtaacaatcctttccactacccggtcccgcttcgacagagtggacctcctgtccaggctatcgttgcaaaaccgaaggcccctacaccaccaccgccaccccctaagtatcccatcgaggatcttcaactggaaccgcgcgaggatattgtgcgacctgctatgcattttatttgccacgacactccggatgatgtggttgacactactatgcgcaacgagagcattgacatgaagtctgttggtccattgcttgagacttgggatacgctgaatgtgtactgcgagattttcaagctggactctttcaccttcgatgactatatccaggccctcgatgtggccaccatcgagaatccctgtcagctgtttacagagatccattgcgctgttttgaagcagattgtcagttccgagcaggacggtggcatcctacaggtaaacttaccagattgggacgacgaggaagatgaggaagaagaagaagaagaagagagcgccgcggccacacctacccctaaacccgagcccagacgctccggccgtgcgaccagaagtagtctcgcaaagttggaggcagaaagacttaaagcagaagccgaagctgccgagaaggagacggagcctgaagtcacagtgaaacatcgcgcagcggaattatcctcggactttcaatggattgaggaagtcaagaagcgcaactttcagaatggtggatgggagatgatcatggtttgtctgctgtatcagctatccaagaacccgcggaagaccgaggcttgcgaagagctacttcagcatctctgcacacccgagaaagaacccaccattgagaacattcgcgaacaatattccaccatggatctcaaccttcgagtttcggctattcagattatttgcatgctcaccatggagacaaaggctgtccgtggctatatggaagattgcgccgagactcaaacccagtatcgcaaagagaagattgaatggcagcgtaatcgaaagcaagctcttgaggaattgaaggctctcaatgatcagcgcaggatccttcttcctgacaatatgccgccatctccgcccgcagagggcgaagaagctgcgaagactgatggcgacgtgaagatgggtggcactgacgactctcccgacgaacctagtgaagacgctgacgatagtgacgaatccgtccaagctcgtcgtggcctccggagaggcggtgatcgagctgcagaacgccaaaagaagcgaaagcgtgaggagcttgagcgcaagaaggaagcggaacttgctgccaaggcccctaagcaatctaagcaattcctgaagattctgaaggatatccagaagaaggatgactatatcaagcaatgcgaagacgaagttgccactctggacaacgacttgcgtgaagccgactgcgctcgcacacgcgttatcggcaaggaccgattctggaatcgatattactggtttgagcgcaacggcatgccatacagcggattgcccaatagctcgacagccgatgctggatatgccaacggctgtatctggattcaagggcccgacgacatcgagcgcgagggatatattgaccttgatgccaaggcccaggatgagtacaaggccaaatttaaaatgacggtccctaagaggaagaagatggaggagggccgcaccagcgtgtacaatgccaggcagtggggctattactccgagcctgagcagttggaccaacttctcaattggctcgacggccgcggattcaacgagaccaagttgcgtaaggagctagttggctacaaggacaagatcgtcgcaggtatggaggccaggaagaagtatctctcccttcccgaagaggataaggaaagggacgaagaggagaagaaagcgaagaagcccgacgctaagcgtatgagcacccgaacgaagaaggaacccagtatcgagccgcagcattaccgttgcatggactgggtcaatactatggcgcttgaggagctgggacatattcactctgagccgcctccgccgcccaagacgaagaggggtggacgaaagagtcgcggttga

SEQ ID NO: 31098 - protein, 1017 aa, Muscodor strobelii
  misc_feature: SGI Peptide ID NO. 570703
  misc_feature (404)..(467): Pfam Id: PF02791 Pfam Desc: DDT domain
  misc_feature (2)..(1014): NCBI GI: 116207292 Blast Desc: CHGG_02939 [Chaetomium globosum CBS 148.51] gi|88183536|gb|EAQ91004.1| CHGG_02939 [Chaetomium globosum CBS 148.51]
  misc_feature (2)..(1014): NCBI GI: 171685896 Blast Desc: protein product [Podospora anserina] gi|170942909|emb|CAP68562.1| protein product [Podospora anserina]
  misc_feature (1)..(1014): NCBI GI: 256725799 Blast Desc: chromatin assembly protein [Nectria haematococca mpVI 77-13-4]
  misc_feature (1)..(1003): NCBI GI: 156033173 Blast Desc: SS1G_13662 [Sclerotinia sclerotiorum 1980] gi|154699065|gb|EDN98803.1| SS1G_13662 [Sclerotinia sclerotiorum 1980]
  misc_feature (1)..(1013): NCBI GI: 39941552 Blast Desc: MGG_05687 [Magnaporthe grisea 70-15] gi|145022380|gb|EDK06400.1| MGG_05687 [Magnaporthe grisea 70-15]
  misc_feature (1)..(1014): NCBI GI: 46111291 Blast Desc: FG02527.1 [Gibberella zeae PH-1]
  misc_feature (1)..(1010): NCBI GI: 85081193 Blast Desc: NCU00164 [Neurospora crassa OR74A] gi|28917750|gb|EAA27441.1| conserved [Neurospora crassa OR74A]
  misc_feature (1)..(1003): NCBI GI: 154315703 Blast Desc: BC1G_04424 [Botryotinia fuckeliana B05.10] gi|150847364|gb|EDN22557.1| BC1G_04424 [Botryotinia fuckeliana B05.10]
  misc_feature (2)..(1007): NCBI GI: 238841401 Blast Desc: DDT domain-containing protein [Microsporum canis CBS 113480]
  misc_feature (1)..(1015): NCBI GI: 145258996 Blast Desc: An04g08810 [Aspergillus niger] gi|134074854|emb|CAK38968.1| protein product [Aspergillus niger]
  misc_feature: Useful for introducing or modulating the production of volatile compounds
MVLYKRKPVQFLQEPHLHDESSDVWHIPQTGEVFNSYDDYLTRMDFYNQKRFICQITGHSGMSFFEALKSELAGAEEVEQAFPEALKGPVLRRVQFQTISRIDTLVDMVYDEFKNDYYPGEVVTIQLASGERCTGIVRDKARLGSKVLPDGTLTQPFSRYSTSIDGRPDEEAQVDSEHISRDRKIFTKLILRSFIKKTVTREAWNGAPWLVKHDVAAQYHIDTRVPPHLRYDNKLLERKQHAAQKRAMHPQTGLQDMNGHVINGYHMGPVRGPSGGPVRLPELKPAPKGHKMHRGHHQDHMPQIPFGRGAPSQLLPHGHDAFPSTPGNNPFHYPVPLRQSGPPVQAIVAKPKAPTPPPPPPKYPIEDLQLEPREDIVRPAMHFICHDTPDDVVDTTMRNESIDMKSVGPLLETWDTLNVYCEIFKLDSFTFDDYIQALDVATIENPCQLFTEIHCAVLKQIVSSEQDGGILQVNLPDWDDEEDEEEEEEEESAAATPTPKPEPRRSGRATRSSLAKLEAERLKAEAEAAEKETEPEVTVKHRAAELSSDFQWIEEVKKRNFQNGGWEMIMVCLLYQLSKNPRKTEACEELLQHLCTPEKEPTIENIREQYSTMDLNLRVSAIQIICMLTMETKAVRGYMEDCAETQTQYRKEKIEWQRNRKQALEELKALNDQRRILLPDNMPPSPPAEGEEAAKTDGDVKMGGTDDSPDEPSEDADDSDESVQARRGLRRGGDRAAERQKKRKREELERKKEAELAAKAPKQSKQFLKILKDIQKKDDYIKQCEDEVATLDNDLREADCARTRVIGKDRFWNRYYWFERNGMPYSGLPNSSTADAGYANGCIWIQGPDDIEREGYIDLDAKAQDEYKAKFKMTVPKRKKMEEGRTSVYNARQWGYYSEPEQLDQLLNWLDGRGFNETKLRKELVGYKDKIVAGMEARKKYLSLPEEDKERDEEEKKAKKPDAKRMSTRTKKEPSIEPQHYRCMDWVNTMALEELGHIHSEPPPPPKTKRGGRKSRG

SEQ ID NO: 31099 - DNA, 4566 bp, Muscodor strobelii
  misc_feature: SGI EST ID NO. CUFF.73637.0
  misc_feature: Variant of the nucleotide sequence at SEQ ID NO 31097
gaatagtgatatcaaatacgccgttaagtcgaggctccttggacctccggacctacctttaacaggccactagatggacattgataagtccagataaatcagacattttctatcaaagtgggacatttgagtactcgttctgttgccctgagaaaggcgattcgaacgagtacagcaatgcgcacagaagaagcggtgatgatggatgagggccaaagggtcgtgacgatggggtaggtagggcggttgacggtgggagcgtttttgaggtggacaagactttgagggccgtccaaaataagcccaaataagccagagactccaccggccgggagcaagctatccaatgattgtatagaaaaggtgccgtcatccccgggcctggacaccctggccgtcgaacccctggcttcaagggtgggcactgaattgtgtggatgttcaaggtttagagacttaacaagtaacactaaccgtcattcgatcagcccgcgcagacaagtaccacccgcgactgaccctgcgtttttacctcatcttttgcattgtctaaaaactagaggtacaaactcaactagggtagtatagtggaggaccatcccgaccctctgcttgacctaccgcataaagccattcttcacttgtaattattttagtccacctcctctccgaccacttcccttctccctcacataccaccaccgacgcttcttctgcgccctcaccggctgacgaaatctcttcaactctcagaccccaatcttcaaccacaaccaccacatcagcgcagagtatcatttcttttccactagcctcaatagcaaacgtccggagctgaacttgatgcctccgacgcgacggaagccgttgaccgcgtctcggacttgatttcgggagcctgactccattacttcagcccgttcgcttatactctctctaacttacatcctttctcgccaacatcttgctctttctcctcgccgtggctctttgagctttggccatcgctgtatttcttttcaagatggttttatacaagcgcaagccagtgcagtttctgcaagaaccccacctccatgatgagagctcagatgtctggcacatcccccaaacaggagaggtcttcaactcatatgatgactatctgactcgcatggacttttataaccagaaaagattcatctgtcaaataactggacactccggcatgtctttcttcgaagctctcaagagcgagcttgcgggcgccgaagaagtcgaacaggccttccccgaagccctgaagggccccgttctccgacgcgttcagttccagacgatctctcgtatcgacacgttagtggacatggtatacgacgagttcaagaacgattactatcccggcgaagtggttacgattcaacttgcctcaggagaaagatgtacaggtatcgtgagagacaaggctaggcttggaagtaaggttttacctgacggcacactcacgcaacccttttcgcgatattccacgagcatcgacggtcgaccggacgaagaagcgcaggtcgatagcgaacatatcagccgagaccgcaaaatcttcaccaagttgattttgcgctcgttcatcaagaagaccgttacgcgcgaggcttggaacggagccccctggctcgtgaagcatgacgtggctgcgcaataccacatcgacactcgagttcctccccatttgcgttacgataataagcttctcgagcgcaaacaacacgcagcacagaaacgtgctatgcatccccagaccggactacaggacatgaatggacatgttattaatgggtatcacatgggccctgttcgaggaccgagtggaggacctgtccgactgcccgagctgaaacctgcgccgaagggacataaaatgcacagaggtcaccaccaggaccatatgccccaaattccctttggccgaggtgctccgagccaactgctaccacatggccatgacgcattcccatctactccaggtaacaatcctttccactacccggtcccgcttcgacagagtggacctcctgtccaggctatcgttgcaaaaccgaaggcccctacaccaccaccgccaccccctaagtatcccatcgaggatcttcaactggaaccgcgcgaggatattgtgcgacctgctatgcattttatttgccacgacactccggatgatgtggttgacactactatgcgcaacgagagcattgacatgaagtctgttggtccattgcttgagacttgggatacgctgaatgtgtactgcgagattttcaagctggactctttcaccttcgatgactatatccaggccctcgatgtggccaccatcgagaatccctgtcagctgtttacagagatccattgcgctgttttgaagcagattgtcagttccgagcaggacggtggcatcctacaggtaaacttaccagattgggacgacgaggaagatgaggaagaagaagaagaagaagagagcgccgcggccacacctacccctaaacccgagcccagacgctccggccgtgcgaccagaagtagtctcgcaaagttggaggcagaaagacttaaagcagaagccgaagctgccgagaaggagacggagcctgaagtcacagtgaaacatcgcgcagcggaattatcctcggactttcaatggattgaggaagtcaagaagcgcaactttcagaatggtggatgggagatgatcatggtttgtctgctgtatcagctatccaagaacccgcggaagaccgaggcttgcgaagagctacttcagcatctctgcacacccgagaaagaacccaccattgagaacattcgcgaacaatattccaccatggatctcaaccttcgagtttcggctattcagattatttgcatgctcaccatggagacaaaggctgtccgtggctatatggaagattgcgccgagactcaaacccagtatcgcaaagagaagattgaatggcagcgtaatcgaaagcaagctcttgaggaattgaaggctctcaatgatcagcgcaggatccttcttcctgacaatatgccgccatctccgcccgcagagggcgaagaagctgcgaagactgatggcgacgtgaagatgggtggcactgacgactctcccgacgaacctagtgaagacgctgacgatagtgacgaatccgtccaagctcgtcgtggcctccggagaggcggtgatcgagctgcagaacgccaaaagaagcgaaagcgtgaggagcttgagcgcaagaaggaagcggaacttgctgccaaggcccctaagcaatctaagcaattcctgaagattctgaaggatatccagaagaaggatgactatatcaagcaatgcgaagacgaagttgccactctggacaacgacttgcgtgaagccgactgcgctcgcacacgcgttatcggcaaggaccgattctggaatcgatattactggtttgagcgcaacggcatgccatacagcggattgcccaatagctcgacagccgatgctggatatgccaacggctgtatctggattcaagggcccgacgacatcgagcgcgagggatatattgaccttgatgccaaggcccaggatgagtacaaggccaaatttaaaatgacggtccctaagaggaagaagatggaggagggccgcaccagcgtgtacaatgccaggcagtggggctattactccgagcctgagcagttggaccaacttctcaattggctcgacggccgcggattcaacgagaccaagttgcgtaaggagctagttggctacaaggacaagatcgtcgcaggtatggaggccaggaagaagtatctctcccttcccgaagaggataaggaaagggacgaagaggagaagaaagcgaagaagcccgacgctaagcgtatgagcacccgaacgaagaaggaacccagtatcgagccgcagcattaccgttgcatggactgggtcaatactatggcgcttgaggagctgggacatattcactctgagccgcctccgccgcccaagacgaagaggggtggacgaaagagtcgcggttgagccactatcgtctcacccatgggttccggacagtatatgagattacgacgacacgctttttacttcaccgctctatgagaatgggaaaacatgggggagatagacggcgtaggcgttttgcttttacggggaaatgctcgatggttctctggtttcggggtggtgggtgtctgtgcctaaaagtgccttacagctcgggtgcatgggttgggtggagtgcatatgaaaatgaggtgcatggtgggagttctttagatggatagatggacttgtattctaggggcgccttgaggttgctttgataacttcgcggctctgctttgcgctgaggttgagagtctcctggcggagcgctattgtatgattatgatgagagagtatccgagtacctagttaggtgcacttaggggtaatagggataaaaaaggatacctgtattattgtctgttctcgtgtatgcgaaagtgagcatgtgtaagtgtgtaagt

SEQ ID NO: 31100 - DNA, 1506 bp, Muscodor strobelii
  misc_feature: SGI cDNA ID NO. 570704
  misc_feature: Reduced expression when VOC is produced
  misc_feature: Encodes the peptide sequence at SEQ ID NO 31101
atgactgagaactacccgacaattgcgcacgtcgcatttgtggctacagccttcaagatcctcctcttcccggcctacaagtcaaccgacttcgaagtccaccggaactggctggccataaccaacagtctctctccctgggagtggtactacgaaaagacttccgaatggactctcgactatccgcccttcttcgctgccttcgaatggattctctctcactttgccaagctggccgacccagctatggttgcggtcaagaatctggaatacgatagctggcagaccatatacttccagaggttcactgtcattttcaccgagctggttctcgtctatgcgctgcaatgcttcgtcgagtcttcccacggtatcgcgaaacgagctgcccacgcagctgcgatctcggttcttctatctccgggacttcttatcattgatcacatccacttccagtacaatggcgccatgtatggcgtcctcttactgtccttggtcttggcgcgacagaaatcttctatccttggtagtggactgatgtttgccgtccttctgtgcatgaagcacatatacctctatcttgcaccggcctattttgtcttcttgctgaggacatactgcctgtcaccaagctccatattccgaatccaatttttcaactgcatcaagcttggggtgggcatcattggcgtcttcgctgtggcctttggtccctttgcgctcaagggtcagattcctcagattctttccagattgttccctttttcgcgcggcctatgtcatgcatattgggccgccaatgtctgggctctgtattctttcgccgacagagccctcatattagtcgccgcacatctgggcttgccggtagattacgctgctatcaccagtttgacaaggggtctcgttggagacacctcgtttgcagtgttaccagatattacaccgagaatctgctttgcactgaccctgctctttcaaatcattccacttatcaagctcttcttcaaaccgacatgggatgcattcgtcggcgccgtgactctctgcggttacgcgtccttcttgttcggatggcacgtccacgagaaagccatcttactagtcataatcccttttagtcttatcgccctcaaagatcggcgccatctcagtgcctttcggcctcttgccgtcgcaggtcatgtctcactatttcctctccttttcacacaagcagaggcacccatcaaagttatatacaccattttctggctggtaatgttcttgatgacctttgatcgccttgcgcccgcctctcaacggccaagattcttccttttcgacaggttcacgatcctgtacatcgcactctgcatccctctgatactatactactcactattccacggtctaatcttcggtaatgagtatgaattcttgcctctcatgttcatgagctgctattcagctgtgggtgtggtagggagctgggtggggttcatgttcgtctttttgacgtcgtga

SEQ ID NO: 31101 - protein, 501 aa, Muscodor strobelii
  misc_feature: SGI Peptide ID NO. 570704
  misc_feature (13)..(500): Pfam Id: PF03155 Pfam Desc: ALG6, ALG8 glycosyltransferase family
  misc_feature (1)..(501): NCBI GI: 171685898 Blast Desc: protein product [Podospora anserina] gi|170942910|emb|CAP68563.1| protein product [Podospora anserina]
  misc_feature (1)..(501): NCBI GI: 256725798 Blast Desc: glycosyltransferase family 57 [Nectria haematococca mpVI 77-13-4]
  misc_feature (1)..(501): NCBI GI: 46111293 Blast Desc: FG02528.1 [Gibberella zeae PH-1] gi|121816880|sp|Q4IJT0.1|ALG8_GIBZE RecName: Full=Dolichyl pyrophosphate Glc1Man9GlcNAc2 alpha-1,3-glucosyltransferase; 8
  misc_feature (1)..(501): NCBI GI: 85081189 Blast Desc: NCU00163 [Neurospora crassa OR74A] gi|74613887|sp|Q7RXP5.1|ALG8_NEUCR RecName: Full=Dolichyl pyrophosphate Glc1Man9GlcNAc2 alpha-1,3-glucosyltransferase; 8
  misc_feature (10)..(501): NCBI GI: 145615571 Blast Desc: MGG_05686 [Magnaporthe grisea 70-15] gi|145022379|gb|EDK06399.1| MGG_05686 [Magnaporthe grisea 70-15]
  misc_feature (1)..(501): NCBI GI: 116207294 Blast Desc: CHGG_02940 [Chaetomium globosum CBS 148.51] gi|121788395|sp|Q2HA14.1|ALG8_CHAGB RecName: Full=Dolichyl pyrophosphate Glc1Man9GlcNAc2 alpha-1,3-glucosyltransferase; 8
  misc_feature (1)..(501): NCBI GI: 119482235 Blast Desc: dolichyl glycosyltransferase [Neosartorya fischeri NRRL 181] gi|119409300|gb|EAW19249.1| dolichyl glycosyltransferase [Neosartorya fischeri NRRL 181]
  misc_feature (1)..(498): NCBI GI: 189206778 Blast Desc: dolichyl glycosyltransferase [Pyrenophora tritici-repentis Pt-1C-BFP] gi|187975816|gb|EDU42442.1| dolichyl glycosyltransferase [Pyrenophora tritici-repentis Pt-1C-BFP]
  misc_feature (1)..(501): NCBI GI: 121716939 Blast Desc: dolichyl glycosyltransferase [Aspergillus clavatus NRRL 1] gi|119404114|gb|EAW14531.1| dolichyl glycosyltransferase [Aspergillus clavatus NRRL 1]
  misc_feature (1)..(501): NCBI GI: 115385619 Blast Desc: ATEG_10054 [Aspergillus terreus NIH2624] gi|114187803|gb|EAU29503.1| ATEG_10054 [Aspergillus terreus NIH2624]
  misc_feature: Useful for introducing or modulating the production of volatile compounds
MTENYPTIAHVAFVATAFKILLFPAYKSTDFEVHRNWLAITNSLSPWEWYYEKTSEWTLDYPPFFAAFEWILSHFAKLADPAMVAVKNLEYDSWQTIYFQRFTVIFTELVLVYALQCFVESSHGIAKRAAHAAAISVLLSPGLLIIDHIHFQYNGAMYGVLLLSLVLARQKSSILGSGLMFAVLLCMKHIYLYLAPAYFVFLLRTYCLSPSSIFRIQFFNCIKLGVGIIGVFAVAFGPFALKGQIPQILSRLFPFSRGLCHAYWAANVWALYSFADRALILVAAHLGLPVDYAAITSLTRGLVGDTSFAVLPDITPRICFALTLLFQIIPLIKLFFKPTWDAFVGAVTLCGYASFLFGWHVHEKAILLVIIPFSLIALKDRRHLSAFRPLAVAGHVSLFPLLFTQAEAPIKVIYTIFWLVMFLMTFDRLAPASQRPRFFLFDRFTILYIALCIPLILYYSLFHGLIFGNEYEFLPLMFMSCYSAVGVVGSWVGFMFVFLTS

SEQ ID NO: 31102 - DNA, 2023 bp, Muscodor strobelii
  misc_feature: SGI EST ID NO. CUFF.73717.1
  misc_feature: Variant of the nucleotide sequence at SEQ ID NO 31100
cccgaacccaattgcacttgtcgctgtcagtgagggagtggcgtgacttgaatctccttgcgtcgtaactctcctgccgcagtcggtgtgcagcgtcattcgtttgtcacccttgccatgattcaccggcaacatgactgagaactacccgacaattgcgcacgtcgcatttgtggctacagccttcaagatcctcctcttcccggcctacaagtcaaccgacttcgaagtccaccggaactggctggccataaccaacagtctctctccctgggagtggtactacgaaaagacttccgaatggactctcgactatccgcccttcttcgctgccttcgaatggattctctctcactttgccaagctggccgacccagctatggttgcggtcaagaatctggaatacgatagctggcagaccatatacttccagaggttcactgtcattttcaccgagctggttctcgtctatgcgctgcaatgcttcgtcgagtcttcccacggtatcgcgaaacgagctgcccacgcagctgcgatctcggttcttctatctccgggacttcttatcattgatcacatccacttccagtacaatggcgccatgtatggcgtcctcttactgtccttggtcttggcgcgacagaaatcttctatccttggtagtggactgatgtttgccgtccttctgtgcatgaagcacatatacctctatcttgcaccggcctattttgtcttcttgctgaggacatactgcctgtcaccaagctccatattccgaatccaatttttcaactgcatcaagcttggggtgggcatcattggcgtcttcgctgtggcctttggtccctttgcgctcaagggtcagattcctcagattctttccagattgttccctttttcgcgcggcctatgtcatgcatattgggccgccaatgtctgggctctgtattctttcgccgacagagccctcatattagtcgccgcacatctgggcttgccggtagattacgctgctatcaccagtttgacaaggggtctcgttggagacacctcgtttgcagtgttaccagatattacaccgagaatctgctttgcactgaccctgctctttcaaatcattccacttatcaagctcttcttcaaaccgacatgggatgcattcgtcggcgccgtgactctctgcggttacgcgtccttcttgttcggatggcacgtccacgagaaagccatcttactagtcataatcccttttagtcttatcgccctcaaagatcggcgccatctcagtgcctttcggcctcttgccgtcgcaggtcatgtctcactatttcctctccttttcacacaagcagaggcacccatcaaagttatatacaccattttctggctggtaatgttcttgatgacctttgatcgccttgcgcccgcctctcaacggccaagattcttccttttcgacaggttcacgatcctgtacatcgcactctgcatccctctgatactatactactcactattccacggtctaatcttcggtaatgagtatgaattcttgcctctcatgttcatgagctgctattcagctgtgggtgtggtagggagctgggtggggttcatgttcgtctttttgacgtcgtgagagttgaggatgaagcatgatcattggagtggaatgcatggaaaggggaccataaaaatcgcgctgtattgctatcaagataccacaaaagtctcacgactgaaactgaaacatctgcgacaagatttcaaagttacttgccaccgatagctcattattagtgaagtagcacctggagtagcacccagagtaataggcacgggcgcattggtcgtgtcgccgacaattgcgtctaatccgcactaatgcacaagtgatcggccaatcagactctatgaaccgcccaccgctttcccgttccgttcgaactctgaccccacctgcttaacgcgtcttctattccaattccacccactccttgtgctcagctttgaggtgtcgggc

SEQ ID NO: 31103 - DNA, 1332 bp, Muscodor strobelii
  misc_feature: SGI cDNA ID NO. 570705
  misc_feature: Encodes the peptide sequence at SEQ ID NO 31104
atgcgtctcgtgcaaccttcgacccttgcctttggtctggtcaccacggccaggctcgctgcagcgcaggcccaattcctcgtcagcgaactcagttttggccacaccggcaggataaatgacagaggacaggccacagtcccgtcattctctatccagggcacgccagatgtccccgaagtgctgtccaacaaagtcatactcacccctccacaccccggcaatactcgcggtgccgcatggggcgacaacacaaatcagtatagaacatgggtcgccgacgtcgatttccgtgtaagcgggcctgagagagggagtggcaacttgaacatctggctggcgcgacggggaaatgacgagattggtcagtccagcatctacaccgtcggcaagttcgacggtcttgcacttgtcatcgacaaccatgggggcaatggcggtatgatccgaggtttcttgaacgatgggacgaccgactacaagagccaggcaagcgtcgacagcctcgccttcggccactgcaactacaactaccgcaacctcggtcgaccgtcacaaatcaaactaaagcagactgcgcaaaccttccgcgtcgaaatcgacacgcgcctttgcttcgagacagatcagatttccctcccagccggctacaacttcggtgttactgccgcatcggccgacaatcctgactcgatcgaagtcttcaagctcgtagtaatgaccgaagacctcaatgcaaagtccgacgagcgccaagttcctccccagcaacagcaatacggtgaacagcagcagcaaatgttctttggccggagcggtcaaaacgacaaccctagccagcctagattcgatgacgacctcgccgacgaaaacgcagacaagataacatcctcgaaagcgcaattcgccgatctccacaaccgactgcagtctgtaaaccatcatctcgcgaccgtattccgaactacatctcaacaagcctcacaagctgagaagcgccacgaggagacaatgcaggtgatcaatgaccttaaacaagctctctcgaaattagatagattgaacacaatcgacaacttgatgaacgacgtcaggggtctccagaacgaactccggaatacgaagaatgagctcaacaacaagctaagagagacggagaacggcatcaagaagtacatgggcgcaaatcacggtaacatgctcgaacacgtcgcaaccagccagcccggacacggaaagttgatcttcgtcatcattggaagtcagattgtcctcgtctgtggatacgtatggtacgagaggaagaagacttcgcctaagaagtacctatga

SEQ ID NO: 31104 - protein, 443 aa, Muscodor strobelii
  misc_feature: SGI Peptide ID NO. 570705
  misc_feature (49)..(244): Pfam Id: PF03388 Pfam Desc: Legume-like lectin family
  misc_feature (131)..(244): Pfam Id: PF03388 Pfam Desc: Legume-like lectin family
  misc_feature (25)..(443): NCBI GI: 116207296 Blast Desc: CHGG_02941 [Chaetomium globosum CBS 148.51] gi|88183538|gb|EAQ91006.1| CHGG_02941 [Chaetomium globosum CBS 148.51]
  misc_feature (26)..(443): NCBI GI: 171685900 Blast Desc: protein product [Podospora anserina] gi|170942911|emb|CAP68564.1| protein product [Podospora anserina]
  misc_feature (7)..(443): NCBI GI: 39941548 Blast Desc: MGG_05685 [Magnaporthe grisea 70-15] gi|145022378|gb|EDK06398.1| MGG_05685 [Magnaporthe grisea 70-15]
  misc_feature (23)..(443): NCBI GI: 46111295 Blast Desc: FG02529.1 [Gibberella zeae PH-1]
  misc_feature (25)..(443): NCBI GI: 256726200 Blast Desc: [Nectria haematococca mpVI 77-13-4]
  misc_feature (52)..(443): NCBI GI: 164428898 Blast Desc: NCU00162 [Neurospora crassa OR74A] gi|157072329|gb|EAA27439.2| conserved [Neurospora crassa OR74A]
  misc_feature (17)..(443): NCBI GI: 156033169 Blast Desc: SS1G_13660 [Sclerotinia sclerotiorum 1980] gi|154699063|gb|EDN98801.1| SS1G_13660 [Sclerotinia sclerotiorum 1980]
  misc_feature (15)..(443): NCBI GI: 154315697 Blast Desc: BC1G_04421 [Botryotinia fuckeliana B05.10] gi|150847361|gb|EDN22554.1| BC1G_04421 [Botryotinia fuckeliana B05.10]
  misc_feature (19)..(443): NCBI GI: 121716943 Blast Desc: lectin family integral membrane protein, [Aspergillus clavatus NRRL 1] gi|119404115|gb|EAW14532.1| lectin family integral membrane protein, [Aspergillus clavatus NRRL 1]
  misc_feature (19)..(443): NCBI GI: 119482237 Blast Desc: lectin family integral membrane protein, [Neosartorya fischeri NRRL 181] gi|119409301|gb|EAW19250.1| lectin family integral membrane protein, [Neosartorya fischeri NRRL 181]
MRLVQPSTLAFGLVTTARLAAAQAQFLVSELSFGHTGRINDRGQATVPSFSIQGTPDVPEVLSNKVILTPPHPGNTRGAAWGDNTNQYRTWVADVDFRVSGPERGSGNLNIWLARRGNDEIGQSSIYTVGKFDGLALVIDNHGGNGGMIRGFLNDGTTDYKSQASVDSLAFGHCNYNYRNLGRPSQIKLKQTAQTFRVEIDTRLCFETDQISLPAGYNFGVTAASADNPDSIEVFKLVVMTEDLNAKSDERQVPPQQQQYGEQQQQMFFGRSGQNDNPSQPRFDDDLADENADKITSSKAQFADLHNRLQSVNHHLATVFRTTSQQASQAEKRHEETMQVINDLKQALSKLDRLNTIDNLMNDVRGLQNELRNTKNELNNKLRETENGIKKYMGANHGNMLEHVATSQPGHGKLIFVIIGSQIVLVCGYVWYERKKTSPKKYL

SEQ ID NO: 31105 - DNA, 2159 bp, Muscodor strobelii
  misc_feature: SGI EST ID NO. CUFF.73649.0
  misc_feature: Variant of the nucleotide sequence at SEQ ID NO 31103
tccaggtcaaaggccgggtgcctccaacaatttgttgcctcgcctggatggaggactcaggagtttggggatcctggcccagaggtccctgagtgtctcatatcaggtgccattccaatttctccagctttcgactgatgaaggacattcatactccgcgagatccctgatcggagctatccaaagtcagactagagttcaaactgcccggccaaaggacagggattcaccacatatccccacaatcgagagcttgggagctggagttgctgcaaactgtcctctcacaagcagctgcccggaatagtggccgcaataccaaatctcgctacacatatcgaccggtggccaattcacacgccaccactctctcaattcgtctcaattcgtctggtagtcgataaagctcgctcttctgcagcttcaaaggagcttcgaggttttctgtcccccttctgtattatttgtgcctttgattcgtgtagctcatcatgcgtctcgtgcaaccttcgacccttgcctttggtctggtcaccacggccaggctcgctgcagcgcaggcccaattcctcgtcagcgaactcagttttggccacaccggcaggataaatgacagaggacaggccacagtcccgtcattctctatccagggcacgccagatgtccccgaagtgctgtccaacaaagtcatactcacccctccacaccccggcaatactcgcggtgccgcatggggcgacaacacaaatcagtatagaacatgggtcgccgacgtcgatttccgtgtaagcgggcctgagagagggagtggcaacttgaacatctggctggcgcgacggggaaatgacgagattggtcagtccagcatctacaccgtcggcaagttcgacggtcttgcacttgtcatcgacaaccatgggggcaatggcggtatgatccgaggtttcttgaacgatgggacgaccgactacaagagccaggcaagcgtcgacagcctcgccttcggccactgcaactacaactaccgcaacctcggtcgaccgtcacaaatcaaactaaagcagactgcgcaaaccttccgcgtcgaaatcgacacgcgcctttgcttcgagacagatcagatttccctcccagccggctacaacttcggtgttactgccgcatcggccgacaatcctgactcgatcgaagtcttcaagctcgtagtaatgaccgaagacctcaatgcaaagtccgacgagcgccaagttcctccccagcaacagcaatacggtgaacagcagcagcaaatgttctttggccggagcggtcaaaacgacaaccctagccagcctagattcgatgacgacctcgccgacgaaaacgcagacaagataacatcctcgaaagcgcaattcgccgatctccacaaccgactgcagtctgtaaaccatcatctcgcgaccgtattccgaactacatctcaacaagcctcacaagctgagaagcgccacgaggagacaatgcaggtgatcaatgaccttaaacaagctctctcgaaattagatagattgaacacaatcgacaacttgatgaacgacgtcaggggtctccagaacgaactccggaatacgaagaatgagctcaacaacaagctaagagagacggagaacggcatcaagaagtacatgggcgcaaatcacggtaacatgctcgaacacgtcgcaaccagccagcccggacacggaaagttgatcttcgtcatcattggaagtcagattgtcctcgtctgtggatacgtatggtacgagaggaagaagacttcgcctaagaagtacctatgaatgagtaaggatggatggtagatacctcatagatgggtaaacggagaagggtgaagggggcagaatggagttaggcgtttcggagatgaactgacttaagcattaagcagcattgtataaaaagcatgaccggggttatgggctcacgatttgttcttgattttgtttctttctagcgttatatccccaatgccatgatctgacttcacttcttcttcgcgagtatactgtcttgttgtcccgtttcgtgttcctaactcgagagctaaattctgtctctgagcagatgtgatgtttcccaaacattcactgcgttatgccaatactacttgtgcg

SEQ ID NO: 31106 - DNA, 1899 bp, Muscodor strobelii
  misc_feature: SGI cDNA ID NO. 570706
  misc_feature: Encodes the peptide sequence at SEQ ID NO 31107
atggcggctcaacgcccttcacaagacaagtctcgtccctacaactcaggcaacgcaagaacccggattgccaacagagaacgccaacgccagcgagcagaagcggagtctcggtccgccgaagacatcgccgatttctacgacgacgacacagtcgagattgaaactagacaatctacccgacctcgtaggtctgctacggcatgggcaatcaggagagctcgtgatcaggcctataaagaagcacgcgagcaatctattgctcaagctaaagcccaaggaccacctccgttccagcctactccagttactcttgatctagctgatcaactacccgctccagtcgctccacctggctttagtgctcaaagctcttcacaagacagctctggcattctttccggtgccgaagacgttgctgaggctgaagctggagaatctacccgatctcctgataggccctggtggccaaatccaaatgcacgcgaaaatcagctaagggctcaggctgaggctcaagctcaacgcgttcaagctcaaattgacggattgtcctttccacaatctgctcaaatggcggatgtttacggtgctggacgtcttgctccaattgttcgagctcctgctccagtcgttccaactggtggttttggagctccggttgcggctcctccaggctttgaacctcaacgacctcttgtgcttccgcatggtgttgctcctccgcccggctttgctcctctgggtccgcctctggctccaccgggctttgtagctcttcctccgggcttcactggtccttctttgcctgatttttctggaccgcctcctcctatagctcgccctcctatggctactcctcctatggctactcctcctgtagctactgctgctcctgtgactactgctcctcctgtggctcgtcctcccgtggctactgttcctgtggctactattcctgctgatccttctctacctgtcatggtaccagctcaaggacctccgctgtctcctccaccagctggaggaatctcagtcgggactcacaaaggctttgcttatgacccacaggcagtgaactttccaacggctcctcctgctgctcctgctcctgctccagcgtctacctttgacccgcaggcaaaggacttcacaccggctgctcctgcacctgttccagctcctgtcactccgcctcctggtcctcgccgtggctctcttcgtcccgaggccatcacgttcattcccggcgcggtagaagcgacactcggcaacagcccttcattccgcaacctcgtcaactccgcgactaaagccgccgctcgctcaccaccacgtccctcccagggtcgtaacgcagcagtccgggagatcatcagccatctagaggcgaatccagagttcacggacctagtgcgagacctgcaagcaggtctcaccgcaccttatccggcgggaaacgcacacttcgacggccgtgtcgtcgcccgtgcgctttctgatctaccggagttcaatgatctggtcgctcgaatggcatctagttacgacagcaactatctgagcaatagtgctgctgaccttattcgcggcgataacgatccgtttgttgacccagccggctccgctagcggctctactactcccactgggcctactgccgcggcaactactgcgtccgatggttcatcgggtggacattctggctctcgtagccctcgcgagcttcttcgccggttgtctaatcgcgctagtgatcttagtgagcgggctagtcagcgatttagcgatcgtgtggatcgtgtggttgctggattccgagacttgagctgtgctagtcccggtgataaggatgatgatgaccctgagcgcactcctcgtcctagtcgtaagacttaa

SEQ ID NO: 31107 - protein, 632 aa, Muscodor strobelii
  misc_feature: SGI Peptide ID NO. 570706
MAAQRPSQDKSRPYNSGNARTRIANRERQRQRAEAESRSAEDIADFYDDDTVEIETRQSTRPRRSATAWAIRRARDQAYKEAREQSIAQAKAQGPPPFQPTPVTLDLADQLPAPVAPPGFSAQSSSQDSSGILSGAEDVAEAEAGESTRSPDRPWWPNPNARENQLRAQAEAQAQRVQAQIDGLSFPQSAQMADVYGAGRLAPIVRAPAPVVPTGGFGAPVAAPPGFEPQRPLVLPHGVAPPPGFAPLGPPLAPPGFVALPPGFTGPSLPDFSGPPPPIARPPMATPPMATPPVATAAPVTTAPPVARPPVATVPVATIPADPSLPVMVPAQGPPLSPPPAGGISVGTHKGFAYDPQAVNFPTAPPAAPAPAPASTFDPQAKDFTPAAPAPVPAPVTPPPGPRRGSLRPEAITFIPGAVEATLGNSPSFRNLVNSATKAAARSPPRPSQGRNAAVREIISHLEANPEFTDLVRDLQAGLTAPYPAGNAHFDGRVVARALSDLPEFNDLVARMASSYDSNYLSNSAADLIRGDNDPFVDPAGSASGSTTPTGPTAAATTASDGSSGGHSGSRSPRELLRRLSNRASDLSERASQRFSDRVDRVVAGFRDLSCASPGDKDDDDPERTPRPSRKT

SEQ ID NO: 31108 - DNA, 707 bp, Muscodor strobelii
  misc_feature: SGI EST ID NO. CUFF.73652.0
  misc_feature: Variant of the nucleotide sequence at SEQ ID NO 31106
cctcgaacgagaaatctgtttcccaacaactcttcagttctcacgatgtgttcctgaacatctcatccgtttccacgatgcctcggagtctaaatagcacaactccttcccacctcatccggtctgctttctcctctcatcaccatcgatcaacacacctgatcaacactcacaacaacagccttctcacagagcttttggagctcacaaaaaatcacaatctcacaaactaacaacccacgagaatctactcaagccaactcagaaatggcggctcaacgcccttcacaagacaagtctcgtccctacaactcaggcaacgcaagaacccggattgccaacagagaacgccaacgccagcgagcagaagcggagtctcggtccgccgaagacatcgccgatttctacgacgacgacacagtcgagattgaaactagacaatctacccgacctcgtaggtctgctacggcatgggcaatcaggagagctcgtgatcaggcctataaagaagcacgcgagcaatctattgctcaagctaaagcccaaggaccacctccgttccagcctactccagttactcttgatctagctgatcaactacccgctccagtcgctccacctggctttagtgctcaaagctcttcacaagacagctctggcattctttccggtgccgaagacgttgctgaggctgaagctggagaatc

SEQ ID NO: 31109 - DNA, 1155 bp, Muscodor strobelii
  misc_feature: SGI cDNA ID NO. 570707
  misc_feature: Encodes the peptide sequence at SEQ ID NO 31110
atgacctcaacgacctcatcttccgagctgccgccagagcagccacccttgccgcagcgcatgacttctagtctgctaatgggcgtggcgcaggggatatcgcgtgtttttctttacggagtcaattctgttgagacgacgggtttgcagcggtttctagacattctagatcaacgaaaggacgttgagaagagggaacggggtcttattacagtttccaatcacctcagcatagtagatgatcctctaatatggggcgtcctaccattcaagtatggtttcaatccatcaaaccatcgctggagtctaggagcccacgatatatgcttcagcaaccgtcctctaactgcattcttcacatccggccaagtcctgccaacacaccgacttcaacactcgccttacggaggactcttccaacccactatgactcaagcaatccgacttctgtccgcacaaccctttcacccaccctcatctcaaaatctcactagttcttctgcccttgatttacaagacccattcacaactaatcacctaacctactccgcctctcccttgccaaactccatcttcccagcaccctctgcgtacacgcaaaacagacatgcatggatacacatcttcccagaggcatgcgtgcaccaacatccagatatgcacatgcgatacttcaaatggggaatctccagactcatactagaagccgagcccatgcctgatgtcttaccgatgtttatcgatggtccgcaaaaggtcatgtcggaggaccggacatttccgcgatttgtgccgagagctggaaagccatttaggataggctttggagaattgcttgatatggaggagaggtttggagacttgaggaagaggtggagggagttggttgtgaaggatgagggtaaaaagggaactttggtaaaagggaggtggatgggcgatctgagtgaggagttgaagtacggtgatgaagctacgaaattacggattgaagtcgcaagacgcgttagagaagaggtggcgaaggtcagacggagtatgggatacccggaggaaccggacgggttggacgatgcggatacgtggaagagagagggtgggaaggagaggtttaggagtaatgttgatgatgggttggttaataagaagcagtga

SEQ ID NO: 31110 - protein, 384 aa, Muscodor strobelii
  misc_feature: SGI Peptide ID NO. 570707
  misc_feature (43)..(248): Pfam Id: PF01553 Pfam Desc: Acyltransferase
  misc_feature (12)..(382): NCBI GI: 85090127 Blast Desc: NCU07576 [Neurospora crassa OR74A] gi|28919613|gb|EAA29034.1| conserved [Neurospora crassa OR74A]
  misc_feature (27)..(366): NCBI GI: 156033261 Blast Desc: SS1G_13706 [Sclerotinia sclerotiorum 1980] gi|154699109|gb|EDN98847.1| SS1G_13706 [Sclerotinia sclerotiorum 1980]
  misc_feature (13)..(378): NCBI GI: 225563339 Blast Desc: tafazzin [Ajellomyces capsulatus G186AR]
  misc_feature (12)..(366): NCBI GI: 189207254 Blast Desc: conserved [Pyrenophora tritici-repentis Pt-1C-BFP] gi|187976054|gb|EDU42680.1| conserved [Pyrenophora tritici-repentis Pt-1C-BFP]
  misc_feature (13)..(378): NCBI GI: 239610500 Blast Desc: tafazzin [Ajellomyces dermatitidis ER-3]
  misc_feature (6)..(382): NCBI GI: 171686250 Blast Desc: protein product [Podospora anserina] gi|170943086|emb|CAP68739.1| protein product [Podospora anserina]
  misc_feature (13)..(378): NCBI GI: 261195468 Blast Desc: tafazzin [Ajellomyces dermatitidis SLH14081] gi|239588010|gb|EEQ70653.1| tafazzin [Ajellomyces dermatitidis SLH14081]
  misc_feature (13)..(368): NCBI GI: 240107254 Blast Desc: taz protein, [Coccidioides posadasii C735 delta SOWgp]
  misc_feature (13)..(382): NCBI GI: 242780439 Blast Desc: tafazzin [Talaromyces stipitatus ATCC 10500] gi|218719742|gb|EED19161.1| tafazzin [Talaromyces stipitatus ATCC 10500]
  misc_feature (13)..(378): NCBI GI: 226280253 Blast Desc: conserved [Paracoccidioides brasiliensis Pb01]
  misc_feature (32)..(328): SWISSPROT Homolog: EC 2.3.1.23 1-acylglycerophosphocholine O-acyltransferase
MTSTTSSSELPPEQPPLPQRMTSSLLMGVAQGISRVFLYGVNSVETTGLQRFLDILDQRKDVEKRERGLITVSNHLSIVDDPLIWGVLPFKYGFNPSNHRWSLGAHDICFSNRPLTAFFTSGQVLPTHRLQHSPYGGLFQPTMTQAIRLLSAQPFHPPSSQNLTSSSALDLQDPFTTNHLTYSASPLPNSIFPAPSAYTQNRHAWIHIFPEACVHQHPDMHMRYFKWGISRLILEAEPMPDVLPMFIDGPQKVMSEDRTFPRFVPRAGKPFRIGFGELLDMEERFGDLRKRWRELVVKDEGKKGTLVKGRWMGDLSEELKYGDEATKLRIEVARRVREEVAKVRRSMGYPEEPDGLDDADTWKREGGKERFRSNVDDGLVNKKQ

SEQ ID NO: 31111 - DNA, 1551 bp, Muscodor strobelii
  misc_feature: SGI EST ID NO. CUFF.73665.0
  misc_feature: Variant of the nucleotide sequence at SEQ ID NO 31109
cttcaactcattgaatcaacctacataaagcatagacatgtagctcaacttcgagcttggtctgattaagcttttcgaagcttctgaggcctaagctgttcgctcgttactacaagtgtgttctaactcgcccgctgtatcaccaccacactacgctcactttctctgcgacattgtacagcgactcatgacgtgtataataatatgacctcaacgacctcatcttccgagctgccgccagagcagccacccttgccgcagcgcatgacttctagtctgctaatgggcgtggcgcaggggatatcgcgtgtttttctttacggagtcaattctgttgagacgacgggtttgcagcggtttctagacattctagatcaacgaaaggacgttgagaagagggaacggggtcttattacagtttccaatcacctcagcatagtagatgatcctctaatatggggcgtcctaccattcaagtatggtttcaatccatcaaaccatcgctggagtctaggagcccacgatatatgcttcagcaaccgtcctctaactgcattcttcacatccggccaagtcctgccaacacaccgacttcaacactcgccttacggaggactcttccaacccactatgactcaagcaatccgacttctgtccgcacaaccctttcacccaccctcatctcaaaatctcactagttcttctgcccttgatttacaagacccattcacaactaatcacctaacctactccgcctctcccttgccaaactccatcttcccagcaccctctgcgtacacgcaaaacagacatgcatggatacacatcttcccagaggcatgcgtgcaccaacatccagatatgcacatgcgatacttcaaatggggaatctccagactcatactagaagccgagcccatgcctgatgtcttaccgatgtttatcgatggtccgcaaaaggtcatgtcggaggaccggacatttccgcgatttgtgccgagagctggaaagccatttaggataggctttggagaattgcttgatatggaggagaggtttggagacttgaggaagaggtggagggagttggttgtgaaggatgagggtaaaaagggaactttggtaaaagggaggtggatgggcgatctgagtgaggagttgaagtacggtgatgaagctacgaaattacggattgaagtcgcaagacgcgttagagaagaggtggcgaaggtcagacggagtatgggatacccggaggaaccggacgggttggacgatgcggatacgtggaagagagagggtgggaaggagaggtttaggagtaatgttgatgatgggttggttaataagaagcagtgatttgttcgatagacatgctctgctaaggacagtttgtacgagtctagaagtttgcagctgaggcgcaaacacttaatggtatgtcccagtgaattaaggcgtgacaaggagattagcattcacgtgttacaagtatgtataagaggtcaaagggctaagttttagtattttcattgaataaagacatctaag

SEQ ID NO: 31112 - DNA, 1098 bp, Muscodor strobelii
  misc_feature: SGI cDNA ID NO. 570708
  misc_feature: Encodes the peptide sequence at SEQ ID NO 31113
atgtcacacagcaaacgaaacacctcgcgcgccgtcttcacgtcctacgagcgcgacctcgcacgctccgcctggtcagccacatccgcccgtctcgcgcgagaatcattcctatccttctctgcctgccgactctgcctcgcgacagccatcgaccccgtatcctgcacgcacggggacatattctgtcgcgaatgcgcgctctccaacatcctcgcgcaaaagaaggagatcaagcgcctcgacaaaataaaagaacaagaggatcgcgatgccgcggaagccaagctggatcaagatgcggaggcccacgaacgtgctgtcagggagtttgaacggacacagaatggtctcgatgtaagatcgcggaccaatggggcagatgacgtgacggcggaagaggagggcaagaggccgaagaagaggaaattcgaaatcgatgcagaagagctcgcgcgcatcgcggcagaagatcgcacaaaggcgagaaaggcaatcgatgacgagaaagcctcgaaacctgttctcccgtcgttctgggcgccttcgataacaccatcgagtaacacgcgcgacacactgcacgatatcgtaaagaagatgaagactacgccgatatgccccgcgtccgcggctgatgcgccgcatacatactccctacacacgctcgtctctgtgaagttcgctacggatgagaacgaagacagtgctaagggaaactccaaagaaaaagatagactagtatgtccagcgtgtaaaaagacgctcggcaactcgtcaaaagccgtgcttgcaaagccttgcggtcatgtgctatgtgggagttgcgcggataagttcatgaagcccaataagacgcatcacgatccccatgccaccaacgcagaatccgagcttcgatgctatgtctgtgaagcagacttgacggagaaaccagagaagagcaggaaagaggacaaggacaagaatgggaagaagaagaaagaaaaagataggatacggcccggtctcgtagagttgaggagtgagggcacgggatactcggcgagcggcaagaatcaagtcgtcaagagtggtgtggctgctttccaatgctag

SEQ ID NO: 31113 - protein, 365 aa, Muscodor strobelii
  misc_feature: SGI Peptide ID NO. 570708
  misc_feature (1)..(365): NCBI GI: 154294108 Blast Desc: BC1G_14124 [Botryotinia fuckeliana B05.10] gi|150845061|gb|EDN20254.1| BC1G_14124 [Botryotinia fuckeliana B05.10]
  misc_feature (5)..(365): NCBI GI: 85090129 Blast Desc: NCU07577 [Neurospora crassa OR74A] gi|28919614|gb|EAA29035.1| conserved [Neurospora crassa OR74A]
  misc_feature (5)..(365): NCBI GI: 145614508 Blast Desc: MGG_04663 [Magnaporthe grisea 70-15] gi|145021417|gb|EDK05546.1| MGG_04663 [Magnaporthe grisea 70-15]
  misc_feature (5)..(360): NCBI GI: 171686248 Blast Desc: protein product [Podospora anserina] gi|170943085|emb|CAP68738.1| protein product [Podospora anserina]
  misc_feature (1)..(365): NCBI GI: 156033263 Blast Desc: SS1G_13707 [Sclerotinia sclerotiorum 1980] gi|154699110|gb|EDN98848.1| SS1G_13707 [Sclerotinia sclerotiorum 1980]
  misc_feature (2)..(365): NCBI GI: 46122035 Blast Desc: FG05395.1 [Gibberella zeae PH-1]
  misc_feature (1)..(365): NCBI GI: 239606337 Blast Desc: RING finger domain-containing protein [Ajellomyces dermatitidis ER-3]
  misc_feature (1)..(365): NCBI GI: 261190078 Blast Desc: RING finger domain-containing protein [Ajellomyces dermatitidis SLH14081] gi|239591277|gb|EEQ73858.1| RING finger domain-containing protein [Ajellomyces dermatitidis SLH14081]
  misc_feature (1)..(365): NCBI GI: 261358442 Blast Desc: conserved [Verticillium albo-atrum VaMs.102]
  misc_feature (1)..(365): NCBI GI: 238842010 Blast Desc: conserved [Microsporum canis CBS 113480]
MSHSKRNTSRAVFTSYERDLARSAWSATSARLARESFLSFSACRLCLATAIDPVSCTHGDIFCRECALSNILAQKKEIKRLDKIKEQEDRDAAEAKLDQDAEAHERAVREFERTQNGLDVRSRTNGADDVTAEEEGKRPKKRKFEIDAEELARIAAEDRTKARKAIDDEKASKPVLPSFWAPSITPSSNTRDTLHDIVKKMKTTPICPASAADAPHTYSLHTLVSVKFATDENEDSAKGNSKEKDRLVCPACKKTLGNSSKAVLAKPCGHVLCGSCADKFMKPNKTHHDPHATNAESELRCYVCEADLTEKPEKSRKEDKDKNGKKKKEKDRIRPGLVELRSEGTGYSASGKNQVVKSGVAAFQC

SEQ ID NO: 31114 - DNA, 1383 bp, Muscodor strobelii
  misc_feature: SGI EST ID NO. CUFF.73667.0
  misc_feature: Variant of the nucleotide sequence at SEQ ID NO 31112
cagtcctcaaggtcgcaactatcaaatcaacaaccaccacaatttgaacatctcgactgcatgcgctcgtgacacagcttgccctcgagcattctgctcttcatccatagctcatcttcattccattcctctcagaacgccggaacgccatgtcacacagcaaacgaaacacctcgcgcgccgtcttcacgtcctacgagcgcgacctcgcacgctccgcctggtcagccacatccgcccgtctcgcgcgagaatcattcctatccttctctgcctgccgactctgcctcgcgacagccatcgaccccgtatcctgcacgcacggggacatattctgtcgcgaatgcgcgctctccaacatcctcgcgcaaaagaaggagatcaagcgcctcgacaaaataaaagaacaagaggatcgcgatgccgcggaagccaagctggatcaagatgcggaggcccacgaacgtgctgtcagggagtttgaacggacacagaatggtctcgatgtaagatcgcggaccaatggggcagatgacgtgacggcggaagaggagggcaagaggccgaagaagaggaaattcgaaatcgatgcagaagagctcgcgcgcatcgcggcagaagatcgcacaaaggcgagaaaggcaatcgatgacgagaaagcctcgaaacctgttctcccgtcgttctgggcgccttcgataacaccatcgagtaacacgcgcgacacactgcacgatatcgtaaagaagatgaagactacgccgatatgccccgcgtccgcggctgatgcgccgcatacatactccctacacacgctcgtctctgtgaagttcgctacggatgagaacgaagacagtgctaagggaaactccaaagaaaaagatagactagtatgtccagcgtgtaaaaagacgctcggcaactcgtcaaaagccgtgcttgcaaagccttgcggtcatgtgctatgtgggagttgcgcggataagttcatgaagcccaataagacgcatcacgatccccatgccaccaacgcagaatccgagcttcgatgctatgtctgtgaagcagacttgacggagaaaccagagaagagcaggaaagaggacaaggacaagaatgggaagaagaagaaagaaaaagataggatacggcccggtctcgtagagttgaggagtgagggcacgggatactcggcgagcggcaagaatcaagtcgtcaagagtggtgtggctgctttccaatgctagcgggcatgtagacatggcgcatgggaaatagatctgtacaacacgcattgtagacaccaattgcagacggaaggagatgcagatttccatccttcatcataccatagcgtatcgtatactctcgcggtaagcaaca

SEQ ID NO: 31115 - DNA, 780 bp, Muscodor strobelii
  misc_feature: SGI cDNA ID NO. 570709
  misc_feature: Encodes the peptide sequence at SEQ ID NO 31116
atggcccagttcacgacgaacacgttcaacgtggagacagctacagcagcggactacccagcctttatccaaaatgtgcgcaatgagctcagcaaactcagaaccagagctcctccggataataacaagtactttgtgggaatcccagccctgccccgtcttgtcgcccaagaattcttcgatgtcaatttggccgtcggtttggcaaacaacacgaaaacagtgaaaatccgagtccggacagacaatctctacgtcgacgggtaccattgggcaggggaagggccatggtacgagttcagcaacccagaacgcatacatctcattcaaggagcccagtggataggattccaaggcggatacggccagttggagagcactgcagcagccgccagaaccactgtcgctctgaaccgagcgaatctcatacgagcggtgagagagctcgatccggcggtaacggcttcgcctcagggcaaccggaacagggcccgctccctgctggtcatcatccaggcaatcagtgaggcaatccgactgcaccccgtgtgcaaatatattgcttcaaactggactaaaactgagaaccctcctgcccctgctccttctcaactgctcgttgatcttgagaattcctggggcaaaatttctaaatcgttgatcgccaaagatatggataactacgtgttcacgctcgatcagggtaccagagcccttacaggaatcaaaaacgcccaagattgtgctgctatagttgccatggtcctggactcgccctag

SEQ ID NO: 31116 - protein, 259 aa, Muscodor strobelii
  misc_feature: SGI Peptide ID NO. 570709
  misc_feature (4)..(259): Pfam Id: PF00161 Pfam Desc: Ribosome inactivating protein
  misc_feature (4)..(218): Pfam Id: PF00161 Pfam Desc: Ribosome inactivating protein
  misc_feature (6)..(224): NCBI GI: 33327390 Blast Desc: AF289119_1 type 1 ribosome-inactivating protein musarmin 4 [Muscari armeniacum]
  misc_feature (6)..(227): NCBI GI: 22036132 Blast Desc: AF289118_1 type 1 ribosome-inactivating protein musarmin 1 [Muscari armeniacum]
  misc_feature (3)..(221): NCBI GI: 22036130 Blast Desc: AF289117_1 type 1 ribosome-inactivating protein musarmin 2 [Muscari armeniacum]
  misc_feature (3)..(227): NCBI GI: 22036134 Blast Desc: AF289120_1 type 1 ribosome-inactivating protein musarmin le [Muscari armeniacum]
  misc_feature (3)..(221): NCBI GI: 22036128 Blast Desc: AF289116_1 type 1 ribosome-inactivating protein musarmin 3 [Muscari armeniacum]
  misc_feature (6)..(226): NCBI GI: 114152136 Blast Desc: AF289116_1 type 1 ribosome-inactivating protein musarmin 3 [Muscari armeniacum]
  misc_feature (10)..(235): NCBI GI: 224133494 Blast Desc: [Populus trichocarpa] gi|222837465|gb|EEE75844.1| [Populus trichocarpa]
  misc_feature (8)..(231): NCBI GI: 7141129 Blast Desc: AF213983_1 ribosome inactivating protein RIPm [Polygonatum multiflorum]
  misc_feature (6)..(257): NCBI GI: 162461916 Blast Desc: ribosome-inactivating protein [Zea mays] gi|7331166|gb|AAF60304.1|AF233881_1 ribosome-inactivating protein [Zea mays]
  misc_feature (6)..(257): NCBI GI: 212276291 Blast Desc: LOC100192066 [Zea mays] gi|194690562|gb|ACF79365.1| [Zea mays]
  misc_feature (6)..(226): SWISSPROT Homolog: EC 3.2.2.22 rRNA N-glycosylase
MAQFTTNTFNVETATAADYPAFIQNVRNELSKLRTRAPPDNNKYFVGIPALPRLVAQEFFDVNLAVGLANNTKTVKIRVRTDNLYVDGYHWAGEGPWYEFSNPERIHLIQGAQWIGFQGGYGQLESTAAAARTTVALNRANLIRAVRELDPAVTASPQGNRNRARSLLVIIQAISEAIRLHPVCKYIASNWTKTENPPAPAPSQLLVDLENSWGKISKSLIAKDMDNYVFTLDQGTRALTGIKNAQDCAAIVAMVLDSP

SEQ ID NO: 31117 - DNA, 465 bp, Muscodor strobelii
  misc_feature: SGI EST ID NO. CUFF.73673.0
  misc_feature: Variant of the nucleotide sequence at SEQ ID NO 31115
tctacgtcgacgggtaccattgggcaggggaagggccatggtacgagttcagcaacccagaacgcatacatctcattcaaggagcccagtggataggattccaaggcggatacggccagttggagagcactgcagcagccgccagaaccactgtcgctctgaaccgagcgaatctcatacgagcggtgagagagctcgatccggcggtaacggcttcgcctcagggcaaccggaacagggcccgctccctgctggtcatcatccaggcaatcagtgaggcaatccgactgcaccccgtgtgcaaatatattgcttcaaactggactaaaactgagaaccctcctgcccctgctccttctcaactgctcgttgatcttgagaattcctggggcaaaatttctaaatcgttgatcgccaaagatatggataactacgtgttcacgctcgatcagggtaccagagccc

SEQ ID NO: 31118 - DNA, 1488 bp, Muscodor strobelii
  misc_feature: SGI cDNA ID NO. 570710
  misc_feature: Reduced expression when VOC is produced
  misc_feature: Encodes the peptide sequence at SEQ ID NO 31119
atgtctaccccgtcatccaaccgcaactccgtcctaccggctctacaccacgcactctcagccgaagctcctgctcctacctcaccgggggcacacggcgaaccgtctcttctcgatccagaggaggatcatgctcaacgtgtacaaagtccaccaagtcaaactacgcgcagtcctactcgacgcagcgctgtagagtccgcggagcaaggggaagaatcggaaagacggatagaaggcatcgcagaaacattttcttcgatctacaactcaaacggagatggagatgtgagagcactctatactggcctgcgtcaagatgcagtcaaatctgtcttggactctttcctcttttttctattctatgagtggttccgcgccctacggctcgcttccgctaggggaaaaagaagaaagggcagaggtctgggagtggtcgaggaattggccgtcgggtgtgcggcgggcgcggcgagtagagcgttaaccacgcctgttggcgttgtggttacgaggttgcagactggtgcgattaccgatgcgagcgatgggaagaaaatgacggtacggcagattgtaaaggagatcaggaaggagaagggcattgtcgggttttgggccgggtatagcgcgagtctggtattgacgctgaacccggcgctgacgttcttcttgcatgagtggttgaggggacggtatgcggatgcgagttatgatgatccgggcgcgaaactcacgtttcttttcgcggctactagtaaggcggcgagtagcctcgtcacgtatccattctctattgcgaagactaggatgcaggctggtgttgtgcgttcttcttcctcttcctccgactctgaccactcacaagagaatggaaacgaagacggcgaaaagagagacatcgagaaagaaatcgaatcgaaacttgccggcctccgcgcggttcagaacctggcgaagcgctctgtgttcggacaagttgcgcagattatcaggacggagggtgttgcttcgctgtatgatggggtaggcgcggagttactgaaggggttcttctcacatggtacgacgatgctcgctaagggcgttgtgcataaactgcttttcaagctttatctcgttgtcgccggcctccttaccgaattgagagctcgccggggcgcaagcagtggagttggctctgggtccccttttgagatgctgagtaaaacacttaacaggattaagggcgggcaagcgacgaaggcagtggacgagcagttgagggataatgtcatcaatatgactgggaatggcaaagggagtagagtgttgaagagagaggtcatagatgataagattgattgggaggagaagttgcctagggctcttaggtataggattgatcgcaaggataggggtagggataggagtgcggattttggactgaatgttgtcgcgaatcttattgatgggacgcagagaccgtttaggggggataaggagtaa

SEQ ID NO: 31119 - protein, 495 aa, Muscodor strobelii
  misc_feature: SGI Peptide ID NO. 570710
  misc_feature (144)..(237): Pfam Id: PF00153 Pfam Desc: Mitochondrial carrier protein
  misc_feature (242)..(372): Pfam Id: PF00153 Pfam Desc: Mitochondrial carrier protein
  misc_feature (3)..(379): NCBI GI: 156033273 Blast Desc: SS1G_13712 [Sclerotinia sclerotiorum 1980] gi|154699115|gb|EDN98853.1| SS1G_13712 [Sclerotinia sclerotiorum 1980]
  misc_feature (56)..(379): NCBI GI: 154294104 Blast Desc: BC1G_14122 [Botryotinia fuckeliana B05.10] gi|150845059|gb|EDN20252.1| BC1G_14122 [Botryotinia fuckeliana B05.10]
  misc_feature (81)..(384): NCBI GI: 171686246 Blast Desc: protein product [Podospora anserina] gi|170943084|emb|CAP68737.1| protein product [Podospora anserina]
  misc_feature (80)..(375): NCBI GI: 189191824 Blast Desc: peroxisomal adenine nucleotide transporter 1 [Pyrenophora tritici-repentis Pt-1C-BFP] gi|187973857|gb|EDU41356.1| peroxisomal adenine nucleotide 1
  misc_feature (80)..(382): NCBI GI: 169599987 Blast Desc: SNOG_02824 [Phaeosphaeria nodorum SN15] gi|160705359|gb|EAT89555.2| SNOG_02824 [Phaeosphaeria nodorum SN15]
  misc_feature (94)..(395): NCBI GI: 39945360 Blast Desc: MGG_04662 [Magnaporthe grisea 70-15] gi|145021418|gb|EDK05547.1| MGG_04662 [Magnaporthe grisea 70-15]
  misc_feature (53)..(383): NCBI GI: 169774421 Blast Desc: [Aspergillus oryzae RIB40] gi|83769541|dbj|BAE59676.1| protein product [Aspergillus oryzae]
  misc_feature (68)..(378): NCBI GI: 255933187 Blast Desc: Pc12g12500 [Penicillium chrysogenum Wisconsin 54-1255] gi|211582683|emb|CAP80877.1| Pc12g12500 [Penicillium chrysogenum Wisconsin 54-1255]
  misc_feature (85)..(385): NCBI GI: 116207802 Blast Desc: CHGG_03194 [Chaetomium globosum CBS 148.51] gi|88183791|gb|EAQ91259.1| CHGG_03194 [Chaetomium globosum CBS 148.51]
  misc_feature (88)..(383): NCBI GI: 145232425 Blast Desc: An02g05230 [Aspergillus niger] gi|134056575|emb|CAK37629.1| protein product [Aspergillus niger]
  misc_feature: Useful for introducing or modulating the production of volatile compounds
MSTPSSNRNSVLPALHHALSAEAPAPTSPGAHGEPSLLDPEEDHAQRVQSPPSQTTRSPTRRSAVESAEQGEESERRIEGIAETFSSIYNSNGDGDVRALYTGLRQDAVKSVLDSFLFFLFYEWFRALRLASARGKRRKGRGLGVVEELAVGCAAGAASRALTTPVGVVVTRLQTGAITDASDGKKMTVRQIVKEIRKEKGIVGFWAGYSASLVLTLNPALTFFLHEWLRGRYADASYDDPGAKLTFLFAATSKAASSLVTYPFSIAKTRMQAGVVRSSSSSSDSDHSQENGNEDGEKRDIEKEIESKLAGLRAVQNLAKRSVFGQVAQIIRTEGVASLYDGVGAELLKGFFSHGTTMLAKGVVHKLLFKLYLVVAGLLTELRARRGASSGVGSGSPFEMLSKTLNRIKGGQATKAVDEQLRDNVINMTGNGKGSRVLKREVIDDKIDWEEKLPRALRYRIDRKDRGRDRSADFGLNVVANLIDGTQRPFRGDKE

SEQ ID NO: 31120 - DNA, 1236 bp, Muscodor strobelii
  misc_feature: SGI cDNA ID NO. 570711
  misc_feature: Encodes the peptide sequence at SEQ ID NO 31121
atggcgaccgctacggagccgcgcaaaggtccttcggacgaaagcaccatcaatgtcgcatccaagaagatgtcccgtgacaagcccaacggcattctcaagctcaagaagcccatccccaagcagtccaagcctggcaactggagagacggcagtgtagctctggatgacaagaaatccaaagccagtaacatgcccgaagtcgcatcccccgtccccgtccctgtcgtcaaccacctcgacgaaaccgagcgagacaccttctacaccggccgcccactcgaggacaacctgaacctgcagcagtgcaagctctgcaagaaaggcgtcatcaggacagcagcgaaggctcacattgacaactgcctgaagattaagagagagaaggcacagcgcaagaaggaggcacgagaggcacgcgagcgcgccaaggagcaggcccgcgaggaggaagctcgtaaaaacgacgaggatggcgacgccaagatgggcgacgatagtgatgacgacgaggacggatcgcccgagaagaagaaggcgagcaagaaagtcggcggcaagaagccagatggagagctgaagggcaagaagcgcaaggccgatggcgatgctgacaagggccccaagaacaagaaaaagaaggaggagcccaagcccaaagtccccaagcctaaggggccagtggatgtcgagaagcaatgtggtgttccgttacccaacggccagctctgcgcgagatctcttacttgcaagagtcacagcatgggtgccaagcgtgcggtcgccggcagatctcttccatacgacatgttgctcgctgcgtaccagaagaagaaccaggccaagcagcagaaggccgctctcgatgccaacgcaccagtagaggaagacgacgaagccgccggcgggcccgttgactcggacgaggaaaccgccgcagttatgagcgccctcgcacgctggcagccgcagcccgtcattccgcaacccatcttcgccccgatcaagcgcacataccagatctcgagactgagagagcagttacagacggctactaatggtggccggactaacatcttcaaggtcgtcgggctgggcgtgaagaacaagaaggagaggttcgtcattcccgcgggccctgactcggacgatgcttcaggcgaggacgacggcgatctccccgcttacgttccgccgagcccgcctagacgacagagtgtggtgggtaaggcttag

SEQ ID NO: 31121 - protein, 411 aa, Muscodor strobelii
  misc_feature: SGI Peptide ID NO. 570711
  misc_feature (211)..(283): Pfam Id: PF08313 Pfam Desc: SCA7
  misc_feature (5)..(390): NCBI GI: 46122037 Blast Desc: FG05396.1 [Gibberella zeae PH-1]
  misc_feature (5)..(411): NCBI GI: 256729763 Blast Desc: NECHADRAFT_95640 [Nectria haematococca mpVI 77-13-4]
  misc_feature (13)..(407): NCBI GI: 116207806 Blast Desc: CHGG_03196 [Chaetomium globosum CBS 148.51] gi|88183793|gb|EAQ91261.1| CHGG_03196 [Chaetomium globosum CBS 148.51]
  misc_feature (4)..(409): NCBI GI: 261358443 Blast Desc: conserved [Verticillium albo-atrum VaMs.102]
  misc_feature (4)..(372): NCBI GI: 85090133 Blast Desc: NCU07579 [Neurospora crassa OR74A] gi|28919616|gb|EAA29037.1| [Neurospora crassa OR74A]
  misc_feature (76)..(390): NCBI GI: 171686242 Blast Desc: protein product [Podospora anserina] gi|170943082|emb|CAP68735.1| protein product [Podospora anserina]
  misc_feature (13)..(363): NCBI GI: 154290937 Blast Desc: BC1G_15532 [Botryotinia fuckeliana B05.10] gi|150847168|gb|EDN22361.1| BC1G_15532 [Botryotinia fuckeliana B05.10]
  misc_feature (75)..(360): NCBI GI: 225684246 Blast Desc: conserved [Paracoccidioides brasiliensis Pb03]
  misc_feature (75)..(360): NCBI GI: 226293867 Blast Desc: conserved [Paracoccidioides brasiliensis Pb18]
  misc_feature (75)..(360): NCBI GI: 154274045 Blast Desc: [Ajellomyces capsulatus NAm1] gi|150415482|gb|EDN10835.1| [Ajellomyces capsulatus NAm1]
MATATEPRKGPSDESTINVASKKMSRDKPNGILKLKKPIPKQSKPGNWRDGSVALDDKKSKASNMPEVASPVPVPVVNHLDETERDTFYTGRPLEDNLNLQQCKLCKKGVIRTAAKAHIDNCLKIKREKAQRKKEAREARERAKEQAREEEARKNDEDGDAKMGDDSDDDEDGSPEKKKASKKVGGKKPDGELKGKKRKADGDADKGPKNKKKKEEPKPKVPKPKGPVDVEKQCGVPLPNGQLCARSLTCKSHSMGAKRAVAGRSLPYDMLLAAYQKKNQAKQQKAALDANAPVEEDDEAAGGPVDSDEETAAVMSALARWQPQPVIPQPIFAPIKRTYQISRLREQLQTATNGGRTNIFKVVGLGVKNKKERFVIPAGPDSDDASGEDDGDLPAYVPPSPPRRQSVVGKA

SEQ ID NO: 31122 - DNA, 2260 bp, Muscodor strobelii
  misc_feature: SGI EST ID NO. CUFF.73683.0
  misc_feature: Variant of the nucleotide sequence at SEQ ID NO 31120
tcatgattggccaggtcagttccaagagacgctcataggacttcattgatcgatccagagggaattataaacaagagtttctgagtggaataagtacgtagtcttacgtctcgagacatgttttattttaacacttggtaatggcaacactgttagtatggtttggcatcttaggttcgaagctgtcatcaaaatcacccagacacgaccagttgctatactgcgacatatagagtaattaaagaatgcatatatgtatgcacatcaactacccacgactcttgtctctgtgttgatcatagttttggttaccttacaaagggacaacgcctcaataattggaggggcgagatagtgataaagccgcggcatatttcggagataaggggaggcaatgggtgaggcgttatctggggaagcacgctagcagatagtggaacccctgtcccgccgggagcggcagccttgggcgcgactacctcaggtaaccaccaccacctgcatcattggacctcgactccaagtcaacccgcgactctgcctacgactctctctattccatcaactgcgcacacccacacgctcattttcatctcatgcgacctgggcttctgtacatcagaacccattcgaccattcgccattgtgaataaagcgctcagtcacgatggcgaccgctacggagccgcgcaaaggtccttcggacgaaagcaccatcaatgtcgcatccaagaagatgtcccgtgacaagcccaacggcattctcaagctcaagaagcccatccccaagcagtccaagcctggcaactggagagacggcagtgtagctctggatgacaagaaatccaaagccagtaacatgcccgaagtcgcatcccccgtccccgtccctgtcgtcaaccacctcgacgaaaccgagcgagacaccttctacaccggccgcccactcgaggacaacctgaacctgcagcagtgcaagctctgcaagaaaggcgtcatcaggacagcagcgaaggctcacattgacaactgcctgaagattaagagagagaaggcacagcgcaagaaggaggcacgagaggcacgcgagcgcgccaaggagcaggcccgcgaggaggaagctcgtaaaaacgacgaggatggcgacgccaagatgggcgacgatagtgatgacgacgaggacggatcgcccgagaagaagaaggcgagcaagaaagtcggcggcaagaagccagatggagagctgaagggcaagaagcgcaaggccgatggcgatgctgacaagggccccaagaacaagaaaaagaaggaggagcccaagcccaaagtccccaagcctaaggggccagtggatgtcgagaagcaatgtggtgttccgttacccaacggccagctctgcgcgagatctcttacttgcaagagtcacagcatgggtgccaagcgtgcggtcgccggcagatctcttccatacgacatgttgctcgctgcgtaccagaagaagaaccaggccaagcagcagaaggccgctctcgatgccaacgcaccagtagaggaagacgacgaagccgccggcgggcccgttgactcggacgaggaaaccgccgcagttatgagcgccctcgcacgctggcagccgcagcccgtcattccgcaacccatcttcgccccgatcaagcgcacataccagatctcgagactgagagagcagttacagacggctactaatggtggccggactaacatcttcaaggtcgtcgggctgggcgtgaagaacaagaaggagaggttcgtcattcccgcgggccctgactcggacgatgcttcaggcgaggacgacggcgatctccccgcttacgttccgccgagcccgcctagacgacagagtgtggtgggtaaggcttagggggcttaggtgagggaaaggggactggctagatagacatttctacgctgaagaggggcttttactaggatgggacttgtataatgatttgatatgaagcataggaatggcgttcatgaggctaggttataccactggcgctggttaggatggttaggatcatatccgtcgagatacgacgggtgacatggcatggcattgcatggcgtttaggctctggatttgagctctggttatggctttttacaactgcgcctcaattcacgatattacagggtaaagggataaaggggagacttcagatagcatgatgcaggctagcgataagaacgaattagctctctgtttaaagactgc

SEQ ID NO: 31123 - DNA, 2088 bp, Muscodor strobelii
  misc_feature: SGI cDNA ID NO. 570712
  misc_feature: Encodes the peptide sequence at SEQ ID NO 31124
atggcgacagaagcaagagagacagaaatacctacttcagccaacctcaacactctcagcaccgacgaacccaacgaaactcctttcgacatcgaccacttcaccctcccctacgatggctctctatgtgaaacctgttatctattcagtgaaatgctacggcaaagtcaagcaaaatccaccctctccgccatgatcagcgggggtactcgtctcgggcaccatcactctctcaacgccctgagatcatcagtgaaaaccggctgtcgactctgtggcctatttctcaaagtgctggaagaaggtcagaacggatatctatggttccagaaggttcacatcccgcttcccgacagtggaagtatcctactacatcgcgattggttgaagagcatggatgataggacgcgaatggaggtttccgtcgatgagcatatatctgacttgcaggattcgcttcagtttgtgccgatgcccgaggacgtgaccaccgtgataagaaacgcagaaatagtatccgaagacgacgataccatctggtcatactcagcccgggccatggtccatcactggctagaccagtgcctcacagcgcatcctcattgttgcgaattccgcggaacggacagacctctccccacacgtgtcatctacgtcggcagtaaagaggaaggagacgaggaccatcaaaacgtccatctgcacatcagctccggaggagagcaggaagactacgtcgcgttaagtcaccgctggggcgacgaaatgccattacggcttaccaaggactcgctaagctctctggtgaagagcatcccttcttccgaactatcgcccacgttccgcgacgcgatagacatcacgcgctccctcggggtgaagtacatctggatcgattcgctctgcatcacacaagattccccggaagactggaacgcagaggccacgaagatgagcgacgtctatcgtcatgcgatattcaccatcgcggcaacagaggcggatgcgaaaaccgggattaaagccccgcgaaggaacttccctggacggcctgtaaacatgcaagttggcgtttccgagggcgtattcggaccccatgcgggtacattacactgtcgcatcaaggaagaaacagatggcgacgcgaacaaatacctagagcgattcttcaacgcggggcctttagacacgagggcgtgggttctacaggagcgcgtcttgtctacacggacacttagctttgaagctcgggaactgcgatggcagtgtctcgaggatgagtacactgagagtaaaccggaaggacagcgaccgccagacaggctagagtcagagtccgagccagaatcagaatcggactcggcagagtcttcgtcttctgggcattcttccgtggccggtttacgttccatgtcggccctcgccaacacgcttaacagagtaacaacattcaaaaaccgacgaaccgactatatatccacattcaaaaaatacatcagcacgcacagcatcccgtccaatccctcgccagccacggaagagctccacttcacatggtacctcctcgtagaaaactacacccgccgtctcctaacccttgaaaccgaccgactcatcgctctagccggtctagctcaatccctcgccctcacaacccacgacacattcctcgccggtctctggcatgcccatctctggcgagatctcctatggagtgcaacgacatactcgcactgggacctcaaatcaggctccttccctcgtcgaccgcgcggtggtttccgcgccccgagctggagctgggcgtcggtcgtgggatatataacctacaccatcaacgagttcgactccttctcggaccacactctcctcgcgaccagtgtcgaagtctcgatgcagaccgatctcgcctcacaatttctcgtccacgatatccaaggaacgctgaagatccgtggaattctgcgagttgctgctatccaagatgataagttactagactccgagtcgggcgaacaaatcgtcgccacgagcatgtccatgggggctacggggtcggtggtcccgccgtttggtgtcttgggttga

SEQ ID NO: 31124 - protein, 695 aa, Muscodor strobelii
  misc_feature: SGI Peptide ID NO. 570712
  misc_feature (245)..(404): Pfam Id: PF06985 Pfam Desc: Heterokaryon incompatibility protein (HET)
  misc_feature (245)..(339): Pfam Id: PF06985 Pfam Desc: Heterokaryon incompatibility protein (HET)
  misc_feature (74)..(604): NCBI GI: 256724492 Blast Desc: NECHADRAFT_88127 [Nectria haematococca mpVI 77-13-4]
  misc_feature (74)..(688): NCBI GI: 159123464 Blast Desc: HET domain protein [Aspergillus fumigatus A1163]
  misc_feature (43)..(688): NCBI GI: 256724255 Blast Desc: NECHADRAFT_87557 [Nectria haematococca mpVI 77-13-4]
  misc_feature (193)..(663): NCBI GI: 169623263 Blast Desc: SNOG_14868 [Phaeosphaeria nodorum SN15] gi|111056600|gb|EAT77720.1| SNOG_14868 [Phaeosphaeria nodorum SN15]
  misc_feature (71)..(610): NCBI GI: 256730657 Blast Desc: NECHADRAFT_73983 [Nectria haematococca mpVI 77-13-4]
  misc_feature (146)..(604): NCBI GI: 256722024 Blast Desc: NECHADRAFT_86169 [Nectria haematococca mpVI 77-13-4]
  misc_feature (187)..(657): NCBI GI: 256726009 Blast Desc: NECHADRAFT_81484 [Nectria haematococca mpVI 77-13-4]
  misc_feature (188)..(606): NCBI GI: 256728185 Blast Desc: NECHADRAFT_24038 [Nectria haematococca mpVI 77-13-4]
  misc_feature (68)..(622): NCBI GI: 256720830 Blast Desc: NECHADRAFT_85535 [Nectria haematococca mpVI 77-13-4]
  misc_feature (87)..(649): NCBI GI: 46126655 Blast Desc: FG07705.1 [Gibberella zeae PH-1]
MATEARETEIPTSANLNTLSTDEPNETPFDIDHFTLPYDGSLCETCYLFSEMLRQSQAKSTLSAMISGGTRLGHHHSLNALRSSVKTGCRLCGLFLKVLEEGQNGYLWFQKVHIPLPDSGSILLHRDWLKSMDDRTRMEVSVDEHISDLQDSLQFVPMPEDVTTVIRNAEIVSEDDDTIWSYSARAMVHHWLDQCLTAHPHCCEFRGTDRPLPTRVIYVGSKEEGDEDHQNVHLHISSGGEQEDYVALSHRWGDEMPLRLTKDSLSSLVKSIPSSELSPTFRDAIDITRSLGVKYIWIDSLCITQDSPEDWNAEATKMSDVYRHAIFTIAATEADAKTGIKAPRRNFPGRPVNMQVGVSEGVFGPHAGTLHCRIKEETDGDANKYLERFFNAGPLDTRAWVLQERVLSTRTLSFEARELRWQCLEDEYTESKPEGQRPPDRLESESEPESESDSAESSSSGHSSVAGLRSMSALANTLNRVTTFKNRRTDYISTFKKYISTHSIPSNPSPATEELHFTWYLLVENYTRRLLTLETDRLIALAGLAQSLALTTHDTFLAGLWHAHLWRDLLWSATTYSHWDLKSGSFPRRPRGGFRAPSWSWASVVGYITYTINEFDSFSDHTLLATSVEVSMQTDLASQFLVHDIQGTLKIRGILRVAAIQDDKLLDSESGEQIVATSMSMGATGSVVPPFGVLG

SEQ ID NO: 31125 - DNA, 652 bp, Muscodor strobelii
  misc_feature: SGI EST ID NO. CUFF.73728.0
  misc_feature: Variant of the nucleotide sequence at SEQ ID NO 31123
catagacctattcaagcttccaaaccacatattcctgctgcggcaaggcttttaccccacgacgtaggcccaaggatttaagtctgcgagacaaccatggcgacagaagcaagagagacagaaatacctacttcagccaacctcaacactctcagcaccgacgaacccaacgaaactcctttcgacatcgaccacttcaccctcccctacgatggctctctatgtgaaacctgttatctattcagtgaaatgctacggcaaagtcaagcaaaatccaccctctccgccatgatcagcgggggtactcgtctcgggcaccatcactctctcaacgccctgagatcatcagtgaaaaccggctgtcgactctgtggcctatttctcaaagtgctggaagaaggtcagaacggatatctatggttccagaaggttcacatcccgcttcccgacagtggaagtatcctactacatcgcgattggttgaagagcatggatgataggacgcgaatggaggtttccgtcgatgagcatatatctgacttgcaggattcgcttcagtttgtgccgatgcccgaggacgtgaccaccgtgataagaaacgcagaaatagtatccgaagacgacgataccatctggtcatactcagcccggg

SEQ ID NO: 31126 - DNA, 1041 bp, Muscodor strobelii
  misc_feature: SGI cDNA ID NO. 570713
  misc_feature: Encodes the peptide sequence at SEQ ID NO 31127
atgttcttcggcgccccagttcccaaggagctgtcgactgtcccggtggcatctgttgcctcggtggctcaaccctcagctcctgttgaagccatctccctcattacctcttcctcaactagcctgcagactcctaaagccctacaaactgtgacgtcatccactgccctcgtctccatcccctttggcaatgataaaatggatcttgccgtcaccgccggcgctgacctcatgtgtgccgctgagctcttcagtcgcaatgagattctcgtcaagatcccgcagagcctcaagaccacctggctggccaaggatgcgatcatgatcgccgttagtcgcgacctcaaagacatccccaccaccgtttcttccgtcgacgagggattcctgatcgaggtgcctatgaacgaggcacacggcgtgttgtctgtggccgttgcgacaactcgaaaaccaaagatcaacgagtctttccgggtcaactttggcactcaccgccttactggggcgctggatgctggtaagcaactcgtccgggggttcgcacagaagctggcggacacggtcaacgacacgacagcatgggtcgaagagacgtatagcataccgaccctcgacaccgtgtctaagcaagtgtgtgaacaaaccgtctccgtctccggttctttacagcagagcatcaaagacttgtcagtccatgtacagtctgtcatcggtcgcaacgtggcgactcgaggccgccagttcgagctggcagtcactggaaccgcacaagacattcgcgacgatcttcagatgaggctcctgaagagtcagattaactcgaagctgctgtggttgaaggcgcaaggcaagatggaagagcatgaccattatctgcgcaaggccgaggcatactgggctaaacagcgggcggagaaggaaagtgcgcgtgctcttcgagtcgagaagacaaagaaggagattcagctgtcgagggagcaaacatcagtgcaacccgcgacgatgggcttcttcggacgcctgcgaggacggacatga

SEQ ID NO: 31127 - protein, 346 aa, Muscodor strobelii
  misc_feature: SGI Peptide ID NO. 570713
  misc_feature (8)..(322): NCBI GI: 261359287 Blast Desc: conserved [Verticillium albo-atrum VaMs.102]
  misc_feature (79)..(311): NCBI GI: 116207646 Blast Desc: CHGG_03116 [Chaetomium globosum CBS 148.51] gi|88183713|gb|EAQ91181.1| CHGG_03116 [Chaetomium globosum CBS 148.51]
  misc_feature (78)..(344): NCBI GI: 85081352 Blast Desc: NCU00442 [Neurospora crassa OR74A] gi|28917780|gb|EAA27470.1| [Neurospora crassa OR74A] gi|40882138|emb|CAF05965.1| [Neurospora crassa]
  misc_feature (81)..(319): NCBI GI: 154296558 Blast Desc: BC1G_12687 [Botryotinia fuckeliana B05.10] gi|150843270|gb|EDN18463.1| BC1G_12687 [Botryotinia fuckeliana B05.10]
  misc_feature (79)..(328): NCBI GI: 156058948 Blast Desc: SS1G_03486 [Sclerotinia sclerotiorum 1980] gi|154701273|gb|EDO01012.1| SS1G_03486 [Sclerotinia sclerotiorum 1980]
  misc_feature (76)..(317): NCBI GI: 171686148 Blast Desc: protein product [Podospora anserina] gi|170943035|emb|CAP68688.1| protein product [Podospora anserina]
  misc_feature (86)..(321): NCBI GI: 256725729 Blast Desc: NECHADRAFT_43320 [Nectria haematococca mpVI 77-13-4]
  misc_feature (89)..(292): NCBI GI: 46116528 Blast Desc: FG04106.1 [Gibberella zeae PH-1]
MFFGAPVPKELSTVPVASVASVAQPSAPVEAISLITSSSTSLQTPKALQTVTSSTALVSIPFGNDKMDLAVTAGADLMCAAELFSRNEILVKIPQSLKTTWLAKDAIMIAVSRDLKDIPTTVSSVDEGFLIEVPMNEAHGVLSVAVATTRKPKINESFRVNFGTHRLTGALDAGKQLVRGFAQKLADTVNDTTAWVEETYSIPTLDTVSKQVCEQTVSVSGSLQQSIKDLSVHVQSVIGRNVATRGRQFELAVTGTAQDIRDDLQMRLLKSQINSKLLWLKAQGKMEEHDHYLRKAEAYWAKQRAEKESARALRVEKTKKEIQLSREQTSVQPATMGFFGRLRGRT

SEQ ID NO: 31128 - DNA, 4482 bp, Muscodor strobelii
  misc_feature: SGI EST ID NO. CUFF.74069.1
  misc_feature: Variant of the nucleotide sequence at SEQ ID NO 31126
tttggatgttatctgcctgcatcactctcactgtgcttcgttctctcttcgcagttacacctcatactccttcgccctctgatctggatgatattgacaaatatctccacaacagctgaagcaggagattctctcggaacctgtagaccatcaggagtcgtttgtcgagctcttggtcagccacgttatccatcacgaaacgattaggtgcttgtaggactgcaacgccggtcgtcttcacctcgattcttgccaaaccagtcaaggcctataactcgtcgtacttcgggtgctttgccatatttcactggcaagctcgaggcatgacgtgatacctgacggctctcgtctattcacgttatggaacaggattccacatccgacaagccgaagccttttccgtcaccacgacagcgccgaccgccttcaacctccagacagcccaccccacgcctcgccgacagcgagccgagctgtccgcccctcaacaccacaaaccaccgtcgcgaggacttgtccgactccataccttctcttcgattcccacgcccactgggaaaccgacagctatccaactggatatcctcgagccagccagacatcatgcaggctggagacaatttccccgacgacgagctcagcttgtctgagtacgactacgatgtcgtcccccgttccaagaagatgccctctgccgagatgggttctgccgagacgagttacgagttcgtcaccgacgacgaaagccaagccggcgagagccaagccgaatccactgcgagctcgttcgacttcccaagaacagacgaggtctatagttacgccggcaccgaggacggcactgatgtcgacgtcgattctgacgacgaggggaccggagccatgaacgagacggcaatctctgatgccacccttgtcgagggtggccagacagatgatctaagcagtgctcaagaatctgtccacacagccattcacagcgtagggaatcctttgaccttgtctctgtcaggcttcatcccgctcccgcctccggtctattccgagtcaaaccgccctcaagacttgtcagaagtcgaggtaaagcatgttaaagaccgtgacgttcctgatagtgaagaggattcagaggaggtggatgtcagcgaatcaccatccgcaaagcaatccaagtcgtcgaatacaagatggccgaagccacttctccaatacgagactctgagagtggccgtcaactatgcttaccagaaccgactcgtggctggcttattggcttggatcatcgtgcaagcttttgtcactctcgctgtgcgccccatgttcttcggcgccccagttcccaaggagctgtcgactgtcccggtggcatctgttgcctcggtggctcaaccctcagctcctgttgaagccatctccctcattacctcttcctcaactagcctgcagactcctaaagccctacaaactgtgacgtcatccactgccctcgtctccatcccctttggcaatgataaaatggatcttgccgtcaccgccggcgctgacctcatgtgtgccgctgagctcttcagtcgcaatgagattctcgtcaagatcccgcagagcctcaagaccacctggctggccaaggatgcgatcatgatcgccgttagtcgcgacctcaaagacatccccaccaccgtttcttccgtcgacgagggattcctgatcgaggtgcctatgaacgaggcacacggcgtgttgtctgtggccgttgcgacaactcgaaaaccaaagatcaacgagtctttccgggtcaactttggcactcaccgccttactggggcgctggatgctggtaagcaactcgtccgggggttcgcacagaagctggcggacacggtcaacgacacgacagcatgggtcgaagagacgtatagcataccgaccctcgacaccgtgtctaagcaagtgtgtgaacaaaccgtctccgtctccggttctttacagcagagcatcaaagacttgtcagtccatgtacagtctgtcatcggtcgcaacgtggcgactcgaggccgccagttcgagctggcagtcactggaaccgcacaagacattcgcgacgatcttcagatgaggctcctgaagagtcagattaactcgaagctgctgtggttgaaggcgcaaggcaagatggaagagcatgaccattatctgcgcaaggccgaggcatactgggctaaacagcgggcggagaaggaaagtgcgcgtgctcttcgagtcgagaagacaaagaaggagattcagctgtcgagggagcaaacatcagtgcaacccgcgacgatgggcttcttcggacgcctgcgaggacggacatgaagcagacggtaatggcctgaagggccccaggttatacgaaatgatgttcactagtagtgggatatgggataggtatcggcgttgggacggttgctctattagccttgcttacctaggtacatgatatattcctgtcgcctatcaagataccatacaaaccaggccggtcagtgtaattgtaaagttattgggctttgccaaagtgccacctactgtgactagggtcatggcgtcgcgaggtaaattgaaaatctgagagtgccaagaggctgtggggcgatgaaggtgaatataggtaaatctccactcagacaaaatgtgaaagacatagacaatcaggtagcacgagcaactgatgtgcatcttaggtgatgttttacttgtaggatatgagtgttacgatgtgatttgataattgatcatgaccttgattatctatgtgcttaactttggattagattctctatataggtataaatctacgaaataagtacggattgccagcgaaagagcgtgacctacttgccctttgtatcttgggcagaatcgccccaggcattggcatagatactggtcaagaccatttcccatcattctcatgattcatatgaccatgacagatgcttgcgtgtcgcacgcagtatcccaattcttaatccaccacttagccaacccaacacgggtatagcaatgcggctgcccaggcaaggctatcaacccaagacaccaaacggcgggaccaccgaccccgtagcccccatggacatgctcgtggcgactaattgcaagacacgagatctcggttctgtcctctagttcgacatcgggcgcgaacataccgatttgttcgcccgactcggagtctagtaacttatcatcttggatagcagcaactcgcagaattccacggatcttcagcgttccttggatatcgtggacgagaaattgtgaggcgagatcggtctgcatcgagacttcgacactggtcgcgaggagagtgtggtccgagaaggagtcgaactcgttgatggtgtaggttatatatcccacgaccgacgcccagctccagctcggggcgcggaaaccaccgcgcggtcgacgagggaaggagcctgatttgaggtcccagtgcgagtatgtcgttgcactccataggagatctcgccagagatgggcatgccagagaccggcgaggaatgtgtcgtgggttgtgagggcgagggattgagctagaccggctagagcgatgagtcggtcggtttcaagggttaggagacggcgggtgtagttttctacgaggaggtaccatgtgaagtggagctcttccgtggctggcgagggattggacgggatgctgtgcgtgctgatgtattttttgaatgtggatatatagtcggttcgtcggtttttgaatgttgttactctgttaagcgtgttggcgagggccgacatggaacgtaaaccggccacggaagaatgcccagaagacgaagactctgccgagtccgattctgattctggctcggactctgactctagcctgtctggcggtcgctgtccttccggtttactctcagtgtactcatcctcgagacactgccatcgcagttcccgagcttcaaagctaagtgtccgtgtagacaagacgcgctcctgtagaacccacgccctcgtgtctaaaggccccgcgttgaagaatcgctctaggtatttgttcgcgtcgccatctgtttcttccttgatgcgacagtgtaatgtacccgcatggggtccgaatacgccctcggaaacgccaacttgcatgtttacaggccgtccagggaagttccttcgcggggctttaatcccggttttcgcatccgcctctgttgccgcgatggtgaatatcgcatgacgatagacgtcgctcatcttcgtggcctctgcgttccagtcttccggggaatcttgtgtgatgcagagcgaatcgatccagatgtacttcaccccgagggagcgcgtgatgtctatcgcgtcgcggaacgtgggcgatagttcggaagaagggatgctcttcaccagagagcttagcgagtccttggtaagccgtaatggcatttcgtcgccccagcggtgacttaacgc

SEQ ID NO: 31129 - DNA, 1998 bp, Muscodor strobelii
  misc_feature: SGI cDNA ID NO. 570714
  misc_feature: Encodes the peptide sequence at SEQ ID NO 31130
atggaacaggattccacatccgacaagccgaagccttttccgtcaccacgacagcgccgaccgccttcaacctccagacagcccaccccacgcctcgccgacagcgagccgagctgtccgcccctcaacaccacaaaccaccgtcgcgaggacttgtccgactccataccttctcttcgattcccacgcccactgggaaaccgacagctatccaactggatatcctcgagccagccagacatcatgcaggctggagacaatttccccgacgacgagctcagcttgtctgagtacgactacgatgtcgtcccccgttccaagaagatgccctctgccgagatgggttctgccgagacgagttacgagttcgtcaccgacgacgaaagccaagccggcgagagccaagccgaatccactgcgagctcgttcgacttcccaagaacagacgaggtctatagttacgccggcaccgaggacggcactgatgtcgacgtcgattctgacgacgaggggaccggagccatgaacgagacggcaatctctgatgccacccttgtcgagggtggccagacagatgatctaagcagtgctcaagaatctgtccacacagccattcacagcgtagggaatcctttgaccttgtctctgtcaggcttcatcccgctcccgcctccggtctattccgagtcaaaccgccctcaagacttgtcagaagtcgaggtaaagcatgttaaagaccgtgacgttcctgatagtgaagaggattcagaggaggtggatgtcagcgaatcaccatccgcaaagcaatccaagtcgtcgaatacaagatggccgaagccacttctccaatacgagactctgagagtggccgtcaactatgcttaccagaaccgactcgtggctggcttattggcttggatcatcgtgcaagcttttgtcactctcgctgtgcgccccatgttcttcggcgccccagttcccaaggagctgtcgactgtcccggtggcatctgttgcctcggtggctcaaccctcagctcctgttgaagccatctccctcattacctcttcctcaactagcctgcagactcctaaagccctacaaactgtgacgtcatccactgccctcgtctccatcccctttggcaatgataaaatggatcttgccgtcaccgccggcgctgacctcatgtgtgccgctgagctcttcagtcgcaatgagattctcgtcaagatcccgcagagcctcaagaccacctggctggccaaggatgcgatcatgatcgccgttagtcgcgacctcaaagacatccccaccaccgtttcttccgtcgacgagggattcctgatcgaggtgcctatgaacgaggcacacggcgtgttgtctgtggccgttgcgacaactcgaaaaccaaagatcaacgagtctttccgggtcaactttggcactcaccgccttactggggcgctggatgctggtaagcaactcgtccgggggttcgcacagaagctggcggacacggtcaacgacacgacagcatgggtcgaagagacgtatagcataccgaccctcgacaccgtgtctaagcaagtgtgtgaacaaaccgtctccgtctccggttctttacagcagagcatcaaagacttgtcagtccatgtacagtctgtcatcggtcgcaacgtggcgactcgaggccgccagttcgagctggcagtcactggaaccgcacaagacattcgcgacgatcttcagatgaggctcctgaagagtcagattaactcgaagctgctgtggttgaaggcgcaaggcaagatggaagagcatgaccattatctgcgcaaggccgaggcatactgggctaaacagcgggcggagaaggaaagtgcgcgtgctcttcgagtcgagaagacaaagaaggagattcagctgtcgagggagcaaacatcagtgcaacccgcgacgatgggcttcttcggacgcctgcgaggacggacatga

SEQ ID NO: 31130 - protein, 665 aa, Muscodor strobelii
  misc_feature: SGI Peptide ID NO. 570714
  misc_feature (327)..(641): NCBI GI: 261359287 Blast Desc: conserved [Verticillium albo-atrum VaMs.102]
  misc_feature (321)..(630): NCBI GI: 116207646 Blast Desc: CHGG_03116 [Chaetomium globosum CBS 148.51] gi|88183713|gb|EAQ91181.1| CHGG_03116 [Chaetomium globosum CBS 148.51]
  misc_feature (397)..(663): NCBI GI: 85081352 Blast Desc: NCU00442 [Neurospora crassa OR74A] gi|28917780|gb|EAA27470.1| [Neurospora crassa OR74A] gi|40882138|emb|CAF05965.1| [Neurospora crassa]
  misc_feature (302)..(647): NCBI GI: 156058948 Blast Desc: SS1G_03486 [Sclerotinia sclerotiorum 1980] gi|154701273|gb|EDO01012.1| SS1G_03486 [Sclerotinia sclerotiorum 1980]
  misc_feature (400)..(647): NCBI GI: 154296558 Blast Desc: BC1G_12687 [Botryotinia fuckeliana B05.10] gi|150843270|gb|EDN18463.1| BC1G_12687 [Botryotinia fuckeliana B05.10]
  misc_feature (395)..(636): NCBI GI: 171686148 Blast Desc: protein product [Podospora anserina] gi|170943035|emb|CAP68688.1| protein product [Podospora anserina]
  misc_feature (405)..(640): NCBI GI: 256725729 Blast Desc: NECHADRAFT_43320 [Nectria haematococca mpVI 77-13-4]
  misc_feature (408)..(618): NCBI GI: 46116528 Blast Desc: FG04106.1 [Gibberella zeae PH-1]
  misc_feature (2)..(169): NCBI GI: 256725729 Blast Desc: NECHADRAFT_43320 [Nectria haematococca mpVI 77-13-4]
  misc_feature (28)..(162): NCBI GI: 46116528 Blast Desc: FG04106.1 [Gibberella zeae PH-1]
MEQDSTSDKPKPFPSPRQRRPPSTSRQPTPRLADSEPSCPPLNTTNHRREDLSDSIPSLRFPRPLGNRQLSNWISSSQPDIMQAGDNFPDDELSLSEYDYDVVPRSKKMPSAEMGSAETSYEFVTDDESQAGESQAESTASSFDFPRTDEVYSYAGTEDGTDVDVDSDDEGTGAMNETAISDATLVEGGQTDDLSSAQESVHTAIHSVGNPLTLSLSGFIPLPPPVYSESNRPQDLSEVEVKHVKDRDVPDSEEDSEEVDVSESPSAKQSKSSNTRWPKPLLQYETLRVAVNYAYQNRLVAGLLAWIIVQAFVTLAVRPMFFGAPVPKELSTVPVASVASVAQPSAPVEAISLITSSSTSLQTPKALQTVTSSTALVSIPFGNDKMDLAVTAGADLMCAAELFSRNEILVKIPQSLKTTWLAKDAIMIAVSRDLKDIPTTVSSVDEGFLIEVPMNEAHGVLSVAVATTRKPKINESFRVNFGTHRLTGALDAGKQLVRGFAQKLADTVNDTTAWVEETYSIPTLDTVSKQVCEQTVSVSGSLQQSIKDLSVHVQSVIGRNVATRGRQFELAVTGTAQDIRDDLQMRLLKSQINSKLLWLKAQGKMEEHDHYLRKAEAYWAKQRAEKESARALRVEKTKKEIQLSREQTSVQPATMGFFGRLRGRT

SEQ ID NO: 31131 - DNA, 4482 bp, Muscodor strobelii; identical to SEQ ID NO: 31128
  misc_feature: SGI EST ID NO. CUFF.74069.1
  misc_feature: Variant of the nucleotide sequence at SEQ ID NO 31129

SEQ ID NO: 31132 - DNA, 879 bp, Muscodor strobelii
  misc_feature: SGI cDNA ID NO. 570715
  misc_feature: Reduced expression when VOC is produced
  misc_feature: Encodes the peptide sequence at SEQ ID NO 31133
atggccgaatcttctatcaccaatcccacacctgcccaggaagaatttcagaatttcctcgataaaaacaccgacagaggctctcgtctacatcccgaagacagagacagcaaccgtgacagcgacgacagtgagcttgacgaggaggatcgttacagaaacgcacaaatcgacggcgctatgcgtacaccagccatccgctccggcgacatgaagttgcccccatccagcttcgactcgggctgtgccacgggtgtcaaaggcgtcatcgccgacgcccgcgcctacgagcaggctcgtcaaggcaaatggaggagcaaggttcgcgatgtacgccagtccataatgggattgagcctggtcggaacgggaaaccaaaagagcgaggcgtccagtcccaccgatagcgacgtgggctcggaccacgacgaggaagccttccttcagcaatggcgcgagacaagacggctcgaattggagaacgagtctaggaatatccgcaaccgccgtactagcccgagtctacgcacgtatggtcggctggaccatgttgatgccttgggctacctcgatgccatcgagaaagtcgggcgagagacagtcgtcgtcgtatttgtctacgatcacgagtgtcaagcatccggcattattgagctggctttacggccgcttgttatggctcatcccaccgttcactttgtgaaggtacactatgaggacattgagttcgacaacgcagcggtacccacactgctcgcctaccgcaaccaaggtgatttgtttgccaatatgacaagcatcatcgacgagattccagaggatgaagacttcgacaccaattcattgaggcaaatattcaagaagcatggtgtcttatag

SEQ ID NO: 31133 - protein, 292 aa, Muscodor strobelii
  misc_feature: SGI Peptide ID NO. 570715
  misc_feature (62)..(292): Pfam Id: PF02114 Pfam Desc: Phosducin
  misc_feature (10)..(292): NCBI GI: 46116526 Blast Desc: FG04105.1 [Gibberella zeae PH-1]
  misc_feature (5)..(292): NCBI GI: 171686146 Blast Desc: protein product [Podospora anserina] gi|170943034|emb|CAP68687.1| protein product [Podospora anserina]
  misc_feature (6)..(292): NCBI GI: 116207644 Blast Desc: CHGG_03115 [Chaetomium globosum CBS 148.51] gi|88183712|gb|EAQ91180.1| CHGG_03115 [Chaetomium globosum CBS 148.51]
  misc_feature (10)..(292): NCBI GI: 261359286 Blast Desc: phosducin [Verticillium albo-atrum VaMs.102]
  misc_feature (6)..(292): NCBI GI: 40882140 Blast Desc: phosducin [Neurospora crassa]
  misc_feature (10)..(292): NCBI GI: 6714950 Blast Desc: AF140555_1 phosducin [Cryphonectria parasitica]
  misc_feature (6)..(292): NCBI GI: 156058936 Blast Desc: SS1G_03480 [Sclerotinia sclerotiorum 1980] gi|154701267|gb|EDO01006.1| SS1G_03480 [Sclerotinia sclerotiorum 1980]
  misc_feature (6)..(292): NCBI GI: 164429104 Blast Desc: NCU00441 [Neurospora crassa OR74A] gi|157072412|gb|EAA27469.2| conserved [Neurospora crassa OR74A]
  misc_feature (6)..(257): NCBI GI: 154296548 Blast Desc: phosducin [Botryotinia fuckeliana B05.10] gi|150843265|gb|EDN18458.1| phosducin [Botryotinia fuckeliana B05.10]
  misc_feature (117)..(292): NCBI GI: 145602087 Blast Desc: MGG_12918 [Magnaporthe grisea 70-15] gi|145010532|gb|EDJ95188.1| MGG_12918 [Magnaporthe grisea 70-15]
  misc_feature: Useful for introducing or modulating the production of volatile compounds
MAESSITNPTPAQEEFQNFLDKNTDRGSRLHPEDRDSNRDSDDSELDEEDRYRNAQIDGAMRTPAIRSGDMKLPPSSFDSGCATGVKGVIADARAYEQARQGKWRSKVRDVRQSIMGLSLVGTGNQKSEASSPTDSDVGSDHDEEAFLQQWRETRRLELENESRNIRNRRTSPSLRTYGRLDHVDALGYLDAIEKVGRETVVVVFVYDHECQASGIIELALRPLVMAHPTVHFVKVHYEDIEFDNAAVPTLLAYRNQGDLFANMTSIIDEIPEDEDFDTNSLRQIFKKHGVL

SEQ ID NO: 31134 - DNA, 1736 bp, Muscodor strobelii
  misc_feature: SGI EST ID NO. CUFF.73714.0
  misc_feature: Variant of the nucleotide sequence at SEQ ID NO 31132
gccccaacaaagacacaaatcccactgatcccgtttccttctctccggcaccacaccactcccagactatcacaccccccttcctcttcttatataccatacacacccacccgatatatctccctgtcctccctcctccacaatggccgaatcttctatcaccaatcccacacctgcccaggaagaatttcagaatttcctcgataaaaacaccgacagaggctctcgtctacatcccgaagacagagacagcaaccgtgacagcgacgacagtgagcttgacgaggaggatcgttacagaaacgcacaaatcgacggcgctatgcgtacaccagccatccgctccggcgacatgaagttgcccccatccagcttcgactcgggctgtgccacgggtgtcaaaggcgtcatcgccgacgcccgcgcctacgagcaggctcgtcaaggcaaatggaggagcaaggttcgcgatgtacgccagtccataatgggattgagcctggtcggaacgggaaaccaaaagagcgaggcgtccagtcccaccgatagcgacgtgggctcggaccacgacgaggaagccttccttcagcaatggcgcgagacaagacggctcgaattggagaacgagtctaggaatatccgcaaccgccgtactagcccgagtctacgcacgtatggtcggctggaccatgttgatgccttgggctacctcgatgccatcgagaaagtcgggcgagagacagtcgtcgtcgtatttgtctacgatcacgagtgtcaagcatccggcattattgagctggctttacggccgcttgttatggctcatcccaccgttcactttgtgaaggtacactatgaggacattgagttcgacaacgcagcggtacccacactgctcgcctaccgcaaccaaggtgatttgtttgccaatatgacaagcatcatcgacgagattccagaggatgaagacttcgacaccaattcattgaggcaaatattcaagaagcatggtgtcttatagacaaccaatcccttcatctttcccttattatcggcggcagtaaaagctcaatttggtcacttgtttttcaattggttctgcgaaaaaaaattgcattgtttgatacccattgacttcatttcgggcgaaagtgggatacaaggcgctatacgagaatgcagtctcatcgtctccattgagtggatgcgaacaggactccgacgtgtggaggataatggagtgggatatttgtttcacgcttgagatctcgagcgttcggggaacgcattggatgagaatgttgtgtatgagcaggaggaacgtggcaatcacggcgtatatcaatcatagacgggcgaacaggatgggcatctggcctcttgagtctgcgcgacggaagagagcaatctttgataaggcgttaaggggactatcacaatagtcgacggatatcctcaagggcattttcatttggtcgggctgaaacaatagctgtggtctttcgggctgtcgtctttgtaaagttgcatggatgggatgtcaatcaaagcacccataattcaaaaacaattcaagaggagcagactgcaacctcttcgcttccaaatcctcgtcctgcatcggaactctaccaattgtgttcgcggatgatatgtcttggcataatgtaacatgagggccagccgttcgacagatatgtaagtgagactcgagacctccgcgtggcttgacttgg

SEQ ID NO: 31135 - DNA, 1086 bp, Muscodor strobelii
  misc_feature: SGI cDNA ID NO. 570716
  misc_feature: Reduced expression when VOC is produced
  misc_feature: Encodes the peptide sequence at SEQ ID NO 31136
atggattcgcaacggcagaacgacgtgtcgccagaggccatgcaagcgcgcatccagcaggcgcgacgtgaagccgagacgctcaaggacagaatcaagcggaagaaggatgagctggctgacactaccctccgtgccgtggctgtatctcaacagtcgcacgaggccatccccagaaaccagttgatgaagacgaaaaggacgctcaagggccatctggccaagatctacgccatgcactggtcgaccgaccgaagacatctggtctcggcctcgcaggacggaaagctgatcatctgggacgcctacacgacgaacaaggtgcacgccataccgctgcgctcctcgtgggtcatgacctgcgcctacgccccgagcgggaactacgtcgcctgcggtggcctcgacaacatctgctccatctacaacctcaaccagaaccgagacggacccacccgcgtcgcgcgggaactgtcgggccacgccgggtatctgtcgtgctgtcgctttattaatgaccgcagcatcctcacctcgtcgggcgatatgacgtgtatgaaatgggatatcgagaccgggaccaaagtgatggagtttgccgatcatctcggcgatgtcatgagcatcagcctcaaccccacaaaccagaacaccttcatctctggtgcttgcgacgcgttcgccaagctgtgggacatccgcgccggcaaggccgtgcagacatttgccggccacgagtccgacatcaacgccatccagttcttccccgatggtcactcgttcgtcaccggctccgatgacgcgacttgcagactcttcgatatccgagctgatagggaattgaatctctatgggtctgagtccattctttgtggtatcacatcagtcgcgacttcagtatcaggtcgtcttctgtttgcaggctacgatgactttgaatgcaaggtctgggacatcactagaggagagaaggtcggctcactcgtgggccatgagaaccgtgtcagctgcctaggcgttagcaacgatggtatcagcctgtgtactggttcttgggactctgtgctgaaaatctgggcatactaa

SEQ ID NO: 31136 - protein, 361 aa, Muscodor strobelii
  misc_feature: SGI Peptide ID NO. 570716
  misc_feature (236)..(274): Pfam Id: PF00400 Pfam Desc: WD domain, G-beta repeat
  misc_feature (63)..(101): Pfam Id: PF00400 Pfam Desc: WD domain, G-beta repeat
  misc_feature (322)..(360): Pfam Id: PF00400 Pfam Desc: WD domain, G-beta repeat
  misc_feature (193)..(232): Pfam Id: PF00400 Pfam Desc: WD domain, G-beta repeat
  misc_feature (105)..(143): Pfam Id: PF00400 Pfam Desc: WD domain, G-beta repeat
  misc_feature (152)..(189): Pfam Id: PF00400 Pfam Desc: WD domain, G-beta repeat
  misc_feature (1)..(361): NCBI GI: 39940078 Blast Desc: guanine nucleotide-binding protein beta subunit [Magnaporthe grisea 70-15] gi|145010530|gb|EDJ95186.1| guanine nucleotide-binding protein beta subunit [Magnaporthe grisea
  misc_feature (1)..(361): NCBI GI: 19548930 Blast Desc: AF484341_1 G-protein beta subunit [Sporothrix schenckii] gi|19548932|gb|AAL90862.1|AF484342_1 G-protein beta subunit [Sporothrix schenckii]
  misc_feature (1)..(361): NCBI GI: 3023840 Blast Desc: GBB_CRYPA RecName: Full=Guanine nucleotide-binding protein subunit beta gi|2459698|gb|AAC49838.1| GTP binding protein beta subunit [Cryphonectria parasitica]
  misc_feature (1)..(361): NCBI GI: 21624378 Blast Desc: heterotrimeric G-protein beta subunit [Magnaporthe grisea]
  misc_feature (1)..(361): NCBI GI: 171686144 Blast Desc: protein product [Podospora anserina] gi|170943033|emb|CAP68686.1| protein product [Podospora anserina]
  misc_feature (1)..(361): NCBI GI: 91980292 Blast Desc: heterotrimeric G protein beta subunit [Gibberella moniliformis]
  misc_feature (1)..(361): NCBI GI: 254265824 Blast Desc: G protein beta subunit [Acremonium chrysogenum]
  misc_feature (1)..(361): NCBI GI: 15991308 Blast Desc: guanine nucleotide-binding protein beta subunit [Fusarium oxysporum] gi|37788342|gb|AAO91808.1| G protein beta subunit [Fusarium oxysporum f. sp. lycopersici] G-protein
  misc_feature (1)..(361): NCBI GI: 37779215 Blast Desc: heterotrimeric G protein beta subunit TGB1 [Trichoderma atroviride]
  misc_feature (1)..(361): NCBI GI: 256725727 Blast Desc: [Nectria haematococca mpVI 77-13-4]
  misc_feature (39)..(359): SWISSPROT Homolog: EC 2.7.11.1 Non-specific serine/threonine protein kinase
  misc_feature: Useful for introducing or modulating the production of volatile compounds
MDSQRQNDVSPEAMQARIQQARREAETLKDRIKRKKDELADTTLRAVAVSQQSHEAIPRNQLMKTKRTLKGHLAKIYAMHWSTDRRHLVSASQDGKLIIWDAYTTNKVHAIPLRSSWVMTCAYAPSGNYVACGGLDNICSIYNLNQNRDGPTRVARELSGHAGYLSCCRFINDRSILTSSGDMTCMKWDIETGTKVMEFADHLGDVMSISLNPTNQNTFISGACDAFAKLWDIRAGKAVQTFAGHESDINAIQFFPDGHSFVTGSDDATCRLFDIRADRELNLYGSESILCGITSVATSVSGRLLFAGYDDFECKVWDITRGEKVGSLVGHENRVSCLGVSNDGISLCTGSWDSVLKIWAY

SEQ ID NO: 31137 - DNA, 2919 bp, Muscodor strobelii
  misc_feature: SGI EST ID NO. CUFF.73726.0
  misc_feature: Variant of the nucleotide sequence at SEQ ID NO 31135
tgacagcttggcgttaagtacaccgacgtctggctctttccctcttttctccccacctcttcctgtctccttccacccaagacaccattgcctctctctttctgctctgtccctacctcgactgagtgacttgactgtgcgtacctacctacctctgctactcgacagccagaccagactgggacaagccccctgtcgtcctggagcttgcatcccccatccaccaccgtgcacttgcacttgcaccatccacatcctccaatcctccctactaaccgctcgtacccccatcgctgctgccaacctcacacctaatctttccctccttttcgtgtcgagccttggtgctttctccccccatccgccacacatccaattcggcgtcgctcgatctgcccgccatcgacacgtcgccggctgaccccgacgcatctcgatcgtccgacgcattcgccatcgctccatcgcttcatcgctgccgctcaggagagtcactaattgccgttgagaccgcctttcctcgccgccttttctcgcttccatccccttcccatactccgacccccgacagccacccgacgaccaccgggtccatcgccagccatggattcgcaacggcagaacgacgtgtcgccagaggccatgcaagcgcgcatccagcaggcgcgacgtgaagccgagacgctcaaggacagaatcaagcggaagaaggatgagctggctgacactaccctccgtgccgtggctgtatctcaacagtcgcacgaggccatccccagaaaccagttgatgaagacgaaaaggacgctcaagggccatctggccaagatctacgccatgcactggtcgaccgaccgaagacatctggtctcggcctcgcaggacggaaagctgatcatctgggacgcctacacgacgaacaaggtgcacgccataccgctgcgctcctcgtgggtcatgacctgcgcctacgccccgagcgggaactacgtcgcctgcggtggcctcgacaacatctgctccatctacaacctcaaccagaaccgagacggacccacccgcgtcgcgcgggaactgtcgggccacgccgggtatctgtcgtgctgtcgctttattaatgaccgcagcatcctcacctcgtcgggcgatatgacgtgtatgaaatgggatatcgagaccgggaccaaagtgatggagtttgccgatcatctcggcgatgtcatgagcatcagcctcaaccccacaaaccagaacaccttcatctctggtgcttgcgacgcgttcgccaagctgtgggacatccgcgccggcaaggccgtgcagacatttgccggccacgagtccgacatcaacgccatccagttcttccccgatggtcactcgttcgtcaccggctccgatgacgcgacttgcagactcttcgatatccgagctgatagggaattgaatctctatgggtctgagtccattctttgtggtatcacatcagtcgcgacttcagtatcaggtcgtcttctgtttgcaggctacgatgactttgaatgcaaggtctgggacatcactagaggagagaaggtcggctcactcgtgggccatgagaaccgtgtcagctgcctaggcgttagcaacgatggtatcagcctgtgtactggttcttgggactctgtgctgaaaatctgggcatactaagcatgagattctttcccattcaatacgccctacgccagatacccctttcgaggcacactatagtgcgccctaagccagcaaaaaaattcgataccaccaccaactcatacttagttggaactcctctgttatcagagctaatgtaaacaggacgaagccatgacatccttactcgacaccccatttcccttgataccggcctgcattgtacttgcacaacttttcgacacggcgcaatgtcgctgtgggagaagcggaggacgcatctagaacactcgatcacccccgacgtcagcatcgtaataccactcgcctcgccttccatccactcttcgctaccctctctgacgtttttgcccgatgcgagtctctttgttgtatgcgccatacccctcaggcgcagtggcaaacccacaggcgatcaaatgcctgaggggcaaatacacgatgtcacggacggcctttcacggcgagcgctacttccttttgtgtgaaccggtcccctcatcaaccccgacctactgatatacggatcacaacgcgtcttcgggttcgaggagtctgtccatagtgactgatgttttctgccgaaaatttccgttcctgcgcctacttgttttcatttttctattttgactttccccgacaattcctcagctctccttgcggtagatggagcggaggcgtcatcaactgttttcttaccccaaggatacaaaaagaagatacggtctatctggctgaacgaaggtgtggaagacgtcccattttcgaaatgtgttgaatttcttgttggaggacgaaaccgaaccctggaaagccaccatggacgatgtgtgtgggcttttcgcatgatgatttgatatggcagtagaagacacggactagctattaggcttttagtcgtctctcgggcttgtttctcccgagagcattgtttgattgctgggttagaggcagttaaaggggggcttgctgatgtgttgagaagagcatatggaggaatgagaacttgtcttgatggcgtatgaggcggcccccttgtcttttcccgttgctgcgagttacccgactgctcctgccttgtcttgcctgtactatagtcatgtgtgtcatactgaatgccgaagaatcatcaaagttaatcagtttgctctgacatgaagtggaatagggaaatagagtgagatgacgatagtgactaataaggcctttgaaatgcgattgtga

SEQ ID NO: 31138 - DNA, 1485 bp, Muscodor strobelii
  misc_feature: SGI cDNA ID NO. 570717
  misc_feature: Reduced expression when VOC is produced
  misc_feature: Encodes the peptide sequence at SEQ ID NO 31139
gccaagctgctcggcaccatgggctccgacgacgccgacgacggcatccgcaccggctggatctgtgtcaacctcggcactgtcgaccgtggcgccgatcaggagtcgctcgtcgccgctgatgggcgctcctcgggctttggcgtgactcagtcgggctctacagtcgttgtccagctgatgaccgaggccaggaggcgagagatggacctcgaggcgctgtggactggtgctctcgatcgctccctcgccgcctccggagccgacgtgaacacgcggaagcccaaacagcccgctgataacctggatcccgtggagcgcgccatactggccaatgtccatcgaccacctaatcacgtacgtggccgccgggataagacgatgccgggtccttggctatcgaatcaagcccgtttgtactcgacagggccgtctattcctctagatgtctcgttgcgaggttctaccattgcgacactccaatcctccgaccccttgcggacgacttctgcagatgagatgaaacgccttctgacgtatgatgccgagtcgaagcaccggctgttgagcctcctccatacccagctgctacacatgggcgacgaggctgctgcgattgcccttggtgggaatgaccaaaccactgaatctactccgttcctcgagctgatgaatcttgccatgcagacacttcccccatctcagacttggaagtatcgcctcgctctccagcaccgaggaaccgagttgtcgatcaagcgttttactgaatcactaaaggatgtacatgttcttgtagacgagatgcgctcgaaccacgccattgatccaaccagagagcaatacattcaactattatactctatcctcgcttcgagctcgtataccgtcagccatttgtctcaacttgccctcgaggtcttaaatatgatgcaccagcgaaatcaagctgttctggccaatgatgttctcgttgccattgtcgaaagcatttctcattccaacaaagccgcgagagcccagtcccgttggaccacagatctcctcagcagtgtcgaaaaactacttttcctgccaacacagccctacctggaagattcgcaattgactgccctgatgggagcttatgctcgacgaggttcttgggctggggtgtggaatatctggcaagtcccgccgagatatcttcgcccacgatcccgagctatgtatcattgcattttcagcttggctatcaacaccaactctaagaaaatctgtgccgacgtgacccgtcgctgtgtccatgacatgtttgacgaagatccacccgtacttcccactggtgatgtgcggaaggcggctttaatatgtctcagcattgccgaccatcacgctgtagaatatgcttcaactataccagcggacgccgaaggcgttttgggaaagctagccaacagagaattcaccaagtatgcacgactcatcaacgaattcgaaaagtga

SEQ ID NO: 31139 - protein, 494 aa, Muscodor strobelii
  misc_feature: SGI Peptide ID NO. 570717
  misc_feature (1)..(484): NCBI GI: 85108429 Blast Desc: NCU06309 [Neurospora crassa OR74A] gi|28924180|gb|EAA33335.1| [Neurospora crassa OR74A]
  misc_feature (5)..(478): NCBI GI: 145258978 Blast Desc: An04g08750 [Aspergillus niger] gi|134074848|emb|CAK38962.1| protein product [Aspergillus niger]
  misc_feature (10)..(464): NCBI GI: 121716922 Blast Desc: conserved [Aspergillus clavatus NRRL 1] gi|119404109|gb|EAW14526.1| conserved [Aspergillus clavatus NRRL 1]
  misc_feature (10)..(456): NCBI GI: 238502483 Blast Desc: conserved [Aspergillus flavus NRRL3357] gi|220691285|gb|EED47633.1| conserved [Aspergillus flavus NRRL3357]
  misc_feature (10)..(456): NCBI GI: 71002660 Blast Desc: conserved [Aspergillus fumigatus Af293] gi|66853649|gb|EAL93973.1| conserved [Aspergillus fumigatus Af293]
  misc_feature (1)..(83): NCBI GI: 116195482 Blast Desc: CHGG_04339 [Chaetomium globosum CBS 148.51] gi|88180252|gb|EAQ87720.1| CHGG_04339 [Chaetomium globosum CBS 148.51]
  misc_feature (1)..(456): NCBI GI: 258566860 Blast Desc: conserved [Uncinocarpus reesii 1704] gi|237905620|gb|EEP80021.1| conserved [Uncinocarpus reesii 1704]
  misc_feature (10)..(477): NCBI GI: 115385613 Blast Desc: conserved [Aspergillus terreus NIH2624] gi|114187800|gb|EAU29500.1| conserved [Aspergillus terreus NIH2624]
  misc_feature (10)..(456): NCBI GI: 159130064 Blast Desc: conserved [Aspergillus fumigatus A1163]
  misc_feature (10)..(456): NCBI GI: 119482225 Blast Desc: NFIA_092040 [Neosartorya fischeri NRRL 181] gi|119409295|gb|EAW19244.1| conserved [Neosartorya fischeri NRRL 181]
  misc_feature: Useful for introducing or modulating the production of volatile compounds
AKLLGTMGSDDADDGIRTGWICVNLGTVDRGADQESLVAADGRSSGFGVTQSGSTVVVQLMTEARRREMDLEALWTGALDRSLAASGADVNTRKPKQPADNLDPVERAILANVHRPPNHVRGRRDKTMPGPWLSNQARLYSTGPSIPLDVSLRGSTIATLQSSDPLRTTSADEMKRLLTYDAESKHRLLSLLHTQLLHMGDEAAAIALGGNDQTTESTPFLELMNLAMQTLPPSQTWKYRLALQHRGTELSIKRFTESLKDVHVLVDEMRSNHAIDPTREQYIQLLYSILASSSYTVSHLSQLALEVLNMMHQRNQAVLANDVLVAIVESISHSNKAARAQSRWTTDLLSSVEKLLFLPTQPYLEDSQLTALMGAYARRGSWAGVWNIWQVPPRYLRPRSRAMYHCIFSLAINTNSKKICADVTRRCVHDMFDEDPPVLPTGDVRKAALICLSIADHHAVEYASTIPADAEGVLGKLANREFTKYARLINEFEK

SEQ ID NO: 31140 - DNA, 1740 bp, Muscodor strobelii
  misc_feature: SGI EST ID NO. CUFF.73794.0
  misc_feature: Variant of the nucleotide sequence at SEQ ID NO 31138
caagctgctcggcaccatgggctccgacgacgccgacgacggcatccgcaccggctggatctgtgtcaacctcggcactgtcgaccgtggcgccgatcaggagtcgctcgtcgccgctgatgggcgctcctcgggctttggcgtgactcagtcgggctctacagtcgttgtccagctgatgaccgaggccaggaggcgagagatggacctcgaggcgctgtggactggtgctctcgatcgctccctcgccgcctccggagccgacgtgaacacgcggaagcccaaacagcccgctgataacctggatcccgtggagcgcgccatactggccaatgtccatcgaccacctaatcacgtacgtggccgccgggataagacgatgccgggtccttggctatcgaatcaagcccgtttgtactcgacagggccgtctattcctctagatgtctcgttgcgaggttctaccattgcgacactccaatcctccgaccccttgcggacgacttctgcagatgagatgaaacgccttctgacgtatgatgccgagtcgaagcaccggctgttgagcctcctccatacccagctgctacacatgggcgacgaggctgctgcgattgcccttgacacttcccccatctcagacttggaagtatcgcctcgctctccagcaccgaggaaccgagttgtcgatcaagcgttttactgaatcactaaaggatgtacatgttcttgtagacgagatgcgctcgaaccacgccattgatccaaccagagagcaatacattcaactattatactctatcctcgcttcgagctcgtataccgtcagccatttgtctcaacttgccctcgaggtcttaaatatgatgcaccagcgaaatcaagctgttctggccaatgatgttctcgttgccattgtcgaaagcatttctcattccaacaaagccgcgagagcccagtcccgttggaccacagatctcctcagcagtgtcgaaaaactacttttcctgccaacacagccctacctggaagattcgcaattgactgccctgatgggagcttatgctcgacgaggttcttgggctggggtgtggaatatctggcaagtcccgccgagatatcttcgcccacgatcccgagctatgtatcattgcattttcagcttggctatcaacaccaactctaagaaaatctgtgccgacgtgacccgtcgctgtgtccatgacatgtttgacgaagatccacccgtacttcccactggtgatgtgcggaaggcggctttaatatgtctcagcattgccgaccatcacgctgtagaatatgcttcaactataccagcggacgccgaaggcgttttgggaaagctagccaacagagaattcaccaagtatgcacgactcatcaacgaattcgaaaagtgattgtggatgtagcatattgcgggctaggcatatcgaatgcgctcattgaaattatcaggaatcacgtttgcattgcttgggataaagcgagttgagtgcttaggacgtatattatcatgagaaatatctgtatagcaccacaaatgtacactatgtaaataccatataacaataatcatgtaccattatctgtcatactccatacaacatatattaccaaatcggatatataaaacagcgctcgctcgccagcatatagatagataaatacagagatggatgaagtacgacgcgtcaccaagctgaagcatgagagctt

SEQ ID NO: 31141 - DNA, 966 bp, Muscodor strobelii
  misc_feature: SGI cDNA ID NO. 570718
  misc_feature: Reduced expression when VOC is produced
  misc_feature: Encodes the peptide sequence at SEQ ID NO 31142
atgaaacgccttctgacgtatgatgccgagtcgaagcaccggctgttgagcctcctccatacccagctgctacacatgggcgacgaggctgctgcgattgcccttggtgggaatgaccaaaccactgaatctactccgttcctcgagctgatgaatcttgccatgcagacacttcccccatctcagacttggaagtatcgcctcgctctccagcaccgaggaaccgagttgtcgatcaagcgttttactgaatcactaaaggatgtacatgttcttgtagacgagatgcgctcgaaccacgccattgatccaaccagagagcaatacattcaactattatactctatcctcgcttcgagctcgtataccgtcagccatttgtctcaacttgccctcgaggtcttaaatatgatgcaccagcgaaatcaagctgttctggccaatgatgttctcgttgccattgtcgaaagcatttctcattccaacaaagccgcgagagcccagtcccgttggaccacagatctcctcagcagtgtcgaaaaactacttttcctgccaacacagccctacctggaagattcgcaattgactgccctgatgggagcttatgctcgacgaggttcttgggctggggtgtggaatatctggcaagtcccgccgagatatcttcgcccacgatcccgagctatgtatcattgcattttcagcttggctatcaacaccaactctaagaaaatctgtgccgacgtgacccgtcgctgtgtccatgacatgtttgacgaagatccacccgtacttcccactggtgatgtgcggaaggcggctttaatatgtctcagcattgccgaccatcacgctgtagaatatgcttcaactataccagcggacgccgaaggcgttttgggaaagctagccaacagagaattcaccaagtatgcacgactcatcaacgaattcgaaaagtga

SEQ ID NO: 31142 - protein, 321 aa, Muscodor strobelii
  misc_feature: SGI Peptide ID NO. 570718
  misc_feature (4)..(311): NCBI GI: 85108429 Blast Desc: NCU06309 [Neurospora crassa OR74A] gi|28924180|gb|EAA33335.1| [Neurospora crassa OR74A]
  misc_feature (162)..(294): NCBI GI: 261352764 Blast Desc: conserved [Verticillium albo-atrum VaMs.102]
  misc_feature (128)..(282): NCBI GI: 154290648 Blast Desc: BC1G_15644 [Botryotinia fuckeliana B05.10] gi|150847475|gb|EDN22668.1| BC1G_15644 [Botryotinia fuckeliana B05.10]
  misc_feature (195)..(316): NCBI GI: 256729788 Blast Desc: NECHADRAFT_101229 [Nectria haematococca mpVI 77-13-4]
  misc_feature (108)..(289): NCBI GI: 46121273 Blast Desc: FG05015.1 [Gibberella zeae PH-1]
  misc_feature (129)..(283): NCBI GI: 71002660 Blast Desc: conserved [Aspergillus fumigatus Af293] gi|66853649|gb|EAL93973.1| conserved [Aspergillus fumigatus Af293]
  misc_feature (129)..(283): NCBI GI: 159130064 Blast Desc: conserved [Aspergillus fumigatus A1163]
  misc_feature (35)..(291): NCBI GI: 121716922 Blast Desc: conserved [Aspergillus clavatus NRRL 1] gi|119404109|gb|EAW14526.1| conserved [Aspergillus clavatus NRRL 1]
  misc_feature: Useful for introducing or modulating the production of volatile compounds
MKRLLTYDAESKHRLLSLLHTQLLHMGDEAAAIALGGNDQTTESTPFLELMNLAMQTLPPSQTWKYRLALQHRGTELSIKRFTESLKDVHVLVDEMRSNHAIDPTREQYIQLLYSILASSSYTVSHLSQLALEVLNMMHQRNQAVLANDVLVAIVESISHSNKAARAQSRWTTDLLSSVEKLLFLPTQPYLEDSQLTALMGAYARRGSWAGVWNIWQVPPRYLRPRSRAMYHCIFSLAINTNSKKICADVTRRCVHDMFDEDPPVLPTGDVRKAALICLSIADHHAVEYASTIPADAEGVLGKLANREFTKYARLINEFEK

SEQ ID NO: 31143 - DNA, 1740 bp, Muscodor strobelii; identical to SEQ ID NO: 31140
  misc_feature: SGI EST ID NO. CUFF.73794.0
  misc_feature: Variant of the nucleotide sequence at SEQ ID NO 31141

SEQ ID NO: 31144 - DNA, 873 bp, Muscodor strobelii
  misc_feature: SGI cDNA ID NO. 570719
  misc_feature: Elevated expression when VOC is produced
  misc_feature: Encodes the peptide sequence at SEQ ID NO 31145
atggcacgtctagcaatctcagcacttctcgctgcttctgcggcgcccggggcgatcgcctggggagcgatgggccatgagacggtggcttatatcgcaaccaacttcgtctcggcggccaccaaaacgtacttccagggtcttttggctgatacatcaaccgattacctagctagtgtggcttcgtgggcggacagctaccggtacacgactgctggtagtttctctgcaccctttcactatatcgacgccatggacaaccctcctacgagctgcagcgtcaactatgatcgtgattgtggcgcttcgggttgtattgtcagtgctctgcagaactacaccacgatcttgcttgatgggcggtattccgcggcaaatcatcagatcgctgcgaagatgattatccacttcgttggtgacattggtcagccattgcactgcgagaatctcgaagtcggcgggaatgatattgatgttatctatgatggcgaggacaccaatctacatgcaatttgggacactcaaatccctgagtcgatatctgggggttcatcaatgacctctgctaaatcttgggcgacaacgctgacaactgctatcaagtcgggcacatacgcgtcccaagccgcagggtgggtatcagatatcagcgtagcatccacaagtgccgtcaaaacatcggtattaaactgggcaaccgaatccaatgccaatgtatgcacaacggtcctcaaaggcggcatcagcaccgttgagaacaaggaactaagcggcgcgtacactacgactgcggatcctgttgtcaagctccagattgctaagcaaggataccgtcttgctaagttcctcgatgctattgttgcagcgatgtag

SEQ ID NO: 31145 - protein, 290 aa, Muscodor strobelii
  misc_feature: SGI Peptide ID NO. 570719
  misc_feature (21)..(288): Pfam Id: PF02265 Pfam Desc: S1/P1 Nuclease
  misc_feature (7)..(286): NCBI GI: 156045187 Blast Desc: SS1G_09782 [Sclerotinia sclerotiorum 1980] gi|154694177|gb|EDN93915.1| SS1G_09782 [Sclerotinia sclerotiorum 1980]
  misc_feature (7)..(287): NCBI GI: 242782633 Blast Desc: nuclease S1 precursor, [Talaromyces stipitatus ATCC 10500] gi|218720186|gb|EED19605.1| nuclease S1 precursor, [Talaromyces stipitatus ATCC 10500]
  misc_feature (6)..(288): NCBI GI: 169768332 Blast Desc: [Aspergillus oryzae RIB40] gi|94730403|sp|P24021.2|NUS1_ASPOR RecName: Full=Nuclease S1; AltName: Full=Endonuclease S1; AltName: endonuclease; AltName: S1
  misc_feature (14)..(287): NCBI GI: 169624232 Blast Desc: SNOG_15372 [Phaeosphaeria nodorum SN15] gi|111056185|gb|EAT77305.1| SNOG_15372 [Phaeosphaeria nodorum SN15]
  misc_feature (21)..(288): NCBI GI: 238278 Blast Desc: nuclease S1 [Aspergillus oryzae, Peptide, 267 aa]
  misc_feature (7)..(289): NCBI GI: 242796267 Blast Desc: nuclease PA3, [Talaromyces stipitatus ATCC 10500] gi|218719351|gb|EED18771.1| nuclease PA3, [Talaromyces stipitatus ATCC 10500]
  misc_feature (7)..(290): NCBI GI: 29150086 Blast Desc: nuclease S1 precursor [Neurospora crassa]
  misc_feature (1)..(286): NCBI GI: 255931869 Blast Desc: Pc12g06500 [Penicillium chrysogenum Wisconsin 54-1255] gi|211582110|emb|CAP80277.1| Pc12g06500 [Penicillium chrysogenum Wisconsin 54-1255] gi|284466529|gb|ADB89936.1| S1/P1 nuclease
  misc_feature (1)..(286): NCBI GI: 284466533 Blast Desc: S1/P1 nuclease [Penicillium chrysogenum]
  misc_feature (1)..(286): NCBI GI: 284466531 Blast Desc: S1/P1 nuclease [Penicillium griseofulvum]
  misc_feature (24)..(288): SWISSPROT Homolog: EC 3.1.30.1 Aspergillus nuclease S(1)
  misc_feature: Useful for introducing or modulating the production of volatile compounds
MARLAISALLAASAAPGAIAWGAMGHETVAYIATNFVSAATKTYFQGLLADTSTDYLASVASWADSYRYTTAGSFSAPFHYIDAMDNPPTSCSVNYDRDCGASGCIVSALQNYTTILLDGRYSAANHQIAAKMIIHFVGDIGQPLHCENLEVGGNDIDVIYDGEDTNLHAIWDTQIPESISGGSSMTSAKSWATTLTTAIKSGTYASQAAGWVSDISVASTSAVKTSVLNWATESNANVCTTVLKGGISTVENKELSGAYTTTADPVVKLQIAKQGYRLAKFLDAIVAAM

SEQ ID NO: 31146 - DNA, 1223 bp, Muscodor strobelii
  misc_feature: SGI EST ID NO. CUFF.73722.0
  misc_feature: Variant of the nucleotide sequence at SEQ ID NO 31144
attgtttcccttcttcttggcatctgtctctcgtttccttgtggttgtgctgctcaaccggatttgaagtgagatcgccgccgttgttcaaatatcgagatatactcgagacaatctgccgaatcgaaaatggcacgtctagcaatctcagcacttctcgctgcttctgcggcgcccggggcgatcgcctggggagcgatgggccatgagacggtggcttatatcgcaaccaacttcgtctcggcggccaccaaaacgtacttccagggtcttttggctgatacatcaaccgattacctagctagtgtggcttcgtgggcggacagctaccggtacacgactgctggtagtttctctgcaccctttcactatatcgacgccatggacaaccctcctacgagctgcagcgtcaactatgatcgtgattgtggcgcttcgggttgtattgtcagtgctctgcagaactacaccacgatcttgcttgatgggcggtattccgcggcaaatcatcagatcgctgcgaagatgattatccacttcgttggtgacattggtcagccattgcactgcgagaatctcgaagtcggcgggaatgatattgatgttatctatgatggcgaggacaccaatctacatgcaatttgggacactcaaatccctgagtcgatatctgggggttcatcaatgacctctgctaaatcttgggcgacaacgctgacaactgctatcaagtcgggcacatacgcgtcccaagccgcagggtgggtatcagatatcagcgtagcatccacaagtgccgtcaaaacatcggtattaaactgggcaaccgaatccaatgccaatgtatgcacaacggtcctcaaaggcggcatcagcaccgttgagaacaaggaactaagcggcgcgtacactacgactgcggatcctgttgtcaagctccagattgctaagcaaggataccgtcttgctaagttcctcgatgctattgttgcagcgatgtagaggatttctttggacataaagatgcatagtttgggcttgaggtaaagagatgacttcgtgaggatcgaagcgtcctaagaacacaacatcagccagatacagagaaatttcgaaaaaggatggcaagcattttacatgcaccacatccttaccgatacgtatggtaaatattctcataaacatgatatatcaaatatgaatgatgatgtgcccagttttct

SEQ ID NO: 31147 - DNA, 972 bp, Muscodor strobelii
  misc_feature: SGI cDNA ID NO. 570720
  misc_feature: Encodes the peptide sequence at SEQ ID NO 31148
atgcctccgcgaacatcgctcaaggcattcttgacctcagcacgtgccgtgttgacggcaccgccctcgaagcgcccttcgccattgacttttgttgttggcaacgaatcggctgatctggattcgctctgctccgcacttctgctagcatatttccaaacatacacttcctcatcgaagtctggtggtgctgaaaactggaaaagtcatctgcacatccctgtttgtcacctcgagcgtgccgatctcgcgctccggccggaactcgctgccgtactgcggaatgcggatgtttctggggacgatctatttacattcgagaacatattaccagccaaagagtcggcagagcctattatcgacaccaaggacacgcagtggttactagttgaccataatgcgatgacaggtcgcctggcaaaggcttttggtgatagggttatcgggtgtgtagaccaccacgcagacgagcacgtcatcccggctgatgctgagcctcgcatcatcgacaagagcgggagctgtgcgagtctgatcgttgagagatatggggatgtctgggatacactcgccgcggagcaaacgtcagagggaaagcgtatagatgcgcagattgcgcacttggcgctaggtccgatattgattgatactagtaacctgctagacaagacgaagactacggagcatgatacaaacgccgtggaatttgcggagcagaagattgagaaagagggagggctgtacgacagggatgggtacttcaagttgttgagcgagttgaaggaggatttgagtaatatgagttttcgcgatgtgtttaggaaggattataaggagtggagtgcgaatgggctgaatcttgcgacgagttcggtgccgaagagctttgcgtatcttgttgatgagaaggctggtggagacgagaagaagttcttggaggagctggagaattgggggcagggagaaggatga

SEQ ID NO: 31148 - protein, 323 aa, Muscodor strobelii
  misc_feature: SGI Peptide ID NO. 570720
  misc_feature (23)..(214): Pfam Id: PF01368 Pfam Desc: DHH family
  misc_feature (4)..(320): NCBI GI: 85108433 Blast Desc: NCU06310 [Neurospora crassa OR74A] gi|28924181|gb|EAA33336.1| [Neurospora crassa OR74A]
  misc_feature (1)..(322): NCBI GI: 170940261 Blast Desc: protein product [Podospora anserina]
  misc_feature (1)..(318): NCBI GI: 46121271 Blast Desc: FG05014.1 [Gibberella zeae PH-1]
  misc_feature (3)..(320): NCBI GI: 156049759 Blast Desc: SS1G_08586 [Sclerotinia sclerotiorum 1980] gi|154692985|gb|EDN92723.1| SS1G_08586 [Sclerotinia sclerotiorum 1980]
  misc_feature (3)..(320): NCBI GI: 154309049 Blast Desc: BC1G_07419 [Botryotinia fuckeliana B05.10] gi|150852462|gb|EDN27654.1| BC1G_07419 [Botryotinia fuckeliana B05.10]
  misc_feature (3)..(308): NCBI GI: 189210152 Blast Desc: exopolyphosphatase [Pyrenophora tritici-repentis Pt-1C-BFP] gi|187977501|gb|EDU44127.1| exopolyphosphatase [Pyrenophora tritici-repentis Pt-1C-BFP]
  misc_feature (1)..(318): NCBI GI: 39949688 Blast Desc: MGG_08801 [Magnaporthe grisea 70-15] gi|145009357|gb|EDJ94068.1| MGG_08801 [Magnaporthe grisea 70-15]
  misc_feature (31)..(320): NCBI GI: 256729602 Blast Desc: NECHADRAFT_83593 [Nectria haematococca mpVI 77-13-4]
  misc_feature (71)..(308): NCBI GI: 169615811 Blast Desc: SNOG_11070 [Phaeosphaeria nodorum SN15] gi|160703053|gb|EAT81569.2| SNOG_11070 [Phaeosphaeria nodorum SN15]
  misc_feature (3)..(292): NCBI GI: 261352763 Blast Desc: conserved [Verticillium albo-atrum VaMs.102]
  misc_feature (4)..(317): SWISSPROT Homolog: EC 3.6.1.11 Exopolyphosphatase
MPPRTSLKAFLTSARAVLTAPPSKRPSPLTFVVGNESADLDSLCSALLLAYFQTYTSSSKSGGAENWKSHLHIPVCHLERADLALRPELAAVLRNADVSGDDLFTFENILPAKESAEPIIDTKDTQWLLVDHNAMTGRLAKAFGDRVIGCVDHHADEHVIPADAEPRIIDKSGSCASLIVERYGDVWDTLAAEQTSEGKRIDAQIAHLALGPILIDTSNLLDKTKTTEHDTNAVEFAEQKIEKEGGLYDRDGYFKLLSELKEDLSNMSFRDVFRKDYKEWSANGLNLATSSVPKSFAYLVDEKAGGDEKKFLEELENWGQGEG

SEQ ID NO: 31149 - DNA, 7067 bp, Muscodor strobelii
  misc_feature: SGI EST ID NO. CUFF.73741.0
  misc_feature: Variant of the nucleotide sequence at SEQ ID NO 31147
ccacaacggtgaagggagctatgtcatctgtcaaactcacctgatcgcatgctaccacagctgcatttaaatacatccagataccataccatctctttgttgcgcaacaccaagcattcagatacccgtttggtgtctttctacccctgcgctgactgctgcgtgctacgagcttcctgcaagcaatcatcgcttggtagtgacacatagagagctatctagctgtatcgatcctctcgtgtcctatcccatcctcgtgcttcccaaatacaacacacaaacgatcccgactacgaggcgtctataagccacctctcctccgttctcgaaaatgaccgcctggctcgaaccgtcgcccaggtagccgctctacaagctcttgcgatgggcaacacattctctctgaccaccccgtacgccggctcggcgggtatcgacgtgccggagctgtctgacctcgtccacgagaggtctataggcaatgcgcgcttcatgaaaagcatccgcgcccggcatcgggatggcgtagcgctcgccaaggtcaccgtcaagccatacagcggctgttctctagccgaatacggcaccaagatactgcaagagcgcgagaagctgcgagatgtgcccaacgcactcgggtttgagcgggctttagagacccagaccaatgcctatctgatccgccagtacatccacagctccctctacgaccgcatgtccactcgacctttcctcgaagacatcgaaaagaaatggctggccttccaactactctgcgccttgcgcgattgccacgcccgagacgtgtaccatggtgatatcaagacggagaatgtcctagtgacatcgtggaactggctctatctcacagactttaccggctccttcaaacccaccatgctccccgataacaaccccgccacgtactcatacttcttcgatctgtccggccgaagaacctgctacattgcccccgaacgctttgtcgagcagatatcagatacccgcgagctgcaaggtcatgacctcacctggtcgatggacatattcagtgctggctgtgtcattgccgaggtattcctcgagacacccatcttcagcctcagccaaatgttcaagttccgacgtggcgagtatgacccggtcatctcccatatcagcagaataccggaccagggcttgcgggagatgctgtcgagcatgatacagcgagacccccagaagcggtattctgctgagcagtacctgcaattttacaaatccaagatcttcccagaatacttctataacttccttcatcaatacatggaactcatcacggaccctacgtcggggagagcacccgtcaccagcgcgttcaaaaaccttggcgaggctgatgaccggatcgaccgggtatattacgactttgacaagattgcctactttcttgggtaccaagagcccgagacgccgtcgtatatgtcgcgtctaacaccaagatttggactcggtctctttcctgtgaggctgaacatcccgaataacgagcattgggccactgtcaggacgcagcctcccaacgatgatggcacgttgatattcttgaccctggtagccggatctttaaggaatactgcccgagcagcttcaaagatcagagcctgtgaccttttattagccttctcggagaagctgaccgacgaggccaagctggatcgcgtactgccctatctcatgacactattgaatgacgatgtcgatgttgtggctattgcagcccttaggacaatcacacaagtgctagcgttggtaactgtcgttactcctgtgaatgctcatgtgtttcccgagtatatcttgcctcgtatgcaagtctttctgtcgggcgcgtcacggcaacccatcatgggcaaagagcggaaagaacctagtccactggttcgcgcaacttacgcttcatgtcttggtagccttgctacgaccgcgtcaagattcttagaattaacagcagtattgagggcggagggttcgatcagcactgcagatccagaggtggaagccggaagcaatccagatgccgcctttgatggattatttgacaatacgcaagccgagctagtcgacttattcgagccacatgcgaaggctctggtcgaagatgccgatgcttccgttcgtcgtgcatttttgagctccgtccctgaattgtgcatgtttttcggcagcgctgagtccaatgatatccttcttacacatttaaacacttatttgaacgaccgcgattggatgttgaaatgcgccttcttcgaaacaattgtcggaattgcggcttttctgggcagcacgagcctcgaagaattcagtttaccactcatggtccaagccgtcactgatccagaggagcatgtcgttcatgcggccctccattcactagctgaattggcgaatcttggacttctatccaagggcaagacctgggagctaattgacgtagtcggccgcttcacaatgcacccgaacatctggattcgggaggctgcggccgaatatatatccagcgctgcaaaattactgtctccagcagatgtgcgatgtattgtcctccccttagtcaagccattcctgaaaccttctatgatccctgaatttaccgagttggcgcttctggatgcattgaagaagcctatgtcgagagcgatattcgatattgccttgtcatgggctcagaagacagacaaaggtctgttctggaaggctgttaggcaacaaaaacagtcaacctttactgtggcttctacagccttatcaattcggtcatcacgggaattacagcctcaatcacttaacaaagtggcacgaaatgacgaggacgaacactggctttctcgattacggcatatgggaatgaactcagaggatgaattcaagctacttgtcctcagagaattcatctggcggttaagccagatgaaaaatcgtgatctcgtcactcaagataacatctcgaaagacctaaatactattctcaaactccgcaacttgaatgtcaaaatgcaaacaatcatgttcgatgagactgttggagtcgatgataaaatgtgggagtacgaagagcaacggcaacgacaggaatccgatctggaccaaggcccgtatacgattgccgatgctcttcttgacgcttcgatgacaattgacgaaccggttggacgtcggcggcgggcggcagtgaacagtcaccgctctcgtttaagcagccagggaggcgccgtttcaccaagaacacgcgacaatcttacaaggacgccgtcaccacaagatggcggtaagggtattgacggggtacggcacgcatcgacgtcgcgagcacggcaatcgaataatgataatgcgtcggtctctaacgcaccatatgcagcaagaagatccattcgcaaccagacaagtgcacttgatctgctcaatagaaagaatagcggcagatcgattgcagaaacagggacgactgagaccaatgcattcggccaagtggaaggaccattttcacccagttcaccagctcatattgccttgcccagtaatatcccgcgcgaaagcgatcaagtcggcgccaagagtcgtgctgctcatacctatgaggggaacgatccgagtatactcaagatgctaggtaacatgtatgtcgacaactatcctcacgatattgcagagtttggccctctggtaccacctgtgattcgaaggaagatcggcaagacagccgggcaactcaatgaggaagcttggaagccgacaggtaggctcgtggctacattctcagagcaccacggagcaatcaatcgtgttgttccatcccccgaccatcagttttttatcacagctggtgacgatgcttgtgtcaaagtatgggactcatctagattggagcgaaacgtgacccatcgctcccgtcaaactcataagcacgcgccaggatcaaaagttgtcgctttgtgtttcgttgaaaatacacatactttcgtcagctgtgataatgaggggctagtcaaccttgtcaaagtcgacacagcagtctcaaatggcgcaacgaaatacattcggctacgcctgctccgtgagtatcaacttcccaaggacgaatatgctgtttggtgcgagcatttcaaacaggatcttagctctgtcctgattcttgctacgaaccgttcccgtatcctagcaatggacttgcgaactatgaccttactgtatgtgcttgagaatccggttcatcatggcacaccgacatgcttctgtgtggatcgaaagaggaactggctcttgctcggcacatctcacggcgttcttgacctttgggacctccggttcaaaatgcgcctcaagggctggggaatgcctggcaagtccgctatttatcgccttagcttacatcctatcaaaggtcgcgggaaatgggtttgtgtatcaggcggtactgggcttggagaggtcacagtatgggatctagagaagacgcagtgccgggagatttatcgctcaggggctgcgaaagacgtagctaaagagtacaaagcttgggacgttgacgaagataaacctgaaggtatgctgggccattttgcaaccaacattgaagcagctaccagtacgtccgatcgcggagtccgagctatggccgtaggggccggagctatggaagagcagcgagacgtcagatacggttacatattgacgggcggctctgataaaaaactgcgattttgggacatgatacgggtagagaactcttgtgtcttcagcgggcaacagagcgatgattatcgtcctgtgttcgctactgttccaactccaagcatacctggcttgaccctgaacgtggagcgtttgatcaaaccgagcacgggtgtagatgcgaagaatgggaagacaggcaaagctggaccgaacaaccgggagaaaccgccgcgccatactgtcatatccaccgagcaagcccagctgcttagaagccatctggactctgtactagacgtggcagtgcttgagttgccgtacacgatgacggtcagtgtcgatcgctcgggtgtcatctttgtgtttcagtagcgatgggacttgagacgaaacaccgaagctatcacgagaagctttcggcgcgtgtgaatgcatcattctatcgcaatgtgaagttcacacctgatgtaccatctctcctaacacgtcacgctgtcttattgcgaagcgatttaaatgatagaacgcaagcgtaacgaataatcgaaacatgtgaaagtttagttgatgaatataaatgactaaaagacattgagcctagaggctaaagcttcgctactagatatgtgtatagacagtgccaagacgtgtataagcggcccgtatcggcgttaaggcgagtttttgtttgttggttccagacaacccagtggggcccgatattaggagtctgacctacacatgtattacgagccctttacaaaagaacatcatttttcttgctcagtgaagaaatagaccagattcctcaagcggaaaatatactcgatcaaaatccaacattaataagcggcattgagaaaaacgacatatttaccttgcacaatgcctccgcgaacatcgctcaaggcattcttgacctcagcacgtgccgtgttgacggcaccgccctcgaagcgcccttcgccattgacttttgttgttggcaacgaatcggctgatctggattcgctctgctccgcacttctgctagcatatttccaaacatacacttcctcatcgaagtctggtggtgctgaaaactggaaaagtcatctgcacatccctgtttgtcacctcgagcgtgccgatctcgcgctccggccggaactcgctgccgtactgcggaatgcggatgtttctggggacgatctatttacattcgagaacatattaccagccaaagagtcggcagagcctattatcgacaccaaggacacgcagtggttactagttgaccataatgcgatgacaggtcgcctggcaaaggcttttggtgatagggttatcgggtgtgtagaccaccacgcagacgagcacgtcatcccggctgatgctgagcctcgcatcatcgacaagagcgggagctgtgcgagtctgatcgttgagagatatggggatgtctgggatacactcgccgcggagcaaacgtcagagggaaagcgtatagatgcgcagattgcgcacttggcgctaggtccgatattgattgatactagtaacctgctagacaagacgaagactacggagcatgatacaaacgccgtggaatttgcggagcagaagattgagaaagagggagggctgtacgacagggatgggtacttcaagttgttgagcgagttgaaggaggatttgagtaatatgagttttcgcgatgtgtttaggaaggattataaggagtggagtgcgaatgggctgaatcttgcgacgagttcggtgccgaagagctttgcgtatcttgttgatgagaaggctggtggagacgagaagaagttcttggaggagctggagaattgggggcagggagaaggatgaagagaggaagatggatcttgtggttctgtttacggcgttcaaagatgaggtggatgataggttttgtagggagttgcttgtctgggcgaggacgaaggagggtgttgaggcggcgaaggtgtttgaggatgctgatagggagacgctgcagttgagtgcttgggcggatggtaagctgcatttaagtgggaaaggagaaagtgaagagagggcttgctggacgcagacgagtgttgaacatagtcggaagcagattgctccaatgctgagggatgcgcttgcaaaagttgctgcttaggttgggatgcatatagaggctaaaatcaatgtctttagatgggaaagggtgggacgtagagatagagacacccggtctgagaatattaaggctccaacacacttccatgtaactatagtgaataagcaggcaacaccatacaacacgtagttcggtgtggtccaaacgaagaatcttagcttccattttagggcag

SEQ ID NO: 31150 - DNA, 4704 bp, Muscodor strobelii
  misc_feature: SGI cDNA ID NO. 570721
  misc_feature: Encodes the peptide sequence at SEQ ID NO 31151
atgggcaacacattctctctgaccaccccgtacgccggctcggcgggtatcgacgtgccggagctgtctgacctcgtccacgagaggtctataggcaatgcgcgcttcatgaaaagcatccgcgcccggcatcgggatggcgtagcgctcgccaaggtcaccgtcaagccatacagcggctgttctctagccgaatacggcaccaagatactgcaagagcgcgagaagctgcgagatgtgcccaacgcactcgggtttgagcgggctttagagacccagaccaatgcctatctgatccgccagtacatccacagctccctctacgaccgcatgtccactcgacctttcctcgaagacatcgaaaagaaatggctggccttccaactactctgcgccttgcgcgattgccacgcccgagacgtgtaccatggtgatatcaagacggagaatgtcctagtgacatcgtggaactggctctatctcacagactttaccggctccttcaaacccaccatgctccccgataacaaccccgccacgtactcatacttcttcgatctgtccggccgaagaacctgctacattgcccccgaacgctttgtcgagcagatatcagatacccgcgagctgcaaggtcatgacctcacctggtcgatggacatattcagtgctggctgtgtcattgccgaggtattcctcgagacacccatcttcagcctcagccaaatgttcaagttccgacgtggcgagtatgacccggtcatctcccatatcagcagaataccggaccagggcttgcgggagatgctgtcgagcatgatacagcgagacccccagaagcggtattctgctgagcagtacctgcaattttacaaatccaagatcttcccagaatacttctataacttccttcatcaatacatggaactcatcacggaccctacgtcggggagagcacccgtcaccagcgcgttcaaaaaccttggcgaggctgatgaccggatcgaccgggtatattacgactttgacaagattgcctactttcttgggtaccaagagcccgagacgccgtcgtatatgtcgcgtctaacaccaagatttggactcggtctctttcctgtgaggctgaacatcccgaataacgagcattgggccactgtcaggacgcagcctcccaacgatgatggcacgttgatattcttgaccctggtagccggatctttaaggaatactgcccgagcagcttcaaagatcagagcctgtgaccttttattagccttctcggagaagctgaccgacgaggccaagctggatcgcgtactgccctatctcatgacactattgaatgacgatgtcgatgttgtggctattgcagcccttaggacaatcacacaagtgctagcgttggtaactgtcgttactcctgtgaatgctcatgtgtttcccgagtatatcttgcctcgtatgcaagtctttctgtcgggcgcgtcacggcaacccatcatgggcaaagagcggaaagaacctagtccactggttcgcgcaacttacgcttcatgtcttggtagccttgctacgaccgcgtcaagattcttagaattaacagcagtattgagggcggagggttcgatcagcactgcagatccagaggtggaagccggaagcaatccagatgccgcctttgatggattatttgacaatacgcaagccgagctagtcgacttattcgagccacatgcgaaggctctggtcgaagatgccgatgcttccgttcgtcgtgcatttttgagctccgtccctgaattgtgcatgtttttcggcagcgctgagtccaatgatatccttcttacacatttaaacacttatttgaacgaccgcgattggatgttgaaatgcgccttcttcgaaacaattgtcggaattgcggcttttctgggcagcacgagcctcgaagaattcagtttaccactcatggtccaagccgtcactgatccagaggagcatgtcgttcatgcggccctccattcactagctgaattggcgaatcttggacttctatccaagggcaagacctgggagctaattgacgtagtcggccgcttcacaatgcacccgaacatctggattcgggaggctgcggccgaatatatatccagcgctgcaaaattactgtctccagcagatgtgcgatgtattgtcctccccttagtcaagccattcctgaaaccttctatgatccctgaatttaccgagttggcgcttctggatgcattgaagaagcctatgtcgagagcgatattcgatattgccttgtcatgggctcagaagacagacaaaggtctgttctggaaggctgttaggcaacaaaaacagtcaacctttactgtggcttctacagccttatcaattcggtcatcacgggaattacagcctcaatcacttaacaaagtggcacgaaatgacgaggacgaacactggctttctcgattacggcatatgggaatgaactcagaggatgaattcaagctacttgtcctcagagaattcatctggcggttaagccagatgaaaaatcgtgatctcgtcactcaagataacatctcgaaagacctaaatactattctcaaactccgcaacttgaatgtcaaaatgcaaacaatcatgttcgatgagactgttggagtcgatgataaaatgtgggagtacgaagagcaacggcaacgacaggaatccgatctggaccaaggcccgtatacgattgccgatgctcttcttgacgcttcgatgacaattgacgaaccggttggacgtcggcggcgggcggcagtgaacagtcaccgctctcgtttaagcagccagggaggcgccgtttcaccaagaacacgcgacaatcttacaaggacgccgtcaccacaagatggcggtaagggtattgacggggtacggcacgcatcgacgtcgcgagcacggcaatcgaataatgataatgcgtcggtctctaacgcaccatatgcagcaagaagatccattcgcaaccagacaagtgcacttgatctgctcaatagaaagaatagcggcagatcgattgcagaaacagggacgactgagaccaatgcattcggccaagtggaaggaccattttcacccagttcaccagctcatattgccttgcccagtaatatcccgcgcgaaagcgatcaagtcggcgccaagagtcgtgctgctcatacctatgaggggaacgatccgagtatactcaagatgctaggtaacatgtatgtcgacaactatcctcacgatattgcagagtttggccctctggtaccacctgtgattcgaaggaagatcggcaagacagccgggcaactcaatgaggaagcttggaagccgacaggtaggctcgtggctacattctcagagcaccacggagcaatcaatcgtgttgttccatcccccgaccatcagttttttatcacagctggtgacgatgcttgtgtcaaagtatgggactcatctagattggagcgaaacgtgacccatcgctcccgtcaaactcataagcacgcgccaggatcaaaagttgtcgctttgtgtttcgttgaaaatacacatactttcgtcagctgtgataatgaggggctagtcaaccttgtcaaagtcgacacagcagtctcaaatggcgcaacgaaatacattcggctacgcctgctccgtgagtatcaacttcccaaggacgaatatgctgtttggtgcgagcatttcaaacaggatcttagctctgtcctgattcttgctacgaaccgttcccgtatcctagcaatggacttgcgaactatgaccttactgtatgtgcttgagaatccggttcatcatggcacaccgacatgcttctgtgtggatcgaaagaggaactggctcttgctcggcacatctcacggcgttcttgacctttgggacctccggttcaaaatgcgcctcaagggctggggaatgcctggcaagtccgctatttatcgccttagcttacatcctatcaaaggtcgcgggaaatgggtttgtgtatcaggcggtactgggcttggagaggtcacagtatgggatctagagaagacgcagtgccgggagatttatcgctcaggggctgcgaaagacgtagctaaagagtacaaagcttgggacgttgacgaagataaacctgaaggtatgctgggccattttgcaaccaacattgaagcagctaccagtacgtccgatcgcggagtccgagctatggccgtaggggccggagctatggaagagcagcgagacgtcagatacggttacatattgacgggcggctctgataaaaaactgcgattttgggacatgatacgggtagagaactcttgtgtcttcagcgggcaacagagcgatgattatcgtcctgtgttcgctactgttccaactccaagcatacctggcttgaccctgaacgtggagcgtttgatcaaaccgagcacgggtgtagatgcgaagaatgggaagacaggcaaagctggaccgaacaaccgggagaaaccgccgcgccatactgtcatatccaccgagcaagcccagctgcttagaagccatctggactctgtactagacgtggcagtgcttgagttgccgtacacgatgacggtcagtgtcgatcgctcgggtgtcatctttgtgtttcagtag

SEQ ID NO: 31151 - protein, 1567 aa, Muscodor strobelii
  misc_feature: SGI Peptide ID NO. 570721
  misc_feature (434)..(470): Pfam Id: PF02985 Pfam Desc: HEAT repeat
  misc_feature (1132)..(1170): Pfam Id: PF00400 Pfam Desc: WD domain, G-beta repeat
  misc_feature (220)..(290): Pfam Id: PF00069 Pfam Desc: Protein kinase domain
  misc_feature (1)..(1567): NCBI GI: 46121857 Blast Desc: FG05306.1 [Gibberella zeae PH-1]
  misc_feature (1)..(1567): NCBI GI: 145603362 Blast Desc: MGG_06100 [Magnaporthe grisea 70-15] gi|145011608|gb|EDJ96264.1| MGG_06100 [Magnaporthe grisea 70-15]
  misc_feature (1)..(1567): NCBI GI: 156049735 Blast Desc: SS1G_08574 [Sclerotinia sclerotiorum 1980] gi|154692973|gb|EDN92711.1| SS1G_08574 [Sclerotinia sclerotiorum 1980]
  misc_feature (1)..(1566): NCBI GI: 261352392 Blast Desc: phosphoinositide 3-kinase regulatory subunit 4 [Verticillium albo-atrum VaMs.102]
  misc_feature (1)..(1567): NCBI GI: 256720924 Blast Desc: [Nectria haematococca mpVI 77-13-4]
  misc_feature (1)..(1467): NCBI GI: 164425030 Blast Desc: NCU06626 [Neurospora crassa OR74A] gi|157070761|gb|EAA33132.2| conserved [Neurospora crassa OR74A]
  misc_feature (1)..(1567): NCBI GI: 225558589 Blast Desc: conserved [Ajellomyces capsulatus G186AR]
  misc_feature (1)..(1563): NCBI GI: 226291920 Blast Desc: phosphoinositide 3-kinase regulatory subunit 4 [Paracoccidioides brasiliensis Pb18]
  misc_feature (1)..(1562): NCBI GI: 226286469 Blast Desc: phosphoinositide 3-kinase regulatory subunit 4 [Paracoccidioides brasiliensis Pb01]
  misc_feature (1)..(1567): NCBI GI: 261193355 Blast Desc: protein kinase [Ajellomyces dermatitidis SLH14081] gi|239588688|gb|EEQ71331.1| protein kinase [Ajellomyces dermatitidis SLH14081]
  misc_feature (1)..(866): SWISSPROT Homolog: EC 2.7.11.1 Non-specific serine/threonine protein kinase
MGNTFSLTTPYAGSAGIDVPELSDLVHERSIGNARFMKSIRARHRDGVALAKVTVKPYSGCSLAEYGTKILQEREKLRDVPNALGFERALETQTNAYLIRQYIHSSLYDRMSTRPFLEDIEKKWLAFQLLCALRDCHARDVYHGDIKTENVLVTSWNWLYLTDFTGSFKPTMLPDNNPATYSYFFDLSGRRTCYIAPERFVEQISDTRELQGHDLTWSMDIFSAGCVIAEVFLETPIFSLSQMFKFRRGEYDPVISHISRIPDQGLREMLSSMIQRDPQKRYSAEQYLQFYKSKIFPEYFYNFLHQYMELITDPTSGRAPVTSAFKNLGEADDRIDRVYYDFDKIAYFLGYQEPETPSYMSRLTPRFGLGLFPVRLNIPNNEHWATVRTQPPNDDGTLIFLTLVAGSLRNTARAASKIRACDLLLAFSEKLTDEAKLDRVLPYLMTLLNDDVDVVAIAALRTITQVLALVTVVTPVNAHVFPEYILPRMQVFLSGASRQPIMGKERKEPSPLVRATYASCLGSLATTASRFLELTAVLRAEGSISTADPEVEAGSNPDAAFDGLFDNTQAELVDLFEPHAKALVEDADASVRRAFLSSVPELCMFFGSAESNDILLTHLNTYLNDRDWMLKCAFFETIVGIAAFLGSTSLEEFSLPLMVQAVTDPEEHVVHAALHSLAELANLGLLSKGKTWELIDVVGRFTMHPNIWIREAAAEYISSAAKLLSPADVRCIVLPLVKPFLKPSMIPEFTELALLDALKKPMSRAIFDIALSWAQKTDKGLFWKAVRQQKQSTFTVASTALSIRSSRELQPQSLNKVARNDEDEHWLSRLRHMGMNSEDEFKLLVLREFIWRLSQMKNRDLVTQDNISKDLNTILKLRNLNVKMQTIMFDETVGVDDKMWEYEEQRQRQESDLDQGPYTIADALLDASMTIDEPVGRRRRAAVNSHRSRLSSQGGAVSPRTRDNLTRTPSPQDGGKGIDGVRHASTSRARQSNNDNASVSNAPYAARRSIRNQTSALDLLNRKNSGRSIAETGTTETNAFGQVEGPFSPSSPAHIALPSNIPRESDQVGAKSRAAHTYEGNDPSILKMLGNMYVDNYPHDIAEFGPLVPPVIRRKIGKTAGQLNEEAWKPTGRLVATFSEHHGAINRVVPSPDHQFFITAGDDACVKVWDSSRLERNVTHRSRQTHKHAPGSKVVALCFVENTHTFVSCDNEGLVNLVKVDTAVSNGATKYIRLRLLREYQLPKDEYAVWCEHFKQDLSSVLILATNRSRILAMDLRTMTLLYVLENPVHHGTPTCFCVDRKRNWLLLGTSHGVLDLWDLRFKMRLKGWGMPGKSAIYRLSLHPIKGRGKWVCVSGGTGLGEVTVWDLEKTQCREIYRSGAAKDVAKEYKAWDVDEDKPEGMLGHFATNIEAATSTSDRGVRAMAVGAGAMEEQRDVRYGYILTGGSDKKLRFWDMIRVENSCVFSGQQSDDYRPVFATVPTPSIPGLTLNVERLIKPSTGVDAKNGKTGKAGPNNREKPPRHTVISTEQAQLLRSHLDSVLDVAVLELPYTMTVSVDRSGVIFVFQ

SEQ ID NO: 31152 - DNA, 7067 bp, Muscodor strobelii; identical to SEQ ID NO: 31149
  misc_feature: SGI EST ID NO. CUFF.73741.0
  misc_feature: Variant of the nucleotide sequence at SEQ ID NO 31150

SEQ ID NO: 31153 - DNA, 1740 bp, Muscodor strobelii
  misc_feature: SGI cDNA ID NO. 570722
  misc_feature: Reduced expression when VOC is produced
  misc_feature: Encodes the peptide sequence at SEQ ID NO 31154
atggagttgggagtcaaacgggcggtgctgggcatactcttatcaacccagcttgctatggcccagcaacccacttgcatttcgctggctggatcgagcgcttgtcgagcatttcaggacgcatctgtctcaacagtgaagaatgtcaccgacttatatccatttctgaaggttgtgaacaacgttgaacagttcgacacacagctcgctcagtacatcgctggcacatggcggcaagagaaatatggggatgcaaatcaatttggttgcggagccgtcaatgtatccaacgatgatctctatgcccgcttcactacctccgtcttctgcaacggcatcatacaaaactcgttgtctttctgcgatgaatcggcaaacgcgtcgaggcctctgtgcgtcgagtcctgcgctcagtatgctcagagcgaggagtacattgtagccgacaaagacttgtgtccatcccccggaagcaatgctcagtcacaaattcgtgccgacttatccaattgccagttacccgcgcaagccctgtcgcccaataactgtgtgcgaggcgttgacaacgagcccaacaactgtggctacggcgacagcaccctcggcctgtgttcatactgtggttccggtggtatcaattccacagatacatgttgttacagctcgaacgcacagcagctatgctctaatgtggtgttacccacccttacaacgactgatgttaccgcatcgccaactgccagtgccacttccaaccctaccacaggcgcgggagtgacaacaggaaaggacaaactatctggtggcgcaattgcgggaatcgttataggatcaattgtgggagcaatcctccttgctgcgctcttagctttttgcattattgcactccgaaaacgaaggaaagagaaagatgaaaagaacatcttcaatcaaccatcccctactcggaaagctccccagacaagccaggtcgcagcagctacgccgcctcaaggctatgaggttcttcctggcggtagaattgcacgtatgtcagcactcgaaggacactctggagactcgccctcacgaccaggcggctcgagacaaggtgccagctctgcagccggcaccgctgcagcccttgctggaagcaaaaggaggttagacaaccagtcatcttctgattcgttccagaatagtcctgggtcggaagtccgcggtggcgtactgcgacccccgcccacaaacatccgtaggaacggatcattatctagcaattccatgctgatgggcgaggacccgcagtctccgacgagcgcaggaggaatgtcgtcaccgccaggggttaacagccaacagtcggaacagcttccgttcttcaaagattactactcacaagatgatattcatcctggaggcagggtcgccgtactctgggcatatcaaccacgggccaccgatgaattcgcgctggaacgaggtgacatgctgaaagtcgttggtatctgggatgatggctgggccactggtatcatggtggacgagagagcagatgaatgggaggcgcgaagacaagcccagagagatagtggtgtttcccacgcttccggtcgcgcacgagacgcgtcgccacctgtcagcggcgagatcaaagcatttcccctcgtctgtgtgtgcctgccggagcactggcgcaagacaatcgagggcgatggatcaacagagactggatctagtggcatcccaccccaaccttga

SEQ ID NO: 31154 - protein, 579 aa, Muscodor strobelii
  misc_feature: SGI Peptide ID NO. 570722
  misc_feature (9)..(576): NCBI GI: 261352393 Blast Desc: SH3 domain-containing protein [Verticillium albo-atrum VaMs.102]
  misc_feature (13)..(575): NCBI GI: 256727555 Blast Desc: NECHADRAFT_76505 [Nectria haematococca mpVI 77-13-4]
  misc_feature (20)..(573): NCBI GI: 85104834 Blast Desc: NCU06628 [Neurospora crassa OR74A] gi|28923393|gb|EAA32580.1| conserved [Neurospora crassa OR74A]
  misc_feature (5)..(576): NCBI GI: 171690790 Blast Desc: protein product [Podospora anserina] gi|170945343|emb|CAP71455.1| protein product [Podospora anserina]
  misc_feature (5)..(571): NCBI GI: 156049729 Blast Desc: SS1G_08571 [Sclerotinia sclerotiorum 1980] gi|154692970|gb|EDN92708.1| SS1G_08571 [Sclerotinia sclerotiorum 1980]
  misc_feature (2)..(575): NCBI GI: 46136591 Blast Desc: FG09811.1 [Gibberella zeae PH-1]
  misc_feature (177)..(573): NCBI GI: 116195788 Blast Desc: CHGG_04492 [Chaetomium globosum CBS 148.51] gi|88180405|gb|EAQ87873.1| CHGG_04492 [Chaetomium globosum CBS 148.51]
  misc_feature (26)..(570): NCBI GI: 119192636 Blast Desc: CIMG_00695 [Coccidioides immitis RS]
  misc_feature (26)..(570): NCBI GI: 240106019 Blast Desc: SH3 domain containing protein [Coccidioides posadasii C735 delta SOWgp]
  misc_feature (25)..(565): NCBI GI: 258573983 Blast Desc: [Uncinocarpus reesii 1704] gi|237901439|gb|EEP75840.1| [Uncinocarpus reesii 1704]
  misc_feature: Useful for introducing or modulating the production of volatile compounds
MELGVKRAVLGILLSTQLAMAQQPTCISLAGSSACRAFQDASVSTVKNVTDLYPFLKVVNNVEQFDTQLAQYIAGTWRQEKYGDANQFGCGAVNVSNDDLYARFTTSVFCNGIIQNSLSFCDESANASRPLCVESCAQYAQSEEYIVADKDLCPSPGSNAQSQIRADLSNCQLPAQALSPNNCVRGVDNEPNNCGYGDSTLGLCSYCGSGGINSTDTCCYSSNAQQLCSNVVLPTLTTTDVTASPTASATSNPTTGAGVTTGKDKLSGGAIAGIVIGSIVGAILLAALLAFCIIALRKRRKEKDEKNIFNQPSPTRKAPQTSQVAAATPPQGYEVLPGGRIARMSALEGHSGDSPSRPGGSRQGASSAAGTAAALAGSKRRLDNQSSSDSFQNSPGSEVRGGVLRPPPTNIRRNGSLSSNSMLMGEDPQSPTSAGGMSSPPGVNSQQSEQLPFFKDYYSQDDIHPGGRVAVLWAYQPRATDEFALERGDMLKVVGIWDDGWATGIMVDERADEWEARRQAQRDSGVSHASGRARDASPPVSGEIKAFPLVCVCLPEHWRKTIEGDGSTETGSSGIPPQP

SEQ ID NO: 31155 - DNA, 3514 bp, Muscodor strobelii
  misc_feature: SGI EST ID NO. CUFF.73732.0
  misc_feature: Variant of the nucleotide sequence at SEQ ID NO 31153
agatagtagccgcaccacctgccagcagattgtcgccgttgttgtgtgtacaacagcagcagagcatcgtagcccaggcccaaccccccaagacactcaacacagcccagtcctgccggtctgccaaggtgcaggtctctcgtcctcacctttgggatctccaacttcacctcctcgtcccttcaccggcacgtacacccaaacctgtacgccaggcgccgttgcggtgctacgatccgccgccgtgctgcgtccacctaattgtctccttcacttctcgcgtcctcttggttcccgtagtaatccttccaaacatcgcatatccccttggttcctacacagtcttcgaccgcgatttccattaccacgatctgccgacgaaacgccacctgattacgacgttggagtgcgaagccgagttgtaattgacgtgatttcccgatatcgaatctactggaacgcgccatcgcatcgtgaacgaagtcgccagctcgcaactgcctccgcgcctacttcttgatgagggatcgatgagcagtatccctaaccgcggcaagcttctttcctcgaccagcctctttttcggtccggccgcactttctctgacctaataccctcgtttccatctggagttcctccgcgatacctaataaccagttctcggtcctcgacaacaaacaatcactttcatcacattcactttttgaaattattcagaaaaactttgtctctcataatcacccaacttcgtttaattcgactacttcgcacgattattagcagctcaaagaaacgcctgcattctcgttcttgaacagatagcacttttctcaacacttcgacctggagtatgcagattggggaatggcgagagaacaacatcatgcaaatatggcacgcattattgattttgacacttcgaatcacgccataaacaatcagtccactacattcagtgaattctttccttcacatatcagcaggtcgataagtaggcttggacagtctcgtgcccgttccacgacaagcaagatggagttgggagtcaaacgggcggtgctgggcatactcttatcaacccagcttgctatggcccagcaacccacttgcatttcgctggctggatcgagcgcttgtcgagcatttcaggacgcatctgtctcaacagtgaagaatgtcaccgacttatatccatttctgaaggttgtgaacaacgttgaacagttcgacacacagctcgctcagtacatcgctggcacatggcggcaagagaaatatggggatgcaaatcaatttggttgcggagccgtcaatgtatccaacgatgatctctatgcccgcttcactacctccgtcttctgcaacggcatcatacaaaactcgttgtctttctgcgatgaatcggcaaacgcgtcgaggcctctgtgcgtcgagtcctgcgctcagtatgctcagagcgaggagtacattgtagccgacaaagacttgtgtccatcccccggaagcaatgctcagtcacaaattcgtgccgacttatccaattgccagttacccgcgcaagccctgtcgcccaataactgtgtgcgaggcgttgacaacgagcccaacaactgtggctacggcgacagcaccctcggcctgtgttcatactgtggttccggtggtatcaattccacagatacatgttgttacagctcgaacgcacagcagctatgctctaatgtggtgttacccacccttacaacgactgatgttaccgcatcgccaactgccagtgccacttccaaccctaccacaggcgcgggagtgacaacaggaaaggacaaactatctggtggcgcaattgcgggaatcgttataggatcaattgtgggagcaatcctccttgctgcgctcttagctttttgcattattgcactccgaaaacgaaggaaagagaaagatgaaaagaacatcttcaatcaaccatcccctactcggaaagctccccagacaagccaggtcgcagcagctacgccgcctcaaggctatgaggttcttcctggcggtagaattgcacgtatgtcagcactcgaaggacactctggagactcgccctcacgaccaggcggctcgagacaaggtgccagctctgcagccggcaccgctgcagcccttgctggaagcaaaaggaggttagacaaccagtcatcttctgattcgttccagaatagtcctgggtcggaagtccgcggtggcgtactgcgacccccgcccacaaacatccgtaggaacggatcattatctagcaattccatgctgatgggcgaggacccgcagtctccgacgagcgcaggaggaatgtcgtcaccgccaggggttaacagccaacagtcggaacagcttccgttcttcaaagattactactcacaagatgatattcatcctggaggcagggtcgccgtactctgggcatatcaaccacgggccaccgatgaattcgcgctggaacgaggtgacatgctgaaagtcgttggtatctgggatgatggctgggccactggtatcatggtggacgagagagcagatgaatgggaggcgcgaagacaagcccagagagatagtggtgtttcccacgcttccggtcgcgcacgagacgcgtcgccacctgtcagcggcgagatcaaagcatttcccctcgtctgtgtgtgcctgccggagcactggcgcaagacaatcgagggcgatggatcaacagagactggatctagtggcatcccaccccaaccttgaagctagccagcctatcaacatatcatgcgattatttgtttggataatggtccggggatcctgggcaatttgtcccgacgcaatttcaacactgccgttacgtctcggtatcatcaggatattcatcactagactcatcagcatcgcgacagaccttaatgctcttacgcttgctagccgaagtctctccgtttgcgagccgactacatcgtacgacttgactgcaaccatcttgcatgcacagtctacatcagagcacgccgcaaatgacagggcttcagccgttatgaccagaacacagggcacagtgttttgacgattctcttcttcggtaaatccatatacccagtttcttttagacaaggtgttccagggtacataatgcttggtcaaagctatgaatgtataatttgcaattcgcttggaaggggtggtagaagacggagcagggggcgagctgtcatatcgttgctacctacatacctactacatcaccaaaaggctccgaggaagaggcacgagagggagttcgattctggctgtacatatttgatgaaaaagtcgctcggtagtgcctgttggtggcgtagatggtcattaatgaacaacaccgaagaacagtgccttgtcacaccctaccttttctctctagtgaatgattttgagaaacgtagccttcttacttgcattgcatctccaagtaacatatatactaacgcgaatttcgctggcttctgacggtg

SEQ ID NO: 31156 - DNA, 276 bp, Muscodor strobelii
  misc_feature: SGI cDNA ID NO. 570723
  misc_feature: Encodes the peptide sequence at SEQ ID NO 31157
atgggtggcggtccaaaagtcccgtatcctaaacatgtctggtcgcccgccggtggctggtatacccagcctgccaactggaaggccaacacggctatcttcggcctcatgatcattggcgtcaccggggtcttctggaagttgagcgcgaaccgagaatacagacaccagatgcccgaggagggtcggttcttccccagcagatactggagcaagcagattatagagtacgaggctgcgaaaaaggctgctaaagagggcaagagcgacgcttag

SEQ ID NO: 31157 - protein, 91 aa, Muscodor strobelii
  misc_feature: SGI Peptide ID NO. 570723
  misc_feature (1)..(82): NCBI GI: 85108140 Blast Desc: NCU08300 [Neurospora crassa OR74A] gi|28924121|gb|EAA33277.1| conserved [Neurospora crassa OR74A]
  misc_feature (1)..(84): NCBI GI: 154293116 Blast Desc: BC1G_14511 [Botryotinia fuckeliana B05.10] gi|150845656|gb|EDN20849.1| BC1G_14511 [Botryotinia fuckeliana B05.10]
  misc_feature (1)..(84): NCBI GI: 169605925 Blast Desc: SNOG_05995 [Phaeosphaeria nodorum SN15] gi|111065939|gb|EAT87059.1| SNOG_05995 [Phaeosphaeria nodorum SN15]
  misc_feature (1)..(86): NCBI GI: 238489355 Blast Desc: conserved [Aspergillus flavus NRRL3357] gi|220698303|gb|EED54643.1| conserved [Aspergillus flavus NRRL3357]
  misc_feature (1)..(78): NCBI GI: 261352583 Blast Desc: conserved [Verticillium albo-atrum VaMs.102]
  misc_feature (1)..(89): NCBI GI: 225679541 Blast Desc: conserved [Paracoccidioides brasiliensis Pb03]
  misc_feature (1)..(89): NCBI GI: 226281614 Blast Desc: conserved [Paracoccidioides brasiliensis Pb01]
  misc_feature (1)..(89): NCBI GI: 226291272 Blast Desc: conserved [Paracoccidioides brasiliensis Pb18]
  misc_feature (1)..(86): NCBI GI: 212532229 Blast Desc: conserved [Penicillium marneffei ATCC 18224] gi|210071635|gb|EEA25724.1| conserved [Penicillium marneffei ATCC 18224]
  misc_feature (1)..(78): NCBI GI: 189198171 Blast Desc: conserved [Pyrenophora tritici-repentis Pt-1C-BFP] gi|187981371|gb|EDU47997.1| conserved [Pyrenophora tritici-repentis Pt-1C-BFP]
MGGGPKVPYPKHVWSPAGGWYTQPANWKANTAIFGLMIIGVTGVFWKLSANREYRHQMPEEGRFFPSRYWSKQIIEYEAAKKAAKEGKSDA

SEQ ID NO: 31158 - DNA, 2136 bp, Muscodor strobelii
  misc_feature: SGI EST ID NO. CUFF.73738.0
  misc_feature: Variant of the nucleotide sequence at SEQ ID NO 31156
atcgcatctgcaggtgccaatttccacgttgacgtgaagtcatctgcgtaaagtgggctgtttggcagccgacagccagctctctagctctccccaaacaaaccaatacggcgcaagctattgctactcgcctccaagttgcatggccataccagcagagcgaccgcatcattctgtccatattctctcaattggcacagcaccgcaacgacccgtcattacacatagacatcatgggtggcggtccaaaagtcccgtatcctaaacatgtctggtcgcccgccggtggctggtatacccagcctgccaactggaaggccaacacggctatcttcggcctcatgatcattggcgtcaccggggtcttctggaagttgagcgcgaaccgagaatacagacaccagatgcccgaggagggtcggttcttccccagcagatactggagcaagcagattatagagtacgaggctgcgaaaaaggctgctaaagagggcaagagcgacgcttaggctatgcaatcatcgttatagacctgtatttatagtgcttcggaaaaggcaatacaacggggtttcaacatcaaatgctctcacaagtctttccctctgccggcaagtacgattggatgtgacagcacaaaggagcaaaaaacaacccggaatccgccagcagcgatactcgctatgtaccccttttcctatattgtaggaacgagaggattacccagatctcctgctctactagatgttatacaaggatacggcttcccctgcgcctggttttatgtctcgatatctgaggaccaaacagatggccagacctgagcacgatttctagagcatatcgaaacggtcatctgtctctgacttaattcaatggacctaccttgtttcgaacggactaacttgggctggtattaagggatagggagtactgaagagaacgtgcatcaattcttgacctctaaccgatgtttctttaggttatatcgaatatactgcgattgtttagcattgtttttgaggacatgactctgtcctgttttgacgttcattctgtcttcatcagccctgcattcagggaacatgcggggtgcatgctctcggaacctttggtgtactgatcatggatgaacggaacggcgctgcagcattctgtccaggtgttacgagccgttggttgactcggaagaatatgctgaaatatgactccgaatgggcgaaatgcgaattggaaccagtgagaaatgaactgcaaagcaattgcatgaatgttaagacatatctactacatggatattgactagcggcggattattcatttattacccgatcattcaccattcgtcaactatagcaccttgacttgttcgatcatggcgatgaaacatcatgcgcgctatcgacaagcctcaagatcgatacgacccttacccaaccgtttggccgttgaagcacgtttgatctgcgaactctatattctgcctactatcctattagaccgcgggccttcacccaatgctggccttgtatagtttggaataatgtcaagtgtcatgacaaaacacttgttctcacgatattgctgagatctgtgtgaatcagaaggcgcttgtgggctggcatctagtgttgactgactctcatatcctcaaggagcagacagatgagcagctatttccacgagtcttgtgtgagatgtaagacgccacagcacacatcgtccacgagtcagttataagctttgagccgaaagtctacggtcgtcatctctcggtaaatcggtcgccgaaaacaggggaaacacttgggacaagacatacaggtggtgaacgtaactatatagtggcttgcttgatgatgtctgatgtgagaaaagcggaatctgtattctagatatacctgtacttggccatcgcaagtataagtcctgagtcgtggaagtcaatgtctcgcccgtggccaatgatgagcgagctctgaaggtgagacaaaggcaatctcccgaatgagacggggtgatctgtgtttcatttgatgaacatgggtgagatacatgtacctagggtctgcggcaatgaccttcggtagtatttcaagtagttgcgcgtttcataaagcatgattacaatatctc

SEQ ID NO: 31159 - DNA, 2487 bp, Muscodor strobelii
  misc_feature: SGI cDNA ID NO. 570724
  misc_feature: Reduced expression when VOC is produced
  misc_feature: Encodes the peptide sequence at SEQ ID NO 31160
atgaggtcttccaaggtgtgccaactgggcccaatccagcgcgcgagaagcgctcaacaacagctgataagatctagtcgaagatcgtcagagctggcttcctttcgattggccaaaaagccgttttcaccacgcgctcattattcccgagggttcttcagctccagcaggaaacagcagcaacagaaggctggtatacttcgctcccttgcaacgcctgcattcattaccattggcggtttgctcatatactcgctctatccaggcgaacttccacatgcccagcttccagaatttctagaagtcgcggatcaccaattgtcggactccacagaaccaggaaacaaccaaggcgatgctgaaacggaagagacagcatggacttccttcactaagcgattcgaggatatttctaacgtcactgagtttgagtggtcgtcgttctctgaacgccttgttgatatgatcttgcctgagtggtccaaaggcattccgcgacagatcagaaagcttcagcatgaactctcaccatcaaatgactcactagctcacgagatttgggaagatgctcatgatccactcataaaccccgaaatcgagtactccgctatcgtcagagtgtccgaggacctctgtagcgaggagaaagaatttcttgcacgtcgaaagaggatcttgacagcagctttggctcactaccttcagttgcccgaaagcgaaatacatcctgacgatgtcccaacgattgctatgtgcggctctggcggtggattacgtgcccttgttgctggcaccggctctatgctcgcggctcaagaggacgggctctttgattgcatcacttacacgtctggtgtcagcggatcttgttggctacaatctctttaccactcttctattaccgaacgtcggttagatcgactcgtagaccacttgaaagctagactgggcgttcacattgcctttcctcccgctgcattgtcttcagtcacctcatctcccaccaacaagctacttctcagcagtatcgtcgaaaagctacgaggcgaccccaacgccgactttggcctagttgacgtctacggcatattattggctgcaagattgctggtgccaaagggcgaacttggcatcaatgacaaagattttaagatttccaatcaacgagattatatcaagtatgggcagaacccgatgcctatttacaccgcagtcaggcatgagataccagatcttctcgctggctcgacggatccagatcgctcaccatcagaagccgagaaagaaattgccaagcaagaggcatggtttcagtggttcgaaattacaccctatgaatttttctgcgaagagttcagcgcaggcatcccaacatgggcagtcggaaggaggtttaacgctggaaaggatgtcatgccagaatccgggtttcacctcccagagatgcggatgccaattctcatgggcatatttggatcagccttctgcgcaacgcttagccactattatcaagaagttcggcctctggtcagaagccttaccggctttggagcgcttgacgagatgatttacgggcacaacgaggatctcgtgaaagttcaccccatcgatccggcactcatacccaatttcgcctacggcatggatggaaagctgcgttacacaacacctacaacgattcaaaagaatgaatacatacaactaatggacgccgggatgtccaataaccttccaatctatcctctacttcgacccggccgagatgtggatattgttgtcgcgttcgacgcatctgcagatgtcaagacggacaattggctttctgtagcagatggctacgctcgtcaacgtggaattaagggctggcctgttggcatcggctggccgaaagctacggacacagccgagaaaattgaacgccagcttgacacggcacaagccagcacagctgacgaagcggaggcaaagctgaaacaggcacgtgaagaccaagaagccaagcgcacaggcgacgaacaggtcaaacccgaccagtcgcatgaacatgcatctgcgagcgacctgggctactgtacggtttgggtgggcacgaaagaagaacgatcatctgaaccgccaccgccatccaaagccgtgacggaagacacggcgtggcagctaacggagtccaaggcagggctcgctgtcgtctatctaccatttttggccaacccagataaagttcctgacgttgatcccgcaacttccgactatatgtctacgtggaactttgtttatacccctgagcagattgagggggcggttgcgctggcgcgagcgaattacagcgaaggcaaagatcagatcaaacgatgcgttcgtgctgtctatgagcgcaagaagagacttcgcgaggaggccgaggcagcggcccgatccgagcggaaaagacgctcgatgagacggggtaataccggtaaattgggcgaaggagatcacttcagctga

SEQ ID NO: 31160 - protein, 828 aa, Muscodor strobelii
  misc_feature: SGI Peptide ID NO. 570724
  misc_feature (249)..(715): Pfam Id: PF01735 Pfam Desc: Lysophospholipase catalytic domain
  misc_feature (249)..(292): Pfam Id: PF01735 Pfam Desc: Lysophospholipase catalytic domain
  misc_feature (50)..(828): NCBI GI: 46110174 Blast Desc: FG01969.1 [Gibberella zeae PH-1]
  misc_feature (12)..(828): NCBI GI: 256720947 Blast Desc: [Nectria haematococca mpVI 77-13-4]
  misc_feature (11)..(828): NCBI GI: 164423540 Blast Desc: NCU08298 [Neurospora crassa OR74A] gi|157070138|gb|EAA33275.2| conserved [Neurospora crassa OR74A]
  misc_feature (113)..(828): NCBI GI: 116196240 Blast Desc: CHGG_04718 [Chaetomium globosum CBS 148.51] gi|88180631|gb|EAQ88099.1| CHGG_04718 [Chaetomium globosum CBS 148.51]
  misc_feature (39)..(828): NCBI GI: 171688650 Blast Desc: protein product [Podospora anserina] gi|170944287|emb|CAP70397.1| protein product [Podospora anserina]
  misc_feature (36)..(828): NCBI GI: 39951761 Blast Desc: MGG_01523 [Magnaporthe grisea 70-15] gi|145020633|gb|EDK04762.1| MGG_01523 [Magnaporthe grisea 70-15]
  misc_feature (78)..(828): NCBI GI: 209978146 Blast Desc: cytosolic phospholipase A2 [Sporothrix schenckii]
  misc_feature (119)..(816): NCBI GI: 189198385 Blast Desc: cytosolic phospholipase A2 zeta [Pyrenophora tritici-repentis Pt-1C-BFP] gi|187981478|gb|EDU48104.1| cytosolic phospholipase A2 zeta [Pyrenophora tritici-repentis Pt-1C-BFP]
  misc_feature (106)..(790): NCBI GI: 169620535 Blast Desc: SNOG_13467 [Phaeosphaeria nodorum SN15] gi|160704052|gb|EAT79351.2| SNOG_13467 [Phaeosphaeria nodorum SN15]
  misc_feature (110)..(802): NCBI GI: 71001696 Blast Desc: phospholipase A2 (PlaA) [Aspergillus fumigatus Af293] gi|66853167|gb|EAL93491.1| phospholipase A2 (PlaA), [Aspergillus fumigatus Af293]
  misc_feature (205)..(619): SWISSPROT Homolog: EC 3.1.1.4 Phospholipase A(2)
  misc_feature: Useful for introducing or modulating the production of volatile compounds
MRSSKVCQLGPIQRARSAQQQLIRSSRRSSELASFRLAKKPFSPRAHYSRGFFSSSRKQQQQKAGILRSLATPAFITIGGLLIYSLYPGELPHAQLPEFLEVADHQLSDSTEPGNNQGDAETEETAWTSFTKRFEDISNVTEFEWSSFSERLVDMILPEWSKGIPRQIRKLQHELSPSNDSLAHEIWEDAHDPLINPEIEYSAIVRVSEDLCSEEKEFLARRKRILTAALAHYLQLPESEIHPDDVPTIAMCGSGGGLRALVAGTGSMLAAQEDGLFDCITYTSGVSGSCWLQSLYHSSITERRLDRLVDHLKARLGVHIAFPPAALSSVTSSPTNKLLLSSIVEKLRGDPNADFGLVDVYGILLAARLLVPKGELGINDKDFKISNQRDYIKYGQNPMPIYTAVRHEIPDLLAGSTDPDRSPSEAEKEIAKQEAWFQWFEITPYEFFCEEFSAGIPTWAVGRRFNAGKDVMPESGFHLPEMRMPILMGIFGSAFCATLSHYYQEVRPLVRSLTGFGALDEMIYGHNEDLVKVHPIDPALIPNFAYGMDGKLRYTTPTTIQKNEYIQLMDAGMSNNLPIYPLLRPGRDVDIVVAFDASADVKTDNWLSVADGYARQRGIKGWPVGIGWPKATDTAEKIERQLDTAQASTADEAEAKLKQAREDQEAKRTGDEQVKPDQSHEHASASDLGYCTVWVGTKEERSSEPPPPSKAVTEDTAWQLTESKAGLAVVYLPFLANPDKVPDVDPATSDYMSTWNFVYTPEQIEGAVALARANYSEGKDQIKRCVRAVYERKKRLREEAEAAARSERKRRSMRRGNTGKLGEGDHFS

SEQ ID NO: 31161 - DNA, 4519 bp, Muscodor strobelii
  misc_feature: SGI EST ID NO. CUFF.74016.0
  misc_feature: Variant of the nucleotide sequence at SEQ ID NO 31159
ggcggctcaaaattgcaagacacatttgcgacctgcgccagcgcgattgaactcctgacatcccaagccattctcaacaatgctcgaatccaagccatgataccctgacactcacctggagggacaatgaggtcttccaaggtgtgccaactgggcccaatccagcgcgcgagaagcgctcaacaacagctgataagatctagtcgaagatcgtcagagctggcttcctttcgattggccaaaaagccgttttcaccacgcgctcattattcccgagggttcttcagctccagcaggaaacagcagcaacagaaggctggtatacttcgctcccttgcaacgcctgcattcattaccattggcggtttgctcatatactcgctctatccaggcgaacttccacatgcccagcttccagaatttctagaagtcgcggatcaccaattgtcggactccacagaaccaggaaacaaccaaggcgatgctgaaacggaagagacagcatggacttccttcactaagcgattcgaggatatttctaacgtcactgagtttgagtggtcgtcgttctctgaacgccttgttgatatgatcttgcctgagtggtccaaaggcattccgcgacagatcagaaagcttcagcatgaactctcaccatcaaatgactcactagctcacgagatttgggaagatgctcatgatccactcataaaccccgaaatcgagtactccgctatcgtcagagtgtccgaggacctctgtagcgaggagaaagaatttcttgcacgtcgaaagaggatcttgacagcagctttggctcactaccttcagttgcccgaaagcgaaatacatcctgacgatgtcccaacgattgctatgtgcggctctggcggtggattacgtgcccttgttgctggcaccggctctatgctcgcggctcaagaggacgggctctttgattgcatcacttacacgtctggtgtcagcggatcttgttggctacaatctctttaccactcttctattaccgaacgtcggttagatcgactcgtagaccacttgaaagctagactgggcgttcacattgcctttcctcccgctgcattgtcttcagtcacctcatctcccaccaacaagctacttctcagcagtatcgtcgaaaagctacgaggcgaccccaacgccgactttggcctagttgacgtctacggcatattattggctgcaagattgctggtgccaaagggcgaacttggcatcaatgacaaagattttaagatttccaatcaacgagattatatcaagtatgggcagaacccgatgcctatttacaccgcagtcaggcatgagataccagatcttctcgctggctcgacggatccagatcgctcaccatcagaagccgagaaagaaattgccaagcaagaggcatggtttcagtggttcgaaattacaccctatgaatttttctgcgaagagttcagcgcaggcatcccaacatgggcagtcggaaggaggtttaacgctggaaaggatgtcatgccagaatccgggtttcacctcccagagatgcggatgccaattctcatgggcatatttggatcagccttctgcgcaacgcttagccactattatcaagaagttcggcctctggtcagaagccttaccggctttggagcgcttgacgagatgatttacgggcacaacgaggatctcgtgaaagttcaccccatcgatccggcactcatacccaatttcgcctacggcatggatggaaagctgcgttacacaacacctacaacgattcaaaagaatgaatacatacaactaatggacgccgggatgtccaataaccttccaatctatcctctacttcgacccggccgagatgtggatattgttgtcgcgttcgacgcatctgcagatgtcaagacggacaattggctttctgtagcagatggctacgctcgtcaacgtggaattaagggctggcctgttggcatcggctggccgaaagctacggacacagccgagaaaattgaacgccagcttgacacggcacaagccagcacagctgacgaagcggaggcaaagctgaaacaggcacgtgaagaccaagaagccaagcgcacaggcgacgaacaggtcaaacccgaccagtcgcatgaacatgcatctgcgagcgacctgggctactgtacggtttgggtgggcacgaaagaagaacgatcatctgaaccgccaccgccatccaaagccgtgacggaagacacggcgtggcagctaacggagtccaaggcagggctcgctgtcgtctatctaccatttttggccaacccagataaagttcctgacgttgatcccgcaacttccgactatatgtctacgtggaactttgtttatacccctgagcagattgagggggcggttgcgctggcgcgagcgaattacagcgaaggcaaagatcagatcaaacgatgcgttcgtgctgtctatgagcgcaagaagagacttcgcgaggaggccgaggcagcggcccgatccgagcggaaaagacgctcgatgagacggggtaataccggtaaattgggcgaaggagatcacttcagctgagcactctctgatctttcgtcgcggatcgctcactgtacatcccttgctgtctgaccatcgagacccggagagcttgctcgtggaaaccataggccccgcaacgctcgtggctttgtgtatataagatttgtaatcatcaagtaaaattatatgtaaatgtacactctattgagttgcttgtgtggtatgtatataggcctgttctcactatggccgtgacatgtatccgatgatacatgatatttctacattttgacttccaaggtcaggaagaatatgatacatagatttagtttgatattcaatgacgagtgaaccgccgccgatgcattttattccctcaatgcaccttagggctactcgtttccccgtcctcaaatcgtacacgtgtctagagtggcccgtttgttagtacatctctgtcattgggctcgttcgatccccttctatccccttatgctgattacttatgcctatgtgattatctcgccaatatcgacataagcaggcttccagggcgcatggtcctcggcgagagtgtcgctcggcacggcggtctcgccggggctgtagagataccacgacttcatggcgttgatagacgccgcagtcttggcggcattcaggctggcgccggcggcctcgccgagcttgtcgcgaccgctgtagatgccgacgacgaagacgggcgtcctactcatgcgacccgtctcactcagtagcctggcgactggcgggtcgaagttttcgcgggcgcacaaccgctgtaactcgagctctgggagcgtgaagttgaagagattcgacagatccaagtgccgcgagaggacgtgggatttgatgaaggtcttggcggactcgctgccgcaatataggtagatggcaccaatcacagcgcgcaagaaatttgcgtgcgcgttctgactcgggtccgcgattatcaggtctttcttgttccgctcgtctgtcacttcgcggctgtcctggcctgccctcctgcccgagacgtctgggacggaattgccgaaagggtcatcgaagacgattcgactgttcatgcccctcttccagttctgcttgatctgggagttcttggattcggctcgggcgtaaccccacttgtgcatcaagttggttgcattgtccttgttgaactgcagatagcccggatcgacctcagcgccgggggcagcggcggactcaacgccccaagcacggcagatgcggttgagagagggctcgccggcatagccgctcatggcggagtagaggatggccataggcaggcgtgggtacctggtgatgagccattcggaggtgtggtactggatcagagaggcgccgacgaaggccaggttggagttgttgaatttggggtgggcatctgcggaggggtctactaatgcgcgggcgaggatctgtagcgggattttggaggagagagaaaggcgggcgtggagagcagcgagcttggcggattggagggcagcttcgggatgcggagagggcaggtctcgacgggtgcgagctggagtttctatgggagcatcttcgacttgggagtcatcgaagatggcgtcgggcgtcagggcagcggcagcggactgacacctcgtctgtgagtatggcgaggatactgaggtgacgacgggagacgtcgacgagagtctggctgggagtcgcgaacaggactgtgcagcgagccaggggcgcgacagttggccaacacgtattcttttcatgttgggcgcaccgcagtctcctcccagagccgattggagagacacgaggctgtcgctatgcgcggtgggtggtgggaggtggatgcggatgggatgggcgtcgtctcgtgtcttgtcgtctggccccgaaaaagtttctgaggtctgagatcacctctaaaagc

SEQ ID NO: 31162 - DNA, 4113 bp, Muscodor strobelii
  misc_feature: SGI cDNA ID NO. 570725
  misc_feature: Encodes the peptide sequence at SEQ ID NO 31163
atggctgcacagggctttgactcccagcgcgagctggatatcatcaaagaacacgttaggcccgaagtttcggcttccaatcaagatcagcgagatgatgagcctgaatggctctccctgccagaaatccccctgggagaggacttcaaccccaactgggaagatccgacagacactgagaagattgatagtcttctgccaaacacttggcaaacgccctggtcaagcaagaacacatatctagagacgcactatcgcctccaacgtgaagagaccatcgctttgctacgcttctgcgtcaagaaataccgagaagcccccacaatgggggacgatgacgatacctgcgtatacacaaaggttttcgttcaaggctacctgatgacgagacttggacccatgtgccgagtgcaattctcgattgagagggccgagaaaaggattcgctggactcagacgaaacgactccaagccggcaaactcgttttgctatcaaccgcacaggacggcttcaagacgatctgcatgcctgcaaccgtcgccgatcgttcgatcgagggactcgattgcaaccctcctacaatccaactacactgggctgatgtgaacgatgctgtcttggatccaactttggagcttatcatgctcgaagcccggaatggatacttcgagggggttcgtcattccatgcttggtctgcagcacgtggcgagaaacgagacagccctagacaaatatctagttcaggcagatgaatcggagggaaatgcccgatatgtcgtcgaaaaccctcgcttcaatctcatgtcactcatccatcatattcccgattcgcagtccatgcgcaaagaggatgttgaaaaactcatgatggagaagaaaagatcgatgagggattttgacttgctgaatcgcgatcccatcgagcttactcactatacgaaccttgacaactcacagcttgaggcagcacaaaggatgcttaccaaagagctagccatcgttcagggccctccaggtaccggcaagactttcacgtctgtcgagagtcttcaaatcatgatcgacagccaagctgggcgcgaccataaagtcatcgtcgtcgccgctcagaccaaccacgcagtcgatcagatgctcaatcaacttatctcgaggggcattatggtggtccgcattggcgggcgcacccagcacgatgttgtcaagaaagatcaccgagcaatggaaactgcactgaagaagaacgtgacccagcttgaggaattggtcagcagcatcttctcagaggaactgttgagtcccgaagaactccatgacgcgggccttatctctcgccagcagatggagtcactcaaagttgagaccggctgggctcgggaatcagaacctagcgagtcctctactacattcgagccaatctctatatggcttggagaccagcatgttagagcacagcagatgaattaccaggatccagtttttgaacaacaagaaactgatgaaacagccgacttcgacgaggaggacttcaacattgagcaagacgatatggctgtcgacgaagatgacggtcgcgataaggtttggggcaaatgggtacccttaaagcatcactggacaggttcaaaccctcgaggatataccgagaactctttgagactcaaaagggaactcaagcgctctgatttgtacgagattgatccagcctatcgcggcgccatataccaatattggcaacgagaaatgcttcgccatcatctgagtcgatttcgggagatactcacggcagctgttagaatcagcaaaagcctgaaaataagcaggtggtgtcgcgatgtacgatgcattgagacaggaaggatacaggttattggatgtaccacaactgggttgtgcaaataccgtggcctccttgccgcccttcagccacgaacgatgttgatcgaagaagcagcagagacgaaagaggccaacattctgtcagcgatctatccttcgcttcaacaacttattcttgtcggtgatcaccagcaattggcacctcagtgtgatacaccattcctcgatgctgggccgttttacatgcgagtctcaatgtttgagcggcttgtgaaactcaatatgccattcactatgctcaatatgcagcgtcgtatgaacccaatactacgacaagcattgaacccattctatccagcgcttcaggatcatcctgtcgtgactaggcccaacgcgcgcccaccagtcccaggtatgaaggtcgaatcttacttcttccaccacacctggagtgaggaatcggacgagaacttgagcaaactcaatgaaactgaggcggagatgatcatttactttattgactacctcttgatgaacggcgttgatcctgcgaaaataaccgttctcacgttttatcgagggcagaagaagaagattctccttgagtttaggaagaagttgaagcatcgacaaccattcacaaacgtacacacagtagattcgtaccagggcgaagagaatgacattatactcctgtcattggtccgaagcaatggcctatatggaccgcataaagcagggtttctcaaagatagcaaccgtgctgttgttgctattagccgtgcacgatgtgggttctacatcttcggcaacatcatcaacatgaggaacgcttgtagcgagtctcgcgagctatgggacgacaaagttgcagcaatcttccgagcacaaggtcgttttggcagcgacggcagattacccatcacgtgccaaaaccaccagcgtactacctggatcactcatccgaatgattgggtaaaccatcatggtggatgtgaggaaatgtgcccccacaagctcgcctgcggtcatgactgtggccgccgttgtcattggataccgcatgacaagctgatctgccagaacccttgcgagaagaccctacgatgcgggcacccatgccagaaaatttgcggcgatcattgctactgcaactgcccagatttctccggagcttttccccatgatgagcgatgggacgacactccagacacgagcacgagtcactggtcagtcgaacaagaacactatgcatcgccgttcgtgggtcgcgatggacgggttggacaagtccgcagaggacaaggtgctcacagagcaggcctaggactggccggcagacaacctaaggtgaccaacccgcttcggcccgcatcaattcgaccgcgtgagcgagaagttctggcgggagacaatgtctcaggttctgggtggcataacttcaatcccaagaacctggttgagctgccgagacaggccagtttccaaccgactagctcgcacgcctcgagcgttccacctggctttgccagagccacatcaaccgctttggaagaaatcagtcctattcgcgatactttctatcaggttggactgacagacaacggccgtcgcgatgtgaaggagaagaatgtcttgatccacagccatactccatcgcctgacttaatgggcaatgagtctccagcaggaagacgtaacggcccctcgactcccgctaaacttctcggctcgcaagtcttggagcagagttcagctacttcacatcatcgacaaggaagcgtcaatactcgcggggctcctcgtcttactatcaatgatacttctaataaaatcggggctcttgacctttcccacgtgactgaaagcctgatcgagctcgaacctgagcaacactaccgacttgaaattaatcccagtcaagctgttagctcgcgtttggcattcgttgacgacgatatcctgtctgagtgggaagttgctgccagctctggggcagcgaagaccctcgacggagctggcgaccatgctcagcatacgatggatgatctcttgcactttgaggagcataacgatatcggctttgtgcacaatgatcgtgataacgttcatcaagacatcgatgcgggttcagacattactgtcatgaacagtaattctcagcacaatcactccgagagtgaagaagtcggaacgaacagcatcacgaacgagctctctagcggcgctgccaaaggttcggcagaggatgacctcctttcatttgactga

SEQ ID NO: 31163 - protein, 1370 aa, Muscodor strobelii
  misc_feature: SGI Peptide ID NO. 570725
  misc_feature (7)..(1006): NCBI GI: 116192731 Blast Desc: CHGG_06083 [Chaetomium globosum CBS 148.51] gi|88181996|gb|EAQ89464.1| CHGG_06083 [Chaetomium globosum CBS 148.51]
  misc_feature (32)..(1006): NCBI GI: 29150104 Blast Desc: conserved [Neurospora crassa]
  misc_feature (73)..(1003): NCBI GI: 171684203 Blast Desc: protein product [Podospora anserina] gi|170942062|emb|CAP67714.1| protein product [Podospora anserina]
  misc_feature (146)..(998): NCBI GI: 46111837 Blast Desc: FG02800.1 [Gibberella zeae PH-1]
  misc_feature (37)..(1000): NCBI GI: 240109637 Blast Desc: CPC735_031420 [Coccidioides posadasii C735 delta SOWgp]
  misc_feature (15)..(965): NCBI GI: 70997992 Blast Desc: DEAD box helicase involved in nonsense mediated decay [Aspergillus fumigatus Af293] gi|66851364|gb|EAL91690.1| DEAD box helicase involved in nonsense mediated decay, [Aspergillus Af293]
  misc_feature (15)..(965): NCBI GI: 159126536 Blast Desc: ATP binding protein, [Aspergillus fumigatus A1163]
  misc_feature (14)..(927): NCBI GI: 156042127 Blast Desc: SS1G_11614 [Sclerotinia sclerotiorum 1980] gi|154695997|gb|EDN95735.1| SS1G_11614 [Sclerotinia sclerotiorum 1980]
  misc_feature (37)..(998): NCBI GI: 239612124 Blast Desc: DEAD box helicase [Ajellomyces dermatitidis ER-3]
  misc_feature (65)..(998): NCBI GI: 261202204 Blast Desc: DEAD box helicase [Ajellomyces dermatitidis SLH14081] gi|239590413|gb|EEQ72994.1| DEAD box helicase [Ajellomyces dermatitidis SLH14081]
MAAQGFDSQRELDIIKEHVRPEVSASNQDQRDDEPEWLSLPEIPLGEDFNPNWEDPTDTEKIDSLLPNTWQTPWSSKNTYLETHYRLQREETIALLRFCVKKYREAPTMGDDDDTCVYTKVFVQGYLMTRLGPMCRVQFSIERAEKRIRWTQTKRLQAGKLVLLSTAQDGFKTICMPATVADRSIEGLDCNPPTIQLHWADVNDAVLDPTLELIMLEARNGYFEGVRHSMLGLQHVARNETALDKYLVQADESEGNARYVVENPRFNLMSLIHHIPDSQSMRKEDVEKLMMEKKRSMRDFDLLNRDPIELTHYTNLDNSQLEAAQRMLTKELAIVQGPPGTGKTFTSVESLQIMIDSQAGRDHKVIVVAAQTNHAVDQMLNQLISRGIMVVRIGGRTQHDVVKKDHRAMETALKKNVTQLEELVSSIFSEELLSPEELHDAGLISRQQMESLKVETGWARESEPSESSTTFEPISIWLGDQHVRAQQMNYQDPVFEQQETDETADFDEEDFNIEQDDMAVDEDDGRDKVWGKWVPLKHHWTGSNPRGYTENSLRLKRELKRSDLYEIDPAYRGAIYQYWQREMLRHHLSRFREILTAAVRISKSLKISRWCRDVRCIETGRIQVIGCTTTGLCKYRGLLAALQPRTMLIEEAAETKEANILSAIYPSLQQLILVGDHQQLAPQCDTPFLDAGPFYMRVSMFERLVKLNMPFTMLNMQRRMNPILRQALNPFYPALQDHPVVTRPNARPPVPGMKVESYFFHHTWSEESDENLSKLNETEAEMIIYFIDYLLMNGVDPAKITVLTFYRGQKKKILLEFRKKLKHRQPFTNVHTVDSYQGEENDIILLSLVRSNGLYGPHKAGFLKDSNRAVVAISRARCGFYIFGNIINMRNACSESRELWDDKVAAIFRAQGRFGSDGRLPITCQNHQRTTWITHPNDWVNHHGGCEEMCPHKLACGHDCGRRCHWIPHDKLICQNPCEKTLRCGHPCQKICGDHCYCNCPDFSGAFPHDERWDDTPDTSTSHWSVEQEHYASPFVGRDGRVGQVRRGQGAHRAGLGLAGRQPKVTNPLRPASIRPREREVLAGDNVSGSGWHNFNPKNLVELPRQASFQPTSSHASSVPPGFARATSTALEEISPIRDTFYQVGLTDNGRRDVKEKNVLIHSHTPSPDLMGNESPAGRRNGPSTPAKLLGSQVLEQSSATSHHRQGSVNTRGAPRLTINDTSNKIGALDLSHVTESLIELEPEQHYRLEINPSQAVSSRLAFVDDDILSEWEVAASSGAAKTLDGAGDHAQHTMDDLLHFEEHNDIGFVHNDRDNVHQDIDAGSDITVMNSNSQHNHSESEEVGTNSITNELSSGAAKGSAEDDLLSFD

SEQ ID NO: 31164 - DNA, 969 bp, Muscodor strobelii
  misc_feature: SGI cDNA ID NO. 570726
  misc_feature: Encodes the peptide sequence at SEQ ID NO 31165
atggctgccgctctcgatgtctacgaattgcgggatggatggctttgccatcgtgttattggaaagccggtgaagaatctttttgtctttggcgatagctatagtgatgaaggtcaattatcgtacattacatcccacaacggcagcggacctcccccaggcaccgtgattccaacttccaatttcacttctacaggtggatatacttggccatattttgcgtcaaagaagctgggtgcaaaaacatacaactacgcagtcagcggtgccgtttgttccaatgacattgtgtcgcgatatctcagctcgctcgacgcggacttcccgtcagtagcggaatatgaagtcccgaccttccaggcggatgtagaatactcagagaaaacaccaaatactacatttctcaaagatcgcacagcagagaatagtgtctatgctctctacataggcactaacgaccttggcgagggcggctttctgcgtgataagcaaactcaaggcaaagttattacagactacattgaatgcatctgttctgtgttcgacagcctttatgcttctggcggacgtcgttttattcttttccaaaccgcccccctcgaaaagagcccgctctacgcagcccaagagcacggcggcagtggaaatgtaaactattgggcaaacaagacctcttacaacgagacagagtacgagaacaaaatcctcgagtatacaacgacggtcaatactgtcttcaactacggtgctccattcgaactgctcgtaaagaaacgatggcctagagcttctgttaccatcttcaacgtgcaccagatcattctcaatatctatcgtacaccagaacgctatctggattcgccagctaatgctacaggctactattaccactgtcctgtcgacagtaatggtaatagtaccggtccctgtgctgcatcagacaatcccttatcaagcttcctatggtaa

SEQ ID NO: 31165 - protein, 322 aa, Muscodor strobelii
  misc_feature: SGI Peptide ID NO. 570726
  misc_feature (22)..(322): NCBI GI: 171683267 Blast Desc: protein product [Podospora anserina] gi|170941593|emb|CAP67247.1| protein product [Podospora anserina]
  misc_feature (22)..(322): NCBI GI: 39944366 Blast Desc: MGG_04194 [Magnaporthe grisea 70-15] gi|145014932|gb|EDJ99500.1| MGG_04194 [Magnaporthe grisea 70-15]
  misc_feature (22)..(322): NCBI GI: 261352451 Blast Desc: acetyl esterase [Verticillium albo-atrum VaMs.102]
  misc_feature (20)..(322): NCBI GI: 116194658 Blast Desc: CHGG_03927 [Chaetomium globosum CBS 148.51] gi|88179840|gb|EAQ87308.1| CHGG_03927 [Chaetomium globosum CBS 148.51]
  misc_feature (25)..(322): NCBI GI: 113206519 Blast Desc: acetyl esterase [Hypocrea jecorina]
  misc_feature (11)..(322): NCBI GI: 156063670 Blast Desc: SS1G_01953 [Sclerotinia sclerotiorum 1980] gi|154697287|gb|EDN97025.1| SS1G_01953 [Sclerotinia sclerotiorum 1980]
  misc_feature (18)..(322): NCBI GI: 164425134 Blast Desc: NCU06364 [Neurospora crassa OR74A] gi|157070804|gb|EAA33162.2| conserved [Neurospora crassa OR74A]
  misc_feature (24)..(322): NCBI GI: 256723934 Blast Desc: NECHADRAFT_37087 [Nectria haematococca mpVI 77-13-4]
  misc_feature (36)..(322): NCBI GI: 154318534 Blast Desc: BC1G_02656 [Botryotinia fuckeliana B05.10] gi|150857786|gb|EDN32978.1| BC1G_02656 [Botryotinia fuckeliana B05.10]
  misc_feature (24)..(322): NCBI GI: 256724327 Blast Desc: NECHADRAFT_97679 [Nectria haematococca mpVI 77-13-4]
MAAALDVYELRDGWLCHRVIGKPVKNLFVFGDSYSDEGQLSYITSHNGSGPPPGTVIPTSNFTSTGGYTWPYFASKKLGAKTYNYAVSGAVCSNDIVSRYLSSLDADFPSVAEYEVPTFQADVEYSEKTPNTTFLKDRTAENSVYALYIGTNDLGEGGFLRDKQTQGKVITDYIECICSVFDSLYASGGRRFILFQTAPLEKSPLYAAQEHGGSGNVNYWANKTSYNETEYENKILEYTTTVNTVFNYGAPFELLVKKRWPRASVTIFNVHQIILNIYRTPERYLDSPANATGYYYHCPVDSNGNSTGPCAASDNPLSSFLW

SEQ ID NO: 31166 - DNA, 1439 bp, Muscodor strobelii
  misc_feature: SGI EST ID NO. CUFF.73773.0
  misc_feature: Variant of the nucleotide sequence at SEQ ID NO 31164
ttggtttgtctcgaattttcgagcagtttacgtgtcattaggatgcttgttcaatcttttttgttcgctattatcggaggtggcctaactgcatcatgcttaaacatcaataaaggaaagccggtgaagaatctttttgtctttggcgatagctatagtgatgaaggtcaattatcgtacattacatcccacaacggcagcggacctcccccaggcaccgtgattccaacttccaatttcacttctacaggtggatatacttggccatattttgcgtcaaagaagctgggtgcaaaaacatacaactacgcagtcagcggtgccgtttgttccaatgacattgtgtcgcgatatctcagctcgctcgacgcggacttcccgtcagtagcggaatatgaagtcccgaccttccaggcggatgtagaatactcagagaaaacaccaaatactacatttctcaaagatcgcacagcagagaatagtgtctatgctctctacataggcactaacgaccttggcgagggcggctttctgcgtgataagcaaactcaaggcaaagttattacagactacattgaatgcatctgttctgtgttcgacagcctttatgcttctggcggacgtcgttttattcttttccaaaccgcccccctcgaaaagagcccgctctacgcagcccaagagcacggcggcagtggaaatgtaaactattgggcaaacaagacctcttacaacgagacagagtacgagaacaaaatcctcgagtatacaacgacggtcaatactgtcttcaactacggtgctccattcgaactgctcgtaaagaaacgatggcctagagcttctgttaccatcttcaacgtgcaccagatcattctcaatatctatcgtacaccagaacgctatctggattcgccagctaatgctacaggctactattaccactgtcctgtcgacagtaatggtaatagtaccggtccctgtgctgcatcagacaatcccttatcaagcttcctatggtatgatagtcttcatccatcagaacgagcagcggaaatccttgcgtcagaactcgtgcaggcaattcggggcaactcaacttttgcaaccacatattcttgaggcataatcaatagtatgcagatgatcgatcgctaaaaagacatgttatctcgaatgcaagccggttggatagtttgtgttggacttgctaagttgacgtgatctttatgattgcacaatcgtggcacaattcgagcgatgcgcgacacgtaaatgagtaatgaaatcgatttattatcagtgactattgctgacaaaacttttcctctaaatttagagaaacttgatgtctgttcgaggttgggaactgatgagacctaccataggccacataccgtgtgaattagagtgtatgtctgtatttttgcggcgttgca

SEQ ID NO: 31167 - DNA, 1068 bp, Muscodor strobelii
  misc_feature: SGI cDNA ID NO. 570727
  misc_feature: Encodes the peptide sequence at SEQ ID NO 31168
atggcgccgcaggatggtgtaccgggcccattgtcaagtctgttgacactcattctcacaacttcgccaacgccatctgctcctggtaccgatctcatatctgagatcctcgagtctttcagactccattgccctatactgctctcttgtaacgtcatcgttgtattcgacacgtatgatcatatcggaccagaaatgcgcttgaagaaagggatggtcacatccgaaggtgccacagctttcgatctttacaagagcaacgttaaagacttgataatgacagaataccagcaaaaatacccctccaatactctcataaacggaacgggcgaagctgaatatggtctaccaaatcttgcggacggtcagcagagggccgtaccactcttgaccttacaaacgcaagataagcgtgtgacgttcattgagccttctgaacgtcttggtttcggtctcggggtccgatcagcgctgagattaactgcgacgccatatgtatggatacagcagcacgattggtcactgattcgcgatattccgttattgcctatgctgcatgtcatgcaagcgtctgacgcggacaatgttgcgcccatcaagtatgtgtgtcttccgtcggtacgaatgcaatgctatgcaacctcaggacacgtgactcactttcccgtgcttcgcgacttgacggcaaaactcaaacgtgactttcacgctccatcatcgccggaagacagcatccctttgaccccgctattcttctggcatgacaaacctcacattgcttctaccgcgcactacttatctcgcatctttccgacagcattagcaatgggtcgaggcgactttattgaggataccgtcggtcaacgggctcgtacgcagatgaaagaaggtatttggtccaaatgggcttgctggttgttttatcctgagaacggaaaggacctctgtctcaaacatctaaatgggcgaaaatggagaggcacagacggcgcactagcccagaaacagctatggcttgagatgggcactcaacgaaagaaaagtatgccagcactaccaaagacttga

SEQ ID NO: 31168 - protein, 355 aa, Muscodor strobelii
  misc_feature: SGI Peptide ID NO. 570727
  misc_feature (10)..(343): NCBI GI: 238492655 Blast Desc: conserved [Aspergillus flavus NRRL3357] gi|220696058|gb|EED52400.1| conserved [Aspergillus flavus NRRL3357]
  misc_feature (11)..(345): NCBI GI: 256722207 Blast Desc: NECHADRAFT_52465 [Nectria haematococca mpVI 77-13-4]
  misc_feature (11)..(338): NCBI GI: 46114091 Blast Desc: FG02951.1 [Gibberella zeae PH-1]
  misc_feature (7)..(343): NCBI GI: 164425567 Blast Desc: NCU05540 [Neurospora crassa OR74A] gi|157070977|gb|EAA31266.2| conserved [Neurospora crassa OR74A]
  misc_feature (15)..(335): NCBI GI: 121719370 Blast Desc: conserved [Aspergillus clavatus NRRL 1] gi|119404582|gb|EAW14958.1| conserved [Aspergillus clavatus NRRL 1]
  misc_feature (11)..(335): NCBI GI: 119499229 Blast Desc: NFIA_040510 [Neosartorya fischeri NRRL 181] gi|119414536|gb|EAW24475.1| conserved [Neosartorya fischeri NRRL 181]
  misc_feature (7)..(342): NCBI GI: 116201859 Blast Desc: CHGG_08814 [Chaetomium globosum CBS 148.51] gi|88177332|gb|EAQ84800.1| CHGG_08814 [Chaetomium globosum CBS 148.51]
  misc_feature (11)..(335): NCBI GI: 70985358 Blast Desc: conserved [Aspergillus fumigatus Af293] gi|66845813|gb|EAL86147.1| conserved [Aspergillus fumigatus Af293] gi|159125893|gb|EDP51009.1| conserved [Aspergillus A1163]
  misc_feature (14)..(338): NCBI GI: 261360506 Blast Desc: alcohol dehydrogenase [Verticillium albo-atrum VaMs.102]
  misc_feature (8)..(342): NCBI GI: 171681756 Blast Desc: protein product [Podospora anserina] gi|170940837|emb|CAP66486.1| protein product [Podospora anserina]
MAPQDGVPGPLSSLLTLILTTSPTPSAPGTDLISEILESFRLHCPILLSCNVIVVFDTYDHIGPEMRLKKGMVTSEGATAFDLYKSNVKDLIMTEYQQKYPSNTLINGTGEAEYGLPNLADGQQRAVPLLTLQTQDKRVTFIEPSERLGFGLGVRSALRLTATPYVWIQQHDWSLIRDIPLLPMLHVMQASDADNVAPIKYVCLPSVRMQCYATSGHVTHFPVLRDLTAKLKRDFHAPSSPEDSIPLTPLFFWHDKPHIASTAHYLSRIFPTALAMGRGDFIEDTVGQRARTQMKEGIWSKWACWLFYPENGKDLCLKHLNGRKWRGTDGALAQKQLWLEMGTQRKKSMPALPKT

SEQ ID NO: 31169 - DNA, 2965 bp, Muscodor strobelii
  misc_feature: SGI EST ID NO. CUFF.73776.0
  misc_feature: Variant of the nucleotide sequence at SEQ ID NO 31167
tcgaagtcgaagtcactgaatgatagtagcgctgccaacaccaagccataatcgagtttgttgaataatgaacatccagcatcactgcaccatatctcgacatcaatctcccgctgcaagaccagtgcgagatggcgccgcaggatggtgtaccgggcccattgtcaagtctgttgacactcattctcacaacttcgccaacgccatctgctcctggtaccgatctcatatctgagatcctcgagtctttcagactccattgccctatactgctctcttgtaacgtcatcgttgtattcgacacgtatgatcatatcggaccagaaatgcgcttgaagaaagggatggtcacatccgaaggtgccacagctttcgatctttacaagagcaacgttaaagacttgataatgacagaataccagcaaaaatacccctccaatactctcataaacggaacgggcgaagctgaatatggtctaccaaatcttgcggacggtcagcagagggccgtaccactcttgaccttacaaacgcaagataagcgtgtgacgttcattgagccttctgaacgtcttggtttcggtctcggggtccgatcagcgctgagattaactgcgacgccatatgtatggatacagcagcacgattggtcactgattcgcgatattccgttattgcctatgctgcatgtcatgcaagcgtctgacgcggacaatgttgcgcccatcaagtatgtgtgtcttccgtcggtacgaatgcaatgctatgcaacctcaggacacgtgactcactttcccgtgcttcgcgacttgacggcaaaactcaaacgtgactttcacgctccatcatcgccggaagacagcatccctttgaccccgctattcttctggcatgacaaacctcacattgcttctaccgcgcactacttatctcgcatctttccgacagcattagcaatgggtcgaggcgactttattgaggataccgtcggtcaacgggctcgtacgcagatgaaagaaggtatttggtccaaatgggcttgctggttgttttatcctgagaacggaaaggacctctgtctcaaacatctaaatgggcgaaaatggagaggcacagacggcgcactagcccagaaacagctatggcttgagatgggcactcaacgaaagaaaagtatgccagcactaccaaagacttgaacggcgtcagactcgagtttatctcttaagacaatgaagcctggtagaacgtctctgcttctggctaccgctgttatggatgaagatggtaactcattcgacaaaatatatttctacaatgtgaacaaccacactaggcatggaagtacgtcaaggttgcatctgccaggcctgctgtgatgggccttattgccttatcgattgcctcctctgcctcctcgccccttacacggtcgttttccccgttcttttggtcatctggcggctgatagggaccatcgactcggttatcatgtcctacatggccggggttaattgatctgttcacgacgcattgaggacgatagttaccaatactgagtgtggagacagtgcgactcccattcgagccatgaaagcgtctgtacccgcccacactacgccactcgcacccttctcgatttctcgaactactgatgacgcatactgtttggcgttgattgctcctttttgcattttaccagtcactagatcgtccaataaaggctggacagacgtgtacttcgagtcctccggtagctcgactttcggcataccagtgaatatctcggtttttacgcctgtagtagctagagtgatagttctcactccgagcggtttgagttcatgccgccatgtctcgcttgctaggtgtagcgctgctttcgagctattgtacgtacctatatgatttgtattggaagaaatgcattcgcggatacgttgttaaccacgcaaccttgggccttgatgagcagaggagaaaatgcttgcaacattgcaagaggggcccagaggttgagggttagcgtcttgacattggaggctctagaaagatctgtcgatattttcgaagggtttcgaagggttgcaaagacaaggtagcccttttcttggaagacttgggcgagagccgaaccgataccaccagccgaacagccagtgatcaaaactgatttcctcacagctgccatggataaaaatatttgagaggctatgccaggcaagactttgaaagatctagatgtgcatattctcagaagtctctggctgaggcggaatatccgacttaaatatgaactcctttctgtcggaaataaagttcctctctgcgagcaataccgagcctctgccatgattaccacttttgagcagacgatttcaagttccacgtcgaatctattcacccgaaaacagatccgcgccaagttcgatacccaggaagtttccgagacccaattacacccgccgctataccgaaactggaatatgaagaatgtcttggcatttctcgacgggtatgcttagtcccgttggaaaggtcacttcacactttctcaactttctctctacaaattagaaagatgaggattaactaatatcaaaatggcgaaaccaaatgagcctagatggacgacgaagaatcggccaggcaacagtatgccattcatcatttcattcaacggcgagaaagtggacctagtaacacgcaagaagatccggagccacgtgatgaaagggaagaagcaaccaaaagttcagcctatcacaagcgagttgattcccagctcacagacaatctctcgttggacatcggtatctgggaagaacctagcagagtcgatttgggaagtatatacacccttgatacccgggcgcatcggctcagatgtttcttttacgggacttagcgaggatgtagaacccttaattctactgaacatggtcagagttgtagaggttgccga

SEQ ID NO: 31170 - DNA, 981 bp, Muscodor strobelii
  misc_feature: SGI cDNA ID NO. 570728
  misc_feature: Encodes the peptide sequence at SEQ ID NO 31171
atgattaccacttttgagcagacgatttcaagttccacgtcgaatctattcacccgaaaacagatccgcgccaagttcgatacccaggaagtttccgagacccaattacacccgccgctataccgaaactggaatatgaagaatgtcttggcatttctcgacggatggacgacgaagaatcggccaggcaacagtatgccattcatcatttcattcaacggcgagaaagtggacctagtaacacgcaagaagatccggagccacgtgatgaaagggaagaagcaaccaaaagttcagcctatcacaagcgagttgattcccagctcacagacaatctctcgttggacatcggtatctgggaagaacctagcagagtcgatttgggaagtatatacacccttgatacccgggcgcatcggctcagatgtttcttttacgggacttagcgaggatgtagaacccttaattctactgaacatggtcagagttgtagaggttgccgaagcaatcatgctccccttgagagctgccgtcggaattgaaggaaagagaagagactggctttctttgctcggcaaagataccgccggcttacatatcacagcttatgcaatggagagctttaccaatagagtattgcttcgtcaagggacccattataaccgagcggccatgctgcatttcgggaaaggacttcagcttctgcgcgaaaggctcgagggagacgatgacgaccggaaagtttctgatgccacgattggagtcgtgttgaaacttgtcgatgctgctcatttcaacggcgatttccttgccgcaagacatcacatgaagggtgttcgcaaaatggtggatgtgagagggggactgcgtactttcagggatacccgtatcaccgatatggcagtaaactatctcggtcctcaatggggtgcagccgttattctttcgacagccctcagaacccgtgccgcactatcctga

SEQ ID NO: 31171 - protein, 326 aa, Muscodor strobelii
  misc_feature: SGI Peptide ID NO. 570728
  misc_feature (66)..(292): NCBI GI: 238505797 Blast Desc: conserved [Aspergillus flavus NRRL3357] gi|220690217|gb|EED46567.1| conserved [Aspergillus flavus NRRL3357]
  misc_feature (66)..(292): NCBI GI: 145256372 Blast Desc: An19g00360 [Aspergillus niger CBS 513.88] gi|134084771|emb|CAK47359.1| protein product [Aspergillus niger]
  misc_feature (139)..(297): NCBI GI: 145240003 Blast Desc: An08g05310 [Aspergillus niger] gi|134077162|emb|CAK45503.1| protein product [Aspergillus niger]
  misc_feature (60)..(292): NCBI GI: 212529582 Blast Desc: conserved [Penicillium marneffei ATCC 18224] gi|210074346|gb|EEA28433.1| conserved [Penicillium marneffei ATCC 18224]
  misc_feature (62)..(293): NCBI GI: 256727322 Blast Desc: NECHADRAFT_76080 [Nectria haematococca mpVI 77-13-4]
  misc_feature (62)..(293): NCBI GI: 171688826 Blast Desc: protein product [Podospora anserina] gi|170944375|emb|CAP70485.1| protein product [Podospora anserina]
  misc_feature (67)..(294): NCBI GI: 119479299 Blast Desc: NFIA_077140 [Neosartorya fischeri NRRL 181] gi|119407832|gb|EAW17781.1| NFIA_077140 [Neosartorya fischeri NRRL 181]
  misc_feature (64)..(289): NCBI GI: 261205392 Blast Desc: conserved [Ajellomyces dermatitidis SLH14081] gi|239592492|gb|EEQ75073.1| conserved [Ajellomyces dermatitidis SLH14081]
  misc_feature (64)..(289): NCBI GI: 239611353 Blast Desc: conserved [Ajellomyces dermatitidis ER-3]
  misc_feature (68)..(293): NCBI GI: 116178794 Blast Desc: [Chaetomium globosum CBS 148.51] gi|88184322|gb|EAQ91790.1| [Chaetomium globosum CBS 148.51]
MITTFEQTISSSTSNLFTRKQIRAKFDTQEVSETQLHPPLYRNWNMKNVLAFLDGWTTKNRPGNSMPFIISFNGEKVDLVTRKKIRSHVMKGKKQPKVQPITSELIPSSQTISRWTSVSGKNLAESIWEVYTPLIPGRIGSDVSFTGLSEDVEPLILLNMVRVVEVAEAIMLPLRAAVGIEGKRRDWLSLLGKDTAGLHITAYAMESFTNRVLLRQGTHYNRAAMLHFGKGLQLLRERLEGDDDDRKVSDATIGVVLKLVDAAHFNGDFLAARHHMKGVRKMVDVRGGLRTFRDTRITDMAVNYLGPQWGAAVILSTALRTRAALS

SEQ ID NO: 31172 - DNA, 2965 bp, Muscodor strobelii; identical to SEQ ID NO: 31169
  misc_feature: SGI EST ID NO. CUFF.73776.0
  misc_feature: Variant of the nucleotide sequence at SEQ ID NO 31170

SEQ ID NO: 31173 - DNA, 1578 bp, Muscodor strobelii
  misc_feature: SGI cDNA ID NO. 570729
  misc_feature: Encodes the peptide sequence at SEQ ID NO 31174
atgattaccacttttgagcagacgatttcaagttccacgtcgaatctattcacccgaaaacagatccgcgccaagttcgatacccaggaagtttccgagacccaattacacccgccgctataccgaaactggaatatgaagaatgtcttggcatttctcgacggatggacgacgaagaatcggccaggcaacagtatgccattcatcatttcattcaacggcgagaaagtggacctagtaacacgcaagaagatccggagccacgtgatgaaagggaagaagcaaccaaaagttcagcctatcacaagcgagttgattcccagctcacagacaatctctcgttggacatcggtatctgggaagaacctagcagagtcgatttgggaagtatatacacccttgatacccgggcgcatcggctcagatgtttcttttacgggacttagcgaggatgtagaacccttaattctactgaacatggtcagagttgtagaggttgccgaagcaatcatgctccccttgagagctgccgtcggaattgaaggaaagagaagagactggctttctttgctcggcaaagataccgccggcttacatatcacagcttatgcaatggagagctttaccaatagagtattgcttcgtcaagggacccattataaccgagcggccatgctgcatttcgggaaaggacttcagcttctgcgcgaaaggctcgagggagacgatgacgaccggaaagtttctgatgccacgattggagtcgtgttgaaacttgtcgatgctgctcatttcaacggcgatttccttgccgcaagacatcacatgaagggtgttcgcaaaatggtggatgtgagagggggactgcgtactttcagggatacccgtatcaccgatatggcagtaaaatgcgatctagctatctcggtcctcaatggggtgcagccgttattctttcgacagccctcagaacccgtgccgcactatcctgaagctttactacgaaccccccacaaaggaaagaagacgctgaaaactcacctgccggtccgacacctcgatgatgacttggccaccatctggaatgtgatgaggagattctgcttgatggcgaatcttgcagcgcagacgcgacagttcattagaattgatatcatcagcgacacgatgaattcgacgatgcaccgccttcttaatatgcggtttcctttcggctcaaccaatgaagtagtactgcatggactattggctttcacgttccacgtcttcttgcagtggaaggatatcaaatccccctacaaccatcttccagatagatacaggagctgcttgattcacgccaataccacagaagctatttctgatcaactgatgctttggcttctaatgattggagctctttcgttctttgaaatatccgaagaagcctggctaagagagcacttgcggcaatgcacagacaaactgcatatcagaacctgggcagggatgcaagatgtgctcaagtcaatgatgtggattgcgccgctagacgaccgactgggagagaccgtgtatggctccttgttcctgagataa

SEQ ID NO: 31174 - protein, 525 aa, Muscodor strobelii
  misc_feature: SGI Peptide ID NO. 570729
  misc_feature (139)..(522): NCBI GI: 145240003 Blast Desc: An08g05310 [Aspergillus niger] gi|134077162|emb|CAK45503.1| protein product [Aspergillus niger]
  misc_feature (60)..(522): NCBI GI: 212529582 Blast Desc: conserved [Penicillium marneffei ATCC 18224] gi|210074346|gb|EEA28433.1| conserved [Penicillium marneffei ATCC 18224]
  misc_feature (66)..(523): NCBI GI: 145256372 Blast Desc: An19g00360 [Aspergillus niger CBS 513.88] gi|134084771|emb|CAK47359.1| protein product [Aspergillus niger]
  misc_feature (62)..(525): NCBI GI: 256727322 Blast Desc: NECHADRAFT_76080 [Nectria haematococca mpVI 77-13-4]
  misc_feature (67)..(519): NCBI GI: 119479299 Blast Desc: NFIA_077140 [Neosartorya fischeri NRRL 181] gi|119407832|gb|EAW17781.1| NFIA_077140 [Neosartorya fischeri NRRL 181]
  misc_feature (62)..(507): NCBI GI: 171688826 Blast Desc: protein product [Podospora anserina] gi|170944375|emb|CAP70485.1| protein product [Podospora anserina]
  misc_feature (364)..(525): NCBI GI: 238505795 Blast Desc: conserved [Aspergillus flavus NRRL3357] gi|220690216|gb|EED46566.1| conserved [Aspergillus flavus NRRL3357]
  misc_feature (64)..(519): NCBI GI: 261205392 Blast Desc: conserved [Ajellomyces dermatitidis SLH14081] gi|239592492|gb|EEQ75073.1| conserved [Ajellomyces dermatitidis SLH14081]
  misc_feature (64)..(519): NCBI GI: 239611353 Blast Desc: conserved [Ajellomyces dermatitidis ER-3]
  misc_feature (364)..(525): NCBI GI: 169780142 Blast Desc: [Aspergillus oryzae RIB40] gi|83773275|dbj|BAE63402.1| protein product [Aspergillus oryzae]
MITTFEQTISSSTSNLFTRKQIRAKFDTQEVSETQLHPPLYRNWNMKNVLAFLDGWTTKNRPGNSMPFIISFNGEKVDLVTRKKIRSHVMKGKKQPKVQPITSELIPSSQTISRWTSVSGKNLAESIWEVYTPLIPGRIGSDVSFTGLSEDVEPLILLNMVRVVEVAEAIMLPLRAAVGIEGKRRDWLSLLGKDTAGLHITAYAMESFTNRVLLRQGTHYNRAAMLHFGKGLQLLRERLEGDDDDRKVSDATIGVVLKLVDAAHFNGDFLAARHHMKGVRKMVDVRGGLRTFRDTRITDMAVKCDLAISVLNGVQPLFFRQPSEPVPHYPEALLRTPHKGKKTLKTHLPVRHLDDDLATIWNVMRRFCLMANLAAQTRQFIRIDIISDTMNSTMHRLLNMRFPFGSTNEVVLHGLLAFTFHVFLQWKDIKSPYNHLPDRYRSCLIHANTTEAISDQLMLWLLMIGALSFFEISEEAWLREHLRQCTDKLHIRTWAGMQDVLKSMMWIAPLDDRLGETVYGSLFLR

SEQ ID NO: 31175 - DNA, 2214 bp, Muscodor strobelii
  misc_feature: SGI EST ID NO. CUFF.73779.0
  misc_feature: Variant of the nucleotide sequence at SEQ ID NO 31173
aagggacccattataaccgagcggccatgctgcatttcgggaaaggacttcagcttctgcgcgaaaggctcgagggagacgatgacgaccggaaagtttctgatgccacgattggagtcgtgttgaaacttgtcgatgctgctcatttcaacggcgatttccttgccgcaagacatcacatgaagggtgttcgcaaaatggtggatgtgagagggggactgcgtactttcagggatacccgtatcaccgatatggcagtaaactatctcggtcctcaatggggtgcagccgttattctttcgacagccctcagaacccgtgccgcactatcctgaagctttactacgaaccccccacaaaggaaagaagacgctgaaaactcacctgccggtccgacacctcgatgatgacttggccaccatctggaatgtgatgaggagattctgcttgatggcgaatcttgcagcgcagacgcgacagttcattagaattgatatcatcagcgacacgatgaattcgacgatgcaccgccttcttaatatgcggtttcctttcggctcaaccaatgaagtagtactgcatggactattggctttcacgttccacgtcttcttgcagtggaaggatatcaaatccccctacaaccatcttccagatagatacaggagctgcttgattcacgccaataccacagaagctatttctgatcaactgatgctttggcttctaatgattggagctctttcgttctttgaaatatccgaagaagcctggctaagagagcacttgcggcaatgcacagacaaactgcatatcagaacctgggcagggatgcaagatgtgctcaagtcaatgatgtggattgcgccgctagacgaccgactgggagagaccgtgtatggctccttgttcctgagataagaagactgtatgacacgcttgtaatgctgttcggtttgggtatgtagaccgttttctagtttgtattcctgtacatttaaaattttgtgtctcaatgctctgtcaaaacgcattctaactctattgctatcaggtgttatcgcgcggccctcgattctcttttttgatattccaagccggtctgtctggctcttgtaatctcgccaattcgagcaacagtctatacatgtataccgcaaagtcgacctctcgaaatgcccgcatataccactccctcccttgttcggctatttctctcgctctcgcttgtccactctctgtctcagcaagataatggatcaattcgggtacttcctctaagcccaagcttacaggtacataatggaaccaaggtataagacgctcgtcatgccactcgcggaatatcgtctgcttgaaaggaacggaagtagatgccaagagacggtggtaacggccgctaataccgtttccatctatgtcaaaaaggagtttggatttatacacttcatctttcgatacccacggtgcttgggcaaagtacgagctctgtgcccgacaaaacggagtcgtgcattgcgttatgcgcgtaaatgccacgtcgtatagtctgttgttcgagaacgacgacgtgacgcggcggatcaccccgttctcctctcggagataagagtatgttctgcgcttcagattctgtgcaaactcgacaaatcgttgtcgctgaaacgaaggccacatctcgtctttcgcgtgcccgccagttgtggagcctgtccagtatagacgattttgttttttctcccagggcacatccttcgtttcgtcatacgagaagtcggattccagatacgccgggcttgggtataagatatctcccattgttgatggggccccgacagagagtaccggaactagtccttcgatcggtcggaaagtcatggggctcatcgctagaccgtgtgtttcgttatatgatgggtttgcgcacaggtctaatgctgatgtcggatcagagataaatggtagcccgaatgtatcgactttcgtctttgcctctctatttgttgtattacgtcgacgattgcaagacctcgttagaacatcccaaatattctgtctcgaaatatcgcccacagtaatatttccagtcggacgttgcccgcgagggatcaccctgggctcatcgagatgattaacaagcaaagtaacattcggcagattcccagggagctgttcgttcatagtatccaaaaatgaagcaatattcctatcatt

SEQ ID NO: 31176 - DNA, 2538 bp, Muscodor strobelii
  misc_feature: SGI cDNA ID NO. 570730
  misc_feature: Encodes the peptide sequence at SEQ ID NO 31177
atggcccgggcaaaaaaggctcttgatgctgtcaccgtttctgcgggtctggcactggtatgctctgctttgacccagtatttgtcgacgaagcaggacgaattaccgtcggagttattgtgctggatcatattgccctttatcttcaacttcaagaagtcgcaaagcccgaatatcgactccgtttcgaaaagtctgccgcagtatgactcgacaaagtcagttgctctggctagggggacgagagtatggcaatggatagtagcactcggtataacgacatacagcgtatatagaggaggaagcgattatcttgtctcgcttccagcgctgacgccattgctcttgctagccgagagaaacatcataacggagataatcctgtatcttacggacccgagatcgtggaatcttactcgattgctagatacgagtcttggtcatgtcctgatcgcggttcttgggatagttgggttgtcgagatttggagtgttggaatttgcatggtcgattataccgctctttgcccttttcgctgtctacgctgtgctggatcatggcaatggtaggggaagagatggaggcgataatgtgaattttgaagcctcgattcatgcgctgtcgttgcgcgtcgttgttatgctggcgatcgctctagcgatagaatctgctgtattcggggtcccgataatcctcacctacacaaccttcggactcgcaatagcaaaggccatatcatggtactatatatctcaagtcgcacggaaaacctcctggctcttcgcttccctggccctagcatttggcctcctcaaaacccgcaaccctttcaccgagaaatccgatatccaagctcttatacacgtcatcgcctcgctcctcgctctcactcaaatcatcaacttccttccgaagaacagtagatctacgtcctatctctggctcctcgccgtaatatcactcgcgccatacatcgccaatctaaccgcgatacatatctcgcactcatcaccaatcctccatatcgagaatcacccaattgaaggtctaatacgagaagctcgatcaggtttcgctacgctattacgagtacaatcgaagacatacgaagcagcacatgaagaatacatcaatcgatacggaatctcgccatcgccaggtttcaaagactggtacgcattcgctcgggcgcacgattctgtaataatcgacgactttgatacaatattttctggcatatcaccattgcttcaacttagtggtcaggaaatatgggacgcgatggatgagttatacacgcagccaaataatgatttatggcggtgtaagatctctagagggatcaagacggaatgtacgcatgaatggaggactaatgataggaatattgcttcatttttggatactatgaacgaacagctccctgggaatctgccgaatgttactttgcttgttaatcatctcgatgagcccagggtgatccctcgcgggcaacgtccgactggaaatattactgtgggcgatatttcgagacagaatatttgggatgttctaacgaggtcttgcaatcgtcgacgtaatacaacaaatagagaggcaaagacgaaagtcgatacattcgggctaccatttatctctgatccgacatcagcattagacctgtgcgcaaacccatcatataacgaaacacacggtctagcgatgagccccatgactttccgaccgatcgaaggactagttccggtactctctgtcggggccccatcaacaatgggagatatcttatacccaagcccggcgtatctggaatccgacttctcgtatgacgaaacgaaggatgtgccctgggagaaaaaacaaaatcgtctatactggacaggctccacaactggcgggcacgcgaaagacgagatgtggccttcgtttcagcgacaacgatttgtcgagtttgcacagaatctgaagcgcagaacatactcttatctccgagaggagaacggggtgatccgccgcgtcacgtcgtcgttctcgaacaacagactatacgacgtggcatttacgcgcataacgcaatgcacgactccgttttgtcgggcacagagctcgtactttgcccaagcaccgtgggtatcgaaagatgaagtgtataaatccaaactcctttttgacatagatggaaacggtattagcggccgttaccaccgtctcttggcatctacttccgttcctttcaagcagacgatattccgcgagtggcatgacgagcgtcttataccttggttccattatgtacctgtaagcttgggcttagaggaagtacccgaattgatccattatcttgctgagacagagagtggacaagcgagagcgagagaaatagccgaacaagggagggagtggtatatgcgggcatttcgagaggtcgactttgcggtatacatgtatagactgttgctcgaattggcgagattacaagagccagacagaccggcttggaatatcaaaaaagagaatcgagggccgcgcgataacacctga

SEQ ID NO: 31177 - protein, 845 aa, Muscodor strobelii
  misc_feature: SGI Peptide ID NO. 570730
  misc_feature (8)..(831): NCBI GI: 119187127 Blast Desc: CIMG_03611 [Coccidioides immitis RS]
  misc_feature (8)..(831): NCBI GI: 240108313 Blast Desc: CPC735_006590 [Coccidioides posadasii C735 delta SOWgp]
  misc_feature (8)..(831): NCBI GI: 238838537 Blast Desc: conserved [Microsporum canis CBS 113480]
  misc_feature (23)..(829): NCBI GI: 164428313 Blast Desc: NCU05123 [Neurospora crassa OR74A] gi|157072098|gb|EAA27873.2| conserved [Neurospora crassa OR74A]
  misc_feature (198)..(831): NCBI GI: 256731985 Blast Desc: NECHADRAFT_69762 [Nectria haematococca mpVI 77-13-4]
  misc_feature (150)..(831): NCBI GI: 70990126 Blast Desc: conserved [Aspergillus fumigatus Af293] gi|66847544|gb|EAL87874.1| conserved [Aspergillus fumigatus Af293]
  misc_feature (150)..(831): NCBI GI: 159130394 Blast Desc: conserved [Aspergillus fumigatus A1163]
  misc_feature (199)..(829): NCBI GI: 46127577 Blast Desc: FG08166.1 [Gibberella zeae PH-1]
  misc_feature (108)..(766): NCBI GI: 28881414 Blast Desc: [Neurospora crassa]
  misc_feature (345)..(787): NCBI GI: 46104376 Blast Desc: FG00126.1 [Gibberella zeae PH-1]
MARAKKALDAVTVSAGLALVCSALTQYLSTKQDELPSELLCWIILPFIFNFKKSQSPNIDSVSKSLPQYDSTKSVALARGTRVWQWIVALGITTYSVYRGGSDYLVSLPALTPLLLLAERNIITEIILYLTDPRSWNLTRLLDTSLGHVLIAVLGIVGLSRFGVLEFAWSIIPLFALFAVYAVLDHGNGRGRDGGDNVNFEASIHALSLRVVVMLAIALAIESAVFGVPIILTYTTFGLAIAKAISWYYISQVARKTSWLFASLALAFGLLKTRNPFTEKSDIQALIHVIASLLALTQIINFLPKNSRSTSYLWLLAVISLAPYIANLTAIHISHSSPILHIENHPIEGLIREARSGFATLLRVQSKTYEAAHEEYINRYGISPSPGFKDWYAFARAHDSVIIDDFDTIFSGISPLLQLSGQEIWDAMDELYTQPNNDLWRCKISRGIKTECTHEWRTNDRNIASFLDTMNEQLPGNLPNVTLLVNHLDEPRVIPRGQRPTGNITVGDISRQNIWDVLTRSCNRRRNTTNREAKTKVDTFGLPFISDPTSALDLCANPSYNETHGLAMSPMTFRPIEGLVPVLSVGAPSTMGDILYPSPAYLESDFSYDETKDVPWEKKQNRLYWTGSTTGGHAKDEMWPSFQRQRFVEFAQNLKRRTYSYLREENGVIRRVTSSFSNNRLYDVAFTRITQCTTPFCRAQSSYFAQAPWVSKDEVYKSKLLFDIDGNGISGRYHRLLASTSVPFKQTIFREWHDERLIPWFHYVPVSLGLEEVPELIHYLAETESGQARAREIAEQGREWYMRAFREVDFAVYMYRLLLELARLQEPDRPAWNIKKENRGPRDNT

SEQ ID NO: 31178 - DNA, 1941 bp, Muscodor strobelii
  misc_feature: SGI cDNA ID NO. 570731
  misc_feature: Encodes the peptide sequence at SEQ ID NO 31179
atggcgccaactaccacgctcaagggcgacaagtttgaccggtcgctgttcgactcggttatgaaacgtcgcttcttcttcacagagtcgttcgaaatctaccgtctctctgccaactttaagggcgacaatcgtggactctacgactatggcccgccaggttgcgcgcttcagtccaacatcattgatgtatggagaaagcatttcgtcctcgaggagaacatgctcgagctagattgcacagtcattacgcccgaaactgtgctcaaaaccagtggccacgtcgacaagtttgccgattggatgtgcaaagaccccgtcaagggcgaatacttgcgcgctgaccatctggtcgagaatgtcctcgagacccgcctcaccaccggaatcaatggccataccaaagatgcgcccaagctggaccaggccactaaggatgagtacaacaatatcctcgcgcagatcgacaattacgacggcgacgcattgggcgagctgatcaagcgactcgatatccgaaaccccgacggccacaatgaggtcaaccctcctatgcccttcaatctcatgttcaaatcgaccatcggtcccagcgcggctgctccagtatacctccgtcccgagacagcgcaaggtcaattccttaacttcaagaagctcctggactacaaccaaggcgctatgccttttgcctctgccagcattggcaagtcctatagaaacgagatctccccgcgagctggtcttctgcgagtccgagaattcgtcatggccgaggttgagcactacgttgatcccgagaagaaagaccacccccgttttgacgaagttggcgacctgaagctgcctcttctcgaccgtggcacacaattggctggcaaaacaacgccacgcacgttgaccgtcgctgaggctgtgaaggataaggttatcgagaaccagacactgggctacttcattggaaggatataccagttcctcgtcaagatcggcactgatcctactaaactccgtttccgtcagcatttggacaatgagatggcccactacgcttgcgattgctgggatgccgagctgcttacaagtcacggctggatcgagtgcgttggatgcgcagaccgaagtgcctatgacttgaccgtgcactccaagtacaccggcacacccttagctgtcaaagaagcgcttgcagagccgaagacggtgaacgagttccaggcgtcgctcgagaagaagctgatgggcccgcgattcaggaaggacgccaaagcagtccaaacgagcgtagaggctttagaccagtctgctctggaagcgatggctgctaagcttgaggagaccggagcggtcactctggagacgccagccctgtcagacggcaagacatctgtagagctcactaaagagcttctcaccatctctaaagtgacacgtaccgtaaggacgcgcgagtacacgccaaatgttattgagccctcattcggtattggccgtatcctatatagtctccttgagcatgtgtactggcacagacccaatgacacggcgagagcgatcctgtcattccccttctcaatggcacccacgaaggtacttatcgtacccctgtcaaaccaggcacagttcgccccaatagtgcgaaagatctcggctcgcctccggtccattggtgtctcgaacaccaccgattcgtcaggtgcctcaattggtaagagatattcgagaaacgacgagctcggcacaccgctgggcattacagtcgattttgatacgctgagcaacggctccatcactctcagagagcgtgatactatggcgcaagtgcgggcatctgaggatgatgtcgtccaagcggtcaagaaccttatagatggcacggagacctgggaacaagtttctcaaagattaccacccttcttgggccagggcaatgatgaataa

SEQ ID NO: 31179 - protein, 646 aa, Muscodor strobelii
  misc_feature: SGI Peptide ID NO. 570731
  misc_feature (530)..(622): Pfam Id: PF03129 Pfam Desc: Anticodon binding domain
  misc_feature (57)..(363): Pfam Id: PF00587 Pfam Desc: tRNA synthetase class II core domain (G, H, P, S and T)
  misc_feature (9)..(639): NCBI GI: 238845074 Blast Desc: glycyl-tRNA synthetase 1 [Microsporum canis CBS 113480]
  misc_feature (1)..(646): NCBI GI: 145246120 Blast Desc: An12g02240 [Aspergillus niger] gi|134080022|emb|CAK41069.1| protein product [Aspergillus niger]
  misc_feature (5)..(642): NCBI GI: 116207946 Blast Desc: CHGG_03266 [Chaetomium globosum CBS 148.51] gi|88183863|gb|EAQ91331.1| CHGG_03266 [Chaetomium globosum CBS 148.51]
  misc_feature (4)..(642): NCBI GI: 85084305 Blast Desc: glycyl-tRNA synthetase 1 [Neurospora crassa OR74A] gi|28918380|gb|EAA28055.1| glycyl-tRNA synthetase 1 [Neurospora crassa OR74A]
  misc_feature (1)..(645): NCBI GI: 115438430 Blast Desc: glycyl-tRNA synthetase 1 [Aspergillus terreus NIH2624] gi|114188879|gb|EAU30579.1| glycyl-tRNA synthetase 1 [Aspergillus terreus NIH2624]
  misc_feature (5)..(642): NCBI GI: 171686512 Blast Desc: protein product [Podospora anserina] gi|170943217|emb|CAP68870.1| protein product [Podospora anserina]
  misc_feature (1)..(645): NCBI GI: 169765239 Blast Desc: [Aspergillus oryzae RIB40] gi|83764945|dbj|BAE55089.1| protein product [Aspergillus oryzae]
  misc_feature (1)..(645): NCBI GI: 238503462 Blast Desc: glycyl-tRNA synthetase [Aspergillus flavus NRRL3357] gi|220690435|gb|EED46784.1| glycyl-tRNA synthetase [Aspergillus flavus NRRL3357]
  misc_feature (5)..(645): NCBI GI: 240109256 Blast Desc: glycyl-tRNA synthetase, [Coccidioides posadasii C735 delta SOWgp]
  misc_feature (1)..(642): NCBI GI: 225562196 Blast Desc: glycyl-tRNA synthetase [Ajellomyces capsulatus G186AR]
  misc_feature (4)..(639): SWISSPROT Homolog: EC 6.1.1.14 Glycine--tRNA ligase
MAPTTTLKGDKFDRSLFDSVMKRRFFFTESFEIYRLSANFKGDNRGLYDYGPPGCALQSNIIDVWRKHFVLEENMLELDCTVITPETVLKTSGHVDKFADWMCKDPVKGEYLRADHLVENVLETRLTTGINGHTKDAPKLDQATKDEYNNILAQIDNYDGDALGELIKRLDIRNPDGHNEVNPPMPFNLMFKSTIGPSAAAPVYLRPETAQGQFLNFKKLLDYNQGAMPFASASIGKSYRNEISPRAGLLRVREFVMAEVEHYVDPEKKDHPRFDEVGDLKLPLLDRGTQLAGKTTPRTLTVAEAVKDKVIENQTLGYFIGRIYQFLVKIGTDPTKLRFRQHLDNEMAHYACDCWDAELLTSHGWIECVGCADRSAYDLTVHSKYTGTPLAVKEALAEPKTVNEFQASLEKKLMGPRFRKDAKAVQTSVEALDQSALEAMAAKLEETGAVTLETPALSDGKTSVELTKELLTISKVTRTVRTREYTPNVIEPSFGIGRILYSLLEHVYWHRPNDTARAILSFPFSMAPTKVLIVPLSNQAQFAPIVRKISARLRSIGVSNTTDSSGASIGKRYSRNDELGTPLGITVDFDTLSNGSITLRERDTMAQVRASEDDVVQAVKNLIDGTETWEQVSQRLPPFLGQGNDE

SEQ ID NO: 31180 - DNA, 2341 bp, Muscodor strobelii
  misc_feature: SGI EST ID NO. CUFF.73835.0
  misc_feature: Variant of the nucleotide sequence at SEQ ID NO 31178
ccgacactctgtaacgcctttgatttcatccccgcccgcgctgctgcaagtctcgcgcagtctccttgatccttaagtggcataattctgtattggtttcgggagtcctgcgactgtgcaattatggcgccaactaccacgctcaagggcgacaagtttgaccggtcgctgttcgactcggttatgaaacgtcgcttcttcttcacagagtcgttcgaaatctaccgtctctctgccaactttaagggcgacaatcgtggactctacgactatggcccgccaggttgcgcgcttcagtccaacatcattgatgtatggagaaagcatttcgtcctcgaggagaacatgctcgagctagattgcacagtcattacgcccgaaactgtgctcaaaaccagtggccacgtcgacaagtttgccgattggatgtgcaaagaccccgtcaagggcgaatacttgcgcgctgaccatctggtcgagaatgtcctcgagacccgcctcaccaccggaatcaatggccataccaaagatgcgcccaagctggaccaggccactaaggatgagtacaacaatatcctcgcgcagatcgacaattacgacggcgacgcattgggcgagctgatcaagcgactcgatatccgaaaccccgacggccacaatgaggtcaaccctcctatgcccttcaatctcatgttcaaatcgaccatcggtcccagcgcggctgctccagtatacctccgtcccgagacagcgcaaggtcaattccttaacttcaagaagctcctggactacaaccaaggcgctatgccttttgcctctgccagcattggcaagtcctatagaaacgagatctccccgcgagctggtcttctgcgagtccgagaattcgtcatggccgaggttgagcactacgttgatcccgagaagaaagaccacccccgttttgacgaagttggcgacctgaagctgcctcttctcgaccgtggcacacaattggctggcaaaacaacgccacgcacgttgaccgtcgctgaggctgtgaaggataaggttatcgagaaccagacactgggctacttcattggaaggatataccagttcctcgtcaagatcggcactgatcctactaaactccgtttccgtcagcatttggacaatgagatggcccactacgcttgcgattgctgggatgccgagctgcttacaagtcacggctggatcgagtgcgttggatgcgcagaccgaagtgcctatgacttgaccgtgcactccaagtacaccggcacacccttagctgtcaaagaagcgcttgcagagccgaagacggtgaacgagttccaggcgtcgctcgagaagaagctgatgggcccgcgattcaggaaggacgccaaagcagtccaaacgagcgtagaggctttagaccagtctgctctggaagcgatggctgctaagcttgaggagaccggagcggtcactctggagacgccagccctgtcagacggcaagacatctgtagagctcactaaagagcttctcaccatctctaaagtgacacgtaccgtaaggacgcgcgagtacacgccaaatgttattgagccctcattcggtattggccgtatcctatatagtctccttgagcatgtgtactggcacagacccaatgacacggcgagagcgatcctgtcattccccttctcaatggcacccacgaaggtacttatcgtacccctgtcaaaccaggcacagttcgccccaatagtgcgaaagatctcggctcgcctccggtccattggtgtctcgaacaccaccgattcgtcaggtgcctcaattggtaagagatattcgagaaacgacgagctcggcacaccgctgggcattacagtcgattttgatacgctgagcaacggctccatcactctcagagagcgtgatactatggcgcaagtgcgggcatctgaggatgatgtcgtccaagcggtcaagaaccttatagatggcacggagacctgggaacaagtttctcaaagattaccacccttcttgggccagggcaatgatgaataaaaggaacgagcgagctagatcatacagatgattaaatagagacaaaacgtgtaataatgagtaaaagttcaagaatactatgagataaatacgcgccagtgctgtactcaaagtttttgatccgttcaatctctatatttaggtatgtgacaaatagcagaagagttgcgcattggataaacttggcgcgttgagctctttgtttccatcagcctgtaccacaatgcttctatgctcttaaaatcctgacaatccggggctgtttgtatcgccttct

SEQ ID NO: 31181 - DNA, 2436 bp, Muscodor strobelii
  misc_feature: SGI cDNA ID NO. 570732
  misc_feature: Encodes the peptide sequence at SEQ ID NO 31182
atgagcgccatcagcaagattcaagcctcgctagcacaaacaacccaagagacgaccttcgctctagccaacgcgaattttgatttctctcttataaagatagcagctccagaggaatacgtaccattgagtttagccttgcctgacaagaaacgattcgaggccgagcatggctctgtccatgttacagcccgacgtctcggctcactatttcattccatcttacccgagactccgaagcttatggaggcctacgggaaacgagcatctgaaatagccgagtctctgacaaagagctctcaactacgcgaaacctggatggaactcgtttctgagagaaaacgcaaactcgaggaaaaagtgtccaatgtagaattgttcgaattaaacgatgcagtaaactctcgtttgtcgctcgatcaggatcagttggccacctgggataacagcgcacgagcttggcttgctgttgccaacgagtccgaagtcacccgaagtcgccagaaagcagtgctgtctcgtcctgaagatcaagatgctttgcttcgggcgtacatcagtgacttcaggaacgaacgttcccatcatcggacgacagcctggaaatatgcatgtctcattcttgtgcgcctcgaggccaccaacgaggccgccagcgaggctgccagcgaggtcatctttgtccctagagaccatcgaaagcttctctctctcggtattacaaagtgtgaagagttcctcggggcgcattctgatttgggatatgttatctgcccccgtcctggcacattcgtgtcccctgagtgtctcatcattgataacgatacaaatgttcgtcctgcccactggacggaaccaccacagcctatcgcgcgactgtttgccaagactaatgagattataatcggggaggcgaagaatgcttaccagctctgtcaaattgcacagacacaattctataggatcttgaagaccaatggttctgccagcaatacttttgccttccagcaagatacagtccgtgaagttttctccactaaaccgttcattgcgagcggtcttttgaagttcttctcttcatcaattttcgttaaaaacctacatttcatatcggcggtcaatcatctatatgggaaccttccaggtgcaacgatcaatccaaatatattagaaaaatgcctcccattaccttgggcatcgttcggtcgtcctccgcccaccgcaatcacggatcccattctggaacacggttattctcaacaagatgctttcaggattgtgacgctgctggagacaggttcagatccgtcgtctcatataccacgggatgtttggaatcgggctcttgcaatttctacggagaataagctctatattcacccactgattgctggtagccctatctctcatgtatcacgaaatttcagcgttcgacggatccgggggaacataggcaagcccggactgaccatcattggatggttcacggacgccagtcttctcaagctgagaaaggccgatgcaagtcgctggcagatgatcaatcataaaccatacgttggaaaactcgacgatcacttttccgacacctcactacacctccagttgaccggattttccaggccaatcgacttcggtgcaaatcatcggatatccagcggagctatcattgatgcagcggtgtcagcgttcaacgggagagagtggataggcgatatcgacgttttaagagcgctcataggaggcaatgctcctcctccgccgcgtcctctacacgtagcttccggccctcgctctgtgacgcacttgagagcttcccgccatcgctctgtggcgcactggatagcttccggccctcgctccagtcttcatatcatcaaacggcaggatgagtgcaatcagaataccttaagcgatcccttacgggagctggttgctatcgacaattgggaggagttcctgagtcctcatccctctgttcctggagtagcgacgtgccatggaaattggcaagcccgcctgactgcagcgagtctttgcctccaactcgactatgaagcatttctcttcactgatcatggatgttgggagtgtgctttcaagattatggatgagttcacatcacttcggtacagaagcaactcctcaagtagtggaagcgaggaaagttggcacggcgagcatgataccaaatcaaccatacaagcaactgagggccatagagcgggcgacagcgagaatgccatttcagacatagaggcccctgggcagcacgatcaaactcttgactcacgggactcttctggcgtggaagaaaatgatgaacatgtcaatgatgatagcgaagttgcgtcgtcatcagatgagacaagctcggtttcgtcctatgatagcagccagacgaccgacaagcggccggtgattttcattttatag

SEQ ID NO: 31182 - protein, 811 aa, Muscodor strobelii
  misc_feature: SGI Peptide ID NO. 570732
  misc_feature (3)..(169): NCBI GI: 169604668 Blast Desc: SNOG_05349 [Phaeosphaeria nodorum SN15] gi|160706620|gb|EAT87740.2| SNOG_05349 [Phaeosphaeria nodorum SN15]
  misc_feature (3)..(168): NCBI GI: 169605903 Blast Desc: SNOG_05984 [Phaeosphaeria nodorum SN15] gi|111065928|gb|EAT87048.1| SNOG_05984 [Phaeosphaeria nodorum SN15]
  misc_feature (1)..(172): NCBI GI: 46137867 Blast Desc: FG10449.1 [Gibberella zeae PH-1]
  misc_feature (3)..(172): NCBI GI: 115492241 Blast Desc: [Aspergillus terreus NIH2624] gi|114197608|gb|EAU39308.1| [Aspergillus terreus NIH2624]
  misc_feature (1)..(174): NCBI GI: 238844746 Blast Desc: conserved [Microsporum canis CBS 113480]
  misc_feature (334)..(698): NCBI GI: 256731930 Blast Desc: NECHADRAFT_80807 [Nectria haematococca mpVI 77-13-4]
  misc_feature (419)..(698): NCBI GI: 119494152 Blast Desc: NFIA_007650 [Neosartorya fischeri NRRL 181] gi|119412148|gb|EAW22089.1| conserved [Neosartorya fischeri NRRL 181]
  misc_feature (2)..(211): NCBI GI: 145609608 Blast Desc: MGG_09129 [Magnaporthe grisea 70-15] gi|145017020|gb|EDK01383.1| MGG_09129 [Magnaporthe grisea 70-15]
  misc_feature (1)..(173): NCBI GI: 261360699 Blast Desc: conserved [Verticillium albo-atrum VaMs.102]
  misc_feature (2)..(211): NCBI GI: 149210921 Blast Desc: MGCH7_ch7g933 [Magnaporthe grisea 70-15] gi|86196888|gb|EAQ71526.1| MGCH7_ch7g933 [Magnaporthe grisea 70-15]
MSAISKIQASLAQTTQETTFALANANFDFSLIKIAAPEEYVPLSLALPDKKRFEAEHGSVHVTARRLGSLFHSILPETPKLMEAYGKRASEIAESLTKSSQLRETWMELVSERKRKLEEKVSNVELFELNDAVNSRLSLDQDQLATWDNSARAWLAVANESEVTRSRQKAVLSRPEDQDALLRAYISDFRNERSHHRTTAWKYACLILVRLEATNEAASEAASEVIFVPRDHRKLLSLGITKCEEFLGAHSDLGYVICPRPGTFVSPECLIIDNDTNVRPAHWTEPPQPIARLFAKTNEIIIGEAKNAYQLCQIAQTQFYRILKTNGSASNTFAFQQDTVREVFSTKPFIASGLLKFFSSSIFVKNLHFISAVNHLYGNLPGATINPNILEKCLPLPWASFGRPPPTAITDPILEHGYSQQDAFRIVTLLETGSDPSSHIPRDVWNRALAISTENKLYIHPLIAGSPISHVSRNFSVRRIRGNIGKPGLTIIGWFTDASLLKLRKADASRWQMINHKPYVGKLDDHFSDTSLHLQLTGFSRPIDFGANHRISSGAIIDAAVSAFNGREWIGDIDVLRALIGGNAPPPPRPLHVASGPRSVTHLRASRHRSVAHWIASGPRSSLHIIKRQDECNQNTLSDPLRELVAIDNWEEFLSPHPSVPGVATCHGNWQARLTAASLCLQLDYEAFLFTDHGCWECAFKIMDEFTSLRYRSNSSSSGSEESWHGEHDTKSTIQATEGHRAGDSENAISDIEAPGQHDQTLDSRDSSGVEENDEHVNDDSEVASSSDETSSVSSYDSSQTTDKRPVIFIL

SEQ ID NO: 31183 - DNA, 924 bp, Muscodor strobelii
  misc_feature: SGI EST ID NO. CUFF.73797.0
  misc_feature: Variant of the nucleotide sequence at SEQ ID NO 31181
atatcttgctactgctaactcaacgatgtgaggttgcactgatgctacatatcgtcatccctcgtgcagtcatcaagcatagctgatacacaaaatcggacatggcaattctatccaatcctatccatgtctgctgggcgcggcaccatctccctcaggcgattctgccttgaatgcccaagtaggtcaggtctgccataaccctgcaggctccctgatcatccatattccagctatgatttcgtgaaagttgggtttttgtatcatatacctacctatggatctagttatcttgacttgaataaacctagaaaacttgcgaacgagtccggtgaacagatcatccccgatacgttcctcctattgaaatgtaatgtctgcttttcagcatgagcgccatcagcaagattcaagcctcgctagcacaaacaacccaagagacgaccttcgctctagccaacgcgaattttgatttctctcttataaagatagcagctccagaggaatacgtaccattgagtttagccttgcctgacaagaaacgattcgaggccgagcatggctctgtccatgttacagcccgacgtctcggctcactatttcattccatcttacccgagactccgaagcttatggaggcctacgggaaacgagcatctgaaatagccgagtctctgacaaagagctctcaactacgcgaaacgtatggcccttttcaagaatacgtcggcctcgatgggacctctatttgggccgccgccacttctagttcagctgctatcgcttgccatctgttggcttgcatgctagcttgttgctggcgtcctgacgaagcgacagcgatggtgagtatacaatgttttcatacggctgcgaacagtctcttcttgaaagatactaatatgcgccacagtgagtgaaact

SEQ ID NO: 31184 - DNA, 3345 bp, Muscodor strobelii
  misc_feature: SGI cDNA ID NO. 570733
  misc_feature: Encodes the peptide sequence at SEQ ID NO 31185
atgcagcggattagggagacgctcgctcgccttactcgtgccagcaaccgtgaacagcgagaggcaccaaaccaaggaccgaaactcgatcgcataggccgcacaaacagttcagccgggagttctcgagaaagagtaccctatctcacagatggtcaaggcgctttaacgatttacgacggaatcaagcgtggagatgatgggattgacatcatttttgttcatgggctgttcgggtcccgtacaaacagtttcagtaaaggcggtgtatattggttacgagatttgttagggcaagatatcccgaatgccagaatcatatcgtggggatggtcgagcgcattgcccacaaccgacaacttcgcaggaaaagcggagcttctccttgccgatatatctcgaatccgtagtgggacccggcgaccgataatttttgtcggtcatggattgggcggtttgttaataaaggaggccttggtcacggcagctttatcgagaatctacggagcgcacgccgagctggggaacgtctacccgaggaccataggatgcatattcctaggcacgcctcacgtcagatcaagcaagcgcacgttgggcgactgtgctgcagcgaccgctattctctcccctacgatgcccagcccacatctcttacgggcacttcgggatagctatcagttactagagactcagcacagcacgtttctccttgtctcaagagacataaaagttgtctgtatcagagagaaactgccaacaacaattgttgcatcggttgagacattacatgaggcaaatggcgtggagttggggaaaggcaccatgcagacgatggttccaaaggactccgcagtttacgacaactttaacgtatcgaaagacgaaataccgacaaaccatctagatatgtgcagattcaaaagccgagatgacactggctatatacggattgtacagcatattaaaaaaatgacatcaggtccatcacaagcggagatcgaggcacaggaaccccgtaatcaagacatcctcaacgcgttgcattatgatactatgatggaacgcgagtcgcgcatcgatcctgcatatggacagacttgcgaatggatattatcgcccaaagtatcgccatttaagaagttccttcattcaaatgagtctatactatggatcagtggcaaagcaggatctggaaaatccacgctcatgaaatatgcctggaaatcggatgacctgaggcaagagttgagcaaaggatgggccaatggtggcgatcttcttatggcaaggtttttcatgttcgaaggcggcagtcgtattcaaaagacttacgagggcttcctacgaagtactctttaccagattttatctacacgacgagacctcattaaggtcgccttcccaagtttcttcgactgctcttggccgcctccagtccaatttaccagcaccaccaatctcaatcaaggcttttactccttgtttgcgcatatgtcggagaagctaaggatggtcgtcttcattgatggtatcgacgaatatcgcattatggaacggaaggaccactatgaacctggagatatcgaggttcactatgataaggaagagggtgatgagtcgtggggccggagcaaatggcggacagattctcacatggagatagcgaagcttatcaacagtatggccaacaaggacgtcgtgaagttcgtagtcagctctcgcgagttgcctgtatttgatgaggcattcggcaacgttcctcgaatcaggatgcaagagcatacagagaaggcgattgcagaatacattgctggccgactggatgatgaagcgccaggtctcccagacaccttcaacctctgcaaagaattagcgaggaaaagtcaaggcgatatactctgggcgagattggctcttgatatggtgattgacggcagtctgcggacattgcggtctactctcaactcactaccaacgcgactgggaggacaggagggtctctacatgcggatgatggagaacctcaaatcagaagatcaaaatgacgcttgtcgcatcttccatctcgtgcttagagctcagcaaccaccgagtattattacactcgctctagctgatcaaggctatttggatcgataccgaaatgaactaaaggtcacgcaagactccgtgcggccgtacaatgctgagtcgttgcagcaattggcggaccaaatgcagcgtcggctcagaatatgctgtgtgggcctcctcgaggctgaatcgaagggaggaacagataccacagatgcctcgagacgcgtggtcttcaaccatcagacaaccaaggagtgggtgggccgccgagacatttggcagcgtctgcctggtatccatcctgtaagcgatattgatcttgattgctctctactgagcggttgtgtgagacacctcaaagcatttgagaaagttcagaacctcgttttaacgtggcctaatgtacgattccggcccgacgcatggcttcttgtcgcgaatgcattgcgttatgcagagagaatcgacgccgagatcaagaatctcgaacactatgctacaatcctagacgacctagacgcgaccaatcagcgagcctgggaggctgcacttaacagccataagccactagtcgaggattcggattggtatgatagaaaactccctggtttactcaggaaacattggacaggctttgagccaatggaagctggcaagtctcccaagcgcaaagacttcttagcacttgttgtccaagccaacttgatccgatatactgcgtacaagctaagccagcttgatggaaatactagacgaaagaaagcacaagagcttctgagttatgtggtcagccccaaaggagatggattcagcgcttgcgtaagcttgagcggagattacttggacttccaccatgacatgcctgactctaggctgctcgatgtactgtacgaggcgggtgcggatcccaaggatgatgagcaagtatggctcaaggctttgagagcaggacaacattacttctcaagaggcagtgcgaccatgacacacttgctggagacatttgcgagcaagaggttaatgttgaaccgagaacgatgggtggcggctatcaagtcgctgctcctacacggcgtcaacccacgcgcagaattgtcacttacaacaacaggagcgggtgacgacagtcaatcgtcgaaatccacaacaatgacagctatagactacatacgagaaacgctagagggcgaaccggagtacgcgatcgatttacttcaattagagactctgttaggacgaagaccgagcgttggactcgcgcgataa

SEQ ID NO: 31185 - protein, 1114 aa, Muscodor strobelii
  misc_feature: SGI Peptide ID NO. 570733
  misc_feature (536)..(996): NCBI GI: 39971303 Blast Desc: MGG_10672 [Magnaporthe grisea 70-15] gi|145009189|gb|EDJ93900.1| MGG_10672 [Magnaporthe grisea 70-15]
  misc_feature (90)..(766): NCBI GI: 116197903 Blast Desc: CHGG_07107 [Chaetomium globosum CBS 148.51] gi|88178386|gb|EAQ85854.1| CHGG_07107 [Chaetomium globosum CBS 148.51]
  misc_feature (336)..(1104): NCBI GI: 226293863 Blast Desc: conserved [Paracoccidioides brasiliensis Pb18]
  misc_feature (336)..(1104): NCBI GI: 225684243 Blast Desc: conserved [Paracoccidioides brasiliensis Pb03]
  misc_feature (88)..(697): NCBI GI: 116204449 Blast Desc: CHGG_10108 [Chaetomium globosum CBS 148.51] gi|88176236|gb|EAQ83704.1| CHGG_10108 [Chaetomium globosum CBS 148.51]
  misc_feature (317)..(1007): NCBI GI: 261190024 Blast Desc: conserved [Ajellomyces dermatitidis SLH14081] gi|239591250|gb|EEQ73831.1| conserved [Ajellomyces dermatitidis SLH14081]
  misc_feature (329)..(888): NCBI GI: 39979126 Blast Desc: [Neurospora crassa]
  misc_feature (325)..(936): NCBI GI: 256722300 Blast Desc: NECHADRAFT_54363 [Nectria haematococca mpVI 77-13-4]
  misc_feature (318)..(996): NCBI GI: 154293653 Blast Desc: BC1G_14084 [Botryotinia fuckeliana B05.10] gi|150845240|gb|EDN20433.1| BC1G_14084 [Botryotinia fuckeliana B05.10]
  misc_feature (344)..(789): NCBI GI: 116195412 Blast Desc: CHGG_04304 [Chaetomium globosum CBS 148.51] gi|88180217|gb|EAQ87685.1| CHGG_04304 [Chaetomium globosum CBS 148.51]
MQRIRETLARLTRASNREQREAPNQGPKLDRIGRTNSSAGSSRERVPYLTDGQGALTIYDGIKRGDDGIDIIFVHGLFGSRTNSFSKGGVYWLRDLLGQDIPNARIISWGWSSALPTTDNFAGKAELLLADISRIRSGTRRPIIFVGHGLGGLLIKEALVTAALSRIYGAHAELGNVYPRTIGCIFLGTPHVRSSKRTLGDCAAATAILSPTMPSPHLLRALRDSYQLLETQHSTFLLVSRDIKVVCIREKLPTTIVASVETLHEANGVELGKGTMQTMVPKDSAVYDNFNVSKDEIPTNHLDMCRFKSRDDTGYIRIVQHIKKMTSGPSQAEIEAQEPRNQDILNALHYDTMMERESRIDPAYGQTCEWILSPKVSPFKKFLHSNESILWISGKAGSGKSTLMKYAWKSDDLRQELSKGWANGGDLLMARFFMFEGGSRIQKTYEGFLRSTLYQILSTRRDLIKVAFPSFFDCSWPPPVQFTSTTNLNQGFYSLFAHMSEKLRMVVFIDGIDEYRIMERKDHYEPGDIEVHYDKEEGDESWGRSKWRTDSHMEIAKLINSMANKDVVKFVVSSRELPVFDEAFGNVPRIRMQEHTEKAIAEYIAGRLDDEAPGLPDTFNLCKELARKSQGDILWARLALDMVIDGSLRTLRSTLNSLPTRLGGQEGLYMRMMENLKSEDQNDACRIFHLVLRAQQPPSIITLALADQGYLDRYRNELKVTQDSVRPYNAESLQQLADQMQRRLRICCVGLLEAESKGGTDTTDASRRVVFNHQTTKEWVGRRDIWQRLPGIHPVSDIDLDCSLLSGCVRHLKAFEKVQNLVLTWPNVRFRPDAWLLVANALRYAERIDAEIKNLEHYATILDDLDATNQRAWEAALNSHKPLVEDSDWYDRKLPGLLRKHWTGFEPMEAGKSPKRKDFLALVVQANLIRYTAYKLSQLDGNTRRKKAQELLSYVVSPKGDGFSACVSLSGDYLDFHHDMPDSRLLDVLYEAGADPKDDEQVWLKALRAGQHYFSRGSATMTHLLETFASKRLMLNRERWVAAIKSLLLHGVNPRAELSLTTTGAGDDSQSSKSTTMTAIDYIRETLEGEPEYAIDLLQLETLLGRRPSVGLAR

SEQ ID NO: 31186 - DNA, 3661 bp, Muscodor strobelii
  misc_feature: SGI EST ID NO. CUFF.73865.0
  misc_feature: Variant of the nucleotide sequence at SEQ ID NO 31184
attcccaacccagaccaaatgccgaaagtgcacaacaaaagacaatcgtacctcgtttttcctttgtgtcaattctatccctcgaatcgaggaaagcaagactaccaaaaaatgcaccatgcagcggattagggagacgctcgctcgccttactcgtgccagcaaccgtgaacagcgagaggcaccaaaccaaggaccgaaactcgatcgcataggccgcacaaacagttcagccgggagttctcgagaaagagtaccctatctcacagatggtcaaggcgctttaacgatttacgacggaatcaagcgtggagatgatgggattgacatcatttttgttcatgggctgttcgggtcccgtacaaacagtttcagtaaaggcggtgtatattggttacgagatttgttagggcaagatatcccgaatgccagaatcatatcgtggggatggtcgagcgcattgcccacaaccgacaacttcgcaggaaaagcggagcttctccttgccgatatatctcgaatccgtagtgggacccggcgaccgataatttttgtcggtcatggattgggcggtttgttaataaaggaggccttggtcacggcagctttatcgagaatctacggagcgcacgccgagctggggaacgtctacccgaggaccataggatgcatattcctaggcacgcctcacgtcagatcaagcaagcgcacgttgggcgactgtgctgcagcgaccgctattctctcccctacgatgcccagcccacatctcttacgggcacttcgggatagctatcagttactagagactcagcacagcacgtttctccttgtctcaagagacataaaagttgtctgtatcagagagaaactgccaacaacaattgttgcatcggttgagacattacatgaggcaaatggcgtggagttggggaaaggcaccatgcagacgatggttccaaaggactccgcagtttacgacaactttaacgtatcgaaagacgaaataccgacaaaccatctagatatgtgcagattcaaaagccgagatgacactggctatatacggattgtacagcatattaaaaaaatgacatcaggtccatcacaagcggagatcgaggcacaggaaccccgtaatcaagacatcctcaacgcgttgcattatgatactatgatggaacgcgagtcgcgcatcgatcctgcatatggacagacttgcgaatggatattatcgcccaaagtatcgccatttaagaagttccttcattcaaatgagtctatactatggatcagtggcaaagcaggatctggaaaatccacgctcatgaaatatgcctggaaatcggatgacctgaggcaagagttgagcaaaggatgggccaatggtggcgatcttcttatggcaaggtttttcatgttcgaaggcggcagtcgtattcaaaagacttacgagggcttcctacgaagtactctttaccagattttatctacacgacgagacctcattaaggtcgccttcccaagtttcttcgactgctcttggccgcctccagtccaatttaccagcaccaccaatctcaatcaaggcttttactccttgtttgcgcatatgtcggagaagctaaggatggtcgtcttcattgatggtatcgacgaatatcgcattatggaacggaaggaccactatgaacctggagatatcgaggttcactatgataaggaagagggtgatgagtcgtggggccggagcaaatggcggacagattctcacatggagatagcgaagcttatcaacagtatggccaacaaggacgtcgtgaagttcgtagtcagctctcgcgagttgcctgtatttgatgaggcattcggcaacgttcctcgaatcaggatgcaagagcatacagagaaggcgattgcagaatacattgctggccgactggatgatgaagcgccaggtctcccagacaccttcaacctctgcaaagaattagcgaggaaaagtcaaggcgatatactctgggcgagattggctcttgatatggtgattgacggcagtctgcggacattgcggtctactctcaactcactaccaacgcgactgggaggacaggagggtctctacatgcggatgatggagaacctcaaatcagaagatcaaaatgacgcttgtcgcatcttccatctcgtgcttagagctcagcaaccaccgagtattattacactcgctctagctgatcaaggctatttggatcgataccgaaatgaactaaaggtcacgcaagactccgtgcggccgtacaatgctgagtcgttgcagcaattggcggaccaaatgcagcgtcggctcagaatatgctgtgtgggcctcctcgaggctgaatcgaagggaggaacagataccacagatgcctcgagacgcgtggtcttcaaccatcagacaaccaaggagtgggtgggccgccgagacatttggcagcgtctgcctggtatccatcctgtaagcgatattgatcttgattgctctctactgagcggttgtgtgagacacctcaaagcatttgagaaagttcagaacctcgttttaacgtggcctaatgtacgattccggcccgacgcatggcttcttgtcgcgaatgcattgcgttatgcagagagaatcgacgccgagatcaagaatctcgaacactatgctacaatcctagacgacctagacgcgaccaatcagcgagcctgggaggctgcacttaacagccataagccactagtcgaggattcggattggtatgatagaaaactccctggtttactcaggaaacattggacaggctttgagccaatggaagctggcaagtctcccaagcgcaaagacttcttagcacttgttgtccaagccaacttgatccgatatactgcgtacaagctaagccagcttgatggaaatactagacgaaagaaagcacaagagcttctgagttatgtggtcagccccaaaggagatggattcagcgcttgcgtaagcttgagcggagattacttggacttccaccatgacatgcctgactctaggctgctcgatgtactgtacgaggcgggtgcggatcccaaggatgatgagcaagtatggctcaaggctttgagagcaggacaacattacttctcaagaggcagtgcgaccatgacacacttgctggagacatttgcgagcaagaggttaatgttgaaccgagaacgatgggtggcggctatcaagtcgctgctcctacacggcgtcaacccacgcgcagaattgtcacttacaacaacaggagcgggtgacgacagtcaatcgtcgaaatccacaacaatgacagctatagactacatacgagaaacgctagagggcgaaccggagtacgcgatcgatttacttcaattagagactctgttaggacgaagaccgagcgttggactcgcgcgataatgcgttcgctacggtggatagagacgcaggttcttatatatatccattcaatatttcattggcgcttctttatcatccaaaagggcgattggagcatggaaattcagggctttggttgcataaggaacatatatactcccaagataatacgaatcatggatatgaacgtaagatgcatctttctaccttgggaccgtg

SEQ ID NO: 31187 - DNA, 1215 bp, Muscodor strobelii
  misc_feature: SGI cDNA ID NO. 570734
  misc_feature: Elevated expression when VOC is produced
  misc_feature: Encodes the peptide sequence at SEQ ID NO 31188
atgaagacaacagtatttcatatagctcagcgcattcgcagcgcgctgaaaaactcattcttacataataatgtcttcgcctctgatggttcctcgaggtctacggcatcgacggacagaacatgtgtcgcctcaagtcttcacggtgaggcattggccttagccatcaaaatcgatggcaaaacattacatctctcagacttaacaaaggtgttctcctcctggcctacagccacgaacaaatataccgaggagctcgaggctttggtcgattcattattagaaagaatcataacgaatgaacgaaagttgaaggcactgaagcaggcagactttgcacggttgatgtctttatggtatcctcatgcagagtgggaggaactgaaagtagccaccgcttactcggtctggatcttcgtgtgggatgacgaaatcgatgctggcgatacagatgcctcgacaagcgaggaacttgcacagaactattataggcaatccttagcttacatccatcaaatgctcggcctggcgggtgagggacaggacgacatcgaaccaccgcacgtgaatatggccctctttgaagatgttggaaagggcatcagagcggctacggatattcaacaacgacagagattctttggcgaacttgagaatttcatgttacaagttggaatggagcatagccacaggatggccggcagcataccgacattgcaggaatacatggacatacgttcaggctctgtcggctgtgccccacagatcgcaatgactgactttatgctcaaaatccgactacctgagtctgtgatggaatgcgcagcaatgaaagcgctatggagagagacgatctatatatgtctcatcctcaacgatgtttactcggtccagaaggaaattgtccaaggatctctcttgaatattgtgccggtcatgttccagcacatgaaggccgaatttcaaaaggacatgtccatggtgtctgaggatctagatgccgaattgaaggcttccatggaaagattcgaagagtccgtgaacgaactcagtcagatatcgccaaacgaccctgtgctgcacggtaatatccttgaatttgtaaaatggtgtcgctatttcatcacaggggtgttatattggagtctagagtcacgtcggtatggtatgtctaagtgtatcaacccagatgggacactgagcatcgtcttatga

SEQ ID NO: 31188 - protein, 404 aa, Muscodor strobelii
  misc_feature: SGI Peptide ID NO. 570734
  misc_feature (81)..(333): Pfam Id: PF03936 Pfam Desc: Terpene synthase family, metal binding domain
  misc_feature (231)..(333): Pfam Id: PF03936 Pfam Desc: Terpene synthase family, metal binding domain
  misc_feature (54)..(404): NCBI GI: 145613455 Blast Desc: MGG_01628 [Magnaporthe grisea 70-15] gi|145020524|gb|EDK04653.1| MGG_01628 [Magnaporthe grisea 70-15]
  misc_feature (45)..(404): NCBI GI: 261357544 Blast Desc: conserved [Verticillium albo-atrum VaMs.102]
  misc_feature (45)..(382): NCBI GI: 46107136 Blast Desc: FG00451.1 [Gibberella zeae PH-1]
  misc_feature (58)..(392): NCBI GI: 110629309 Blast Desc: cyclase [Hypocrea virens]
  misc_feature (53)..(404): NCBI GI: 256735271 Blast Desc: NECHADRAFT_74943 [Nectria haematococca mpVI 77-13-4]
  misc_feature (41)..(382): NCBI GI: 121712513 Blast Desc: conserved [Aspergillus clavatus NRRL 1] gi|119402020|gb|EAW12442.1| conserved [Aspergillus clavatus NRRL 1]
  misc_feature (57)..(284): NCBI GI: 169775815 Blast Desc: [Aspergillus oryzae RIB40] gi|238502467|ref|XP_002382467.1| conserved [Aspergillus flavus NRRL3357] gi|83771109|dbj|BAE61241.1| protein product oryzae]
  misc_feature (51)..(382): NCBI GI: 145601642 Blast Desc: MGG_10516 [Magnaporthe grisea 70-15] gi|145010135|gb|EDJ94791.1| [Magnaporthe grisea 70-15]
  misc_feature (57)..(404): NCBI GI: 145247728 Blast Desc: An12g10670 [Aspergillus niger] gi|134080856|emb|CAK41414.1| protein product [Aspergillus niger]
  misc_feature (54)..(404): NCBI GI: 116202291 Blast Desc: CHGG_09030 [Chaetomium globosum CBS 148.51] gi|88177548|gb|EAQ85016.1| CHGG_09030 [Chaetomium globosum CBS 148.51]
  misc_feature (101)..(388): SWISSPROT Homolog: EC 4.2.3.7 Pentalenene synthase
  misc_feature: Useful for introducing or modulating the production of volatile compounds
MKTTVFHIAQRIRSALKNSFLHNNVFASDGSSRSTASTDRTCVASSLHGEALALAIKIDGKTLHLSDLTKVFSSWPTATNKYTEELEALVDSLLERIITNERKLKALKQADFARLMSLWYPHAEWEELKVATAYSVWIFVWDDEIDAGDTDASTSEELAQNYYRQSLAYIHQMLGLAGEGQDDIEPPHVNMALFEDVGKGIRAATDIQQRQRFFGELENFMLQVGMEHSHRMAGSIPTLQEYMDIRSGSVGCAPQIAMTDFMLKIRLPESVMECAAMKALWRETIYICLILNDVYSVQKEIVQGSLLNIVPVMFQHMKAEFQKDMSMVSEDLDAELKASMERFEESVNELSQISPNDPVLHGNILEFVKWCRYFITGVLYWSLESRRYGMSKCINPDGTLSIVL

SEQ ID NO: 31189 - DNA, 1838 bp, Muscodor strobelii
  misc_feature: SGI EST ID NO. CUFF.73915.1
  misc_feature: Variant of the nucleotide sequence at SEQ ID NO 31187
gttccaagccagtggcgtccctaagtctgtgcaatgcctctggccgggtattctcgaagagtgtgtatgcacgtggtattattcgcgaagcaaaccagttcgcccagattctcagatggccgctcattatcttattattagaccccccacttcgtgatttcctttgacgtcttaacaatctatcgatatcacctcaagtgtcgtctgagctttctcttagctaccttacaatagctgccggcggagatccttgattcgatcacactcatacaactacttgaacaacccaaaacgctcttggctgtcaagtttttcagttccgctcagttatcatatatggaacactgaaaatctcagacaggaattttcgtacccacctcccactgggattgtgcatctacgctttgactgtctccagttgaacttagtcattcccgttactttaagccttcacgcgaaaatgaagacaacagtatttcatatagctcagcgcattcgcagcgcgctgaaaaactcattcttacataataatgtcttcgcctctgatggttcctcgaggtctacggcatcgacggacagaacatgtgtcgcctcaagtcttcacggtgaggcattggccttagccatcaaaatcgatggcaaaacattacatctctcagacttaacaaaggtgttctcctcctggcctacagccacgaacaaatataccgaggagctcgaggctttggtcgattcattattagaaagaatcataacgaatgaacgaaagttgaaggcactgaagcaggcagactttgcacggttgatgtctttatggtatcctcatgcagagtgggaggaactgaaagtagccaccgcttactcggtctggatcttcgtgtgggatgacgaaatcgatgctggcgatacagatgcctcgacaagcgaggaacttgcacagaactattataggcaatccttagcttacatccatcaaatgctcggcctggcgggtgagggacaggacgacatcgaaccaccgcacgtgaatatggccctctttgaagatgttggaaagggcatcagagcggctacggatattcaacaacgacagagattctttggcgaacttgagaatttcatgttacaagttggaatggagcatagccacaggatggccggcagcataccgacattgcaggaatacatggacatacgttcaggctctgtcggctgtgccccacagatcgcaatgactgactttatgctcaaaatccgactacctgagtctgtgatggaatgcgcagcaatgaaagcgctatggagagagacgatctatatatgtctcatcctcaacgatgtttactcggtccagaaggaaattgtccaaggatctctcttgaatattgtgccggtcatgttccagcacatgaaggccgaatttcaaaaggacatgtccatggtgtctgaggatctagatgccgaattgaaggcttccatggaaagattcgaagagtccgtgaacgaactcagtcagatatcgccaaacgaccctgtgctgcacggtaatatccttgaatttgtaaaatggtgtcgctatttcatcacaggggtgttatattggagtctagagtcacgtcggtatggtatgtctaagtgtatcaacccagatgggacactgagcatcgtcttatgaggaatatcaacacatgctcctccaggatgagtctgagcaacagaaacatgcgtggtgtctgtcacaagttacaggttcactcgcaatacgtaatcctaattcatttgtacgaccgtcttgatatacccctcatgatgtaataaatatatttccaaatccatca

SEQ ID NO: 31190 - DNA, 2229 bp, Muscodor strobelii
  misc_feature: SGI cDNA ID NO. 570735
  misc_feature: Encodes the peptide sequence at SEQ ID NO 31191
atggcttctgagtccaagtgtcccgtcacgggcaacgttgctggtggcggtaccagaaaccgcgattggtggcccgagcagctcaggctcaacatcctgcgccagcataacaagtcttctgaccctctcggcgaggacttcgactatgccgctgccttcaagtctcttgattacgccgctctcaagaaggatctgaacgaccttatgaccgactcccaggacttctggccagccgacttcggccactacggcggactcttcatccgaatggcctggcacagtgccggtacctaccgtgtcttcgatggtcgtggaggtggtggtcagggccagcaacgattcgctcccttgaacagttggcccgataacgtcagtttggacaaggctcgccgcctactttggcccatcaagcagaaatatggcaacaagatctcctgggctgacttgctccttctgaccggtaacgtcgccctcgagtccatgggcttcaagacctttggtttcgctggtggccgcaaagacacatgggaggcggacgagtcagcctactggggtggtgagaccacctggttgggcaacgacgttcgttattctcagggtcacgctggtcttgacaagcacggtgttgtcgacgccgacgaagatccaaagcccaaggcacactccaacgacctcgaggcgccgctggctgctgcccacatgggtctgatctacgtcaaccccgagggacctgatggaaatcccgatcccattgcggccgcccatgatatccgtgacacatttggtcgtatggcgatgaacgacgaggagactgtcgctctcattgctggtgggcacacttttggaaagactcatggtgccgccccggcaagcaatgttggagctgagccagaagcagcatcgatggaatcacaaggtcttggctggcaaaacagccacgcttcaggcaaaggaccagacacgattaccagtggcctcgaggttatctggaccaagactcctaccaagtggagcaatcagtacttcgagtatctctttgcctacgaatgggagcacgacaagagtcctgccggagcaaaccagtgggttgccaagaatgccgatgccatcattcctgatgcctatgattcaagcaagaagcacaagccgaagatgctgacgacagacttgtcgctccgcttcgaccccgagtacgagaagatctctcgtcgcttcctcgagaatccagaccaattcgccgacgcgtttgcccgtgcttggttcaaactgctgcaccgtgatcttggcccgtctgttctctacattggacccgaggtccctaaggaggagctgatctggcaagaccctatccctgctgtcaaccacgatctcgttggtgatcaagatattgctgagctcaagaaagccattctttcctctggtttgagcacatctcagctcatttcagctgcctttgcttctgcttctactttccgtggtagtgacaagcgtggtggcgccaacggtgcccgtattcgtctctccccaatgaaagattggaagatcaacagccagttcggactggacaaggttctctcagctctagagaatatccagggcaaattcaacaagaaggtgtccatcgccgatctcatcgtgcttgctggtgtggctggagtggagaaggctgcacaagatgctggccacagcgtctcggtgccattcaagcctggccgcatggatgcgacgaaagaacaaaccgacgccaagtctatcgcccacctagagccttatgccgatggtttccgaaactacggcaagggcacatctcgtgtcaagactgaggctctcctcgtagacaaggctcaacttctgactctatccgctcctgagatgactgtgctgcttggaggtctgcgtgctcttaacaccaactacgatggatcaagcaccggtgtcttgactaagcgccccggacagttgacaaacgacttcttcgttaacctcttggacaccaacacaacctggaaagcaactggctctgacggcgagctgtttgagggtagtgaccgcaagactggtgagaagaagtggacggcttcgcgagtcgatcttgttttcggctctcaagccgagctacgagccatctccgaggtttacggcagctccgatggaggtgccaagttcgtgaaggactttgtggcggtttgggacaaggtgatgaatcttgatagattcgatctgcgatga

SEQ ID NO: 31191 - protein, 742 aa, Muscodor strobelii
  misc_feature: SGI Peptide ID NO. 570735
  misc_feature (413)..(742): Pfam Id: PF00141 Pfam Desc: Peroxidase
  misc_feature (61)..(408): Pfam Id: PF00141 Pfam Desc: Peroxidase
  misc_feature (1)..(742): NCBI GI: 242760748 Blast Desc: bifunctional catalase-peroxidase Cat2 [Talaromyces stipitatus ATCC 10500] gi|218723248|gb|EED22665.1| bifunctional catalase-peroxidase Cat2 [Talaromyces stipitatus ATCC 10500]
  misc_feature (3)..(742): NCBI GI: 119483800 Blast Desc: bifunctional catalase-peroxidase Cat2 [Neosartorya fischeri NRRL 181] gi|215275096|sp|A1DAL6.1|KATG_NEOFI RecName: Full=Catalase-peroxidase; Short=CP; AltName: bifunctional Cat2
  misc_feature (3)..(742): NCBI GI: 70983023 Blast Desc: bifunctional catalase-peroxidase Cat2 [Aspergillus fumigatus Af293] gi|74629205|sp|Q7Z7W6.1|KATG_ASPFU RecName: Full=Catalase-peroxidase; Short=CP; AltName: AltName: RecName:
  misc_feature (3)..(742): NCBI GI: 121715033 Blast Desc: bifunctional catalase-peroxidase Cat2 [Aspergillus clavatus NRRL 1] gi|215275380|sp|A1C8R3.1|KATG_ASPCL RecName: Full=Catalase-peroxidase; Short=CP; AltName: bifunctional Cat2 1]
  misc_feature (6)..(741): NCBI GI: 116191113 Blast Desc: CHGG_05274 [Chaetomium globosum CBS 148.51] gi|121787226|sp|Q2H7U1.1|KATG_CHAGB RecName: Full=Catalase-peroxidase; Short=CP; AltName: CHGG_05274 globosum
  misc_feature (3)..(742): NCBI GI: 145228627 Blast Desc: An01g01830 [Aspergillus niger] gi|215275382|sp|A2Q7T1.1|KATG_ASPNC RecName: Full=Catalase-peroxidase; Short=CP; AltName: protein product
  misc_feature (3)..(742): NCBI GI: 74629993 Blast Desc: KATG_PENMA RecName: Full=Catalase-peroxidase; Short=CP; AltName: Full=Peroxidase/catalase gi|22653436|gb|AAN04057.1| catalase/peroxidase [Penicillium
  misc_feature (6)..(741): NCBI GI: 171683710 Blast Desc: protein product [Podospora anserina] gi|215275103|sp|B2ASU5.1|KATG_PODAN RecName: Full=Catalase-peroxidase; Short=CP; AltName: protein product
  misc_feature (3)..(742): NCBI GI: 212539203 Blast Desc: bifunctional catalase-peroxidase Cat2 [Penicillium marneffei ATCC 18224] gi|210069499|gb|EEA23590.1| bifunctional catalase-peroxidase Cat2 [Penicillium marneffei ATCC 18224]
  misc_feature (4)..(742): NCBI GI: 115433813 Blast Desc: peroxidase/catalase 2 [Aspergillus terreus NIH2624] gi|121734972|sp|Q0CD12.1|KATG_ASPTN RecName: Full=Catalase-peroxidase; Short=CP; AltName: peroxidase/catalase
  misc_feature (6)..(741): SWISSPROT Homolog: EC 1.11.1.6 Catalase
  misc_feature (6)..(741): SWISSPROT Homolog: EC 1.11.1.7 Peroxidase
MASESKCPVTGNVAGGGTRNRDWWPEQLRLNILRQHNKSSDPLGEDFDYAAAFKSLDYAALKKDLNDLMTDSQDFWPADFGHYGGLFIRMAWHSAGTYRVFDGRGGGGQGQQRFAPLNSWPDNVSLDKARRLLWPIKQKYGNKISWADLLLLTGNVALESMGFKTFGFAGGRKDTWEADESAYWGGETTWLGNDVRYSQGHAGLDKHGVVDADEDPKPKAHSNDLEAPLAAAHMGLIYVNPEGPDGNPDPIAAAHDIRDTFGRMAMNDEETVALIAGGHTFGKTHGAAPASNVGAEPEAASMESQGLGWQNSHASGKGPDTITSGLEVIWTKTPTKWSNQYFEYLFAYEWEHDKSPAGANQWVAKNADAIIPDAYDSSKKHKPKMLTTDLSLRFDPEYEKISRRFLENPDQFADAFARAWFKLLHRDLGPSVLYIGPEVPKEELIWQDPIPAVNHDLVGDQDIAELKKAILSSGLSTSQLISAAFASASTFRGSDKRGGANGARIRLSPMKDWKINSQFGLDKVLSALENIQGKFNKKVSIADLIVLAGVAGVEKAAQDAGHSVSVPFKPGRMDATKEQTDAKSIAHLEPYADGFRNYGKGTSRVKTEALLVDKAQLLTLSAPEMTVLLGGLRALNTNYDGSSTGVLTKRPGQLTNDFFVNLLDTNTTWKATGSDGELFEGSDRKTGEKKWTASRVDLVFGSQAELRAISEVYGSSDGGAKFVKDFVAVWDKVMNLDRFDLR

SEQ ID NO: 31192 - DNA, 2822 bp, Muscodor strobelii
  misc_feature: SGI EST ID NO. CUFF.74073.0
  misc_feature: Variant of the nucleotide sequence at SEQ ID NO 31190
tattgacaagatctgcctcgtaaatatatagggcgcacaggtacctagagctatacagtattcttcacccgcctgcatgccgcgatactgtgatgagacgtctaatacaaatgagatgttacgcaataacccccaatcgtctcggcgcgttgctgtcgtcctgtgatataaagtgcggggttctcggctgctgacgactcgtatcacaccactatacttttcctttctcttcttccctttcctgtctgtctgcgagcaagtaatgagatcgtgttctcgttccttactcagcttcaagtcgacatcgctgccacgaactccgcgactcttcgcgctcaataacaccacccacttccacaccacacggatcacaatggcttctgagtccaagtgtcccgtcacgggcaacgttgctggtggcggtaccagaaaccgcgattggtggcccgagcagctcaggctcaacatcctgcgccagcataacaagtcttctgaccctctcggcgaggacttcgactatgccgctgccttcaagtctcttgattacgccgctctcaagaaggatctgaacgaccttatgaccgactcccaggacttctggccagccgacttcggccactacggcggactcttcatccgaatggcctggcacagtgccggtacctaccgtgtcttcgatggtcgtggaggtggtggtcagggccagcaacgattcgctcccttgaacagttggcccgataacgtcagtttggacaaggctcgccgcctactttggcccatcaagcagaaatatggcaacaagatctcctgggctgacttgctccttctgaccggtaacgtcgccctcgagtccatgggcttcaagacctttggtttcgctggtggccgcaaagacacatgggaggcggacgagtcagcctactggggtggtgagaccacctggttgggcaacgacgttcgttattctcagggtcacgctggtcttgacaagcacggtgttgtcgacgccgacgaagatccaaagcccaaggcacactccaacgacctcgaggcgccgctggctgctgcccacatgggtctgatctacgtcaaccccgagggacctgatggaaatcccgatcccattgcggccgcccatgatatccgtgacacatttggtcgtatggcgatgaacgacgaggagactgtcgctctcattgctggtgggcacacttttggaaagactcatggtgccgccccggcaagcaatgttggagctgagccagaagcagcatcgatggaatcacaaggtcttggctggcaaaacagccacgcttcaggcaaaggaccagacacgattaccagtggcctcgaggttatctggaccaagactcctaccaagtggagcaatcagtacttcgagtatctctttgcctacgaatgggagcacgacaagagtcctgccggagcaaaccagtgggttgccaagaatgccgatgccatcattcctgatgcctatgattcaagcaagaagcacaagccgaagatgctgacgacagacttgtcgctccgcttcgaccccgagtacgagaagatctctcgtcgcttcctcgagaatccagaccaattcgccgacgcgtttgcccgtgcttggttcaaactgctgcaccgtgatcttggcccgtctgttctctacattggacccgaggtccctaaggaggagctgatctggcaagaccctatccctgctgtcaaccacgatctcgttggtgatcaagatattgctgagctcaagaaagccattctttcctctggtttgagcacatctcagctcatttcagctgcctttgcttctgcttctactttccgtggtagtgacaagcgtggtggcgccaacggtgcccgtattcgtctctccccaatgaaagattggaagatcaacagccagttcggactggacaaggttctctcagctctagagaatatccagggcaaattcaacaagaaggtgtccatcgccgatctcatcgtgcttgctggtgtggctggagtggagaaggctgcacaagatgctggccacagcgtctcggtgccattcaagcctggccgcatggatgcgacgaaagaacaaaccgacgccaagtctatcgcccacctagagccttatgccgatggtttccgaaactacggcaagggcacatctcgtgtcaagactgaggctctcctcgtagacaaggctcaacttctgactctatccgctcctgagatgactgtgctgcttggaggtctgcgtgctcttaacaccaactacgatggatcaagcaccggtgtcttgactaagcgccccggacagttgacaaacgacttcttcgttaacctcttggacaccaacacaacctggaaagcaactggctctgacggcgagctgtttgagggtagtgaccgcaagactggtgagaagaagtggacggcttcgcgagtcgatcttgttttcggctctcaagccgagctacgagccatctccgaggtttacggcagctccgatggaggtgccaagttcgtgaaggactttgtggcggtttgggacaaggtgatgaatcttgatagattcgatctgcgatgactgaccgatgactcgggaagtgacactggttcggaagttagggcaaggctttagttgaagcggtacagactgtagatttttacgataaaccgctataacttcttagaagcaaaatctaatgaaaaaaagtcaaatattttattcgtctatgtaccgacccaataagggtctttgcccattagcatgtgagatagtcacgtaggactaatgtatacaagcc

SEQ ID NO: 31193 - DNA, 1632 bp, Muscodor strobelii
  misc_feature: SGI cDNA ID NO. 570736
  misc_feature: Elevated expression when VOC is produced
  misc_feature: Encodes the peptide sequence at SEQ ID NO 31194
atgacggctgagctgaagagtgagcttcctaccgcaggcctcaatcttgttcacagtcacgcccatgaagaagatgttgcagggacagtcaatgttagagtagtcgagggcgacgatacggcatacggccaagcactgttccccgttccagctgaagacccgaatgacccgctccaatggtcgcgattcaagaagttgatgattctgataattatttgtctttactcattcctgggaaactccgcattattaggtgttggaccatacatcaccctttggtcggagatcttcgatgtctcacaggcggaagcttcgacgctcatcacatatccgaatctcgcttatggtctttgttcgtggatcttagtgccattgtaccttaagtttggtaggagaccagttatgcttgggtcgatattggctttcattgcaggtcttgctggttgcgcacgtgctactacgttcggtggtttgatggcagcccgaatcgtgcattgcctcggagccgggatatgtgaagccttacctgtacagcttgtgaacgatatattctttctccatgaacgcggaaagcagcttgggtattatacattcggtatatgcttcgcggctctcgcgactctgcccgcggcgtatatgctacctacacaatactcatggcgattattcttctacgtgttgttagctttcggctcagcattgtttattctagcattcttcttcgtggaagagacttcgtatgataggaaaagcgtcacatattcaaccgccgagtcgcgaaacgggacgactgtgagctccagcgaagacaagtcggagactgttgctgagcatacttctactgtaccaactcggaagacctatctcgagacgctgaagccgactggacgcattgaccgaactgttccgttcttcacattgttgtggagatcgttaacgtacttcttggtcccccaggttctctgggtcatcacgtctttcggaatcatcatcggattaggggccctagctttcaattttgtatttcctatcaggatcaccgcaccgccgtacaattggccggcctcaagctccggactccacgctgccggatcagtgatagggttcttactcggcgtcccatttgcagggacttcggatcgactcgctgcatatctcacgcgccgaaataatggcatccgagaagccgaaatgagactcggcgtaatgatacctgcggcgattatcggtcctgccggtcttgtgctctacggttttacagcagagctgaatcttcattggataggcttcttctttggctctggtatggtctcttggtgtggctatttcttctatagcttcacacttgcatatgctgtcgactcctacaacagcaatacttctgagatgcttatagcaatgaatgttggtaagcagcttgtgagttttggtctggggttcaaggtccttgactggattctggcaagtggctatgccaaagtcattgctggcgcatttggcggagtattacttgctaataacttgtttctttttgtgttcatgatttggggaaagagaatcagacgatttatgtcggaatcttgggtggccaagctacatgggcgtggaaatatccacgaaaggtcagattga

SEQ ID NO: 31194 - protein, 543 aa, Muscodor strobelii
  misc_feature: SGI Peptide ID NO. 570736
  misc_feature (69)..(480): Pfam Id: PF07690 Pfam Desc: Major Facilitator Superfamily
  misc_feature (15)..(535): NCBI GI: 242823518 Blast Desc: conserved [Talaromyces stipitatus ATCC 10500] gi|218713001|gb|EED12426.1| conserved [Talaromyces stipitatus ATCC 10500]
  misc_feature (15)..(535): NCBI GI: 212546409 Blast Desc: MFS transporter, [Penicillium marneffei ATCC 18224] gi|210064878|gb|EEA18973.1| MFS transporter, [Penicillium marneffei ATCC 18224]
  misc_feature (19)..(540): NCBI GI: 115384748 Blast Desc: conserved [Aspergillus terreus NIH2624] gi|114196613|gb|EAU38313.1| conserved [Aspergillus terreus NIH2624]
  misc_feature (18)..(535): NCBI GI: 171678189 Blast Desc: protein product [Podospora anserina] gi|170937164|emb|CAP61821.1| protein product [Podospora anserina]
  misc_feature (18)..(535): NCBI GI: 259486012 Blast Desc: TPA: MFS transporter, (AFU_orthologue; AFUA_4G01480) [Aspergillus nidulans FGSC A4]
  misc_feature (45)..(540): NCBI GI: 145606905 Blast Desc: MGG_03836 [Magnaporthe grisea 70-15] gi|145014524|gb|EDJ99092.1| MGG_03836 [Magnaporthe grisea 70-15]
  misc_feature (59)..(540): NCBI GI: 171680558 Blast Desc: protein product [Podospora anserina] gi|170939906|emb|CAP65132.1| protein product [Podospora anserina]
  misc_feature (18)..(490): NCBI GI: 67525167 Blast Desc: AN3041.2 [Aspergillus nidulans FGSC A4] gi|40744436|gb|EAA63612.1| AN3041.2 [Aspergillus nidulans FGSC A4]
  misc_feature (13)..(540): NCBI GI: 116178924 Blast Desc: CHGG_00090 [Chaetomium globosum CBS 148.51] gi|88184387|gb|EAQ91855.1| CHGG_00090 [Chaetomium globosum CBS 148.51]
  misc_feature (36)..(533): NCBI GI: 256724716 Blast Desc: NECHADRAFT_48131 [Nectria haematococca mpVI 77-13-4]
  misc_feature: Useful for introducing or modulating the production of volatile compounds
MTAELKSELPTAGLNLVHSHAHEEDVAGTVNVRVVEGDDTAYGQALFPVPAEDPNDPLQWSRFKKLMILIIICLYSFLGNSALLGVGPYITLWSEIFDVSQAEASTLITYPNLAYGLCSWILVPLYLKFGRRPVMLGSILAFIAGLAGCARATTFGGLMAARIVHCLGAGICEALPVQLVNDIFFLHERGKQLGYYTFGICFAALATLPAAYMLPTQYSWRLFFYVLLAFGSALFILAFFFVEETSYDRKSVTYSTAESRNGTTVSSSEDKSETVAEHTSTVPTRKTYLETLKPTGRIDRTVPFFTLLWRSLTYFLVPQVLWVITSFGIIIGLGALAFNFVFPIRITAPPYNWPASSSGLHAAGSVIGFLLGVPFAGTSDRLAAYLTRRNNGIREAEMRLGVMIPAAIIGPAGLVLYGFTAELNLHWIGFFFGSGMVSWCGYFFYSFTLAYAVDSYNSNTSEMLIAMNVGKQLVSFGLGFKVLDWILASGYAKVIAGAFGGVLLANNLFLFVFMIWGKRIRRFMSESWVAKLHGRGNIHERSD

SEQ ID NO: 31195 - DNA, 458 bp, Muscodor strobelii
  misc_feature: SGI EST ID NO. CUFF.74081.0
  misc_feature: Variant of the nucleotide sequence at SEQ ID NO 31193
cgacgatacggcatacggccaagcactgttccccgttccagctgaagacccgaatgacccgctccaatggtcgcgattcaagaagttgatgattctgataattatttgtctttactcattcctgggaaactccgcattattaggtgttggaccatacatcaccctttggtcggagatcttcgatgtctcacaggcggaagcttcgacgctcatcacatatccgaatctcgcttatggtctttgttcgtggatcttagtgccattgtaccttaagtttggtaggagaccagttatgcttgggtcgatattggctttcattgcaggtcttgctggttgcgcacgtgctactacgttcggtggtttgatggcagcccgaatcgtgcattgcctcggagccgggatatgtgaagccttacctgtacagcttgtgaacgatatattctttctccatgaacgcg

SEQ ID NO: 31196 - DNA, 474 bp, Muscodor strobelii
  misc_feature: SGI cDNA ID NO. 570737
  misc_feature: Encodes the peptide sequence at SEQ ID NO 31197
atgagcctcactacggagaagagcgcgaagaagcgcgtcaagctgccaactggttcatcatcatcatcatcatctcatgtccgcgcccctaagcgcaccagaaagagacttgccggaaagcgaaaagtgaaaagttgcggagcttgccgagcagctcacttgagatgtgtcgctgattgttacggcgtcccctgtgaacgctgtgcaaagaagggatgggacgattgcactttgatgcagatgccggaatcttcaactaccaaatcatctcaaccagagtccgacaactacaaaaacccggacacaatgcaagagactcaggaaccagtcattattgacatcgagccatcacagaccgaaactcatgaggactccgacagcgccgatactgtcgacctcatcgtggaaaagggtcattatttgaaacaggtggcggcagatgtaattgcatacatgtcgaagaagaacaattga

SEQ ID NO: 31197 - protein, 157 aa, Muscodor strobelii
  misc_feature: SGI Peptide ID NO. 570737
  misc_feature (41)..(104): NCBI GI: 46134015 Blast Desc: FG09147.1 [Gibberella zeae PH-1]
MSLTTEKSAKKRVKLPTGSSSSSSSHVRAPKRTRKRLAGKRKVKSCGACRAAHLRCVADCYGVPCERCAKKGWDDCTLMQMPESSTTKSSQPESDNYKNPDTMQETQEPVIIDIEPSQTETHEDSDSADTVDLIVEKGHYLKQVAADVIAYMSKKNN

SEQ ID NO: 31198 - DNA, 912 bp, Muscodor strobelii
  misc_feature: SGI cDNA ID NO. 570738
  misc_feature: Encodes the peptide sequence at SEQ ID NO 31199
atggcatcagccgacgtgcaagccccaacttcatctcttcctaccttccattccgaggatgtaaagactacttcgctcaactcgccaagcgaagtagaagcccttcttaactactacctcgataacgaggatggctctccgccgcaacctgcatacgtaaacaagcccgagacatacttccgtagaaatgaggagcgaactgtgaagatcaccaatattgccggccgagaggacgagttcactctcgatggacaaggtttccagatccaccgtaacgtggcacaggaaaaggacttcgcagacgatgagcacattaaagccgtttactatcctgagactgagcagctcttgaaggacgttaccggcgcatccaagatcttcatcttcgaccacacaatccgtcgccaaactccagacacacgcagcggcccaggcgccaaagttcagctccgcggacctgtgcaacgtgtgcacatcgaccaatcctactccgcctccctctcacgggtgcctcatcatcttcctgcggaagaagcaaccgaacttctgaagggcagagttcaaatcatcaatgtctggcgacccatccgcaccatcctccgggatccattggccgtcgcctcggcatcgagcgtcgcagaagacgacctcgtaccaatcggacttatttaccccaaccgcaagggcgagactctgagtgtgagatacaataaggatcatcagtggttctataagaagggattgacacctgaggaggttatcttgatcaagtgttttgattcgaagaccgatggacgcgcacgacgggttccgcataccgcatttgcggaccccacggataaggatgatgcgcctacgagagagagcatcgaggttagatgcctggtattccaccctgaggatcgggattaa

SEQ ID NO: 31199 - protein, 303 aa, Muscodor strobelii
  misc_feature: SGI Peptide ID NO. 570738
  misc_feature (1)..(303): NCBI GI: 119489980 Blast Desc: NFIA_062100 [Neosartorya fischeri NRRL 181] gi|119411106|gb|EAW21049.1| conserved [Neosartorya fischeri NRRL 181]
  misc_feature (1)..(303): NCBI GI: 70998803 Blast Desc: conserved [Aspergillus fumigatus Af293] gi|66851760|gb|EAL92085.1| conserved [Aspergillus fumigatus Af293] gi|159127143|gb|EDP52258.1| conserved [Aspergillus A1163]
  misc_feature (10)..(301): NCBI GI: 154297779 Blast Desc: BC1G_12301 [Botryotinia fuckeliana B05.10] gi|150858430|gb|EDN33622.1| BC1G_12301 [Botryotinia fuckeliana B05.10]
  misc_feature (1)..(301): NCBI GI: 67524207 Blast Desc: AN2561.2 [Aspergillus nidulans FGSC A4] gi|40745510|gb|EAA64666.1| AN2561.2 [Aspergillus nidulans FGSC A4] gi|259487995|tpe|CBF87102.1| TPA: conserved [Aspergillus FGSC
  misc_feature (57)..(301): NCBI GI: 169625338 Blast Desc: SNOG_15942 [Phaeosphaeria nodorum SN15] gi|160705638|gb|EAT76780.2| SNOG_15942 [Phaeosphaeria nodorum SN15]
  misc_feature (1)..(303): NCBI GI: 255935655 Blast Desc: Pc13g04180 [Penicillium chrysogenum Wisconsin 54-1255] gi|211583474|emb|CAP91487.1| Pc13g04180 [Penicillium chrysogenum Wisconsin 54-1255]
  misc_feature (24)..(303): NCBI GI: 156043835 Blast Desc: SS1G_10921 [Sclerotinia sclerotiorum 1980] gi|154695308|gb|EDN95046.1| SS1G_10921 [Sclerotinia sclerotiorum 1980]
  misc_feature (36)..(301): NCBI GI: 212543779 Blast Desc: conserved [Penicillium marneffei ATCC 18224] gi|210066951|gb|EEA21044.1| conserved [Penicillium marneffei ATCC 18224]
  misc_feature (1)..(301): NCBI GI: 242787759 Blast Desc: conserved [Talaromyces stipitatus ATCC 10500] gi|218721228|gb|EED20647.1| conserved [Talaromyces stipitatus ATCC 10500]
  misc_feature (1)..(303): NCBI GI: 115390440 Blast Desc: conserved [Aspergillus terreus NIH2624] gi|114195121|gb|EAU36821.1| conserved [Aspergillus terreus NIH2624]
MASADVQAPTSSLPTFHSEDVKTTSLNSPSEVEALLNYYLDNEDGSPPQPAYVNKPETYFRRNEERTVKITNIAGREDEFTLDGQGFQIHRNVAQEKDFADDEHIKAVYYPETEQLLKDVTGASKIFIFDHTIRRQTPDTRSGPGAKVQLRGPVQRVHIDQSYSASLSRVPHHLPAEEATELLKGRVQIINVWRPIRTILRDPLAVASASSVAEDDLVPIGLIYPNRKGETLSVRYNKDHQWFYKKGLTPEEVILIKCFDSKTDGRARRVPHTAFADPTDKDDAPTRESIEVRCLVFHPEDRD

SEQ ID NO: 31200 - DNA, 4135 bp, Muscodor strobelii
  misc_feature: SGI EST ID NO. CUFF.74054.0
  misc_feature: Variant of the nucleotide sequence at SEQ ID NO 31198
tacaaatgtagttgatttctaatgccaatgagaatcgagatcacgagcgtgctctgtcgcaacccgcaagctactattgcgtgctgcggggcaaggtatcgttatgtcatgtaacccatcccccaatatggtagagagaactgccgattcagatgggagatgatggggagtatatatagacttgatcgatggaaaatgaatatgacgtttttgactcaatatcatcgctttcatcagattatactatctggactttgacatcagccagcccccacatcctaacacttacagagtctcaacgactatacaaccatcaaaatggcatcagccgacgtgcaagccccaacttcatctcttcctaccttccattccgaggatgtaaagactacttcgctcaactcgccaagcgaagtagaagcccttcttaactactacctcgataacgaggatggctctccgccgcaacctgcatacgtaaacaagcccgagacatacttccgtagaaatgaggagcgaactgtgaagatcaccaatattgccggccgagaggacgagttcactctcgatggacaaggtttccagatccaccgtaacgtggcacaggaaaaggacttcgcagacgatgagcacattaaagccgtttactatcctgagactgagcagctcttgaaggacgttaccggcgcatccaagatcttcatcttcgaccacacaatccgtcgccaaactccagacacacgcagcggcccaggcgccaaagttcagctccgcggacctgtgcaacgtgtgcacatcgaccaatcctactccgcctccctctcacgggtgcctcatcatcttcctgcggaagaagcaaccgaacttctgaagggcagagttcaaatcatcaatgtctggcgacccatccgcaccatcctccgggatccattggccgtcgcctcggcatcgagcgtcgcagaagacgacctcgtaccaatcggacttatttaccccaaccgcaagggcgagactctgagtgtgagatacaataaggatcatcagtggttctataagaagggattgacacctgaggaggttatcttgatcaagtgttttgattcgaagaccgatggacgcgcacgacgggttccgcataccgcatttgcggaccccacggataaggatgatgcgcctacgagagagagcatcgaggttagatgcctggtattccaccctgaggatcgggattaagcttgcaagagtgggaatctatcatccggagctgagatgctcaaaggatgagatcaacctaacgcggaatatgatggatgagataccgggtagattgtaacaagattgaagaatgcaaggaatattgtaacgatgtagaatgtctaacgtcaaaattggtaccatactacacaattctgtgcctgaactccgtcgcaatgcggtctaaaatgaaacctgctccgagaaatttctcgagtacaggttaagtcgagagtgctgggatggctgctaagtccacaccatcaatgatgtttaatccctgaaacccctcctcaatagcccaagcgcgccccttttccaatttattgaggaattcgcaggcccgtccgacgacaagcagacctgggggtctactgccctcttgttctatagcttccacaactttgtctaatgttgtgcggataactcgctggtctgggcagcttgcgcgttcaatgaccgcacaaggtgtagttttttggccataatggtcttattggctgtatcacaacatcctggggcttttcgtccctagatgagatctccgtctctagatattgtgtcaactcttcgacaagccccgatatacggtgcaaggccatgagaaacacaaccgttcttgtcggattgtattcaggtggtgccggcggcttgcccttctttcctgtaccagtgcaaatgagcacttgatccgagacatcgcgttgtgtcgggggaatatttgcgaaaagcggcgcagagagcgcagaggtgacaccaggtaggacaatcactttgtcaccgaatccgtgattacgaaagtattcgatttcttctcctcccctgccatatatgaaggggtcgccttgtttcaatcgtaacacggttttgccctctcgtacaccggcgatagccatctcctgcagctcattctgcgcggcgtcggcgtttcccgggaatttgcgtgcaatttgcaccagggtcctccgaggtattagatctagcactccggaaggaacgagcttgtcggcgagaatgagatctgcaatctgtattgccttatgtgttgcctgcgtcaataagtccgggtgtcctggaccagacccagcaaggataatgcgcccttttccagctgatctatgcgtaagcattgtcttgccaacagtctccgccgaatcaacagtgtcatagttcctcaagatgatttcgacatcttcatcggtgacagccgctaagcgtttcaagggccaatactcgcagacttggctgagccaacgtatgcgtctgttcttcgcagcatccaagtcggcctccgtaaccaatttattaaatgtggcaggctgctcaaccgaatcatcaccatcatcacactctgctagcgatgactgtatgaggttatcctcttgctgcagtcgcctacgagcgtcacccagcctcagacaggcctcgcctatcttctgtgggagagaggcagcaatttcgcgacgtatcctagacgctaatttacagccacgaccgtttgtggttacacctatttggaggggaccatcgttgtgtgtcgagagcagagtgaaggaacagagctgaggggcatctacgacgttgacagggattcggtttcgtttgcaaagtgaagatattcgtgagcctgaacttctcggttagccacgttatttatagcgcaaatcgtaagacatactaagctcatccctgggtccggacgtgacgaagacagcgtcgacaacatggtcaatctctcctcttccaagagtgaaaaggtggctttcttgaaacgattctttcagccatttgacctcgccatcatctatgcgctttttcaaggcatagtggaagtctgccgactctggcgcaatgagaatcggtgatgcgccagcagctaaggactgtccactccgggaagcagccagcgaattggaaccgacaatcaaatgaacgtgtgcgatggcgttagtagccgtgagtagtgacagatacgatgccattttcaggctactaatttgccaatcaccaacaaaagactaacgtttctcaatttgccagattatcgcgttctataacccgcgataggctcatagcggggggcagctggtctatggcaaagggtttgtaagctgcaatggagtaaggacagatgactgtctgcaagtcaacatgcagaaaagtcatgcaacgtcaaaagactttcgtgtctcacgttttctatgaaggctccgccaaaccaaaggaaaagagctcgagtttggcgccatatcggaaaatgttatacacataaaacggacgaagtgggatgaataattcggggtctgcgatctcgcatcattcgcaaagattgtagtggggcagatagcaagcacgccatccgcgccagacaagccaaagggtcttggaatgggaccaatcaaccgtcccaatttagtcatgtctgcactcccgcggacatgttcggagataatgaattgactgtatctttcttgcggttgattaatcattgaattttgtactcgaccagcgcgcctccaatcctttaggataagatcgattgtagttgagcattagtagtgctcaatgtaacatgcttacatgtgtgatagtttcgaatcagcgataaagacaagaagcctgtgtttatgtcaaaaaaactagccagggagtagtaccgaatgttgtcagggcatgaaagttgacattatatgactgtctccaacagataaacaatcgtatctcaaaaatatacctgaaggtaacaagtcaaacgaggtacaaaaagtagcaaaagtacaatcactgcatcagccgtgaatcgaacacggggcccatcgatggcaacgatggattttaccactaaaccactgatgcttgtgccattgtatatatgagagctaga

SEQ ID NO: 31201 - DNA, 1479 bp, Muscodor strobelii
  misc_feature: SGI cDNA ID NO. 570739
  misc_feature: Reduced expression when VOC is produced
  misc_feature: Encodes the peptide sequence at SEQ ID NO 31202
atggcatcgtatctgtcactactcacggctactaacgccatcgcacacgttcatttgattgtcggttccaattcgctggctgcttcccggagtggacagtccttagctgctggcgcatcaccgattctcattgcgccagagtcggcagacttccactatgccttgaaaaagcgcatagatgatggcgaggtcaaatggctgaaagaatcgtttcaagaaagccaccttttcactcttggaagaggagagattgaccatgttgtcgacgctgtcttcgtcacgtccggacccagggatgagcttagctcacgaatatcttcactttgcaaacgaaaccgaatccctgtcaacgtcgtagatgcccctcagctctgttccttcactctgctctcgacacacaacgatggtcccctccaaataggtgtaaccacaaacggtcgtggctgtaaattagcgtctaggatacgtcgcgaaattgctgcctctctcccacagaagataggcgaggcctgtctgaggctgggtgacgctcgtaggcgactgcagcaagaggataacctcatacagtcatcgctagcagagtgtgatgatggtgatgattcggttgagcagcctgccacatttaataaattggttacggaggccgacttggatgctgcgaagaacagacgcatacgttggctcagccaagtctgcgagtattggcccttgaaacgcttagcggctgtcaccgatgaagatgtcgaaatcatcttgaggaactatgacactgttgattcggcggagactgttggcaagacaatgcttacgcatagatcagctggaaaagggcgcattatccttgctgggtctggtccaggacacccggacttattgacgcaggcaacacataaggcaatacagattgcagatctcattctcgccgacaagctcgttccttccggagtgctagatctaatacctcggaggaccctggtgcaaattgcacgcaaattcccgggaaacgccgacgccgcgcagaatgagctgcaggagatggctatcgccggtgtacgagagggcaaaaccgtgttacgattgaaacaaggcgaccccttcatatatggcaggggaggagaagaaatcgaatactttcgtaatcacggattcggtgacaaagtgattgtcctacctggtgtcacctctgcgctctctgcgccgcttttcgcaaatattcccccgacacaacgcgatgtctcggatcaagtgctcatttgcactggtacaggaaagaagggcaagccgccggcaccacctgaatacaatccgacaagaacggttgtgtttctcatggccttgcaccgtatatcggggcttgtcgaagagttgacacaatatctagagacggagatctcatctagggacgaaaagccccaggatgttgtgatacagccaataagaccattatggccaaaaaactacaccttgtgcggtcattga

SEQ ID NO: 31202 - protein, 492 aa, Muscodor strobelii
  misc_feature: SGI Peptide ID NO. 570739
  misc_feature (278)..(483): Pfam Id: PF00590 Pfam Desc: Tetrapyrrole (Corrin/Porphyrin) Methylases
  misc_feature (278)..(460): Pfam Id: PF00590 Pfam Desc: Tetrapyrrole (Corrin/Porphyrin) Methylases
  misc_feature (6)..(486): NCBI GI: 46135865 Blast Desc: FG09448.1 [Gibberella zeae PH-1]
  misc_feature (5)..(484): NCBI GI: 154321822 Blast Desc: BC1G_01058 [Botryotinia fuckeliana B05.10] gi|150850305|gb|EDN25498.1| BC1G_01058 [Botryotinia fuckeliana B05.10]
  misc_feature (4)..(486): NCBI GI: 39969421 Blast Desc: MGG_10321 [Magnaporthe grisea 70-15] gi|149211277|ref|XP_001523013.1| MGCH7_ch7g1098 [Magnaporthe grisea 70-15] gi|86197053|gb|EAQ71691.1| MGCH7_ch7g1098 grisea
  misc_feature (5)..(484): NCBI GI: 171684067 Blast Desc: protein product [Podospora anserina] gi|170941994|emb|CAP67646.1| protein product [Podospora anserina]
  misc_feature (2)..(484): NCBI GI: 38567306 Blast Desc: related to siroheme synthase (Uroporphyrin-III C-methyltransferase) [Neurospora crassa]
  misc_feature (7)..(486): NCBI GI: 121704832 Blast Desc: siroheme synthase, [Aspergillus clavatus NRRL 1] gi|119398825|gb|EAW09253.1| siroheme synthase, [Aspergillus clavatus NRRL 1]
  misc_feature (7)..(486): NCBI GI: 71000525 Blast Desc: siroheme synthase [Aspergillus fumigatus Af293] gi|66852583|gb|EAL92908.1| siroheme synthase, [Aspergillus fumigatus Af293] gi|159127959|gb|EDP53074.1| siroheme synthase,
  misc_feature (7)..(486): NCBI GI: 119493110 Blast Desc: siroheme synthase, [Neosartorya fischeri NRRL 181] gi|119411951|gb|EAW21894.1| siroheme synthase, [Neosartorya fischeri NRRL 181]
  misc_feature (7)..(474): NCBI GI: 145245321 Blast Desc: An11g09700 [Aspergillus niger] gi|134079627|emb|CAK40843.1| protein product [Aspergillus niger]
  misc_feature (7)..(485): NCBI GI: 255944201 Blast Desc: Pc20g03160 [Penicillium chrysogenum Wisconsin 54-1255] gi|211587603|emb|CAP85645.1| Pc20g03160 [Penicillium chrysogenum Wisconsin 54-1255]
  misc_feature (1)..(459): SWISSPROT Homolog: EC 2.1.1.107 Uroporphyrinogen-III C-methyltransferase
  misc_feature: Useful for introducing or modulating the production of volatile compounds
MASYLSLLTATNAIAHVHLIVGSNSLAASRSGQSLAAGASPILIAPESADFHYALKKRIDDGEVKWLKESFQESHLFTLGRGEIDHVVDAVFVTSGPRDELSSRISSLCKRNRIPVNVVDAPQLCSFTLLSTHNDGPLQIGVTTNGRGCKLASRIRREIAASLPQKIGEACLRLGDARRRLQQEDNLIQSSLAECDDGDDSVEQPATFNKLVTEADLDAAKNRRIRWLSQVCEYWPLKRLAAVTDEDVEIILRNYDTVDSAETVGKTMLTHRSAGKGRIILAGSGPGHPDLLTQATHKAIQIADLILADKLVPSGVLDLIPRRTLVQIARKFPGNADAAQNELQEMAIAGVREGKTVLRLKQGDPFIYGRGGEEIEYFRNHGFGDKVIVLPGVTSALSAPLFANIPPTQRDVSDQVLICTGTGKKGKPPAPPEYNPTRTVVFLMALHRISGLVEELTQYLETEISSRDEKPQDVVIQPIRPLWPKNYTLCGH

SEQ ID NO: 31203 - DNA, 4149 bp, Muscodor strobelii
  misc_feature: SGI EST ID NO. CUFF.74055.1
  misc_feature: Variant of the nucleotide sequence at SEQ ID NO 31201
tctagctctcatatatacaatggcacaagcatcagtggtttagtggtaaaatccatcgttgccatcgatgggccccgtgttcgattcacggctgatgcagtgattgtacttttgctactttttgtacctcgtttgacttgttaccttcaggtatatttttgagatacgattgtttatctgttggagacagtcatataatgtcaactttcatgccctgacaacattcggtactactccctggctagtttttttgacataaacacaggcttcttgtctttatcgctgattcgaaactatcacacatgtaagcatgttacattgagcactactaatgctcaactacaatcgatcttatcctaaaggattggaggcgcgctggtcgagtacaaaattcaatgattaatcaaccgcaagaaagatacagtcaattcattatctccgaacatgtccgcgggagtgcagacatgactaaattgggacggttgattggtcccattccaagaccctttggcttgtctggcgcggatggcgtgcttgctatctgccccactacaatctttgcgaatgatgcgagatcgcagaccccgaattattcatcccacttcgtccgttttatgtgtataacattttccgatatggcgccaaactcgagctcttttcctttggtttggcggagccttcatagaaaacgtgagacacgaaagtcttttgacgttgcatgacttttctgcatgttgacttgcagacagtcatctgtccttactccattgcagcttacaaaccctttgccatagaccagctgccccccgctatgagcctatcgcgggttatagaacgcgataatctggcaaattgagaaacgttagtcttttgttggtgattggcaaattagtagcctgaaaatggcatcgtatctgtcactactcacggctactaacgccatcgcacacgttcatttgattgtcggttccaattcgctggctgcttcccggagtggacagtccttagctgctggcgcatcaccgattctcattgcgccagagtcggcagacttccactatgccttgaaaaagcgcatagatgatggcgaggtcaaatggctgaaagaatcgtttcaagaaagccaccttttcactcttggaagaggagagattgaccatgttgtcgacgctgtcttcgtcacgtccggacccagggatgagcttagctcacgaatatcttcactttgcaaacgaaaccgaatccctgtcaacgtcgtagatgcccctcagctctgttccttcactctgctctcgacacacaacgatggtcccctccaaataggtgtaaccacaaacggtcgtggctgtaaattagcgtctaggatacgtcgcgaaattgctgcctctctcccacagaagataggcgaggcctgtctgaggctgggtgacgctcgtaggcgactgcagcaagaggataacctcatacagtcatcgctagcagagtgtgatgatggtgatgattcggttgagcagcctgccacatttaataaattggttacggaggccgacttggatgctgcgaagaacagacgcatacgttggctcagccaagtctgcgagtattggcccttgaaacgcttagcggctgtcaccgatgaagatgtcgaaatcatcttgaggaactatgacactgttgattcggcggagactgttggcaagacaatgcttacgcatagatcagctggaaaagggcgcattatccttgctgggtctggtccaggacacccggacttattgacgcaggcaacacataaggcaatacagattgcagatctcattctcgccgacaagctcgttccttccggagtgctagatctaatacctcggaggaccctggtgcaaattgcacgcaaattcccgggaaacgccgacgccgcgcagaatgagctgcaggagatggctatcgccggtgtacgagagggcaaaaccgtgttacgattgaaacaaggcgaccccttcatatatggcaggggaggagaagaaatcgaatactttcgtaatcacggattcggtgacaaagtgattgtcctacctggtgtcacctctgcgctctctgcgccgcttttcgcaaatattcccccgacacaacgcgatgtctcggatcaagtgctcatttgcactggtacaggaaagaagggcaagccgccggcaccacctgaatacaatccgacaagaacggttgtgtttctcatggccttgcaccgtatatcggggcttgtcgaagagttgacacaatatctagagacggagatctcatctagggacgaaaagccccaggatgttgtgatacagccaataagaccattatggccaaaaaactacaccttgtgcggtcattgaacgcgcaagctgcccagaccagcgagttatccgcacaacattagacaaagttgtggaagctatagaacaagagggcagtagacccccaggtctgcttgtcgtcggacgggcctgcgaattcctcaataaattggaaaaggggcgcgcttgggctattgaggaggggtttcagggattaaacatcattgatggtgtggacttagcagccatcccagcactctcgacttaacctgtactcgagaaatttctcggagcaggtttcattttagaccgcattgcgacggagttcaggcacagaattgtgtagtatggtaccaattttgacgttagacattctacatcgttacaatattccttgcattcttcaatcttgttacaatctacccggtatctcatccatcatattccgcgttaggttgatctcatcctttgagcatctcagctccggatgatagattcccactcttgcaagcttaatcccgatcctcagggtggaataccaggcatctaacctcgatgctctctctcgtaggcgcatcatccttatccgtggggtccgcaaatgcggtatgcggaacccgtcgtgcgcgtccatcggtcttcgaatcaaaacacttgatcaagataacctcctcaggtgtcaatcccttcttatagaaccactgatgatccttattgtatctcacactcagagtctcgcccttgcggttggggtaaataagtccgattggtacgaggtcgtcttctgcgacgctcgatgccgaggcgacggccaatggatcccggaggatggtgcggatgggtcgccagacattgatgatttgaactctgcccttcagaagttcggttgcttcttccgcaggaagatgatgaggcacccgtgagagggaggcggagtaggattggtcgatgtgcacacgttgcacaggtccgcggagctgaactttggcgcctgggccgctgcgtgtgtctggagtttggcgacggattgtgtggtcgaagatgaagatcttggatgcgccggtactgatcagtgggcgtgagtaaatctattcttgaaaaatgaataagacagacagattagcactcacacgtccttcaagagctgctcagtctcaggatagtaaacggctttaatgtgctcatcgtctgcgaagtccttttcctgtgccacgttacggtggatctggaaaccttgtccatcgagagtgaactcgtcctctcggccggcaatattggtgatcttcacagttcgctcctcatttctacggaagtatgtctcgggcttgtttacgtatgcaggttgcggcggagagccatcctcgttatcgaggtagtagttaagaagggcttctacttcgcttggcgagttgagcgaagtagtctttacatcctcggaatggaaggtaggaagagatgaagttggggcttgcacgtcggctgatgccattttgatggttgtatagtcgttgagactctgtaagtgttaggatgtgggggctggctgatgtcaaagtccagatagtataatctgatgaaagcgatgatattgagtcaaaaacgtcatattcattttccatcgatcaagtctatatatactccccatcatctcccatctgaatcggcagttctctctaccatattgggggatgggttacatgacataacgataccttgccccgcagcacgcaatagtagcttgcgggttgcgacagagcacgctcgtgatctcgattctcattggcattagaaatcaactacatttgta

SEQ ID NO: 31204 - DNA, 1593 bp, Muscodor strobelii
  misc_feature: SGI cDNA ID NO. 570740
  misc_feature: Reduced expression when VOC is produced
  misc_feature: Encodes the peptide sequence at SEQ ID NO 31205
atgtctgcggtagcgaactctgtcagatggttttaccgtgaattcggccttgcctcgatccaccagaccggccgcaatgcctacctcgtcatactcgcgagaacatgtcgcatgttcgcctatggaaccagcgccctgatgctcgctatcttcttttcggcactgaaaatttccgatagccagatcggcttattcatgaccttaacactcgctggagatgttgtgcttggcactttgctctcactaatggcggaccgcattggcaggcgaaaagtattactcggcggccaaattttgatgataacgagcggagtgatttttgcatcctttgaaaacttttggattctgcttttcggtgcagtcatcggcgttatttctgttgccggtggtgacttcggtcccttccgaagtattgaagaatctatactgtcccaaattacagagccttcgacacgatcagatgtgctctcatggcatgtgacgctgcctttaattggttcctccctcggtagtgaagcttcggggcgaattcttcattggcttcaggccaaagacggatggtctgaggtcgattcctaccatgcggtgttttggatatacgcggcgacaggaatcctgaacgtctttctagtcttaccactgacagacgcatgtgagcttcaacagaccaacagccagtatacgcaggttgcacaagacgaaaacgagagtgatactacacgtggatctagctctgcgactcctgtgccggagacaactagccggaattggcttgtaaagaggcttgcggcaatttcagctccgacaaggtcaatcatgtacaaattgtggttcttactggccgtcgattctctcgctgatggaatggtcccgttcgccttgacgaattactatctggacaccaacttccatccttcaaaagccacacttggtgatttgacatcggccagctacttcctcggcggattgggtgctgcactcgccacccctcttgctcggaagatcggtctcatcaacacaatggtgttcacacatattccctcatcgactgcggtcctcgtatttccatttccaccttacttctggatgtgcgccgttctgtttttagttagatcagctctaaatagtatggatcaggcaccccgcgccgcgttcatcgctgcagtcgtcaaacccgaggagcgcactgccgtgatgggcataacatctactatccgaaccttggccgctgctagcggaccgacagttactggactcctcgcctcgagcaaatatttctgggtggcgtttgtaatagctggtgtttgtcgcttgtcatatgattttggtctttatgcattgtttgtgaacatgcgtctgcatcaacacgagccgacgccgatggaacaagtgaacgacggatcacgcggaggaaggttgcgagatgaagagatggagcttgaaagtattgttgactctgatatcttgagcaacgatgatgatacggttgactggaatgttccagttggtagaagtgattcattgaagctgccttctggattcgagcaccaaagagcccggagcagaagtccacaccggaatgctgatagctaa

SEQ ID NO: 31205 - protein, 530 aa, Muscodor strobelii
  misc_feature: SGI Peptide ID NO. 570740
  misc_feature (30)..(414): Pfam Id: PF07690 Pfam Desc: Major Facilitator Superfamily
  misc_feature (276)..(436): Pfam Id: PF07690 Pfam Desc: Major Facilitator Superfamily
  misc_feature (30)..(214): Pfam Id: PF07690 Pfam Desc: Major Facilitator Superfamily
  misc_feature (1)..(477): NCBI GI: 39944750 Blast Desc: MGG_04357 [Magnaporthe grisea 70-15] gi|145021608|gb|EDK05737.1| MGG_04357 [Magnaporthe grisea 70-15]
  misc_feature (2)..(486): NCBI GI: 256722687 Blast Desc: NECHADRAFT_53195 [Nectria haematococca mpVI 77-13-4]
  misc_feature (12)..(459): NCBI GI: 171677135 Blast Desc: protein product [Podospora anserina] gi|170936635|emb|CAP61294.1| protein product [Podospora anserina]
  misc_feature (13)..(468): NCBI GI: 116205497 Blast Desc: CHGG_10632 [Chaetomium globosum CBS 148.51] gi|88176760|gb|EAQ84228.1| CHGG_10632 [Chaetomium globosum CBS 148.51]
  misc_feature (2)..(493): NCBI GI: 46115108 Blast Desc: FG03396.1 [Gibberella zeae PH-1]
  misc_feature (8)..(471): NCBI GI: 238842447 Blast Desc: conserved [Microsporum canis CBS 113480]
  misc_feature (15)..(524): NCBI GI: 169603013 Blast Desc: SNOG_04512 [Phaeosphaeria nodorum SN15] gi|160706308|gb|EAT88272.2| SNOG_04512 [Phaeosphaeria nodorum SN15]
  misc_feature (16)..(481): NCBI GI: 85109993 Blast Desc: NCU08425 [Neurospora crassa OR74A] gi|28881267|emb|CAD70526.1| conserved [Neurospora crassa] gi|28924852|gb|EAA33949.1| [Neurospora crassa OR74A]
  misc_feature (15)..(471): NCBI GI: 189203125 Blast Desc: major facilitator superfamily MFS_1 [Pyrenophora tritici-repentis Pt-1C-BFP] gi|187984997|gb|EDU50485.1| major facilitator superfamily MFS_1 [Pyrenophora tritici-repentis
  misc_feature (6)..(468): NCBI GI: 169605183 Blast Desc: SNOG_05611 [Phaeosphaeria nodorum SN15] gi|160706721|gb|EAT86675.2| SNOG_05611 [Phaeosphaeria nodorum SN15]
  misc_feature: Useful for introducing or modulating the production of volatile compounds
MSAVANSVRWFYREFGLASIHQTGRNAYLVILARTCRMFAYGTSALMLAIFFSALKISDSQIGLFMTLTLAGDVVLGTLLSLMADRIGRRKVLLGGQILMITSGVIFASFENFWILLFGAVIGVISVAGGDFGPFRSIEESILSQITEPSTRSDVLSWHVTLPLIGSSLGSEASGRILHWLQAKDGWSEVDSYHAVFWIYAATGILNVFLVLPLTDACELQQTNSQYTQVAQDENESDTTRGSSSATPVPETTSRNWLVKRLAAISAPTRSIMYKLWFLLAVDSLADGMVPFALTNYYLDTNFHPSKATLGDLTSASYFLGGLGAALATPLARKIGLINTMVFTHIPSSTAVLVFPFPPYFWMCAVLFLVRSALNSMDQAPRAAFIAAVVKPEERTAVMGITSTIRTLAAASGPTVTGLLASSKYFWVAFVIAGVCRLSYDFGLYALFVNMRLHQHEPTPMEQVNDGSRGGRLRDEEMELESIVDSDILSNDDDTVDWNVPVGRSDSLKLPSGFEHQRARSRSPHRNADS

SEQ ID NO: 31206 - DNA, 1914 bp, Muscodor strobelii
  misc_feature: SGI EST ID NO. CUFF.73879.0
  misc_feature: Variant of the nucleotide sequence at SEQ ID NO 31204
aaacaactcatgacgccactgaccaactccgtcacatcaagagtcactatggccgatgacgttggagtagaccaattaccttgtcaaggcgacccagtgtgtgggaaccggcactaacctccgggattcgcgagcccgaaaccggcatttttccgagtggtctttcaccgcaaaattgaccggttccgagacttggcgatggttcctctacaatcccctcttcaattgtttttggagttgttaccatgtctgcggtagcgaactctgtcagatggttttaccgtgaattcggccttgcctcgatccaccagaccggccgcaatgcctacctcgtcatactcgcgagaacatgtcgcatgttcgcctatggaaccagcgccctgatgctcgctatcttcttttcggcactgaaaatttccgatagccagatcggcttattcatgaccttaacactcgctggagatgttgtgcttggcactttgctctcactaatggcggaccgcattggcaggcgaaaagtattactcggcggccaaattttgatgataacgagcggagtgatttttgcatcctttgaaaacttttggattctgcttttcggtgcagtcatcggcgttatttctgttgccggtggtgacttcggtcccttccgaagtattgaagaatctatactgtcccaaattacagagccttcgacacgatcagatgtgctctcatggcatgtgacgctgcctttaattggttcctccctcggtagtgaagcttcggggcgaattcttcattggcttcaggccaaagacggatggtctgaggtcgattcctaccatgcggtgttttggatatacgcggcgacaggaatcctgaacgtctttctagtcttaccactgacagacgcatgtgagcttcaacagaccaacagccagtatacgcaggttgcacaagacgaaaacgagagtgatactacacgtggatctagctctgcgactcctgtgccggagacaactagccggaattggcttgtaaagaggcttgcggcaatttcagctccgacaaggtcaatcatgtacaaattgtggttcttactggccgtcgattctctcgctgatggaatggtcccgttcgccttgacgaattactatctggacaccaacttccatccttcaaaagccacacttggtgatttgacatcggccagctacttcctcggcggattgggtgctgcactcgccacccctcttgctcggaagatcggtctcatcaacacaatggtgttcacacatattccctcatcgactgcggtcctcgtatttccatttccaccttacttctggatgtgcgccgttctgtttttagttagatcagctctaaatagtatggatcaggcaccccgcgccgcgttcatcgctgcagtcgtcaaacccgaggagcgcactgccgtgatgggcataacatctactatccgaaccttggccgctgctagcggaccgacagttactggactcctcgcctcgagcaaatatttctgggtggcgtttgtaatagctggtgtttgtcgcttgtcatatgattttggtctttatgcattgtttgtgaacatgcgtctgcatcaacacgagccgacgccgatggaacaagtgaacgacggatcacgcggaggaaggttgcgagatgaagagatggagcttgaaagtattgttgactctgatatcttgagcaacgatgatgatacggttgactggaatgttccagttggtagaagtgattcattgaagctgccttctggattcgagcaccaaagagcccggagcagaagtccacaccggaatgctgatagctaaatttgtacactagatcttttgaaaacgagaatgtcgcatagttgcagagtatatagttgaacatgttatagtgtgt

SEQ ID NO: 31207 - DNA, 774 bp, Muscodor strobelii
  misc_feature: SGI cDNA ID NO. 570741
  misc_feature: Encodes the peptide sequence at SEQ ID NO 31208
atgcacggacttctccatcccctcgccctcaccctcggcatccccgcgagctccaagtccaagctcgcgcgcttcgaagagcaaatgtacgccgcggtctataccggcttttcctccccgctgggactgtacgttatgtacaggactccgacttggtacttcgataccaaagggatgtacgaggggtatccgcataaatcccacgagggggtgatgaaattctattatttgttgcaagctgcgttctgggtccagcaggcgatggtgatggtgctgggtctggagaagaggaggaaggactttaaggaacttgttgtgcatcatgttgttaccgttagcttgattgcgctgagctaccgctttcattttaccatgatgggttgtttggtttatgttacgcatgatttgagtgatttcttccttgctacatccaaatccctcaactacattgaccaccctctccaaggtccttatttcgcgctttgcatcggggtatgggtgtatctgcggcactacatcaacctcaagattctctactccatcacaaacgagtttaagtccattggaccatttgtcctgagttgggaaaccgagcagtataagtgcgagatctcgcaagtcattacgttttcgctattggccgcgttgcaggcgctgaacttattctggctttattgtcttttgaggagcgcatataaattcgtttggctgggcattgcgaaggatgatcgtgaagacgacgatgacgagcaacctgagaagacggagcagtaa

SEQ ID NO: 31208 - protein, 257 aa, Muscodor strobelii
  misc_feature: SGI Peptide ID NO. 570741
  misc_feature (43)..(252): Pfam Id: PF03798 Pfam Desc: Longevity-assurance protein (LAG1)
  misc_feature (1)..(251): NCBI GI: 156058374 Blast Desc: SS1G_03198 [Sclerotinia sclerotiorum 1980] gi|154700986|gb|EDO00725.1| SS1G_03198 [Sclerotinia sclerotiorum 1980]
  misc_feature (1)..(256): NCBI GI: 39940102 Blast Desc: MGG_05189 [Magnaporthe grisea 70-15] gi|145010545|gb|EDJ95201.1| MGG_05189 [Magnaporthe grisea 70-15]
  misc_feature (1)..(257): NCBI GI: 85082845 Blast Desc: NCU00008 [Neurospora crassa OR74A] gi|28918078|gb|EAA27759.1| NCU00008 [Neurospora crassa OR74A]
  misc_feature (1)..(245): NCBI GI: 261358493 Blast Desc: sphingosine N-acyltransferase lac1 [Verticillium albo-atrum VaMs.102]
  misc_feature (1)..(257): NCBI GI: 171686028 Blast Desc: protein product [Podospora anserina] gi|170942975|emb|CAP68628.1| protein product [Podospora anserina]
  misc_feature (29)..(237): NCBI GI: 154309212 Blast Desc: BC1G_07500 [Botryotinia fuckeliana B05.10] gi|150852324|gb|EDN27516.1| BC1G_07500 [Botryotinia fuckeliana B05.10]
  misc_feature (1)..(245): NCBI GI: 256729886 Blast Desc: [Nectria haematococca mpVI 77-13-4]
  misc_feature (1)..(253): NCBI GI: 255949714 Blast Desc: Pc22g17110 [Penicillium chrysogenum Wisconsin 54-1255] gi|211592641|emb|CAP98999.1| Pc22g17110 [Penicillium chrysogenum Wisconsin 54-1255]
  misc_feature (1)..(256): NCBI GI: 189208159 Blast Desc: sphingosine N-acyltransferase lac1 [Pyrenophora tritici-repentis Pt-1C-BFP] gi|187976506|gb|EDU43132.1| sphingosine N-acyltransferase lac1 [Pyrenophora tritici-repentis
  misc_feature (1)..(245): NCBI GI: 46122295 Blast Desc: FG05525.1 [Gibberella zeae PH-1]
  misc_feature (1)..(241): SWISSPROT Homolog: EC 2.3.1.24 Sphingosine N-acyltransferase
MHGLLHPLALTLGIPASSKSKLARFEEQMYAAVYTGFSSPLGLYVMYRTPTWYFDTKGMYEGYPHKSHEGVMKFYYLLQAAFWVQQAMVMVLGLEKRRKDFKELVVHHVVTVSLIALSYRFHFTMMGCLVYVTHDLSDFFLATSKSLNYIDHPLQGPYFALCIGVWVYLRHYINLKILYSITNEFKSIGPFVLSWETEQYKCEISQVITFSLLAALQALNLFWLYCLLRSAYKFVWLGIAKDDREDDDDEQPEKTEQ

SEQ ID NO: 31209 - DNA, 1531 bp, Muscodor strobelii
  misc_feature: SGI EST ID NO. CUFF.73883.0
  misc_feature: Variant of the nucleotide sequence at SEQ ID NO 31207
ctgaattttcccttttcattcgcgctgtcgctgatacccctgaagctggtctgctcctagatgtcgaatgtaaccaatctatattcgactgtattgaccactagtagccatcaacgacttcctcttatcaaaacaacgctcctttccaaagaacgaccatcgaataaacatcaatacttctaataaaacgacgagccgttccagaatgaaaactcacagaggtcttgatccttcgatcgaccaagtcaaaccgaccatagcaagaaaaggtcgacaactacatagtctagcagtgtcgcacaggaacccagcaacagacacaaccgcctcttcttccgcttcttcctcaaagacacgtcggaagagaaaatcctcgagacaaaatgcagtcatccgaacttttcgtcaacgtacctggacactccccctccttctaattctcccattcttattcctctacgccctgaacccaacagacagcaacatagtccaccccttcctcttcccctcctacaaaatcccctcgccatctacctctcccccaacatacggcaaaggacctctcgatatcctattcgtaggcttctacgtcctagtcctatccttcacgcgagaattcatcatgcacggacttctccatcccctcgccctcaccctcggcatccccgcgagctccaagtccaagctcgcgcgcttcgaagagcaaatgtacgccgcggtctataccggcttttcctccccgctgggactgtacgttatgtacaggactccgacttggtacttcgataccaaagggatgtacgaggggtatccgcataaatcccacgagggggtgatgaaattctattatttgttgcaagctgcgttctgggtccagcaggcgatggtgatggtgctgggtctggagaagaggaggaaggactttaaggaacttgttgtgcatcatgttgttaccgttagcttgattgcgctgagctaccgctttcattttaccatgatgggttgtttggtttatgttacgcatgatttgagtgatttcttccttgctacatccaaatccctcaactacattgaccaccctctccaaggtccttatttcgcgctttgcatcggggtatgggtgtatctgcggcactacatcaacctcaagattctctactccatcacaaacgagtttaagtccattggaccatttgtcctgagttgggaaaccgagcagtataagtgcgagatctcgcaagtcattacgttttcgctattggccgcgttgcaggcgctgaacttattctggctttattgtcttttgaggagcgcatataaattcgtttggctgggcattgcgaaggatgatcgtgaagacgacgatgacgagcaacctgagaagacggagcagtaaaaggttggatagacgagacaggtttagtggcattccgctatagacacttctgtggttgtctcgttggaaagagatctgcataggaatagaataatgtttaatctcgaatattaatgttaatgtgatgattctaga

SEQ ID NO: 31210 - DNA, 639 bp, Muscodor strobelii
  misc_feature: SGI cDNA ID NO. 570742
  misc_feature: Encodes the peptide sequence at SEQ ID NO 31211
atgggctttaattcgctagacaacaaattgtatgcatccaatttcgtcaatggtggagcgcaactgatcaggatcggcggtaatgggcaatatcaggtagtcgagtcgctcaacaagacagatgtcaactataacatgggtgatgttgacgagcagggttattactggttgacaacaagctatggatggggattcgccaagatagatttgatccccaactcttcaacgtacgggcgcaccgtagcgaacggtacatcgaaggcaccaccctttacgccccttgactgggcgtacgtaccgggcgctggcaactatctttgggctctcgggtacgactccgatttctcgcagacgaatcttttgcgatttgaccgctccacggccacgctaggcgtctggacggcatcaaccaacttcggcaatgtgacaggcaagaacatctggggcgccgtgtacgccggcccgtcggggaccttgatcggaagcgaaaatacaagtggggatatctggcaattcccgttacctgggtcctcaaccaaggcgacttacctcgcctcgggtccggcatcgtcgagcaatgatggcgccaggtgcatcaaggccattactaatgacggtaatgacgccatttactcctga

SEQ ID NO: 31211 - protein, 212 aa, Muscodor strobelii
  misc_feature: SGI Peptide ID NO. 570742
  misc_feature (83)..(201): NCBI GI: 46140247 Blast Desc: FG11638.1 [Gibberella zeae PH-1]
  misc_feature (1)..(198): NCBI GI: 2352910 Blast Desc: proline rich protein 5MeD [Metarhizium anisopliae]
  misc_feature (1)..(198): NCBI GI: 2352910 Blast Desc: proline rich protein 5MeD [Metarhizium anisopliae]
  misc_feature (1)..(201): NCBI GI: 212634258 Blast Desc: Cytosolic protein, [Shewanella piezotolerans WP3] gi|212555742|gb|ACJ28196.1| Cytosolic protein, [Shewanella piezotolerans WP3]
  misc_feature (1)..(209): NCBI GI: 167623208 Blast Desc: Shal_1274 [Shewanella halifaxensis HAW-EB4] gi|167353230|gb|ABZ75843.1| conserved cytosolic protein [Shewanella halifaxensis HAW-EB4]
  misc_feature (1)..(209): NCBI GI: 157961065 Blast Desc: Spea_1237 [Shewanella pealeana ATCC 700345] gi|157846065|gb|ABV86564.1| conserved cytosolic protein [Shewanella pealeana ATCC 700345]
  misc_feature (1)..(201): NCBI GI: 170725866 Blast Desc: Swoo_1509 [Shewanella woodyi ATCC 51908] gi|169811213|gb|ACA85797.1| conserved cytosolic protein [Shewanella woodyi ATCC 51908]
  misc_feature (2)..(198): NCBI GI: 269104272 Blast Desc: cytosolic protein [Photobacterium damselae subsp. damselae CIP 102761] gi|268160912|gb|EEZ39409.1| cytosolic protein [Photobacterium damselae subsp. damselae CIP 102761]
  misc_feature (1)..(210): NCBI GI: 156977218 Blast Desc: VIBHAR_06004 [Vibrio harveyi ATCC BAA-1116] gi|156528812|gb|ABU73897.1| VIBHAR_06004 [Vibrio harveyi ATCC BAA-1116]
  misc_feature (1)..(208): NCBI GI: 209809118 Blast Desc: VSAL_II0313 [Aliivibrio salmonicida LFI1238] gi|208010680|emb|CAQ81067.1| exported protein [Aliivibrio salmonicida LFI1238]
MGFNSLDNKLYASNFVNGGAQLIRIGGNGQYQVVESLNKTDVNYNMGDVDEQGYYWLTTSYGWGFAKIDLIPNSSTYGRTVANGTSKAPPFTPLDWAYVPGAGNYLWALGYDSDFSQTNLLRFDRSTATLGVWTASTNFGNVTGKNIWGAVYAGPSGTLIGSENTSGDIWQFPLPGSSTKATYLASGPASSSNDGARCIKAITNDGNDAIYS

SEQ ID NO: 31212 - DNA, 3261 bp, Muscodor strobelii
  misc_feature: SGI EST ID NO. CUFF.73886.0
  misc_feature: Variant of the nucleotide sequence at SEQ ID NO 31210
ctcaagtggcccttggggcatcaagagcctacgatgccgtagaccctatacacactcataccaaccagttcaacttggagatggtcgagaaagagtatgctgctgccaattacaaaagctcaataattcttgagtccaactggactctggcccccgtcgacgcctacaccggtccaatcaacttcgggcgtggtgccatgaacgcccctatcaactgtctagggacaaatactcacctagggtgtcatgtgttcttgaacgttacctacgatccaaacaattgcgctgaactgtgtacaagcacaaccatatataatctaggtcatggcatggcggatcgaccgtgccgatttttcaatacttacatccttctgaaagaaggggcaaactttgcccaatactgctcaatgtatactcaactctgggattctgcgtgggccaccaattatggtcaaatcggacccgatggttccaactacacagttgacagctcggtgggatactacaataaaactgatccaggaccatgtcaagccatcgtctccaccaccacaaagactacgacaactgtgagctcaacaaagtcaacttcaacaacgagcaccaagccagctacaacaagcacaacaacgggcatcactaccaccacaccgaaaatcaccactaccagcactgtaagcagtacagccaccagcacaactaagagcactactgctagtactactactaagagcaccactactagcggtgcaaccactagcactacgacttcgacaccaggcgctaccaccaccaagagcacaacgtcaagtgccactacaactcagagcacttcagcttcgacaacaggtgccactaccactaagagtactacaactgcagtgacaactacgcagagcacgacgacttcaccaaccactacaaagagctctacaaccacaacgctaagtggtaccaccaccaagagtaccacgacttcagcacctactaccataagtactacaagctcaactacaagctcaacaccaagcgctaccaccaccaagagcacatccacttcagcaactacaagtaagagcaccacaactccagtaactacgacgagctcaactacgacttcaacgccgagtgcaactactaccaaaagcacaacaacttcagcaactacaacgaacagtattacaacgtcaacgtcagttacgacttctaccaagagtataacatcaagctcttcaaccactacgagcacaacaacctctacgagtaccaccaagtccacgacgacttccaccataagtactgccaccaccacaagtactacgacttcaacactaagtgccactaccactaagagtacaactgcttcagcaactacgacgaccagcagtacaacatcaacgccaggtgcgactactaccaagagtactacgtcttcaacgcccggcgttactacaacaaaaagctcgacgtcgagctcttcaaccattacaagcacaacaacttctgcgagtaccactaagtccacgacaacttcgacaacgagtgccactactaccaagagtactacgacttccgcaactactactcaaggtactacaacttcaacgactacgacaaaaagctctacaacctcaacctcgacaacaaacgcaactaccagcaagagcaccacatcgagctcctccactaccatgggtacaacaagctccacactcagtgctactacaactaaaagcacaacatcgagctcaactccaagcgttaccactactaaaagcacaacatcgagctcttctaccatcacaagcacgacgagctcaacctcaagcgttaccactactaaaagcacaacattcagctcctccgctaccacgagtacaacatcgagctcttccacagccaaaagcactacaagcttaacatccagtaccactaccgctacgagcataacgtcaagctctagtacaactaagagcataacctccagttctagtacaataacgggaacaacatcaagctctagtacaaataagagcacaacatcaagttctagtacaactaagagcacaacctccagttctagtacaataacgggaacaacatcaagttctactacgaccaaaggcacgacaagctcaacgccaggcgcgactactacaacaagtaagagcactacgacctcaacgacttcttcagcgcccacttcagcgcccacttcaacgaaaacgactacttcgactactaagtcagctgtcacaaccacgactactagcggacttcccacagtcccatgcaatgcaaacgggtatctacttcagactacaacgctttacagcgtcaacctcaacactggtgatcaaaccctgattaataattccgttggaacagcagtcaatgctatgggctttaattcgctagacaacaaattgtatgcatccaatttcgtcaatggtggagcgcaactgatcaggatcggcggtaatgggcaatatcaggtagtcgagtcgctcaacaagacagatgtcaactataacatgggtgatgttgacgagcagggttattactggttgacaacaagctatggatggggattcgccaagatagatttgatccccaactcttcaacgtacgggcgcaccgtagcgaacggtacatcgaaggcaccaccctttacgccccttgactgggcgtacgtaccgggcgctggcaactatctttgggctctcgggtacgactccgatttctcgcagacgaatcttttgcgatttgaccgctccacggccacgctaggcgtctggacggcatcaaccaacttcggcaatgtgacaggcaagaacatctggggcgccgtgtacgccggcccgtcggggaccttgatcggaagcgaaaatacaagtggggatatctggcaattcccgttacctgggtcctcaaccaaggcgacttacctcgcctcgggtccggcatcgtcgagcaatgatggcgccaggtgcatcaaggccattactaatgacggtaatgacgccatttactcctgatcgtctagagatgagacgctagacacagaaaaatgtacgggtacctgttcgagaagaatgaagatggtagtttacgcaatatgtctaggtattacttgacgtttttgaaattcgtgtgcctagacgataaagcatgaactcatggaattttaagaacagatagagaaagcgagaaattagatagtgtgatagtaataatgataatgatagatctattattagt

SEQ ID NO: 31213 - DNA, 1302 bp, Muscodor strobelii
  misc_feature: SGI cDNA ID NO. 570743
  misc_feature: Reduced expression when VOC is produced
  misc_feature: Encodes the peptide sequence at SEQ ID NO 31214
atggcaactggattgcttgtaggagcgctcgctctcgctcaagtggcccttggggcatcaagagcctacgatgccgtagaccctatacacactcataccaaccagttcaacttggagatggtcgagaaagagtatgctgctgccaattacaaaagctcaataattcttgagtccaactggactctggcccccgtcgacgcctacaccggtccaatcaacttcgggcgtggtgccatgaacgcccctatcaactgtctagggacaaatactcacctagggtgtcatgtgttcttgaacgttacctacgatccaaacaattgcgctgaactgtgtacaagcacaaccatatataatctaggtcatggcatggcggatcgaccgtgccgatttttcaatacttacatccttctgaaagaaggggcaaactttgcccaatactgctcaatgtatactcaactctgggattctgcgtgggccaccaattatggtcaaatcggacccgatggttccaactacacagttgacagctcggtgggatactacaataaaactgatccaggaccatgtcaagccatcgtctccaccaccacaaagactacgacaactgtgagctcaacaaagtcaacttcaacaacgagcaccaagccagctacaacaagcacaacaacgggcatcactaccaccacaccgaaaatcaccactaccagcacttactacaactgcagtgacaactacgcagagcacgacgacttcaccaaccactacaaagagctctacaaccacaacgctaagtggtaccaccaccaagagtaccacgacttcagcacctactaccataagtactacaagctcaactacaagctcaacaccaagcgctaccaccaccaagagcacatccacttcagcaactacaattacgacttctaccaagagtataacatcaagctcttcaaccactacgagcacaacaacctctacgagtaccaccaagtccacgacgacttccaccataacaactacgacgaccagcagtacaacatcaacgccaggtgcgactactaccaagagtactacgtcttcaacgcccggctccacgacaacttcgacaacgagtgccactactaccaagagtactacgacttccgcaactactactcaaggtactacaacttcaacgactacgacaaaaagctctacaacctcaacctcgacaacaaacgcaactaccagcaagagcaccacatcgagctcctccactaccatgggtacaacaagctccacactcagtgctactacaactaa

SEQ ID NO: 31214 - protein, 433 aa, Muscodor strobelii
  misc_feature: SGI Peptide ID NO. 570743
  misc_feature (78)..(229): NCBI GI: 169618509 Blast Desc: SNOG_12445 [Phaeosphaeria nodorum SN15] gi|160703625|gb|EAT80258.2| SNOG_12445 [Phaeosphaeria nodorum SN15]
  misc_feature (54)..(186): NCBI GI: 156048538 Blast Desc: SS1G_09000 [Sclerotinia sclerotiorum 1980] gi|154693397|gb|EDN93135.1| SS1G_09000 [Sclerotinia sclerotiorum 1980]
  misc_feature (58)..(187): NCBI GI: 154308896 Blast Desc: BC1G_07976 [Botryotinia fuckeliana B05.10] gi|150852602|gb|EDN27794.1| BC1G_07976 [Botryotinia fuckeliana B05.10]
  misc_feature (67)..(186): NCBI GI: 154300791 Blast Desc: BC1G_10695 [Botryotinia fuckeliana B05.10] gi|150856443|gb|EDN31635.1| BC1G_10695 [Botryotinia fuckeliana B05.10]
  misc_feature (77)..(164): NCBI GI: 169614215 Blast Desc: SNOG_10245 [Phaeosphaeria nodorum SN15] gi|111061460|gb|EAT82580.1| SNOG_10245 [Phaeosphaeria nodorum SN15]
  misc_feature (56)..(163): NCBI GI: 169619074 Blast Desc: SNOG_12730 [Phaeosphaeria nodorum SN15] gi|111058908|gb|EAT80028.1| SNOG_12730 [Phaeosphaeria nodorum SN15]
  misc_feature (65)..(181): NCBI GI: 85099157 Blast Desc: NCU04169 [Neurospora crassa OR74A] gi|12718457|emb|CAC28723.1| [Neurospora crassa] gi|28922246|gb|EAA31491.1| [Neurospora crassa OR74A]
  misc_feature (59)..(164): NCBI GI: 156055144 Blast Desc: SS1G_04923 [Sclerotinia sclerotiorum 1980] gi|154702708|gb|EDO02447.1| SS1G_04923 [Sclerotinia sclerotiorum 1980]
  misc_feature (65)..(163): NCBI GI: 189210375 Blast Desc: conserved [Pyrenophora tritici-repentis Pt-1C-BFP] gi|187977612|gb|EDU44238.1| conserved [Pyrenophora tritici-repentis Pt-1C-BFP]
  misc_feature (59)..(185): NCBI GI: 154289727 Blast Desc: BC1G_15977 [Botryotinia fuckeliana B05.10] gi|150848792|gb|EDN23985.1| BC1G_15977 [Botryotinia fuckeliana B05.10]
  misc_feature: Useful for introducing or modulating the production of volatile compounds
MATGLLVGALALAQVALGASRAYDAVDPIHTHTNQFNLEMVEKEYAAANYKSSIILESNWTLAPVDAYTGPINFGRGAMNAPINCLGTNTHLGCHVFLNVTYDPNNCAELCTSTTIYNLGHGMADRPCRFFNTYILLKEGANFAQYCSMYTQLWDSAWATNYGQIGPDGSNYTVDSSVGYYNKTDPGPCQAIVSTTTKTTTTVSSTKSTSTTSTKPATTSTTTGITTTTPKITTTSTYYNCSDNYAEHDDFTNHYKELYNHNAKWYHHQEYHDFSTYYHKYYKLNYKLNTKRYHHQEHIHFSNYNYDFYQEYNIKLFNHYEHNNLYEYHQVHDDFHHNNYDDQQYNINARCDYYQEYYVFNARLHDNFDNECHYYQEYYDFRNYYSRYYNFNDYDKKLYNLNLDNKRNYQQEHHIELLHYHGYNKLHTQCYYN

SEQ ID NO: 31215 - DNA, 3261 bp, Muscodor strobelii; identical to SEQ ID NO: 31212
  misc_feature: SGI EST ID NO. CUFF.73886.0
  misc_feature: Variant of the nucleotide sequence at SEQ ID NO 31213

SEQ ID NO: 31216 - DNA, 1107 bp, Muscodor strobelii
  misc_feature: SGI cDNA ID NO. 570744
  misc_feature: Reduced expression when VOC is produced
  misc_feature: Encodes the peptide sequence at SEQ ID NO 31217
atgcatccagcagctcggggactgcgactcattagaccaccgaggtctagcttcgcgcaattctcacggcgcactctggtcacggacgctgatgtcgacaaagcaaggcaatattgcatagcgcaattgcggcagtctgactacgactcgtacctcatccgaaacttcattcccaagtctagacaagatgcctacgacgcctttcgcacgctcaacctcgagctcgtccgcctccccgagctcgtctccaacccagccatcggccagatgcgcatgcagttctggcgcgatgccgtgaataacaccttcgctggccgtcccccgagggagcccatcatgctcctgctgcacagggtcttgacccagctcgccgacacctcgcccgacagcaatcccgcctcgatcaagttctggctcctgcggctcatcaacacccgcgagaagtacatggacaaccgcccattcacatctctcgccgccctcgaggactatgccgagaacacctatgccaccctcatgtactcgaccttggccgccctgggtgtccagtccatgcacgtcgaccacctcgccagccacgtcggcaaggcctgtggcattgctgccgtctgcagaggtgtcccagttctcgccgcccaattgccgcccgtcaaagctcctgacggtgcaaatgtagctgccagtcggaatcctgtcttacttctgcctttggacgtcatggcccaggccggtgtcaaggaggaagatgtctaccgctacgggcccgatgccgacggctttcaagatgccgtcttccaagtggccacgcgtgcaaatgatcatctcatcacggctcgagagatgttgaagaatctacgcgcaggacaatcccccggccacgactacgagcaccacggtgaagagcagcacgagtatgccagttctgcacccggccaagacggcttcgaacgagattgggcaaaaggcttcagtgtcttacttgagagtatacccgccaatgactatcttgcgcggttagagagtcaaaacttcaacccctttgctgtgaaaagcagctggaaacttccgtggaagctgtggcgagcccacaaatcacagcaaatttga

SEQ ID NO: 31217 - protein, 368 aa, Muscodor strobelii
  misc_feature: SGI Peptide ID NO. 570744
  misc_feature (16)..(368): NCBI GI: 39940418 Blast Desc: MGG_05031 [Magnaporthe grisea 70-15] gi|145010724|gb|EDJ95380.1| MGG_05031 [Magnaporthe grisea 70-15]
  misc_feature (4)..(368): NCBI GI: 171680900 Blast Desc: protein product [Podospora anserina] gi|170940408|emb|CAP65634.1| protein product [Podospora anserina]
  misc_feature (45)..(368): NCBI GI: 116191563 Blast Desc: CHGG_05499 [Chaetomium globosum CBS 148.51] gi|88181412|gb|EAQ88880.1| CHGG_05499 [Chaetomium globosum CBS 148.51]
  misc_feature (45)..(368): NCBI GI: 164422955 Blast Desc: NCU09517 [Neurospora crassa OR74A] gi|157069887|gb|EAA29276.2| conserved [Neurospora crassa OR74A]
  misc_feature (19)..(352): NCBI GI: 256725708 Blast Desc: [Nectria haematococca mpVI 77-13-4]
  misc_feature (17)..(352): NCBI GI: 46111687 Blast Desc: FG02725.1 [Gibberella zeae PH-1]
  misc_feature (4)..(368): NCBI GI: 255953433 Blast Desc: Pc21g04230 [Penicillium chrysogenum Wisconsin 54-1255] gi|211589180|emb|CAP95320.1| Pc21g04230 [Penicillium chrysogenum Wisconsin 54-1255]
  misc_feature (56)..(364): NCBI GI: 154283189 Blast Desc: conserved [Ajellomyces capsulatus NAm1] gi|150410570|gb|EDN05958.1| conserved [Ajellomyces capsulatus NAm1]
  misc_feature (28)..(368): NCBI GI: 240106912 Blast Desc: CPC735_017000 [Coccidioides posadasii C735 delta SOWgp]
  misc_feature (25)..(362): NCBI GI: 145241830 Blast Desc: An09g02470 [Aspergillus niger] gi|134078102|emb|CAK40184.1| protein product [Aspergillus niger]
  misc_feature: Useful for introducing or modulating the production of volatile compounds
MHPAARGLRLIRPPRSSFAQFSRRTLVTDADVDKARQYCIAQLRQSDYDSYLIRNFIPKSRQDAYDAFRTLNLELVRLPELVSNPAIGQMRMQFWRDAVNNTFAGRPPREPIMLLLHRVLTQLADTSPDSNPASIKFWLLRLINTREKYMDNRPFTSLAALEDYAENTYATLMYSTLAALGVQSMHVDHLASHVGKACGIAAVCRGVPVLAAQLPPVKAPDGANVAASRNPVLLLPLDVMAQAGVKEEDVYRYGPDADGFQDAVFQVATRANDHLITAREMLKNLRAGQSPGHDYEHHGEEQHEYASSAPGQDGFERDWAKGFSVLLESIPANDYLARLESQNFNPFAVKSSWKLPWKLWRAHKSQQI

SEQ ID NO: 31218 - DNA, 2518 bp, Muscodor strobelii
  misc_feature: SGI EST ID NO. CUFF.73888.0
  misc_feature: Variant of the nucleotide sequence at SEQ ID NO 31216
gcaacacgctgcaaggtaggtcaatcggaatgggtgccagggacccttgttcgccgtagttgatgtcatctggtcgcatgctacggtttaatggatttttctgcttcgatttcagtttcgcagcaggctgtctgtcttttcttcgcgaagttttctctcaatttgggttctcccgcgtcgctttttttgtatcataactacaagatgtcatactaacatgtgtaaatgaattgtacaatatttagaatattttaagcctcgttttcccctccacacaatgcatccagcagctcggggactgcgactcattagaccaccgaggtctagcttcgcgcaattctcacggcgcactctggtcacggacgctgatgtcgacaaagcaaggcaatattgcatagcgcaattgcggcagtctgactacgactcgtacctcatccgaaacttcattcccaagtctagacaagatgcctacgacgcctttcgcacgctcaacctcgagctcgtccgcctccccgagctcgtctccaacccagccatcggccagatgcgcatgcagttctggcgcgatgccgtgaataacaccttcgctggccgtcccccgagggagcccatcatgctcctgctgcacagggtcttgacccagctcgccgacacctcgcccgacagcaatcccgcctcgatcaagttctggctcctgcggctcatcaacacccgcgagaagtacatggacaaccgcccattcacatctctcgccgccctcgaggactatgccgagaacacctatgccaccctcatgtactcgaccttggccgccctgggtgtccagtccatgcacgtcgaccacctcgccagccacgtcggcaaggcctgtggcattgctgccgtctgcagaggtgtcccagttctcgccgcccaattgccgcccgtcaaagctcctgacggtgcaaatgtagctgccagtcggaatcctgtcttacttctgcctttggacgtcatggcccaggccggtgtcaaggaggaagatgtctaccgctacgggcccgatgccgacggctttcaagatgccgtcttccaagtggccacgcgtgcaaatgatcatctcatcacggctcgagagatgttgaagaatctacgcgcaggacaatcccccggccacgactacgagcaccacggtgaagagcagcacgagtatgccagttctgcacccggccaagacggcttcgaacgagattgggcaaaaggcttcagtgtcttacttgagagtatacccgccaatgactatcttgcgcggttagagagtcaaaacttcaacccctttgctgtgaaaagcagctggaaacttccgtggaagctgtggcgagcccacaaatcacagcaaatttgaaatatctcgctagtcttccaggtgcttaatgtgaattaattatcattgaataccaatgaaaaatgccggaagcccaactctatgccgtcttctcagggagtagtcggcaaacatctgtaatgcgcatattatccgtatgcccaaggagacgatgcgcgcggaatcctttggctgaggattttatgactaccatacgggatttggctgacatgatgactgtttcacaaattgctaacctcggtgcgtgagtgaattccgccgagcaagattcgaggacagtgttcggaacggggaacccgctcaagagttgcgaatggttcatcgggaaatcaatattcgactgtacctctggtctttcggctactacggtctagaacgccatgctatctttccggactgcactgaggcagggtgtcatacacagatgtatcgacggggcgatacatcagctcattcggtcctgcattcccctttcttgtacgccactatgttggctacattggctatgtgactaccctcttgtgtctctttttctgttatctcaaacttttccgagatgaggagggctctggaacttcgctctgatatgtgagctcgcaagagagaagctctagttaccttcgtaactgtgcgcctccttggaacgactttgccgtttgatgcgcataatggccacaacatcatcctatatttgacactacatggagctaacaggagaattgagttcagtgccgttcatggtgctttcaataggggcccagcccggctgagaaggtttgccgtctctcggaaagaatacgaactactgcatcggtacctgactaccaacgaagccgttggcttattatcagagatgaaggcaagccgctgtaaccgttgtcgtgctaagatgttgccgagatgcatgatattgccgacagaagaggtcaactgttgataaagtattgggaccacgcctgaccattaccattgtttccaatccggtaatggatgcgcctacttgtgcctttctctgcttacaactgagcagacataatcacatgttctgaaggtgaccgttgataccgcttatgataggcaatccataaaagctcgcatgttcctaacagacgaattcacttcatctcctcaaac

SEQ ID NO: 31219 - DNA, 3318 bp, Muscodor strobelii
  misc_feature: SGI cDNA ID NO. 570745
  misc_feature: Encodes the peptide sequence at SEQ ID NO 31220
atgagcttcactggttccgccgagccacccgccaaaagacgaaggttcttcgccgatccagatgagccgcttgcgcatggctcgccctccgatcgagactctgagactaccaaaatatctgcgagcagtctgagccacgttagtccgccgccgacgcgaaccgaagcggccaccgaaaatgctacaccagtcacgttcgatcgggatgcctttcaagcattgctcggcaccacggttgcccccgaagcgcttgagatcatcagttcgagatgtgacaacagcctggagcgtgcagtcaacatgtacttcgacggcacgtggaaaaactatcggaaagcctcccacccgctgatgacctccgccaaactgccctcgcgatctccatcagccaactcgatgagcacgccagcccacctgaaacccttcaatgctccacagggccaaagccttcgctacattggtgctttcggtgccgagggttgggcgaccaggagcggtaccaacctgctcaagcacggcgacaccatcaagatcgaacgccaaaaggtccaacaaacgccctcacgcatgcgcctcgccacttctggcaaggctgatgtcctggtgcgttttaccgacgcgaagggatcggagattggcagactgaccagcgatgccgccaattggatctcgtctctgatcgaccagaacgtgtgcaagttcgagggcacctgtgtctatgcccctgagcgcctacgtccaaacgataccgtcttcatacaactccgctgctttcttaagatgaccgtatttgacggcagtggatttcaacccgccgataatcgctccactgggccgtttgaacaaaaggaatcgcttgaagaacgcaaccttcgcctacgacagattggtattgtaaagctattcaaagaaattaaccttataccttcgaaaacgtcggctcaaaatgccagacaagggctcctcgatgcagccgaggcagacgaaaagaagagcaagctgcctcagtccactagtcgcgatggtccgccgtcttcgccgcctagtgatgatgctgaagaaggcgaggagctcgagcaagatcagctcgatgccttgtaccgcaaagctcagtcttttgacttcagcacgcccgaggcggagcctgccgataccttcgcaatgcatttacgcccgtaccagaagcaatcattacactggatgctggcaaaggaaaaggaccagaagaatgaagcccgcgaagcctcgatgcacccgttgtgggaagagtacttgtggcccctcaaagacgttgacgaccaagacttgccccgtatcgagggccaggaaagcttctatgtcaatccatactcaggcgaaatgtcattggacttccctcatcaggagcagcattgtcttggaggaatcttagcggacgaaatgggtcttggcaagacaattcagatgctcagtctgatccattctcacaagtctgatgttgttcttcgtcatgctgaaaacgctgcacgagcgcaactacccagacggctgccacggtctgttagttcgcatgatgttgtcgacgctcctaagacgaccttggttgtggcacccatgtcgctgctggcgcagtggcaaagcgaagcagagaatgcgtcgaaagaaggcactctcaaaagtattctgtattatgggaatgaaaaggcagataatcttcagtctatgtgtcgtgaagctaatcttgcaacagctcccgatgtaatcatcacgagttacggagttgttctttccgagttctcgcagattgcttcaaaggcgggtggcggtagagagtcccatagaggactgttttctcttaatttctttcgcattatacttgatgaaggtcataccatcaaaaaccgacagtcaaaaacatcaaaagcttgctacgaattactttccgagcatcggtgggtgttgacgggcacacctatcgtgaaccgacttgaagatcttttcagtctcgtcaggtttttgagagtcgagccgtggaataatttctcgttctggcgtactttcatcaccgttccgtttgagtcgaaagatttcatgcgggcacttgatgtcgtgcagacagtactagaacctctggtgatgagaagaacgaaagatatgaagactccaagtggagaacctctggttctgcttcctccaaagaccattaaacttgtcgatgttgagctctccgaagaagagcgtgctatctacgattatgtctttgcgaaagcaaaaagcaccttctctgcgaacattgagaagggaacagttatgaaggcttataccaccatctttgcgcaaattcttcgcttgcgtcaagcgtgctgccatccgtcacttgtccgtaaccaggatcttgtcattgaagaggagcttgctggggcagaagcggatgccgcagcaggattgagtgacgatatggatttacactcgctgatcgagaagttcacagccacaactaatgatcaaaaagaaggcagcaattttagcactcatgtcttggagcagattcgcgatgaagccgcaaatgaatgtccgatatgttcagaagagcccatgatcgaccaaacagtcactggctgctggcactcggcctgcaaaaactgccttttggatttcatgaaacaccacaaagatcgccacgagacaccccggtgtttcaactgccgtgagccattgaactaccgcgacttatttgaagttattcgacatgatgacgagcccagtgccatcaataagacgccaaaaatcagcttgcagcggcttggagtcaatgagtcctcgtcgaaggttgtatcacttatgagacacttgcgagagctgcgaagagagcatccacgtatgaaatccgtagtgttcagtcagttcacctcgttcatgtcactcatcgaaccagccttacaaaaagcaaacattcatttccttcgcttagatggctccattaaccaaaaaagtcgagctgccatcctgaaagagtttgcggaatctaatagatttaccattttattgataagtctgcgagctggtggtgtcggtcttaaccttgtccaagcgaagcgggtttatatgatggacccctggtggagctttgctgtcgaggctcaagccattgaccgagtgcatcgcatgggccaggaagacgaagtcaaagtttatcggtttatctgcaaagatagtgttgaggagcgtatgctcaaggttcaagatcgaaagaagttcattgcgacgtctttggggatgatgaccgacgaagagaagaggttgcagagaatcgaagacatcaaagagttgcttacttaa

SEQ ID NO: 31220 - protein, 1105 aa, Muscodor strobelii
  misc_feature: SGI Peptide ID NO. 570745
  misc_feature (153)..(258): Pfam Id: PF08797 Pfam Desc: HIRAN domain
  misc_feature (972)..(1050): Pfam Id: PF00271 Pfam Desc: Helicase conserved C-terminal domain
  misc_feature (393)..(787): Pfam Id: PF00176 Pfam Desc: SNF2 family N-terminal domain
  misc_feature (1)..(1104): NCBI GI: 145241786 Blast Desc: An09g02250 [Aspergillus niger] gi|134078079|emb|CAK40162.1| protein product [Aspergillus niger]
  misc_feature (8)..(1104): NCBI GI: 212533265 Blast Desc: DNA excision repair protein (Rad5), [Penicillium marneffei ATCC 18224] gi|210072153|gb|EEA26242.1| DNA excision repair protein (Rad5), [Penicillium marneffei ATCC 18224]
  misc_feature (1)..(1086): NCBI GI: 258567128 Blast Desc: UREG_04997 [Uncinocarpus reesii 1704] gi|237905754|gb|EEP80155.1| UREG_04997 [Uncinocarpus reesii 1704]
  misc_feature (8)..(1086): NCBI GI: 225561718 Blast Desc: DNA repair protein rad5 [Ajellomyces capsulatus G186AR]
  misc_feature (10)..(1086): NCBI GI: 226284904 Blast Desc: DNA repair protein rad5 [Paracoccidioides brasiliensis Pb01]
  misc_feature (10)..(1104): NCBI GI: 119174712 Blast Desc: CIMG_09318 [Coccidioides immitis RS]
  misc_feature (8)..(1086): NCBI GI: 225684512 Blast Desc: DNA repair protein rad5 [Paracoccidioides brasiliensis Pb03]
  misc_feature (63)..(1104): NCBI GI: 255953435 Blast Desc: Pc21g04240 [Penicillium chrysogenum Wisconsin 54-1255] gi|211589181|emb|CAP95321.1| Pc21g04240 [Penicillium chrysogenum Wisconsin 54-1255]
  misc_feature (8)..(1086): NCBI GI: 226294171 Blast Desc: DNA repair protein rad5 [Paracoccidioides brasiliensis Pb18]
  misc_feature (10)..(1104): NCBI GI: 238842613 Blast Desc: DNA repair protein rad5 [Microsporum canis CBS 113480]
MSFTGSAEPPAKRRRFFADPDEPLAHGSPSDRDSETTKISASSLSHVSPPPTRTEAATENATPVTFDRDAFQALLGTTVAPEALEIISSRCDNSLERAVNMYFDGTWKNYRKASHPLMTSAKLPSRSPSANSMSTPAHLKPFNAPQGQSLRYIGAFGAEGWATRSGTNLLKHGDTIKIERQKVQQTPSRMRLATSGKADVLVRFTDAKGSEIGRLTSDAANWISSLIDQNVCKFEGTCVYAPERLRPNDTVFIQLRCFLKMTVFDGSGFQPADNRSTGPFEQKESLEERNLRLRQIGIVKLFKEINLIPSKTSAQNARQGLLDAAEADEKKSKLPQSTSRDGPPSSPPSDDAEEGEELEQDQLDALYRKAQSFDFSTPEAEPADTFAMHLRPYQKQSLHWMLAKEKDQKNEAREASMHPLWEEYLWPLKDVDDQDLPRIEGQESFYVNPYSGEMSLDFPHQEQHCLGGILADEMGLGKTIQMLSLIHSHKSDVVLRHAENAARAQLPRRLPRSVSSHDVVDAPKTTLVVAPMSLLAQWQSEAENASKEGTLKSILYYGNEKADNLQSMCREANLATAPDVIITSYGVVLSEFSQIASKAGGGRESHRGLFSLNFFRIILDEGHTIKNRQSKTSKACYELLSEHRWVLTGTPIVNRLEDLFSLVRFLRVEPWNNFSFWRTFITVPFESKDFMRALDVVQTVLEPLVMRRTKDMKTPSGEPLVLLPPKTIKLVDVELSEEERAIYDYVFAKAKSTFSANIEKGTVMKAYTTIFAQILRLRQACCHPSLVRNQDLVIEEELAGAEADAAAGLSDDMDLHSLIEKFTATTNDQKEGSNFSTHVLEQIRDEAANECPICSEEPMIDQTVTGCWHSACKNCLLDFMKHHKDRHETPRCFNCREPLNYRDLFEVIRHDDEPSAINKTPKISLQRLGVNESSSKVVSLMRHLRELRREHPRMKSVVFSQFTSFMSLIEPALQKANIHFLRLDGSINQKSRAAILKEFAESNRFTILLISLRAGGVGLNLVQAKRVYMMDPWWSFAVEAQAIDRVHRMGQEDEVKVYRFICKDSVEERMLKVQDRKKFIATSLGMMTDEEKRLQRIEDIKELLT

SEQ ID NO: 31221 - DNA, 4030 bp, Muscodor strobelii
  misc_feature: SGI EST ID NO. CUFF.73891.0
  misc_feature: Variant of the nucleotide sequence at SEQ ID NO 31219
cacgacttgaaacgtgcttgcctgggaataggaattatctctttatgcctcttgacactgacctctaagcctcttttcttttccttactaggagtccttgtgtctttcccaaagaatgtgcaattactcagaacaccatcagttcctttgttaggtacatacgaatgagccgttgccgacatgagcttcactggttccgccgagccacccgccaaaagacgaaggttcttcgccgatccagatgagccgcttgcgcatggctcgccctccgatcgagactctgagactaccaaaatatctgcgagcagtctgagccacgttagtccgccgccgacgcgaaccgaagcggccaccgaaaatgctacaccagtcacgttcgatcgggatgcctttcaagcattgctcggcaccacggttgcccccgaagcgcttgagatcatcagttcgagatgtgacaacagcctggagcgtgcagtcaacatgtacttcgacggcacgtggaaaaactatcggaaagcctcccacccgctgatgacctccgccaaactgccctcgcgatctccatcagccaactcgatgagcacgccagcccacctgaaacccttcaatgctccacagggccaaagccttcgctacattggtgctttcggtgccgagggttgggcgaccaggagcggtaccaacctgctcaagcacggcgacaccatcaagatcgaacgccaaaaggtccaacaaacgccctcacgcatgcgcctcgccacttctggcaaggctgatgtcctggtgcgttttaccgacgcgaagggatcggagattggcagactgaccagcgatgccgccaattggatctcgtctctgatcgaccagaacgtgtgcaagttcgagggcacctgtgtctatgcccctgagcgcctacgtccaaacgataccgtcttcatacaactccgctgctttcttaagatgaccgtatttgacggcagtggatttcaacccgccgataatcgctccactgggccgtttgaacaaaaggaatcgcttgaagaacgcaaccttcgcctacgacagattggtattgtaaagctattcaaagaaattaaccttataccttcgaaaacgtcggctcaaaatgccagacaagggctcctcgatgcagccgaggcagacgaaaagaagagcaagctgcctcagtccactagtcgcgatggtccgccgtcttcgccgcctagtgatgatgctgaagaaggcgaggagctcgagcaagatcagctcgatgccttgtaccgcaaagctcagtcttttgacttcagcacgcccgaggcggagcctgccgataccttcgcaatgcatttacgcccgtaccagaagcaatcattacactggatgctggcaaaggaaaaggaccagaagaatgaagcccgcgaagcctcgatgcacccgttgtgggaagagtacttgtggcccctcaaagacgttgacgaccaagacttgccccgtatcgagggccaggaaagcttctatgtcaatccatactcaggcgaaatgtcattggacttccctcatcaggagcagcattgtcttggaggaatcttagcggacgaaatgggtcttggcaagacaattcagatgctcagtctgatccattctcacaagtctgatgttgttcttcgtcatgctgaaaacgctgcacgagcgcaactacccagacggctgccacggtctgttagttcgcatgatgttgtcgacgctcctaagacgaccttggttgtggcacccatgtcgctgctggcgcagtggcaaagcgaagcagagaatgcgtcgaaagaaggcactctcaaaagtattctgtattatgggaatgaaaaggcagataatcttcagtctatgtgtcgtgaagctaatcttgcaacagctcccgatgtaatcatcacgagttacggagttgttctttccgagttctcgcagattgcttcaaaggcgggtggcggtagagagtcccatagaggactgttttctcttaatttctttcgcattatacttgatgaaggtcataccatcaaaaaccgacagtcaaaaacatcaaaagcttgctacgaattactttccgagcatcggtgggtgttgacgggcacacctatcgtgaaccgacttgaagatcttttcagtctcgtcaggtttttgagagtcgagccgtggaataatttctcgttctggcgtactttcatcaccgttccgtttgagtcgaaagatttcatgcgggcacttgatgtcgtgcagacagtactagaacctctggtgatgagaagaacgaaagatatgaagactccaagtggagaacctctggttctgcttcctccaaagaccattaaacttgtcgatgttgagctctccgaagaagagcgtgctatctacgattatgtctttgcgaaagcaaaaagcaccttctctgcgaacattgagaagggaacagttatgaaggcttataccaccatctttgcgcaaattcttcgcttgcgtcaagcgtgctgccatccgtcacttgtccgtaaccaggatcttgtcattgaagaggagcttgctggggcagaagcggatgccgcagcaggattgagtgacgatatggatttacactcgctgatcgagaagttcacagccacaactaatgatcaaaaagaaggcagcaattttagcactcatgtcttggagcagattcgcgatgaagccgcaaatgaatgtccgatatgttcagaagagcccatgatcgaccaaacagtcactggctgctggcactcggcctgcaaaaactgccttttggatttcatgaaacaccacaaagatcgccacgagacaccccggtgtttcaactgccgtgagccattgaactaccgcgacttatttgaagttattcgacatgatgacgagcccagtgccatcaataagacgccaaaaatcagcttgcagcggcttggagtcaatgagtcctcgtcgaaggttgtatcacttatgagacacttgcgagagctgcgaagagagcatccacgtatgaaatccgtagtgttcagtcagttcacctcgttcatgtcactcatcgaaccagccttacaaaaagcaaacattcatttccttcgcttagatggctccattaaccaaaaaagtcgagctgccatcctgaaagagtttgcggaatctaatagatttaccattttattgataagtctgcgagctggtggtgtcggtcttaaccttgtccaagcgaagcgggtttatatgatggacccctggtggagctttgctgtcgaggctcaagccattgaccgagtgcatcgcatgggccaggaagacgaagtcaaagtttatcggtttatctgcaaagatagtgttgaggagcgtatgctcaaggttcaagatcgaaagaagttcattgcgacgtctttggggatgatgaccgacgaagagaagaggttgcagagaatcgaagacatcaaagagttgcttacttaaaagggcgatgaaatatcacttgcattatatacattgtccatccatccttcggatgagcacttacatggcgttggggggggcattttggggcattttacgcgtgcaacccctctggctgcaatttagaggcattgcttgtcagttacgttcattttgtagcatcagcggctattgaacaatgaagaatgaatttcgacgtgacaattcgttctcgagtacttgtcgtaggcgctagtttcaaggcgggccagtcagacacagccaattctccagggaaaaagctgatacagcacttagctgattcaggtgaagtggcagtctgctattccacatatcccacggctcgacacaactagatgggatacagagcatttggagagatttggtagaataatcgttgcatttagacagacgggcatggattttagcattttcagcgagctgaagcaccctgtcatagagatgtggtgtccataatttgaagcccccaattgcagacagaaatgtacataaatgccagcttataagcttg

SEQ ID NO: 31222 - DNA, 1155 bp, Muscodor strobelii
  misc_feature: SGI cDNA ID NO. 570746
  misc_feature: Encodes the peptide sequence at SEQ ID NO 31223
atgtcgtcagatcacaaccacgtattcatcaatgctgcgtactatccatcctggcgcatatatcgaggattgcctccttcgtccctacagaccgactgcataaaccgcatattctacgccttcctacgtctgaatcctgatggtaccctcagacttctcgatgaacacgccgatttcgtagtccccgccgacggtgaatccggctgtcttgccgctctcgctaagctcaaacatcaatcccagattcaacgccatgatcataacatccaccataatctcaagcacagctgcaatcaaggctcaagaccataccgtctcgagactctcatctctgtcgggggcggaggtggcagttctgaattcccaattatatcatcctctccacagtctcttctcacatttaccacgtctattgtctccttcatttctgagcacggcctcgacggtgtggacatagactgggagcatcccacaactctagccgaaggcgccgcgtacatcactctcctagccgccctacgctcagctctgccttccaaatatctcttgactactgcgctcccatgcggcgaatattgcctgcggcacatcgacttgaccgccttaaataatctcgtcgacagtataaacctcatgggctatgatttccacggcccatggacgccgactagcggtcatcacgcaaatctgtatgctgatgatgatcccgcaatgcacgcagatcgcgcgcattcctgccacaatggcgtgaaatacttaatttcccacggaatttcggcacataaaatcatccttggcgtcccggcctatgctcgaacattcgcaggtgcatgtaaacagggcgatgttttcgaaagctcagaggaaatcgaatatcgtgacctaccacagcattggataaaggatgctagcatagacacctgtggtgccgcaagtttcgtagaccgcgaccatatcgatcaagaaacacagaaagtgcacaaaggcaaaggatttatcacttttgatgttcctgaaactgtacgtcgcaaggctgaatacgtaaagcgaagggggcttggtgggatattctattggacgggagttggcgatatcaaagatgggccggagagtctcgtgcggactggttttgacgcattgaacaggatagaatga

SEQ ID NO: 31223 - protein, 384 aa, Muscodor strobelii
  misc_feature: SGI Peptide ID NO. 570746
  misc_feature (9)..(364): Pfam Id: PF00704 Pfam Desc: Glycosyl hydrolases family 18
  misc_feature (108)..(364): Pfam Id: PF00704 Pfam Desc: Glycosyl hydrolases family 18
  misc_feature (9)..(81): Pfam Id: PF00704 Pfam Desc: Glycosyl hydrolases family 18
  misc_feature (9)..(380): NCBI GI: 39947046 Blast Desc: conserved [Magnaporthe grisea 70-15] gi|59802967|gb|AAX07683.1| chitinase-like protein [Magnaporthe grisea] gi|145012285|gb|EDJ96941.1| conserved [Magnaporthe grisea
  misc_feature (8)..(381): NCBI GI: 256726155 Blast Desc: NECHADRAFT_106207 [Nectria haematococca mpVI 77-13-4]
  misc_feature (9)..(381): NCBI GI: 46116602 Blast Desc: FG04143.1 [Gibberella zeae PH-1]
  misc_feature (2)..(380): NCBI GI: 146322380 Blast Desc: class V chitinase [Aspergillus fumigatus Af293] gi|129556988|gb|EAL87991.2| class V chitinase, [Aspergillus fumigatus Af293]
  misc_feature (1)..(381): NCBI GI: 126032277 Blast Desc: TPA: TPA_inf: chitinase 18-2 [Hypocrea jecorina]
  misc_feature (9)..(382): NCBI GI: 71143448 Blast Desc: chitinase 18-2 [Trichoderma atroviride]
  misc_feature (9)..(383): NCBI GI: 238483487 Blast Desc: class V chitinase, [Aspergillus flavus NRRL3357] gi|220701032|gb|EED57370.1| class V chitinase, [Aspergillus flavus NRRL3357]
  misc_feature (8)..(380): NCBI GI: 255951272 Blast Desc: Pc22g25160 [Penicillium chrysogenum Wisconsin 54-1255] gi|211593420|emb|CAP99804.1| Pc22g25160 [Penicillium chrysogenum Wisconsin 54-1255]
  misc_feature (2)..(383): NCBI GI: 259489474 Blast Desc: TPA: class V chitinase, (AFU_orthologue; AFUA_1G02800) [Aspergillus nidulans FGSC A4]
  misc_feature (8)..(383): NCBI GI: 119189405 Blast Desc: CIMG_04750 [Coccidioides immitis RS]
  misc_feature (9)..(380): SWISSPROT Homolog: EC 3.2.1.14 Chitinase
MSSDHNHVFINAAYYPSWRIYRGLPPSSLQTDCINRIFYAFLRLNPDGTLRLLDEHADFVVPADGESGCLAALAKLKHQSQIQRHDHNIHHNLKHSCNQGSRPYRLETLISVGGGGGSSEFPIISSSPQSLLTFTTSIVSFISEHGLDGVDIDWEHPTTLAEGAAYITLLAALRSALPSKYLLTTALPCGEYCLRHIDLTALNNLVDSINLMGYDFHGPWTPTSGHHANLYADDDPAMHADRAHSCHNGVKYLISHGISAHKIILGVPAYARTFAGACKQGDVFESSEEIEYRDLPQHWIKDASIDTCGAASFVDRDHIDQETQKVHKGKGFITFDVPETVRRKAEYVKRRGLGGIFYWTGVGDIKDGPESLVRTGFDALNRIE

SEQ ID NO: 31224 - DNA, 2110 bp, Muscodor strobelii
  misc_feature: SGI EST ID NO. CUFF.73894.0
  misc_feature: Variant of the nucleotide sequence at SEQ ID NO 31222
tctctaccaaactactcgttaccattgcattggaaagcacacgatcggaagcacacgttttctaaagagtgccggttttctgttctatctccggatcccccttgactcttaattgtcaaccgaacaataagaccacgctctcaatctcattttgatggatttatctcgtatctccccaaaacagtttcaccaggcgccaacttcacaaagcatgcccacgatgtcgtcagatcacaaccacgtattcatcaatgctgcgtactatccatcctggcgcatatatcgaggattgcctccttcgtccctacagaccgactgcataaaccgcatattctacgccttcctacgtctgaatcctgatggtaccctcagacttctcgatgaacacgccgatttcgtagtccccgccgacggtgaatccggctgtcttgccgctctcgctaagctcaaacatcaatcccagattcaacgccatgatcataacatccaccataatctcaagcacagctgcaatcaaggctcaagaccataccgtctcgagactctcatctctgtcgggggcggaggtggcagttctgaattcccaattatatcatcctctccacagtctcttctcacatttaccacgtctattgtctccttcatttctgagcacggcctcgacggtgtggacatagactgggagcatcccacaactctagccgaaggcgccgcgtacatcactctcctagccgccctacgctcagctctgccttccaaatatctcttgactactgcgctcccatgcggcgaatattgcctgcggcacatcgacttgaccgccttaaataatctcgtcgacagtataaacctcatgggctatgatttccacggcccatggacgccgactagcggtcatcacgcaaatctgtatgctgatgatgatcccgcaatgcacgcagatcgcgcgcattcctgccacaatggcgtgaaatacttaatttcccacggaatttcggcacataaaatcatccttggcgtcccggcctatgctcgaacattcgcaggtgcatgtaaacagggcgatgttttcgaaagctcagaggaaatcgaatatcgtgacctaccacagcattggataaaggatgctagcatagacacctgtggtgccgcaagtttcgtagaccgcgaccatatcgatcaagaaacacagaaagtgcacaaaggcaaaggatttatcacttttgatgttcctgaaactgtacgtcgcaaggctgaatacgtaaagcgaagggggcttggtgggatattctattggacgggagttggcgatatcaaagatgggccggagagtctcgtgcggactggttttgacgcattgaacaggatagaatgatttggaagtcctcgtacccgataccaaagacttttcgcttagttcaaataatttggataagtatgtacgattgatgccaaagcccatcgttacctttgaggaatgacatggattggtctgaggaaatgatgctacctgcgactatactcaggtcgaatgcgagaattgattgaagactgatttcgatgcttttaccagcattactcctttccttgtcccttcccgttttcgtgtccagcgtttcgtacttcggggcgacacacttaatcgtattaataatcagatttgtcgctacagttcgagatacgtccggctggtgcgaaaagttcgacaacttggtccattgtttcactgaaccaatatacacctgtcgcaggtgaagaatagcacaaatagatcgtgctcttttatcgttcataatcttcaactctgatgtatttaaataagaccaaagtcggccagcgtcgattaatacctgaattgtgaccgttagaacgccaaaaacgcccccacgaagcttatcacgacgtctctttctgggcgtgtactctagcgaatgagcatcgtttggtggtgatctccaaatcgtccccgcttcaataccaagagctaccctagtcgcgaccatgagatgacaccatatgcgagcaatattgatcatagctaccctagtagaagttcgaagctagagaaaatgtatttccaaatagtgcactgaagtagacgaaagggaga

SEQ ID NO: 31225 - DNA, 1455 bp, Muscodor strobelii
  misc_feature: SGI cDNA ID NO. 570747
  misc_feature: Encodes the peptide sequence at SEQ ID NO 31226
atggaggacaaggtcgaaattcgtgcaccttcaccagaagacggtgctcacgcttctccgccgtcattagacgagaagacgctagcatcgtcaagggatctcgatgacacgtacgaagagtacaaaaagtcaaacgtgcagaatatcgatccggtcgaagcccgcaaggtattgcgaaagattgatctcaatatcttgccccttcttatggggacgtattttctgcagtatttggataaatcgagtatcaacttcgccagtgtctttgggttgcaggatgggactcatctgcatggccagcaatatgcatggctcagctcgctcttttatttgggatatctggtagctcaaccctttgcaggctatgcgcttcagagactaccgttaggaaaattcatcggtagcactgcgctagtctggggtctgctcacgatcacgactccagcttgcaataacttcgccgggattgcagcgaatcgtttcttacttggagtgtttgagtcggttgtcaatcctggcttcgttctctgtttatcaatgtggtggacgcaggacgagcaacccctcatttttgggggcattagtctggcatgggctataacgtttcttgtgttcatgccggacataccaacaacggcacgatttctcacccctcttcaacgaatactggccgttgaacgtgtagcccaaaatcggcagggtgtgaagaaccatcatttcaagaaatatcaggtctggcaatgcttgagagaccccaagacctggattctgttcatcatggccattgcggcgcagattcccaatgcagcccagtcgagtttcacgtctattattctcaaaactttcgggttttctacgctgcagactcagtatatgcagataccaggcaacgctgtccagattctatcacttcttgcatctggattcattagctctcgatacccaaatatgcgatgtcttgtcatgttggtcggtaatttgatttgtgttggagctggcgcagctcttgtaggtctaccagctggaccagatggaaccgagaataaatggggacgtcttgtagcactatggctttgttcgttccagtccgtcgggttcagtatgagtttgacgatggtgagcagcaacgtggcaggctacacgaaaaagcagttgactggcgccattctcttcgttggctattgcgttggtaatgtcattggtcctcaaaccttcatcgacagcgaggctccgctatacacttcggcctatatcgctattctcgtcggttattctgttaagacattaatggtcatcttattgtatctttacatgtggggtgtaaacaagaaacgagatcgtgagatggcgggttcaagttcaacgctgaatgaacagcaagttaaagatgctatcgagagaggcatgcaggacgttaccgaaattgacaacaaaggatttagatacgttttatag

SEQ ID NO: 31226 - protein, 484 aa, Muscodor strobelii
  misc_feature: SGI Peptide ID NO. 570747
  misc_feature (69)..(402): Pfam Id: PF07690 Pfam Desc: Major Facilitator Superfamily
  misc_feature (69)..(188): Pfam Id: PF07690 Pfam Desc: Major Facilitator Superfamily
  misc_feature (189)..(402): Pfam Id: PF07690 Pfam Desc: Major Facilitator Superfamily
  misc_feature (9)..(484): NCBI GI: 154296608 Blast Desc: BC1G_12712 [Botryotinia fuckeliana B05.10] gi|150843295|gb|EDN18488.1| BC1G_12712 [Botryotinia fuckeliana B05.10]
  misc_feature (16)..(484): NCBI GI: 156058986 Blast Desc: SS1G_03505 [Sclerotinia sclerotiorum 1980] gi|154701292|gb|EDO01031.1| SS1G_03505 [Sclerotinia sclerotiorum 1980]
  misc_feature (29)..(484): NCBI GI: 169786341 Blast Desc: [Aspergillus oryzae RIB40] gi|83776379|dbj|BAE66498.1| protein product [Aspergillus oryzae]
  misc_feature (29)..(484): NCBI GI: 238507341 Blast Desc: MFS transporter, [Aspergillus flavus NRRL3357] gi|220689585|gb|EED45936.1| MFS transporter, [Aspergillus flavus NRRL3357]
  misc_feature (19)..(484): NCBI GI: 115401858 Blast Desc: [Aspergillus terreus NIH2624] gi|114190458|gb|EAU32158.1| [Aspergillus terreus NIH2624]
  misc_feature (34)..(484): NCBI GI: 169603678 Blast Desc: SNOG_04847 [Phaeosphaeria nodorum SN15] gi|111066118|gb|EAT87238.1| SNOG_04847 [Phaeosphaeria nodorum SN15]
  misc_feature (13)..(469): NCBI GI: 255953755 Blast Desc: Pc21g05850 [Penicillium chrysogenum Wisconsin 54-1255] gi|211589341|emb|CAP95482.1| Pc21g05850 [Penicillium chrysogenum Wisconsin 54-1255]
  misc_feature (31)..(469): NCBI GI: 159127107 Blast Desc: MFS transporter, [Aspergillus fumigatus A1163]
  misc_feature (2)..(419): NCBI GI: 119483484 Blast Desc: allantoate permease [Neosartorya fischeri NRRL 181] gi|119409801|gb|EAW19748.1| allantoate permease [Neosartorya fischeri NRRL 181]
  misc_feature (31)..(419): NCBI GI: 70998731 Blast Desc: MFS transporter [Aspergillus fumigatus Af293] gi|66851724|gb|EAL92049.1| MFS transporter, [Aspergillus fumigatus Af293]
MEDKVEIRAPSPEDGAHASPPSLDEKTLASSRDLDDTYEEYKKSNVQNIDPVEARKVLRKIDLNILPLLMGTYFLQYLDKSSINFASVFGLQDGTHLHGQQYAWLSSLFYLGYLVAQPFAGYALQRLPLGKFIGSTALVWGLLTITTPACNNFAGIAANRFLLGVFESVVNPGFVLCLSMWWTQDEQPLIFGGISLAWAITFLVFMPDIPTTARFLTPLQRILAVERVAQNRQGVKNHHFKKYQVWQCLRDPKTWILFIMAIAAQIPNAAQSSFTSIILKTFGFSTLQTQYMQIPGNAVQILSLLASGFISSRYPNMRCLVMLVGNLICVGAGAALVGLPAGPDGTENKWGRLVALWLCSFQSVGFSMSLTMVSSNVAGYTKKQLTGAILFVGYCVGNVIGPQTFIDSEAPLYTSAYIAILVGYSVKTLMVILLYLYMWGVNKKRDREMAGSSSTLNEQQVKDAIERGMQDVTEIDNKGFRYVL

SEQ ID NO: 31227 - DNA, 323 bp, Muscodor strobelii
  misc_feature: SGI EST ID NO. CUFF.73906.0
  misc_feature: Variant of the nucleotide sequence at SEQ ID NO 31225
gtcggttattctgttaagacattaatggtcatcttattgtatctttacatgtggggtgtaaacaagaaacgagatcgtgagatggcgggttcaagttcaacgctgaatgaacagcaagttaaagatgctatcgagagaggcatgcaggacgttaccgaaattgacaacaaaggatttagatacgttttatagcgagtattctaaataaaaaggttcaagtaagaattgtcgtgaagattgccgcacgttgtccgcgctaatctggtgaatgattggggcgcgtcttttatcacggcaacattatcaatatagtggctttcaac

SEQ ID NO: 31228 - DNA, 1824 bp, Muscodor strobelii
  misc_feature: SGI cDNA ID NO. 570748
  misc_feature: Reduced expression when VOC is produced
  misc_feature: Encodes the peptide sequence at SEQ ID NO 31229
atgcgtgccggtaacatctttgtggccgatctcatagaggcccagctattgcacaaagtgcaccgaattcgcattgcaatttacggaagtctcgccctcacgggcgagggtcacatgacaccgtctgctcttctccttggccttgagagcgctgatgtcgagacggtggataccgcgtacgtaccggaccgcttcgtccagatcaaggagctgaagaagctctttcttggccaggggctcggtgaaggaaaaggcaaggagatcgatttcgattacgaacgggacttcaaatgggaatggggccgaaagcttccattgcacagtaatgggatgcgttttaccgtgtttgccgaggatgggtcgactctagcgatgaacgatctattcagcgtgggtggcggtttcgtggtcaacggtgcactctcaatagctgcgccctcgtcctcgaacagtgccgttgggcaagctctcgagtcggattcgcgcgatttgcaagtagacggtggtggccatccggccgattatgtggaaaacatgttctataaagaaatcagacgcgcagatgccgcagaagggcgcagaagcggttccgagattaagtctttcgaagccactgatgaatccactgctcttgtcgatactaccacaatgccaccttcccctggaaccgaggcagccgatcgtcagcaaaccactactgagactggggctcagaagcctcgctatcctttccgtgacggtcgaagcttactggcactctgtcacaagcacaatcttacgatagcacagctggtatatgagaatgagaagagccatggctacactgacgaggagatcgtagagaaactgcttcgcatatgggaagtgatggaccagagtatcctcgagggggtacaggcaccgcttgatactacgttgcccggctcgctgaagctacacaggcgagcgccagccctttacaagcgactcaacaggggtctatatccatctcagagccagagtctctctccatcagatagcaaggcacagctctcatctcccaagactgaggacatcacgaaaaagcagggacagggtaaaagtctcgagcctaccacaaagagcacttctcttaccagaggcgttaatggaaaacggggcccgccccggatacatggatctgtctatcatccaattatgccgtctcctcatcgacgcaccgcgcttccggcaatggactatttgacagtctatgcgattgctgtcaacgagacaaatgcggcaggaggacgtatcgtaacagcacctaccaacggtgccgcgggtataattccgtcggtactcaagtacactgttgaatttattagcgacgatccggaacgtgatattcttacgtttctcttgactgccgcagcgattggtatgctctacaagcgcggagcgactatctctgcagcggagggcggatgcatggcagaagtaggcgttgcttgctctatggcagcaggtgctttcgccgcctgtatgggcgcaagcccagagaccgttgagcaagcggcagagattggaattgagcacaaccttggtcttacgtgcgatccgatcggagggcttgtccaagcaccctgtatcgagcgcaatgcgctaggtgctatcaaagcgatttcaagtgccaatttggcgctcagctccgaggcgggcacacagaaagtgagcctggacgatgcaattcgagccatgcgacttacagcccaaggaatgcgaaacgaattcaaagagacaagtttgagcggactagctaccagtgtgccattgaacattccagtcagcgtgccggattgttga

SEQ ID NO: 31229 - protein, 607 aa, Muscodor strobelii
  misc_feature: SGI Peptide ID NO. 570748
  misc_feature (245)..(595): Pfam Id: PF03313 Pfam Desc: Serine dehydratase alpha chain
  misc_feature (1)..(140): Pfam Id: PF03315 Pfam Desc: Serine dehydratase beta chain
  misc_feature (404)..(595): Pfam Id: PF03313 Pfam Desc: Serine dehydratase alpha chain
  misc_feature (1)..(137): Pfam Id: PF03315 Pfam Desc: Serine dehydratase beta chain
  misc_feature (1)..(607): NCBI GI: 261357982 Blast Desc: L-serine dehydratase [Verticillium albo-atrum VaMs.102]
  misc_feature (1)..(607): NCBI GI: 256724175 Blast Desc: [Nectria haematococca mpVI 77-13-4]
  misc_feature (1)..(607): NCBI GI: 46115652 Blast Desc: FG03668.1 [Gibberella zeae PH-1]
  misc_feature (1)..(607): NCBI GI: 71003017 Blast Desc: UM00042.1 [Ustilago maydis 521] gi|46096194|gb|EAK81427.1| UM00042.1 [Ustilago maydis 521]
  misc_feature (1)..(607): NCBI GI: 164661683 Blast Desc: MGL_1232 [Malassezia globosa CBS 7966] gi|159105865|gb|EDP44750.1| MGL_1232 [Malassezia globosa CBS 7966]
  misc_feature (1)..(607): NCBI GI: 170094971 Blast Desc: [Laccaria bicolor S238N-H82] gi|164646010|gb|EDR10256.1| [Laccaria bicolor S238N-H82]
  misc_feature (380)..(607): NCBI GI: 169849803 Blast Desc: CC1G_05671 [Coprinopsis cinerea okayama7#130] gi|116507238|gb|EAU90133.1| CC1G_05671 [Coprinopsis cinerea okayama7#130]
  misc_feature (195)..(596): NCBI GI: 186477761 Blast Desc: L-serine dehydratase 1 [Burkholderia phymatum STM815] gi|184194220|gb|ACC72185.1| L-serine dehydratase 1 [Burkholderia phymatum STM815]
  misc_feature (145)..(596): NCBI GI: 282884271 Blast Desc: L-serine dehydratase 1 [Burkholderia sp. CCGE1001] gi|281329892|gb|EFB11659.1| L-serine dehydratase 1 [Burkholderia sp. CCGE1001]
  misc_feature (195)..(596): NCBI GI: 170694330 Blast Desc: L-serine dehydratase 1 [Burkholderia graminis C4D1M] gi|170140753|gb|EDT08927.1| L-serine dehydratase 1 [Burkholderia graminis C4D1M]
  misc_feature: Useful for introducing or modulating the production of volatile compounds
MRAGNIFVADLIEAQLLHKVHRIRIAIYGSLALTGEGHMTPSALLLGLESADVETVDTAYVPDRFVQIKELKKLFLGQGLGEGKGKEIDFDYERDFKWEWGRKLPLHSNGMRFTVFAEDGSTLAMNDLFSVGGGFVVNGALSIAAPSSSNSAVGQALESDSRDLQVDGGGHPADYVENMFYKEIRRADAAEGRRSGSEIKSFEATDESTALVDTTTMPPSPGTEAADRQQTTTETGAQKPRYPFRDGRSLLALCHKHNLTIAQLVYENEKSHGYTDEEIVEKLLRIWEVMDQSILEGVQAPLDTTLPGSLKLHRRAPALYKRLNRGLYPSQSQSLSPSDSKAQLSSPKTEDITKKQGQGKSLEPTTKSTSLTRGVNGKRGPPRIHGSVYHPIMPSPHRRTALPAMDYLTVYAIAVNETNAAGGRIVTAPTNGAAGIIPSVLKYTVEFISDDPERDILTFLLTAAAIGMLYKRGATISAAEGGCMAEVGVACSMAAGAFAACMGASPETVEQAAEIGIEHNLGLTCDPIGGLVQAPCIERNALGAIKAISSANLALSSEAGTQKVSLDDAIRAMRLTAQGMRNEFKETSLSGLATSVPLNIPVSVPDC

SEQ ID NO: 31230 - DNA, 3206 bp, Muscodor strobelii
  misc_feature: SGI EST ID NO. CUFF.73909.0
  misc_feature: Variant of the nucleotide sequence at SEQ ID NO 31228
atcaaagatgatagataacatgtttcattttccctagctaatcaaagaaatgccaagttgattcaactcaattgacattctgttgcaagttctgtggcattttcgttgcgctacgggttgtggccgtatgctctgtcgcttgcgacgagcctctacatttttgagctaccccatcctcatccacacgcaaatcagatatcaccctcgcttgttcgaggcagtaagtctgacgatgaggcaagtttcatctcggcagctcgggctgttatcgcgctcattgcgaactcaatggaatcgatcgccaacaacggcatggaaagccagtgtcgcttctacacgaataacaccccttaaagtagttcgtcacgcaacgtggtcgatgcctcaaggccgatgtttcagcgcctctacctcagcatcagaaaattccgacgagcacgacacgggcacatacagcgaggctgaccatgaacatgccgtcatcagtacctttgatttgttttccgtcggcatcggtccctcatcctcacataccgtcgggccgatgcgtgccggtaacatctttgtggccgatctcatagaggcccagctattgcacaaagtgcaccgaattcgcattgcaatttacggaagtctcgccctcacgggcgagggtcacatgacaccgtctgctcttctccttggccttgagagcgctgatgtcgagacggtggataccgcgtacgtaccggaccgcttcgtccagatcaaggagctgaagaagctctttcttggccaggggctcggtgaaggaaaaggcaaggagatcgatttcgattacgaacgggacttcaaatgggaatggggccgaaagcttccattgcacagtaatgggatgcgttttaccgtgtttgccgaggatgggtcgactctagcgatgaacgatctattcagcgtgggtggcggtttcgtggtcaacggtgcactctcaatagctgcgccctcgtcctcgaacagtgccgttgggcaagctctcgagtcggattcgcgcgatttgcaagtagacggtggtggccatccggccgattatgtggaaaacatgttctataaagaaatcagacgcgcagatgccgcagaagggcgcagaagcggttccgagattaagtctttcgaagccactgatgaatccactgctcttgtcgatactaccacaatgccaccttcccctggaaccgaggcagccgatcgtcagcaaaccactactgagactggggctcagaagcctcgctatcctttccgtgacggtcgaagcttactggcactctgtcacaagcacaatcttacgatagcacagctggtatatgagaatgagaagagccatggctacactgacgaggagatcgtagagaaactgcttcgcatatgggaagtgatggaccagagtatcctcgagggggtacaggcaccgcttgatactacgttgcccggctcgctgaagctacacaggcgagcgccagccctttacaagcgactcaacaggggtctatatccatctcagagccagagtctctctccatcagatagcaaggcacagctctcatctcccaagactgaggacatcacgaaaaagcagggacagggtaaaagtctcgagcctaccacaaagagcacttctcttaccagaggcgttaatggaaaacggggcccgccccggatacatggatctgtctatcatccaattatgccgtctcctcatcgacgcaccgcgcttccggcaatggactatttgacagtctatgcgattgctgtcaacgagacaaatgcggcaggaggacgtatcgtaacagcacctaccaacggtgccgcgggtataattccgtcggtactcaagtacactgttgaatttattagcgacgatccggaacgtgatattcttacgtttctcttgactgccgcagcgattggtatgctctacaagcgcggagcgactatctctgcagcggagggcggatgcatggcagaagtaggcgttgcttgctctatggcagcaggtgctttcgccgcctgtatgggcgcaagcccagagaccgttgagcaagcggcagagattggaattgagcacaaccttggtcttacgtgcgatccgatcggagggcttgtccaagcaccctgtatcgagcgcaatgcgctaggtgctatcaaagcgatttcaagtgccaatttggcgctcagctccgaggcgggcacacagaaagtgagcctggacgatgcaattcgagccatgcgacttacagcccaaggaatgcgaaacgaattcaaagagacaagtttgagcggactagctaccagtgtgccattgaacattccagtcagcgtgccggattgttgaacattccgatgctcttcataggctctcgacttgcgggtcattcaagttacacggaaaaggatttatagaaagtgtgtacagacacggagtcgggcgttacgtttagatctcaccattgatgtaccgtgttttcgagccgatgcaagtattattgcttgaaaacaaaaatcttacacgtaaaatagagaattagagtcgctagacatgtccaatctcaaacccgaagcctccaaagcacctgtatggcttgctctgccacaatcacaaagtgttaacatttcggtgagcattctatgacatgtatcgatatatagaagccgagcagcggattcgtctattgcgggtggtcttaggcgatcatcatttttgcattcgttccgcggagatatatgctacgagattgattatgtgatacaaagtcgacatggcgtagtccgataccggctcacatacaaaacgtttggaaaaacgttggaacacctgacctgtcacttgttgcaactagatacaagtccaatagagtctgtcctgattgaagcgacataccgaatggtctccagtcgcggtaacgagttttggcggggtgcatcttgggtctttacactctcacacatcatagatcatgaggccaaacatgatgtgatctaaagatttcctccggataaagcttggtgtgctgagaacttacaggatcagatgatttagatccaatatgatacgggcgatgatgcattgaaaagtgagcaggcgatttatctcgattatatgcaaacgaagaacatctgtttgggaccggaaaaaacttctagaattttttcctcgctttagtggagtctcg

SEQ ID NO: 31231 - DNA, 1560 bp, Muscodor strobelii
  misc_feature: SGI cDNA ID NO. 570749
  misc_feature: Reduced expression when VOC is produced
  misc_feature: Encodes the peptide sequence at SEQ ID NO 31232
atgccacaccgcgtagtagatttcttccgggcacccaatgacaacatgcacgccgccattaagactgtgcagcgccggaggagccccgcggcgcaaacagaacgacaacaccccacccgcacttcatcttatgcatcaaccactgacggtagcgtcgaggaccactcaccatcagttgcaccagcagtgaagataccggattcagcaaaagaaaagcaaaaggagcgtcaccgcataagttttcctacgctacacttaggtggacacaaggcatcgaaggagtcggtgcaaaatacggacgcatctctggactggaagatagaatcgcctccagcgattctgcacggtacgccggaagagagtactggggctttggtttcaggtcaattactccttgacgtaaagacggaaagcttcgaggtggagaatcttgaggccaaattggaactcatcgtcacccagaagaagccatttcacacccactgccacgaatgcgctactcagaaaactgaaatccagaagtggtctctgctcagtgagccaacggctttgacgaaacgcacacatgagttccctttctcagtattattagaaggtcgcttacccgctacgacggataatcagcttctctctatcagctacgtattcacagcggaagctaagccgcgagatgatggtatccccatcaagttcaaccgcaagattgatgtgcggcgctcgcttcaagtgcccgagcaacaacaccacagtttgcggattttcccgccaacggatatcaccgcaagcatgcactacgactccgttattcacccgcttggcaccaaccgcttccagctccgtctcgacggtgtaggaaagcacacctctggtaaccgaagtgtcgagtactggaagttgaagcgtctttcatggaagctcgaggagaccgtcaagacggtagcacctgcatgtggcaagcatacgcccaaaccaacgggcgccgatgctgaaacgaagaaggggatcacgcgaaacgagacccgtgtccttgcgcatgccgatctgcacgccggatggaaggcagactacgtcagcgagaacggacacgtcgacgccgaactcgagtatgcaaccgtagggccgaacgccagtaagaaggccgtgagctgcgatctgcgcgccagtgacggaaccgaagtctcgcaccggctcgtcgttgaaatggtcgtcgcccaagaatacgccgctttgccatatgctcgccacgtcacacctacaggcgttgcgcggatcttgcgcatgaacttcgcagtcaccattacggaacgatctggactcggcgtatcatgggacaacgaggcacctcctatctaccaagatgtcccgccgtccccaccatcatacgcctgcgcggtcatcaagcatgggagtgtcgaggatctgagtctatcgggtccgagcacaccgcttgatggcgacgaaagcccatatggtgttgagagcccggcttactgcgagtttcctactccgcggggagcgtcgcccgaacctgaagcttcggcatcagcttcgactccgtga

SEQ ID NO: 31232 - protein, 519 aa, Muscodor strobelii
  misc_feature: SGI Peptide ID NO. 570749
  misc_feature (1)..(485): NCBI GI: 171680902 Blast Desc: protein product [Podospora anserina] gi|170940409|emb|CAP65635.1| protein product [Podospora anserina]
  misc_feature (70)..(485): NCBI GI: 116191559 Blast Desc: CHGG_05497 [Chaetomium globosum CBS 148.51] gi|88181410|gb|EAQ88878.1| CHGG_05497 [Chaetomium globosum CBS 148.51]
  misc_feature (1)..(488): NCBI GI: 256726162 Blast Desc: [Nectria haematococca mpVI 77-13-4]
  misc_feature (1)..(487): NCBI GI: 46111215 Blast Desc: FG02489.1 [Gibberella zeae PH-1]
  misc_feature (1)..(474): NCBI GI: 85090631 Blast Desc: NCU09514 [Neurospora crassa OR74A] gi|28919878|gb|EAA29273.1| conserved [Neurospora crassa OR74A]
  misc_feature (1)..(485): NCBI GI: 39940420 Blast Desc: MGG_05030 [Magnaporthe grisea 70-15] gi|145010725|gb|EDJ95381.1| MGG_05030 [Magnaporthe grisea 70-15]
  misc_feature (78)..(469): NCBI GI: 154310572 Blast Desc: BC1G_06760 [Botryotinia fuckeliana B05.10] gi|150851300|gb|EDN26493.1| BC1G_06760 [Botryotinia fuckeliana B05.10]
  misc_feature (1)..(407): NCBI GI: 261354635 Blast Desc: LDB19 [Verticillium albo-atrum VaMs.102]
  misc_feature (78)..(475): NCBI GI: 156058422 Blast Desc: SS1G_03222 [Sclerotinia sclerotiorum 1980] gi|154701010|gb|EDO00749.1| SS1G_03222 [Sclerotinia sclerotiorum 1980]
  misc_feature (55)..(462): NCBI GI: 189200260 Blast Desc: PTRG_06134 [Pyrenophora tritici-repentis Pt-1C-BFP] gi|187983566|gb|EDU49054.1| PTRG_06134 [Pyrenophora tritici-repentis Pt-1C-BFP]
  misc_feature: Useful for introducing or modulating the production of volatile compounds
MPHRVVDFFRAPNDNMHAAIKTVQRRRSPAAQTERQHPTRTSSYASTTDGSVEDHSPSVAPAVKIPDSAKEKQKERHRISFPTLHLGGHKASKESVQNTDASLDWKIESPPAILHGTPEESTGALVSGQLLLDVKTESFEVENLEAKLELIVTQKKPFHTHCHECATQKTEIQKWSLLSEPTALTKRTHEFPFSVLLEGRLPATTDNQLLSISYVFTAEAKPRDDGIPIKFNRKIDVRRSLQVPEQQHHSLRIFPPTDITASMHYDSVIHPLGTNRFQLRLDGVGKHTSGNRSVEYWKLKRLSWKLEETVKTVAPACGKHTPKPTGADAETKKGITRNETRVLAHADLHAGWKADYVSENGHVDAELEYATVGPNASKKAVSCDLRASDGTEVSHRLVVEMVVAQEYAALPYARHVTPTGVARILRMNFAVTITERSGLGVSWDNEAPPIYQDVPPSPPSYACAVIKHGSVEDLSLSGPSTPLDGDESPYGVESPAYCEFPTPRGASPEPEASASASTP

SEQ ID NO: 31233 - DNA, 2653 bp, Muscodor strobelii
  misc_feature: SGI EST ID NO. CUFF.74093.1
  misc_feature: Variant of the nucleotide sequence at SEQ ID NO 31231
cttttgtgacccattaggacttcagatgattcattgcgaagcgaatctttgttttcattcatcttttaagtcaacagcatctcatcttggagagctttactcacccacccatcccccattgctcttgtcacttatacgcgagctataggccaatcaagaccctgcattcagcacgacgcctcccaaaggaggaaaagtttattatctaactggccagcgtcatagaattgcagccaatacgctgtgaactgcgtctggatacaaagtgatgaaagaaggagacgcctctttcgtcttctaaaacgcgcaaaaactcatctcgcaagaatcgaggcttagacgtttgagggaaaattgctgcgtcagctgataaaaaaatccgttgggttctgcaaccgtcgcacgatcttgctaccagcaaaattgcatcacacccgcactattcccaagaccccttctcaagcaaaccttgttccaagagccatctcgcgactcgcaaattagaggcgttggactttttccagcgtcctgtccctcaattttgacggtgtattggaacaaaagccaattttgttcctcccggcaagatttttcgcaagaattggggagcgctaaaaccacaagcccgactgcttgcatagcacttacagaggtcacacgacataaagcatagcgtggaaagcgtctccatcatttttgcctttttttgtccacacagactaggaagacagagtaaagcgccaccgacatcatccagaagactaagtcaagatgccacaccgcgtagtagatttcttccgggcacccaatgacaacatgcacgccgccattaagactgtgcagcgccggaggagccccgcggcgcaaacagaacgacaacaccccacccgcacttcatcttatgcatcaaccactgacggtagcgtcgaggaccactcaccatcagttgcaccagcagtgaagataccggattcagcaaaagaaaagcaaaaggagcgtcaccgcataagttttcctacgctacacttaggtggacacaaggcatcgaaggagtcggtgcaaaatacggacgcatctctggactggaagatagaatcgcctccagcgattctgcacggtacgccggaagagagtactggggctttggtttcaggtcaattactccttgacgtaaagacggaaagcttcgaggtggagaatcttgaggccaaattggaactcatcgtcacccagaagaagccatttcacacccactgccacgaatgcgctactcagaaaactgaaatccagaagtggtctctgctcagtgagccaacggctttgacgaaacgcacacatgagttccctttctcagtattattagaaggtcgcttacccgctacgacggataatcagcttctctctatcagctacgtattcacagcggaagctaagccgcgagatgatggtatccccatcaagttcaaccgcaagattgatgtgcggcgctcgcttcaagtgcccgagcaacaacaccacagtttgcggattttcccgccaacggatatcaccgcaagcatgcactacgactccgttattcacccgcttggcaccaaccgcttccagctccgtctcgacggtgtaggaaagcacacctctggtaaccgaagtgtcgagtactggaagttgaagcgtctttcatggaagctcgaggagaccgtcaagacggtagcacctgcatgtggcaagcatacgcccaaaccaacgggcgccgatgctgaaacgaagaaggggatcacgcgaaacgagacccgtgtccttgcgcatgccgatctgcacgccggatggaaggcagactacgtcagcgagaacggacacgtcgacgccgaactcgagtatgcaaccgtagggccgaacgccagtaagaaggccgtgagctgcgatctgcgcgccagtgacggaaccgaagtctcgcaccggctcgtcgttgaaatggtcgtcgcccaagaatacgccgctttgccatatgctcgccacgtcacacctacaggcgttgcgcggatcttgcgcatgaacttcgcagtcaccattacggaacgatctggactcggcgtatcatgggacaacgaggcacctcctatctaccaagatgtcccgccgtccccaccatcatacgcctgcgcggtcatcaagcatgggagtgtcgaggatctgagtctatcgggtccgagcacaccgcttgatggcgacgaaagcccatatggtgttgagagcccggcttactgcgagtttcctactccgcggggagcgtcgcccgaacctgaagcttcggcatcagcttcgactccgtgagagccttttcttactcaggaatactcttctgaaattaattgcattgcggatttgacaaggttagacttgcattttcagtttggcgtttaggaaaaacaaaaagaaggcggaaaatacccaattgcgtttcacttcactggaattcttgtttacgtggaacgaacaacccgagccggaatacgaccggaaatacgcgtcatgacatattacatttcactacatagactggcaacgagcatagaatcgtttacatatcatattcattagctgagagggcttttatagataaatatccaaataatcattgccatatcatgggaag

SEQ ID NO: 31234 - DNA, 1662 bp, Muscodor strobelii
  misc_feature: SGI cDNA ID NO. 570750
  misc_feature: Encodes the peptide sequence at SEQ ID NO 31235
atggagcgactaccaggtttcaatgtggccaacgtgctcgaaaaacgagcacttcttgtcgctatcaactgtatcgccgccttgtccattttcttcttcggctacgatcaaggaatgatgtcgggtgtgaataatgccaacaactatgtccggcttatgaaattcggctacatagatgaagagacagggtctcctgttgtaacgaactctcttcttcaaggtggtattgttgctgtctactatctgggcacgctgtttgggtgcctgtttggtggttgggtcggagataagatcggaagagtcaagacaatcgctgtcggtgctggatgggctgttctcggcgctgcccttcaagcatcgtctatgaaccacagctggatgattggcgctcgagtcgtcaatggcatcggtactggcatcctcaatgcaatcgtgcccgtttgggcaaccgagacggccgagcacacctcgcgtggtcaattcattgccattgaattcacactcaacatctttggagtcgttgttgcttactggctcgagtttggtctgtcatttatcgacaacggagaagcggcgtttcgctggaggttcccgattgctttccagatcatacctctcctcgtccttttcttctcagtctggttctttcccgaatctcctcgctatctcgtcaatgccggaagacatgaggaggcaaaattcattttacggcgacttcgtggctcaacgggcgaagacctcgcaagagcggaggctgagtttcaagacattcgtaatgttgttgaattagagaccaaagagtcgaaacaaaactcgtatttccatatgttcttcggtattggctcgggtagtcttcatactggtagacgagtacaactggtcatttggctccagattcttcaagaatgggttggaattgctggtgttactgtctatgcccctacgatatttcgcatcgcaggatttgatgatttcaaaagccaatggatcagcgggttgaacaacattttttacatgttcgctacgcttgtttgtgtgttcacgctggaccgtatcggccgtcgatggacattgtggtggggagctgttggacaaggcatcgccatgtttctggccggtgcgttctcgaagttgggcaccgacgcgacgaatgctggcaacgccgaaaaggcaagtcaatatggtgctgcagctgcggcatttgttttcattttcacggctgttttcggtgcaacgtggttgacggttccatggctctatcccgctgagatcttcccactctcggttcgttcaaaaggcaacgcatggggtgtattcggctggagtatcgggaacggctggttaaccttattatgccccgtattgtttgacagaattggtgctacaacgctacacatttttggggttgccaatgtcattactatcccaatcgtttgggcactgtaccctgagacaaaccagcgtaccttggaggagatggatcttctctttgccagctcgtcaccttgggtctgggatgctgagaagacattcgccagacttaaagaagaacggcccgagctggttcaagctgcaaagcacggtatccatgttgatatcgaaagagatgcttctgctccagacaatttgcaagacagcgatgggaagaaatcactagaatag

SEQ ID NO: 31235 - protein, 553 aa, Muscodor strobelii
  misc_feature: SGI Peptide ID NO. 570750
  misc_feature (19)..(449): Pfam Id: PF07690 Pfam Desc: Major Facilitator Superfamily
  misc_feature (22)..(497): Pfam Id: PF00083 Pfam Desc: Sugar (and other) transporter
  misc_feature (1)..(539): NCBI GI: 46114482 Blast Desc: FG03083.1 [Gibberella zeae PH-1]
  misc_feature (1)..(534): NCBI GI: 256723711 Blast Desc: [Nectria haematococca mpVI 77-13-4]
  misc_feature (1)..(534): NCBI GI: 145616581 Blast Desc: MGG_10707 [Magnaporthe grisea 70-15] gi|145009402|gb|EDJ94102.1| MGG_10707 [Magnaporthe grisea 70-15]
  misc_feature (4)..(527): NCBI GI: 119191079 Blast Desc: CIMG_05587 [Coccidioides immitis RS]
  misc_feature (4)..(527): NCBI GI: 240107424 Blast Desc: Sugar transporter family protein [Coccidioides posadasii C735 delta SOWgp]
  misc_feature (2)..(527): NCBI GI: 169783302 Blast Desc: [Aspergillus oryzae RIB40] gi|83774857|dbj|BAE64980.1| protein product [Aspergillus oryzae]
  misc_feature (2)..(527): NCBI GI: 238493069 Blast Desc: MFS monosaccharide transporter, [Aspergillus flavus NRRL3357] gi|220696265|gb|EED52607.1| MFS monosaccharide transporter, [Aspergillus flavus NRRL3357]
  misc_feature (2)..(540): NCBI GI: 119498039 Blast Desc: MFS monosaccharide transporter, [Neosartorya fischeri NRRL 181] gi|119413941|gb|EAW23880.1| MFS monosaccharide transporter, [Neosartorya fischeri NRRL 181]
  misc_feature (2)..(542): NCBI GI: 145238234 Blast Desc: An07g06880 [Aspergillus niger] gi|134076246|emb|CAK39532.1| protein product [Aspergillus niger]
  misc_feature (2)..(553): NCBI GI: 121710768 Blast Desc: MFS monosaccharide transporter, [Aspergillus clavatus NRRL 1] gi|119401150|gb|EAW11574.1| MFS monosaccharide transporter, [Aspergillus clavatus NRRL 1]
MERLPGFNVANVLEKRALLVAINCIAALSIFFFGYDQGMMSGVNNANNYVRLMKFGYIDEETGSPVVTNSLLQGGIVAVYYLGTLFGCLFGGWVGDKIGRVKTIAVGAGWAVLGAALQASSMNHSWMIGARVVNGIGTGILNAIVPVWATETAEHTSRGQFIAIEFTLNIFGVVVAYWLEFGLSFIDNGEAAFRWRFPIAFQIIPLLVLFFSVWFFPESPRYLVNAGRHEEAKFILRRLRGSTGEDLARAEAEFQDIRNVVELETKESKQNSYFHMFFGIGSGSLHTGRRVQLVIWLQILQEWVGIAGVTVYAPTIFRIAGFDDFKSQWISGLNNIFYMFATLVCVFTLDRIGRRWTLWWGAVGQGIAMFLAGAFSKLGTDATNAGNAEKASQYGAAAAAFVFIFTAVFGATWLTVPWLYPAEIFPLSVRSKGNAWGVFGWSIGNGWLTLLCPVLFDRIGATTLHIFGVANVITIPIVWALYPETNQRTLEEMDLLFASSSPWVWDAEKTFARLKEERPELVQAAKHGIHVDIERDASAPDNLQDSDGKKSLE

SEQ ID NO: 31236 - DNA, 2363 bp, Muscodor strobelii
  misc_feature: SGI EST ID NO. CUFF.73925.0
  misc_feature: Variant of the nucleotide sequence at SEQ ID NO 31234
cattgattggagcgcgtgcgagcgaagtgcatcgaatgtagcaacccacaaaatttcgttaggtctgacactaacacgactgaattggtgtttctcaataggcactgtgatgcgaacttctggctgcatttgggataccggtgatagtgtggagaagacctggagaccagccgtatgcggaggagggtctacctctcgaactgaaccccatgggctctactgttggtcaccggtggggagatggagatacgggacaagatttgcttcgtcacttgcctgagtgctcggtcttgggcactcgacgatatgaaatactattgataatagggtctagtgtcattattgtcgaattctataaagcgaggcggtcccaggtccggaagtttacagcttcgagcatcttcatcgcactttcatgcgcaatcgaccatccttcgattatagactgagagaaagttaacgctcaagcaacgggtcaacatggagcgactaccaggtttcaatgtggccaacgtgctcgaaaaacgagcacttcttgtcgctatcaactgtatcgccgccttgtccattttcttcttcggctacgatcaaggaatgatgtcgggtgtgaataatgccaacaactatgtccggcttatgaaattcggctacatagatgaagagacagggtctcctgttgtaacgaactctcttcttcaaggtggtattgttgctgtctactatctgggcacgctgtttgggtgcctgtttggtggttgggtcggagataagatcggaagagtcaagacaatcgctgtcggtgctggatgggctgttctcggcgctgcccttcaagcatcgtctatgaaccacagctggatgattggcgctcgagtcgtcaatggcatcggtactggcatcctcaatgcaatcgtgcccgtttgggcaaccgagacggccgagcacacctcgcgtggtcaattcattgccattgaattcacactcaacatctttggagtcgttgttgcttactggctcgagtttggtctgtcatttatcgacaacggagaagcggcgtttcgctggaggttcccgattgctttccagatcatacctctcctcgtccttttcttctcagtctggttctttcccgaatctcctcgctatctcgtcaatgccggaagacatgaggaggcaaaattcattttacggcgacttcgtggctcaacgggcgaagacctcgcaagagcggaggctgagtttcaagacattcgtaatgttgttgaattagagaccaaagagtcgaaacaaaactcgtatttccatatgttcttcggtattggctcgggtagtcttcatactggtagacgagtacaactggtcatttggctccagattcttcaagaatgggttggaattgctggtgttactgtctatgcccctacgatatttcgcatcgcaggatttgatgatttcaaaagccaatggatcagcgggttgaacaacattttttacatgttcgctacgcttgtttgtgtgttcacgctggaccgtatcggccgtcgatggacattgtggtggggagctgttggacaaggcatcgccatgtttctggccggtgcgttctcgaagttgggcaccgacgcgacgaatgctggcaacgccgaaaaggcaagtcaatatggtgctgcagctgcggcatttgttttcattttcacggctgttttcggtgcaacgtggttgacggttccatggctctatcccgctgagatcttcccactctcggttcgttcaaaaggcaacgcatggggtgtattcggctggagtatcgggaacggctggttaaccttattatgccccgtattgtttgacaacttaaagaagaacggcccgagctggttcaagctgcaaagcacggtatccatgttgatatcgaaagagatgcttctgctccagacaatttgcaagacagcgatgggaagaaatcactagaatagagcaatagtagcatatcggttacaatgcacatagactgggaagtcctatgttcgtgtggtaatctgtgcagatcgcagtagcctctcacttcaatgtagaggaatatgtggtttggtgaggatgacgcatcctaaaacgcttttataaaggttagaccggtgtaagcttatcatggacaatcttgatgcttctatcttcttgagactttagtcatgactctaagtggcctttcgataccaatattcccttggatttttcaagcactctccgactgtaattggcttgtatctgcgctcagtgatgagcctcagtatttcaggaaccaacttcttcgcggtccattccttgatatcgtgacaaagcacgatataccaacctctgccatc

SEQ ID NO: 31237 - DNA, 1290 bp, Muscodor strobelii
  misc_feature: SGI cDNA ID NO. 570751
  misc_feature: Encodes the peptide sequence at SEQ ID NO 31238
atgagatatgccacattgttaaccacaattgaagggtacatagagagccgcaacgatccggaaaatgcacccgtattgctctggttgagcggcggtcctggcgccactggtgagttcggcctatttacaggcaatggtccatgccatgtcaacgaggatggcaactcgactcgtcaagtgaactatacttggtctaacaacgccaatgtgctgtatattgaccagccagtcggagtcggcttttcacacgtgacaaactcctctgtctctccaaccaacatcgtagacgcagcccgtgatttatacagcttcttattcctcttcaccaccgctgcctttcccgagctagcagaccgtacctggcatataactggagaatcgatgggtggccagtatacgactttttacaccaaatatatgctcgagcaggaggctgagtggcggcgactaggactaccaccgcttctaggtttccgcatcgattccattgtagttgttgacggctacatagacgattcgcggcacgcggctggatattacgatttcttctgcatgcccgttgcatataacggcgacatgccattgatgaacgagacatcgtgtgccgaaatggcagccgccgtaccagagtgtgagcgcctcggtgcagcatgtcgggcatcttatgataaagcccagtgccaattcgcgtatgaagtatgcgagggaacggtggggaggatattccatgatgaaaccgtacctggaggttggaatccatatgacagccgcaagaaatgcatcgagcctccactctgctcagcactagccgacaacccaacgcgcgattttttgaatcgtccttgggtccaagaacgtctagcgcttccggaacccatcgattttgagctgatcgactttgaggtaaatgaacgatggtcacaggatgggcgcctatttgtccctacgacgaaggaaatcacgtggctactcgatgaaacagacattcgcatcctgttcatcaatgggaataacgacattatcataaactcaccaggcgagatccgtttactcgatgaacaaccgtggtacgcgcaagccatataccgcgctcagagtctcaaagactggtattatgccaacggcaaattactgcaagaagggtttgcagatcaaaatgctcaaaaaggagggcaatggaagggtattgagcgactaagcatctttacagtcgatgatgcaggacattcagcaccttatgacaatcccgaagctgtacaggctgtactagattcttggattaagcaatga

SEQ ID NO: 31238 - protein, 429 aa, Muscodor strobelii
  misc_feature: SGI Peptide ID NO. 570751
  misc_feature (1)..(429): Pfam Id: PF00450 Pfam Desc: Serine carboxypeptidase
  misc_feature (13)..(132): Pfam Id: PF00450 Pfam Desc: Serine carboxypeptidase
  misc_feature (162)..(429): Pfam Id: PF00450 Pfam Desc: Serine carboxypeptidase
  misc_feature (13)..(428): NCBI GI: 261354572 Blast Desc: carboxypeptidase Y [Verticillium albo-atrum VaMs.102]
  misc_feature (13)..(342): NCBI GI: 256723998 Blast Desc: NECHADRAFT_51620 [Nectria haematococca mpVI 77-13-4]
  misc_feature (13)..(342): NCBI GI: 256725408 Blast Desc: [Nectria haematococca mpVI 77-13-4]
  misc_feature (13)..(342): NCBI GI: 46115264 Blast Desc: FG03474.1 [Gibberella zeae PH-1]
  misc_feature (13)..(427): NCBI GI: 256729965 Blast Desc: NECHADRAFT_44892 [Nectria haematococca mpVI 77-13-4]
  misc_feature (13)..(342): NCBI GI: 256722761 Blast Desc: NECHADRAFT_53179 [Nectria haematococca mpVI 77-13-4]
  misc_feature (13)..(427): NCBI GI: 119476832 Blast Desc: carboxypeptidase Y, [Neosartorya fischeri NRRL 181] gi|119407373|gb|EAW17322.1| carboxypeptidase Y, [Neosartorya fischeri NRRL 181]
  misc_feature (13)..(429): NCBI GI: 169611448 Blast Desc: SNOG_08837 [Phaeosphaeria nodorum SN15] gi|111062885|gb|EAT84005.1| SNOG_08837 [Phaeosphaeria nodorum SN15]
  misc_feature (13)..(429): NCBI GI: 46115854 Blast Desc: FG03769.1 [Gibberella zeae PH-1]
  misc_feature (10)..(409): NCBI GI: 119491375 Blast Desc: carboxypeptidase Y, [Neosartorya fischeri NRRL 181] gi|119411402|gb|EAW21345.1| carboxypeptidase Y, [Neosartorya fischeri NRRL 181]
  misc_feature (13)..(427): SWISSPROT Homolog: EC 3.4.16.5 Carboxypeptidase C
MRYATLLTTIEGYIESRNDPENAPVLLWLSGGPGATGEFGLFTGNGPCHVNEDGNSTRQVNYTWSNNANVLYIDQPVGVGFSHVTNSSVSPTNIVDAARDLYSFLFLFTTAAFPELADRTWHITGESMGGQYTTFYTKYMLEQEAEWRRLGLPPLLGFRIDSIVVVDGYIDDSRHAAGYYDFFCMPVAYNGDMPLMNETSCAEMAAAVPECERLGAACRASYDKAQCQFAYEVCEGTVGRIFHDETVPGGWNPYDSRKKCIEPPLCSALADNPTRDFLNRPWVQERLALPEPIDFELIDFEVNERWSQDGRLFVPTTKEITWLLDETDIRILFINGNNDIIINSPGEIRLLDEQPWYAQAIYRAQSLKDWYYANGKLLQEGFADQNAQKGGQWKGIERLSIFTVDDAGHSAPYDNPEAVQAVLDSWIKQ

SEQ ID NO: 31239 - DNA, 304 bp, Muscodor strobelii
  misc_feature: SGI EST ID NO. CUFF.73940.0
  misc_feature: Variant of the nucleotide sequence at SEQ ID NO 31237
tttagatgctacgctgacttgatcgtgtcaggccgcaagaaatgcatcgagcctccactctgctcagcactagccgacaacccaacgcgcgattttttgaatcgtccttgggtccaagaacgtctagcgcttccggaacccatcgattttgagctgatcgactttgaggtaaatgaacgatggtcacaggatgggcgcctatttgtccctacgacgaaggaaatcacgtggctactcgatgaaacagacattcgcatcctgttcatcaatgggaataacgacattatcataaactcaccaggcg

SEQ ID NO: 31240 - DNA, 246 bp, Muscodor strobelii
  misc_feature: SGI cDNA ID NO. 570752
  misc_feature: Encodes the peptide sequence at SEQ ID NO 31241
atgaagacggcactcttcaccttcctcaccgttgccttgacgtcctacgtcaatgccagccccatctttagggtggatagacgggctgctgacccttttgaggtacccgacaagcgtgacggttcatctatcaccaatgaaggccttcatacctgggtagtcgttcagaagaacaatgatggtgttgacgcgtaccaagacgagatcgatgctgctgatcccgctcaggtcttgggaaagctctga

SEQ ID NO: 31241 - protein, 81 aa, Muscodor strobelii
  misc_feature: SGI Peptide ID NO. 570752
MKTALFTFLTVALTSYVNASPIFRVDRRAADPFEVPDKRDGSSITNEGLHTWVVVQKNNDGVDAYQDEIDAADPAQVLGKL

SEQ ID NO: 31242 - DNA, 960 bp, Muscodor strobelii
  misc_feature: SGI cDNA ID NO. 570753
  misc_feature: Encodes the peptide sequence at SEQ ID NO 31243
atgaaacagtccgacaagaaaaccatccaagaaactgtttcccactttgtggctggggtgacaggtgggacccgtattgacgaagatgcgctcactgtagtgaacttcgacgacctccgggcagccgttacgaaagagctggaatcgacctcgctccgggatcacatggaactcctccactccaagaaccagttcaactatgcatgcaatgtggcggcagacttcgccaatgcccaagggtttgaataccagaagattcatgcattgctgaccatcttcttcttccacgccgaggacgtcctcgagcatcagcccgatatcatccacaacttgcaactcaagctggccacgggagaggccattggcgagcccgtactcgactggtacgcgcgcgagctaacaccgctgctatggaagcactttaaccctctggtggccaacatgatcatcgtggcatgttatgacttcgtcaacggtatcggcattgagctgctgacgcgcgatacggctgtgcgcgcggaagcgccgaaattccccgaatggctgcggttcaagacggggctgtcaccgatgtacgcactgttggcactgtcgcggcacacggacatcgggcgaaggccgactggcgggctcgagaaatacgtacaggcagtaccggatgccatcgtgtttaccaacatcgtcaacgacgtcatttccttttacaaagagtactcggcgggcgaaagaggcaattatatagatcagcgcgccgagatggagggcatcgacgtcttcacggcgcagcgtacgctagccgacgagggaattatcgtctacaagcgcattattgctacgctagccgatgagtctgagtatcgcgccaacttcgaggcctacgcgcgaggaatcatccacttccacacttcatctccgcgctaccgcttgcggcagttgttcgggaggtctggggagggctga

SEQ ID NO: 31243 - protein, 319 aa, Muscodor strobelii
  misc_feature: SGI Peptide ID NO. 570753
  misc_feature (75)..(313): NCBI GI: 169851720 Blast Desc: CC1G_03563 [Coprinopsis cinerea okayama7#130] gi|116506403|gb|EAU89298.1| CC1G_03563 [Coprinopsis cinerea okayama7#130]
  misc_feature (88)..(314): NCBI GI: 170109005 Blast Desc: [Laccaria bicolor S238N-H82] gi|164639290|gb|EDR03562.1| [Laccaria bicolor S238N-H82]
  misc_feature (75)..(317): NCBI GI: 170110152 Blast Desc: [Laccaria bicolor S238N-H82] gi|164638866|gb|EDR03141.1| [Laccaria bicolor S238N-H82]
  misc_feature (139)..(314): NCBI GI: 242216687 Blast Desc: [Postia placenta Mad-698-R] gi|220726694|gb|EED80635.1| [Postia placenta Mad-698-R]
  misc_feature (132)..(314): NCBI GI: 242209004 Blast Desc: [Postia placenta Mad-698-R] gi|220730658|gb|EED84512.1| [Postia placenta Mad-698-R]
  misc_feature (132)..(314): NCBI GI: 242216689 Blast Desc: [Postia placenta Mad-698-R] gi|220726695|gb|EED80636.1| [Postia placenta Mad-698-R]
  misc_feature (132)..(314): NCBI GI: 242207489 Blast Desc: [Postia placenta Mad-698-R] gi|220731402|gb|EED85247.1| [Postia placenta Mad-698-R]
  misc_feature (75)..(314): NCBI GI: 242216337 Blast Desc: [Postia placenta Mad-698-R] gi|220726921|gb|EED80856.1| [Postia placenta Mad-698-R]
  misc_feature (105)..(313): NCBI GI: 242218396 Blast Desc: [Postia placenta Mad-698-R] gi|220725857|gb|EED79827.1| [Postia placenta Mad-698-R]
  misc_feature (3)..(312): NCBI GI: 212531631 Blast Desc: trichodiene synthase, [Penicillium marneffei ATCC 18224] gi|210071336|gb|EEA25425.1| trichodiene synthase, [Penicillium marneffei ATCC 18224]
MKQSDKKTIQETVSHFVAGVTGGTRIDEDALTVVNFDDLRAAVTKELESTSLRDHMELLHSKNQFNYACNVAADFANAQGFEYQKIHALLTIFFFHAEDVLEHQPDIIHNLQLKLATGEAIGEPVLDWYARELTPLLWKHFNPLVANMIIVACYDFVNGIGIELLTRDTAVRAEAPKFPEWLRFKTGLSPMYALLALSRHTDIGRRPTGGLEKYVQAVPDAIVFTNIVNDVISFYKEYSAGERGNYIDQRAEMEGIDVFTAQRTLADEGIIVYKRIIATLADESEYRANFEAYARGIIHFHTSSPRYRLRQLFGRSGEG

SEQ ID NO: 31244 - DNA, 1164 bp, Muscodor strobelii
  misc_feature: SGI EST ID NO. CUFF.73970.0
  misc_feature: Variant of the nucleotide sequence at SEQ ID NO 31242
ccgaggcatgactcctgacacgagcccatttgtttctctagttctctaccatacgtgcttatcttgatctccctcgctaacggctagtgatgaaacagtccgacaagaaaaccatccaagaaactgtttcccactttgtggctggggtgacaggtgggacccgtattgacgaagatgcgctcactgtagtgaacttcgacgacctccgggcagccgttacgaaagagctggaatcgacctcgctccgggatcacatggaactcctccactccaagaaccagttcaactatgcatgcaatgtggcggcagacttcgccaatgcccaagggtttgaataccagaagattcatgcattgctgaccatcttcttcttccacgccgaggacgtcctcgagcatcagcccgatatcatccacaacttgcaactcaagctggccacgggagaggccattggcgagcccgtactcgactggtacgcgcgcgagctaacaccgctgctatggaagcactttaaccctctggtggccaacatgatcatcgtggcatgttatgacttcgtcaacggtatcggcattgagctgctgacgcgcgatacggctgtgcgcgcggaagcgccgaaattccccgaatggctgcggttcaagacggggctgtcaccgatgtacgcactgttggcactgtcgcggcacacggacatcgggcgaaggccgactggcgggctcgagaaatacgtacaggcagtaccggatgccatcgtgtttaccaacatcgtcaacgacgtcatttccttttacaaagagtactcggcgggcgaaagaggcaattatatagatcagcgcgccgagatggagggcatcgacgtcttcacggcgcagcgtacgctagccgacgagggaattatcgtctacaagcgcattattgctacgctagccgatgagtctgagtatcgcgccaacttcgaggcctacgcgcgaggaatcatccacttccacacttcatctccgcgctaccgcttgcggcagttgttcgggaggtctggggagggctgacttaccatgttttatctcagcaggataaaatagtctatagatgactacgagatgtttagaaggcagtactcgcgaggcagtccaaaaaacagaaagagaaattaccttttcaata

SEQ ID NO: 31245 - DNA, 2145 bp, Muscodor strobelii
  misc_feature: SGI cDNA ID NO. 570754
  misc_feature: Encodes the peptide sequence at SEQ ID NO 31246
atgaattcctctccattgtcgcaatggctcggcgtcccctaccagatcgtcctcagacaacctgctggggaaacgatcactggactcctcatgaacctggtcccagagcagcatcttactcttgaaaaagccagtgtaaggcgaacgggccagacgtttgctcagatcgacatcctggctgccaacattgcagatatcataccgctccagactctcgatgccgtcgctccaccctacccgcccctagctcctgcttctgccacttcaccccagaatccaacgcagaacacctttcaggatccagctattctaagcgtgggtcggaagcccaactcatcatcctccctacctcgcccgactacctacgagaagaatccatcgccaatcatcataaatcctgccgataggctgacctactcttctcctgatgagacggacacaaccgcggcaacccccctagaagcaacattaaatcagctgggcattacatcgccttcaattcagacagttgtggacacaactgaggatgatgcgcagatgcttactcccacggccactacgatgcgatctggtacagcgcaaggtgaacgcaagcgaaacaaacgtgggaagcgacagcaatccaacaaggtgacggaagaggagccccagccgtcaagtgctagacctggtaagggatggcgtcagactcctatcctgcaatctacgaaatcatttcaaccattcaactccctcaaaaagaaacaaaaaggtcgtcctgacccgaacgccgagaacggatgggcgtctgaagatgtcacagatgtgcaggaggctggtgacttcgactttcagggcagccttgccaaattcgacaaacgcactatcttcaatgagatgcaggagcaagatcgcatcgatgatgcagataggttggtatctcacaaccggctcccgaaaccaaaacccggcacagctggtggtaagaactaccactactcggagaacgtattaggagacaacacgcctactatcttgagagcaccgaaggaaacacccggcgaccattggagaagcgaggcggatgacgagatcatcaatggaatacctgagactcacagcggtcgtgaagggagtggcagaacatctcgtttgcgaggcgaatcaaggcgttcccaatcacgtaaagctagtgccagtactgccattggaccgccccagcaccgtgtgaattccggattgaaaacatctgccacgtccgcagcaatggagggcttatataccgctaataacaagcgcatcgagaccgtgacacatctgcagatgcttgtggtagaaaacgtggcaagcaatgagctcggtctgacggaggatttgatggctgagaatgcgggtcgcgggatctgcgaagtagctcttcgagcactaggcgatcctgctatcagattattagcagccgcaacatcaccgccctctgtggctaccatcgttgtactagcggggaacaacaggtcaggtgcacgtgctatagccgctgcgcgtcatctacgaaacaggagtatcaataccctcgtatgcgtggtcggcatcgagcgtgagcgcgagctcctagacgaggtccgcagacaggtgcggctcttccgcaatttcggcggtacgatatacaccaagtcagaactattcgagcacctcaaacagtcaacagatagtctcagcgcttctgctcaggtctcggtgacgttgatcatcgactcgctcctgggactcaccatctcgttcgaggagctgcgtaagtcggatcaagcttctacctacgagttaatggagtgggcgaaccgcaatgatgcgtttgtcatggctatcgatgtaccgagtgggatagaaccctcctcgggaaaggtaaacgtcattgatggagcaaaactctatgtgcaaccccggtacgtcgttgcgcttgcggcgccgaaattggggctcgtcaaggcactggagaagattgatgagcccggtgatgtgctcatggcggatgaatggaagatttacctcgttgatattggacttgggacgagtgtctggcggaaggcggctaccaaggttaggagggggattgactttgatgatggggtcatggagcttagataccagcgatatatacaggatgactaa

SEQ ID NO: 31246 - protein, 714 aa, Muscodor strobelii
  misc_feature: SGI Peptide ID NO. 570754
  misc_feature (270)..(293): Pfam Id: PF09532 Pfam Desc: DFDF motif
  misc_feature (446)..(651): Pfam Id: PF03853 Pfam Desc: YjeF-related protein N-terminus
  misc_feature (7)..(714): NCBI GI: 46122291 Blast Desc: FG05523.1 [Gibberella zeae PH-1]
  misc_feature (7)..(714): NCBI GI: 256729888 Blast Desc: [Nectria haematococca mpVI 77-13-4]
  misc_feature (9)..(708): NCBI GI: 85081291 Blast Desc: NCU00427 [Neurospora crassa OR74A] gi|28917765|gb|EAA27455.1| conserved [Neurospora crassa OR74A] gi|40882152|emb|CAF05979.1| [Neurospora crassa]
  misc_feature (9)..(708): NCBI GI: 261361678 Blast Desc: YjeF_N domain-containing protein [Verticillium albo-atrum VaMs.102]
  misc_feature (7)..(709): NCBI GI: 145602069 Blast Desc: MGG_05213 [Magnaporthe grisea 70-15] gi|145010516|gb|EDJ95172.1| MGG_05213 [Magnaporthe grisea 70-15]
  misc_feature (7)..(708): NCBI GI: 156058658 Blast Desc: SS1G_03341 [Sclerotinia sclerotiorum 1980] gi|154701128|gb|EDO00867.1| SS1G_03341 [Sclerotinia sclerotiorum 1980]
  misc_feature (6)..(624): NCBI GI: 171686132 Blast Desc: protein product [Podospora anserina] gi|170943027|emb|CAP68680.1| protein product [Podospora anserina]
  misc_feature (7)..(708): NCBI GI: 119478334 Blast Desc: YjeF-related protein N-terminus protein [Neosartorya fischeri NRRL 181] gi|119407503|gb|EAW17452.1| YjeF-related protein N-terminus protein [Neosartorya fischeri NRRL 181]
  misc_feature (7)..(708): NCBI GI: 121714008 Blast Desc: YjeF_N domain protein [Aspergillus clavatus NRRL 1] gi|119402768|gb|EAW13189.1| YjeF_N domain protein [Aspergillus clavatus NRRL 1]
  misc_feature (7)..(708): NCBI GI: 242761877 Blast Desc: YjeF_N domain protein [Talaromyces stipitatus ATCC 10500] gi|218723462|gb|EED22879.1| YjeF_N domain protein [Talaromyces stipitatus ATCC 10500]
MNSSPLSQWLGVPYQIVLRQPAGETITGLLMNLVPEQHLTLEKASVRRTGQTFAQIDILAANIADIIPLQTLDAVAPPYPPLAPASATSPQNPTQNTFQDPAILSVGRKPNSSSSLPRPTTYEKNPSPIIINPADRLTYSSPDETDTTAATPLEATLNQLGITSPSIQTVVDTTEDDAQMLTPTATTMRSGTAQGERKRNKRGKRQQSNKVTEEEPQPSSARPGKGWRQTPILQSTKSFQPFNSLKKKQKGRPDPNAENGWASEDVTDVQEAGDFDFQGSLAKFDKRTIFNEMQEQDRIDDADRLVSHNRLPKPKPGTAGGKNYHYSENVLGDNTPTILRAPKETPGDHWRSEADDEIINGIPETHSGREGSGRTSRLRGESRRSQSRKASASTAIGPPQHRVNSGLKTSATSAAMEGLYTANNKRIETVTHLQMLVVENVASNELGLTEDLMAENAGRGICEVALRALGDPAIRLLAAATSPPSVATIVVLAGNNRSGARAIAAARHLRNRSINTLVCVVGIERERELLDEVRRQVRLFRNFGGTIYTKSELFEHLKQSTDSLSASAQVSVTLIIDSLLGLTISFEELRKSDQASTYELMEWANRNDAFVMAIDVPSGIEPSSGKVNVIDGAKLYVQPRYVVALAAPKLGLVKALEKIDEPGDVLMADEWKIYLVDIGLGTSVWRKAATKVRRGIDFDDGVMELRYQRYIQDD

SEQ ID NO: 31247 - DNA, 2752 bp, Muscodor strobelii
  misc_feature: SGI EST ID NO. CUFF.73974.0
  misc_feature: Variant of the nucleotide sequence at SEQ ID NO 31245
agataactcaactcttctatccccatcacaatcactgtttttgtcatgaagttgagcttgtccatattttccgtgctgagctgtgagggcaacgcgactaatactggatacagtattaaaccttaagccatcgtcattcttccactgccatctcgaatcaaacccaataccaccttttcatacaacgttgaggaggcgcaaagaggaacgattagtgagcgacgagacaagcactctcggaatcatacctccgaaatcaatcacaggcaacggccacatatcatctcgcgtattgacagatttgaatattcagaaaaggtcatatgaggtatacctttgtggccgtctattgagcgattgcttggggggctcttccctcgtcctacccgtcctcggcagccgagacagcaccatatctggcacaatgaattcctctccattgtcgcaatggctcggcgtcccctaccagatcgtcctcagacaacctgctggggaaacgatcactggactcctcatgaacctggtcccagagcagcatcttactcttgaaaaagccagtgtaaggcgaacgggccagacgtttgctcagatcgacatcctggctgccaacattgcagatatcataccgctccagactctcgatgccgtcgctccaccctacccgcccctagctcctgcttctgccacttcaccccagaatccaacgcagaacacctttcaggatccagctattctaagcgtgggtcggaagcccaactcatcatcctccctacctcgcccgactacctacgagaagaatccatcgccaatcatcataaatcctgccgataggctgacctactcttctcctgatgagacggacacaaccgcggcaacccccctagaagcaacattaaatcagctgggcattacatcgccttcaattcagacagttgtggacacaactgaggatgatgcgcagatgcttactcccacggccactacgatgcgatctggtacagcgcaaggtgaacgcaagcgaaacaaacgtgggaagcgacagcaatccaacaaggtgacggaagaggagccccagccgtcaagtgctagacctggtaagggatggcgtcagactcctatcctgcaatctacgaaatcatttcaaccattcaactccctcaaaaagaaacaaaaaggtcgtcctgacccgaacgccgagaacggatgggcgtctgaagatgtcacagatgtgcaggaggctggtgacttcgactttcagggcagccttgccaaattcgacaaacgcactatcttcaatgagatgcaggagcaagatcgcatcgatgatgcagataggttggtatctcacaaccggctcccgaaaccaaaacccggcacagctggtggtaagaactaccactactcggagaacgtattaggagacaacacgcctactatcttgagagcaccgaaggaaacacccggcgaccattggagaagcgaggcggatgacgagatcatcaatggaatacctgagactcacagcggtcgtgaagggagtggcagaacatctcgtttgcgaggcgaatcaaggcgttcccaatcacgtaaagctagtgccagtactgccattggaccgccccagcaccgtgtgaattccggattgaaaacatctgccacgtccgcagcaatggagggcttatataccgctaataacaagcgcatcgagaccgtgacacatctgcagatgcttgtggtagaaaacgtggcaagcaatgagctcggtctgacggaggatttgatggctgagaatgcgggtcgcgggatctgcgaagtagctcttcgagcactaggcgatcctgctatcagattattagcagccgcaacatcaccgccctctgtggctaccatcgttgtactagcggggaacaacaggtcaggtgcacgtgctatagccgctgcgcgtcatctacgaaacaggagtatcaataccctcgtatgcgtggtcggcatcgagcgtgagcgcgagctcctagacgaggtccgcagacaggtgcggctcttccgcaatttcggcggtacgatatacaccaagtcagaactattcgagcacctcaaacagtcaacagatagtctcagcgcttctgctcaggtctcggtgacgttgatcatcgactcgctcctgggactcaccatctcgttcgaggagctgcgtaagtcggatcaagcttctacctacgagttaatggagtgggcgaaccgcaatgatgcgtttgtcatggctatcgatgtaccgagtgggatagaaccctcctcgggaaaggtaaacgtcattgatggagcaaaactctatgtgcaaccccggtacgtcgttgcgcttgcggcgccgaaattggggctcgtcaaggcactggagaagattgatgagcccggtgatgtgctcatggcggatgaatggaagatttacctcgttgatattggacttgggacgagtgtctggcggaaggcggctaccaaggttaggagggggattgactttgatgatggggtcatggagcttagataccagcgatatatacaggatgactaagaagatggctggaaaaacgcccatgcagaagtatttcggccgatgctgagcgagaacgtctgtgatcagatggaaatattgcattctgagaataattaggtactagcgttgacaaacccatccgcactcagtacagggctaggagagtagatataaggccctaatgaatgaacaaaaatcgtt

SEQ ID NO: 31248 - DNA, 2433 bp, Muscodor strobelii
  misc_feature: SGI cDNA ID NO. 570755
  misc_feature: Reduced expression when VOC is produced
  misc_feature: Encodes the peptide sequence at SEQ ID NO 31249
atgctgggtagagctagagacaaggccaatagtgccaaacctccgaggaacgacctggccaagcaactcttcccctctagcagccctgccgctcagcaacgggatatcacatcatgggcatcttctaacaaaatcccctccggtcctgcttcgtctgctgctcgccatgaacctcttaagccgaggtctggcaacttacagccccagtccggtgctcgtcagtcgatgccacgcaccaacagtttagcgtcgatatgcaccactgcaggctcctttgacgagcgatcgactgccaccggcgtgtcacggtcctctcgggatacggtgccgactgtcttcatggacgaggacgacttcagtgacgacaatgctctcgactttgactacgagtgcccgactgcacttcccatgcccaccttgcctccgccaccaaaaccgaaacctcagcccgctctaaatgggcagcccgccgccccaactactagccaaatgtcgtggtcatcatcacctcagcaccatatgtttcctcctgagaatgagcgcaagctgaaacgtaaccttccagagcaagcagctccgccaccaaagaggagaagcttcccgaagacctggaatgtggggaaaaacaaggacaaagttatggatcttactgaagaggacgacgggccggatgctcaaatttctcatctccagtcaacgccgttaccgactaaaaagagtgcccttccttgggataccactcaaagcgctacgaaagagcgacggaaacagctcaagaaccagaccaagaagtcggagaatcagctctctgccgaagaaatgcgagctgttaccgatgcccatgctatcaaaaaggcttctgcaatatctctgagctcggagcagcaacatgttatcgatcttgttattaagcagaagcaaagcgtattcttcaccggccctgccggcacgggtaaatcagttttgatgcgagctaggttcattcatgagctgaagaagaaatgggcgagagatccagaaagggttgcagtggctgcatcaactggcctcgcagcctgcaacattggtggtcagactcttcacagctttgctggcatcgggctgggcaaggaagacgtgcccactttggtcaagaagatccgccgcaacgcaaaagcaaaaaatcgatggctgcggactcacactctcgtcattgacgaagtgtccatggttgacggcgaactttttgataagctatcacagattgcgcgcacccttcgcaataatggaaggccctttggcggcatccaattagttataacgggtgatttcttccaattgcctccggtgcctgatggtgggaagaaggaagccaagtttgcgtttgacgctgcgacctggaacacctcaattgaccacacaatcggactgacccaagtctttcgtcaaaaagacccccaatttgcggggatgctcaatgaaatgcggcttggaagaatcagcgatgcaagcgtacagaccttcaagagcctcgcgaggcccttaagttttgacgatggcttggatgtcacggaactgtttccaacgcgacaagaggtcgaaaggtccaatgaaacgcgactacggaatttacctggagagtcataccactacgaggccgccgatactggtgatccaaatatccgtgacaagctgctggccaacatgatggcacccaaaacgatgcagctcaagaaaggggcgcaggtgatgcttatcaagaatatggacgatacgctggtgaacggctctctcggcaaggtagtagggttcatgagtgaggctgtgttcgagaattgggcattgacggaccaatcgacagggtcaggcgacgaggccgagcccagcggcagtggagcaagaaagatcaaagcttttagtcgagacgtagacggtacgaaagatgttcgcgagtacccggtagttcggttcacggccacggatggtacgcatcgcgtcatcctttgcattcctgaggactggaaagtggaattgcccacgggcgaggtgcaggcatctcggaaacaattaccactcattttggcatgggcactttcgatccataaagcgcagggccagacgctggagagggtcaaggtagacctgggcaaggtgttcgagaaaggccaggcgtatgtggcgctcagccgagccgtcagcaagcaagggcttcaagtgttgcgttttgaaaagagcaaagtgatggctcacccacgggtgattcagttctacaacaagctctacagcgccgagtcggctctcaagactcagaaggcagcgactaagccgactctcaagatatcggatttcgccagcaatgtgcctgcaccgggttccagggcgggctcaaaaggaaagggtagggagatcattgatttagacgaagaggaggcaatgatggcagcctacgcttga

SEQ ID NO: 31249 - protein, 810 aa, Muscodor strobelii
  misc_feature: SGI Peptide ID NO. 570755
  misc_feature (19)..(782): NCBI GI: 164429093 Blast Desc: NCU00428 [Neurospora crassa OR74A] gi|40882151|emb|CAF05978.1| related to PIF1 protein precursor [Neurospora crassa] gi|157072407|gb|EAA27456.2| NCU00428 crassa
  misc_feature (1)..(791): NCBI GI: 39940056 Blast Desc: MGG_05212 [Magnaporthe grisea 70-15] gi|145010517|gb|EDJ95173.1| MGG_05212 [Magnaporthe grisea 70-15]
  misc_feature (1)..(810): NCBI GI: 46122289 Blast Desc: FG05522.1 [Gibberella zeae PH-1]
  misc_feature (19)..(777): NCBI GI: 171686130 Blast Desc: protein product [Podospora anserina] gi|170943026|emb|CAP68679.1| protein product [Podospora anserina]
  misc_feature (1)..(783): NCBI GI: 116207628 Blast Desc: CHGG_03107 [Chaetomium globosum CBS 148.51] gi|88183704|gb|EAQ91172.1| CHGG_03107 [Chaetomium globosum CBS 148.51]
  misc_feature (112)..(774): NCBI GI: 255704024 Blast Desc: DNA-helicase [Coniothyrium minitans]
  misc_feature (112)..(757): NCBI GI: 255704026 Blast Desc: DNA-helicase [Coniothyrium minitans]
  misc_feature (150)..(760): NCBI GI: 121714010 Blast Desc: mitochondrial DNA helicase (Pif1), [Aspergillus clavatus NRRL 1] gi|119402769|gb|EAW13190.1| mitochondrial DNA helicase (Pif1), [Aspergillus clavatus NRRL 1]
  misc_feature (138)..(761): NCBI GI: 145249534 Blast Desc: An14g04830 [Aspergillus niger] gi|134081788|emb|CAK42044.1| protein product [Aspergillus niger]
  misc_feature (132)..(776): NCBI GI: 115399518 Blast Desc: DNA repair and recombination protein pif1, mitochondrial precursor [Aspergillus terreus NIH2624] gi|114192231|gb|EAU33931.1| DNA repair and recombination protein
  misc_feature: Useful for introducing or modulating the production of volatile compounds
MLGRARDKANSAKPPRNDLAKQLFPSSSPAAQQRDITSWASSNKIPSGPASSAARHEPLKPRSGNLQPQSGARQSMPRTNSLASICTTAGSFDERSTATGVSRSSRDTVPTVFMDEDDFSDDNALDFDYECPTALPMPTLPPPPKPKPQPALNGQPAAPTTSQMSWSSSPQHHMFPPENERKLKRNLPEQAAPPPKRRSFPKTWNVGKNKDKVMDLTEEDDGPDAQISHLQSTPLPTKKSALPWDTTQSATKERRKQLKNQTKKSENQLSAEEMRAVTDAHAIKKASAISLSSEQQHVIDLVIKQKQSVFFTGPAGTGKSVLMRARFIHELKKKWARDPERVAVAASTGLAACNIGGQTLHSFAGIGLGKEDVPTLVKKIRRNAKAKNRWLRTHTLVIDEVSMVDGELFDKLSQIARTLRNNGRPFGGIQLVITGDFFQLPPVPDGGKKEAKFAFDAATWNTSIDHTIGLTQVFRQKDPQFAGMLNEMRLGRISDASVQTFKSLARPLSFDDGLDVTELFPTRQEVERSNETRLRNLPGESYHYEAADTGDPNIRDKLLANMMAPKTMQLKKGAQVMLIKNMDDTLVNGSLGKVVGFMSEAVFENWALTDQSTGSGDEAEPSGSGARKIKAFSRDVDGTKDVREYPVVRFTATDGTHRVILCIPEDWKVELPTGEVQASRKQLPLILAWALSIHKAQGQTLERVKVDLGKVFEKGQAYVALSRAVSKQGLQVLRFEKSKVMAHPRVIQFYNKLYSAESALKTQKAATKPTLKISDFASNVPAPGSRAGSKGKGREIIDLDEEEAMMAAYA

SEQ ID NO: 31250 - DNA, 3300 bp, Muscodor strobelii
  misc_feature: SGI EST ID NO. CUFF.73977.0
  misc_feature: Variant of the nucleotide sequence at SEQ ID NO 31248
tgatgaccgcaccgcgtctccgcgtctcccttttttaattgggataataacacaactcagcttatcgcagcatgcaccccagataccaacagcattcgtggtatatacttgagataatctgattgtgtttcgtagttgccacatccgcaatgccctaattcttcttgtcttcatactgtataaactatatgtcctcagctcctgcctgaggtgcacataaagtctttctttcatcttcccccacctccagtcctccaccccgtctcagagagtcacaaggcagaaacaactggatgaatgccggggcaacccgcgtattggccctgcgacctgcgttcttgccagccacttgctcgcgtgctactcaaacccatccatatacacatctaggtccgccgtcaccgtcgtcatcccgcgcccacgcccacgcctgcacctctcctcgtctccgcccatgtattgtcaggtgtagctctacctcaccctccttttacgcacctgagtctaccatgctgggtagagctagagacaaggccaatagtgccaaacctccgaggaacgacctggccaagcaactcttcccctctagcagccctgccgctcagcaacgggatatcacatcatgggcatcttctaacaaaatcccctccggtcctgcttcgtctgctgctcgccatgaacctcttaagccgaggtctggcaacttacagccccagtccggtgctcgtcagtcgatgccacgcaccaacagtttagcgtcgatatgcaccactgcaggctcctttgacgagcgatcgactgccaccggcgtgtcacggtcctctcgggatacggtgccgactgtcttcatggacgaggacgacttcagtgacgacaatgctctcgactttgactacgagtgcccgactgcacttcccatgcccaccttgcctccgccaccaaaaccgaaacctcagcccgctctaaatgggcagcccgccgccccaactactagccaaatgtcgtggtcatcatcacctcagcaccatatgtttcctcctgagaatgagcgcaagctgaaacgtaaccttccagagcaagcagctccgccaccaaagaggagaagcttcccgaagacctggaatgtggggaaaaacaaggacaaagttatggatcttactgaagaggacgacgggccggatgctcaaatttctcatctccagtcaacgccgttaccgactaaaaagagtgcccttccttgggataccactcaaagcgctacgaaagagcgacggaaacagctcaagaaccagaccaagaagtcggagaatcagctctctgccgaagaaatgcgagctgttaccgatgcccatgctatcaaaaaggcttctgcaatatctctgagctcggagcagcaacatgttatcgatcttgttattaagcagaagcaaagcgtattcttcaccggccctgccggcacgggtaaatcagttttgatgcgagctaggtgtgttaccatgattcgagtttgacgagacccagaagctaaccattcgcatcattcatgagctgaagaagaaatgggcgagagatccagaaagggttgcagtggctgcatcaactggcctcgcagcctgcaacattggtggtcagactcttcacagctttgctggcatcgggctgggcaaggaagacgtgcccactttggtcaagaagatccgccgcaacgcaaaagcaaaaaatcgatggctgcggactcacactctcgtcattgacgaagtgtccatggttgacggcgaactttttgataagctatcacagattgcgcgcacccttcgcaataatggaaggccctttggcggcatccaattagttataacgggtgatttcttccaattgcctccggtgcctgatggtgggaagaaggaagccaagtttgcgtttgacgctgcgacctggaacacctcaattgaccacacaatcggactgacccaagtctttcgtcaaaaagacccccaatttgcggggatgctcaatgaaatgcggcttggaagaatcagcgatgcaagcgtacagaccttcaagagcctcgcgaggcccttaagttttgacgatggcttggatgtcacggaactgtttccaacgcgacaagaggtcgaaaggtccaatgaaacgcgactacggaatttacctggagagtcataccactacgaggccgccgatactggtgatccaaatatccgtgacaagctgctggccaacatgatggcacccaaaacgatgcagctcaagaaaggggcgcaggtgatgcttatcaagaatatggacgatacgctggtgaacggctctctcggcaaggtagtagggttcatgagtgaggctgtgttcgagaattgggcattgacggaccaatcgacagggtcaggcgacgaggccgagcccagcggcagtggagcaagaaagatcaaagcttttagtcgagacgtagacggtacgaaagatgttcgcgagtacccggtagttcggttcacggccacggatggtacgcatcgcgtcatcctttgcattcctgaggactggaaagtggaattgcccacgggcgaggtgcaggcatctcggaaacaattaccactcattttggcatgggcactttcgatccataaagcgcagggccagacgctggagagggtcaaggtagacctgggcaaggtgttcgagaaaggccaggcgtatgtggcgctcagccgagccgtcagcaagcaagggcttcaagtgttgcgttttgaaaagagcaaagtgatggctcacccacgggtgattcagttctacaacaagctctacagcgccgagtcggctctcaagactcagaaggcagcgactaagccgactctcaagatatcggatttcgccagcaatgtgcctgcaccgggttccagggcgggctcaaaaggaaagggtagggagatcattgatttagacgaagaggaggcaatgatggcagcctacgcttgatggcgtcaattgtgcattcatagaggggtatgtctgggacggcgttggcatttggaagtcgctttttcatggcgtacgcttggggtgcggacaatcacacagcgatatacccgtcgaggtgctctcgtatgtattgacatgggtttgagagacaggaatgttgaagaactttgctcaggtggcttcgcactgggaagcagaccatagcctaggtaaagacataatgtacaagtattgaagataaagacgagtctttcgttctagagatatagtaacaagcatttctaaggaaggagacgttgacctgga

SEQ ID NO: 31251 - DNA, 3000 bp, Muscodor strobelii
  misc_feature: SGI cDNA ID NO. 570756
  misc_feature: Encodes the peptide sequence at SEQ ID NO 31252
atgaaacaagacaccaaaaccggccgcaacagtgatcgagacgtcacttacaatgacgaggccggtgctaaagatgaagaaatccgccaatatgctgccggtgggcatactctggctgaatgggatgaattatatgaaaacaggccacacaaccatggcaagagtctgttgttctcggacttgaccactcagctgttcgacaaactcaattcagctcggagcaaagagtctaaggtcgctgctctaggtgcgcgtgcacaaacgccccacgagtatcgccgcgcactcgtcgagcgattcatctcaagatggcggaaagaagtgggcgatgacttcttcccagctatgcgcttgatcctgcccttgtctgatcgcgagaggggcatgtacaagctgaaggaatcagttatcgccaatcgtcttatcaaggtcctgaaaatcgatgtccgctcaaatgatgccgagagcctcaagcgttggaagcaggcacctactacatcttcagacggtcaagctgtagcgggcgactttcctttcagatgttaccaggtcctcgctaagagacccatgtcgggtggaaacaccatgcgcattgctgatgttaacgaaatgttagaccgacttgccgctgcttcgggcgacaaagaacaacttcctatttttgaacatttctatcagaatatgaatgcacatgagctgcaatggctcattcgtatcatcctgaagcaggtcagaattggcgcaacagagaagacgatactagatatatttcacccgaatgccatggacttgttcaacgtgtcctcaaaactccgcagagtgtgctgggagttatacgaccccgaatacatcttaactgatgagcagactggcattgtcttatttgaatgcttccttccacagctcgcctataacgaaatgtcgacttccttcgagagtatggtaaagaagctaaacagctcgccagggtcaaaagatagtgatgagaaccttgagttctggatcgaggaaaagctggatggcgaaagaatgcaattacatgtggcagacgacagcagtcacccaggcggtaaaaagttcttttattggtcacggaaaggcaaagattacacatacctctatggaagcgggttcaaagatgatcgctcgtcacttacttgccatctgaagagtgcttttgctctaggagttcgcaacatcattctagatggagagatgatagtatgggatcctgttctgaaaaaggtctgcagatttggcactctaaagacagccgctcttgcaggcattcgtgaccccaacaatcaggaacctcgaccagtgttccgagtcttcgatatactttatctgaacgaccagccattaactcagtatacccttcgcgatcgaagagaagctcttaaacgggctgttcctggtgtgccattccgtcttgaggttcaccaacacgcagtagccactgacccagaagaaatccggccggctctgcaaaagattgtttcagactcttctgagggcctggtcataaagaatccacagtcattgtacactgttggtgagcgcgcgaccgattggataaaagtgaaacccgagtatatgaggggccatggaaaggaacttgatgttattgtcattggaggttattatggatcaggtcgtcgtggtggcagattatcctccttcatgtgcggcctccgcgttacccaaaaagacatcgagaatggcgccgatccggaaaaatgttacagtttcctcaaagtcggcggaggtttcaaggtcgaggactactccgaaattcatatgctcactgagggcaaatggaaggattgggacagcaaaaaccctccaagcaaatatatacgccttgctggcggagagaagtaccaatatgagaagcctgatgtgtggatccgacctaaagactctgttgttatcgctgtcaaggcggccagtctcgaagagacaaaatcattcgcaagcaagtacacgttccggtttccacgattcagaggtctgaagacagatcgggattgggaatcgtctttagactacgaccagttccaagaaatgagaatcgctcaagaacaacagaaagaagaaaaggcattcgagagagagaccaaacgacttcgaaacaagcgggctaagagaagtgtcgtgatcgccggacaggactcggcacccgccgtcgtctcaggaccacagactaaagtcttcgagggactagaattctgtatactcactgactgcactgcgcctgtgaagaaaactaagacgcaactagagacgttagtcagacagaacggcggcaagatatcccagcgcgcaagtcccggtacagacatgatcttaatagccgagaaaaaagtcgtaaaagtcgctagcatgatcaaagccggcgaagtcgacatcgtcagaccaagatggttgctagattgtgttgcacaggaagacaagagcttcgtcatcccttatgagcgcgatcatctgttttacgcttgcgacgcgactctgggcgctgcggagcagaacacagactgctacggcgatagctatgcgcgagatcttgacggccaggaactgaaacagttactgcaaaacatgccgaagagggaaatcgtggaccatttcagtaaagaggcattcattcgacgactaactcaaaacggtcatgatctgagcatgttgagaggtcacctattccgagatatggtcatacatctcgctggaacggctgatgtatcattgactaaagttcgtcagatcaaagattttgtgagattcggaagcggcgttctggtagatgacattgataatatttcaatatcgcatatcattgttctgggatcagatgagaaaggggaaatggagacggcggccgaagtgcgagagactattagcacgcgacatcctgttccgagagtagttactgtgcaatggattgaagactgctggaagaatcggactattgttgacgaggaaagatatgtaactcgatag

SEQ ID NO: 31252 - protein, 999 aa, Muscodor strobelii
  misc_feature: SGI Peptide ID NO. 570756
  misc_feature (734)..(814): Pfam Id: PF00533 Pfam Desc: BRCA1 C Terminus (BRCT) domain
  misc_feature (300)..(529): Pfam Id: PF01068 Pfam Desc: ATP dependent DNA ligase domain
  misc_feature (23)..(998): NCBI GI: 256725754 Blast Desc: NECHADRAFT_43928 [Nectria haematococca mpVI 77-13-4]
  misc_feature (23)..(997): NCBI GI: 145602015 Blast Desc: MGG_12899 [Magnaporthe grisea 70-15] gi|145010469|gb|EDJ95125.1| MGG_12899 [Magnaporthe grisea 70-15] gi|215848864|dbj|BAH01725.1| DNA ligase 4 [Magnaporthe grisea]
  misc_feature (90)..(997): NCBI GI: 116207608 Blast Desc: CHGG_03097 [Chaetomium globosum CBS 148.51] gi|88183694|gb|EAQ91162.1| CHGG_03097 [Chaetomium globosum CBS 148.51]
  misc_feature (10)..(998): NCBI GI: 85109337 Blast Desc: NCU06264 [Neurospora crassa OR74A] gi|74617328|sp|Q7SB49.1|DNL4_NEUCR RecName: Full=DNA ligase 4; AltName: Full=DNA ligase IV; AltName: synthase [ATP] 4; AltName:
  misc_feature (11)..(996): NCBI GI: 261358129 Blast Desc: DNA ligase [Verticillium albo-atrum VaMs.102]
  misc_feature (42)..(995): NCBI GI: 242763727 Blast Desc: DNA ligase, [Talaromyces stipitatus ATCC 10500] gi|218723828|gb|EED23245.1| DNA ligase, [Talaromyces stipitatus ATCC 10500]
  misc_feature (12)..(995): NCBI GI: 212529366 Blast Desc: DNA ligase, [Penicillium marneffei ATCC 18224] gi|210074238|gb|EEA28325.1| DNA ligase, [Penicillium marneffei ATCC 18224]
  misc_feature (34)..(997): NCBI GI: 119174468 Blast Desc: CIMG_09216 [Coccidioides immitis RS] gi|121752757|sp|Q1DKE7.1|DNLI4_COCIM RecName: Full=DNA ligase 4; AltName: Full=DNA ligase IV; AltName: synthase [ATP] 4
  misc_feature (34)..(997): NCBI GI: 240106843 Blast Desc: DNA ligase I, ATP-dependent family protein [Coccidioides posadasii C735 delta SOWgp]
  misc_feature (90)..(997): NCBI GI: 171686124 Blast Desc: protein product [Podospora anserina] gi|170943023|emb|CAP68676.1| protein product [Podospora anserina]
  misc_feature (10)..(998): SWISSPROT Homolog: EC 6.5.1.1 DNA ligase (ATP)
MKQDTKTGRNSDRDVTYNDEAGAKDEEIRQYAAGGHTLAEWDELYENRPHNHGKSLLFSDLTTQLFDKLNSARSKESKVAALGARAQTPHEYRRALVERFISRWRKEVGDDFFPAMRLILPLSDRERGMYKLKESVIANRLIKVLKIDVRSNDAESLKRWKQAPTTSSDGQAVAGDFPFRCYQVLAKRPMSGGNTMRIADVNEMLDRLAAASGDKEQLPIFEHFYQNMNAHELQWLIRIILKQVRIGATEKTILDIFHPNAMDLFNVSSKLRRVCWELYDPEYILTDEQTGIVLFECFLPQLAYNEMSTSFESMVKKLNSSPGSKDSDENLEFWIEEKLDGERMQLHVADDSSHPGGKKFFYWSRKGKDYTYLYGSGFKDDRSSLTCHLKSAFALGVRNIILDGEMIVWDPVLKKVCRFGTLKTAALAGIRDPNNQEPRPVFRVFDILYLNDQPLTQYTLRDRREALKRAVPGVPFRLEVHQHAVATDPEEIRPALQKIVSDSSEGLVIKNPQSLYTVGERATDWIKVKPEYMRGHGKELDVIVIGGYYGSGRRGGRLSSFMCGLRVTQKDIENGADPEKCYSFLKVGGGFKVEDYSEIHMLTEGKWKDWDSKNPPSKYIRLAGGEKYQYEKPDVWIRPKDSVVIAVKAASLEETKSFASKYTFRFPRFRGLKTDRDWESSLDYDQFQEMRIAQEQQKEEKAFERETKRLRNKRAKRSVVIAGQDSAPAVVSGPQTKVFEGLEFCILTDCTAPVKKTKTQLETLVRQNGGKISQRASPGTDMILIAEKKVVKVASMIKAGEVDIVRPRWLLDCVAQEDKSFVIPYERDHLFYACDATLGAAEQNTDCYGDSYARDLDGQELKQLLQNMPKREIVDHFSKEAFIRRLTQNGHDLSMLRGHLFRDMVIHLAGTADVSLTKVRQIKDFVRFGSGVLVDDIDNISISHIIVLGSDEKGEMETAAEVRETISTRHPVPRVVTVQWIEDCWKNRTIVDEERYVTR

SEQ ID NO: 31253 - DNA, 3679 bp, Muscodor strobelii
  misc_feature: SGI EST ID NO. CUFF.73979.0
  misc_feature: Variant of the nucleotide sequence at SEQ ID NO 31251
gaaaaatgttagtcaaagagtttaaagaggtagactgataaaacgtcgatgcaaatattgtctttccatgtttgaattggattccgtttggccatcaacgcgttcctttgtgcgtgacatcgcgccatgtaagacacttgcggcttccgaactgtatcatccctgctcactacgacccatacccaaattcatagtaggcccagggcactccgaccgcaacatcgtccgacatgaaacaagacaccaaaaccggccgcaacagtgatcgagacgtcacttacaatgacgaggccggtgctaaagatgaagaaatccgccaatatgctgccggtgggcatactctggctgaatgggatgaattatatgaaaacaggccacacaaccatggcaagagtctgttgttctcggacttgaccactcagctgttcgacaaactcaattcagctcggagcaaagagtctaaggtcgctgctctaggtgcgcgtgcacaaacgccccacgagtatcgccgcgcactcgtcgagcgattcatctcaagatggcggaaagaagtgggcgatgacttcttcccagctatgcgcttgatcctgcccttgtctgatcgcgagaggggcatgtacaagctgaaggaatcagttatcgccaatcgtcttatcaaggtcctgaaaatcgatgtccgctcaaatgatgccgagagcctcaagcgttggaagcaggcacctactacatcttcagacggtcaagctgtagcgggcgactttcctttcagatgttaccaggtcctcgctaagagacccatgtcgggtggaaacaccatgcgcattgctgatgttaacgaaatgttagaccgacttgccgctgcttcgggcgacaaagaacaacttcctatttttgaacatttctatcagaatatgaatgcacatgagctgcaatggctcattcgtatcatcctgaagcaggtcagaattggcgcaacagagaagacgatactagatatatttcacccgaatgccatggacttgttcaacgtgtcctcaaaactccgcagagtgtgctgggagttatacgaccccgaatacatcttaactgatgagcagactggcattgtcttatttgaatgcttccttccacagctcgcctataacgaaatgtcgacttccttcgagagtatggtaaagaagctaaacagctcgccagggtcaaaagatagtgatgagaaccttgagttctggatcgaggaaaagctggatggcgaaagaatgcaattacatgtggcagacgacagcagtcacccaggcggtaaaaagttcttttattggtcacggaaaggcaaagattacacatacctctatggaagcgggttcaaagatgatcgctcgtcacttacttgccatctgaagagtgcttttgctctaggagttcgcaacatcattctagatggagagatgatagtatgggatcctgttctgaaaaaggtctgcagatttggcactctaaagacagccgctcttgcaggcattcgtgaccccaacaatcaggaacctcgaccagtgttccgagtcttcgatatactttatctgaacgaccagccattaactcagtatacccttcgcgatcgaagagaagctcttaaacgggctgttcctggtgtgccattccgtcttgaggttcaccaacacgcagtagccactgacccagaagaaatccggccggctctgcaaaagattgtttcagactcttctgagggcctggtcataaagaatccacagtcattgtacactgttggtgagcgcgcgaccgattggataaaagtgaaacccgagtatatgaggggccatggaaaggaacttgatgttattgtcattggaggttattatggatcaggtcgtcgtggtggcagattatcctccttcatgtgcggcctccgcgttacccaaaaagacatcgagaatggcgccgatccggaaaaatgttacagtttcctcaaagtcggcggaggtttcaaggtcgaggactactccgaaattcatatgctcactgagggcaaatggaaggattgggacagcaaaaaccctccaagcaaatatatacgccttgctggcggagagaagtaccaatatgagaagcctgatgtgtggatccgacctaaagactctgttgttatcgctgtcaaggcggccagtctcgaagagacaaaatcattcgcaagcaagtacacgttccggtttccacgattcagaggtctgaagacagatcgggattgggaatcgtctttagactacgaccagttccaagaaatgagaatcgctcaagaacaacagaaagaagaaaaggcattcgagagagagaccaaacgacttcgaaacaagcgggctaagagaagtgtcgtgatcgccggacaggactcggcacccgccgtcgtctcaggaccacagactaaagtcttcgagggactagaattctgtatactcactgactgcactgcgcctgtgaagaaaactaagacgcaactagagacgttagtcagacagaacggcggcaagatatcccagcgcgcaagtcccggtacagacatgatcttaatagccgagaaaaaagtcgtaaaagtcgctagcatgatcaaagccggcgaagtcgacatcgtcagaccaagatggttgctagattgtgttgcacaggaagacaagagcttcgtcatcccttatgagcgcgatcatctgttttacgcttgcgacgcgactctgggcgctgcggagcagaacacagactgctacggcgatagctatgcgcgagatcttgacggccaggaactgaaacagttactgcaaaacatgccgaagagggaaatcgtggaccatttcagtaaagaggcattcattcgacgactaactcaaaacggtcatgatctgagcatgttgagaggtcacctattccgagatatggtcatacatctcgctggaacggctgatgtatcattgactaaagttcgtcagatcaaagattttgtgagattcggaagcggcgttctggtagatgacattgataatatttcaatatcgcatatcattgttctgggatcagatgagaaaggggaaatggagacggcggccgaagtgcgagagactattagcacgcgacatcctgttccgagagtagttactgtgcaatggattgaagactgctggaagaatcggactattgttgacgaggaaagatatgtaactcgatagtctggacacgataacaaaattccgcgaagattcatgtctacaggcgcggctgaaagtgaagtgactaaagcctagtaaatgtggcaattgcaggtccctattcaatgttgccgtcgcgtcctttgtacatgtcaggtggctgggtaacaaagagaagcgtcgaccttatcaatgcaaattggagaacggcacaccaacaagcaatcatgtggccttggcctagtggtttaacaatcggtatctgcttgcagatcaatgggttcgattcccatacttgctatgtagggtcctgggaactttgcttcggttcgtcctggcgctagtacccatcccaaaggggcctttgcatcatttccgatcttattttttctcttttcgttttttcgctatccagttcagttttttaatatgctttccttgcgcccatttcgcctcttgttagtcttttg

SEQ ID NO: 31254 - DNA, 1200 bp, Muscodor strobelii
  misc_feature: SGI cDNA ID NO. 570757
  misc_feature: Encodes the peptide sequence at SEQ ID NO 31255
atgctcactgagggcaaatggaaggattgggacagcaaaaaccctccaagcaaatatatacgccttgctggcggagagaagtaccaatatgagaagcctgatgtgtggatccgacctaaagactctgttgttatcgctgtcaaggcggccagtctcgaagagacaaaatcattcgcaagcaagtacacgttccggtttccacgattcagaggtctgaagacagatcgggattgggaatcgtctttagactacgaccagttccaagaaatgagaatcgctcaagaacaacagaaagaagaaaaggcattcgagagagagaccaaacgacttcgaaacaagcgggctaagagaagtgtcgtgatcgccggacaggactcggcacccgccgtcgtctcaggaccacagactaaagtcttcgagggactagaattctgtatactcactgactgcactgcgcctgtgaagaaaactaagacgcaactagagacgttagtcagacagaacggcggcaagatatcccagcgcgcaagtcccggtacagacatgatcttaatagccgagaaaaaagtcgtaaaagtcgctagcatgatcaaagccggcgaagtcgacatcgtcagaccaagatggttgctagattgtgttgcacaggaagacaagagcttcgtcatcccttatgagcgcgatcatctgttttacgcttgcgacgcgactctgggcgctgcggagcagaacacagactgctacggcgatagctatgcgcgagatcttgacggccaggaactgaaacagttactgcaaaacatgccgaagagggaaatcgtggaccatttcagtaaagaggcattcattcgacgactaactcaaaacggtcatgatctgagcatgttgagaggtcacctattccgagatatggtcatacatctcgctggaacggctgatgtatcattgactaaagttcgtcagatcaaagattttgtgagattcggaagcggcgttctggtagatgacattgataatatttcaatatcgcatatcattgttctgggatcagatgagaaaggggaaatggagacggcggccgaagtgcgagagactattagcacgcgacatcctgttccgagagtagttactgtgcaatggattgaagactgctggaagaatcggactattgttgacgaggaaagatatgtaactcgatag

SEQ ID NO: 31255 - protein, 399 aa, Muscodor strobelii
  misc_feature: SGI Peptide ID NO. 570757
  misc_feature (134)..(214): Pfam Id: PF00533 Pfam Desc: BRCA1 C Terminus (BRCT) domain
  misc_feature (3)..(397): NCBI GI: 256725754 Blast Desc: NECHADRAFT_43928 [Nectria haematococca mpVI 77-13-4]
  misc_feature (3)..(396): NCBI GI: 261358129 Blast Desc: DNA ligase [Verticillium albo-atrum VaMs.102]
  misc_feature (3)..(397): NCBI GI: 116207608 Blast Desc: CHGG_03097 [Chaetomium globosum CBS 148.51] gi|88183694|gb|EAQ91162.1| CHGG_03097 [Chaetomium globosum CBS 148.51]
  misc_feature (2)..(397): NCBI GI: 145602015 Blast Desc: MGG_12899 [Magnaporthe grisea 70-15] gi|145010469|gb|EDJ95125.1| MGG_12899 [Magnaporthe grisea 70-15] gi|215848864|dbj|BAH01725.1| DNA ligase 4 [Magnaporthe grisea]
  misc_feature (3)..(398): NCBI GI: 85109337 Blast Desc: NCU06264 [Neurospora crassa OR74A] gi|74617328|sp|Q7SB49.1|DNL4_NEUCR RecName: Full=DNA ligase 4; AltName: Full=DNA ligase IV; AltName: synthase [ATP] 4; AltName:
  misc_feature (3)..(397): NCBI GI: 171686124 Blast Desc: protein product [Podospora anserina] gi|170943023|emb|CAP68676.1| protein product [Podospora anserina]
  misc_feature (3)..(395): NCBI GI: 242763727 Blast Desc: DNA ligase, [Talaromyces stipitatus ATCC 10500] gi|218723828|gb|EED23245.1| DNA ligase, [Talaromyces stipitatus ATCC 10500]
  misc_feature (3)..(397): NCBI GI: 119174468 Blast Desc: CIMG_09216 [Coccidioides immitis RS] gi|121752757|sp|Q1DKE7.1|DNLI4_COCIM RecName: Full=DNA ligase 4; AltName: Full=DNA ligase IV; AltName: synthase [ATP] 4
  misc_feature (3)..(397): NCBI GI: 240106843 Blast Desc: DNA ligase I, ATP-dependent family protein [Coccidioides posadasii C735 delta SOWgp]
  misc_feature (3)..(395): NCBI GI: 212529366 Blast Desc: DNA ligase, [Penicillium marneffei ATCC 18224] gi|210074238|gb|EEA28325.1| DNA ligase, [Penicillium marneffei ATCC 18224]
  misc_feature (3)..(398): SWISSPROT Homolog: EC 6.5.1.1 DNA ligase (ATP)
MLTEGKWKDWDSKNPPSKYIRLAGGEKYQYEKPDVWIRPKDSVVIAVKAASLEETKSFASKYTFRFPRFRGLKTDRDWESSLDYDQFQEMRIAQEQQKEEKAFERETKRLRNKRAKRSVVIAGQDSAPAVVSGPQTKVFEGLEFCILTDCTAPVKKTKTQLETLVRQNGGKISQRASPGTDMILIAEKKVVKVASMIKAGEVDIVRPRWLLDCVAQEDKSFVIPYERDHLFYACDATLGAAEQNTDCYGDSYARDLDGQELKQLLQNMPKREIVDHFSKEAFIRRLTQNGHDLSMLRGHLFRDMVIHLAGTADVSLTKVRQIKDFVRFGSGVLVDDIDNISISHIIVLGSDEKGEMETAAEVRETISTRHPVPRVVTVQWIEDCWKNRTIVDEERYVTR

SEQ ID NO: 31256 - DNA, 3679 bp, Muscodor strobelii; identical to SEQ ID NO: 31253
  misc_feature: SGI EST ID NO. CUFF.73979.0
  misc_feature: Variant of the nucleotide sequence at SEQ ID NO 31254

SEQ ID NO: 31257 - DNA, 669 bp, Muscodor strobelii
  misc_feature: SGI cDNA ID NO. 570758
  misc_feature: Encodes the peptide sequence at SEQ ID NO 31258
atgtctctgccatccaatgttcacgtgtccaaacacccgtgcctactctcgaagctctcgcttctccgatctaagtctacacatgcccgtgatgtcaagtctctcgtcaacgacatcgccctgatcgtcggcattgaagcgtttgctacggctctaacacccgttgacggacctaaggacgagacacccatcggcttcgaatacacaaccacgaccgtacaaccccaagagctctccatcgtccccatcctacgctcgggactcggcatggtagaagccatacaaacaatcctaccgcagcccgtacccgtacaccatctcggcctctaccgtgagccaagcaccctcgagcccgtcgaatactacaacaacctaccccaacacatcggatccggtgcctcgagtctagctatcgtcgtcgatcccgtcatagcgacgggcggcacctgcgttgccgccattcagacgctaaaggaatggggcgtgaagaagatcgttgttttatccgttattgctgctgcggagggtgtgaaacgtgctgcggctgagtggcctgagggtgtggagatctgggttgcgggtgtagatgagaagttgacggataagggaatgctgcaacccggtgtgggagatgttggtgatagactgtttttgacgattgggaagtag

SEQ ID NO: 31258 - protein, 222 aa, Muscodor strobelii
  misc_feature: SGI Peptide ID NO. 570758
  misc_feature (31)..(190): Pfam Id: PF00156 Pfam Desc: Phosphoribosyl transferase domain
  misc_feature (2)..(222): NCBI GI: 46116626 Blast Desc: FG04155.1 [Gibberella zeae PH-1]
  misc_feature (2)..(222): NCBI GI: 85109331 Blast Desc: NCU06261 [Neurospora crassa OR74A] gi|28924505|gb|EAA33629.1| NCU06261 [Neurospora crassa OR74A]
  misc_feature (2)..(222): NCBI GI: 256726159 Blast Desc: [Nectria haematococca mpVI 77-13-4]
  misc_feature (2)..(222): NCBI GI: 116207610 Blast Desc: CHGG_03098 [Chaetomium globosum CBS 148.51] gi|88183695|gb|EAQ91163.1| CHGG_03098 [Chaetomium globosum CBS 148.51]
  misc_feature (2)..(222): NCBI GI: 171686134 Blast Desc: protein product [Podospora anserina] gi|170943028|emb|CAP68681.1| protein product [Podospora anserina]
  misc_feature (2)..(222): NCBI GI: 156058686 Blast Desc: SS1G_03355 [Sclerotinia sclerotiorum 1980] gi|154701142|gb|EDO00881.1| SS1G_03355 [Sclerotinia sclerotiorum 1980]
  misc_feature (2)..(222): NCBI GI: 154303098 Blast Desc: BC1G_09569 [Botryotinia fuckeliana B05.10] gi|150855032|gb|EDN30224.1| BC1G_09569 [Botryotinia fuckeliana B05.10]
  misc_feature (3)..(222): NCBI GI: 239607517 Blast Desc: uracil phosphoribosyltransferase [Ajellomyces dermatitidis ER-3]
  misc_feature (3)..(222): NCBI GI: 261200263 Blast Desc: uracil phosphoribosyltransferase [Ajellomyces dermatitidis SLH14081] gi|239593604|gb|EEQ76185.1| uracil phosphoribosyltransferase [Ajellomyces dermatitidis SLH14081]
  misc_feature (1)..(222): NCBI GI: 71002550 Blast Desc: uracil phosphoribosyltransferase [Aspergillus fumigatus Af293] gi|66853594|gb|EAL93918.1| uracil phosphoribosyltransferase [Aspergillus fumigatus Af293] uracil
  misc_feature (5)..(219): SWISSPROT Homolog: EC 2.4.2.9 Uracil phosphoribosyltransferase
MSLPSNVHVSKHPCLLSKLSLLRSKSTHARDVKSLVNDIALIVGIEAFATALTPVDGPKDETPIGFEYTTTTVQPQELSIVPILRSGLGMVEAIQTILPQPVPVHHLGLYREPSTLEPVEYYNNLPQHIGSGASSLAIVVDPVIATGGTCVAAIQTLKEWGVKKIVVLSVIAAAEGVKRAAAEWPEGVEIWVAGVDEKLTDKGMLQPGVGDVGDRLFLTIGK

SEQ ID NO: 31259 - DNA, 998 bp, Muscodor strobelii
  misc_feature: SGI EST ID NO. CUFF.73983.0
  misc_feature: Variant of the nucleotide sequence at SEQ ID NO 31257
ccactatgagctatcactgtctcgcatactgagagtcccgaccaccggattactatctgcctaactaacctcactcactccctttgttattctgattcaggctttcgattctctgtgctatctctcaaacgggcatactcatcaattcctccgcggtcgtcttattactgtttttgtatccgtaaaaacgagatcatttagcatcgtttcctatctcagagtacttatacatcgggtatctatcgtagagttaggtaacctcgtagctacaatgtctctgccatccaatgttcacgtgtccaaacacccgtgcctactctcgaagctctcgcttctccgatctaagtctacacatgcccgtgatgtcaagtctctcgtcaacgacatcgccctgatcgtcggcattgaagcgtttgctacggctctaacacccgttgacggacctaaggacgagacacccatcggcttcgaatacacaaccacgaccgtacaaccccaagagctctccatcgtccccatcctacgctcgggactcggcatggtagaagccatacaaacaatcctaccgcagcccgtacccgtacaccatctcggcctctaccgtgagccaagcaccctcgagcccgtcgaatactacaacaacctaccccaacacatcggatccggtgcctcgagtctagctatcgtcgtcgatcccgtcatagcgacgggcggcacctgcgttgccgccattcagacgctaaaggaatggggcgtgaagaagatcgttgttttatccgttattgctgctgcggagggtgtgaaacgtgctgcggctgagtggcctgagggtgtggagatctgggttgcgggtgtagatgagaagttgacggataagggaatgctgcaacccggtgtgggagatgttggtgatagactgtttttgacgattgggaagtaggatgtttctggttagaagacgcagcgtaatggctagattcaataattactcgcctcca

SEQ ID NO: 31260 - DNA, 1413 bp, Muscodor strobelii
  misc_feature: SGI cDNA ID NO. 570759
  misc_feature: Encodes the peptide sequence at SEQ ID NO 31261
atgccaataaccacagactctggtgtacttgtagcacctgagaaagatccggtacaggggatcgcatctgctcacgcgacatcatcgcgccggcggcgatcgtctgctaccgaacctgagtatgaggttccggatgactatttcaacgtcacggaggtagcggcggtgccggctgagcaggagcaggaggactttgaagaagaggcgcatcgacaaacaagccaggcacttggatctcagagatcagagcaatccgttccacgggaacagccaattagcaccaagctccataaggcgcccgtctcaaaatggacgacagagctgtacacaatctcatacctcatcctattctccatattcggcaccctcgcacgcctcggtctgcaggctctcgcgttctacccaggggtgccggtgacatttagttccgtgtggcccaatttcgccggaagtctcatcatcgggtttctggcagaagaccgcaagctcttccgttttgaatgggggactccaacatacgaccaacacctcaagaaggctagagaagacgaagaggcgggatcttccagctctcacattgcacaggatttggtcactgcgaagaaagctcatttagcgactaagaagacgatacccctatacatcggtcttgcgactggattttgtggctcatttacttccttttcttcatttattagagatatcttcctcgctctttcgaacgatttaccggtaccaggcggttcgacagctatcccacgaaacggcggatattcgttcctggctctactcgctgtcacgattgctacgatctctctatctttctcgggattttacattgggactcaacttgcggttggcttagagcccataacaccatcattaccttattccttgacacgcaaggcattggatcccattgccgtgttgctaggctggggttcttggatcggagctatcattctctccatcgttccaccagatcgattcgccaaacacggtgccgctgaagtctggcgtggtactgcaacgttcgcattgatattcgccccattaggctgcctacttagattctacatctcagccaaactcaacggacgaatatcttcgtttccacttggcacattcgccgtgaacatgctaggcacagctatcttaggactggcctgggacctggctcacgtgcctaaaggtggagtcattggatgtcaggtcttccaaggtattgaagacggtttctgcggttgtctcacaaccgtgtcaacgtggattactgaattggctgtgcttcgtcgtcggaagagttacatatatggaggcgcgagcgtaattggtgggttggcagttatgattgcaattatgggtggcttgaaatggagccagggatattcaggactccaatgtctacattga

SEQ ID NO: 31261 - protein, 470 aa, Muscodor strobelii
  misc_feature: SGI Peptide ID NO. 570759
  misc_feature (343)..(456): Pfam Id: PF02537 Pfam Desc: CrcB-like protein
  misc_feature (343)..(426): Pfam Id: PF02537 Pfam Desc: CrcB-like protein
  misc_feature (19)..(462): NCBI GI: 46116628 Blast Desc: FG04156.1 [Gibberella zeae PH-1]
  misc_feature (20)..(470): NCBI GI: 154303096 Blast Desc: BC1G_09568 [Botryotinia fuckeliana B05.10] gi|150855031|gb|EDN30223.1| BC1G_09568 [Botryotinia fuckeliana B05.10]
  misc_feature (12)..(466): NCBI GI: 256725755 Blast Desc: NECHADRAFT_43287 [Nectria haematococca mpVI 77-13-4]
  misc_feature (40)..(470): NCBI GI: 171686136 Blast Desc: protein product [Podospora anserina] gi|170943029|emb|CAP68682.1| protein product [Podospora anserina]
  misc_feature (40)..(469): NCBI GI: 85109333 Blast Desc: NCU06262 [Neurospora crassa OR74A] gi|28924506|gb|EAA33630.1| [Neurospora crassa OR74A]
  misc_feature (20)..(439): NCBI GI: 156058688 Blast Desc: SS1G_03356 [Sclerotinia sclerotiorum 1980] gi|154701143|gb|EDO00882.1| SS1G_03356 [Sclerotinia sclerotiorum 1980]
  misc_feature (82)..(468): NCBI GI: 261358127 Blast Desc: conserved [Verticillium albo-atrum VaMs.102]
  misc_feature (50)..(468): NCBI GI: 121716770 Blast Desc: chromosome condensation protein, [Aspergillus clavatus NRRL 1] gi|119404062|gb|EAW14479.1| chromosome condensation protein, [Aspergillus clavatus NRRL 1]
  misc_feature (100)..(468): NCBI GI: 119482113 Blast Desc: CrcB-like protein [Neosartorya fischeri NRRL 181] gi|119409239|gb|EAW19188.1| CrcB-like protein [Neosartorya fischeri NRRL 181]
  misc_feature (57)..(469): NCBI GI: 189199496 Blast Desc: conserved [Pyrenophora tritici-repentis Pt-1C-BFP] gi|187983184|gb|EDU48672.1| conserved [Pyrenophora tritici-repentis Pt-1C-BFP]
MPITTDSGVLVAPEKDPVQGIASAHATSSRRRRSSATEPEYEVPDDYFNVTEVAAVPAEQEQEDFEEEAHRQTSQALGSQRSEQSVPREQPISTKLHKAPVSKWTTELYTISYLILFSIFGTLARLGLQALAFYPGVPVTFSSVWPNFAGSLIIGFLAEDRKLFRFEWGTPTYDQHLKKAREDEEAGSSSSHIAQDLVTAKKAHLATKKTIPLYIGLATGFCGSFTSFSSFIRDIFLALSNDLPVPGGSTAIPRNGGYSFLALLAVTIATISLSFSGFYIGTQLAVGLEPITPSLPYSLTRKALDPIAVLLGWGSWIGAIILSIVPPDRFAKHGAAEVWRGTATFALIFAPLGCLLRFYISAKLNGRISSFPLGTFAVNMLGTAILGLAWDLAHVPKGGVIGCQVFQGIEDGFCGCLTTVSTWITELAVLRRRKSYIYGGASVIGGLAVMIAIMGGLKWSQGYSGLQCLH

SEQ ID NO: 31262 - DNA, 3084 bp, Muscodor strobelii
  misc_feature: SGI cDNA ID NO. 570760
  misc_feature: Encodes the peptide sequence at SEQ ID NO 31263
atggccgaattgaacccatgcccactcaaagcatgctgtagcaattggggattctgcggtccatttccagcgcactgcgatatacgcgcaccggagggtggcagtcccggcagtaagcttccagaattccagagtacatgcgtttcaaattgcggatacgacatcaagcagatttcaggaccgcccgaagcctttaatcgaatcggatactactcatcatggagccttggtcgtgaatgtctgcggctttcggcagccaatgcaaacaccgatggaagctatacgcacatgcattggggcttccttgaaattgacccaaacacctggaaaccagtgctgaaggatcctcacaagcaatgggacgatttcaagaagctagaggacatgaaacgtatcatatcattcggtggttgggcatactcgacagagaaagcaacgtacaatatcattctttccgcgatcatagatcatcgcgaggtttttgcggcgaatatcgctaattttattgccgatgaaggtattgacggtgtagacattaattgggagtatccaggggcacctgacattcttgttgatggacaacccatcgggcaagccggagatggcgtggcctatctccggtttttgacaactttgaaagccaagctcggagataagatagtgtccattgcagcacccgcatcgtattggtatttgaaggcgttccccattgatagaatagctgctgttatagatcacattgtctttatgacatacgatcttcatgggcaatgggattacggaaacatcaatgcttttgactcctgtccatctgggaggtgcattagaagtcatgtcaatttaacggaaacgcgtcacgctctgtcacttgttacaaaagctggtgttccaaacaacaagatcttcgtgggagaatctagctacggtagatcattccacatggccgtcgatggctgctggggcccaaattgctatttcaccggctctcgaatagtatcagatgctcgggaaggacgatgtactaaaacagcgggagacattgcaaatgcggagattgatgagatcatcagactcggcggcggagaacaattgcatgatgccgggtccaacactgatttcgtactttacaaaggggacgctatcagctatatgacaccaacaacgaaaaatactcgacgtgctgactggaaagacttaaatttcgcgggcacgatcgactgggcagtcgatctgcaagcgtttagtaaagacgatctaaaccagaaacccgataggccagaaacaggagatgaaggatgtatttctggctcggataagacagtcaacactggcgatctctgtccggtcgttgagctaccgcccgagataccgggcgacatcatagcttgggacgagctggacgtcgatttgaaccgcttatgcaagtttgcatgcaagtacgggtattgcccgcaagacatatgcacaactccagtcgtcgacccggaccaagatgggatagtcgaggttggcaacgatcctgacaatccgaactggttcgactatgaggcggcgaggcaagagaacttggcaaattgcataatatatcaggatcccaagtacagagatgcttcgaccttccaatgctacgcatattgccactcaaaagtcgaggaagcaaaagaagaaggccggaccacgaattacggatgtgtaggcttctttcccttggacaaagaaattccttggacgagagagccaggcacaggtcagatctacgctccagggaaatgttcatgtgacaacatgctactcaatgagatcgcggacctcataattgatgcgcttccaattatcgctgaaatcggttgctatataatcatgtcagcccttaagactgtgcttgatgtcgggctggagttcattcccggcgttggcaagattttggatgctggtttagacgcagcaaccgtggcagcacaagtgtcagcctacgcgtatcctgaggaagaagaccctgaaggtgcattttcttggtggttaagtccttgcggagggacagatcttgtaccaaatgatatcaaaaatgtattcggtattctaagtactgtcacagacggtgtatcgagtttcaagactccaaagaatttcaagaaaggaagcggaaagaagggcgacgacgctaaccccatagaccgatcgaaaccaaaagctggtacgggaaaaggtcccaatggtaccggcaacggcgccaccaagaaacccaaatgccggatccctgcttcgaagtcaaccatccgcgtaggtgcggctaaaaacacattgcgcgagcagtcatgtgttgctgataagacgcaaaaggacgagttggtaatcacctccatcggatatggggctcggccaacacaagtggccaaagcctgcagtaagagctggtcacaagcatgctttcactacagctctgccatatcaagaaatccgacatgggcaactttgacatgtccacccgaagcaggcgctacgtcttacgatcgacctcgccccgcggtgaagacatggtacgaagcacaacacggcggtggaggctggagagacccagaccccgccaatcgacaacaaggttcctgtggtgcagatgaatatccgcctgcctatttgctgaacgatgcctctcctgcttatatgaactccaggaaaaacccccaaggtcaatcgattcgctacctcccatatggggagaatagaggcgccgggagtatgtggaagggcgcgtgttttagtccacatgttgcggcgctgactgatagtcaagtgagaacgggagtcaatggggcaacaagtaagcaagttgctgtttccaatggtctcaagaggacgttcgcggcagtcaatgtccccgtgaagccagaattcacgatatcctcttggggccagcaaggaaacgccccgccagatgatgggatgtctctgaatacatgttggccttctggcattgcagcaggtgacccaggatttgcgctgttgtctttcgatccttggtataatggcaagcctcgcccttacgactatacgaaagactacgtgaagggttcgaatggatcgtag

SEQ ID NO: 31263 - protein, 1027 aa, Muscodor strobelii
  misc_feature: SGI Peptide ID NO. 570760
  misc_feature (65)..(408): Pfam Id: PF00704 Pfam Desc: Glycosyl hydrolases family 18
  misc_feature (65)..(383): Pfam Id: PF00704 Pfam Desc: Glycosyl hydrolases family 18
  misc_feature (1)..(986): NCBI GI: 46124103 Blast Desc: FG06429.1 [Gibberella zeae PH-1]
  misc_feature (384)..(1026): NCBI GI: 116193287 Blast Desc: CHGG_06361 [Chaetomium globosum CBS 148.51] gi|88182274|gb|EAQ89742.1| CHGG_06361 [Chaetomium globosum CBS 148.51]
  misc_feature (1)..(278): NCBI GI: 116193285 Blast Desc: CHGG_06360 [Chaetomium globosum CBS 148.51] gi|88182273|gb|EAQ89741.1| CHGG_06360 [Chaetomium globosum CBS 148.51]
  misc_feature (1)..(432): NCBI GI: 212533577 Blast Desc: conserved [Penicillium marneffei ATCC 18224] gi|210072309|gb|EEA26398.1| conserved [Penicillium marneffei ATCC 18224]
  misc_feature (1)..(441): NCBI GI: 115388968 Blast Desc: conserved [Aspergillus terreus NIH2624] gi|114194385|gb|EAU36085.1| conserved [Aspergillus terreus NIH2624]
  misc_feature (1)..(414): NCBI GI: 258574793 Blast Desc: conserved [Uncinocarpus reesii 1704] gi|237901844|gb|EEP76245.1| conserved [Uncinocarpus reesii 1704]
  misc_feature (1)..(417): NCBI GI: 170940090 Blast Desc: protein product [Podospora anserina]
  misc_feature (1)..(414): NCBI GI: 67516455 Blast Desc: AN0509.2 [Aspergillus nidulans FGSC A4] gi|40747452|gb|EAA66608.1| AN0509.2 [Aspergillus nidulans FGSC A4] gi|259489236|tpe|CBF89341.1| TPA: class V chitinase, nidulans
  misc_feature (1)..(416): NCBI GI: 212530856 Blast Desc: conserved [Penicillium marneffei ATCC 18224] gi|210074983|gb|EEA29070.1| conserved [Penicillium marneffei ATCC 18224]
  misc_feature (1)..(414): NCBI GI: 119500670 Blast Desc: glycosyl hydrolase, family 18, [Neosartorya fischeri NRRL 181] gi|119415257|gb|EAW25195.1| glycosyl hydrolase, family 18, [Neosartorya fischeri NRRL 181]
MAELNPCPLKACCSNWGFCGPFPAHCDIRAPEGGSPGSKLPEFQSTCVSNCGYDIKQISGPPEAFNRIGYYSSWSLGRECLRLSAANANTDGSYTHMHWGFLEIDPNTWKPVLKDPHKQWDDFKKLEDMKRIISFGGWAYSTEKATYNIILSAIIDHREVFAANIANFIADEGIDGVDINWEYPGAPDILVDGQPIGQAGDGVAYLRFLTTLKAKLGDKIVSIAAPASYWYLKAFPIDRIAAVIDHIVFMTYDLHGQWDYGNINAFDSCPSGRCIRSHVNLTETRHALSLVTKAGVPNNKIFVGESSYGRSFHMAVDGCWGPNCYFTGSRIVSDAREGRCTKTAGDIANAEIDEIIRLGGGEQLHDAGSNTDFVLYKGDAISYMTPTTKNTRRADWKDLNFAGTIDWAVDLQAFSKDDLNQKPDRPETGDEGCISGSDKTVNTGDLCPVVELPPEIPGDIIAWDELDVDLNRLCKFACKYGYCPQDICTTPVVDPDQDGIVEVGNDPDNPNWFDYEAARQENLANCIIYQDPKYRDASTFQCYAYCHSKVEEAKEEGRTTNYGCVGFFPLDKEIPWTREPGTGQIYAPGKCSCDNMLLNEIADLIIDALPIIAEIGCYIIMSALKTVLDVGLEFIPGVGKILDAGLDAATVAAQVSAYAYPEEEDPEGAFSWWLSPCGGTDLVPNDIKNVFGILSTVTDGVSSFKTPKNFKKGSGKKGDDANPIDRSKPKAGTGKGPNGTGNGATKKPKCRIPASKSTIRVGAAKNTLREQSCVADKTQKDELVITSIGYGARPTQVAKACSKSWSQACFHYSSAISRNPTWATLTCPPEAGATSYDRPRPAVKTWYEAQHGGGGWRDPDPANRQQGSCGADEYPPAYLLNDASPAYMNSRKNPQGQSIRYLPYGENRGAGSMWKGACFSPHVAALTDSQVRTGVNGATSKQVAVSNGLKRTFAAVNVPVKPEFTISSWGQQGNAPPDDGMSLNTCWPSGIAAGDPGFALLSFDPWYNGKPRPYDYTKDYVKGSNGS

SEQ ID NO: 31264 - DNA, 4140 bp, Muscodor strobelii
  misc_feature: SGI EST ID NO. CUFF.73986.0
  misc_feature: Variant of the nucleotide sequence at SEQ ID NO 31262
tgacatacgatcttcatgggcaatgggattacggaaacatcaatgcttttgactcctgtccatctgggaggtgcattagaagtcatgtcaatttaacggaaacgcgtcacgctctgtcacttgttacaaaagctggtgttccaaacaacaagatcttcgtgggagaatctagctacggtagatcattccacatggccgtcgatggctgctggggcccaaattgctatttcaccggctctcgaatagtatcagatgctcgggaaggacgatgtactaaaacagcgggagacattgcaaatgcggagattgatgagatcatcagactcggcggcggagaacaattgcatgatgccgggtccaacactgatttcgtactttacaaaggggacgctatcagctatatgacaccaacaacgaaaaatactcgacgtgctgactggaaagacttaaatttcgcgggcacgatcgactgggcagtcgatctgcaagcgtttagtaaagacgatctaaaccagaaacccgataggccagaaacaggagatgaaggatgtatttctggctcggataagacagtcaacactggcgatctctgtgagttcagttgcagttatggtttttgtccaggaacacaatgtgaatgtaccatccaaggtccggtcgttgagctaccgcccgagataccgggcgacatcatagcttgggacgagctggacgtcgatttgaaccgcttatgcaagtttgcatgcaagtacgggtattgcccgcaagacatatgcacaactccagtcgtcgacccggaccaagatgggatagtcgaggttggcaacgatcctgacaatccgaactggttcgactatgaggcggcgaggcaagagaacttggcaaattgcataatatatcaggatcccaagtacagagatgcttcgaccttccaatgctacgcatattgccactcaaaagtcgaggaagcaaaagaagaaggccggaccacgaattacggatgtgtaggcttctttcccttggacaaagaaattccttggacgagagagccaggcacaggtcagatctacgctccagggaaatgttcatgtgacaacatgctactcaatgagatcgcggacctcataattgatgcgcttccaattatcgctgaaatcggttgctatataatcatgtcagcccttaagactgtgcttgatgtcgggctggagttcattcccggcgttggcaagattttggatgctggtttagacgcagcaaccgtggcagcacaagtgtcagcctacgcgtatcctgaggaagaagaccctgaaggtgcattttcttggtggttaagtccttgcggagggacagatcttgtaccaaatgatatcaaaaatgtattcggtattctaagtactgtcacagacggtgtatcgagtttcaagactccaaagaatttcaagaaaggaagcggaaagaagggcgacgacgctaaccccatagaccgatcgaaaccaaaagctggtacgggaaaaggtcccaatggtaccggcaacggcgccaccaagaaacccaaatgccggatccctgcttcgaagtcaaccatccgcgtaggtgcggctaaaaacacattgcgcgagcagtcatgtgttgctgataagacgcaaaaggacgagttggtaatcacctccatcggatatggggctcggccaacacaagtggccaaagcctgcagtaagagctggtcacaagcatgctttcactacagctctgccatatcaagaaatccgacatgggcaactttgacatgtccacccgaagcaggcgctacgtcttacgatcgacctcgccccgcggtgaagacatggtacgaagcacaacacggcggtggaggctggagagacccagaccccgccaatcgacaacaaggttcctgtggtgcagatgaatatccgcctgcctatttgctgaacgatgcctctcctgcttatatgaactccaggaaaaacccccaaggtcaatcgattcgctacctcccatatggggagaatagaggcgccgggagtatgtggaagggcgcgtgttttagtccacatgttgcggcgctgactgatagtcaagtgagaacgggagtcaatggggcaacaagtaagcaagttgctgtttccaatggtctcaagaggacgttcgcggcagtcaatgtccccgtgaagccagaattcacgatatcctcttggggccagcaaggaaacgccccgccagatgatgggatgtctctgaatacatgttggccttctggcattgcagcaggtgacccaggatttgcgctgttgtctttcgatccttggtataatggcaagcctcgcccttacgactatacgaaagactacgtgaagggttcgaatggatcgtagtatcttactttcggcattatatggctatgcgggaggtgttacctagtcttgtcgtctgtctaaggttgttcatacatattcaagtcttatcacacaacctagttcatagttgctgtcttagaatcaaatcgattcatatgtcttcctatatggtattatatattatgccgaggctctaatgtgcaaacatatacatctactgctcttgtagatatcgaagatcgacaggaaataaaaatctatcaatgtagacattggagtcctgaatatccctggctccatttcaagccacccataattgcaatcataactgccaacccaccaattacgctcgcgcctccatatatgtaactcttccgacgacgaagcacagccaattcagtaatccacgttgacacggttgtgagacaaccgcagaaaccgtcttcaataccttggaagacctgacatccaatgactccacctttaggcacgtgagccaggtcccaggccagtcctaagatagctgtgcctagcatgttcacggcgaatgtgccaagtggaaacgaagatattcgtccgttgagtttggctgagatgtagaatctaagtaggcagcctaatggggcgaatatcaatgcgaacgttgcagtaccacgccagacttcagcggcaccgtgtttggcgaatcgatctggtggaacgatggagagaatgatagctccgatccaagaaccccagcctagcaacacggcaatgggatccaatgccttgcgtgtcaaggaataaggtaatgatggtgttatgggctctaagccaaccgcaagttgagtcccaatgtaaaatcccgagaaagatagagagatcgtagcaatcgtgacagcgagtagagccaggaacgaatatccgccgtttcgtgggatagctgtcgaaccgcctggtaccggtaaatcgttcgaaagagcgaggaagatatctctaataaatgaagaaaaggaagtaaatgagccacaaaatccagtcgcaagaccgatgtataggggtatcgtcttcttagtcgctaaatgagctttcttcgcagtgaccaaatcctgtgcaatgtgagagctggaagatcccgcctcttcgtcttctctagccttcttgaggtgttggtcgtatgttggagtcccccattcaaaacggaagagcttgcggtcttctgccagaaacccgatgatgagacttccggcgaaattgggccacacggaactaaatgtcaccggcacccctgggtagaacgcgagagcctgcagaccgaggcgtgcgagggtgccgaatatggagaataggatgaggtatgagattgtgtacagctctgtcgtccattttgagacgggcgccttatggagcttggtgctaattggctgttcccgtggaacggattgctctgatctctgagatccaagtgcctggcttgtttgtcgatgcgcctcttcttcaaagtcctcctgctcctgctcagccggcaccgccgctacctccgtgacgttgaaatagtcatccggaacctcatactcaggttcggtagcagacgatcgccgccggcgcgatgatgtcgcgtgagcagatgcgatcccctgtaccggatctttctcaggtgctacaagtacaccagagtctgtggttattggcatgatgcatcgcgcatgcaaggtgcgaccgggtaatgatcatattgccggtcagaaatctcgaagttacgtcggcgcgacctcgaaattag

SEQ ID NO: 31265 - DNA, 885 bp, Muscodor strobelii
  misc_feature: SGI cDNA ID NO. 570761
  misc_feature: Encodes the peptide sequence at SEQ ID NO 31266
atgacgtcaaacaacaatgcccctttttcacttgacgtagccattgcgacgattcaggacttttatacactcctcaccaggatgtatcttcccgatgagagtctcatcttggcaccggaagccggctggccgtctattacgaatgttggccagcatatccttgacgagttgaagaagacgactgaggtgatcacgctccttgcaaggctgtcgtacattcgaacggatggggacgacatctacaggtcacaaggtgctccagggtgtttctttgccgattggcattcattaatgcaagcaattgccaacggcactatcagtattagccacgtcaagactatcacagagggtaacgatttgaacgatgacaaggatgtgatcgatgaagagctttcgcctctcattgggttgaccgctggtggttacggcccattgtttgtactcgataccaagattggggtcatccactggattgattattgtccggacgagatcaaggagaatactacgattccacctgtggatatcgatgactactattcagatgagtcgcaaaatcaagttgaagactggcgctacgacgccccagcttggacaattgtcgacttctttaggcttctccaaaaccaatttcgccaactcgactttattcctataagcccctacaccgttatcaatgccttcaatcatcgtacgcctgagaaagatcgtatggtgtccatgttgcgggacatttatcggcgacacggctggcccgatgatgcaagttatgataaggccgaatgcatagaagcagtgcagcaagcactagaacagaattttccagcagaagcagactttcgtcgccgcggcaagcggccgtcggctgtgaacccaaacgcttaa

SEQ ID NO: 31266 - protein, 294 aa, Muscodor strobelii
  misc_feature: SGI Peptide ID NO. 570761
  misc_feature (1)..(279): NCBI GI: 238838708 Blast Desc: conserved [Microsporum canis CBS 113480]
  misc_feature (9)..(279): NCBI GI: 238841748 Blast Desc: conserved [Microsporum canis CBS 113480]
  misc_feature (57)..(284): NCBI GI: 116199827 Blast Desc: [Chaetomium globosum CBS 148.51] gi|88179348|gb|EAQ86816.1| [Chaetomium globosum CBS 148.51]
  misc_feature (9)..(275): NCBI GI: 238839760 Blast Desc: conserved [Microsporum canis CBS 113480]
  misc_feature (143)..(275): NCBI GI: 189200917 Blast Desc: [Pyrenophora tritici-repentis Pt-1C-BFP] gi|187983894|gb|EDU49382.1| [Pyrenophora tritici-repentis Pt-1C-BFP]
  misc_feature (191)..(275): NCBI GI: 119174240 Blast Desc: [Coccidioides immitis RS]
  misc_feature (12)..(280): NCBI GI: 189200917 Blast Desc: [Pyrenophora tritici-repentis Pt-1C-BFP] gi|187983894|gb|EDU49382.1| [Pyrenophora tritici-repentis Pt-1C-BFP]
MTSNNNAPFSLDVAIATIQDFYTLLTRMYLPDESLILAPEAGWPSITNVGQHILDELKKTTEVITLLARLSYIRTDGDDIYRSQGAPGCFFADWHSLMQAIANGTISISHVKTITEGNDLNDDKDVIDEELSPLIGLTAGGYGPLFVLDTKIGVIHWIDYCPDEIKENTTIPPVDIDDYYSDESQNQVEDWRYDAPAWTIVDFFRLLQNQFRQLDFIPISPYTVINAFNHRTPEKDRMVSMLRDIYRRHGWPDDASYDKAECIEAVQQALEQNFPAEADFRRRGKRPSAVNPNA

SEQ ID NO: 31267 - DNA, 219 bp, Muscodor strobelii
  misc_feature: SGI EST ID NO. CUFF.73994.0
  misc_feature: Variant of the nucleotide sequence at SEQ ID NO 31265
gcgggacatttatcggcgacacggctggcccgatgatgcaagttatgataaggccgaatgcatagaagcagtgcagcaagcactagaacagaattttccagcagaagcagactttcgtcgccgcggcaagcggccgtcggctgtgaacccaaacgcttaacacaatcatttggttcgaccacgatgggcatttcaggctagtatactatcagtcgtgtc

SEQ ID NO: 31268 - DNA, 1134 bp, Muscodor strobelii
  misc_feature: SGI cDNA ID NO. 570762
  misc_feature: Encodes the peptide sequence at SEQ ID NO 31269
atggatttgaagggactaaagaccggcgcctcctcccgggcattcgctgaacttcacgagccaaagaactccactgcagagaccgtgcaacgcctcattgatcttggatttgtgattgttggtaaactcaaaacgacgcagtttgcggattcagaatggccgacgtgtgattggattgattatcatggtccttggaatccgcgtggagatggctatttgacgacgagcgggagtagtgctggttctgcctctgcggttgctagtcatccttggcttgattactcgctcggtactgacaccttgggcagcattagatcgcctgctgccgtgcaggggatttttggaatgcggccttcgcttggagcgacgagcacttcaggagttgtgccgtatagtccgacatgggatacaatcgttgatcaccagcctagccaggaggtcttcgaaaattttatcacccttgtcgagcatttcctaggaataaaacgtacaagaatcagccttgcagatacatggaaatacactcgacctgacgggaccgaagaatcaatcagcaagcatttccatcatgcatttgactggtccgcgaatcgagatcagtggacaggtctcctcaaacccttcatcgaggagtatgaagagaagaagggcaaacctccgattcttaacccacaaatccggtttaaagtgaattatacacaaacggtgaccgcggaacagaaatcaaagggagatagactgctcaaacaatatcacgactggttctacgaacatatcatgacgccctccgatgatgggtactccgacagcatcatgatcttgccctggacgaatggagagccggtgtatagggatgagtacaaggaaggaccgcaagaattcacaggccggggattcttcttttataacattgggccttatgcgcagtgccctgagcttgttgtccctgttggtactacaccatatgtttcgaagtataccggaaaggtagagcagcttccagccgctgttggctttatagctgctaagggcagtgatattatgcttgctaatcttgtgaacgatgtttttgagagtatgggttccaggtttaatggactggagagtcaggttcgtctcggtaatgaattttag

SEQ ID NO: 31269 - protein, 377 aa, Muscodor strobelii
  misc_feature: SGI Peptide ID NO. 570762
  misc_feature (2)..(350): Pfam Id: PF01425 Pfam Desc: Amidase
  misc_feature (77)..(138): Pfam Id: PF01425 Pfam Desc: Amidase
  misc_feature (1)..(371): NCBI GI: 238492361 Blast Desc: glutamyl-tRNA(gln) amidotransferase subunit A, [Aspergillus flavus NRRL3357] gi|220695911|gb|EED52253.1| glutamyl-tRNA(gln) amidotransferase subunit A, [Aspergillus
  misc_feature (1)..(371): NCBI GI: 169782716 Blast Desc: [Aspergillus oryzae RIB40] gi|83774564|dbj|BAE64687.1| protein product [Aspergillus oryzae]
  misc_feature (2)..(359): NCBI GI: 239613958 Blast Desc: amidase [Ajellomyces dermatitidis ER-3]
  misc_feature (2)..(359): NCBI GI: 261193419 Blast Desc: amidase [Ajellomyces dermatitidis SLH14081] gi|239588720|gb|EEQ71363.1| amidase [Ajellomyces dermatitidis SLH14081]
  misc_feature (1)..(359): NCBI GI: 256720629 Blast Desc: NECHADRAFT_50177 [Nectria haematococca mpVI 77-13-4]
  misc_feature (1)..(356): NCBI GI: 255946445 Blast Desc: Pc20g15160 [Penicillium chrysogenum Wisconsin 54-1255] gi|211588725|emb|CAP86845.1| Pc20g15160 [Penicillium chrysogenum Wisconsin 54-1255]
  misc_feature (3)..(353): NCBI GI: 115442858 Blast Desc: [Aspergillus terreus NIH2624] gi|114188105|gb|EAU29805.1| [Aspergillus terreus NIH2624]
  misc_feature (3)..(356): NCBI GI: 256731989 Blast Desc: NECHADRAFT_93947 [Nectria haematococca mpVI 77-13-4]
  misc_feature (1)..(356): NCBI GI: 159123401 Blast Desc: glutamyl-tRNA(Gln) amidotransferase, subunit A [Aspergillus fumigatus A1163]
  misc_feature (1)..(377): NCBI GI: 242761675 Blast Desc: glutamyl-tRNA(Gln) amidotransferase, subunit A [Talaromyces stipitatus ATCC 10500] gi|218723422|gb|EED22839.1| glutamyl-tRNA(Gln) amidotransferase, subunit A [Talaromyces ATCC
MDLKGLKTGASSRAFAELHEPKNSTAETVQRLIDLGFVIVGKLKTTQFADSEWPTCDWIDYHGPWNPRGDGYLTTSGSSAGSASAVASHPWLDYSLGTDTLGSIRSPAAVQGIFGMRPSLGATSTSGVVPYSPTWDTIVDHQPSQEVFENFITLVEHFLGIKRTRISLADTWKYTRPDGTEESISKHFHHAFDWSANRDQWTGLLKPFIEEYEEKKGKPPILNPQIRFKVNYTQTVTAEQKSKGDRLLKQYHDWFYEHIMTPSDDGYSDSIMILPWTNGEPVYRDEYKEGPQEFTGRGFFFYNIGPYAQCPELVVPVGTTPYVSKYTGKVEQLPAAVGFIAAKGSDIMLANLVNDVFESMGSRFNGLESQVRLGNEF

SEQ ID NO: 31270 - DNA, 771 bp, Muscodor strobelii
  misc_feature: SGI cDNA ID NO. 570763
  misc_feature: Reduced expression when VOC is produced
  misc_feature: Encodes the peptide sequence at SEQ ID NO 31271
atgggtgaggaattcaagccctacaccgtcccgtacagcggagccgggtccgtccacaccaagcaaggatgggttaactcgcgcgagtatggcgcacccggcgcgacttctggtccgggcaaacgccgtgacagtgcccctattcctcctttccactacgccgagaccaccagtgtcgcccctccttcggactctaagagccccggaacccctcgtggtcgatgcagcttcagctctggcggcagtgccactcgatctgcccgtgcctcgcgctctacctccatcaacctgcacggcaacaaccaagacattcctgccatcaagggacccaatggcatcggctttgacttgcccaagcactacaaagatctctccaagctgtccaaccgcgaggtcgctcttaagatcggcctgctcaacatccagaagggcagcatccacgatgacatgcagaaggcagctacggcccgtgaggtcttgtctcgtgatcctcaggcgcagtccgacattcgcaacgagaatgctcgacagatgaacgacgtcaacgaggcgatccgtgcctgggaatcggtccagcagtctcgcatggagaacattcacgaccccagccttgtggacatgctgatgattcaccaggactatcaccacgacttggacaagtcgaaagaggaggctggtagcgaggctgtcagcgactcgtctctcgatgctgttcacctggatggtcttcgccaagatgggaagaagaagagacgcagcactcgggcttaa

SEQ ID NO: 31271 - protein, 256 aa, Muscodor strobelii
  misc_feature: SGI Peptide ID NO. 570763
  misc_feature: Useful for introducing or modulating the production of volatile compounds
MGEEFKPYTVPYSGAGSVHTKQGWVNSREYGAPGATSGPGKRRDSAPIPPFHYAETTSVAPPSDSKSPGTPRGRCSFSSGGSATRSARASRSTSINLHGNNQDIPAIKGPNGIGFDLPKHYKDLSKLSNREVALKIGLLNIQKGSIHDDMQKAATAREVLSRDPQAQSDIRNENARQMNDVNEAIRAWESVQQSRMENIHDPSLVDMLMIHQDYHHDLDKSKEEAGSEAVSDSSLDAVHLDGLRQDGKKKRRSTRA

SEQ ID NO: 31272 - DNA, 4518 bp, Muscodor strobelii
  misc_feature: SGI EST ID NO. CUFF.74065.1
  misc_feature: Variant of the nucleotide sequence at SEQ ID NO 31270
gggtaattgtcagtttgtctgtattccccgggacaatgctccggttgaccagggtacactgaactgtgtctcttctccaagacccttcgtcacaaagtttatgagaacaaacctcatgcgactttgtcaataccatagtagcgatcgtgacctagtccggggatttgcaaatattctcgggcacgccaaagctaggacattctgttcgatcgtgaatgagagaactcgaacaatctcgggctagctagcttgcatttgttccacgtgtcagcttgaagactgcagagtgtagccgatggtagatgtctcgacaattgcacaatcgctccggacctaaaacacttagtaatcttctaagaccttcgaatgagtctcattgaagacgaaaatggtccaaacacggaaagagagaaaagctgccgccaattcggccggcatcaagcttgcccagcctgaccgatccgcgccgtccgagaaaacactgctagatatagcccaagaacacaagctcttcggacaggccgatgcccatccgagtaaccaaagaaggatcgcaaacacggctggagtcgatggcgtcgaccctgatgacgagaagctttcgcccacggctgaaaggattatggattctctgctttggtctgtcagcttgggcatgctgcacttcactttcgatgtcttggtccataaccaatatgccgagtcgttctcattcatagatgtcggaatccgcgcctggaaggcatttgcagtattcttcgtcctcttctatgtgttgcatagccacccgtcctcccccaacctactacccggcctgccccttcgattccagaatcctcttcgacaagccgttttctcggttgcgagcaccatctgtggctgttatctaattcacatcaccacaagctatggctacattgccgtcttgaagcagtcaccacctatcgcttgcatatgggtgtggtccgtcatcgagctcaacctctccttggctgttgcatcgctggctataatcggtgctttcttctggcaaggagattactcgttgaagctttgagcatccaatcagcatcacagatcttgtcaacgcctcagacttgtggagcatgctgctttatcctgccattttcaccaatatccggagaattcctgggagaatgtgcatcatgacggccgaaatggttgctgcgcatagcacgatgtactagatcttcgagtcgacggatctcggattttccctcgctaacagtagcctcaagtttgtgcaagtcttcgtgaatctcgtcttgtttgaactggttcttccattcaagctcgcgaattcgcctgggaaaacgttagcccaatactagttgcgtaaagcagaaatctctcgacttacgaagaaagcatgctcatttgagtaaatgttacgcgcccggcgagcagctctctctgccgaactagctctagagcttgtgatctgactggtaaccatgcaactgcgactgctgtcgagaaacgccagccttgtggaaccactacaaccagcagagatcagaataacatcgtgacagatagtatcttcgagacattgtcgagcctggtgaagatgctcgtagcttggactaccatttttatggctccacctagggcgctcgtagcctgatggtcgagatatcgaggaagaggaaatcaaggcaaatggcactgacctgcccaccgcttgccctgtgggtgttcatccacgcttccagctttttcttcaacctcatcaatgagctcaagcagtcgcttctcaagcctaagcaggtcctctagtacaaaggaatacatctggaactcgggttggtgctgcgcatagagccgatcacccgcggtcttgatgagctctccaagccattccgactcagtcttgtaccatgataaggatgtcttcacctggaagtattcttgatcgctattccgtagatacgaaagtcgtacgtaaaaggcggtaataatagctgcgacaaatgtaagaattccagcgatgtttgccgtaatcgacaagggcgagtcttgctggctgctgtccattgattgtccatgcttttgtatctatgagttgaagctgttcggagctgtggctgaccgtttgcgctagtgatgtccattgtgaccagggtcctcatcctccataaatcacgtgaagccccctttgcctgggttggtgaacgaccatcgacatgatgatggttttggttgcacacattcatgtccatcacacgaatcggcagtatgattagtgttcaatccttaagtgtcatcgttgtcacacgtctatgaacatggccagctcaaatactactaggaggtcttgcaagtgccagttcttctcttgccggaaactaaatgatgaagaacgagtgttttgattgcaatttcggctcctgaaggagggctgaaactacggtcaccactgctaaaatgtaataagtctttaccactcgactccatgcggaatagggaagaacgatcgaggttggcgttggtgcaactgaacacatcgaataaagagcttcagtcaatgacgggataattcttatgacgatcttgttggaaatgacataatctgtcttgcatcatcgtctaagagctacatgtagactggagattgccagtgttgtcaaggtgatacaaagggtttctggatggcacgacccagtgttgtgacgttactgctctacgtcgcggcttccatctgatgtcacaactttgcttctagaaaacaaataccctgacaatcatcggtaaggtgaagagggcagttgcgacttcgctccttgaacccaagcagccggttcgatattgcaccacgtgatacctgttctgggccctctgagctgcccaaggcaaacattagatgaaattgaatcgtcctatctggtcaccgtggtccgacttgacctgttttcccgctgactcccgtcaccggacaatcgagtcttcctcttcttcacccttccctccacatctcctttcacacatcctttgcagcgacagctacactggatacctctcctcggcttcgttattttgataataagtctgattgtatcgctctgcggactcaagacgatcgcacccggtgttgtcccttgcggcgtcacttcaagcatcgattaccagttctgatcagcctctatatcggtctacaacccttgcatcgccgacatccacgttttcacgttgatgtccatcagcaatctgaaaccaactgacgcgcctgtaaaggaagataagcctattcaggaacacgaataccatgggtgaggaattcaagccctacaccgtcccgtacagcggagccgggtccgtccacaccaagcaaggatgggttaactcgcgcgagtatggcgcacccggcgcgacttctggtccgggcaaacgccgtgacagtgcccctattcctcctttccactacgccgagaccaccagtgtcgcccctccttcggactctaagagccccggaacccctcgtggtcgatgcagcttcagctctggcggcagtgccactcgatctgcccgtgcctcgcgctctacctccatcaacctgcacggcaacaaccaagacattcctgccatcaagggacccaatggcatcggctttgacttgcccaagcactacaaagatctctccaagctgtccaaccgcgaggtcgctcttaagatcggcctgctcaacatccagaagggcagcatccacgatgacatgcagaaggcagctacggcccgtgaggtcttgtctcgtgatcctcaggcgcagtccgacattcgcaacgagaatgctcgacagatgaacgacgtcaacgaggcgatccgtgcctgggaatcggtccagcagtctcgcatggagaacattcacgaccccagccttgtggacatgctgatgattcaccaggactatcaccacgacttggacaagtcgaaagaggaggctggtagcgaggctgtcagcgactcgtctctcgatgctgttcacctggatggtcttcgccaagatgggaagaagaagagacgcagcactcgggcttaaatcggcggacatttggtcatggctcattcacaataccgaaatcggccagcttaccacgtctcaataaacccccaggtatgtatgcttagtgtgatttgcctactcacgtgttgctaggcaatggctcggaggtattttgaaagctatgttaacggtttttgtctgtacaacaggtattgtggatggtgttgtctccattgttctggtttctttccggcttacaaggcgttcctggttgcatgcgttactctttaacgctttcgtcacagatatagcgacgcgaggctatctcatgtgggtttggacaggtggtgtgatttcgatgtccagacaaacttcacgatccggcaacgtaggacagatagtgacgcgatgcatggtctgcattatttagtcagtcactcaacctattactgcaagctcaagcagatccgtagtgaataaaacagagttagctacca

SEQ ID NO: 31273 - DNA, 738 bp, Muscodor strobelii
  misc_feature: SGI cDNA ID NO. 570764
  misc_feature: Encodes the peptide sequence at SEQ ID NO 31274
atggacagcagccagcaagactcgcccttgtcgattacggcaaacatcgctggaattcttacatttgtcgcagctattattaccgccttttacgtacgactttcgtatctacggaatagcgatcaagaatacttccaggtgaagacatccttatcatggtacaagactgagtcggaatggcttggagagctcatcaagaccgcgggtgatcggctctatgcgcagcaccaacccgagttccagatgtattcctttgtactagaggacctgcttaggcttgagaagcgactgcttgagctcattgatgaggttgaagaaaaagctggaagcgtggatgaacacccacagggcaagcggtgggcagtggttccacaaggctggcgtttctcgacagcagtcgcagttgcatggttaccagtcagatcacaagctctagagctagttcggcagagagagctgctcgccgggcgcgtaacatttactcaaatgagcatgctttcttcgcgaattcgcgagcttgaatggaagaaccagttcaaacaagacgagattcacgaagacttgcacaaacttgaggctactgttagcgagggaaaatccgagatccgtcgactcgaagatctagtacatcgtgctatgcgcagcaaccatttcggccgtcatgatgcacattctcccaggaattctccggatattggtgaaaatggcaggataaagcagcatgctccacaagtctga

SEQ ID NO: 31274 - protein, 245 aa, Muscodor strobelii
  misc_feature: SGI Peptide ID NO. 570764
  misc_feature (1)..(217): NCBI GI: 46116508 Blast Desc: FG04096.1 [Gibberella zeae PH-1]
  misc_feature (4)..(211): NCBI GI: 256725723 Blast Desc: NECHADRAFT_94458 [Nectria haematococca mpVI 77-13-4]
  misc_feature (87)..(162): NCBI GI: 156042115 Blast Desc: [Sclerotinia sclerotiorum 1980] gi|154695991|gb|EDN95729.1| [Sclerotinia sclerotiorum 1980]
  misc_feature (6)..(52): NCBI GI: 189195592 Blast Desc: [Pyrenophora tritici-repentis Pt-1C-BFP] gi|187980013|gb|EDU46639.1| [Pyrenophora tritici-repentis Pt-1C-BFP]
  misc_feature (7)..(173): NCBI GI: 156044406 Blast Desc: [Sclerotinia sclerotiorum 1980] gi|154694695|gb|EDN94433.1| [Sclerotinia sclerotiorum 1980]
MDSSQQDSPLSITANIAGILTFVAAIITAFYVRLSYLRNSDQEYFQVKTSLSWYKTESEWLGELIKTAGDRLYAQHQPEFQMYSFVLEDLLRLEKRLLELIDEVEEKAGSVDEHPQGKRWAVVPQGWRFSTAVAVAWLPVRSQALELVRQRELLAGRVTFTQMSMLSSRIRELEWKNQFKQDEIHEDLHKLEATVSEGKSEIRRLEDLVHRAMRSNHFGRHDAHSPRNSPDIGENGRIKQHAPQV

SEQ ID NO: 31275 - DNA, 2990 bp, Muscodor strobelii
  misc_feature: SGI EST ID NO. CUFF.74064.2
  misc_feature: Variant of the nucleotide sequence at SEQ ID NO 31273
gggaaagaggcatgggtcagtaccttgaagtgacgccgcaagggacaacaccgggtgcgatcgtcttgagtccgcagagcgatacaatcagacttattatcaaaataacgaagccgaggagaggtatccagtgtagctgtcgctgcaaaggatgtgtgaaaggagatgtggagggaagggtgaagaagaggaagactcgattgtccggtgacgggagtcagcgggaaaacaggtcaagtcggaccacggtgaccagataggacgattcaatttcatctaatgtttgccttgggcagctcagagggcccagaacaggtatcacgtggtgcaatatcgaaccggctgcttgggttcaaggagcgaagtcgcaactgccctcttcaccttaccgatgattgtcagggtatttgttttctagaagcaaagttgtgacatcagatggaagccgcgacgtagagcagtaacgtcacaacactgggtcgtgccatccagaaaccctttgtatcaccttgacaacactggcaatctccagtctacatgtagctcttagacgatgatgcaagacagattatgtcatttccaacaagatcgtcataagaattatcccgtcattgactgaagctctttattcgatgtgttcagttgcaccaacgccaacctcgatcgttcttccctattccgcatggagtcgagtggtaaagacttattacattttagcagtggtgaccgtagtttcagccctccttcaggagccgaaattgcaatcaaaacactcgttcttcatcatttagtttccggcaagagaagaactggcacttgcaagacctcctagtagtatttgagctggccatgttcatagacgtgtgacaacgatgacacttaaggattgaacactaatcatactgccgattcgtgtgatggacatgaatgtgtgcaaccaaaaccatcatcatgtcgatggtcgttcaccaacccaggcaaagggggcttcacgtgatttatggaggatgaggaccctggtcacaatggacatcactagcgcaaacggtcagccacagctccgaacagcttcaactcatagatacaaaagcatggacaatcaatggacagcagccagcaagactcgcccttgtcgattacggcaaacatcgctggaattcttacatttgtcgcagctattattaccgccttttacgtacgactttcgtatctacggaatagcgatcaagaatacttccaggtgaagacatccttatcatggtacaagactgagtcggaatggcttggagagctcatcaagaccgcgggtgatcggctctatgcgcagcaccaacccgagttccagatgtattcctttgtactagaggacctgcttaggcttgagaagcgactgcttgagctcattgatgaggttgaagaaaaagctggaagcgtggatgaacacccacagggcaagcggtgggcagtggttccacaaggctggcgtttctcgacagcagtcgcagttgcatggttaccagtcagatcacaagctctagagctagttcggcagagagagctgctcgccgggcgcgtaacatttactcaaatgagcatgctttcttcgcgaattcgcgagcttgaatggaagaaccagttcaaacaagacgagattcacgaagacttgcacaaacttgaggctactgttagcgagggaaaatccgagatccgtcgactcgaagatctagtacatcgtgctatgcgcagcaaccatttcggccgtcatgatgcacattctcccaggaattctccggatattggtgaaaatggcaggataaagcagcatgctccacaagtctgaggcgttgacaagatctgtgatgctgattggatgctcaaagcttcaacgagtaatctccttgccagaagaaagcaccgattatagccagcgatgcaacagccaaggagaggttgagctcgatgacggaccacacccatatgcaagcgataggtggtgactgcttcaagacggcaatgtagccatagcttgtggtgatgtgaattagataacagccacagatggtgctcgcaaccgagaaaacggcttgtcgaagaggattctggaatcgaaggggcaggccgggtagtaggttgggggaggacgggtggctatgcaacacatagaagaggacgaagaatactacggcaacatgaagattagtgtgcattcaggacgtctcaggaggatgatctgctcacctgcaaatgccttccaggcgcggattccgacatctatgaatgagaacgactcggcatattggttatggaccaagacatcgaaagtgaagtgcagcatgcccaagctgacagaccaaagcagagaatccataatcctttcagccgtgggcgaaagcttctcgtcatcagggtcgacgccatcgactccagccgtgtttgcgatccttctttggttactcggatgggcatcggcctgtccgaagagcttgtgttcttgggctatatctagcagtgttttctcggacggcgcggatcggtcaggctgggcaagcttgatgccggccgaattggcggcagcttttctctctttccgtgtttggaccattttcgtcttcaatgagactcattcgaaggtcttagaagattactaagtgttttaggtccggagcgattgtgcaattgtcgagacatctaccatcggctacactctgcagtcttcaagctgacacgtggaacaaatgcaagctagctagcccgagattgttcgagttctctcattcacgatcgaacagaatgtcctagctttggcgtgcccgagaatatttgcaaatccccggactaggtcacgatcgctactatggtattgacaaagtcgcatgaggtttgttctcataaactttgtgacgaagggtcttggagaagagacacagttcagtgtaccctggtcaaccggagcattgtcccggggaatacagacaaactgacaattaccc

SEQ ID NO: 31276 - DNA, 669 bp, Muscodor strobelii
  misc_feature: SGI cDNA ID NO. 570765
  misc_feature: Encodes the peptide sequence at SEQ ID NO 31277
atggtccaaacacggaaagagagaaaagctgccgccaattcggccggcatcaagcttgcccagcctgaccgatccgcgccgtccgagaaaacactgctagatatagcccaagaacacaagctcttcggacaggccgatgcccatccgagtaaccaaagaaggatcgcaaacacggctggagtcgatggcgtcgaccctgatgacgagaagctttcgcccacggctgaaaggattatggattctctgctttggtctgtcagcttgggcatgctgcacttcactttcgatgtcttggtccataaccaatatgccgagtcgttctcattcatagatgtcggaatccgcgcctggaaggcatttgcagtattcttcgtcctcttctatgtgttgcatagccacccgtcctcccccaacctactacccggcctgccccttcgattccagaatcctcttcgacaagccgttttctcggttgcgagcaccatctgtggctgttatctaattcacatcaccacaagctatggctacattgccgtcttgaagcagtcaccacctatcgcttgcatatgggtgtggtccgtcatcgagctcaacctctccttggctgttgcatcgctggctataatcggtgctttcttctggcaaggagattactcgttgaagctttga

SEQ ID NO: 31277 - protein, 222 aa, Muscodor strobelii
  misc_feature: SGI Peptide ID NO. 570765
  misc_feature (5)..(221): NCBI GI: 261359228 Blast Desc: conserved [Verticillium albo-atrum VaMs.102]
  misc_feature (1)..(221): NCBI GI: 116191551 Blast Desc: CHGG_05493 [Chaetomium globosum CBS 148.51] gi|88181406|gb|EAQ88874.1| CHGG_05493 [Chaetomium globosum CBS 148.51]
  misc_feature (6)..(221): NCBI GI: 171680910 Blast Desc: protein product [Podospora anserina] gi|170940413|emb|CAP65639.1| protein product [Podospora anserina]
  misc_feature (8)..(221): NCBI GI: 164422951 Blast Desc: NCU09509 [Neurospora crassa OR74A] gi|157069885|gb|EAA29202.2| conserved [Neurospora crassa OR74A]
  misc_feature (5)..(220): NCBI GI: 156042113 Blast Desc: SS1G_11607 [Sclerotinia sclerotiorum 1980] gi|154695990|gb|EDN95728.1| SS1G_11607 [Sclerotinia sclerotiorum 1980]
  misc_feature (19)..(214): NCBI GI: 169613695 Blast Desc: SNOG_09980 [Phaeosphaeria nodorum SN15] gi|111061195|gb|EAT82315.1| SNOG_09980 [Phaeosphaeria nodorum SN15]
  misc_feature (19)..(216): NCBI GI: 189199134 Blast Desc: conserved [Pyrenophora tritici-repentis Pt-1C-BFP] gi|187983003|gb|EDU48491.1| conserved [Pyrenophora tritici-repentis Pt-1C-BFP]
  misc_feature (8)..(120): NCBI GI: 145602294 Blast Desc: MGG_05021 [Magnaporthe grisea 70-15] gi|145010733|gb|EDJ95389.1| MGG_05021 [Magnaporthe grisea 70-15]
  misc_feature (3)..(208): NCBI GI: 119174718 Blast Desc: CIMG_09321 [Coccidioides immitis RS]
  misc_feature (13)..(208): NCBI GI: 240106919 Blast Desc: CPC735_017080 [Coccidioides posadasii C735 delta SOWgp]
MVQTRKERKAAANSAGIKLAQPDRSAPSEKTLLDIAQEHKLFGQADAHPSNQRRIANTAGVDGVDPDDEKLSPTAERIMDSLLWSVSLGMLHFTFDVLVHNQYAESFSFIDVGIRAWKAFAVFFVLFYVLHSHPSSPNLLPGLPLRFQNPLRQAVFSVASTICGCYLIHITTSYGYIAVLKQSPPIACIWVWSVIELNLSLAVASLAIIGAFFWQGDYSLKL

SEQ ID NO: 31278 - DNA, 4518 bp, Muscodor strobelii; identical to SEQ ID NO: 31272
  misc_feature: SGI EST ID NO. CUFF.74065.1
  misc_feature: Variant of the nucleotide sequence at SEQ ID NO 31276

SEQ ID NO: 31279 - DNA, 1767 bp, Muscodor strobelii
  misc_feature: SGI cDNA ID NO. 570766
  misc_feature: Reduced expression when VOC is produced
  misc_feature: Encodes the peptide sequence at SEQ ID NO 31280
atggccgcaattgctaccatgtcaacatccctgaacgacgctatgaagcctcgtccgatgaatctttccatctcgccgccctctatggctccttctgccgcatcttctcctgtatcggcatcctccccgatgtctaatggatctacaccctcttccgctacatcacaattggccatcaaacctaccaatgcaggagcacaacctactggtgtggcacctttgccgctacctgcaaagacttctatcaccagcaaagaatgggtcatcccgccccgtcccaagccaggcaggaagcccgcaaccgataccccacccacaaagcgcaaggctcagaatagagcagctcagcgagctttccgagagcgcagggccgctcgcgtaggagaattagaagaacagctcgacgagcagcgagatgagtacgagcgaacacagaagcaactacaagaagatgtgaataaccttaccgctgaggttgagtcattacgattacagtgttctgctttcgaggagagtttggagcatgaacggttggaaaaagccaagatcatcaatgaactagagtcattacgtcgtcgttggcggcacgagcattcgagcgtagcttcgaggactggtagcctcgtcgcacgtaacgatcgcatgccgagcttctcttctcaacagcacgaccacagaggtagtctagtcagcaacgcatccgaacaccgcgattcaacagcacacttctccatctcgcatatgatatcgcacccggattcgtcgacagtatcaagccatgaccgccagttgtcgacagatgtttctggctgcggtaaatgccattctctagaatcatgctcctgtgtcgcagaagtgctcgccacctcgacccctgactgtggaggctgtagtatcggcacgagatgtgcttgtcttgaagcggcactcgaaccctcaagcctaaacccagagcccgagctgaaacgcaaaccctcgtcaatctcgacttttgcgccagaagagaagagacagaaagctgacgcgtatcctaacgagattgacttcactgccatattctcttccaagaaggccctcgttcctgaacccactccctctgaccccctcccgcctcctcaacccatagctccacgtgaatcatgcggcttctgtacagatggtagctattgcatgtgtgccgaagcggcatcgacacaaacgcaaaccttggcccccatgggacaacaggttcagaccccgccatcatcagatagcgacgttggtcctcatcctatggaagtcacatcgacgggcgccattaaacttccaagtcttcgatctctaaagcgaagttcattccgtccgactcgtaagaccagcggtggttgtggtgccaatggtccgggtacgtgttctcagtgtctgcgagatccaaaggcgggacttttctgccgcagtctggccgcgaccttcgccaaggagtccggtaagtctggcgacggatgttgtgggggatcaggaggatcaggatgctgcaaatcgaaggatgcatcagcgccaccccggaccggtgttggcttgtccgtggcggatgcgtacaagaccctgtccagtcacccaggcttcgataaggcaagcgatgaaattgagacctggctccccaagctgagagctgtagctcaccctagtactggcattgccccgagccgcacacatatcgacgttgagactgcaagtatcatgagtgtgctgaaggagtttgatgttagatttgggagcaacaaatga

SEQ ID NO: 31280 - protein, 588 aa, Muscodor strobelii
  misc_feature: SGI Peptide ID NO. 570766
  misc_feature (79)..(585): NCBI GI: 46123105 Blast Desc: FG05930.1 [Gibberella zeae PH-1]
  misc_feature (81)..(588): NCBI GI: 145603558 Blast Desc: MGG_05959 [Magnaporthe grisea 70-15] gi|145011771|gb|EDJ96427.1| MGG_05959 [Magnaporthe grisea 70-15]
  misc_feature (77)..(585): NCBI GI: 171693019 Blast Desc: protein product [Podospora anserina] gi|170946458|emb|CAP73259.1| protein product [Podospora anserina]
  misc_feature (79)..(585): NCBI GI: 256731554 Blast Desc: NECHADRAFT_2073 [Nectria haematococca mpVI 77-13-4]
  misc_feature (46)..(585): NCBI GI: 116198907 Blast Desc: CHGG_07609 [Chaetomium globosum CBS 148.51] gi|88178888|gb|EAQ86356.1| CHGG_07609 [Chaetomium globosum CBS 148.51]
  misc_feature (80)..(585): NCBI GI: 156059568 Blast Desc: SS1G_03796 [Sclerotinia sclerotiorum 1980] gi|154701583|gb|EDO01322.1| SS1G_03796 [Sclerotinia sclerotiorum 1980]
  misc_feature (81)..(585): NCBI GI: 261357947 Blast Desc: bZIP transcription factor HapX [Verticillium albo-atrum VaMs.102]
  misc_feature (51)..(486): NCBI GI: 28950391 Blast Desc: [Neurospora crassa]
  misc_feature (51)..(486): NCBI GI: 164423198 Blast Desc: NCU08891 [Neurospora crassa OR74A] gi|157069988|gb|EAA29593.2| [Neurospora crassa OR74A]
  misc_feature (71)..(585): NCBI GI: 67902528 Blast Desc: AN8251.2 [Aspergillus nidulans FGSC A4] gi|18147128|dbj|BAB83050.1| transcriptional activator [Emericella nidulans] gi|40739799|gb|EAA58989.1| conserved [Aspergillus FGSC
  misc_feature: Useful for introducing or modulating the production of volatile compounds
MAAIATMSTSLNDAMKPRPMNLSISPPSMAPSAASSPVSASSPMSNGSTPSSATSQLAIKPTNAGAQPTGVAPLPLPAKTSITSKEWVIPPRPKPGRKPATDTPPTKRKAQNRAAQRAFRERRAARVGELEEQLDEQRDEYERTQKQLQEDVNNLTAEVESLRLQCSAFEESLEHERLEKAKIINELESLRRRWRHEHSSVASRTGSLVARNDRMPSFSSQQHDHRGSLVSNASEHRDSTAHFSISHMISHPDSSTVSSHDRQLSTDVSGCGKCHSLESCSCVAEVLATSTPDCGGCSIGTRCACLEAALEPSSLNPEPELKRKPSSISTFAPEEKRQKADAYPNEIDFTAIFSSKKALVPEPTPSDPLPPPQPIAPRESCGFCTDGSYCMCAEAASTQTQTLAPMGQQVQTPPSSDSDVGPHPMEVTSTGAIKLPSLRSLKRSSFRPTRKTSGGCGANGPGTCSQCLRDPKAGLFCRSLAATFAKESGKSGDGCCGGSGGSGCCKSKDASAPPRTGVGLSVADAYKTLSSHPGFDKASDEIETWLPKLRAVAHPSTGIAPSRTHIDVETASIMSVLKEFDVRFGSNK

SEQ ID NO: 31281 - DNA, 3807 bp, Muscodor strobelii
  misc_feature: SGI EST ID NO. CUFF.74018.0
  misc_feature: Variant of the nucleotide sequence at SEQ ID NO 31279
tgtgcagcgcatgctacccactcggatcaacctgaaagccttggtatatgctgtgaggtttacacatttaatgaatgcaatgcacttgtttctagtggtgacagtgatggttgtcgattctcgttatgtcggggttggcgagttgggccataaggttgtaagttattctgtaaggaacctggctgacgagggcgggctggaatggccggacgaattccgaccttggccgaggtgaatagctgaggtggacatttccactcaaaagctcccgatgtggatattgacaacgggggtcctcgagtttggagtttcgatggtctgcccattttccacggaaaccgggcaatctggtcagacgagaatttctgtatttcttgcctctaccaacggctcatcgaaatttagttcgaagaaaaaacagacccgtgatgatttgcttaagcctcattcctgctagatatcaaccctggtcacatgcttagatatccagctttctatgccactccaaacagacagaccgacagaccaagagacgctctttagctgtatcacgccacccgacaactatcggaacaccagaaaccgggcagaagctggcgcacgccaagtggaccgtagagaagaattccagcgagtcagcttcgcaaatcttcgattagatctacagctttcactccaatggctgctcggctgctctcctgttcgcccaatcactgacacatcgtgactgtctttttcctgcactcagggtttgagccgtgcgaatggccgtgactggcccgtattcgcgagaacccaacgtggtgtagcgccaagcgccccagaaaagatcggacccctggcataatcttatcaatctgatcaaactcaaccaccgccatctccatcgcatcgcctaatccctcacacacgcccacccgaaccacactctctccctcatccgcccgccctgcatctcacccctccgccctgcatctcacccctccgagccccattctcattgggtctagcgacgctcgcctcgaggatcgactgccccttcagagtttttgttcaccgcgcaccggaacgcagcaaaacagatacatattcaccatttcgccggctccggtctcgacgtagtcttttctccgaacatcatctttttcaatgattacttccttggtgcttgattcacttgagcaacaatacatcagcttgtaatcggggattcacgactattcatcaaatcccaacactccggcttaatcacattcatatgttcaggatcattcaactcacaagactctgccgggagtgaattggcaatctagccctcgctttccgctggatccaatctccacaccctgctagaattgcttgcaattgcagcttttgaaattctcacatttcaagttatctttgcttcttccattgtcaagtgcaacttccccaacagcaagtgtttacagcagaaatccgctgagattaagtgtctacgtattgctggcccccgtctgcaccgcgcaatcactcacgttgctacaatattgcggttgccaaataccgccctgtctggtctaaagctgattttgcccgtatgggcctctcatcattgagctgtacccattgtgcaagatggccgcaattgctaccatgtcaacatccctgaacgacgctatgaagcctcgtccgatgaatctttccatctcgccgccctctatggctccttctgccgcatcttctcctgtatcggcatcctccccgatgtctaatggatctacaccctcttccgctacatcacaattggccatcaaacctaccaatgcaggagcacaacctactggtgtggcacctttgccgctacctgcaaagacttctatcaccagcaaagaatgggtcatcccgccccgtcccaagccaggcaggaagcccgcaaccgataccccacccacaaagcgcaaggctcagaatagagcagctcagcgagctttccgagagcgcagggccgctcgcgtaggagaattagaagaacagctcgacgagcagcgagatgagtacgagcgaacacagaagcaactacaagaagatgtgaataaccttaccgctgaggttgagtcattacgattacagtgttctgctttcgaggagagtttggagcatgaacggttggaaaaagccaagatcatcaatgaactagagtcattacgtcgtcgttggcggcacgagcattcgagcgtagcttcgaggactggtagcctcgtcgcacgtaacgatcgcatgccgagcttctcttctcaacagcacgaccacagaggtagtctagtcagcaacgcatccgaacaccgcgattcaacagcacacttctccatctcgcatatgatatcgcacccggattcgtcgacagtatcaagccatgaccgccagttgtcgacagatgtttctggctgcggtaaatgccattctctagaatcatgctcctgtgtcgcagaagtgctcgccacctcgacccctgactgtggaggctgtagtatcggcacgagatgtgcttgtcttgaagcggcactcgaaccctcaagcctaaacccagagcccgagctgaaacgcaaaccctcgtcaatctcgacttttgcgccagaagagaagagacagaaagctgacgcgtatcctaacgagattgacttcactgccatattctcttccaagaaggccctcgttcctgaacccactccctctgaccccctcccgcctcctcaacccatagctccacgtgaatcatgcggcttctgtacagatggtagctattgcatgtgtgccgaagcggcatcgacacaaacgcaaaccttggcccccatgggacaacaggttcagaccccgccatcatcagatagcgacgttggtcctcatcctatggaagtcacatcgacgggcgccattaaacttccaagtcttcgatctctaaagcgaagttcattccgtccgactcgtaagaccagcggtggttgtggtgccaatggtccgggtacgtgttctcagtgtctgcgagatccaaaggcgggacttttctgccgcagtctggccgcgaccttcgccaaggagtccggtaagtctggcgacggatgttgtgggggatcaggaggatcaggatgctgcaaatcgaaggatgcatcagcgccaccccggaccggtgttggcttgtccgtggcggatgcgtacaagaccctgtccagtcacccaggcttcgataaggcaagcgatgaaattgagacctggctccccaagctgagagctgtagctcaccctagtactggcattgccccgagccgcacacatatcgacgttgagactgcaagtatcatgagtgtgctgaaggagtttgatgttagatttgggagcaacaaatgattgcgccttatatgctggcaatcgtgcatgggtacgttatatacacagtaattgacgcggcccattgctatagcatctttggagtgcaatggcgcagtgtaccatcaacaattaaaaaaatttatctttgatgctcctatttaagaaaagaaaaagtgagacctttctagtctgacactcaatatccgctgtgtgcgtagataatatagtatgtgttcttgtccgatgcatagggagaagaagccctaagaatagccaattgccccttgcatgcgttatgcttcccacttacaagatgcgacgactttgagcatcagtccattttgtagcttgttgtcttgtgtagttgaccagtcatcgcacctggtttggacttattctaccattcaaacttgtctaccaagagatgggattctagtggat

SEQ ID NO: 31282 - DNA, 537 bp, Muscodor strobelii
  misc_feature: SGI cDNA ID NO. 570767
  misc_feature: Encodes the peptide sequence at SEQ ID NO 31283
atgtcagacatcaccggtctttgcgtgcatcctgagaaacgacgtcaaggccatgcagtggcacttcttcagcaactgcggatcgtcgcgcaggaactgaatattccccttctcgtcatcgccgagggtacactggaagaagccgtggcggagtcgaaagccaagggtgaggaaatcattcctgaacagcaggcaacgttgaagaaacaggaggaaaaaactctgaaaaaaatctttgcgaataaatctggcgctctggaggagaaacatcgaagtgttgcaggcataattgacgtcaagggctggctcggcaacggctgcactggagagtatgtctacagttatactgaacgtggccaatgccacaagacagggcagtacaatgccatcggcatcaccgtcctgaatgcacatgccccacatgagaagctcgtcgtgttcaatgatgctcactgtgagcacaccgctggtaccatcacgaccaagacgtgtatagaagcgggatcatatggctcattccgtatcgaaaagaagtga

SEQ ID NO: 31283 - protein, 178 aa, Muscodor strobelii
  misc_feature: SGI Peptide ID NO. 570767
MSDITGLCVHPEKRRQGHAVALLQQLRIVAQELNIPLLVIAEGTLEEAVAESKAKGEEIIPEQQATLKKQEEKTLKKIFANKSGALEEKHRSVAGIIDVKGWLGNGCTGEYVYSYTERGQCHKTGQYNAIGITVLNAHAPHEKLVVFNDAHCEHTAGTITTKTCIEAGSYGSFRIEKK

SEQ ID NO: 31284 - DNA, 1575 bp, Muscodor strobelii
  misc_feature: SGI cDNA ID NO. 570768
  misc_feature: Encodes the peptide sequence at SEQ ID NO 31285
atgggtgttccagagaccaatgtcaaggccgatctcaagatcaagtccggcaccctcgcggccggcgagacaggccatgagaccgatacggcctcggccgaccagctgctggcctccctcggttacgtcgccgaactctcgcggaaccgctccacgcttcaggtagccttcatgtccttcgtgttggccgcaattccttacggtctcgctaccactctctattatcctcttgtgtgcggtggtcccgttgatataatctggggttgggtcgcagtgtcgctgatcatcatctgtgttgctgcgtcgctcggagagattacgagtgtttatcccaccgccggcggcgtgtactaccaagcctggatgctggcacccgcaagctaccgtaagatcgctgcgtgggtgtgcggctggcagtttgtcgttggaaatatcaccatcactttatccgtcaacttcggcactacgctctttttgatcggatgcgtcaatgtttttgagtcggctccgggtgtgggtgttctagaaggtaatgcttggcagacttatctgatctttttgggcatcacgctattgtgcaatctcgtgtgcgcgttttgcaataaatggctgccgattctggatacattcgccattttctggacttttgctggcgtcattgcaattctgatcactgttcttgttgtcgccaagaatggccgtcactccggtgaatatgtcttcacccacttcgaagtcaactccggctggacgccaggctggtctttctttgtcggattgttgcatgcagcctacgcaacttcatcgacaggcatgatcatctccatgtgcgaagaggtcaaagcgcctgctactcaggtacccaaagctatggttctaaccattttaattaacacattcgctggcttgctcttcatgatcccattggtattcgtccttccgcccattgaagatcttatcctcctggctcagccggtgccgactatcatcaaaagcgccgtgggcagccctggtggtgcattcgggctgctgataccacttctcgtgctcgcgcttatttgcggaattgggtgcactacggctgcatcgcgttccgtgtatgccttttcgcgggatggtgccgttccgggttccaagtggtggaaggtcgtgaaccccaagcttgacgtgccgttcaacgcaatgatgctcagtatggttgttcaagttctcctcggactcatctattttgggtcagctgccgccttcaacgccttctccggagtgggtgtcattactcttaccctggcatacggtatcccgatcgtcgtcagcatgcttgagggccgccggacggtagccaagggacagttctttttgggcaaacttggctgggtttgcaatttcattgctgttgcatggactgcgctggccattcctctcttctctatgcccaccgttgttccagttaccgatccctcatatgcgaattacgctcccgtcgtttttgtgggatttggtctcctttcctacgcatggtacgtgttctggggccggaaaaactatactggtcccccaacagaagtcatcacgtaa

SEQ ID NO: 31285 - protein, 524 aa, Muscodor strobelii
  misc_feature: SGI Peptide ID NO. 570768
  misc_feature (55)..(517): Pfam Id: PF00324 Pfam Desc: Amino acid permease
  misc_feature (255)..(420): Pfam Id: PF00324 Pfam Desc: Amino acid permease
  misc_feature (55)..(118): Pfam Id: PF00324 Pfam Desc: Amino acid permease
  misc_feature (32)..(521): NCBI GI: 261354669 Blast Desc: polyamine transporter TPO5 [Verticillium albo-atrum VaMs.102]
  misc_feature (15)..(521): NCBI GI: 256726580 Blast Desc: [Nectria haematococca mpVI 77-13-4]
  misc_feature (11)..(521): NCBI GI: 46124191 Blast Desc: FG06473.1 [Gibberella zeae PH-1]
  misc_feature (6)..(521): NCBI GI: 145613758 Blast Desc: MGG_01385 [Magnaporthe grisea 70-15] gi|145020785|gb|EDK04914.1| MGG_01385 [Magnaporthe grisea 70-15]
  misc_feature (40)..(521): NCBI GI: 171681216 Blast Desc: protein product [Podospora anserina] gi|170940566|emb|CAP65794.1| protein product [Podospora anserina]
  misc_feature (16)..(523): NCBI GI: 164425471 Blast Desc: NCU05776 [Neurospora crassa OR74A] gi|157070938|gb|EAA30800.2| NCU05776 [Neurospora crassa OR74A]
  misc_feature (3)..(521): NCBI GI: 169599096 Blast Desc: SNOG_02364 [Phaeosphaeria nodorum SN15] gi|160704534|gb|EAT90576.2| SNOG_02364 [Phaeosphaeria nodorum SN15]
  misc_feature (27)..(519): NCBI GI: 46126647 Blast Desc: FG07701.1 [Gibberella zeae PH-1]
  misc_feature (7)..(521): NCBI GI: 189208724 Blast Desc: conserved [Pyrenophora tritici-repentis Pt-1C-BFP] gi|187976788|gb|EDU43414.1| conserved [Pyrenophora tritici-repentis Pt-1C-BFP]
  misc_feature (17)..(520): NCBI GI: 255935277 Blast Desc: Pc13g02240 [Penicillium chrysogenum Wisconsin 54-1255] gi|211583285|emb|CAP91293.1| Pc13g02240 [Penicillium chrysogenum Wisconsin 54-1255]
MGVPETNVKADLKIKSGTLAAGETGHETDTASADQLLASLGYVAELSRNRSTLQVAFMSFVLAAIPYGLATTLYYPLVCGGPVDIIWGWVAVSLIIICVAASLGEITSVYPTAGGVYYQAWMLAPASYRKIAAWVCGWQFVVGNITITLSVNFGTTLFLIGCVNVFESAPGVGVLEGNAWQTYLIFLGITLLCNLVCAFCNKWLPILDTFAIFWTFAGVIAILITVLVVAKNGRHSGEYVFTHFEVNSGWTPGWSFFVGLLHAAYATSSTGMIISMCEEVKAPATQVPKAMVLTILINTFAGLLFMIPLVFVLPPIEDLILLAQPVPTIIKSAVGSPGGAFGLLIPLLVLALICGIGCTTAASRSVYAFSRDGAVPGSKWWKVVNPKLDVPFNAMMLSMVVQVLLGLIYFGSAAAFNAFSGVGVITLTLAYGIPIVVSMLEGRRTVAKGQFFLGKLGWVCNFIAVAWTALAIPLFSMPTVVPVTDPSYANYAPVVFVGFGLLSYAWYVFWGRKNYTGPPTEVIT

SEQ ID NO: 31286 - DNA, 3514 bp, Muscodor strobelii
  misc_feature: SGI EST ID NO. CUFF.74040.0
  misc_feature: Variant of the nucleotide sequence at SEQ ID NO 31284
cagatctgtcccataatattcaagtgcaaacttttgcccgtacacagctggcgaacgataaaacgtgttggccctgttgcagcacgatgattcgctcaatatttagtaaagcagtcctgggagcaggatcagactgcactctgaactagactcgatataccatgcgaatctaggcgcctcgaggccacaaaccgatccctgtttctagaagttctagggtgagatcttaatgtgtactactgcgagcgatttgtccgcgtacaggccgcttattgtgcgggggcctcaggggacgctatcgaatcacgaataacgacaatggctcgggggagctgaagtgcaattgcgatggaattgggattgctcatttcactgacatcattccgctatgccactttggaagagattttcgcgcatacctatggcttaatggctcttacttggaagtatcgctcttatctcgaccccccggccagcttcatagtaccctggtctatttctctcatcatgcctcgataccgttggcggacaagctgcggttgtcggtacctactgtgcatatttgcatgtactggtacacaaggaaggcggttttgaggattcgtatttacattagagtcttggcttccgctactccagatgttttacttctctttccaccttctccttgccgttcttttccctttgatcacgcgacaacattacaagcgatttactttcgaccttattcaaccgtcactactttgtaagagccgccaatggattcataaacaaaaacaccatacgagtagaggaatatcataccagatcgagccatcaccgagcgcagaatgggtgttccagagaccaatgtcaaggccgatctcaagatcaagtccggcaccctcgcggccggcgagacaggccatgagaccgatacggcctcggccgaccagctgctggcctccctcggttacgtcgccgaactctcgcggaaccgctccacgcttcaggtagccttcatgtccttcgtgttggccgcaattccttacggtctcgctaccactctctattatcctcttgtgtgcggtggtcccgttgatataatctggggttgggtcgcagtgtcgctgatcatcatctgtgttgctgcgtcgctcggagagattacgagtgtttatcccaccgccggcggcgtgtactaccaagcctggatgctggcacccgcaagctaccgtaagatcgctgcgtgggtgtgcggctggcagtttgtcgttggaaatatcaccatcactttatccgtcaacttcggcactacgctctttttgatcggatgcgtcaatgtttttgagtcggctccgggtgtgggtgttctagaaggtaatgcttggcagacttatctgatctttttgggcatcacgctattgtgcaatctcgtgtgcgcgttttgcaataaatggctgccgattctggatacattcgccattttctggacttttgctggcgtcattgcaattctgatcactgttcttgttgtcgccaagaatggccgtcactccggtgaatatgtcttcacccacttcgaagtcaactccggctggacgccaggctggtctttctttgtcggattgttgcatgcagcctacgcaacttcatcgacaggcatgatcatctccatgtgcgaagaggtcaaagcgcctgctactcaggtacccaaagctatggttctaaccattttaattaacacattcgctggcttgctcttcatgatcccattggtattcgtccttccgcccattgaagatcttatcctcctggctcagccggtgccgactatcatcaaaagcgccgtgggcagccctggtggtgcattcgggctgctgataccacttctcgtgctcgcgcttatttgcggaattgggtgcactacggctgcatcgcgttccgtgtatgccttttcgcgggatggtgccgttccgggttccaagtggtggaaggtcgtgaaccccaagcttgacgtgccgttcaacgcaatgatgctcagtatggttgttcaagttctcctcggactcatctattttgggtcagctgccgccttcaacgccttctccggagtgggtgtcattactcttaccctggcatacggtatcccgatcgtcgtcagcatgcttgagggccgccggacggtagccaagggacagttctttttgggcaaacttggctgggtttgcaatttcattgctgttgcatggactgcgctggccattcctctcttctctatgcccaccgttgttccagttaccgatccctcatatgcgaattacgctcccgtcgtttttgtgggatttggtctcctttcctacgcatggtacgtgttctggggccggaaaaactatactggtcccccaacagaagtcatcacgtaagacactccaggtctttttatatagactctcttcttctcccggatatttttagtgcttgagacaacggggacgatgttcctgcacgattatagtccttatgatacctattggcttgaaaatacccactggtaattttgctgagcgcatagatacccggtgcgaatacgattagtcttatataaagtaataccaaacgcgtattgcaaatgaactatgtacactttccttgtatttcaacctcgtctccggtgcaagttcgggcgatcaacaaatccatccacctgggcaggcaagacgcacaagggtcttgtttcacgaagtggagttgggccaccctgacacagatcctctactcacttttccatggttgtttaactagagggcacgcactgatagtagtagtcgttgagatggctacaggtacttccgctctacagggacaaagggttagcaaacgctcagatgagtccgtaatgccgaaagatattgctgagccgggtcaacatacagcgcaggttgtgcatcctgtccatccggaacctccgcactgaccataagccgcaaccggagtgcaaactgaggtaggagtcgaggtggcacttgaggtagttgatgtcttcgtcgtcacggttgtaccaacactggttgtcgtcgcctttgttgtcgtcgctttcgtggttgttgccgtgcttgtgggactgctccctaccacacaggtcgattcacaggctgcacatgtcgaaccggcactcttggttgagccgcccgagtacactgatgacggtcagtttgttaggcaccgtgtcgtctgcattcgagccgacttggcacaatgttcgatgagtaggacgacaaacctgttggacctggcgcttgataagttgacaacgactgataaatgttgatcaatatacccgggtcgctcgccgagtatgcgcccggcagactcacgccgcttggacttgctgaaccggacccagtgaccgtgagctgatagcaactcatgtagaactgagcgccattggtgccgccagcaacatgaagcgcaatgacctctgcacggagaaggtagtcgccaggcgcaatgtcggaggggattttcacgttca

SEQ ID NO: 31287 - DNA, 1557 bp, Muscodor strobelii
  misc_feature: SGI cDNA ID NO. 570769
  misc_feature: Reduced expression when VOC is produced
  misc_feature: Encodes the peptide sequence at SEQ ID NO 31288
atgaccgagaagactgaggattcggtgacatcgccgtcgcccggcgtctcggacatcgaggatggcaaagagctccatgacctcgcgccgcaacaatctgtggcctcgtcagtatggcccgcagaaaatatgtcagctgctcgcgaggttctccttgtctttgttgcctgtatgacgcagttttgcacccagggggctttcgcagagacgctcgctcttcttcacgtgatcggcaatagttttgggatcactaacccggatcgattatcgtggcttgttgccggtttctcgttgactgttggcacctttatcctcttttcaggccgactcggggatgctttcggttacaagcgaatgatcatcatcggcctagggtggttcagcttgtggtccctcatcagcggtcttagtgtctattcgaattatacacttgctgtgtttgcgcgtgtgctgcaaggtatcggtccggccatctgcttgcccaattctctcgcgattcttggcgccgtttacccacctggagccaagaaagctttgatattcgccctatttggcgctgccgcccctgtcggagcaatcatctccatggtagttgctactgctatagccatatcatggtggccgtgggccttgtttgcgcttagcatatatcttgtcgtcctcgccaccctcgctgctatcgctatacccgatatgccacgtaagacttacgtttttgtcgacggctggacttttcgtaaggttttctatgagcttgatataccgggcgcagtgaccggtgtcgtctctctggtattattcaacttcgcctggaatcaagccccaattgtaggctgggcaaccgctgaagtcattgtacctctcgtcctgggcgtggtcttgttcggtctatttgcttggatcgaaattaaagtcgcagctaagccgctgctcccattcgatatcgtcaatggcgaggttgccttcgtacttggggtcttagcttgcggctgggctacctttggcatctgggttctatacttggtccagatcttggaggtgatccgcggtctgactccgcttcacgtagcagtatggctcacccctctcatcgttgcaggcattgttgctgcgctcttcactggattccttcttggtccgctcaagaccaagccgtcaatagtcatgacgtgtgctcttgcagcatttttgatcggagtgacacttatcgctactgtaccaccgaaccaaatatactggggtcagatctttgtctgtaccattgtcatacctttcggcatggatatgagctttcctgccgcaactctgattttgtctaacgcggttaagcggcagcaccaaggtgttgccgccagtctcgtcaacaccattgtcaactatagtatctctctaggcgttggttttgcaggaacagtacagacacacgttgcgcacggagacgtacttgcagggtttcgcggtggcttatacgtcggtattggactggcagggctgggcttgtcgatatgtatagcaaacctgatacgggaggctataatagatcacagggcaaagtga

SEQ ID NO: 31288 - protein, 518 aa, Muscodor strobelii
  misc_feature: SGI Peptide ID NO. 570769
  misc_feature (49)..(466): Pfam Id: PF07690 Pfam Desc: Major Facilitator Superfamily
  misc_feature (3)..(510): NCBI GI: 46115860 Blast Desc: FG03772.1 [Gibberella zeae PH-1]
  misc_feature (1)..(514): NCBI GI: 256722771 Blast Desc: NECHADRAFT_102094 [Nectria haematococca mpVI 77-13-4]
  misc_feature (20)..(510): NCBI GI: 145240673 Blast Desc: An08g08710 [Aspergillus niger] gi|134077507|emb|CAK96651.1| protein product [Aspergillus niger]
  misc_feature (16)..(490): NCBI GI: 212546943 Blast Desc: MFS transporter of unkown specificity [Penicillium marneffei ATCC 18224] gi|210065145|gb|EEA19240.1| MFS transporter of unkown specificity [Penicillium marneffei ATCC 18224]
  misc_feature (25)..(516): NCBI GI: 115433418 Blast Desc: ATEG_08225 [Aspergillus terreus NIH2624] gi|114189698|gb|EAU31398.1| ATEG_08225 [Aspergillus terreus NIH2624]
  misc_feature (17)..(510): NCBI GI: 119479337 Blast Desc: MFS transporter of unkown specificity [Neosartorya fischeri NRRL 181] gi|119407851|gb|EAW17800.1| MFS transporter of unkown specificity [Neosartorya fischeri NRRL 181]
  misc_feature (7)..(510): NCBI GI: 70997828 Blast Desc: MFS transporter of unkown specificity [Aspergillus fumigatus Af293] gi|66851282|gb|EAL91608.1| MFS transporter of unkown specificity [Aspergillus fumigatus Af293]
  misc_feature (7)..(510): NCBI GI: 159126621 Blast Desc: MFS transporter of unkown specificity [Aspergillus fumigatus A1163]
  misc_feature (41)..(490): NCBI GI: 242822008 Blast Desc: MFS transporter of unkown specificity [Talaromyces stipitatus ATCC 10500] gi|218712717|gb|EED12142.1| MFS transporter of unkown specificity [Talaromyces stipitatus ATCC
  misc_feature (4)..(518): NCBI GI: 154311668 Blast Desc: BC1G_06293 [Botryotinia fuckeliana B05.10] gi|150850804|gb|EDN25997.1| BC1G_06293 [Botryotinia fuckeliana B05.10]
  misc_feature: Useful for introducing or modulating the production of volatile compounds
MTEKTEDSVTSPSPGVSDIEDGKELHDLAPQQSVASSVWPAENMSAAREVLLVFVACMTQFCTQGAFAETLALLHVIGNSFGITNPDRLSWLVAGFSLTVGTFILFSGRLGDAFGYKRMIIIGLGWFSLWSLISGLSVYSNYTLAVFARVLQGIGPAICLPNSLAILGAVYPPGAKKALIFALFGAAAPVGAIISMVVATAIAISWWPWALFALSIYLVVLATLAAIAIPDMPRKTYVFVDGWTFRKVFYELDIPGAVTGVVSLVLFNFAWNQAPIVGWATAEVIVPLVLGVVLFGLFAWIEIKVAAKPLLPFDIVNGEVAFVLGVLACGWATFGIWVLYLVQILEVIRGLTPLHVAVWLTPLIVAGIVAALFTGFLLGPLKTKPSIVMTCALAAFLIGVTLIATVPPNQIYWGQIFVCTIVIPFGMDMSFPAATLILSNAVKRQHQGVAASLVNTIVNYSISLGVGFAGTVQTHVAHGDVLAGFRGGLYVGIGLAGLGLSICIANLIREAIIDHRAK

SEQ ID NO: 31289 - DNA, 2135 bp, Muscodor strobelii
  misc_feature: SGI EST ID NO. CUFF.74090.0
  misc_feature: Variant of the nucleotide sequence at SEQ ID NO 31287
atttgactttatcccacgcttcagtacctgcgactcgtaaagctgtgcgccagacaagtcgggctttggagcctgcttcgcctgcgcttactatactgggtagggtcacgtatcccgtcgtatcgatctcctatcgcgtcggacttcgatatcgatttactcgaaagagtgcaaatagagaggaggtgctgtggagtaacagcggagcttgaaagcgcggcgcgatccgacactaccggccagggtctatgttcatcagtcagcgccggagtcgcgaaatatttgtcgataattctgaccgttgtagttgatcccttgcatgcgcacgcatctaatacaattccttcatgtcctcaaatactcagcctgccctgtttgtggactcttcccatctgcagagaaaggcacaacatttgcaacgccatgaccgagaagactgaggattcggtgacatcgccgtcgcccggcgtctcggacatcgaggatggcaaagagctccatgacctcgcgccgcaacaatctgtggcctcgtcagtatggcccgcagaaaatatgtcagctgctcgcgaggttctccttgtctttgttgcctgtatgacgcagttttgcacccagggggctttcgcagagacgctcgctcttcttcacgtgatcggcaatagttttgggatcactaacccggatcgattatcgtggcttgttgccggtttctcgttgactgttggcacctttatcctcttttcaggccgactcggggatgctttcggttacaagcgaatgatcatcatcggcctagggtggttcagcttgtggtccctcatcagcggtcttagtgtctattcgaattatacacttgctgtgtttgcgcgtgtgctgcaaggtatcggtccggccatctgcttgcccaattctctcgcgattcttggcgccgtttacccacctggagccaagaaagctttgatattcgccctatttggcgctgccgcccctgtcggagcaatcatctccatggtagttgctactgctatagccatatcatggtggccgtgggccttgtttgcgcttagcatatatcttgtcgtcctcgccaccctcgctgctatcgctatacccgatatgccacgtaagacttacgtttttgtcgacggctggacttttcgtaaggttttctatgagcttgatataccgggcgcagtgaccggtgtcgtctctctggtattattcaacttcgcctggaatcaagccccaattgtaggctgggcaaccgctgaagtcattgtacctctcgtcctgggcgtggtcttgttcggtctatttgcttggatcgaaattaaagtcgcagctaagccgctgctcccattcgatatcgtcaatggcgaggttgccttcgtacttggggtcttagcttgcggctgggctacctttggcatctgggttctatacttggtccagatcttggaggtgatccgcggtctgactccgcttcacgtagcagtatggctcacccctctcatcgttgcaggcattgttgctgcgctcttcactggattccttcttggtccgctcaagaccaagccgtcaatagtcatgacgtgtgctcttgcagcatttttgatcggagtgacacttatcgctactgtaccaccgaaccaaatatactggggtcagatctttgtctgtaccattgtcatacctttcggcatggatatgagctttcctgccgcaactctgattttgtctaacgcggttaagcggcagcaccaaggtgttgccgccagtctcgtcaacaccattgtcaactatagtatctctctaggcgttggttttgcaggaacagtacagacacacgttgcgcacggagacgtacttgcagggtttcgcggtggcttatacgtcggtattggactggcagggctgggcttgtcgatatgtatagcaaacctgatacgggaggctataatagatcacagggcaaagtgagccagtcaaacgactgaatgggattgagaaagatattgtaccttgcataataattttagagtgataccccctatagacaaagctaacaaaacatcgagaaaagacgcttattattgtgtccgtcacttcgtggcacatacaacatgctaagtgag

SEQ ID NO: 31290 - DNA, 1353 bp, Muscodor strobelii
  misc_feature: SGI cDNA ID NO. 570770
  misc_feature: Encodes the peptide sequence at SEQ ID NO 31291
atgcgtggactactcggcctggccgccgccaccttggctacactcattgcccaatcagctggacaccccatcgttgtacaccccggcggtgtaaaagacgtccaatttaacgaagagaacgttctcaacagcacagccggccccgactccggctactggtcgaattccactactgctgacagcaccgaggataaagttacgtttatcgttgaggctgctcaggctagcaatgcgttgccagtctccctagttaacaactatggcgacaacatgctcgcattcatcaccggaaaggatgcgtccggaaagcctgtctttatcgacaatactggcaactacttctacccggagggcgcgacctcgactgccacgccgatcacagcgaccaacatcgccatttctctcggtggccaaggttcgacaaccagcatcaacatcccaggtgatctgattagtgccagaatttaccttgctcaagggcaactacagttctacacggttcttgatggcaatggagtggcagccatcgtcgagccggcagccgtcaatccgaaagatgcctcggcgggagtcccgtggggctttgtcgagttcaactaccagaacaacgccatctttaccaacatcagctatgtcgatttcgtcggtctgccgctaggtatggccttgtccgatgccgccaacacccaggttgtcgagggcctcaatgcgggtgctcttcagagcatctgcaacgatctcaagacgcaagccgcggccgacggtcaggcttgggaccagctttgccagaccgatggcgcgggcaacgcgctgcgtgtgctgtctcccaacctgtttacgtcggccaacccgacgtggatgagcacctactacgatgcgtacgtgcagcaggtgtggcagttctacgccagcaacaccctcaccatcaacacccagtcccagggcgacagcgcctgccaggtcgtcgacaaccagctggcctgcgccaacgacaaccgtgggtacccagcacccacgacggccgatatctggggttgcaactcgggacccttcgccatcatcgacggggacaacccgacgcacgtcgccaacgtgccccgactctgcgccgccttcgagcgcaccgagctgctcctggacgggggcaactacacgcccagcctcgatgccacccactactacacagtcgaccccaccaaccactacagccgcatcgtgcacaattacgaggctaacggcatcggctacgccttctcctacgacgacgtcaacccggaaggtgccaacgcgtctggagagatcactaccaccaacccgacgggtctgaagatcaccgtcggtggttactcttag

SEQ ID NO: 31291 - protein, 450 aa, Muscodor strobelii
  misc_feature: SGI Peptide ID NO. 570770
  misc_feature (1)..(447): NCBI GI: 256726304 Blast Desc: NECHADRAFT_94692 [Nectria haematococca mpVI 77-13-4]
  misc_feature (4)..(450): NCBI GI: 212526330 Blast Desc: conserved [Penicillium marneffei ATCC 18224] gi|210072720|gb|EEA26807.1| conserved [Penicillium marneffei ATCC 18224]
  misc_feature (22)..(450): NCBI GI: 242774018 Blast Desc: glucan endo-1,3-beta-glucosidase precursor, [Talaromyces stipitatus ATCC 10500] gi|218721977|gb|EED21395.1| glucan endo-1,3-beta-glucosidase precursor, [Talaromyces ATCC
  misc_feature (4)..(450): NCBI GI: 242780568 Blast Desc: conserved [Talaromyces stipitatus ATCC 10500] gi|218719770|gb|EED19189.1| conserved [Talaromyces stipitatus ATCC 10500]
  misc_feature (1)..(448): NCBI GI: 255931147 Blast Desc: Pc12g02400 [Penicillium chrysogenum Wisconsin 54-1255] gi|211581749|emb|CAP79867.1| Pc12g02400 [Penicillium chrysogenum Wisconsin 54-1255]
  misc_feature (1)..(450): NCBI GI: 46111053 Blast Desc: FG02408.1 [Gibberella zeae PH-1]
  misc_feature (1)..(450): NCBI GI: 212531815 Blast Desc: glucan endo-1,3-beta-glucosidase precursor, [Penicillium marneffei ATCC 18224] gi|210071428|gb|EEA25517.1| glucan endo-1,3-beta-glucosidase precursor, [Penicillium ATCC
  misc_feature (28)..(448): NCBI GI: 261361626 Blast Desc: glucanase B [Verticillium albo-atrum VaMs.102]
  misc_feature (79)..(450): NCBI GI: 242761177 Blast Desc: conserved [Talaromyces stipitatus ATCC 10500] gi|218723326|gb|EED22743.1| conserved [Talaromyces stipitatus ATCC 10500]
  misc_feature (63)..(448): NCBI GI: 169600283 Blast Desc: SNOG_02972 [Phaeosphaeria nodorum SN15] gi|111068583|gb|EAT89703.1| SNOG_02972 [Phaeosphaeria nodorum SN15]
  misc_feature (134)..(423): SWISSPROT Homolog: EC 3.2.1.39 Glucan endo-1,3-beta-D-glucosidase
MRGLLGLAAATLATLIAQSAGHPIVVHPGGVKDVQFNEENVLNSTAGPDSGYWSNSTTADSTEDKVTFIVEAAQASNALPVSLVNNYGDNMLAFITGKDASGKPVFIDNTGNYFYPEGATSTATPITATNIAISLGGQGSTTSINIPGDLISARIYLAQGQLQFYTVLDGNGVAAIVEPAAVNPKDASAGVPWGFVEFNYQNNAIFTNISYVDFVGLPLGMALSDAANTQVVEGLNAGALQSICNDLKTQAAADGQAWDQLCQTDGAGNALRVLSPNLFTSANPTWMSTYYDAYVQQVWQFYASNTLTINTQSQGDSACQVVDNQLACANDNRGYPAPTTADIWGCNSGPFAIIDGDNPTHVANVPRLCAAFERTELLLDGGNYTPSLDATHYYTVDPTNHYSRIVHNYEANGIGYAFSYDDVNPEGANASGEITTTNPTGLKITVGGYS

SEQ ID NO: 31292 - DNA, 4707 bp, Muscodor strobelii
  misc_feature: SGI EST ID NO. CUFF.74061.0
  misc_feature: Variant of the nucleotide sequence at SEQ ID NO 31290
cagtaagcgatggaacgtttgtgactcttggggagagaagggtcatttcatcaacttggcaggctcgagttgcccgtaatgtatgaggcgtgtagtcaaacatggtgggttggtgcgcattgcacgtacagggatcgtagtcaggaacgagaaagaagctgggttaggagtgagtctaatgccgaaaatagccaactgtttcccttagaccctcgagcgccgcgccgctggtggtgtcgcatctgccgatccatcagaaccttataacctccttccgcaaatcgatcgcctgctaactgcttctggggtgctggtccggtcatctttaccaggttggagggtggtccgccaagacagtggggagatgcaggaaccgctctctcgcacagacttgccctcttaacataccgagcggaaacatacctcgcgtagagctcgcgtgcaatgctcaattctcccgctctcccagttcccactctgcaccccgagttgtgttcggagctcacttgaccagaactaaccgacgacttactagaacctactgatgtacggtactcgacgtaattctacgttgactggatgcggtagtcctatgctatcgagacttgctatttctcgattctgtcccgggcgctagcctcttttttgcagctgataagtgatctggtgctggtgggttgaaggattcgtctgatgacacccctcaaacgcccctgcccctagcctcatttcgacagacatggcggcgcgctgacgttttagacgcctgttcctctctacatgcacggggaacccagggatctggtggtctgctccccacaactgcgcgctttcgactttggcataggtcattttgttggcatgagcaccaacatgtattcgtaatacacttcgcgcgtgagcgctgcgctgtgtacaggcacacatcgaagcagtgcccgtgaccgaagtaaccgggccgttctctgcaggtccgggttagatgcgtccgacagctttgtcgtgccttgccaagatgacaagatgactgaggcaactcttgagtggttactcgcacattacccttcatctaagtaccgagccgagcgccagttgctaacacacgtagagctaaggcgctttgcgatctcaaacagtagctccagacgagtgagtctacaagcaacttgggggccttgggttaccatcattgttgaaggttggatcctatgatggcactcacaaaggacttctaacttagtcacggctccagctatacgattggtgtcgcaaaaaggttcggcttaccccggatcaacgtatctactactctggctcgttcgggcaacatgtcaaatcagacgtttctgcatagagagaaacctcaaacatggcgaagatcgacgagcagctgtgggtcctctacacttcatctcatcagctgtgacattttaggaagaggcaagttcactactcggcgaaatacagtccttgcgcgttgatatggccgacgacgcatcctaactctatgcctaagcctcaccatagaggtcctggggcttatttggagccggaaagggaaggttatatggtccattcggaacaacccaccgatcccaacataccggcggttgatgaacccgcaacgttccatccctggctgtggcgctggccgatatggtcttggagagagagatatggacgacttcagattatctataaatgagcggttcgtcgatcatatcgtcgatctcgtctcatctgctagccagtctcgtctatcaagcttggttcactccctaccagcttctgagatcatatccgggtttcgtcccatacatcctttttttcccccaacgcaggtcgactacatatactgacatcatgcgtggactactcggcctggccgccgccaccttggctacactcattgcccaatcagctggacaccccatcgttgtacaccccggcggtgtaaaagacgtccaatttaacgaagagaacgttctcaacagcacagccggccccgactccggctactggtcgaattccactactgctgacagcaccgaggataaagttacgtttatcgttgaggctgctcaggctagcaatgcgttgccagtctccctagttaacaactatggcgacaacatgctcgcattcatcaccggaaaggatgcgtccggaaagcctgtctttatcgacaatactggcaactacttctacccggagggcgcgacctcgactgccacgccgatcacagcgaccaacatcgccatttctctcggtggccaaggttcgacaaccagcatcaacatcccaggtgatctgattagtgccagaatttaccttgctcaagggcaactacagttctacacggttcttgatggcaatggagtggcagccatcgtcgagccggcagccgtcaatccgaaagatgcctcggcgggagtcccgtggggctttgtcgagttcaactaccagaacaacgccatctttaccaacatcagctatgtcgatttcgtcggtctgccgctaggtatggccttgtccgatgccgccaacacccaggttgtcgagggcctcaatgcgggtgctcttcagagcatctgcaacgatctcaagacgcaagccgcggccgacggtcaggcttgggaccagctttgccagaccgatggcgcgggcaacgcgctgcgtgtgctgtctcccaacctgtttacgtcggccaacccgacgtggatgagcacctactacgatgcgtacgtgcagcaggtgtggcagttctacgccagcaacaccctcaccatcaacacccagtcccagggcgacagcgcctgccaggtcgtcgacaaccagctggcctgcgccaacgacaaccgtgggtacccagcacccacgacggccgatatctggggttgcaactcgggacccttcgccatcatcgacggggacaacccgacgcacgtcgccaacgtgccccgactctgcgccgccttcgagcgcaccgagctgctcctggacgggggcaactacacgcccagcctcgatgccacccactactacacagtcgaccccaccaaccactacagccgcatcgtgcacaattacgaggctaacggcatcggctacgccttctcctacgacgacgtcaacccggaaggtgccaacgcgtctggagagatcactaccaccaacccgacgggtctgaagatcaccgtcggtggttactcttagaggatatatcttccttgagacatgtcattcgttttatagcatagcatgggcagcgaggaaaatgggaacaggggacaccgctttggtggccaacgatacgagtcgtacagggatgaggatgatgacagagatgaggttcatttcacctgtatatagttacgacattggtgtatatatcatcaaattcatctacgaagtatataagcatactatctatcgaacacactctgcatgcatttttctttttaactcgtgtcgcggttgctcaattgcgcacccagaaaagggcagtactagtgacacatagaagggatgcaaagaattgtaagtcttacggataggtagttttcacgagtggaacacagcaacaaacatgttctcgaaggtagacggggtgcattgccagcagcaggccgagtggaaagtgacgaggtgaataggggtccatgtacgcgcgcttctattccgcagagagccggtcatctctatctcaccgaataatggccgcgtaactactaggtaggttgctaggtacccagcattgcacagacgttcaaaggacaatggtgagatgtactgcaggaaccatcgcaatgtgacataaacaagggtatttccttacggatgaaacaatgctctctcggcactcgagctaaaaataggcccatgctggtctcggccttcacagtcagagaccgatgaactctccaagaaacagtgcgccaatccaagcccagtatttcaatacatacgatactgattgtagtagtgaagactgtacgaccgaatttctaggatgggaaaacctggacttctcgaatcttgacaagtgtgaaaaaaacatgttagcgatcaccgccccagccgagttggcggttgacttcgttcatggcattgatgccggctcggaagagacccaaggcaccgtcgactgtggagtgaccagtggcaaaattgggctgggcctcgtgggcattccgcaagtcggcctggtctaagagggcctgcctcttgtccatgacggcgcggcagatggcaaaggcccacatgttgtaccactggtcctcgctgatgctgacgtactccttggtgccggaggcggtggtcctcgagaagggccactcggcgacggcgacctcccagcgcttggtgcggaagaagaggtagggccagctgaagatccacaggaaggagaggtagaagagccaggtgatccacgaggtgaagcgccagtggttgacccgggcgtcgttgtagagctcgaagcgggcgtctcggctggcgatggtgacggcgaggcggccgcggtagttggtgtcgcggacgagctgggtgaggcggcggacgagcaggtcctcgtcgagcccggtcatctggcgctgaaagacgaagcacttgagcgcggcgtggctggcggcgaagcggtggcaccactcctgcagggtgggggtgtcgtcggcgccgagctcgatgctctggcgggcgccgggg

SEQ ID NO: 31293 - DNA, 645 bp, Muscodor strobelii
  misc_feature: SGI cDNA ID NO. 570771
  misc_feature: Encodes the peptide sequence at SEQ ID NO 31294
cccggcgcccgccagagcatcgagctcggcgccgacgacacccccaccctgcaggagtggtgccaccgcttcgccgccagccacgccgcgctcaagtgcttcgtctttcagcgccagatgaccgggctcgacgaggacctgctcgtccgccgcctcacccagctcgtccgcgacaccaactaccgcggccgcctcgccgtcaccatcgccagccgagacgcccgcttcgagctctacaacgacgcccgggtcaaccactggcgcttcacctcgtggatcacctggctcttctacctctccttcctgtggatcttcagctggccctacctcttcttccgcaccaagcgctgggaggtcgccgtcgccgagtggcccttctcgaggaccaccgcctccggcaccaaggagtacgtcagcatcagcgaggaccagtggtacaacatgtgggcctttgccatctgccgcgccgtcatggacaagaggcaggccctcttagaccaggccgacttgcggaatgcccacgaggcccagcccaattttgccactggtcactccacagtcgacggtgccttgggtctcttccgagccggcatcaatgccatgaacgaagtcaaccgccaactcggctggggcggtgatcgctaa

SEQ ID NO: 31294 - protein, 214 aa, Muscodor strobelii
  misc_feature: SGI Peptide ID NO. 570771
  misc_feature (1)..(213): NCBI GI: 85092193 Blast Desc: NCU06926 [Neurospora crassa OR74A] gi|28920676|gb|EAA30037.1| [Neurospora crassa OR74A]
  misc_feature (1)..(213): NCBI GI: 116203859 Blast Desc: CHGG_09813 [Chaetomium globosum CBS 148.51] gi|88175941|gb|EAQ83409.1| CHGG_09813 [Chaetomium globosum CBS 148.51]
  misc_feature (1)..(213): NCBI GI: 171681529 Blast Desc: protein product [Podospora anserina] gi|170940723|emb|CAP65951.1| protein product [Podospora anserina]
  misc_feature (13)..(213): NCBI GI: 39955144 Blast Desc: MGG_08981 [Magnaporthe grisea 70-15] gi|145021060|gb|EDK05189.1| MGG_08981 [Magnaporthe grisea 70-15]
  misc_feature (1)..(213): NCBI GI: 189205092 Blast Desc: conserved [Pyrenophora tritici-repentis Pt-1C-BFP] gi|187985980|gb|EDU51468.1| conserved [Pyrenophora tritici-repentis Pt-1C-BFP]
  misc_feature (1)..(213): NCBI GI: 169609671 Blast Desc: SNOG_07928 [Phaeosphaeria nodorum SN15] gi|160701893|gb|EAT84204.2| SNOG_07928 [Phaeosphaeria nodorum SN15]
  misc_feature (12)..(213): NCBI GI: 256727881 Blast Desc: NECHADRAFT_5512 [Nectria haematococca mpVI 77-13-4]
  misc_feature (1)..(213): NCBI GI: 256724874 Blast Desc: NECHADRAFT_66932 [Nectria haematococca mpVI 77-13-4]
  misc_feature (2)..(213): NCBI GI: 46139123 Blast Desc: FG11076.1 [Gibberella zeae PH-1]
  misc_feature (2)..(213): NCBI GI: 39971831 Blast Desc: MGG_07231 [Magnaporthe grisea 70-15] gi|145019727|gb|EDK03955.1| MGG_07231 [Magnaporthe grisea 70-15]
PGARQSIELGADDTPTLQEWCHRFAASHAALKCFVFQRQMTGLDEDLLVRRLTQLVRDTNYRGRLAVTIASRDARFELYNDARVNHWRFTSWITWLFYLSFLWIFSWPYLFFRTKRWEVAVAEWPFSRTTASGTKEYVSISEDQWYNMWAFAICRAVMDKRQALLDQADLRNAHEAQPNFATGHSTVDGALGLFRAGINAMNEVNRQLGWGGDR

SEQ ID NO: 31295 - DNA, 4707 bp, Muscodor strobelii
  misc_feature: SGI EST ID NO. CUFF.74061.0
  misc_feature: Variant of the nucleotide sequence at SEQ ID NO 31293
ccccggcgcccgccagagcatcgagctcggcgccgacgacacccccaccctgcaggagtggtgccaccgcttcgccgccagccacgccgcgctcaagtgcttcgtctttcagcgccagatgaccgggctcgacgaggacctgctcgtccgccgcctcacccagctcgtccgcgacaccaactaccgcggccgcctcgccgtcaccatcgccagccgagacgcccgcttcgagctctacaacgacgcccgggtcaaccactggcgcttcacctcgtggatcacctggctcttctacctctccttcctgtggatcttcagctggccctacctcttcttccgcaccaagcgctgggaggtcgccgtcgccgagtggcccttctcgaggaccaccgcctccggcaccaaggagtacgtcagcatcagcgaggaccagtggtacaacatgtgggcctttgccatctgccgcgccgtcatggacaagaggcaggccctcttagaccaggccgacttgcggaatgcccacgaggcccagcccaattttgccactggtcactccacagtcgacggtgccttgggtctcttccgagccggcatcaatgccatgaacgaagtcaaccgccaactcggctggggcggtgatcgctaacatgtttttttcacacttgtcaagattcgagaagtccaggttttcccatcctagaaattcggtcgtacagtcttcactactacaatcagtatcgtatgtattgaaatactgggcttggattggcgcactgtttcttggagagttcatcggtctctgactgtgaaggccgagaccagcatgggcctatttttagctcgagtgccgagagagcattgtttcatccgtaaggaaatacccttgtttatgtcacattgcgatggttcctgcagtacatctcaccattgtcctttgaacgtctgtgcaatgctgggtacctagcaacctacctagtagttacgcggccattattcggtgagatagagatgaccggctctctgcggaatagaagcgcgcgtacatggacccctattcacctcgtcactttccactcggcctgctgctggcaatgcaccccgtctaccttcgagaacatgtttgttgctgtgttccactcgtgaaaactacctatccgtaagacttacaattctttgcatcccttctatgtgtcactagtactgcccttttctgggtgcgcaattgagcaaccgcgacacgagttaaaaagaaaaatgcatgcagagtgtgttcgatagatagtatgcttatatacttcgtagatgaatttgatgatatatacaccaatgtcgtaactatatacaggtgaaatgaacctcatctctgtcatcatcctcatccctgtacgactcgtatcgttggccaccaaagcggtgtcccctgttcccattttcctcgctgcccatgctatgctataaaacgaatgacatgtctcaaggaagatatatcctctaagagtaaccaccgacggtgatcttcagacccgtcgggttggtggtagtgatctctccagacgcgttggcaccttccgggttgacgtcgtcgtaggagaaggcgtagccgatgccgttagcctcgtaattgtgcacgatgcggctgtagtggttggtggggtcgactgtgtagtagtgggtggcatcgaggctgggcgtgtagttgcccccgtccaggagcagctcggtgcgctcgaaggcggcgcagagtcggggcacgttggcgacgtgcgtcgggttgtccccgtcgatgatggcgaagggtcccgagttgcaaccccagatatcggccgtcgtgggtgctgggtacccacggttgtcgttggcgcaggccagctggttgtcgacgacctggcaggcgctgtcgccctgggactgggtgttgatggtgagggtgttgctggcgtagaactgccacacctgctgcacgtacgcatcgtagtaggtgctcatccacgtcgggttggccgacgtaaacaggttgggagacagcacacgcagcgcgttgcccgcgccatcggtctggcaaagctggtcccaagcctgaccgtcggccgcggcttgcgtcttgagatcgttgcagatgctctgaagagcacccgcattgaggccctcgacaacctgggtgttggcggcatcggacaaggccatacctagcggcagaccgacgaaatcgacatagctgatgttggtaaagatggcgttgttctggtagttgaactcgacaaagccccacgggactcccgccgaggcatctttcggattgacggctgccggctcgacgatggctgccactccattgccatcaagaaccgtgtagaactgtagttgcccttgagcaaggtaaattctggcactaatcagatcacctgggatgttgatgctggttgtcgaaccttggccaccgagagaaatggcgatgttggtcgctgtgatcggcgtggcagtcgaggtcgcgccctccgggtagaagtagttgccagtattgtcgataaagacaggctttccggacgcatcctttccggtgatgaatgcgagcatgttgtcgccatagttgttaactagggagactggcaacgcattgctagcctgagcagcctcaacgataaacgtaactttatcctcggtgctgtcagcagtagtggaattcgaccagtagccggagtcggggccggctgtgctgttgagaacgttctcttcgttaaattggacgtcttttacaccgccggggtgtacaacgatggggtgtccagctgattgggcaatgagtgtagccaaggtggcggcggccaggccgagtagtccacgcatgatgtcagtatatgtagtcgacctgcgttgggggaaaaaaaggatgtatgggacgaaacccggatatgatctcagaagctggtagggagtgaaccaagcttgatagacgagactggctagcagatgagacgagatcgacgatatgatcgacgaaccgctcatttatagataatctgaagtcgtccatatctctctctccaagaccatatcggccagcgccacagccagggatggaacgttgcgggttcatcaaccgccggtatgttgggatcggtgggttgttccgaatggaccatataaccttccctttccggctccaaataagccccaggacctctatggtgaggcttaggcatagagttaggatgcgtcgtcggccatatcaacgcgcaaggactgtatttcgccgagtagtgaacttgcctcttcctaaaatgtcacagctgatgagatgaagtgtagaggacccacagctgctcgtcgatcttcgccatgtttgaggtttctctctatgcagaaacgtctgatttgacatgttgcccgaacgagccagagtagtagatacgttgatccggggtaagccgaacctttttgcgacaccaatcgtatagctggagccgtgactaagttagaagtcctttgtgagtgccatcataggatccaaccttcaacaatgatggtaacccaaggcccccaagttgcttgtagactcactcgtctggagctactgtttgagatcgcaaagcgccttagctctacgtgtgttagcaactggcgctcggctcggtacttagatgaagggtaatgtgcgagtaaccactcaagagttgcctcagtcatcttgtcatcttggcaaggcacgacaaagctgtcggacgcatctaacccggacctgcagagaacggcccggttacttcggtcacgggcactgcttcgatgtgtgcctgtacacagcgcagcgctcacgcgcgaagtgtattacgaatacatgttggtgctcatgccaacaaaatgacctatgccaaagtcgaaagcgcgcagttgtggggagcagaccaccagatccctgggttccccgtgcatgtagagaggaacaggcgtctaaaacgtcagcgcgccgccatgtctgtcgaaatgaggctaggggcaggggcgtttgaggggtgtcatcagacgaatccttcaacccaccagcaccagatcacttatcagctgcaaaaaagaggctagcgcccgggacagaatcgagaaatagcaagtctcgatagcataggactaccgcatccagtcaacgtagaattacgtcgagtaccgtacatcagtaggttctagtaagtcgtcggttagttctggtcaagtgagctccgaacacaactcggggtgcagagtgggaactgggagagcgggagaattgagcattgcacgcgagctctacgcgaggtatgtttccgctcggtatgttaagagggcaagtctgtgcgagagagcggttcctgcatctccccactgtcttggcggaccaccctccaacctggtaaagatgaccggaccagcaccccagaagcagttagcaggcgatcgatttgcggaaggaggttataaggttctgatggatcggcagatgcgacaccaccagcggcgcggcgctcgagggtctaagggaaacagttggctattttcggcattagactcactcctaacccagcttctttctcgttcctgactacgatccctgtacgtgcaatgcgcaccaacccaccatgtttgactacacgcctcatacattacgggcaactcgagcctgccaagttgatgaaatgacccttctctccccaagagtcacaaacgttccatcgcttactg

SEQ ID NO: 31296 - DNA, 2757 bp, Muscodor strobelii
  misc_feature: SGI cDNA ID NO. 570772
  misc_feature: Encodes the peptide sequence at SEQ ID NO 31297
atgtccgaccaacgccatcacaacaggcgcccagcccacgacatatctcacatgtctcagtcgtcagatccatcaatatacacctatcccgagttccaacatcttcgcgcggcccccaacccatctcaattctcccacgcgcatacccatcgcctgtcgtcctactcatttccccacacaacctccccagagcccgtgatatcactctcttccctctcgcaactcgaccccttatgcccgttgcgtcaagactgctcaccatggttcgaggtcgcaagcccaggccttccaaaatccatccaactcccacccaccaatcttgtcggcaatgagttctggacggggttaccagacgacacatgcctatcaagcccagcaaattcagactcaacagccagctcccgctcctcatcaacaatctcgcaagcaccatccgcagactggtctccagtgcaaaccgaggtaccctccgatttctgccctgcccagccatcacgtggtcccagcccattgcgccgtgcatgggggccatcttcgagttcttctttctcatctgacaaaggctccgacggtggagtacttgctagtaagatctcatcagagaccatccgccccgcaacccataagtcgacgccccacatctgtctatggggaataaacggcatctgctcaacaaacgggttcttaacacgagaagagttgaacagacatgtgaagatggagcatttactcgaatgccccgtcgctgcctgcacagagactgtgttccagaatagggagcatctcgattgtcatatgcgatgggatcacggcgcaggtgttgcgaataatgaggaggcttgtcgaagtagtgatcttatcgaagtccctgacgagaagagagagagcagtaggcttgaggcggtcgcaacgctagtaaccccgagggttgtagaagtggaacagcagggcaagagcagacctgcaaatgcgttacctggagagttggtgggggataaggtactgaagatggaactatcgatcggcacctccaagaaacggtgtcgcgaacaacttagagctgtcgctgaaaagcgatacaggcgcgcaaatgggggtcacagtccgagcgcactatcaagtcgcgccccaaagctgctagacactgtcaccttccctatattgtgggagcatgggattcttccattcctgatagaattcatgccgaaatggtgcggaccggcgcacgtcataagtgtgatgcgaggccggaagccagatgcaaggcgcatatgcatcatgacaaggaaggtcgtgacaaaggcccggcgaatggtgattgcaggacatgtgagggacctgctacccgaaagctttcgcaataacatcacattcgtcttctccacggggcaagttgatcgtctggtgtgggcgcgtggcctgagcaaagacatgccagatgaagtatgccagcctagaaacccgttcgcgtacataagcccctgtatgggagacagtattggtgcttcactcgacgatggtgaggatgcaacagcgacattagggccatgcatcactgcagaggggggcagttactggctggcttgttttcatccctttatcagtagcacgcggcgcacatcacccgtcatgatcgaacatccctcgccacaggacagaacactgtgtacgcaagagcgacatgatgtgctcgagacaaatgatgaatccttccgtattgggaaattgaccgcaacctcgggctataatctgaagaccacccgtatctcacatgatcccttttgggaagagtgcgacaaagaacagcctctgattgtgatggattggatactcatctcggctggtactaaacaggccaacatccttcgtaagtttccgacggtgacgcctcgacgcgagacccctatcacgacgactgcctcagtgacacccggcacaagcgtgatctcaacaggtcgtacttccggtgtgcaacgcggtcaagtctgcgaagtccccgcatacgtctccggcgcagaaaacggtactgggaaggcgacacgagaatggtacgttgaagaggcgtatccgtacgataacgagaatgagtggattcggggaggtatcggggtcgagggggacagcggtgcagctatcatcgacagcgacacgaatacgctgatcggccagctttggggaaggaatcggtatcatgggccaggtccaagacatacttacttcacgcccatcatcgatatattcgatgacatacaagagaaatcgggactcagcactagaccacaactaccacaataccgtggcgaggccgatcgatggcctacgtatcctatctgcaggcaatgcttcgatttgcgagaatacttggatagtaggcgctcgtccagagagtcattgatgtccatgattggcgcccacgacatacaggccgaccgagacaacgatctgacttcggtatcggaacttgccacgccgcgggaccacccgcaggtagcgcgacaggtggaagtcaatgaagcagggtcatcatttggtccgagtagtgcaatttctcctggccctctattttcatattatccagctccttctccgggggcatctgatcttcgaagtccctatgcccaggctttgctagatgatgacctatacgaaccaaaatgtcccgaagggaacgagattggccttggcaagaggccagcgcttattccaccatcaggtcaaaatagaacacaacaaacaaagcggaggagagaaatgtag

SEQ ID NO: 31297 - protein, 918 aa, Muscodor strobelii
  misc_feature: SGI Peptide ID NO. 570772
  misc_feature (165)..(710): NCBI GI: 46123375 Blast Desc: FG06065.1 [Gibberella zeae PH-1]
  misc_feature (478)..(763): NCBI GI: 261354905 Blast Desc: [Verticillium albo-atrum VaMs.102]
  misc_feature (325)..(754): NCBI GI: 261353275 Blast Desc: conserved [Verticillium albo-atrum VaMs.102]
  misc_feature (370)..(769): NCBI GI: 116192983 Blast Desc: [Chaetomium globosum CBS 148.51] gi|88182122|gb|EAQ89590.1| [Chaetomium globosum CBS 148.51]
  misc_feature (381)..(750): NCBI GI: 171683931 Blast Desc: protein product [Podospora anserina] gi|170941926|emb|CAP67578.1| protein product [Podospora anserina]
  misc_feature (679)..(798): NCBI GI: 145608104 Blast Desc: MGG_03380 [Magnaporthe grisea 70-15] gi|145015605|gb|EDK00095.1| MGG_03380 [Magnaporthe grisea 70-15]
  misc_feature (558)..(759): NCBI GI: 212541020 Blast Desc: conserved [Penicillium marneffei ATCC 18224] gi|210067964|gb|EEA22056.1| conserved [Penicillium marneffei ATCC 18224]
MSDQRHHNRRPAHDISHMSQSSDPSIYTYPEFQHLRAAPNPSQFSHAHTHRLSSYSFPHTTSPEPVISLSSLSQLDPLCPLRQDCSPWFEVASPGLPKSIQLPPTNLVGNEFWTGLPDDTCLSSPANSDSTASSRSSSTISQAPSADWSPVQTEVPSDFCPAQPSRGPSPLRRAWGPSSSSSFSSDKGSDGGVLASKISSETIRPATHKSTPHICLWGINGICSTNGFLTREELNRHVKMEHLLECPVAACTETVFQNREHLDCHMRWDHGAGVANNEEACRSSDLIEVPDEKRESSRLEAVATLVTPRVVEVEQQGKSRPANALPGELVGDKVLKMELSIGTSKKRCREQLRAVAEKRYRRANGGHSPSALSSRAPKLLDTVTFPILWEHGILPFLIEFMPKWCGPAHVISVMRGRKPDARRICIMTRKVVTKARRMVIAGHVRDLLPESFRNNITFVFSTGQVDRLVWARGLSKDMPDEVCQPRNPFAYISPCMGDSIGASLDDGEDATATLGPCITAEGGSYWLACFHPFISSTRRTSPVMIEHPSPQDRTLCTQERHDVLETNDESFRIGKLTATSGYNLKTTRISHDPFWEECDKEQPLIVMDWILISAGTKQANILRKFPTVTPRRETPITTTASVTPGTSVISTGRTSGVQRGQVCEVPAYVSGAENGTGKATREWYVEEAYPYDNENEWIRGGIGVEGDSGAAIIDSDTNTLIGQLWGRNRYHGPGPRHTYFTPIIDIFDDIQEKSGLSTRPQLPQYRGEADRWPTYPICRQCFDLREYLDSRRSSRESLMSMIGAHDIQADRDNDLTSVSELATPRDHPQVARQVEVNEAGSSFGPSSAISPGPLFSYYPAPSPGASDLRSPYAQALLDDDLYEPKCPEGNEIGLGKRPALIPPSGQNRTQQTKRRREM

SEQ ID NO: 31298 - DNA, 5674 bp, Muscodor strobelii
  misc_feature: SGI EST ID NO. CUFF.74535.0
  misc_feature: Variant of the nucleotide sequence at SEQ ID NO 31296
ccgattccgagttttagttcgattgttttcttgtcgttgtcagccaattgcactatttgccttttgaactagtttcggtctatgactaggaagctaagctttcttagtccttcgcaatcaattgtgagataagagtctagagcctagactctagaatcgggcaactcaaggcaactcagttctagccaaagtctcacagcttcaccgaaccaacttaactcaactccaaatctgagtctaatcgagtataacggcctcaccgaaagacacaaatctaccaactcaaatccatcaccaacagtcaggacaacaggatcaacatgtccgaccaacgccatcacaacaggcgcccagcccacgacatatctcacatgtctcagtcgtcagatccatcaatatacacctatcccgagttccaacatcttcgcgcggcccccaacccatctcaattctcccacgcgcatacccatcgcctgtcgtcctactcatttccccacacaacctccccagagcccgtgatatcactctcttccctctcgcaactcgaccccttatgcccgttgcgtcaagactgctcaccatggttcgaggtcgcaagcccaggccttccaaaatccatccaactcccacccaccaatcttgtcggcaatgagttctggacggggttaccagacgacacatgcctatcaagcccagcaaattcagactcaacagccagctcccgctcctcatcaacaatctcgcaagcaccatccgcagactggtctccagtgcaaaccgaggtaccctccgatttctgccctgcccagccatcacgtggtcccagcccattgcgccgtgcatgggggccatcttcgagttcttctttctcatctgacaaaggctccgacggtggagtacttgctagtaagatctcatcagagaccatccgccccgcaacccataagtcgacgccccacatctgtctatggggaataaacggcatctgctcaacaaacgggttcttaacacgagaagagttgaacagacatgtgaagatggagcatttactcgaatgccccgtcgctgcctgcacagagactgtgttccagaatagggagcatctcgattgtcatatgcgatgggatcacggcgcaggtgttgcgaataatgaggaggcttgtcgaagtagtgatcttatcgaagtccctgacgagaagagagagagcagtaggcttgaggcggtcgcaacgctagtaaccccgagggttgtagaagtggaacagcagggcaagagcagacctgcaaatgcgttacctggagagttggtgggggataaggtactgaagatggaactatcgatcggcacctccaagaaacggtgtcgcgaacaacttagagctgtcgctgaaaagcgatacaggcgcgcaaatggtaaggcactagcatcgcactgggctttaatagtctaacagagtaacagggggtcacagtccgagcgcactatcaagtcgcgccccaaagctgctagacactgtcaccttccctatattgtgggagcatgggattcttccattcctgatagaattcatgccgaaatggtgcggaccggcgcacgtcataagtgtgatgcgaggccggaagccagatgcaaggcgcatatgcatcatgacaaggaaggtcgtgacaaaggcccggcgaatggtgattgcaggacatgtgagggacctgctacccgaaagctttcgcaataacatcacattcgtcttctccacggggcaagttgatcgtctggtgtgggcgcgtggcctgagcaaagacatgccagatgaagtatgccagcctagaaacccgttcgcgtacataagcccctgtatgggagacagtattggtgcttcactcgacgatggtgaggatgcaacagcgacattagggccatgcatcactgcagaggggggcagttactggctggcttgttttcatccctttatcagtagcacgcggcgcacatcacccgtcatgatcgaacatccctcgccacaggacagaacactgtgtacgcaagagcgacatgatgtgctcgagacaaatgatgaatccttccgtattgggaaattgaccgcaacctcgggctataatctgaagaccacccgtatctcacatgatcccttttgggaagagtgcgacaaagaacagcctctgattgtgatggattggatactcatctcggctggtactaaacaggccaacatccttcgtaagtttccgacggtgacgcctcgacgcgagacccctatcacgacgactgcctcagtgacacccggcacaagcgtgatctcaacaggtcgtacttccggtgtgcaacgcggtcaagtctgcgaagtccccgcatacgtctccggcgcagaaaacggtactgggaaggcgacacgagaatggtacgttgaagaggcgtatccgtacgataacgagaatgagtggattcggggaggtatcggggtcgagggggacagcggtgcagctatcatcgacagcgacacgaatacgctgatcggccagctttggggaaggaatcggtatcatgggccaggtccaagacatacttacttcacgcccatcatcgatatattcgatgacatacaagagaaatcgggactcagcactagaccacaactaccacaataccgtggcgaggccgatcgatggcctacgtatcctatctgcaggcaatgcttcgatttgcgagaatacttggatagtaggcgctcgtccagagagtcattgatgtccatgattggcgcccacgacatacaggccgaccgagacaacgatctgacttcggtatcggaacttgccacgccgcgggaccacccgcaggtagcgcgacaggtggaagtcaatgaagcagggtcatcatttggtccgagtagtgcaatttctcctggccctctattttcatattatccagctccttctccgggggcatctgatcttcgaagtccctatgcccaggctttgctagatgatgacctatacgaaccaaaatgtcccgaagggaacgagattggccttggcaagaggccagcgcttattccaccatcaggtcaaaatagaacacaacaaacaaagcggaggagagaaatgtagacgcctgagctctaaggtaaaggcggtgtatttacctcacttgctcgagtccggatactccgcatcacgttgtaaactaagctggtcggatgaacattgaattggtcatcccaatcttccagccatgaatagcaagtatatagagcctgctatggacgcggactgtcactaaacagttactggggcgtgtagcgcaggggtagcgcatccgctttgcatggaaacaagcgtcaaattgcggaaggtcttgggttcgagccccaactcgtccaatctttttgcaaatttctaagttgggatcatcctgggaatcctcctctgctcattttcttggctcgttgatcacggcggttgtgatttgccctcgagcccttgttggcttccttgcgttgccttgcatgctctgtgtctttgtcaccggtcggacccgcgacattgccaccacggccaccacccctccctcgggctcggccgcgaacacgcccgcgtaaagctcctcgttgctcggcgcctgaatcttcctggtcggatccagccgggctagcacgccaggcggttgacgccagctctctctgcttgccggcaaaggcatattttgcttccagctgtctcatggattgaggggctctagcaagcattacagcccatccttcgatggcctcgtctgtcatacccgttgcttgcttcagctcgatccttactttacttcgtcgcgttgtagcatctctttcgaaagatttaggatcggcttgatacgctctgaatagagtctcctcattggcgtctttcttcttttgatcattgacatcttctagatggccgtcgttcacaacaaatccagagtctaccgcatcatatgtgtcatctcgttcgtcatcatccgcatcaaaagctgaaagggcagacagaatggcagccttgttaggggcagtcgaccggtcttgcagtatgtcatctgcagtccgatcagggttgcgcttgccgaagtgaaggtttgatgcatcgattgccaaacgatcaaattcatcgtcatcgaaaacattgcgtcgcaaagggatctgaggtggtgttgagcggggtgcgatatcatggcttttccttctcgtccgttcaggagatctagtaattatcagcaacaggatactatagcgtcgaatgagatgatcgtacagctctttggtgcgatccgcagacgccaagtgaggtggtaatgaatcttcaagcaaatgcgcaatgacttgttccgtgttgttgtcatactcttcaagaagttttgaaacgaatgccgatcccaaatccgggaagagatcttgaatctgtgagatttgactcattcgatggacacgcatctctcccacggcgtcatccgggtcttcagtcatgattcctttacctttatcgaccttacgcttgacgaggcgtttgggtctaacattaccaccaggcttgcggtgtccttcaagcgaagtgatgactggttttatccgcgtcacaccagtcgtagattgctcaaggcggctttggatctgtttcagaatgggagttacagtgacaagctcgggaaccatagagtcgtttgcattgagtggacctgatttatgagagtctgcggcggtctttagagagtaaaagacgtcggtcagcgtcgaatatttcggagaatctccttcggtcaatccgatgagacaaagataagtggtagtgataatagccttccgtaaaggagggttcatgatcctgaagcagccgatgagtccgtcaaggaagtcgctgccagccaagaagaatgcggcgacatggggcgatgcatggatgagatgatgtaattttttcaatcgtgactctaataccttcacatcacttttgataccatcgtcgagagatattatgagtgatttcttgagggcctgtaaagaagtctcaacttccggcttttgacagatggcatcaacaagcgtcgttgctctcttcttcccgtacaatttgctgaaatcggacaggaattgccaagtgagcatttcaggcggtggcgatggtagccgcaacagtcttgatgttaagatgtagctttgccgaatcagtaaggtagccgccttcgaatttcccaggattgatgtgccagacgctgcggtctcgcgggtgaaagagatctggaattgtgagatggactcatcattcttcatgtgaccaatgagttcggcctctgagagggacagatatgcctctgccaaggcgagccatgttgacaaacatgcctcccattcaacaggtacgatgtggtcgcgccatggagcctctggaaagggcgcaaatggagggagagtgggcgccatgacgtgggtgggaaggttggtaaggaggtgagagtacaagaggaccagtgaaggagaggaagaaaaaggctcgaagtagcagctgcttcatgccaatctcagatgctgttttcacagacacaaagctgcagtaggcagcatgagatataacagcttcaagttggctcagcatcatgatgagccatacttttgatgcaagtctccacctgttcttg

SEQ ID NO: 31299 - DNA, 1983 bp, Muscodor strobelii
  misc_feature: SGI cDNA ID NO. 570773
  misc_feature: Encodes the peptide sequence at SEQ ID NO 31300
atggcgcccactctccctccatttgcgccctttccagaggctccatggcgcgaccacatcgtacctgttgaatgggaggcatgtttgtcaacatggctcgccttggcagaggcatatctgtccctctcagaggccgaactcattggtcacatgaagaatgatgagtccatctcacaattccagatctctttcacccgcgagaccgcagcgtctggcacatcaatcctgggaaattcgaaggcggctaccttactgattcggcaaagctacatcttaacatcaagactgttgcggctaccatcgccaccgcctgaaatgctcacttggcaattcctgtccgatttcagcaaattgtacgggaagaagagagcaacgacgcttgttgatgccatctgtcaaaagccggaagttgagacttctttacaggccctcaagaaatcactcataatatctctcgacgatggtatcaaaagtgatgtgaaggtattagagtcacgattgaaaaaattacatcatctcatccatgcatcgccccatgtcgccgcattcttcttggctggcagcgacttccttgacggactcatcggctgcttcaggatcatgaaccctcctttacggaaggctattatcactaccacttatctttgtctcatcggattgaccgaaggagattctccgaaatattcgacgctgaccgacgtcttttactctctaaagaccgccgcagactctcataaatcaggtccactcaatgcaaacgactctatggttcccgagcttgtcactgtaactcccattctgaaacagatccaaagccgccttgagcaatctacgactggtgtgacgcggataaaaccagtcatcacttcgcttgaaggacaccgcaagcctggtggtaatgttagacccaaacgcctcgtcaagcgtaaggtcgataaaggtaaaggaatcatgactgaagacccggatgacgccgtgggagagatgcgtgtccatcgaatgagtcaaatctcacagattcaagatctcttcccggatttgggatcggcattcgtttcaaaacttcttgaagagtatgacaacaacacggaacaagtcattgcgcatttgcttgaagattcattaccacctcacttggcgtctgcggatcgcaccaaagagctatctcctgaacggacgagaaggaaaagccatgatatcgcaccccgctcaacaccacctcagatccctttgcgacgcaatgttttcgatgacgatgaatttgatcgtttggcaatcgatgcatcaaaccttcacttcggcaagcgcaaccctgatcggactgcagatgacatactgcaagaccggtcgactgcccctaacaaggctgccattctgtctgccctttcagcttttgatgcggatgatgacgaacgagatgacacatatgatgcggtagactctggatttgttgtgaacgacggccatctagaagatgtcaatgatcaaaagaagaaagacgccaatgaggagactctattcagagcgtatcaagccgatcctaaatctttcgaaagagatgctacaacgcgacgaagtaaagtaaggatcgagctgaagcaagcaacgggtatgacagacgaggccatcgaaggatgggctgtaatgcttgctagagcccctcaatccatgagacagctggaagcaaaatatgcctttgccggcaagcagagagagctggcgtcaaccgcctggcgtgctagcccggctggatccgaccaggaagattcaggcgccgagcaacgaggagctttacgcgggcgtgttcgcggccgagcccgagggaggggtggtggccgtggtggcaatgtcgcgggtccgaccggtgacaaagacacagagcatgcaaggcaacgcaaggaagccaacaagggctcgagggcaaatcacaaccgccgtgatcaacgagccaagaaaatgagcagaggaggattcccaggatga

SEQ ID NO: 31300 - protein, 660 aa, Muscodor strobelii
  misc_feature: SGI Peptide ID NO. 570773
  misc_feature (332)..(374): Pfam Id: PF02845 Pfam Desc: CUE domain
  misc_feature (4)..(660): NCBI GI: 154289690 Blast Desc: BC1G_15994 [Botryotinia fuckeliana B05.10] gi|150848821|gb|EDN24014.1| BC1G_15994 [Botryotinia fuckeliana B05.10]
  misc_feature (4)..(658): NCBI GI: 256733018 Blast Desc: [Nectria haematococca mpVI 77-13-4]
  misc_feature (4)..(660): NCBI GI: 46123377 Blast Desc: FG06066.1 [Gibberella zeae PH-1]
  misc_feature (5)..(660): NCBI GI: 156039779 Blast Desc: SS1G_12026 [Sclerotinia sclerotiorum 1980] gi|154697763|gb|EDN97501.1| SS1G_12026 [Sclerotinia sclerotiorum 1980]
  misc_feature (8)..(651): NCBI GI: 145608116 Blast Desc: MGG_03371 [Magnaporthe grisea 70-15] gi|145015614|gb|EDK00104.1| MGG_03371 [Magnaporthe grisea 70-15]
  misc_feature (17)..(660): NCBI GI: 261354904 Blast Desc: conserved [Verticillium albo-atrum VaMs.102]
  misc_feature (1)..(579): NCBI GI: 85092127 Blast Desc: NCU06893 [Neurospora crassa OR74A] gi|28920643|gb|EAA30004.1| [Neurospora crassa OR74A]
  misc_feature (1)..(660): NCBI GI: 189200833 Blast Desc: conserved [Pyrenophora tritici-repentis Pt-1C-BFP] gi|187983852|gb|EDU49340.1| conserved [Pyrenophora tritici-repentis Pt-1C-BFP]
  misc_feature (4)..(660): NCBI GI: 169617768 Blast Desc: SNOG_12065 [Phaeosphaeria nodorum SN15] gi|160703479|gb|EAT80477.2| SNOG_12065 [Phaeosphaeria nodorum SN15]
  misc_feature (1)..(403): NCBI GI: 171678808 Blast Desc: protein product [Podospora anserina] gi|170937474|emb|CAP62132.1| protein product [Podospora anserina]
MAPTLPPFAPFPEAPWRDHIVPVEWEACLSTWLALAEAYLSLSEAELIGHMKNDESISQFQISFTRETAASGTSILGNSKAATLLIRQSYILTSRLLRLPSPPPEMLTWQFLSDFSKLYGKKRATTLVDAICQKPEVETSLQALKKSLIISLDDGIKSDVKVLESRLKKLHHLIHASPHVAAFFLAGSDFLDGLIGCFRIMNPPLRKAIITTTYLCLIGLTEGDSPKYSTLTDVFYSLKTAADSHKSGPLNANDSMVPELVTVTPILKQIQSRLEQSTTGVTRIKPVITSLEGHRKPGGNVRPKRLVKRKVDKGKGIMTEDPDDAVGEMRVHRMSQISQIQDLFPDLGSAFVSKLLEEYDNNTEQVIAHLLEDSLPPHLASADRTKELSPERTRRKSHDIAPRSTPPQIPLRRNVFDDDEFDRLAIDASNLHFGKRNPDRTADDILQDRSTAPNKAAILSALSAFDADDDERDDTYDAVDSGFVVNDGHLEDVNDQKKKDANEETLFRAYQADPKSFERDATTRRSKVRIELKQATGMTDEAIEGWAVMLARAPQSMRQLEAKYAFAGKQRELASTAWRASPAGSDQEDSGAEQRGALRGRVRGRARGRGGGRGGNVAGPTGDKDTEHARQRKEANKGSRANHNRRDQRAKKMSRGGFPG

SEQ ID NO: 31301 - DNA, 5709 bp, Muscodor strobelii
  misc_feature: SGI EST ID NO. CUFF.74536.3
  misc_feature: Variant of the nucleotide sequence at SEQ ID NO 31299
caagaacaggtggagacttgcatcaaaagtatggctcatcatgatgctgagccaacttgaagctgttatatctcatgctgcctactgcagctttgtgtctgtgaaaacagcatctgagattggcatgaagcagctgctacttcgagcctttttcttcctctccttcactggtcctcttgtactctcacctccttaccaaccttcccacccacgtcatggcgcccactctccctccatttgcgccctttccagaggctccatggcgcgaccacatcgtacctgttgaatgggaggcatgtttgtcaacatggctcgccttggcagaggcatatctgtccctctcagaggccgaactcattggtcacatgaagaatgatgagtccatctcacaattccagatctctttcacccgcgagaccgcagcgtctggcacatcaatcctgggaaattcgaaggcggctaccttactgattcggcaaagctacatcttaacatcaagactgttgcggctaccatcgccaccgcctgaaatgctcacttggcaattcctgtccgatttcagcaaattgtacgggaagaagagagcaacgacgcttgttgatgccatctgtcaaaagccggaagttgagacttctttacaggccctcaagaaatcactcataatatctctcgacgatggtatcaaaagtgatgtgaaggtattagagtcacgattgaaaaaattacatcatctcatccatgcatcgccccatgtcgccgcattcttcttggctggcagcgacttccttgacggactcatcggctgcttcaggatcatgaaccctcctttacggaaggctattatcactaccacttatctttgtctcatcggattgaccgaaggagattctccgaaatattcgacgctgaccgacgtcttttactctctaaagaccgccgcagactctcataaatcaggtccactcaatgcaaacgactctatggttcccgagcttgtcactgtaactcccattctgaaacagatccaaagccgccttgagcaatctacgactggtgtgacgcggataaaaccagtcatcacttcgcttgaaggacaccgcaagcctggtggtaatgttagacccaaacgcctcgtcaagcgtaaggtcgataaaggtaaaggaatcatgactgaagacccggatgacgccgtgggagagatgcgtgtccatcgaatgagtcaaatctcacagattcaagatctcttcccggatttgggatcggcattcgtttcaaaacttcttgaagagtatgacaacaacacggaacaagtcattgcgcatttgcttgaagattcattaccacctcacttggcgtctgcggatcgcaccaaagagctatctcctgaacggacgagaaggaaaagccatgatatcgcaccccgctcaacaccacctcagatccctttgcgacgcaatgttttcgatgacgatgaatttgatcgtttggcaatcgatgcatcaaaccttcacttcggcaagcgcaaccctgatcggactgcagatgacatactgcaagaccggtcgactgcccctaacaaggctgccattctgtctgccctttcagcttttgatgcggatgatgacgaacgagatgacacatatgatgcggtagactctggatttgttgtgaacgacggccatctagaagatgtcaatgatcaaaagaagaaagacgccaatgaggagactctattcagagcgtatcaagccgatcctaaatctttcgaaagagatgctacaacgcgacgaagtaaagtaaggatcgagctgaagcaagcaacgggtatgacagacgaggccatcgaaggatgggctgtaatgcttgctagagcccctcaatccatgagacagctggaagcaaaatatgcctttgccggcaagcagagagagctggcgtcaaccgcctggcgtgctagcccggctggatccgaccaggaagattcaggcgccgagcaacgaggagctttacgcgggcgtgttcgcggccgagcccgagggaggggtggtggccgtggtggcaatgtcgcgggtccgaccggtgacaaagacacagagcatgcaaggcaacgcaaggaagccaacaagggctcgagggcaaatcacaaccgccgtgatcaacgagccaagaaaatgagcagaggaggattcccaggatgatcccaacttagaaatttgcaaaaagattggacgagttggggctcgaacccaagaccttccgcaatttgacgcttgtttccatgcaaagcggatgcgctacccctgcgctacacgccccagtaactgtttagtgacagtccgcgtccatagcaggctctatatacttgctattcatggctggaagattgggatgaccaattcaatgttcatccgaccagcttagtttacaacgtgatgcggagtatccggactcgagcaagtgaggtaaatacaccgcctttaccttagagctcaggcgtctacatttctctcctccgctttgtttgttgtgttctattttgacctgatggtggaataagcgctggcctcttgccaaggccaatctcgttcccttcgggacattttggttcgtataggtcatcatctagcaaagcctgggcatagggacttcgaagatcagatgcccccggagaaggagctggataatatgaaaatagagggccaggagaaattgcactactcggaccaaatgatgaccctgcttcattgacttccacctgtcgcgctacctgcgggtggtcccgcggcgtggcaagttccgataccgaagtcagatcgttgtctcggtcggcctgtatgtcgtgggcgccaatcatggacatcacttagattcggtcagtacttatttttgggtccgcgggtaacggattccaaaagatacagaaggaaatgtcccttgatgacactcacatgactctctggacgagcgcctactatccaagtattctcgcaaatcgaagcattgcctgcagataggatacgtaggccatcgatcggcctcgccacggtattgtggtagttgtggtctagtgctgagtcccgatttctcttgtatgtcatcgaatatatcgatgatgggcgtgaagtaagtatgtcttggacctggcccatgataccgattccttccccaaagctggccgatcagcgtattcgtgtcgctgtcgatgatagctgcaccgctgtccccctcgaccccgatacctccccgaatccactcattctcgttatcgtacggatacgcctcttcaacgtaccattctcgtgtcgccttcccagtaccgttttctgcgccggagacgtatgcggggacttcgcagacttgaccgcgttgcacaccggaagtacgacctgttgagatcacgcttgtgccgggtgtcactgaggcagtcgtcgtgataggggtctcgcgtcgaggcgtcaccgtcggaaacttacgaaggatgttggcctgtttagtaccagccgagatgagtatccaatccatcacaatcagaggctgttctttgtcgcactcttcccaaaagggatcatgtgagatacgggtggtcttcagattatagcccgaggttgcggtcaatttcccaatacggaaggattcatcatttgtctcgagcacatcatgtcgctcttgcgtacacagtgttctgtcctgtggcgagggatgttcgatcatgacgggtgatgtgcgccgcgtgctactgataaagggatgaaaacaagccagccagtaactgcccccctctgcagtgatgcatggccctaatgtcgctgttgcatcctcaccatcgtcgagtgaagcaccaatactgtctcccatacaggggcttatgtacgcgaacgggtttctaggctggcatacttcatctggcatgtctttgctcaggccacgcgcccacaccagacgatcaacttgccccgtggagaagacgaatgtgatgttattgcgaaagctttcgggtagcaggtccctcacatgtcctgcaatcaccattcgccgggcctttgtcacgaccttccttgtcatgatgcatatgcgccttgcatctggcttccggcctcgcatcacacttatgacgtgcgccggtccgcaccatttcggcatgaattctatcaggaatggaagaatcccatgctcccacaatatagggaaggtgacagtgtctagcagctttggggcgcgacttgatagtgcgctcggactgtgaccccctgttactctgttagactattaaagcccagtgcgatgctagtgccttaccatttgcgcgcctgtatcgcttttcagcgacagctctaagttgttcgcgacaccgtttcttggaggtgccgatcgatagttccatcttcagtaccttatcccccaccaactctccaggtaacgcatttgcaggtctgctcttgccctgctgttccacttctacaaccctcggggttactagcgttgcgaccgcctcaagcctactgctctctctcttctcgtcagggacttcgataagatcactacttcgacaagcctcctcattattcgcaacacctgcgccgtgatcccatcgcatatgacaatcgagatgctccctattctggaacacagtctctgtgcaggcagcgacggggcattcgagtaaatgctccatcttcacatgtctgttcaactcttctcgtgttaagaacccgtttgttgagcagatgccgtttattccccatagacagatgtggggcgtcgacttatgggttgcggggcggatggtctctgatgagatcttactagcaagtactccaccgtcggagcctttgtcagatgagaaagaagaactcgaagatggcccccatgcacggcgcaatgggctgggaccacgtgatggctgggcagggcagaaatcggagggtacctcggtttgcactggagaccagtctgcggatggtgcttgcgagattgttgatgaggagcgggagctggctgttgagtctgaatttgctgggcttgataggcatgtgtcgtctggtaaccccgtccagaactcattgccgacaagattggtgggtgggagttggatggattttggaaggcctgggcttgcgacctcgaaccatggtgagcagtcttgacgcaacgggcataaggggtcgagttgcgagagggaagagagtgatatcacgggctctggggaggttgtgtggggaaatgagtaggacgacaggcgatgggtatgcgcgtgggagaattgagatgggttgggggccgcgcgaagatgttggaactcgggataggtgtatattgatggatctgacgactgagacatgtgagatatgtcgtgggctgggcgcctgttgtgatggcgttggtcggacatgttgatcctgttgtcctgactgttggtgatggatttgagttggtagatttgtgtctttcggtgaggccgttatactcgattagactcagatttggagttgagttaagttggttcggtgaagctgtgagactttggctagaactgagttgccttgagttgcccgattctagagtctaggctctagactcttatctcacaattgattgcgaaggactaagaaagcttagcttcctagtcatagaccgaaactagttcaaaaggcaaatagtgcaattggctgacaacgacaagaaaacaatcgaactaaaactcggaatcgg

SEQ ID NO: 31302 - DNA, 348 bp, Muscodor strobelii
  misc_feature: SGI cDNA ID NO. 570774
  misc_feature: Reduced expression when VOC is produced
  misc_feature: Encodes the peptide sequence at SEQ ID NO 31303
atgtcttacaacaaggacaaggacttcggcgaggcgcccaagacgcacaagatccgcatcaccctgacttcccgcaaggtccagtccctcgagaaggtctcgcaggagctcatcgaccgcgccaagtctaaggatctcaaagtcaagggccccgtccgcctccccaccaaggtcctcaaggtcaccacccgtaagaccccttgcggtgagggttccaagacttgggactgctacgagatgcgcatccacaagcgcctgatcgacctcaacgcccccaccgagattgtcaagcagatcattgtcaacatcgaggctggtgtcgaggttgaggtcaccattgctgcttaa

SEQ ID NO: 31303 - protein, 115 aa, Muscodor strobelii
  misc_feature: SGI Peptide ID NO. 570774
  misc_feature (17)..(111): Pfam Id: PF00338 Pfam Desc: Ribosomal protein S10p/S20e
  misc_feature (1)..(115): NCBI GI: 145608114 Blast Desc: MGG_03372 [Magnaporthe grisea 70-15] gi|145015613|gb|EDK00103.1| MGG_03372 [Magnaporthe grisea 70-15]
  misc_feature (1)..(115): NCBI GI: 154289692 Blast Desc: 40S ribosomal protein S20 [Botryotinia fuckeliana B05.10] gi|150848822|gb|EDN24015.1| 40S ribosomal protein S20 [Botryotinia fuckeliana B05.10]
  misc_feature (1)..(115): NCBI GI: 156039777 Blast Desc: SS1G_12025 [Sclerotinia sclerotiorum 1980] gi|154697762|gb|EDN97500.1| SS1G_12025 [Sclerotinia sclerotiorum 1980]
  misc_feature (2)..(115): NCBI GI: 85092125 Blast Desc: 40S ribosomal protein S20 [Neurospora crassa OR74A] gi|28920642|gb|EAA30003.1| 40S ribosomal protein S20 [Neurospora crassa OR74A]
  misc_feature (1)..(115): NCBI GI: 116206092 Blast Desc: CHGG_02339 [Chaetomium globosum CBS 148.51] gi|88182936|gb|EAQ90404.1| CHGG_02339 [Chaetomium globosum CBS 148.51]
  misc_feature (1)..(115): NCBI GI: 189200831 Blast Desc: 40S ribosomal protein S20 [Pyrenophora tritici-repentis Pt-1C-BFP] gi|187983851|gb|EDU49339.1| 40S ribosomal protein S20 [Pyrenophora tritici-repentis Pt-1C-BFP]
  misc_feature (2)..(115): NCBI GI: 171678806 Blast Desc: protein product [Podospora anserina] gi|170937473|emb|CAP62131.1| protein product [Podospora anserina]
  misc_feature (1)..(115): NCBI GI: 169617766 Blast Desc: SNOG_12064 [Phaeosphaeria nodorum SN15] gi|111059356|gb|EAT80476.1| SNOG_12064 [Phaeosphaeria nodorum SN15]
  misc_feature (1)..(115): NCBI GI: 119190935 Blast Desc: conserved [Coccidioides immitis RS] gi|240107367|gb|EER25552.1| 40S ribosomal protein S20, [Coccidioides posadasii C735 delta SOWgp]
  misc_feature (1)..(115): NCBI GI: 258564989 Blast Desc: 40S ribosomal protein S20 [Uncinocarpus reesii 1704] gi|237906940|gb|EEP81341.1| 40S ribosomal protein S20 [Uncinocarpus reesii 1704]
  misc_feature: Useful for introducing or modulating the production of volatile compounds
MSYNKDKDFGEAPKTHKIRITLTSRKVQSLEKVSQELIDRAKSKDLKVKGPVRLPTKVLKVTTRKTPCGEGSKTWDCYEMRIHKRLIDLNAPTEIVKQIIVNIEAGVEVEVTIAA

SEQ ID NO: 31304 - DNA, 1019 bp, Muscodor strobelii
  misc_feature: SGI EST ID NO. CUFF.74683.0
  misc_feature: Variant of the nucleotide sequence at SEQ ID NO 31302
cccaaggccactggcaaaccccaccaacccttatcttatcgccgccttccacaatcccgtcgcaaacgtcaaattcatccaggcccgcccccgccaagcccaacttttctcttcttcgcagcttcgcgagaatatcataatcagccccagccttcatcacgttaccgaaacgaaacacacgttcgagtcgtgaaggcacctcgtcaaccacccatcccatcaccaccagtcccttcgatctctaaaccacccaagccatcaacatgtcttacaacaaggacaaggacttcggcgaggcgcccaagacgcacaagatccgcatcaccctgacttcccgcaaggtccagtccctcgagaaggtctcgcaggagctcatcgaccgcgccaagtctaaggatctcaaagtcaagggccccgtccgcctccccaccaaggtcctcaaggtcaccacccgtaagaccccttgcggtgagggttccaagacttgggactgctacgagatgcgcatccacaagcgcctgatcgacctcaacgcccccaccgagattgtcaagcagatcattgtcaacatcgaggctggtgtcgaggttgaggtcaccattgctgcttaattgcccagtccaatggcgaaaagtggcgagctttggttctaggattgcggtgcgaagtcggattcgtatgtggaacacgacctcaagttggatggctgggttcacctcggctctatcgctgaatccgaagtagaatcaggaggatgagctggtgtgctggcccgttgctgcagcgagagttgcgggatggcgcgcggacgaggatttacaccctgaaattcaatccacatgccatccaatcttgtcttgctcgtaaattgtgaaatgctgcgctcaaatgtgataggcgcgtcggtaggactaataagtcgagatcaaggtgaagattgcgccgcacataagtagatgatgagcttgacgaacctatatgtttacaactcgtactaatcttcatattcttgagtaatg

SEQ ID NO: 31305 - DNA, 1836 bp, Muscodor strobelii
  misc_feature: SGI cDNA ID NO. 570775
  misc_feature: Encodes the peptide sequence at SEQ ID NO 31306
atggcgccgccgtgcaaattctaccaggaaggcagatgtcgcaatggagccaactgcagattcgaccattccggtcccgtcaacgtcacgaaccagagctcgaatcccttcaacgtcctgtccaacacggccagcactcgcgcccccgaagacccggccaagaaatacaacatctccaaagacatgatcaagacagacctgactagcgagagaccccagtggatcctgtcttcctacggtcccggccgcgatgcccccgaacagctgtttggcggctatccgcgtgagcagagcttcgaggagatgcgcttccacatccagtccgctacgagcccacagcagctacagcagagggtagaggaagaaaaggcccttcggaatcaggccgaacagcagattctaggcgccatccagaacctcgacggcgctctcagcttcgtgctctcggccgaaaacagacaccccaaccggcacgacattgtcaagcagagcgccacaggcgtaagcagtacggccggaaagttcgagcgagacacatccggagcctcaaacaatgcctttgctggcaatgcaactaccgctcagaaccccttttcgaccgccccggcccagccgaacccattcggaggaggagcaggtaacactacctcagcctttgggcagccctcagctctgggccagaagcccagcccgttcggcgccggcccagccccgacaagtgctttcggccagccatcacaaatgggcgcagcggcccctgccttcgggcagacttcgcagatgggtgctgctggcccggcgtttggccaagcctcgcagatgggagcacccaagcccgcgtttggacaaacttcgggcttgggcgccgccgctcctgctttcggccaggcctcaacattgggtcagaagcctaatccgtttggtgttgccaccgcgggcccatctgccttcgcccaggccgggcagggcacttttggccagacaggtcagacccagagtgccttcggtcaaccttcggctatgggacaaaaagcaaaccccttcggtgccccggccgctagtacggcgactccgtttgggcagtcaagcacaccggctgtagcgaatccatttgctcaggctggacagaatgcatcgtccactacatctcctttcggccagcctgcagcaccagtagtagctaacccttttggccaacccgcagctgcatctgctgatcaagccatggacacatcagcgccaacatctgtcgcacagaacgcacctggcaacaatccctttggccagcccgcagctcagaatccttttggtgccgcatcctcgtcagcgccattcgggagcacaaacaacgcctccaaccccttcggccagccttctgcaccccagcctgctgcaactcaaccccaaccacaggccggggcacagaatggcgtggttggcagtccctatgcccccggaagcacaaaagcccaccctcccgcctccagttacatccaaaaaaggcttttgcctgggggcagagaattgcttgcatctttcaaaggccaggccgcggtcttcagatttaaggtcgacaataaatacgtaggccgggatcaagtaccccaagggcacaccggaccaccgttcccgggatatctgaagagtgatgggtcctggtgcaagatcatctgtcccgagggtcctccgctctattacaaagatacggaacccgatgcctcggcttataccccgattattaaggagaaggtatgcaaaggcggggcttacgggacggtttacggggggatgcccgagctcccccccatgagagaggattgtaattgggttttatga

SEQ ID NO: 31306 - protein, 611 aa, Muscodor strobelii
  misc_feature: SGI Peptide ID NO. 570775
  misc_feature (3)..(25): Pfam Id: PF00642 Pfam Desc: Zinc finger C-x8-C-x5-C-x3-H type (and similar)
  misc_feature (5)..(611): NCBI GI: 46123379 Blast Desc: FG06067.1 [Gibberella zeae PH-1]
  misc_feature (5)..(609): NCBI GI: 145608112 Blast Desc: MGG_03373 [Magnaporthe grisea 70-15] gi|145015612|gb|EDK00102.1| MGG_03373 [Magnaporthe grisea 70-15]
  misc_feature (5)..(609): NCBI GI: 256733019 Blast Desc: NECHADRAFT_37615 [Nectria haematococca mpVI 77-13-4]
  misc_feature (5)..(609): NCBI GI: 85092129 Blast Desc: NCU06894 [Neurospora crassa OR74A] gi|28920644|gb|EAA30005.1| [Neurospora crassa OR74A]
  misc_feature (5)..(608): NCBI GI: 116206094 Blast Desc: CHGG_02340 [Chaetomium globosum CBS 148.51] gi|88182937|gb|EAQ90405.1| CHGG_02340 [Chaetomium globosum CBS 148.51]
  misc_feature (5)..(609): NCBI GI: 171678812 Blast Desc: protein product [Podospora anserina] gi|170937476|emb|CAP62134.1| protein product [Podospora anserina]
  misc_feature (58)..(360): NCBI GI: 261354902 Blast Desc: CCCH zinc finger domain-containing protein [Verticillium albo-atrum VaMs.102]
  misc_feature (5)..(610): NCBI GI: 159128764 Blast Desc: CCCH zinc finger domain protein [Aspergillus fumigatus A1163]
  misc_feature (5)..(610): NCBI GI: 146322761 Blast Desc: CCCH zinc finger domain protein [Aspergillus fumigatus Af293] gi|129556789|gb|EBA27307.1| CCCH zinc finger domain protein [Aspergillus fumigatus Af293]
  misc_feature (5)..(611): NCBI GI: 119190937 Blast Desc: CIMG_05516 [Coccidioides immitis RS]
MAPPCKFYQEGRCRNGANCRFDHSGPVNVTNQSSNPFNVLSNTASTRAPEDPAKKYNISKDMIKTDLTSERPQWILSSYGPGRDAPEQLFGGYPREQSFEEMRFHIQSATSPQQLQQRVEEEKALRNQAEQQILGAIQNLDGALSFVLSAENRHPNRHDIVKQSATGVSSTAGKFERDTSGASNNAFAGNATTAQNPFSTAPAQPNPFGGGAGNTTSAFGQPSALGQKPSPFGAGPAPTSAFGQPSQMGAAAPAFGQTSQMGAAGPAFGQASQMGAPKPAFGQTSGLGAAAPAFGQASTLGQKPNPFGVATAGPSAFAQAGQGTFGQTGQTQSAFGQPSAMGQKANPFGAPAASTATPFGQSSTPAVANPFAQAGQNASSTTSPFGQPAAPVVANPFGQPAAASADQAMDTSAPTSVAQNAPGNNPFGQPAAQNPFGAASSSAPFGSTNNASNPFGQPSAPQPAATQPQPQAGAQNGVVGSPYAPGSTKAHPPASSYIQKRLLPGGRELLASFKGQAAVFRFKVDNKYVGRDQVPQGHTGPPFPGYLKSDGSWCKIICPEGPPLYYKDTEPDASAYTPIIKEKVCKGGAYGTVYGGMPELPPMREDCNWVL

SEQ ID NO: 31307 - DNA, 3009 bp, Muscodor strobelii
  misc_feature: SGI EST ID NO. CUFF.74257.1
  misc_feature: Variant of the nucleotide sequence at SEQ ID NO 31305
tgatgaccagctttgacgactctcacgagagttcaccagccaacatcacccgttcttgtcgccttcgtcggcgtcctcgacttggctcttgtctcgacaattcacgatctcctctttggcttaacgttctcgagcgacggcgtcttctctagcgaaagtgctagaaagctagaaactcgttcccttgccgcacacgccgaccgcttcaaccacacccctcactcccgcgacctacctccactgcgcctatcacatctgctacaacgaataaagggccccgcaagaccaaggatcacccacacggactacgccctcgtgtcacttcttccccagaccagtctgacttcgagactcgccctctcgagtccgtctggctggcccgtcccgcgcgctgtctaggttcgcacaaggaagattgcatcactctagacgcagagttcgacattacaagcacaccaaatgcggtcccaatgcctgtgcatattatttcaagcctatgcagataagacagttccagtcaccgcatatcagcagtagtagacccaaaacatggcgccgccgtgcaaattctaccaggaaggcagatgtcgcaatggagccaactgcagattcgaccattccggtcccgtcaacgtcacgaaccagagctcgaatcccttcaacgtcctgtccaacacggccagcactcgcgcccccgaagacccggccaagaaatacaacatctccaaagacatgatcaagacagacctgactagcgagagaccccagtggatcctgtcttcctacggtcccggccgcgatgcccccgaacagctgtttggcggctatccgcgtgagcagagcttcgaggagatgcgcttccacatccagtccgctacgagcccacagcagctacagcagagggtagaggaagaaaaggcccttcggaatcaggccgaacagcagattctaggcgccatccagaacctcgacggcgctctcagcttcgtgctctcggccgaaaacagacaccccaaccggcacgacattgtcaagcagagcgccacaggcgtaagcagtacggccggaaagttcgagcgagacacatccggagcctcaaacaatgcctttgctggcaatgcaactaccgctcagaaccccttttcgaccgccccggcccagccgaacccattcggaggaggagcaggtaacactacctcagcctttgggcagccctcagctctgggccagaagcccagcccgttcggcgccggcccagccccgacaagtgctttcggccagccatcacaaatgggcgcagcggcccctgccttcgggcagacttcgcagatgggtgctgctggcccggcgtttggccaagcctcgcagatgggagcacccaagcccgcgtttggacaaacttcgggcttgggcgccgccgctcctgctttcggccaggcctcaacattgggtcagaagcctaatccgtttggtgttgccaccgcgggcccatctgccttcgcccaggccgggcagggcacttttggccagacaggtcagacccagagtgccttcggtcaaccttcggctatgggacaaaaagcaaaccccttcggtgccccggccgctagtacggcgactccgtttgggcagtcaagcacaccggctgtagcgaatccatttgctcaggctggacagaatgcatcgtccactacatctcctttcggccagcctgcagcaccagtagtagctaacccttttggccaacccgcagctgcatctgctgatcaagccatggacacatcagcgccaacatctgtcgcacagaacgcacctggcaacaatccctttggccagcccgcagctcagaatccttttggtgccgcatcctcgtcagcgccattcgggagcacaaacaacgcctccaaccccttcggccagccttctgcaccccagcctgctgcaactcaaccccaaccacaggccggggcacagaatggcgtggttggcagtccctatgcccccggaagcacaaaagcccaccctcccgcctccagttacatccaaaaaaggcttttgcctgggggcagagaattgcttgcatctttcaaaggccaggccgcggtcttcagatttaaggtcgacaataaatacgtaggccgggatcaagtaccccaagggcacaccggaccaccgttcccgggatatctgaagagtgatgggtcctggtgcaagatcatctgtcccgagggtcctccgctctattacaaagatacggaacccgatgcctcggcttataccccgattattaaggagaaggtatgcaaaggcggggcttacgggacggtttacggggggatgcccgagctcccccccatgagagaggattgtaattgggttttatgagccgcgctgtagctgggccgctgagacttgaccgatacgtggactattcggcggtatatatggtgcgaccgaactggaacagccgaacttttgccgagatgggacgaatggcgaggcggatggatgagcagacagaagctggggtgcaaatcggatcccccccggttagatacgagggtatgtacctagggctccactgcggtttgactatgtagtctggacaaaaagagatgataatgaagaatatcaattgacaatgaatggcgtatttgtcactacctacgtgtacttgtgcgtggtttattgaaatagtggattagagctctggctaaggtaggtaaacaaagtgaggaatggaatgaggggtggtgggatgtatgggttggtgcgtctaagcacgttggttcatgcgtgcgcaaatgactaagacgaagggggagggattgtctttgtgtgcatttgttttaaaagctgggtttcacagtgaaatggctttgagccattatggaggctaatgctttagatatagactggggcccattatgtgcgagggatacagagaggaggatgatacctacttcataaggacgatatagttgtaagagagtacgaatgaggcgattt

SEQ ID NO: 31308 - DNA, 873 bp, Muscodor strobelii
  misc_feature: SGI cDNA ID NO. 570776
  misc_feature: Encodes the peptide sequence at SEQ ID NO 31309
atgacggaaaatggcgacggccctcagaaggtcgacggattggccccgcagctgggcatggaaacggaactgctacgacgcatgatgcgccatatcgctgcgtctggatatatcgacatgacgggcccggatgagtatacgcccaacaacttcagcaaatctttggcgtcaccagtcattagcagtggttaccataccagcactaagcttcatatgttcgcgtacctacaatcgactccaccgcatggacagaatttccatgaccatatgcttgcatacctcttgaatcgacctcaatggttagatgagggatttttccccatcaaggagagagtatttgaaggactagacacagttaaagacgctgtcttattcgttgatgtcgctggtgatttgggctactatacggaggaacttttattcaagttccctaatgcccctggacgattgatccttcaagacctaccacatgttatcgagaccgttcaacatcgtctcaatccgcgcatcgaatgcatgggatacgacttctttaccgaacagcctattaaaggtgctcgcgtttactacatgcacacagttcttcacgattggcccgacgaacaagctgttaaaattgcaagtggtgttatgagggctatgaaaccgggctacagcaagtttctcgttcacgagaatgtaatgcatcccatggcgcaacattacgaacagacaactttagatctaattatgatgacaaacttcggcggaaaagagcgcaccgctgcggaatggtctgagctattagagaagaagtgtgggctcaagatagtgaagatctgggcccctatcgacggagttgaaagtgtgatcgaatgcgagcgccccgaatga

SEQ ID NO: 31309 - protein, 290 aa, Muscodor strobelii
  misc_feature: SGI Peptide ID NO. 570776
  misc_feature (41)..(263): Pfam Id: PF00891 Pfam Desc: O-methyltransferase
  misc_feature (125)..(263): Pfam Id: PF00891 Pfam Desc: O-methyltransferase
  misc_feature (6)..(287): NCBI GI: 256727756 Blast Desc: NECHADRAFT_34244 [Nectria haematococca mpVI 77-13-4]
  misc_feature (6)..(284): NCBI GI: 85094255 Blast Desc: NCU05855 [Neurospora crassa OR74A] gi|28921302|gb|EAA30610.1| conserved [Neurospora crassa OR74A]
  misc_feature (6)..(287): NCBI GI: 240107098 Blast Desc: sterigmatocystin 8-O-methyltransferase precursor, [Coccidioides posadasii C735 delta SOWgp]
  misc_feature (6)..(287): NCBI GI: 242783242 Blast Desc: O-methyltransferase, [Talaromyces stipitatus ATCC 10500] gi|218720295|gb|EED19714.1| O-methyltransferase, [Talaromyces stipitatus ATCC 10500]
  misc_feature (5)..(287): NCBI GI: 116203239 Blast Desc: CHGG_09504 [Chaetomium globosum CBS 148.51] gi|88178022|gb|EAQ85490.1| CHGG_09504 [Chaetomium globosum CBS 148.51]
  misc_feature (6)..(287): NCBI GI: 121709769 Blast Desc: o-methyltransferase [Aspergillus clavatus NRRL 1] gi|119400664|gb|EAW11089.1| o-methyltransferase [Aspergillus clavatus NRRL 1]
  misc_feature (6)..(287): NCBI GI: 115387201 Blast Desc: conserved [Aspergillus terreus NIH2624] gi|114195190|gb|EAU36890.1| conserved [Aspergillus terreus NIH2624]
  misc_feature (6)..(287): NCBI GI: 255933237 Blast Desc: Pc12g12810 [Penicillium chrysogenum Wisconsin 54-1255] gi|211582708|emb|CAP80908.1| Pc12g12810 [Penicillium chrysogenum Wisconsin 54-1255]
  misc_feature (6)..(287): NCBI GI: 145235619 Blast Desc: An03g05790 [Aspergillus niger] gi|134058145|emb|CAK38339.1| protein product [Aspergillus niger]
  misc_feature (27)..(287): NCBI GI: 119175356 Blast Desc: CIMG_09542 [Coccidioides immitis RS]
  misc_feature (4)..(274): SWISSPROT Homolog: EC 2.1.1.110 Sterigmatocystin 8-O-methyltransferase
MTENGDGPQKVDGLAPQLGMETELLRRMMRHIAASGYIDMTGPDEYTPNNFSKSLASPVISSGYHTSTKLHMFAYLQSTPPHGQNFHDHMLAYLLNRPQWLDEGFFPIKERVFEGLDTVKDAVLFVDVAGDLGYYTEELLFKFPNAPGRLILQDLPHVIETVQHRLNPRIECMGYDFFTEQPIKGARVYYMHTVLHDWPDEQAVKIASGVMRAMKPGYSKFLVHENVMHPMAQHYEQTTLDLIMMTNFGGKERTAAEWSELLEKKCGLKIVKIWAPIDGVESVIECERPE

SEQ ID NO: 31310 - DNA, 1469 bp, Muscodor strobelii
  misc_feature: SGI EST ID NO. CUFF.74115.0
  misc_feature: Variant of the nucleotide sequence at SEQ ID NO 31308
gtcagaaacgctagtaaagcggagccttgcaatgtaattgccatctcatttggcgttcaatcgagcctatggaccactatgacggaaaatggcgacggccctcagaaggtcgacggattggccccgcagctgggcatggaaacggaactgctacgacgcatgatgcgccatatcgctgcgtctggatatatcgacatgacgggcccggatgagtatacgcccaacaacttcagcaaatctttggcgtcaccagtcattagcagtggttaccataccaggtaaggaagatctgatacattcaactgagaataaagacgccaactcactcatttatggtcctgcaatcctccatccctcctttttacatgcccacgactggcttcaaaagaaggggtatacttgcccgacggatcagctcgacactccgtttcaaacggcccacagcactaagcttcatatgttcgcgtacctacaatcgactccaccgcatggacagaatttccatgaccatatgcttgcatacctcttgaatcgacctcaatggttagatgagggatttttccccatcaaggagagagtatttgaaggactagacacagttaaagacgctgtcttattcgttgatgtcgctggtgatttgggctactatacggaggaacttttattcaagttccctaatgcccctggacgattgatccttcaagacctaccacatgttatcgagaccgttcaacatcgtctcaatccgcgcatcgaatgcatgggatacgacttctttaccgaacagcctattaaaggtgctcgcgtttactacatgcacacagttcttcacgattggcccgacgaacaagctgttaaaattgcaagtggtgttatgagggctatgaaaccgggctacagcaagtttctcgttcacgagaatgtaatgcatcccatggcgcaacattacgaacagacaactttagatctaattatgatgacaaacttcggcggaaaagagcgcaccgctgcggaatggtctgagctattagagaagaagtgtgggctcaagatagtgaagatctgggcccctatcgacggagttgaaagtgtgatcgaatgcgagcgccccgaatgagatgacgctgttattggccaacgacatgtatgatgataattagcttatcctcatgtcgagattcttggtctggggctgtcctgtcgcacttggcttgtttaggttgaattgcttatccgcagctaacaacttattttaacttgaatgtaatacggaaatcactgaaatggccgataaatcattcgagcgtcaggtcggtggttgacaacaattggccagtgatgctggacagcggcggatagtctttcggctgatgcgccgtatctctaggtctcaccgcgtttctgtcacgtagcttcgataatcgtatatggaagctgttggtagctccgcaccggcactactatgagtc

SEQ ID NO: 31311 - DNA, 3828 bp, Muscodor strobelii
  misc_feature: SGI cDNA ID NO. 570777
  misc_feature: Encodes the peptide sequence at SEQ ID NO 31312
atgtcaaatctaggtgctaaagcgttgacctggagagtaacggaaatcccgaatggaaccaccaaagagcaatttgtccatttctttgaatacgaagatcgtgataggatttctatcgattctctttgtcctgacgcctccggtggagatgacctcacagctaccttgctatatcggccccatcctgatcgtccaagcggcgcgcccaaattcactcacggtaagcctaaagacgtgagtatcgacaaagatttcgagcattggacccctctttattgtcctccggcagggacgtatatcgaagcagacattgtcgctattacgggccttgcaggacatgcattcgggtcatgggctcattcggaggagaacatgtggcttcgtgacgatgtctgcaagttcgctcccaacgcgcgagtgttgacatatggctataatagccaccttgttggacctgatatgtcaattgtcaggatgtcagacttgagcgatactttctatgagaatctaattaacatgcgtgaggactcgaagtgcgaacaacgccctattatctttgtaggacatagcctcggatgcatgattatcaaaaaggctatgataattgcgcgagagagaaatattagtagctcacgcctacccgtgcgagctattatctttctcgcagcgcctcatcgaggcatggacgtagccgcgttgcaaagtattgtgaaaaatgctccccctgagcaactcgtcgaagaacttcgtccagagtcagaagcattaaaatcgttgaatgagggatttacaagaatcgctcaggacattgacatcctgacttgttacgagaccagaccaacgaagacaatggcttttgacgaagcaaagcaaaaatggactcgttcgggcgaagccgcgatactgttgaatccctcctctgcgcatcagtactggccaaaagagaaacggatttatgcagatgctgatcattctagcatcgctaagttgagaaaaaacagaactattttctcaaatgtgagagcagcaatctctcgggcactgactcctacggcacaaatttcccgggaggagcgccgtgaaaattctcacgaagacgactcgacaagtgttatgactcaagatgaatcgcctgcgcgaaattccgagcaacgtagtcatggaaatacaccacaaaggcattattatcatcatggacataccgagcagagtggccattcgccatttgcaaacgaaatgcactaccaatactcacccactccattgcaaaaaacgccccaacgcattgggctcagaacggtgtcacatgcaaatggggtgcctcgggattccttcatcgatcctgatgagcatagatcgcttggagctatggcctcgtctcaagtgccacaagtgatggctccggcaagtaccaatttctcagctcccagcagcgagttctcagaggttcgagccagcgcttccagccatgtcccagttggtgaacaacaacagttgaattccgtatcgcgggaatcttccgagtctctatccagtcacagagacccgtacactccatcgcctccagtcttcatgaacagagaagcgttagcaagtcctccgcctccctatattccatacgccgcctccccaagcttcgccgatacttcttccctgcagccgggtccacacttcagtgatcaatccaacctgtcagcagcttatgtaccaggcgcgacgcaaggcttctcaacagggttatacaataactctagtcatccctcgtataatgatggcgtgtcgcattatgcaaatttgcagcaacaacagaacgcggcaatgatgcagcagcaatttcaggcgatgaatattacagctgatcaaagccagcagcaagatccagatccagctcctgcctatgacgacggctacggtggaggcgaggaagaagagctagaatctgggggccaagacgaatcagtgaataatgtcacggcggagtcacattctcgcatctgtgatggttgcgacgaagaaattacgggagatctgagttaccgttgtcttgagtgcccggactggtattattgtccgcagtgcaatgaggctggccttcctcatcccaatcaccaattcaaagcagtgttcccgggagagtctgagcactttggacaagaggaaccgcatggcacgagtgaagctgatggtggggttccaggcggcgatgcagctgtacccgaagtcgaatgctcaagatgcgacgcagacattgtgtttccagacttcttttaccaatgccctacttgtcctcctgacaaccgcatctgtcaatcatgccaagaaaactcgtggtcatgtctgcagtgcgtagaggagccagcagaagcagtacgcaggcgtcagctcatatggtacgggaagaaattggagtcgaacatgtttatcgatcccgagcccgaggcgacagactcagtgctcgtgagagctttgaaattgcaagacatggacacactggacagattggttcgagttccagcacttctgaacgctattgattcagaaggacgcaccccgttgcatattgcagcccatctgaacctcgacgctgttgcaaagttcctcctgatgcatggcgcagaacttgaagcaagagacagtgacgggtacacgccgctaagccaagccgtcctatccaaacatgaggacatggccttgatcctctttgataggaatgccaatctacatacagtggacgaaagaggcaacactctattgcatctagcatgtgcgtcaggatgcgaggaactagttagaaatttggtgtcagaagatgaggacgagcaagacgcgggtcagaacgacctcatcgatttcatcgacacgccaaattacgcagggcaaactgcgcttttccgatcctgtgaagttggcgagctcgcgattgcagcgcttctgttagacgccggtgctgatccaaatgcagaatatatcattgcagacgctgatgatgagggagccagtacccagctgggtaacctagcagcggcaaacgagggagaggcagtcaagttcttactagactacggaagtggcaccccggtcgacagcgaagacacactagagcgcacgatattgttccgtgccgccgaggcaggccgcttcggactatgccgatttttgatagaacgcggcgccaaccccaacgcgacggcccgaggaggtactcaaagtgtactcgggcaagctgcggcaatgggctttccaaacactatggggatactcgttggaggcggagcgtacattgatgggtgcgacgcgctgaataggaccccgctgctccgggcggtagcttccaatcagcctgcggcgtgcctggctctcctgcagaatgacgctgacccaaaccctgaggctgcgtgtcccgtcgacagcgataccgatatggatttttacactccgctgaatcttgcaagcgcacgaggtttcaaatccattgtagtccaccttgtgtcccacggcgccaggcttgagaaccgagactcaaagggacgaacatcgttattcctggccgctcaatatgggcatctagatgtctgcgcttgtctcgtcgaagccggggcgaacgttgaggcgcggtctccgagcgggagtagcgttgtctccatcgcggcaagacacgggcacctgcaagtcatagagcacttgatcgtggcggcgagggcctcggctaagccgcccccaagtgtccgcgggggcaaatggaagaacttcgtttttgaccccattgtacccgatgcgcgtcgggcagagattttagaacttttacggacctataagcgctcacaatag

SEQ ID NO: 31312 - protein, 1275 aa, Muscodor strobelii
  misc_feature: SGI Peptide ID NO. 570777
  misc_feature (847)..(879): Pfam Id: PF00023 Pfam Desc: Ankyrin repeat
  misc_feature (1175)..(1207): Pfam Id: PF00023 Pfam Desc: Ankyrin repeat
  misc_feature (880)..(912): Pfam Id: PF00023 Pfam Desc: Ankyrin repeat
  misc_feature (1142)..(1174): Pfam Id: PF00023 Pfam Desc: Ankyrin repeat
  misc_feature (660)..(705): Pfam Id: PF00569 Pfam Desc: Zinc finger, ZZ type
  misc_feature (913)..(943): Pfam Id: PF00023 Pfam Desc: Ankyrin repeat
  misc_feature (958)..(990): Pfam Id: PF00023 Pfam Desc: Ankyrin repeat
  misc_feature (1033)..(1065): Pfam Id: PF00023 Pfam Desc: Ankyrin repeat
  misc_feature (828)..(1229): NCBI GI: 115877255 Blast Desc: : similar to ankyrin 2,3/unc44, partial [Strongylocentrotus purpuratus] gi|115970262|ref|XP_001190373.1| : similar to ankyrin 2,3/unc44, partial [Strongylocentrotus
  misc_feature (834)..(1229): NCBI GI: 116202357 Blast Desc: CHGG_09063 [Chaetomium globosum CBS 148.51] gi|88177581|gb|EAQ85049.1| CHGG_09063 [Chaetomium globosum CBS 148.51]
  misc_feature (828)..(1229): NCBI GI: 115720245 Blast Desc: : similar to ankyrin 2,3/unc44, partial [Strongylocentrotus purpuratus]
  misc_feature (828)..(1229): NCBI GI: 115926460 Blast Desc: : similar to ankyrin 2,3/unc44, partial [Strongylocentrotus purpuratus]
  misc_feature (828)..(1229): NCBI GI: 115939162 Blast Desc: : similar to ankyrin 2,3/unc44 [Strongylocentrotus purpuratus]
  misc_feature (828)..(1229): NCBI GI: 115675516 Blast Desc: : similar to ankyrin 2,3/unc44, partial [Strongylocentrotus purpuratus]
  misc_feature (817)..(1229): NCBI GI: 115665370 Blast Desc: : similar to ankyrin 2,3/unc44, partial [Strongylocentrotus purpuratus] gi|115939157|ref|XP_001196401.1| : similar to ankyrin 2,3/unc44, partial [Strongylocentrotus
  misc_feature (828)..(1229): NCBI GI: 115939162 Blast Desc: : similar to ankyrin 2,3/unc44 [Strongylocentrotus purpuratus]
  misc_feature (808)..(1229): NCBI GI: 123506042 Blast Desc: ankyrin repeat protein [Trichomonas vaginalis G3] gi|121912064|gb|EAY16890.1| ankyrin repeat protein, [Trichomonas vaginalis G3]
  misc_feature (817)..(1229): NCBI GI: 115772433 Blast Desc: : similar to ankyrin 2,3/unc44 [Strongylocentrotus purpuratus] gi|115928953|ref|XP_001193458.1| : similar to ankyrin 2,3/unc44 [Strongylocentrotus purpuratus]
MSNLGAKALTWRVTEIPNGTTKEQFVHFFEYEDRDRISIDSLCPDASGGDDLTATLLYRPHPDRPSGAPKFTHGKPKDVSIDKDFEHWTPLYCPPAGTYIEADIVAITGLAGHAFGSWAHSEENMWLRDDVCKFAPNARVLTYGYNSHLVGPDMSIVRMSDLSDTFYENLINMREDSKCEQRPIIFVGHSLGCMIIKKAMIIARERNISSSRLPVRAIIFLAAPHRGMDVAALQSIVKNAPPEQLVEELRPESEALKSLNEGFTRIAQDIDILTCYETRPTKTMAFDEAKQKWTRSGEAAILLNPSSAHQYWPKEKRIYADADHSSIAKLRKNRTIFSNVRAAISRALTPTAQISREERRENSHEDDSTSVMTQDESPARNSEQRSHGNTPQRHYYHHGHTEQSGHSPFANEMHYQYSPTPLQKTPQRIGLRTVSHANGVPRDSFIDPDEHRSLGAMASSQVPQVMAPASTNFSAPSSEFSEVRASASSHVPVGEQQQLNSVSRESSESLSSHRDPYTPSPPVFMNREALASPPPPYIPYAASPSFADTSSLQPGPHFSDQSNLSAAYVPGATQGFSTGLYNNSSHPSYNDGVSHYANLQQQQNAAMMQQQFQAMNITADQSQQQDPDPAPAYDDGYGGGEEEELESGGQDESVNNVTAESHSRICDGCDEEITGDLSYRCLECPDWYYCPQCNEAGLPHPNHQFKAVFPGESEHFGQEEPHGTSEADGGVPGGDAAVPEVECSRCDADIVFPDFFYQCPTCPPDNRICQSCQENSWSCLQCVEEPAEAVRRRQLIWYGKKLESNMFIDPEPEATDSVLVRALKLQDMDTLDRLVRVPALLNAIDSEGRTPLHIAAHLNLDAVAKFLLMHGAELEARDSDGYTPLSQAVLSKHEDMALILFDRNANLHTVDERGNTLLHLACASGCEELVRNLVSEDEDEQDAGQNDLIDFIDTPNYAGQTALFRSCEVGELAIAALLLDAGADPNAEYIIADADDEGASTQLGNLAAANEGEAVKFLLDYGSGTPVDSEDTLERTILFRAAEAGRFGLCRFLIERGANPNATARGGTQSVLGQAAAMGFPNTMGILVGGGAYIDGCDALNRTPLLRAVASNQPAACLALLQNDADPNPEAACPVDSDTDMDFYTPLNLASARGFKSIVVHLVSHGARLENRDSKGRTSLFLAAQYGHLDVCACLVEAGANVEARSPSGSSVVSIAARHGHLQVIEHLIVAARASAKPPPSVRGGKWKNFVFDPIVPDARRAEILELLRTYKRSQ

SEQ ID NO: 31313 - DNA, 768 bp, Muscodor strobelii
  misc_feature: SGI cDNA ID NO. 570778
  misc_feature: Reduced expression when VOC is produced
  misc_feature: Encodes the peptide sequence at SEQ ID NO 31314
atggccggcactggacctcctcccaactactatcgcatactcgaaatccccgagacagcaactacacagcaaatcagagatgcctacaaaaaagcagctctaaaaactcacccagaccgcgtcgcagccgactccccagaacgagccgcccgcacgcgcaaattccagctcgtaaacgacgcctactacacactctccgacgcaacccgcagacgagactacgatgcccagcggaagctcttcggcggcgcacgtcccaagccctcatcctccgcaaatacgaaccgtccaccacctggttcatttacgcccgacttcgacgacgaattcgacgaggaaatccccgtcggcggcgacatgcctaacacgaacaacttctacagctgggcatgggacttcttcaccaagggttcctcacagaacaacgcagagacgcaacaggagcggcagcagacggaagatgcgcagttcggagacgtgttcgaggagatgttgagggaggagggtatggacgaggcgcagcagcaggctaataagggcaagttttggagtcttgctggaggcgctgccgggggtgttttgggatttatcgcggctaatttccctggtgcgatcgcggggatggtggccgggaataggtttggggcgattagagatgcgagggggaagagtgtttatgctgtttttcaggagttgccgcagagtgagcgcgcgaggttgcttgcgcagttggctacgagggtttttagtcatgctgtgggtgtttaa

SEQ ID NO: 31314 - protein, 255 aa, Muscodor strobelii
  misc_feature: SGI Peptide ID NO. 570778
  misc_feature (9)..(75): Pfam Id: PF00226 Pfam Desc: DnaJ domain
  misc_feature (4)..(255): NCBI GI: 256735140 Blast Desc: NECHADRAFT_102364 [Nectria haematococca mpVI 77-13-4]
  misc_feature (2)..(255): NCBI GI: 171695836 Blast Desc: protein product [Podospora anserina] gi|170948160|emb|CAP60324.1| protein product [Podospora anserina]
  misc_feature (5)..(255): NCBI GI: 39972835 Blast Desc: MGG_07712 [Magnaporthe grisea 70-15] gi|145012479|gb|EDJ97133.1| MGG_07712 [Magnaporthe grisea 70-15]
  misc_feature (1)..(230): NCBI GI: 261356479 Blast Desc: DNAJ domain-containing protein [Verticillium albo-atrum VaMs.102]
  misc_feature (13)..(255): NCBI GI: 164427925 Blast Desc: NCU02491 [Neurospora crassa OR74A] gi|157071938|gb|EAA35849.2| conserved [Neurospora crassa OR74A]
  misc_feature (7)..(252): NCBI GI: 154308392 Blast Desc: BC1G_08256 [Botryotinia fuckeliana B05.10] gi|150852797|gb|EDN27989.1| BC1G_08256 [Botryotinia fuckeliana B05.10]
  misc_feature (7)..(252): NCBI GI: 156057755 Blast Desc: SS1G_04609 [Sclerotinia sclerotiorum 1980] gi|154702394|gb|EDO02133.1| SS1G_04609 [Sclerotinia sclerotiorum 1980]
  misc_feature (7)..(230): NCBI GI: 38567098 Blast Desc: conserved [Neurospora crassa]
  misc_feature (9)..(253): NCBI GI: 169601328 Blast Desc: SNOG_03528 [Phaeosphaeria nodorum SN15] gi|111067613|gb|EAT88733.1| SNOG_03528 [Phaeosphaeria nodorum SN15]
  misc_feature (13)..(253): NCBI GI: 189193773 Blast Desc: DNAJ domain containing protein [Pyrenophora tritici-repentis Pt-1C-BFP] gi|187978789|gb|EDU45415.1| DNAJ domain containing protein [Pyrenophora tritici-repentis
  misc_feature: Useful for introducing or modulating the production of volatile compounds
MAGTGPPPNYYRILEIPETATTQQIRDAYKKAALKTHPDRVAADSPERAARTRKFQLVNDAYYTLSDATRRRDYDAQRKLFGGARPKPSSSANTNRPPPGSFTPDFDDEFDEEIPVGGDMPNTNNFYSWAWDFFTKGSSQNNAETQQERQQTEDAQFGDVFEEMLREEGMDEAQQQANKGKFWSLAGGAAGGVLGFIAANFPGAIAGMVAGNRFGAIRDARGKSVYAVFQELPQSERARLLAQLATRVFSHAVGV

SEQ ID NO: 31315 - DNA, 1169 bp, Muscodor strobelii
  misc_feature: SGI EST ID NO. CUFF.74152.0
  misc_feature: Variant of the nucleotide sequence at SEQ ID NO 31313
cgctaggtaggtgcgccacatctatgacgtgggctagtcaatgattccttgctgagatggactaaatgccatgagaagttcgagacaacagccttgtcttgcagatataatccttaagaacactcccttccttcctgcctaccttaagactctgcaactctcttttactgtatacctaaagcctttacgcgcgatttgtaaaccaagtcaaaatggccggcactggacctcctcccaactactatcgcatactcgaaatccccgagacagcaactacacagcaaatcagagatgcctacaaaaaagcagctctaaaaactcacccagaccgcgtcgcagccgactccccagaacgagccgcccgcacgcgcaaattccagctcgtaaacgacgcctactacacactctccgacgcaacccgcagacgagactacgatgcccagcggaagctcttcggcggcgcacgtcccaagccctcatcctccgcaaatacgaaccgtccaccacctggttcatttacgcccgacttcgacgacgaattcgacgaggaaatccccgtcggcggcgacatgcctaacacgaacaacttctacagctgggcatgggacttcttcaccaagggttcctcacagaacaacgcagagacgcaacaggagcggcagcagacggaagatgcgcagttcggagacgtgttcgaggagatgttgagggaggagggtatggacgaggcgcagcagcaggctaataagggcaagttttggagtcttgctggaggcgctgccgggggtgttttgggatttatcgcggctaatttccctggtgcgatcgcggggatggtggccgggaataggtttggggcgattagagatgcgagggggaagagtgtttatgctgtttttcaggagttgccgcagagtgagcgcgcgaggttgcttgcgcagttggctacgagggtttttagtcatgctgtgggtgtttaaggagtttgctgggcaggcattcctttcgtgctgggacagtctgtgggctaggaaacatatactgatgcgtggcgtttcggcttggtgtggacgggcaaggttggcttggggatccgacttgatttggtagatagatagtaattactgagcattttatgcgtaaattgtcttctttatgtgacaatcgcc

SEQ ID NO: 31316 - DNA, 717 bp, Muscodor strobelii
  misc_feature: SGI cDNA ID NO. 570779
  misc_feature: Encodes the peptide sequence at SEQ ID NO 31317
atgggcttctgggacggttggggcgacggcgcgtccgtcatctcgcgcaaatctcacaaatcctcatcgcataagtcctcctcgcacaagcacaagcgctccaagtcgcactcccgctcgccatcgcccagcaacaagcaccgcaagcatggccaccactcatcgtctggtctcggtgcgctcttcggcaccgacagccactacgagaagcacaacacctccaaaggctccttttttaatcttgggaaccatagtaccaggagtttcttcagcgtcggccgatcaccatcctactacaagcgctccccacgctccaacttcatgacccgcgcctacaagaagctgaagcgcctcctccgcgacctcgtctactacgccaagcgccaccccatgaaggtcttcatgctcgtcatcatgcccctcatcaccggcggcgctctcactgccctccttgcccgctttggcctgcgcctgccccagagcatgaccaggatgatgggcatcgccgccaagaccgcgagcggcgacggcatcggtcttgttggtgaagccgtgcgcatggctagcgggctcggtggcaatggcagcgcgagcattgagaggggttatgacaacggctattcgtatgagaagcgccgaacaaccgagttcgactacgggggacactcgggtggcggtggggggttccttggtggcttgggcaagatgttttcctaa

SEQ ID NO: 31317 - protein, 238 aa, Muscodor strobelii
  misc_feature: SGI Peptide ID NO. 570779
  misc_feature (62)..(216): NCBI GI: 39972855 Blast Desc: MGG_07722 [Magnaporthe grisea 70-15] gi|145012489|gb|EDJ97143.1| MGG_07722 [Magnaporthe grisea 70-15]
  misc_feature (1)..(201): NCBI GI: 256732644 Blast Desc: NECHADRAFT_79043 [Nectria haematococca mpVI 77-13-4]
  misc_feature (1)..(201): NCBI GI: 46125975 Blast Desc: FG07365.1 [Gibberella zeae PH-1]
  misc_feature (60)..(237): NCBI GI: 261356504 Blast Desc: conserved [Verticillium albo-atrum VaMs.102]
  misc_feature (66)..(216): NCBI GI: 171696302 Blast Desc: protein product [Podospora anserina] gi|170948393|emb|CAP60557.1| protein product [Podospora anserina]
  misc_feature (63)..(166): NCBI GI: 154308394 Blast Desc: BC1G_08257 [Botryotinia fuckeliana B05.10] gi|150852798|gb|EDN27990.1| BC1G_08257 [Botryotinia fuckeliana B05.10]
  misc_feature (70)..(166): NCBI GI: 156057757 Blast Desc: SS1G_04610 [Sclerotinia sclerotiorum 1980] gi|154702395|gb|EDO02134.1| SS1G_04610 [Sclerotinia sclerotiorum 1980]
  misc_feature (98)..(188): NCBI GI: 85119516 Blast Desc: NCU02519 [Neurospora crassa OR74A] gi|28927462|gb|EAA36414.1| [Neurospora crassa OR74A]
  misc_feature (77)..(162): NCBI GI: 119185155 Blast Desc: CIMG_07285 [Coccidioides immitis RS] gi|240106559|gb|EER24747.1| CPC735_000910 [Coccidioides posadasii C735 delta SOWgp]
  misc_feature (74)..(159): NCBI GI: 238844735 Blast Desc: conserved [Microsporum canis CBS 113480]
MGFWDGWGDGASVISRKSHKSSSHKSSSHKHKRSKSHSRSPSPSNKHRKHGHHSSSGLGALFGTDSHYEKHNTSKGSFFNLGNHSTRSFFSVGRSPSYYKRSPRSNFMTRAYKKLKRLLRDLVYYAKRHPMKVFMLVIMPLITGGALTALLARFGLRLPQSMTRMMGIAAKTASGDGIGLVGEAVRMASGLGGNGSASIERGYDNGYSYEKRRTTEFDYGGHSGGGGGFLGGLGKMFS

SEQ ID NO: 31318 - DNA, 4127 bp, Muscodor strobelii
  misc_feature: SGI EST ID NO. CUFF.74610.0
  misc_feature: Variant of the nucleotide sequence at SEQ ID NO 31316
cgcatggggccccatcggcggaagggtccggcaggggtctgagagggacaggagaaacgaccagccactcgaattgtcggtgaaaggccaggaggcttggggacggggcccagttcgcagcaggctgatatgttgtgcagcagctcacgatcctccgcataattcatcttttcttatcgtgggttattgtcggctggtggattgtgttgctgtgactcgcttttcaagttgtcgctgtcgatcgttgtcgcggtgcagcgttctccgtactcgacttcagttgttgggcatttgggcagctatctcacttctcaaagctcagttcgtacataaaagctatcgagcttcgcaattgtgtttaaaacatgggcttctgggacggttggggcgacggcgcgtccgtcatctcgcgcaaatctcacaaatcctcatcgcataagtcctcctcgcacaagcacaagcgctccaagtcgcactcccgctcgccatcgcccagcaacaagcaccgcaagcatggccaccactcatcgtctggtctcggtgcgctcttcggcaccgacagccactacgagaagcacaacacctccaaaggctccttttttaatcttgggaaccatagtaccaggagtttcttcagcgtcggccgatcaccatcctactacaagcgctccccacgctccaacttcatgacccgcgcctacaagaagctgaagcgcctcctccgcgacctcgtctactacgccaagcgccaccccatgaaggtcttcatgctcgtcatcatgcccctcatcaccggcggcgctctcactgccctccttgcccgctttggcctgcgcctgccccagagcatgaccaggatgatgggcatcgccgccaagaccgcgagcggcgacggcatcggtcttgttggtgaagccgtgcgcatggctagcgggctcggtggcaatggcagcgcgagcattgagaggggttatgacaacggctattcgtatgagaagcgccgaacaaccgagttcgactacgggggacactcgggtggcggtggggggttccttggtggcttgggcaagatgttttcctaagagtacgatatgcgactttggtaacgtgttaagggtcacggttctataccaccgatttaaggaaattttggacaagatttggcgtttggaggcttcactggtacccactgggttcgattcatgtcattcaatagagttgggacatttccccatgagtttggtacgacttgatcgatgagacatgctttgcacaacaattcagatacgtcataaatcaatgtgattatgatcaatcacgtaaatggaaaagaaaaataagaatgaaattaaaacccataggtctatcagcatttcagtattacacgggtatagatatgtatggtgcaatacccttcgcaatcttgaggttcgtttatttgcctttccgtctccgacctccagccttccgtttggcgggtgatgctgtgcccgatgtgctcttcttggcccttgagcgcccagtgttagactctggtgagccctctatgacaattacatcttcttgacttgcgttcctgatctgaaccccaccgcggccatcgctaccactatcatcctcagggggcgtctcttcgccgccataggcaagaccatcctcgtcgtaacctccagacgtccgccttgcagcttgagaacgcgtcatataaggtgctcgagggccctcggtctggaactgaaacggatcaaacggttgttgctgagaaggcggcgaatttctagggcgccaactttcttcatgcggaagtggtctgcgcgatgatatcgacgataccggtcttgacggattagaaacatattgatagtcgaaaggcgatgaagaaccttcgcgatcagaaggaggccggtgagaggatgatgtcgatgaccgaggacgtgtctgagaattatttggaggaggaaacaagcctgtcggcggaccaaggcgctcctgggctccgggctgccgaagatggcggaggatgtcgaggcaaggaatcattggagtaattcctcgggacgggaggagcatcaaattgggaaagcggaacggtgcatcgctgctccttttcctttcgttgtcgtcgctcgccactagcttttcgcgcattggcttctgcctcggcctgcagacgcttgcggcgccgctctaacgctgccagttcttccttgttcagccgtacatcttgcttacccttttgtttagcctttcgtatccgtgccagggccgactgtaccaaggcattttccacttccgcctgagcctcatcttccatgtccacttctgttgcctcggaatcgctctcatccgattcatcatctgaatgctgataatcatacctgcggcgcgagcgaccgccgctgcccatgtctatacccgtaaaccgaagttcgtcactgacgaaccgtttattacccgctgtgagcgccaaaccagcgccttgtgtatctgtatcatcactgtccagctcctcgacgactctttgtcttgattcccagaaattgctgtcgtcgtcaggcgcggcatacctcccctgaccgcgcctggatggtcttccccaagggggcgcaactttgggagctcgcggccgaccacctagaccgcctcccctgaaaaagcctcatcgataggcttgtccagcatggcagcgtggccgaagatgaccacgccgctggcaccaatcaaccacaggacggtggagaacgttggtgcaataagaaagatgaaaccgcatgtacagagcagaccggtgtacagctgagacgaggtggcatggaagctgccaatcgtcaagtcctggccattgagtcggccgaggaggaacaggccacccgcgaggaggacaatgtcgaagagtaggagcggggtggtgatcaaggcatagacgctgaggagcacaaagacagcgacatagttgctcgagaaagttgacaggttgtagttgacacgtgactgaacctcgccgaagttggcgggcttggagaagcgcttgaagtcgaggaactcgccaatgggcttcatgttggcgaagcgggtggagagcgaggtgttgcggaagccggagaaccgatcgccaatgttcaggcgtgacgtgagaacgtcgagggggatctgaatgcgggaagtcatggtgaatggcgatgagagacgtgcggtgcaatctctgtgtctggtctatggacggggtgcgacctattgagcgcggcggatgtagattctgagaagtctcgaagatgctggagaatgacctggctatcaagaaggttctgattaggatggtgtctgcgaaggtttgacggtggcccggctgtggagaaaggagtgaggcagttctaggttggtagttcctgaagacttacgtcgtatctccgaacaggggtaacaatgagcgcagatggctttgtcgtgcaaacccgacaattcgtcaaggagaggtgaattaaaagatccgaggatttctttggcagaaagaatgaatgcacagaagacgctgtgaaatctggatagagtgtagaagagacgggtgttgatgatgagttgagcagagagcgacaaaataattaaattttgccgaataggatgacgatcagcctctttttaccacgtcgctggctcgggcattagcgttgcgatgcttgggccaggcagacggataaagtgagggtcaagataaggtgtgaagggggtcggatctggccagggtggtcagagctgctttggtgctgtcggcgctgagactggactgctggcaattggcagacgcagacgcaagattgcagtgtgagagattgcgaagtctcgacgctaaccgggctgagcctgggaaattcccctgcccagtgcaaagtgtgttattttcgtaaatttcgtaattgtcttgcctctctcccccacaagacaaaatcggctgcctgtgaggcagaccacgagcgaggaaagaccgtcctctcctctcgcctctacctgctccttacaacacccgccatcgtgtggtgaaaggtgagtcaaaagcggtgagaagaaaaaaagaagaaaaggaaaaaagatcaagaaggaagagcagaggagcggcaggatctcttttcaac

SEQ ID NO: 31319 - DNA, 534 bp, Muscodor strobelii
  misc_feature: SGI cDNA ID NO. 570780
  misc_feature: Encodes the peptide sequence at SEQ ID NO 31320
atgacttcccgcattcagatccccctcgacgttctcacgtcacgcctgaacattggcgatcggttctccggcttccgcaacacctcgctctccacccgcttcgccaacatgaagcccattggcgagttcctcgacttcaagcgcttctccaagcccgccaacttcggcgaggttcagtcacgtgtcaactacaacctgtcaactttctcgagcaactatgtcgctgtctttgtgctcctcagcgtctatgccttgatcaccaccccgctcctactcttcgacattgtcctcctcgcgggtggcctgttcctcctcggccgactcaatggccaggacttgacgattggcagcttccatgccacctcgtctcagctgtacaccggtctgctctgtacatgcggtttcatctttcttattgcaccaacgttctccaccgtcctgtggttgattggtgccagcggcgtggtcatcttcggccacgctgccatgctggacaagcctatcgatgaggctttttcaggggaggcggtctag

SEQ ID NO: 31320 - protein, 177 aa, Muscodor strobelii
  misc_feature: SGI Peptide ID NO. 570780
  misc_feature (29)..(175): Pfam Id: PF03208 Pfam Desc: PRA1 family protein
  misc_feature (29)..(162): Pfam Id: PF03208 Pfam Desc: PRA1 family protein
  misc_feature (3)..(177): NCBI GI: 46124961 Blast Desc: FG06858.1 [Gibberella zeae PH-1]
  misc_feature (3)..(177): NCBI GI: 256733111 Blast Desc: [Nectria haematococca mpVI 77-13-4]
  misc_feature (3)..(177): NCBI GI: 261356506 Blast Desc: prenylated Rab acceptor 1 [Verticillium albo-atrum VaMs.102]
  misc_feature (3)..(177): NCBI GI: 164427906 Blast Desc: prenylated Rab acceptor 1 [Neurospora crassa OR74A] gi|157071931|gb|EDO65328.1| prenylated Rab acceptor 1 [Neurospora crassa OR74A]
  misc_feature (3)..(177): NCBI GI: 261201384 Blast Desc: COPII vesicles protein Yip3 [Ajellomyces dermatitidis SLH14081] gi|239592151|gb|EEQ74732.1| COPII vesicles protein Yip3 [Ajellomyces dermatitidis SLH14081]
  misc_feature (3)..(177): NCBI GI: 189193779 Blast Desc: prenylated Rab acceptor 1 [Pyrenophora tritici-repentis Pt-1C-BFP] gi|187978792|gb|EDU45418.1| prenylated Rab acceptor 1 [Pyrenophora tritici-repentis
  misc_feature (3)..(177): NCBI GI: 169601332 Blast Desc: SNOG_03530 [Phaeosphaeria nodorum SN15] gi|111067615|gb|EAT88735.1| SNOG_03530 [Phaeosphaeria nodorum SN15]
  misc_feature (3)..(177): NCBI GI: 225562291 Blast Desc: prenylated Rab acceptor 1 [Ajellomyces capsulatus G186AR] gi|240279193|gb|EER42698.1| prenylated Rab acceptor 1 [Ajellomyces capsulatus H143]
  misc_feature (3)..(177): NCBI GI: 226292420 Blast Desc: prenylated Rab acceptor 1 [Paracoccidioides brasiliensis Pb18]
  misc_feature (5)..(177): NCBI GI: 145255795 Blast Desc: An18g06440 [Aspergillus niger] gi|134084693|emb|CAK47312.1| protein product [Aspergillus niger]
MTSRIQIPLDVLTSRLNIGDRFSGFRNTSLSTRFANMKPIGEFLDFKRFSKPANFGEVQSRVNYNLSTFSSNYVAVFVLLSVYALITTPLLLFDIVLLAGGLFLLGRLNGQDLTIGSFHATSSQLYTGLLCTCGFIFLIAPTFSTVLWLIGASGVVIFGHAAMLDKPIDEAFSGEAV

SEQ ID NO: 31321 - DNA, 3368 bp, Muscodor strobelii
  misc_feature: SGI EST ID NO. CUFF.74611.1
  misc_feature: Variant of the nucleotide sequence at SEQ ID NO 31319
cctgccgctcctctgctcttccttcttgatcttttttccttttcttctttttttcttctcaccgcttttgactcacctttcaccacacgatggcgggtgttgtaaggagcaggtagaggcgagaggagaggacggtctttcctcgctcgtggtctgcctcacaggcagccgattttgtcttgtgggggagagaggcaagacaattacgaaatttacgaaaataacacactttgcactgggcaggggaatttcccaggctcagcccggttagcgtcgagacttcgcaatctctcacactgcaatcttgcgtctgcgtctgccaattgccagcagtccagtctcagcgccgacagcaccaaagcagctctgaccaccctggccagatccgacccccttcacaccttatcttgaccctcactttatccgtctgcctggcccaagcatcgcaacgctaatgcccgagccagcgacgtggtaaaaagaggctgatcgtcatcctattcggcaaaatttaattattttgtcgctctctgctcaactcatcatcaacacccgtctcttctacactctatccagatttcacagcgtcttctgtgcattcattctttctgccaaagaaatcctcggatcttttaattcacctctccttgacgaattgtcgggtttgcacgacaaagccatctgcgctcattgttacccctgttcggagatacgacccaggtcattctccagcatcttcgagacttctcagaatctacatccgccgcgctcaataggtcgcaccccgtccatagaccagacacagagattgcaccgcacgtctctcatcgccattcaccatgacttcccgcattcagatccccctcgacgttctcacgtcacgcctgaacattggcgatcggttctccggcttccgcaacacctcgctctccacccgcttcgccaacatgaagcccattggcgagttcctcgacttcaagcgcttctccaagcccgccaacttcggcgaggttcagtcacgtgtcaactacaacctgtcaactttctcgagcaactatgtcgctgtctttgtgctcctcagcgtctatgccttgatcaccaccccgctcctactcttcgacattgtcctcctcgcgggtggcctgttcctcctcggccgactcaatggccaggacttgacgattggcagcttccatgccacctcgtctcagctgtacaccggtctgctctgtacatgcggtttcatctttcttattgcaccaacgttctccaccgtcctgtggttgattggtgccagcggcgtggtcatcttcggccacgctgccatgctggacaagcctatcgatgaggctttttcaggggaggcggtctaggtggtcggccgcgagctcccaaagttgcgcccccttggggaagaccatccaggcgcggtcaggggaggtatgccgcgcctgacgacgacagcaatttctgggaatcaagacaaagagtcgtcgaggagctggacagtgatgatacagatacacaaggcgctggtttggcgctcacagcgggtaataaacggttcgtcagtgacgaacttcggtttacgggtatagacatgggcagcggcggtcgctcgcgccgcaggtatgattatcagcattcagatgatgaatcggatgagagcgattccgaggcaacagaagtggacatggaagatgaggctcaggcggaagtggaaaatgccttggtacagtcggccctggcacggatacgaaaggctaaacaaaagggtaagcaagatgtacggctgaacaaggaagaactggcagcgttagagcggcgccgcaagcgtctgcaggccgaggcagaagccaatgcgcgaaaagctagtggcgagcgacgacaacgaaaggaaaaggagcagcgatgcaccgttccgctttcccaatttgatgctcctcccgtcccgaggaattactccaatgattccttgcctcgacatcctccgccatcttcggcagcccggagcccaggagcgccttggtccgccgacaggcttgtttcctcctccaaataattctcagacacgtcctcggtcatcgacatcatcctctcaccggcctccttctgatcgcgaaggttcttcatcgcctttcgactatcaatatgtttctaatccgtcaagaccggtatcgtcgatatcatcgcgcagaccacttccgcatgaagaaagttggcgccctagaaattcgccgccttctcagcaacaaccgtttgatccgtttcagttccagaccgagggccctcgagcaccttatatgacgcgttctcaagctgcaaggcggacgtctggaggttacgacgaggatggtcttgcctatggcggcgaagagacgccccctgaggatgatagtggtagcgatggccgcggtggggttcagatcaggaacgcaagtcaagaagatgtaattgtcatagagggctcaccagagtctaacactgggcgctcaagggccaagaagagcacatcgggcacagcatcacccgccaaacggaaggctggaggtcggagacggaaaggcaaataaacgaacctcaagattgcgaagggtattgcaccatacatatctatacccgtgtaatactgaaatgctgatagacctatgggttttaatttcattcttatttttcttttccatttacgtgattgatcataatcacattgatttatgacgtatctgaattgttgtgcaaagcatgtctcatcgatcaagtcgtaccaaactcatggggaaatgtcccaactctattgaatgacatgaatcgaacccagtgggtaccagtgaagcctccaaacgccaaatcttgtccaaaatttccttaaatcggtggtatagaaccgtgacccttaacacgttaccaaagtcgcatatcgtactcttaggaaaacatcttgcccaagccaccaaggaaccccccaccgccacccgagtgtcccccgtagtcgaactcggttgttcggcgcttctcatacgaatagccgttgtcataacccctctcaatgctcgcgctgccattgccaccgagcccgctagccatgcgcacggcttcaccaacaagaccgatgccgtcgccgctcgcggtcttggcggcgatgcccatcatcctggtcatgctctggggcaggcgcaggccaaagcgggcaaggagggcagtgagagcgccgccggtgatgaggggcatgatgacgagcatgaagaccttcatggggtggcgcttggcgtagtagacgaggtcgcggaggaggcgcttcagcttcttgtaggcgcgggtcatgaagttggagcgtggggagcgcttgtagtaggatggtgatcggcctt

SEQ ID NO: 31322 - DNA, 1470 bp, Muscodor strobelii
  misc_feature: SGI cDNA ID NO. 570781
  misc_feature: Elevated expression when VOC is produced
  misc_feature: Encodes the peptide sequence at SEQ ID NO 31323
atgagcggctcaatcgctctagatttctctcaataccccatccctactcaggcttggattgacggtaaatatgtcgataccaagggtagtgagaagaagaccctcacttctgcagtgaacgatgaggtggtgacctctgatctgcagtgggccaccgctgaagacatcgatgttgctgttgctgctgcggagaagggtttcgaagcatggagcaaacttcctacgttcgcgagaagagatattatgcacaaatttgccagtatagttaaggagaacgcagctcagattcagtggtacgaagcagtattaatcggcaaggatcccgtagtcgccacttacgacataagagaagttgtcgagctcttcacatactacggtagtctcattgatcagtatcacggccaagttgccgcacctcaagaaaatggcacattagagtatatcctgcggcaaccatacggtgttgttgcagcgatcacaccgttcaatggccctcttttgacgctcgctatgaaagtcgcacccgcaattgctgctggcaatgccattgtcttgaaagctagcgagcaaaaccccctttcttcgctcttcgtcgccagcttgactagagccgctggattccccgacggactgatcaatgtctgcaccggtggcgctgatgtcggcaacgccgtttcttctcacatgaaaatccgtatgatcagcttcacaggtagtgtcaacgttggaaagctcatccaggtcgctgccgccaagtcaaatctcaaaaaggtcacgcttgaactcggtggcaagtctccgtgcatcgtattcccggacgccgatttggaagctgcctctaagggagctgcttctttcctggctctgaacggccaggcttgtgttgtcggcacgaggatgtacgtccacgaagactgtgcccaagagatgatattcagaatgaagggtattgccgagtatatgggttccactctgggatctgatccgcttgcaccgaccaccatgaccggccctctcgctactaagcgccaaaaggaggtcgttctcaagtacatcgaggagggcaagaacgaggccaccctgctgactggtggtgcgtctttcggagagaagggctgctacgtgcagccgaccattttcatcaaccccgcaaagaccgccaaggtcctgaacgaggagattttcggccctgttctgacgatcgttactttcaaggacgaggcggaagttttggagttggctaatgacagcgaactcggtctcggtgcctacgtctggacaaaggatcttggaagagctctgcgtctcacctccaagctccaggctggtacagtttgcgtcaactctgctcaggcaactgacaagtcgcggccattcggtggctggaagcagagcggtcaaggcgttgagaatggtacccacggtctggatgactggactcagaccaagagtgtcctgctccagttgtaa

SEQ ID NO: 31323 - protein, 489 aa, Muscodor strobelii
  misc_feature: SGI Peptide ID NO. 570781
  misc_feature (24)..(485): Pfam Id: PF00171 Pfam Desc: Aldehyde dehydrogenase family
  misc_feature (7)..(488): NCBI GI: 115387076 Blast Desc: ATEG_07393 [Aspergillus terreus NIH2624] gi|114191077|gb|EAU32777.1| ATEG_07393 [Aspergillus terreus NIH2624]
  misc_feature (10)..(488): NCBI GI: 256732225 Blast Desc: NECHADRAFT_80606 [Nectria haematococca mpVI 77-13-4]
  misc_feature (13)..(489): NCBI GI: 242820069 Blast Desc: aldehyde dehydrogenase, [Talaromyces stipitatus ATCC 10500] gi|218713907|gb|EED13331.1| aldehyde dehydrogenase, [Talaromyces stipitatus ATCC 10500]
  misc_feature (16)..(489): NCBI GI: 212538877 Blast Desc: aldehyde dehydrogenase, [Penicillium marneffei ATCC 18224] gi|210069336|gb|EEA23427.1| aldehyde dehydrogenase, [Penicillium marneffei ATCC 18224]
  misc_feature (9)..(489): NCBI GI: 46139039 Blast Desc: FG11034.1 [Gibberella zeae PH-1]
  misc_feature (5)..(489): NCBI GI: 189208560 Blast Desc: aldehyde dehydrogenase X, mitochondrial precursor [Pyrenophora tritici-repentis Pt-1C-BFP] gi|187976706|gb|EDU43332.1| aldehyde dehydrogenase X, precursor
  misc_feature (5)..(489): NCBI GI: 169613480 Blast Desc: SNOG_09871 [Phaeosphaeria nodorum SN15] gi|160702733|gb|EAT83136.2| SNOG_09871 [Phaeosphaeria nodorum SN15]
  misc_feature (15)..(489): NCBI GI: 196257790 Blast Desc: Aldehyde dehydrogenase (NAD(+)) [Cyanothece sp. PCC 7822] gi|196201390|gb|EDX96209.1| Aldehyde dehydrogenase (NAD(+)) [Cyanothece sp. PCC 7822]
  misc_feature (11)..(489): NCBI GI: 121699950 Blast Desc: aldehyde dehydrogenase [Aspergillus clavatus NRRL 1] gi|119396382|gb|EAW06814.1| aldehyde dehydrogenase [Aspergillus clavatus NRRL 1]
  misc_feature (15)..(489): NCBI GI: 218440679 Blast Desc: Aldehyde Dehydrogenase [Cyanothece sp. PCC 7424] gi|218173407|gb|ACK72140.1| Aldehyde Dehydrogenase [Cyanothece sp. PCC 7424]
  misc_feature (11)..(489): SWISSPROT Homolog: EC 1.2.1.3 Aldehyde dehydrogenase (NAD(+))
  misc_feature: Useful for introducing or modulating the production of volatile compounds
  misc_feature: Useful for fungicidal and/or biocontrol applications
MSGSIALDFSQYPIPTQAWIDGKYVDTKGSEKKTLTSAVNDEVVTSDLQWATAEDIDVAVAAAEKGFEAWSKLPTFARRDIMHKFASIVKENAAQIQWYEAVLIGKDPVVATYDIREVVELFTYYGSLIDQYHGQVAAPQENGTLEYILRQPYGVVAAITPFNGPLLTLAMKVAPAIAAGNAIVLKASEQNPLSSLFVASLTRAAGFPDGLINVCTGGADVGNAVSSHMKIRMISFTGSVNVGKLIQVAAAKSNLKKVTLELGGKSPCIVFPDADLEAASKGAASFLALNGQACVVGTRMYVHEDCAQEMIFRMKGIAEYMGSTLGSDPLAPTTMTGPLATKRQKEVVLKYIEEGKNEATLLTGGASFGEKGCYVQPTIFINPAKTAKVLNEEIFGPVLTIVTFKDEAEVLELANDSELGLGAYVWTKDLGRALRLTSKLQAGTVCVNSAQATDKSRPFGGWKQSGQGVENGTHGLDDWTQTKSVLLQL

SEQ ID NO: 31324 - DNA, 1938 bp, Muscodor strobelii
  misc_feature: SGI EST ID NO. CUFF.74143.0
  misc_feature: Variant of the nucleotide sequence at SEQ ID NO 31322
gtggtttcaccgccgctggttgcatgaccacagtagtgggagccgttgatatgtagtgcaaactgtgattcgtattagtaaggtcgtttcatccctttctttaagatctgttctttcgtgcgtacatcgtgcatgtatgcaacttaaactgctactctattcgaacgttcttcccaacctattcccttgattctctcatccagtcctatatcgaaaccttgttaagcgagacaatcccagttcgtcaacatgagcggctcaatcgctctagatttctctcaataccccatccctactcaggcttggattgacggtaaatatgtcgataccaagggtagtgagaagaagaccctcacttctgcagtgaacgatgaggtggtgacctctgatctgcagtgggccaccgctgaagacatcgatgttgctgttgctgctgcggagaagggtttcgaagcatggagcaaacttcctacgttcgcgagaagagatattatgcacaaatttgccagtatagttaaggagaacgcagctcagattcagtggtacgaagcagtattaatcggcaaggatcccgtagtcgccacttacgacataagagaagttgtcgagctcttcacatactacggtagtctcattgatcagtatcacggccaagttgccgcacctcaagaaaatggcacattagagtatatcctgcggcaaccatacggtgttgttgcagcgatcacaccgttcaatggccctcttttgacgctcgctatgaaagtcgcacccgcaattgctgctggcaatgccattgtcttgaaagctagcgagcaaaaccccctttcttcgctcttcgtcgccagcttgactagagccgctggattccccgacggactgatcaatgtctgcaccggtggcgctgatgtcggcaacgccgtttcttctcacatgaaaatccgtatgatcagcttcacaggtagtgtcaacgttggaaagctcatccaggtcgctgccgccaagtcaaatctcaaaaaggtcacgcttgaactcggtggcaagtctccgtgcatcgtattcccggacgccgatttggaagctgcctctaagggagctgcttctttcctggctctgaacggccaggcttgtgttgtcggcacgaggatgtacgtccacgaagactgtgcccaagagatgatattcagaatgaagggtattgccgagtatatgggttccactctgggatctgatccgcttgcaccgaccaccatgaccggccctctcgctactaagcgccaaaaggaggtcgttctcaagtacatcgaggagggcaagaacgaggccaccctgctgactggtggtgcgtctttcggagagaagggctgctacgtgcagccgaccattttcatcaaccccgcaaagaccgccaaggtcctgaacgaggagattttcggccctgttctgacgatcgttactttcaaggacgaggcggaagttttggagttggctaatgacagcgaactcggtctcggtgcctacgtctggacaaaggatcttggaagagctctgcgtctcacctccaagctccaggctggtacagtttgcgtcaactctgctcaggcaactgacaagtcgcggccattcggtggctggaagcagagcggtcaaggcgttgagaatggtacccacggtctggatgactggactcagaccaagagtgtcctgctccagttgtaatcggcggatgttaatgcatgggataatgagttatgtgactataaaaagactgagtgacatcttgaaacaagaagcgacattcaaaatcaaaatgaaataacatgaacaaaaacctcttctctatatgaagtgtttacggctgggtgaaatcagcatcctccgatggtgtgaatgttcgccttatcataccgcgatatggacatacctactggattgtct

SEQ ID NO: 31325 - DNA, 1194 bp, Muscodor strobelii
  misc_feature: SGI cDNA ID NO. 570782
  misc_feature: Encodes the peptide sequence at SEQ ID NO 31326
atgtcgacttttgactcagaaattccgattgcgctaattgagcagctgaaggacctcactgcgcagctatcttcacaagatgcgaatgcgaggaaacaggctttgcagctgagcaacaagcttacaaggagcctggaacagccagaaactgctgctgtcgagcttagcttttctagtgtgattcccgtatttgctagagtaggcgttgaactgggcctattcaagcatattagtgaacatgatggaccagttgatgcggaagaacttgcaaagttaacgggcggggaggagcttctcatcatgcgaatcttgagagcaatgtcctcaattggcttcgtaaaagaggtcgacgagatgaagtgggaggctaatcccgtcacaagagcaatggcgacggatggtatcgcggctggtcaccggatgctgggagacacgaccgtcttgcgcgcagcggtagcagcacctaaatacttcagggaggccgggtacacttgtccaacgaaccctaaggatggactgatgcagtatgcatttcagtcgaaactatcgtcgttcgacctgctcgcttctatgcctgatgtcgtgcacgacttcaatacattcatgggaaataccatgggagcccgagagtactggacagactggtatccagtccaagaacggcttctcgatggtgcgtcttctgactcagctcttctcgtcgatgtcggcggcggtaagggccacgatattgttgcctttcacgacaagtatcccggcaagggtcgtctagtgctcgaggacctgggggccgttacgaatagcatcggatcaacactccacccagccatcgaggttctacaatacgacttcttcacggagcagcccatccatggagcacgcgcgtactttttccatcacatactccacgattggtcagatgcagtatgtctagatatactgaagcacgttaccaaggccatgaaaccggggtactctaagctactacttcatgagatgataatccccgcgcagaacgcaagcccgtttcatgctatgcttgacttgagcatgatggcttttaatggcgggatggaacggacggagagacaatggaatgagttgcttgctaaggcgggcttggaagtcgtcaagatatggccaccgatgcaggaagatgctgatggaattgttgaggcaatgcttaaggcgtag

SEQ ID NO: 31326 - protein, 397 aa, Muscodor strobelii
  misc_feature: SGI Peptide ID NO. 570782
  misc_feature (115)..(370): Pfam Id: PF00891 Pfam Desc: O-methyltransferase
  misc_feature (292)..(370): Pfam Id: PF00891 Pfam Desc: O-methyltransferase
  misc_feature (10)..(394): NCBI GI: 225563381 Blast Desc: conserved [Ajellomyces capsulatus G186AR]
  misc_feature (10)..(394): NCBI GI: 240275980 Blast Desc: sterigmatocystin 8-O-methyltransferase [Ajellomyces capsulatus H143]
  misc_feature (10)..(394): NCBI GI: 154282013 Blast Desc: conserved [Ajellomyces capsulatus NAm1] gi|150411998|gb|EDN07386.1| conserved [Ajellomyces capsulatus NAm1]
  misc_feature (9)..(394): NCBI GI: 238845342 Blast Desc: o-methyltransferase [Microsporum canis CBS 113480]
  misc_feature (6)..(394): NCBI GI: 242817104 Blast Desc: O-methyltransferase, [Talaromyces stipitatus ATCC 10500] gi|218713350|gb|EED12774.1| O-methyltransferase, [Talaromyces stipitatus ATCC 10500]
  misc_feature (60)..(394): NCBI GI: 242817109 Blast Desc: O-methyltransferase, [Talaromyces stipitatus ATCC 10500] gi|218713351|gb|EED12775.1| O-methyltransferase, [Talaromyces stipitatus ATCC 10500]
  misc_feature (12)..(396): NCBI GI: 154290205 Blast Desc: BC1G_15779 [Botryotinia fuckeliana B05.10] gi|150847835|gb|EDN23028.1| BC1G_15779 [Botryotinia fuckeliana B05.10]
  misc_feature (60)..(393): NCBI GI: 67904492 Blast Desc: AN9233.2 [Aspergillus nidulans FGSC A4] gi|40742334|gb|EAA61524.1| AN9233.2 [Aspergillus nidulans FGSC A4] gi|259485331|tpe|CBF82267.1| TPA: conserved [Aspergillus FGSC
  misc_feature (24)..(396): NCBI GI: 145249736 Blast Desc: An14g05840 [Aspergillus niger] gi|134081890|emb|CAK42145.1| protein product [Aspergillus niger]
  misc_feature (24)..(396): NCBI GI: 242789147 Blast Desc: O-methyltransferase, [Talaromyces stipitatus ATCC 10500] gi|218717890|gb|EED17310.1| O-methyltransferase, [Talaromyces stipitatus ATCC 10500]
  misc_feature (68)..(380): SWISSPROT Homolog: EC 2.1.1.110 Sterigmatocystin 8-O-methyltransferase
MSTFDSEIPIALIEQLKDLTAQLSSQDANARKQALQLSNKLTRSLEQPETAAVELSFSSVIPVFARVGVELGLFKHISEHDGPVDAEELAKLTGGEELLIMRILRAMSSIGFVKEVDEMKWEANPVTRAMATDGIAAGHRMLGDTTVLRAAVAAPKYFREAGYTCPTNPKDGLMQYAFQSKLSSFDLLASMPDVVHDFNTFMGNTMGAREYWTDWYPVQERLLDGASSDSALLVDVGGGKGHDIVAFHDKYPGKGRLVLEDLGAVTNSIGSTLHPAIEVLQYDFFTEQPIHGARAYFFHHILHDWSDAVCLDILKHVTKAMKPGYSKLLLHEMIIPAQNASPFHAMLDLSMMAFNGGMERTERQWNELLAKAGLEVVKIWPPMQEDADGIVEAMLKA

SEQ ID NO: 31327 - DNA, 1846 bp, Muscodor strobelii
  misc_feature: SGI EST ID NO. CUFF.74128.0
  misc_feature: Variant of the nucleotide sequence at SEQ ID NO 31325
tggagttgagtgctgtgcgagccaagcctgtaagggacaagcggctataggatctctatccaacaatgcatggcgccgcatagtacagctattggaacgaggacaatttagtagcttctgcaaaagcaaatctggcaggcaatcattcggttatgcatccgacatatatcctcgtggtagagactggtgtaccaactgtcaggtgagtgaagaaaatagcgatacatcgtgactgcctctgcagcgaaacttagtatgacgttgtatcactattttcgtgattcacctcgactgtgtaggtatataagttgcctgccccaacgagggagagcgttcataacattcccttgcgccctaaattcatccttcggccgtatcctgactcgtatgataagatgtcgacttttgactcagaaattccgattgcgctaattgagcagctgaaggacctcactgcgcagctatcttcacaagatgcgaatgcgaggaaacaggctttgcagctgagcaacaagcttacaaggagcctggaacagccagaaactgctgctgtcgagcttagcttttctagtgtgattcccgtatttgctagagtaggcgttgaactgggcctattcaagcatattagtgaacatgatggaccagttgatgcggaagaacttgcaaagttaacgggcggggaggagcttctcatcatgcgaatcttgagagcaatgtcctcaattggcttcgtaaaagaggtcgacgagatgaagtgggaggctaatcccgtcacaagagcaatggcgacggatggtatcgcggctggtcaccggatgctgggagacacgaccgtcttgcgcgcagcggtagcagcacctaaatacttcagggaggccgggtacacttgtccaacgaaccctaaggatggactgatgcagtatgcatttcagtcgaaactatcgtcgttcgacctgctcgcttctatgcctgatgtcgtgcacgacttcaatacattcatgggaaataccatgggagcccgagagtactggacagactggtatccagtccaagaacggcttctcgatggtgcgtcttctgactcagctcttctcgtcgatgtcggcggcggtaagggccacgatattgttgcctttcacgacaagtatcccggcaagggtcgtctagtgctcgaggacctgggggccgttacgaatagcatcggatcaacactccacccagccatcgaggttctacaatacgacttcttcacggagcagcccatccatggagcacgcgcgtactttttccatcacatactccacgattggtcagatgcagtatgtctagatatactgaagcacgttaccaaggccatgaaaccggggtactctaagctactacttcatgagatgataatccccgcgcagaacgcaagcccgtttcatgctatgcttgacttgagcatgatggcttttaatggcgggatggaacggacggagagacaatggaatgagttgcttgctaaggcgggcttggaagtcgtcaagatatggccaccgatgcaggaagatgctgatggaattgttgaggcaatgcttaaggcgtaggctgtttctgtgtacggagtagagttactgagtctttattaaggataaacactagatcatacaacttcggagctgaggttccattgaactctcgaatatctacttatacttgagtccagcattgcaagtctagcattactgcgtaaggttccggcgaagacgacctgatgtcaatcttcgcattcacacacctaattagtgccaataattctacctatagaaccttttggcgggctgcagtgtttataaaacacgat

SEQ ID NO: 31328 - DNA, 624 bp, Muscodor strobelii
  misc_feature: SGI cDNA ID NO. 570783
  misc_feature: Encodes the peptide sequence at SEQ ID NO 31329
atgcctgatgtcgtgcacgacttcaatacattcatgggaaataccatgggagcccgagagtactggacagactggtatccagtccaagaacggcttctcgatggtgcgtcttctgactcagctcttctcgtcgatgtcggcggcggtaagggccacgatattgttgcctttcacgacaagtatcccggcaagggtcgtctagtgctcgaggacctgggggccgttacgaatagcatcggatcaacactccacccagccatcgaggttctacaatacgacttcttcacggagcagcccatccatggagcacgcgcgtactttttccatcacatactccacgattggtcagatgcagtatgtctagatatactgaagcacgttaccaaggccatgaaaccggggtactctaagctactacttcatgagatgataatccccgcgcagaacgcaagcccgtttcatgctatgcttgacttgagcatgatggcttttaatggcgggatggaacggacggagagacaatggaatgagttgcttgctaaggcgggcttggaagtcgtcaagatatggccaccgatgcaggaagatgctgatggaattgttgaggcaatgcttaaggcgtag

SEQ ID NO: 31329 - protein, 207 aa, Muscodor strobelii
  misc_feature: SGI Peptide ID NO. 570783
  misc_feature (1)..(180): Pfam Id: PF00891 Pfam Desc: O-methyltransferase
  misc_feature (102)..(180): Pfam Id: PF00891 Pfam Desc: O-methyltransferase
  misc_feature (1)..(204): NCBI GI: 238845342 Blast Desc: o-methyltransferase [Microsporum canis CBS 113480]
  misc_feature (2)..(204): NCBI GI: 225563381 Blast Desc: conserved [Ajellomyces capsulatus G186AR]
  misc_feature (2)..(204): NCBI GI: 240275980 Blast Desc: sterigmatocystin 8-O-methyltransferase [Ajellomyces capsulatus H143]
  misc_feature (2)..(204): NCBI GI: 154282013 Blast Desc: conserved [Ajellomyces capsulatus NAm1] gi|150411998|gb|EDN07386.1| conserved [Ajellomyces capsulatus NAm1]
  misc_feature (2)..(204): NCBI GI: 242817104 Blast Desc: O-methyltransferase, [Talaromyces stipitatus ATCC 10500] gi|218713350|gb|EED12774.1| O-methyltransferase, [Talaromyces stipitatus ATCC 10500]
  misc_feature (2)..(204): NCBI GI: 242817109 Blast Desc: O-methyltransferase, [Talaromyces stipitatus ATCC 10500] gi|218713351|gb|EED12775.1| O-methyltransferase, [Talaromyces stipitatus ATCC 10500]
  misc_feature (2)..(203): NCBI GI: 67904492 Blast Desc: AN9233.2 [Aspergillus nidulans FGSC A4] gi|40742334|gb|EAA61524.1| AN9233.2 [Aspergillus nidulans FGSC A4] gi|259485331|tpe|CBF82267.1| TPA: conserved [Aspergillus FGSC
  misc_feature (1)..(206): NCBI GI: 154290205 Blast Desc: BC1G_15779 [Botryotinia fuckeliana B05.10] gi|150847835|gb|EDN23028.1| BC1G_15779 [Botryotinia fuckeliana B05.10]
  misc_feature (3)..(206): NCBI GI: 242789147 Blast Desc: O-methyltransferase, [Talaromyces stipitatus ATCC 10500] gi|218717890|gb|EED17310.1| O-methyltransferase, [Talaromyces stipitatus ATCC 10500]
  misc_feature (2)..(206): NCBI GI: 212526064 Blast Desc: O-methyltransferase [Penicillium marneffei ATCC 18224] gi|210072587|gb|EEA26674.1| O-methyltransferase [Penicillium marneffei ATCC 18224]
  misc_feature (44)..(190): SWISSPROT Homolog: EC 2.1.1.110 Sterigmatocystin 8-O-methyltransferase
MPDVVHDFNTFMGNTMGAREYWTDWYPVQERLLDGASSDSALLVDVGGGKGHDIVAFHDKYPGKGRLVLEDLGAVTNSIGSTLHPAIEVLQYDFFTEQPIHGARAYFFHHILHDWSDAVCLDILKHVTKAMKPGYSKLLLHEMIIPAQNASPFHAMLDLSMMAFNGGMERTERQWNELLAKAGLEVVKIWPPMQEDADGIVEAMLKA

SEQ ID NO: 31330 - DNA, 1846 bp, Muscodor strobelii; identical to SEQ ID NO: 31327
  misc_feature: SGI EST ID NO. CUFF.74128.0
  misc_feature: Variant of the nucleotide sequence at SEQ ID NO 31328

SEQ ID NO: 31331 - DNA, 4740 bp, Muscodor strobelii
  misc_feature: SGI cDNA ID NO. 570784
  misc_feature: Encodes the peptide sequence at SEQ ID NO 31332
atgaagggccaggtgtttgtgcgccagactctggcacttacgaagaagaacctggtcgtcgctgtcaaacgcaaatggttctcgacactattgcgatctttgatacttcctatcgctttgattgtcctcctcctcgagatccagaatttttcgaaagaccagaacaaatacggatacggtagcatcaaccaaataaggagtctttctgatacaatacacggctcgaagtcccttgttctcgtccacaattccactcttggacccgatttcgccccctttcttgagcgattgaagcccaagatcggcaaagcaaaggtcatcgaactcacaactgagaaggatatagacgccaattgtcccgtcgactaccatggatactccccatgtcatgctgttgtactctttaacgactcgcctcgaagtggtagagtcaacgctacttggaaatatgacatccggatcgatcctgcgttggagagctgggccttcgatgtctacaaccaaggcagcaccgcccaatccatcgtcctaccactacaagaagcaatagaaactgccatgggaaacttcactggcaactcagatatccaagctttcactccttacacccaaaaagaagccgacgaccaatcaagaaagagttttcaagttttagccttgtacattttgtcgttcgcctttttcattagcatggttccagttgcgcaacatgcctcaagtatgatgtccttcgaacgcgaactgggtgtctcgcagcttatcgatgcgatgggtggaaacgggacttcatgggcacgagtgatgagctacgtcatcacgtttgacatcttatacctaccgttatggattattctcggagcaatcttctggcatctcttgcttccaggccaaaacgcggcgattgttatcttctggcaaatctttacaggatggtctgttacaagcgcagcagtattcggtgcaagcttcttcaagaagcaagcgttcggctctctctggggcacgttgatacccgttctacttgctgtcattgctgcctataccgagaacactatcacccctccttcagtcggtcaggtcattgtgttaagcctgttgttccccagtatcaactatgtcgctttcttcagtcttattaccaaggccgaaatcatcgacacaaagcttgatcttggccaggttctagacgatgctaaaatcagagataccggaatatccctctccggtcagcatggcgctaagaactgggtgagcgtgataccaggagctgctctttgggtaattctcattttgcaaatcatcgttttccctttgctcgcggtacttgtcgagaagattctttacgccaacaatcgcaaagggagagatttcaaaacagaccccgaggcggaaaagtcacaagtcgccatagagactactggattaggcaaaacatactacccgtcctggttcaagaagttcttttgctgtgctcgagcaccgaaagccaaagccgtggatgaacttaacctctcgagttatcgaaaccagattttatgtcttttaggcccaaatggatcaggcaaaaccacaaccctcgatatgcttagtggcttccagaagcccaccgatggctcaattgtcatcaatgcaccttcctcatccattggcgtgtgtcctcagaagaacgtcctctgggatagcctcactgtttttgagcacctgtctatgtggaatgctgtgaagggaaatcgagagaccccagatagcctcgaggagctgattgcaaaatgcgatctggtcaagaagaagaacaacctagtctcaagtctaagcggtggcatgaagcgcaagctccaactcgcttgtatgcttgtcggcggctcgactgtatgttttgcagatgaagttacatcaggcttggatcctctgtctagaagagtgatttggaatgtgatcctgagcgagagagcccagaggactatggttctgacgactcattttctcgacgaatcagaagttttatctgatcacattgtgatcatcacactaggcaagatgaagtgccaaggcacgcctgctgagctcaagtctagattcggcggcggatatcgtgtgcatatccccaagactgaacagattggagacatacaatacccagtggtcgagcaacgtgatcggtacatctgccggacaccggactcgtcgtctgcggctcgcgttcttgcatctctgaagacttcaaaggattctgagttgtacatcaccggtccgactattgaggatgtgttcctcaaagtcgcggaagagccccatgctctcatcggggaatcagcagaggaaatctcttctgttgactctgtggtctccgcaccagaaagaaaagcacaggaatcagcacccagtacgataaaattctacgctaggcagatccgtgctctcttcctcaaaagaatatacttattacgatcattgtggtgggcatatattttcgccctcgcaatcccaatcgttgtctcgcacttccttggtcctttcctgaaagactacgtaacgccagactgtgatgatcttgtgggcagagccccttatccatatgcagttcagctctatactctgcagaacgtcgcgctgggacccctttctcttaacaaaacggcaactaatattgtcaaagcccaaaatgatggccagatctacagctattatgatgagtatgatgaagcaacaggtccattcatacaaaacagccgagatgcactagaagattttatccatgttcatggtgagaatattagctattctggcgggttgtgggctccgaacgacagcactcctttgatcacatatgatgctaggaacgcacaaaaatcctcgatattgttgaatttggcaaatcaagctcgtagcggtgtaaggattgatgtctcttcctcctacctcacgaagtacacccgtgcggacggcggcaacagcgtcatttatgtcacacttttctgtctagtgcaagccctataccctgctttcttcgccttatatccgacatatgagcgccgttcacaagtacgagcactacagtactcaaatggcattcgaccactgcctttgctgctttcgtactggatgttcgactttgccttcgtcctcatcatctcgatcgtttgtacagcgataatatcttcccaagcctcttggtttggtataggatacatcttcctctcccaggcactttacggcctcgctgctaccctcgtggcatacctggtctctttgatcgccaggtcgcagccatccgcgttcgcattttcagtgttgatcatggcggtcatgtacgtgatatcgatagtggtcgtcctggtccttaacttggatacaggaaaccctcagagaactcttgacggcacagcttatgggctgggcgtgattttcccaattcagaatcttctgcgagcgtactccgtggggttgaacacattcattgtgcgctgtcgtggactcacgaaggtcaccgatccagggtcaatctacgcacatggcggtccaattctgctcctgattatacagaacatctggctctttgtcttgttactatggctggaagggggcaagctcacattccgaaaacccaaggtggtgcaagaagacaatgagaagttcgcactctcgggacgcccagatgtggatgccgagacttctcgtgtcatggcctcgaagtccgatctactccgtgttcaacatctctccaagagctttggctcctataatgctgttgacgatgtgtcactaggactccaagaaggcgagattctcgcgcttctgggaccgaatggggccgggaagacgacgaccatcaacatgattagaggtgatatgacaccatcgagcgggaaggtctatctccaggatgtcgatgtccataaagacacccgcctcgcgcagaagcaccttggcttatgtccacaattcgacgctctcgacctcctcactgtccgtgaacacctggtcttctatgcgcgatgcaaaggtgtatcagacataaaagcagacgtcgcctacgtaatgagcaaggtcggcatcacagcacacgccgacaagctcgccgcgaagctctcgggtggcaacaagcgcaagctaagtctcgcaatcgcactcgtcggtaacccgcctgtgcttgttctagatgagccaagctctgccatggacgctgccagtaaacgagtactttggaagacactgcaggctgttgctccgggtcgctcggttctcattactacgcattcgatggaagaggccgatgcactggctactcgtgctgctattattgcgaagagacttcttgctatcggtactaccgaggcactgcgaaagacgcatagcaatgagtaccatgttcaccttattttgaagagtgcgcccttgtctacgtctgaagagatgcgcgaggttgccttctgggttaatagctcgttcccgaatgtaagattcgagggcgaaaatcttggtggccaggtccgattcatcgtccctgcggatagccaggtcccgactcaggataccggcacaaagggtgatgaggtgagagcatcgcagagcttcacgcgatacttgattgagactcttgaggcaagaaaagacagtcttggactggactgctactctatttctgcagcgaccatggagagcgtcttcctgactgttgttaaggagagcgatgctgatgaagatgagcggattgagaagaagaaaccttggtggagatag

SEQ ID NO: 31332 - protein, 1579 aa, Muscodor strobelii
  misc_feature: SGI Peptide ID NO. 570784
  misc_feature (1260)..(1437): Pfam Id: PF00005 Pfam Desc: ABC transporter
  misc_feature (509)..(678): Pfam Id: PF00005 Pfam Desc: ABC transporter
  misc_feature (4)..(1577): NCBI GI: 256734425 Blast Desc: NECHADRAFT_31723 [Nectria haematococca mpVI 77-13-4]
  misc_feature (6)..(1579): NCBI GI: 171695174 Blast Desc: protein product [Podospora anserina] gi|170947829|emb|CAP59993.1| protein product [Podospora anserina]
  misc_feature (4)..(1576): NCBI GI: 261360611 Blast Desc: ATP-binding cassette sub-family A member 9 [Verticillium albo-atrum VaMs.102]
  misc_feature (34)..(1579): NCBI GI: 145605337 Blast Desc: MGG_09941 [Magnaporthe grisea 70-15] gi|145013156|gb|EDJ97797.1| MGG_09941 [Magnaporthe grisea 70-15]
  misc_feature (4)..(1569): NCBI GI: 119479425 Blast Desc: ABC transporter, [Neosartorya fischeri NRRL 181] gi|119407895|gb|EAW17844.1| ABC transporter, [Neosartorya fischeri NRRL 181]
  misc_feature (6)..(1575): NCBI GI: 156039868 Blast Desc: SS1G_12070 [Sclerotinia sclerotiorum 1980] gi|154696127|gb|EDN95865.1| SS1G_12070 [Sclerotinia sclerotiorum 1980]
  misc_feature (4)..(1569): NCBI GI: 70997918 Blast Desc: ABC transporter [Aspergillus fumigatus Af293] gi|66851327|gb|EAL91653.1| ABC transporter, [Aspergillus fumigatus Af293] gi|159126576|gb|EDP51692.1| ABC transporter,
  misc_feature (5)..(1569): NCBI GI: 121712992 Blast Desc: ABC transporter, [Aspergillus clavatus NRRL 1] gi|119402260|gb|EAW12681.1| ABC transporter, [Aspergillus clavatus NRRL 1]
  misc_feature (6)..(1568): NCBI GI: 238844264 Blast Desc: ATP-binding cassette sub-family A member 7 [Microsporum canis CBS 113480]
  misc_feature (2)..(1571): NCBI GI: 119183361 Blast Desc: CIMG_06624 [Coccidioides immitis RS]
MKGQVFVRQTLALTKKNLVVAVKRKWFSTLLRSLILPIALIVLLLEIQNFSKDQNKYGYGSINQIRSLSDTIHGSKSLVLVHNSTLGPDFAPFLERLKPKIGKAKVIELTTEKDIDANCPVDYHGYSPCHAVVLFNDSPRSGRVNATWKYDIRIDPALESWAFDVYNQGSTAQSIVLPLQEAIETAMGNFTGNSDIQAFTPYTQKEADDQSRKSFQVLALYILSFAFFISMVPVAQHASSMMSFERELGVSQLIDAMGGNGTSWARVMSYVITFDILYLPLWIILGAIFWHLLLPGQNAAIVIFWQIFTGWSVTSAAVFGASFFKKQAFGSLWGTLIPVLLAVIAAYTENTITPPSVGQVIVLSLLFPSINYVAFFSLITKAEIIDTKLDLGQVLDDAKIRDTGISLSGQHGAKNWVSVIPGAALWVILILQIIVFPLLAVLVEKILYANNRKGRDFKTDPEAEKSQVAIETTGLGKTYYPSWFKKFFCCARAPKAKAVDELNLSSYRNQILCLLGPNGSGKTTTLDMLSGFQKPTDGSIVINAPSSSIGVCPQKNVLWDSLTVFEHLSMWNAVKGNRETPDSLEELIAKCDLVKKKNNLVSSLSGGMKRKLQLACMLVGGSTVCFADEVTSGLDPLSRRVIWNVILSERAQRTMVLTTHFLDESEVLSDHIVIITLGKMKCQGTPAELKSRFGGGYRVHIPKTEQIGDIQYPVVEQRDRYICRTPDSSSAARVLASLKTSKDSELYITGPTIEDVFLKVAEEPHALIGESAEEISSVDSVVSAPERKAQESAPSTIKFYARQIRALFLKRIYLLRSLWWAYIFALAIPIVVSHFLGPFLKDYVTPDCDDLVGRAPYPYAVQLYTLQNVALGPLSLNKTATNIVKAQNDGQIYSYYDEYDEATGPFIQNSRDALEDFIHVHGENISYSGGLWAPNDSTPLITYDARNAQKSSILLNLANQARSGVRIDVSSSYLTKYTRADGGNSVIYVTLFCLVQALYPAFFALYPTYERRSQVRALQYSNGIRPLPLLLSYWMFDFAFVLIISIVCTAIISSQASWFGIGYIFLSQALYGLAATLVAYLVSLIARSQPSAFAFSVLIMAVMYVISIVVVLVLNLDTGNPQRTLDGTAYGLGVIFPIQNLLRAYSVGLNTFIVRCRGLTKVTDPGSIYAHGGPILLLIIQNIWLFVLLLWLEGGKLTFRKPKVVQEDNEKFALSGRPDVDAETSRVMASKSDLLRVQHLSKSFGSYNAVDDVSLGLQEGEILALLGPNGAGKTTTINMIRGDMTPSSGKVYLQDVDVHKDTRLAQKHLGLCPQFDALDLLTVREHLVFYARCKGVSDIKADVAYVMSKVGITAHADKLAAKLSGGNKRKLSLAIALVGNPPVLVLDEPSSAMDAASKRVLWKTLQAVAPGRSVLITTHSMEEADALATRAAIIAKRLLAIGTTEALRKTHSNEYHVHLILKSAPLSTSEEMREVAFWVNSSFPNVRFEGENLGGQVRFIVPADSQVPTQDTGTKGDEVRASQSFTRYLIETLEARKDSLGLDCYSISAATMESVFLTVVKESDADEDERIEKKKPWWR

SEQ ID NO: 31333 - DNA, 4265 bp, Muscodor strobelii
  misc_feature: SGI EST ID NO. CUFF.74140.0
  misc_feature: Variant of the nucleotide sequence at SEQ ID NO 31331
caagttttagccttgtacattttgtcgttcgcctttttcattagcatggttccagttgcgcaacatgcctcaagtatgatgtccttcgaacgcgaactgggtgtctcgcagcttatcgatgcgatgggtggaaacgggacttcatgggcacgagtgatgagctacgtcatcacgtttgacatcttatacctaccgttatggattattctcggagcaatcttctggcatctcttgcttccaggccaaaacgcggcgattgttatcttctggcaaatctttacaggatggtctgttacaagcgcagcagtattcggtgcaagcttcttcaagaagcaagcgttcggctctctctggggcacgttgatacccgttctacttgctgtcattgctgcctataccgagaacactatcacccctccttcagtcggtcaggtcattgtgttaagcctgttgttccccagtatcaactatgtcgctttcttcagtcttattaccaaggccgaaatcatcgacacaaagcttgatcttggccaggttctagacgatgctaaaatcagagataccggaatatccctctccggtcagcatggcgctaagaactgggtgagcgtgataccaggagctgctctttgggtaattctcattttgcaaatcatcgttttccctttgctcgcggtacttgtcgagaagattctttacgccaacaatcgcaaagggagagatttcaaaacagaccccgaggcggaaaagtcacaagtcgccatagagactactggattaggcaaaacatactacccgtcctggttcaagaagttcttttgctgtgctcgagcaccgaaagccaaagccgtggatgaacttaacctctcgagttatcgaaaccagattttatgtcttttaggcccaaatggatcaggcaaaaccacaaccctcgatatgcttagtggcttccagaagcccaccgatggctcaattgtcatcaatgcaccttcctcatccattggcgtgtgtcctcagaagaacgtcctctgggatagcctcactgtttttgagcacctgtctatgtggaatgctgtgaagggaaatcgagagaccccagatagcctcgaggagctgattgcaaaatgcgatctggtcaagaagaagaacaacctagtctcaagtctaagcggtggcatgaagcgcaagctccaactcgcttgtatgcttgtcggcggctcgactgtatgttttgcagatgaagttacatcaggcttggatcctctgtctagaagagtgatttggaatgtgatcctgagcgagagagcccagaggactatggttctgacgactcattttctcgacgaatcagaagttttatctgatcacattgtgatcatcacactaggcaagatgaagtgccaaggcacgcctgctgagctcaagtctagattcggcggcggatatcgtgtgcatatccccaagactgaacagattggagacatacaatacccagtggtcgagcaacgtgatcggtacatctgccggacaccggactcgtcgtctgcggctcgcgttcttgcatctctgaagacttcaaaggattctgagttgtacatcaccggtccgactattgaggatgtgttcctcaaagtcgcggaagagccccatgctctcatcggggaatcagcagaggaaatctcttctgttgactctgtggtctccgcaccagaaagaaaagcacaggaatcagcacccagtacgataaaattctacgctaggcagatccgtgctctcttcctcaaaagaatatacttattacgatcattgtggtgggcatatattttcgccctcgcaatcccaatcgttgtctcgcacttccttggtcctttcctgaaagactacgtaacgccagactgtgatgatcttgtgggcagagccccttatccatatgcagttcagctctatactctgcagaacgtcgcgctgggacccctttctcttaacaaaacggcaactaatattgtcaaagcccaaaatgatggccagatctacagctattatgatgagtatgatgaagcaacaggtccattcatacaaaacagccgagatgcactagaagattttatccatgttcatggtgagaatattagctattctggcgggttgtgggctccgaacgacagcactcctttgatcacatatgatgctaggaacgcacaaaaatcctcgatattgttgaatttggcaaatcaagctcgtagcggtgtaaggattgatgtctcttcctcctacctcacgaagtacacccgtgcggacggcggcaacagcgtcatttatgtcacacttttctgtctagtgcaagccctataccctgctttcttcgccttatatccgacatatgagcgccgttcacaagtacgagcactacagtactcaaatggcattcgaccactgcctttgctgctttcgtactggatgttcgactttgccttcgtcctcatcatctcgatcgtttgtacagcgataatatcttcccaagcctcttggtttggtataggatacatcttcctctcccaggcactttacggcctcgctgctaccctcgtggcatacctggtctctttgatcgccaggtcgcagccatccgcgttcgcattttcagtgttgatcatggcggtcatgtacgtgatatcgatagtggtcgtcctggtccttaacttggatacaggaaaccctcagagaactcttgacggcacagcttatgggctgggcgtgattttcccaattcagaatcttctgcgagcgtactccgtggggttgaacacattcattgtgcgctgtcgtggactcacgaaggtcaccgatccagggtcaatctacgcacatggcggtccaattctgctcctgattatacagaacatctggctctttgtcttgttactatggctggaagggggcaagctcacattccgaaaacccaaggtggtgcaagaagacaatgagaagttcgcactctcgggacgcccagatgtggatgccgagacttctcgtgtcatggcctcgaagtccgatctactccgtgttcaacatctctccaagagctttggctcctataatgctgttgacgatgtgtcactaggactccaagaaggcgagattctcgcgcttctgggaccgaatggggccgggaagacgacgaccatcaacatgattagaggtgatatgacaccatcgagcgggaaggtctatctccaggatgtcgatgtccataaagacacccgcctcgcgcagaagcaccttggcttatgtccacaattcgacgctctcgacctcctcactgtccgtgaacacctggtcttctatgcgcgatgcaaaggtgtatcagacataaaagcagacgtcgcctacgtaatgagcaaggtcggcatcacagcacacgccgacaagctcgccgcgaagctctcgggtggcaacaagcgcaagctaagtctcgcaatcgcactcgtcggtaacccgcctgtgcttgttctagatgagccaagctctgccatggacgctgccagtaaacgagtactttggaagacactgcaggctgttgctccgggtcgctcggttctcattactacgcattcgatggaagaggccgatgcactggctactcgtgctgctattattgcgaagagacttcttgctatcggtactaccgaggcactgcgaaagacgcatagcaatgagtaccatgttcaccttattttgaagagtgcgcccttgtctacgtctgaagagatgcgcgaggttgccttctgggttaatagctcgttcccgaatgtaagattcgagggcgaaaatcttggtggccaggtccgattcatcgtccctgcggatagccaggtcccgactcaggataccggcacaaagggtgatgaggtgagagcatcgcagagcttcacgcgatacttgattgagactcttgaggcaagaaaagacagtcttggactggactgctactctatttctgcagcgaccatggagagcgtcttcctgactgttgttaaggagagcgatgctgatgaagatgagcggattgagaagaagaaaccttggtggagatagtagtgtcttgttattttgctagctaattatgatataccccctgcagaaaatgatttaaaaagagtaagagtacagaatgttaagatgaaattcaacataactaatcgcgacaacgaaataagacgctttcgtcaaatttagtgacgacttcagtagatacctgacctaag

SEQ ID NO: 31334 - DNA, 651 bp, Muscodor strobelii
  misc_feature: SGI cDNA ID NO. 570785
  misc_feature: Encodes the peptide sequence at SEQ ID NO 31335
atgtggattctacctcttgtcggatacttgggctctatcctaggcttcagtttcctcaccttggccattgcctcaggactatactacctctccgaactagtcgaagagcacaccgtcatcgccaagcgattgctcacccaactcatttatttcatcatcggcctgcaattcatcctctggctggtcgatggcctccctctcaccctgagcctcatgggcatcatctcccatggcgtctatcttggaaacatgcgacgtttcccctttgtcaggctgaccgatcccctatttctcgtttcatgcgtgctcgttctggccaatcactatctatggtttcgccacttctccgagtcgcagcaacgatcctactcccgcatgtcctccatgtacgatcagcctgacgcccccagctttaccgagatcgcctccttctttggcatatgcgtgtggctcatccccttcgccctgtttgtcagtctctcggccagcgacaatgttctgcccaccatcggcagcgaacagccctctcatgatgatagcgggaagaacaagcgccaaggcatggtcaaggtcattgtagactatgtcttaactgccattggcgaggttagtcggttagcagggtggaagaagcctgacgatcgcttttga

SEQ ID NO: 31335 - protein, 216 aa, Muscodor strobelii
  misc_feature: SGI Peptide ID NO. 570785
  misc_feature (1)..(208): Pfam Id: PF04148 Pfam Desc: Transmembrane adaptor Erv26
  misc_feature (1)..(169): Pfam Id: PF04148 Pfam Desc: Transmembrane adaptor Erv26
  misc_feature (1)..(216): NCBI GI: 39948698 Blast Desc: MGG_08706 [Magnaporthe grisea 70-15] gi|145009249|gb|EDJ93960.1| MGG_08706 [Magnaporthe grisea 70-15]
  misc_feature (1)..(215): NCBI GI: 85115788 Blast Desc: NCU00778 [Neurospora crassa OR74A] gi|28926732|gb|EAA35698.1| conserved [Neurospora crassa OR74A] gi|38636402|emb|CAE81939.1| related to transmembrane protein
  misc_feature (1)..(203): NCBI GI: 256727307 Blast Desc: NECHADRAFT_33233 [Nectria haematococca mpVI 77-13-4]
  misc_feature (1)..(216): NCBI GI: 154323618 Blast Desc: BC1G_00208 [Botryotinia fuckeliana B05.10] gi|150842437|gb|EDN17630.1| BC1G_00208 [Botryotinia fuckeliana B05.10]
  misc_feature (1)..(215): NCBI GI: 171695722 Blast Desc: protein product [Podospora anserina] gi|170948103|emb|CAP60267.1| protein product [Podospora anserina]
  misc_feature (1)..(216): NCBI GI: 156056863 Blast Desc: SS1G_04162 [Sclerotinia sclerotiorum 1980] gi|154701948|gb|EDO01687.1| SS1G_04162 [Sclerotinia sclerotiorum 1980]
  misc_feature (1)..(215): NCBI GI: 169769565 Blast Desc: [Aspergillus oryzae RIB40] gi|83767111|dbj|BAE57250.1| protein product [Aspergillus oryzae]
  misc_feature (1)..(215): NCBI GI: 261201286 Blast Desc: DUF396 domain protein [Ajellomyces dermatitidis SLH14081] gi|239592102|gb|EEQ74683.1| DUF396 domain protein [Ajellomyces dermatitidis SLH14081]
  misc_feature (1)..(215): NCBI GI: 121709876 Blast Desc: DUF396 doamin protein [Aspergillus clavatus NRRL 1] gi|119400704|gb|EAW11128.1| DUF396 doamin protein [Aspergillus clavatus NRRL 1]
  misc_feature (1)..(215): NCBI GI: 239611734 Blast Desc: DUF396 domain protein [Ajellomyces dermatitidis ER-3]
MWILPLVGYLGSILGFSFLTLAIASGLYYLSELVEEHTVIAKRLLTQLIYFIIGLQFILWLVDGLPLTLSLMGIISHGVYLGNMRRFPFVRLTDPLFLVSCVLVLANHYLWFRHFSESQQRSYSRMSSMYDQPDAPSFTEIASFFGICVWLIPFALFVSLSASDNVLPTIGSEQPSHDDSGKNKRQGMVKVIVDYVLTAIGEVSRLAGWKKPDDRF

SEQ ID NO: 31336 - DNA, 1697 bp, Muscodor strobelii
  misc_feature: SGI EST ID NO. CUFF.74191.1
  misc_feature: Variant of the nucleotide sequence at SEQ ID NO 31334
tgggacggaagcatatgtcatagggggtcccaaggagcaatcttgtgaaggacacgctgcatcatccgattccagtcgcgtccctcactacacgcttgtgctaatgactggacgacaattcaattgaaattcacggcctcaaatacctaccccttttcagtgcccgctttataccggaagcacaagacataaagagtcctttcactctaattgctatagttcctgtttccatacttatatctgcatatttctttggccatgtgcactttgtaatagtcgccagcaactcgcattgaccctcgtcaacatttgtgcaacatgtggattctacctcttgtcggatacttgggctctatcctaggcttcagtttcctcaccttggccattgcctcaggactatactacctctccgaactagtcgaagagcacaccgtcatcgccaagcgattgctcacccaactcatttatttcatcatcggcctgcaattcatcctctggctggtcgatggcctccctctcaccctgagcctcatgggcatcatctcccatggcgtctatcttggaaacatgcgacgtttcccctttgtcaggctgaccgatcccctatttctcgtttcatgcgtgctcgttctggccaatcactatctatggtttcgccacttctccgagtcgcagcaacgatcctactcccgcatgtcctccatgtacgatcagcctgacgcccccagctttaccgagatcgcctccttctttggcatatgcgtgtggctcatccccttcgccctgtttgtcagtctctcggccagcgacaatgttctgcccaccatcggcagcgaacagccctctcatgatgatagcgggaagaacaagcgccaaggcatggtcaaggtcattgtagactatgtcttaactgccattggcgaggttagtcggttagcagggtggaagaagcctgacgatcgcttttgagacagcggataatacctagagatgtcgtgtatgatcaatcttgcttgcattcaatatgatgaagaatgcgcttacgtctcatgctcaaggtatgatgttagataagtgttcgtcatttcgtactgaccaataccgcagttcctggtgcccaaccatgcacacgtgctccacaagtagtagaattgcttctcacagcagagcttttgagataatagggctggcgaagaatcggctagcttgcgactgtttgatcgctcacagcacagcagccgactcgtgtggagatcgtcctagagcgcatgccacacaaacgtgtgttctaagcggtgcaatcccaaaggaacttccaggtgttgcggactctgcacatgatgtgatagtcgcgctttccgccaacgactcttacgtagaatatctgcaaaacagcttttttagtgctggtgctgaatatccaggcgacgagtctgtggacactgtcgcaggccttgaacacggccttggtagctttagatcatctggcatgctaccgacatgggcatggtagcatccagcaatttgtcaatttaccataaaactaaaggaccccatgttgcattgagtcgataatcatcgaccacggttcaacgttgcaagcgaaagatgaatatttgagtgcaaatatatctttcatcatctaatcaagcaaaatgacagccaatcacttaaatctgccacagttagcatttcac

SEQ ID NO: 31337 - DNA, 843 bp, Muscodor strobelii
  misc_feature: SGI cDNA ID NO. 570786
  misc_feature: Encodes the peptide sequence at SEQ ID NO 31338
atgtcacggccagaggacacactgtccgcagacatccactacaatgactccgaagcccgcaagtacaccacctcctcgcgcatccagaacatccaagcctcgatgaccgagcgtgccctcgaccttctcgacctcaaatcaccatccctcatccttgatgttggctgtggcagtggtctgtccggtgagatactctctgcggtggctcccgaagagggtggtccccacgtgtgggttggcatggacattgcagcctccatgctagacgtagcacttcagcgcgatgtggaaggtgacctcatgctcgcagacattggtcagggagtgccttttcgtgctggcaccttcgatgctgccatcagcatcagcgcaattcaatggctgtgtaatgccgagtccagcgacctgtcgcccacaggacgcctctcgcgcttcttcaacggcttatatgccagtctgaagcgaggaggccgtgctgtctgccaattttaccctaagaacgacgaacagaagaagatgatcactggtgctgctgtcaaggctggcttcggtgccggtctactcgaggatgatcctgaaaccaagaacgtcaaagtgtatctggtactgaccgttggcgggggtgatctcgagggagttggaagcgacatcaccggagttgtcaagggcatggataatgtggacgtactagactcgaggatacagaagaagagcggcaagggagagatgaagaagggcagcaaggcatggatcatacagaagaaagagcagatggagcggaaaggcaaggtcgtcaaggcgacatccaaatacacgggtcggaaaagacgtgttgcattttaa

SEQ ID NO: 31338 - protein, 280 aa, Muscodor strobelii
  misc_feature: SGI Peptide ID NO. 570786
  misc_feature (52)..(161): Pfam Id: PF08241 Pfam Desc: Methyltransferase domain
  misc_feature (52)..(159): Pfam Id: PF08242 Pfam Desc: Methyltransferase domain
  misc_feature (1)..(280): NCBI GI: 116181172 Blast Desc: CHGG_01214 [Chaetomium globosum CBS 148.51] gi|88185511|gb|EAQ92979.1| CHGG_01214 [Chaetomium globosum CBS 148.51]
  misc_feature (1)..(280): NCBI GI: 256726748 Blast Desc: [Nectria haematococca mpVI 77-13-4]
  misc_feature (1)..(280): NCBI GI: 46122701 Blast Desc: FG05728.1 [Gibberella zeae PH-1]
  misc_feature (1)..(280): NCBI GI: 156056861 Blast Desc: SS1G_04161 [Sclerotinia sclerotiorum 1980] gi|154701947|gb|EDO01686.1| SS1G_04161 [Sclerotinia sclerotiorum 1980]
  misc_feature (1)..(280): NCBI GI: 154323616 Blast Desc: BC1G_00207 [Botryotinia fuckeliana B05.10] gi|154323622|ref|XP_001561125.1| BC1G_00210 [Botryotinia fuckeliana B05.10] gi|150842436|gb|EDN17629.1| BC1G_00207 B05.10]
  misc_feature (1)..(280): NCBI GI: 171695720 Blast Desc: protein product [Podospora anserina] gi|170948102|emb|CAP60266.1| protein product [Podospora anserina]
  misc_feature (1)..(280): NCBI GI: 261201284 Blast Desc: methyltransferase [Ajellomyces dermatitidis SLH14081] gi|239592101|gb|EEQ74682.1| methyltransferase [Ajellomyces dermatitidis SLH14081] gi|239611735|gb|EEQ88722.1| [Ajellomyces
  misc_feature (1)..(280): NCBI GI: 154278882 Blast Desc: HCAG_04094 [Ajellomyces capsulatus NAm1] gi|150412197|gb|EDN07584.1| HCAG_04094 [Ajellomyces capsulatus NAm1]
  misc_feature (1)..(280): NCBI GI: 85115784 Blast Desc: NCU00777 [Neurospora crassa OR74A] gi|28926731|gb|EAA35697.1| NCU00777 [Neurospora crassa OR74A] gi|38636403|emb|CAE81940.1| conserved [Neurospora crassa]
  misc_feature (1)..(280): NCBI GI: 225554375 Blast Desc: bud site selection protein [Ajellomyces capsulatus G186AR]
MSRPEDTLSADIHYNDSEARKYTTSSRIQNIQASMTERALDLLDLKSPSLILDVGCGSGLSGEILSAVAPEEGGPHVWVGMDIAASMLDVALQRDVEGDLMLADIGQGVPFRAGTFDAAISISAIQWLCNAESSDLSPTGRLSRFFNGLYASLKRGGRAVCQFYPKNDEQKKMITGAAVKAGFGAGLLEDDPETKNVKVYLVLTVGGGDLEGVGSDITGVVKGMDNVDVLDSRIQKKSGKGEMKKGSKAWIIQKKEQMERKGKVVKATSKYTGRKRRVAF

SEQ ID NO: 31339 - DNA, 1266 bp, Muscodor strobelii
  misc_feature: SGI EST ID NO. CUFF.74260.1
  misc_feature: Variant of the nucleotide sequence at SEQ ID NO 31337
gtgaaggttggcatttgccttgggtgctatgtcaacctaactgtatcgtgtttctcggagctcagatgatacttcagaaccccaggaaatattccaatctttgagagacaccactatcttccatttggcaatcattttgacttgccatcaggatgtcacggccagaggacacactgtccgcagacatccactacaatgactccgaagcccgcaagtacaccacctcctcgcgcatccagaacatccaagcctcgatgaccgagcgtgccctcgaccttctcgacctcaaatcaccatccctcatccttgatgttggctgtggcagtggtctgtccggtgagatactctctgcggtggctcccgaagagggtggtccccacgtgtgggttggcatggacattgcagcctccatgctagacgtagcacttcagcgcgatgtggaaggtgacctcatgctcgcagacattggtcagggagtgccttttcgtgctggcaccttcgatgctgccatcagcatcagcgcaattcaatggctgtgtaatgccgagtccagcgacctgtcgcccacaggacgcctctcgcgcttcttcaacggcttatatgccagtctgaagcgaggaggccgtgctgtctgccaattttaccctaagaacgacgaacagaagaagatgatcactggtgctgctgtcaaggctggcttcggtgccggtctactcgaggatgatcctgaaaccaagaacgtcaaagtgtatctggtactgaccgttggcgggggtgatctcgagggagttggaagcgacatcaccggagttgtcaagggcatggataatgtggacgtactagactcgaggatacagaagaagagcggcaagggagagatgaagaagggcagcaaggcatggatcatacagaagaaagagcagatggagcggaaaggcaaggtcgtcaaggcgacatccaaatacacgggtcggaaaagacgtgttgcattttaaaaagatgatacctctgcggttggcgttggcgttggcgttatatcgagagggagagcagagcagctctcatctcggtccagtgtttattaagaggtgagggtctacctacccggtaccattttcaagataactgtatgcaattaagagttgataccctcttctcaaccacctctctgactgtgtcgacgatcgtttattaaagtgaaagtatattgaggagcattttacgctgcttctttgacaaatttgaactcttgactttgcaacgcgc

SEQ ID NO: 31340 - DNA, 1587 bp, Muscodor strobelii
  misc_feature: SGI cDNA ID NO. 570787
  misc_feature: Encodes the peptide sequence at SEQ ID NO 31341
atgttcgcctcaacgccacgagtgaagcagaaggacagaattgatccatggaccagcgtcgccgaactcatcatctacagcccagatctcagtttagatgcaaccaagtttcaagctccgccaacaagtctaggacggtgggggcagacagttgtcttgcctatcgttccagtcgccggcgccttgacccccggaggcaatgtggttttctggagttcatggcggccagatctcttctctggtaccactacgcacacaacattaactgtgacttggaatgcaggcaccaaagccataagtgaacttgacgttacaaacactggtcacgacatgttctgtcctggtatttctctagatgccaatggacgtatcacagtaactggtggtaacgacgcagcaaaaacatcggcatatgatccaagcggcgcagcttggaaagctcaggcgcagatgaaactcgcgcgtggataccaggctagcgtcacgattggagacgggcgaatcttcactatcggcggttcatggagtggcggtcgggcggacaagcccggagagatctatcagccgaccaccaatacctggacctacctgccaggtgcagacgcaacaccgatgctcacaaaggacgctgggggaattttccgttctgacaaccacgcttggctgttctcatggaaagccaacgcagtacttcaagcaggacctagcaagaacatgaactggtataacgttaccagcactaatggttcatacatcagtgcaggaactcgcgcttccgatggggatagcatgtgcggcacggccaccatgtacgatgcagtgaacggcttgattttgtctgcgggtggttctccttcatacgaaaacagtgacgcaacttcgaacgcgcatgtcatcaagctcggtgacgccaatgtcaagccgacagtcactaaagtacagaatatgaagaacgccagggcgttcgcaagcgctgttgtattgccagacggtactgttctcgtcataggcgggcaaaactatcctgtgcccttctcagacacaacacctgttttccagacggagttgttccgtcctgcgacaaacacttggaccaccttagcatcgatcgcagtgccacggacgtatcatagtatctcaattttgcttcccgatgcgaccgtcgccactgggggtggcggcctctgtggaacgggctgtcaacagaaccattttgatatgcagattttcacaccaccttacttattcaagagcgacggtagccttgctacgcgaccggttatatcatctgtgtcttcgacgaagctgtctccgggtgcttcattcacggtgacgacaactggagatatttcctcattttccctgattcgtttcggttcagttacacacaccgtcaatacggatcagaggcgagtgccttgccaggtcactgctaccagcggatctgcagctagtggatcagtaaagaacactatcgcgcttcctacagatcctggggttttggtaccaggatactggatgctgttcgccgttgacgccgcaggcgtgcccagtgttgcaacaacagtccagattcttctatcctaa

SEQ ID NO: 31341 - protein, 528 aa, Muscodor strobelii
  misc_feature: SGI Peptide ID NO. 570787
  misc_feature (155)..(201): Pfam Id: PF01344 Pfam Desc: Kelch motif
  misc_feature (320)..(371): Pfam Id: PF01344 Pfam Desc: Kelch motif
  misc_feature (425)..(525): Pfam Id: PF09118 Pfam Desc: Domain of function (DUF1929)
  misc_feature (155)..(198): Pfam Id: PF01344 Pfam Desc: Kelch motif
  misc_feature (16)..(525): NCBI GI: 399532 Blast Desc: GAOA_GIBZE RecName: Full=Galactose oxidase; Short=GAO; Short=GOase; Short=GO; Flags: Precursor gi|167226|gb|AAA16228.1| galactose oxidase precursor [Fusarium austroamericanum]
  misc_feature (16)..(525): NCBI GI: 46139035 Blast Desc: GAOA_DACDE Galactose oxidase precursor (GAO) [Gibberella zeae PH-1]
  misc_feature (16)..(525): NCBI GI: 146386789 Blast Desc: GAOA_DACDE Galactose oxidase precursor (GAO) [Gibberella zeae PH-1]
  misc_feature (16)..(525): NCBI GI: 49259228 Blast Desc: GAOA_DACDE Galactose oxidase precursor (GAO) [Gibberella zeae PH-1]
  misc_feature (16)..(525): NCBI GI: 146386788 Blast Desc: GAOA_DACDE Galactose oxidase precursor (GAO) [Gibberella zeae PH-1]
  misc_feature (16)..(525): NCBI GI: 16974853 Blast Desc: GAOA_DACDE Galactose oxidase precursor (GAO) [Gibberella zeae PH-1]
  misc_feature (16)..(525): NCBI GI: 146386790 Blast Desc: GAOA_DACDE Galactose oxidase precursor (GAO) [Gibberella zeae PH-1]
  misc_feature (16)..(525): NCBI GI: 256731910 Blast Desc: NECHADRAFT_122595 [Nectria haematococca mpVI 77-13-4]
  misc_feature (16)..(527): NCBI GI: 46105246 Blast Desc: FG00251.1 [Gibberella zeae PH-1]
  misc_feature (35)..(527): NCBI GI: 261361067 Blast Desc: galactose oxidase [Verticillium albo-atrum VaMs.102]
  misc_feature (16)..(525): SWISSPROT Homolog: EC 1.1.3.9 Galactose oxidase
MFASTPRVKQKDRIDPWTSVAELIIYSPDLSLDATKFQAPPTSLGRWGQTVVLPIVPVAGALTPGGNVVFWSSWRPDLFSGTTTHTTLTVTWNAGTKAISELDVTNTGHDMFCPGISLDANGRITVTGGNDAAKTSAYDPSGAAWKAQAQMKLARGYQASVTIGDGRIFTIGGSWSGGRADKPGEIYQPTTNTWTYLPGADATPMLTKDAGGIFRSDNHAWLFSWKANAVLQAGPSKNMNWYNVTSTNGSYISAGTRASDGDSMCGTATMYDAVNGLILSAGGSPSYENSDATSNAHVIKLGDANVKPTVTKVQNMKNARAFASAVVLPDGTVLVIGGQNYPVPFSDTTPVFQTELFRPATNTWTTLASIAVPRTYHSISILLPDATVATGGGGLCGTGCQQNHFDMQIFTPPYLFKSDGSLATRPVISSVSSTKLSPGASFTVTTTGDISSFSLIRFGSVTHTVNTDQRRVPCQVTATSGSAASGSVKNTIALPTDPGVLVPGYWMLFAVDAAGVPSVATTVQILLS

SEQ ID NO: 31342 - DNA, 1488 bp, Muscodor strobelii
  misc_feature: SGI cDNA ID NO. 570788
  misc_feature: Encodes the peptide sequence at SEQ ID NO 31343
atgtcagtcttttcaatcatcaagcgtgggagggctcaggccaaggaacaaaagtcgaaacaagccgaaaaacagaaggaggaagccgtcaagcttccctataggcacgtagtcacacatgctgctaccgatgccttggctacagcgccatcgagctggaaatcggacgatcggccaaagatcagggaacagaaccgcaggagaagtgctatggcgtctactggtatgagcccaagtgggctaccgcgtgttggaagcaatctgtcatatgtctcgtatccatctgtatatgcctcatctcctattcctgctcttcccaagaactacagctatagtagcattcccagcgcgtggcgtgacaggatggccacgacaccagaaggagtggactcctccgattatttcagtcatcctaggaatttcaagggaaagggaagggagcccataccgcgctttactattggtgcgacaccatctgtgctgtcgtctgggcggaccagcccactgtcaagtagagacgtgccgttgtctaatggtgaggattcggggagcatgagcataagcatgagcggtgttgaagacgagaaagaaatgagaaagcaggcttcaaacttttcccacaatattgataccagaccatcatcccaatcgcgtaaccgtccatctagtagtgaaagctgtcatcgtcttcatcctgctcatgcccggagaagctcagagaacgtcgctcagtccgaacggcctcaacccgaacggcctcagcccgatagacactatcctccacaagctaaaagcacttactttatggcgcctcgtcccgcgaatcgacgcatatataatatggacacttccgatgcaccgcctattcctacgctgcctaatcacctaggcatgggcgcagcttcgtcttcatcagcttcgtctctagtttcgatcgggatggccgtgtctactcccccaagttccgtgatctcaactccaacaccctcgacggccggcgatcctccgcccaacatgaaaattccgcggattcaacctacggagccgattcgaggctcacctttacggagattctcgtttggttctcgcagaacctctatcgacactatcacaccagaaccggctgatcactctcctcaaccattatcggtatcttcaaacaggcgaagactatccaagcaaagacccagtccatcacctagtcaattcagcgagcgagagttttcttggcacgccgatcccgtgcccaatctgcgaaacgaggcagtttcactcaacacaagcgaaaagtccagatcgatgttcagtctgtccactgcaacgtcgaaaccgacaccactcaagtggaataatgctccagctccagctacagatgctccaagacggaagctaagcaaggatcaatcaaaggtctcgaccgacagcagcaagaaaactcgttggtcctggagccgcaggaattcaaccacttctgaatacggtcaatga

SEQ ID NO: 31343 - protein, 495 aa, Muscodor strobelii
  misc_feature: SGI Peptide ID NO. 570788
  misc_feature (1)..(240): NCBI GI: 116196316 Blast Desc: CHGG_04756 [Chaetomium globosum CBS 148.51] gi|88180669|gb|EAQ88137.1| CHGG_04756 [Chaetomium globosum CBS 148.51]
  misc_feature (1)..(483): NCBI GI: 171690314 Blast Desc: protein product [Podospora anserina] gi|170945105|emb|CAP71216.1| protein product [Podospora anserina]
  misc_feature (1)..(239): NCBI GI: 85106660 Blast Desc: NCU06387 [Neurospora crassa OR74A] gi|28923825|gb|EAA32989.1| [Neurospora crassa OR74A]
  misc_feature (1)..(134): NCBI GI: 145603304 Blast Desc: MGG_13202 [Magnaporthe grisea 70-15] gi|145011561|gb|EDJ96217.1| MGG_13202 [Magnaporthe grisea 70-15]
  misc_feature (1)..(175): NCBI GI: 261353078 Blast Desc: VDBG_01615 [Verticillium albo-atrum VaMs.102]
  misc_feature (1)..(123): NCBI GI: 156035767 Blast Desc: SS1G_13087 [Sclerotinia sclerotiorum 1980] gi|154698492|gb|EDN98230.1| SS1G_13087 [Sclerotinia sclerotiorum 1980]
  misc_feature (1)..(69): NCBI GI: 154294079 Blast Desc: [Botryotinia fuckeliana B05.10] gi|150845118|gb|EDN20311.1| [Botryotinia fuckeliana B05.10]
  misc_feature (1)..(72): NCBI GI: 46123671 Blast Desc: FG06213.1 [Gibberella zeae PH-1]
  misc_feature (1)..(72): NCBI GI: 256727427 Blast Desc: NECHADRAFT_76268 [Nectria haematococca mpVI 77-13-4]
MSVFSIIKRGRAQAKEQKSKQAEKQKEEAVKLPYRHVVTHAATDALATAPSSWKSDDRPKIREQNRRRSAMASTGMSPSGLPRVGSNLSYVSYPSVYASSPIPALPKNYSYSSIPSAWRDRMATTPEGVDSSDYFSHPRNFKGKGREPIPRFTIGATPSVLSSGRTSPLSSRDVPLSNGEDSGSMSISMSGVEDEKEMRKQASNFSHNIDTRPSSQSRNRPSSSESCHRLHPAHARRSSENVAQSERPQPERPQPDRHYPPQAKSTYFMAPRPANRRIYNMDTSDAPPIPTLPNHLGMGAASSSSASSLVSIGMAVSTPPSSVISTPTPSTAGDPPPNMKIPRIQPTEPIRGSPLRRFSFGSRRTSIDTITPEPADHSPQPLSVSSNRRRLSKQRPSPSPSQFSEREFSWHADPVPNLRNEAVSLNTSEKSRSMFSLSTATSKPTPLKWNNAPAPATDAPRRKLSKDQSKVSTDSSKKTRWSWSRRNSTTSEYGQ

SEQ ID NO: 31344 - DNA, 1083 bp, Muscodor strobelii
  misc_feature: SGI cDNA ID NO. 570789
  misc_feature: Reduced expression when VOC is produced
  misc_feature: Encodes the peptide sequence at SEQ ID NO 31345
atgtcgagatctttgacgatgcggaagattgacgggaagccaggcgttgtatactatcccctccaactaaaccacaatcccaaaccagtccccaaacgcggacagctcctcgtccgcctccaagccgcagccctaaaccaccgcgacctcttccaacgacaacacctatacccaggtctatccttctcaaacccactcttcgccgacggctgcggaatcgtcgaatccgtcggtccagacacgaagtcctcatgggtcggtaaacgcgtgataatcacaccatcacggggctgggagtcagcgcccgaaggaccagaggataacaaattctccacgatcggcggatcgatactctacgaagatgggacaggacaggattacatcgctatttcggaggctgaggtcgagatcgcgccgccgcatctaaatgcggctgaagctgcggcgttgccactcgttggacttacggggtggagggcgctgttcacgaagagtgctaatgcggaaaaagggaggaatatactggttactgggattgggggtggtgtcgcgctcgctgttctacagttcgctgttgcgagggggtgtaatgtctatgttacatctggctctgaggagaaactacgtaaagcgaaggatctgggggcgaggggcggggtgagttataaaggggaggattggcatgttgagctacagcagctgttaccggaggatagaccgtttttcgatgctattgttgacggggccggaggcgatatcatgaagagggctgttaggttgttgaagcctggtggtgtcgtgagtagttatggcatgacgctggccccgaagatggactggattatgcaggctgttatgaagaatattgatattaggggtagtacgatgggcagtaggagggagtttagggatatggtggcgtttgttaatgagcataagattaagccgatagtgagtagggttgtgaagggtttggataatttgaaggagattgaggagttgtatggcgagttgagggatgggacgcagtttgggaagttggttattcagatttctgatgatggggcgagtgctaagttgtag

SEQ ID NO: 31345 - protein, 360 aa, Muscodor strobelii
  misc_feature: SGI Peptide ID NO. 570789
  misc_feature (170)..(311): Pfam Id: PF00107 Pfam Desc: Zinc-binding dehydrogenase
  misc_feature (1)..(351): NCBI GI: 85106416 Blast Desc: NCU07042 [Neurospora crassa OR74A] gi|28923779|gb|EAA32945.1| NCU07042 [Neurospora crassa OR74A]
  misc_feature (1)..(360): NCBI GI: 46123649 Blast Desc: FG06202.1 [Gibberella zeae PH-1]
  misc_feature (1)..(360): NCBI GI: 261355833 Blast Desc: oxidoreductase [Verticillium albo-atrum VaMs.102]
  misc_feature (1)..(350): NCBI GI: 256726863 Blast Desc: [Nectria haematococca mpVI 77-13-4]
  misc_feature (12)..(357): NCBI GI: 238841810 Blast Desc: oxidoreductase [Microsporum canis CBS 113480]
  misc_feature (12)..(357): NCBI GI: 119190045 Blast Desc: CIMG_05070 [Coccidioides immitis RS]
  misc_feature (12)..(357): NCBI GI: 240110993 Blast Desc: alcohol dehydrogenase, [Coccidioides posadasii C735 delta SOWgp]
  misc_feature (3)..(360): NCBI GI: 258565549 Blast Desc: conserved [Uncinocarpus reesii 1704] gi|237907220|gb|EEP81621.1| conserved [Uncinocarpus reesii 1704]
  misc_feature (1)..(359): NCBI GI: 145603438 Blast Desc: MGG_13230 [Magnaporthe grisea 70-15] gi|145011667|gb|EDJ96323.1| MGG_13230 [Magnaporthe grisea 70-15]
  misc_feature (1)..(355): NCBI GI: 225684810 Blast Desc: YogA [Paracoccidioides brasiliensis Pb03]
  misc_feature (20)..(353): SWISSPROT Homolog: EC 1.1.1.1 Alcohol dehydrogenase
  misc_feature: Useful for introducing or modulating the production of volatile compounds
MSRSLTMRKIDGKPGVVYYPLQLNHNPKPVPKRGQLLVRLQAAALNHRDLFQRQHLYPGLSFSNPLFADGCGIVESVGPDTKSSWVGKRVIITPSRGWESAPEGPEDNKFSTIGGSILYEDGTGQDYIAISEAEVEIAPPHLNAAEAAALPLVGLTGWRALFTKSANAEKGRNILVTGIGGGVALAVLQFAVARGCNVYVTSGSEEKLRKAKDLGARGGVSYKGEDWHVELQQLLPEDRPFFDAIVDGAGGDIMKRAVRLLKPGGVVSSYGMTLAPKMDWIMQAVMKNIDIRGSTMGSRREFRDMVAFVNEHKIKPIVSRVVKGLDNLKEIEELYGELRDGTQFGKLVIQISDDGASAKL

SEQ ID NO: 31346 - DNA, 2809 bp, Muscodor strobelii
  misc_feature: SGI EST ID NO. CUFF.74331.1
  misc_feature: Variant of the nucleotide sequence at SEQ ID NO 31344
gtttcttctgccattattaatacgggattgacgattgtgttatatatatatatacgcattcaaagttaagacttgcattttgacagcttggattgtccaattgcgtttgtaacgacgtgccagagagttgaaggttccgccactcccgactaccatgtcgagatctttgacgatgcggaagattgacgggaagccaggcgttgtatactatcccctccaactaaaccacaatcccaaaccagtccccaaacgcggacagctcctcgtccgcctccaagccgcagccctaaaccaccgcgacctcttccaacgacaacacctatacccaggtctatccttctcaaacccactcttcgccgacggctgcggaatcgtcgaatccgtcggtccagacacgaagtcctcatgggtcggtaaacgcgtgataatcacaccatcacggggctgggagtcagcgcccgaaggaccagaggataacaaattctccacgatcggcggatcgatactctacgaagatgggacaggacaggattacatcgctatttcggaggctgaggtcgagatcgcgccgccgcatctaaatgcggctgaagctgcggcgttgccactcgttggacttacggggtggagggcgctgttcacgaagagtgctaatgcggaaaaagggaggaatatactggttactgggattgggggtggtgtcgcgctcgctgttctacagttcgctgttgcgagggggtgtaatgtctatgttacatctggctctgaggagaaactacgtaaagcgaaggatctgggggcgaggggcggggtgagttataaaggggaggattggcatgttgagctacagcagctgttaccggaggatagaccgtttttcgatgctattgttgacggggccggaggcgatatcatgaagagggctgttaggttgttgaagcctggtggtgtcgtgagtagttatggcatgacgctggccccgaagatggactggattatgcaggctgttatgaagaatattgatattaggggtagtacgatgggcagtaggagggagtttagggatatggtggcgtttgttaatgagcataagattaagccgatagtgagtagggttgtgaagggtttggataatttgaaggagattgaggagttgtatggcgagttgagggatgggacgcagtttgggaagttggttattcagatttctgatgatggggcgagtgctaagttgtagattgggaggacaggatcgactggttttagacaaagggtgaaggtatcgacacctagaggaaatcgtaccttgaaattagaagatttttgtctctctacctctgtgcaatggcatagaatctgtgtaatggtgttgatacaactcactgaaacaaaactatagtcgccttcaggcacacaatcattacagacatatcaacgcagcggtataggtattatgcgacacgttgaccagtgtattcattttcgcttttttttttcgcctttcttatcaatggccgcgtggccgcctcgtatcggagtgctgatctcggcgatcaagagcatcgcacctgagtttccgtcattatgtcgtctcttacccctgaaagtggctggctggcagttgaaatatggcgttgtacaggttacactacctaatctttcaagcatgataagcccatgtggtacgaccttgattatagagagtccgtatcttcatagctgtcatcctgacgtacagtaggtatctaggtagtcagcctagcccgctctcacagacgcccaatggtaaaacaagttatatacatggcaaaccctgtacgttttctcattttccatcttaaatgttggaagaagaaaatctcacgagtctccgctcggattaggatccaccacacggcccgaacacgatgatatccacttagatagtctgtcaaaaggatctcctcgcaaaggatctccttcaggaaatatcattgaagatctcgctagaagctctgaaaatagcttcataccggctccattgccgctgggagccacagcgccatgcgaattttgacgccactatcaatagtaaggtacgctgcttcgtggtactttggttaggtgagacaagagccgcattatcaacgccaataacgtgtgagaagcaacgtcttttttttgttgtgcggaaatgccatagtatgtctagtcatattgttgaactgataagctgtcagcctccattcacccctcagccgtatcaaactggccatcatcccggaagagccagtcaagtggtcagataacaggcgaaaggtagcaagaccgcctcacaaggattctcagatatgttgttgttttcaggttttctgactcgtatcaacctccttacataagatatgatcgcaacaattcacccgacatatgagtgagaatcagcgcggatgcatatgtaggactccgctccagacaccgtcttacggtctagtaacgttcggaatacggcagctaaatgggtgaactgaatggtgatgtcagtgaactagtagggccttttgaagcgcctacgctattcggacccaacctagtaatcctgtgaggaactgctgtcggtgtgaaggatccataaagattgtacttaagttccagtcgtgagcagttaagatgaccaggtttaaatggtgcaggcagaatatagcctcagccttcatggattgttgacccgaccttttgggtccgcttccgcaatggctcgagacttaggaagctttaagatatctcggcgggtgccgattagtgtggccaatcatagctgataccctctaat

SEQ ID NO: 31347 - DNA, 2553 bp, Muscodor strobelii
  misc_feature: SGI cDNA ID NO. 570790
  misc_feature: Reduced expression when VOC is produced
  misc_feature: Encodes the peptide sequence at SEQ ID NO 31348
atggcggcacagcctgtgcctcatccgtcgacggagaggagacgagtcaaggtctacgagctgcgcaacaacgactggttcgaccgcggcaccggcttctgctcggccgtctacaacaacaccgaagatgtccaacaacgcgatcccagagtggttgttgagtctgaagaccagcccgaccgcatcctcctcgagacacgcatctgcaaggaggacggcttccacaaacaacaagaaaccctcattgtctggacagagcctagcaatggagtcgatatggccctcagcttccaggaggctgaagggtgcgccatgatctggaaattcattaatagcattcagcaacagtacaacccttccaatacacaagatgattgcgagatagacgacctcgccatagacatgcccaaccccatcagtctccccgaggcctccctggctaatcttgccgacattgagtctcagatgcgcagtctgagcggtactcaagggggccgcgacgcgctgacgaaatacgtgctcagtgaacggtacatcgacaagctgatccccatcgtgtccgacgccgaagacctcgagagcctcaccgatctacatcgcctctgcaacatcatgaagatcatcattctcctcaacgataccaacatcatagagcaggccgtgtccgacgaatgcgtgatcggtgtcgtgggtgcattggagtacgatcccgatttcccgagtcataaggccaaccatcgccaatggctgcagggcgagggcaggtatcgcgaggtcgtgcgcatcgaagatggtcagattcttaagaagatccaccagacttatcgactgggctatttgaaagatgtcgtgttggctaggattctagacgataacaccttctcggtgctcaattccctgattttctttaaccaggtggacatcgtgcaacatctgcaggcaaactcccccttcctcggcgaactcttcaacatcttcaagtcaggtcaggaccttacacgaaagaaggaggcagtcctttttatcgagcagtgttgttctatagctaagaacctccaacctcctgcgcgacagaccctgtataataatttcatcgctcacggccttctccaagtcatcaacttcggtctcaagcataacgacgtcactgtccgagtcggagccacgaatatcctcgtttccataattgagcacgatcctcatgtcataaggcagactatgtatcgccaagtgcacgacaagcagtctccgttaacagaaaccctcatcgacctcttacttgtcgagaccgacctgggagtcaaatcacacatctccgacgctcttaaggtgctgcttgaccagagcccaataccagcagaggctttcgcaaaagcaaatggcgaatatgccgccagggcagctatgcggtcagcacaagcgaacatggatcctcaacaagaccaattcctcgccatcttctacgagaaatctgccgtcaagctgtttcagcctctcattgccctgaaagaccgcaaagatatgcagtttaccaacattgaagcatctgctttcacctatttggtggaaattctgtgcttctttattcggcagcaccagcatcgaagcaagtactttgtcctatcacaggacattgtcctgcggatcacgcagctcttgcagtccccagagaagtttctaaagctagtgggcatccgatttcttcgtcaacttgttggttcccaggacgagttctacatcaaacatttgtcagaaaagaaggctcttgaacctgtgctcgatctcctcattgcaacgatgccacgcgacaaccttctcagctccgcttgtcttgagcttttcgagcatattaagaaagagaatgtcaaagacttggtgaaacatattgttgagaattatcgggagaaattgcagagtctctcttacatggaagtgttccgagaaatccttcttcgatacgaccagactgccgggttcaccgcaaacatggactatttcttagagtcggaagacgaggccggacgtaggcggccaaacatcaacccaagaactggaccaatggagcatctgactatggaccaagcagaggaggaatattggaatacatccgacgacgaggacgagctgcaaggcaaggcaaccgacgggacatcatctatgaatggtgaaacaaccggccacaaactcatggtcgattatacgtcggacgaggacttggatgagaatatcgaagcaggggccatttccgcagacgaagaagcaacgaaagataagacgcagaagacggatgccgccccgaccgtaccgccacccgaacgagtgtctgaaaaacgacggcgcgaggaggacgaggaggacgatctcagtaaaatgatccagcacaaacgccgaaacagcacatctgcaggttcaaacgcgtcagttcccacggcgagtgttcttagaaagaagaaggccggaccgggcactcgagacgccaacattgcacccaagaagattgctatcagcctgacatccaccgggaaagccggaggccattcgggcaatgattga

SEQ ID NO: 31348 - protein, 850 aa, Muscodor strobelii
  misc_feature: SGI Peptide ID NO. 570790
  misc_feature (173)..(364): Pfam Id: PF04802 Pfam Desc: Domain of function (DUF625)
  misc_feature (1)..(850): NCBI GI: 261353077 Blast Desc: suppressor of Mek1 [Verticillium albo-atrum VaMs.102]
  misc_feature (3)..(850): NCBI GI: 46123669 Blast Desc: FG06212.1 [Gibberella zeae PH-1]
  misc_feature (30)..(844): NCBI GI: 116196312 Blast Desc: CHGG_04754 [Chaetomium globosum CBS 148.51] gi|88180667|gb|EAQ88135.1| CHGG_04754 [Chaetomium globosum CBS 148.51]
  misc_feature (7)..(844): NCBI GI: 189206666 Blast Desc: suppressor of Mek1 [Pyrenophora tritici-repentis Pt-1C-BFP] gi|187975760|gb|EDU42386.1| suppressor of Mek1 [Pyrenophora tritici-repentis Pt-1C-BFP]
  misc_feature (93)..(847): NCBI GI: 154294073 Blast Desc: BC1G_14070 [Botryotinia fuckeliana B05.10] gi|150845115|gb|EDN20308.1| BC1G_14070 [Botryotinia fuckeliana B05.10]
  misc_feature (1)..(699): NCBI GI: 171690312 Blast Desc: protein product [Podospora anserina] gi|170945104|emb|CAP71215.1| protein product [Podospora anserina]
  misc_feature (8)..(837): NCBI GI: 119479745 Blast Desc: NFIA_079450 [Neosartorya fischeri NRRL 181] gi|119408055|gb|EAW18004.1| conserved [Neosartorya fischeri NRRL 181]
  misc_feature (8)..(845): NCBI GI: 121713308 Blast Desc: DUF625 domain protein [Aspergillus clavatus NRRL 1] gi|119402418|gb|EAW12839.1| DUF625 domain protein [Aspergillus clavatus NRRL 1]
  misc_feature (8)..(842): NCBI GI: 146324103 Blast Desc: DUF625 domain protein [Aspergillus fumigatus Af293] gi|129558067|gb|EAL91815.2| DUF625 domain protein, [Aspergillus fumigatus Af293]
  misc_feature (8)..(842): NCBI GI: 255949418 Blast Desc: Pc22g15590 [Penicillium chrysogenum Wisconsin 54-1255] gi|211592493|emb|CAP98847.1| Pc22g15590 [Penicillium chrysogenum Wisconsin 54-1255]
  misc_feature: Useful for introducing or modulating the production of volatile compounds
MAAQPVPHPSTERRRVKVYELRNNDWFDRGTGFCSAVYNNTEDVQQRDPRVVVESEDQPDRILLETRICKEDGFHKQQETLIVWTEPSNGVDMALSFQEAEGCAMIWKFINSIQQQYNPSNTQDDCEIDDLAIDMPNPISLPEASLANLADIESQMRSLSGTQGGRDALTKYVLSERYIDKLIPIVSDAEDLESLTDLHRLCNIMKIIILLNDTNIIEQAVSDECVIGVVGALEYDPDFPSHKANHRQWLQGEGRYREVVRIEDGQILKKIHQTYRLGYLKDVVLARILDDNTFSVLNSLIFFNQVDIVQHLQANSPFLGELFNIFKSGQDLTRKKEAVLFIEQCCSIAKNLQPPARQTLYNNFIAHGLLQVINFGLKHNDVTVRVGATNILVSIIEHDPHVIRQTMYRQVHDKQSPLTETLIDLLLVETDLGVKSHISDALKVLLDQSPIPAEAFAKANGEYAARAAMRSAQANMDPQQDQFLAIFYEKSAVKLFQPLIALKDRKDMQFTNIEASAFTYLVEILCFFIRQHQHRSKYFVLSQDIVLRITQLLQSPEKFLKLVGIRFLRQLVGSQDEFYIKHLSEKKALEPVLDLLIATMPRDNLLSSACLELFEHIKKENVKDLVKHIVENYREKLQSLSYMEVFREILLRYDQTAGFTANMDYFLESEDEAGRRRPNINPRTGPMEHLTMDQAEEEYWNTSDDEDELQGKATDGTSSMNGETTGHKLMVDYTSDEDLDENIEAGAISADEEATKDKTQKTDAAPTVPPPERVSEKRRREEDEEDDLSKMIQHKRRNSTSAGSNASVPTASVLRKKKAGPGTRDANIAPKKIAISLTSTGKAGGHSGND

SEQ ID NO: 31349 - DNA, 3842 bp, Muscodor strobelii
  misc_feature: SGI EST ID NO. CUFF.74605.0
  misc_feature: Variant of the nucleotide sequence at SEQ ID NO 31347
tctctcgcgacccaacgtgggcagacagcaagtgcgcacgcccagacccgacacccacaagccgtcttcctcaacccgacctagcgccatccaaaccctctggttttcgcctcatttcgctcacggtgccacccgaacacatcacaactaaacctcactcaccccacgagccacatgcccagcctggtcgcgtccaccgtttcagtcccgactctgccctgccgctctgccgtgtcgtgttgtcgccgcgatattctaagctggagtatgacagcatctgccccgtagtggcccgtctcatctgcagcagcgctcccgacctgcccgtgtcgcccgtgtcgcctgtcgcctgtcgcgcatcttgggttcggcccggcctgcatcgtccccaattgatcagcatcgtcactgcccctcccgcgcgcacctcacacacctcacacacctcaacacctccgatcccaatccccgggacgtggcccgcgacatctctgcctttgcgcccgtcttgcccgctgtcgcagcaattgcgcctgcccgccaacgcccgtgaccgcgaggaaccgtggcggtcacgctcctcagccacccggacacccaactctcccttcaccaactacaactcgacctgtccgccgacttgctgcactacgagcccggtgtggtggacactgaccccgagtacccgttgacgatggcggcacagcctgtgcctcatccgtcgacggagaggagacgagtcaaggtctacgagctgcgcaacaacgactggttcgaccgcggcaccggcttctgctcggccgtctacaacaacaccgaagatgtccaacaacgcgatcccagagtggttgttgagtctgaagaccagcccgaccgcatcctcctcgagacacgcatctgcaaggaggacggcttccacaaacaacaagaaaccctcattgtctggacagagcctagcaatggagtcgatatggccctcagcttccaggaggctgaagggtgcgccatgatctggaaattcattaatagcattcagcaacagtacaacccttccaatacacaagatgattgcgagatagacgacctcgccatagacatgcccaaccccatcagtctccccgaggcctccctggctaatcttgccgacattgagtctcagatgcgcagtctgagcggtactcaagggggccgcgacgcgctgacgaaatacgtgctcagtgaacggtacatcgacaagctgatccccatcgtgtccgacgccgaagacctcgagagcctcaccgatctacatcgcctctgcaacatcatgaagatcatcattctcctcaacgataccaacatcatagagcaggccgtgtccgacgaatgcgtgatcggtgtcgtgggtgcattggagtacgatcccgatttcccgagtcataaggccaaccatcgccaatggctgcagggcgagggcaggtatcgcgaggtcgtgcgcatcgaagatggtcagattcttaagaagatccaccagacttatcgactgggctatttgaaagatgtcgtgttggctaggattctagacgataacaccttctcggtgctcaattccctgattttctttaaccaggtggacatcgtgcaacatctgcaggcaaactcccccttcctcggcgaactcttcaacatcttcaagtcaggtcaggaccttacacgaaagaaggaggcagtcctttttatcgagcagtgttgttctatagctaagaacctccaacctcctgcgcgacagaccctgtataataatttcatcgctcacggccttctccaagtcatcaacttcggtctcaagcataacgacgtcactgtccgagtcggagccacgaatatcctcgtttccataattgagcacgatcctcatgtcataaggcagactatgtatcgccaagtgcacgacaagcagtctccgttaacagaaaccctcatcgacctcttacttgtcgagaccgacctgggagtcaaatcacacatctccgacgctcttaaggtgctgcttgaccagagcccaataccagcagaggctttcgcaaaagcaaatggcgaatatgccgccagggcagctatgcggtcagcacaagcgaacatggatcctcaacaagaccaattcctcgccatcttctacgagaaatctgccgtcaagctgtttcagcctctcattgccctgaaagaccgcaaagatatgcagtttaccaacattgaagcatctgctttcacctatttggtggaaattctgtgcttctttattcggcagcaccagcatcgaagcaagtactttgtcctatcacaggacattgtcctgcggatcacgcagctcttgcagtccccagagaagtttctaaagctaggtaggttgatggcgcattgatagtattgattctgactaactccctgtatagtgggcatccgatttcttcgtcaacttgttggttcccaggacgagttctacatcaaacatttgtcagaaaagaaggctcttgaacctgtgctcgatctcctcattgcaacgatgccacgcgacaaccttctcagctccgcttgtcttgagcttttcgagcatattaagaaagagaatgtcaaagacttggtgaaacatattgttgagaattatcgggagaaattgcagagtctctcttacatggaagtgttccgagaaatccttcttcgatacgaccagactgccgggttcaccgcaaacatggactatttcttagagtcggaagacgaggccggacgtaggcggccaaacatcaacccaagaactggaccaatggagcatctgactatggaccaagcagaggaggaatattggaatacatccgacgacgaggacgagctgcaaggcaaggcaaccgacgggacatcatctatgaatggtgaaacaaccggccacaaactcatggtcgattatacgtcggacgaggacttggatgagaatatcgaagcaggggccatttccgcagacgaagaagcaacgaaagataagacgcagaagacggatgccgccccgaccgtaccgccacccgaacgagtgtctgaaaaacgacggcgcgaggaggacgaggaggacgatctcagtaaaatgatccagcacaaacgccgaaacagcacatctgcaggttcaaacgcgtcagttcccacggcgagtgttcttagaaagaagaaggccggaccgggcactcgagacgccaacattgcacccaagaagattgctatcagcctgacatccaccgggaaagccggaggccattcgggcaatgattgagcgatgttatggtcattcgaagtttctttgacacattgaccatggatgatataccatgaacttgatccggactgatttatgaggattagggaaggaggcgtccggcgagacgggaggacatttgcgccgtgctaagggcaagcgataggcatgctgctcgacaagccggggatcttcactgcagcattgccctggcaccggcagaaacagtgttcagagtaaactggatgggcttataccacctacatggtggttgaactgaaagagtactgtctgagaacgccggaaagatcgatctaaagaggcgatctacctccttgtactattaagggatacacctaaataatggtgatctttgccaggcaggcaatgcgactgcgtttgagatcatgagaaactcgcgtcacggaaattgaatgacatgaaaaaattcacaatgcatgcttgagtctctacccatgacatgggatatgacgtgataacgtgactgtttaacggccaggcgagctgtataagatctgtattcatccgggctgattgctca

SEQ ID NO: 31350 - DNA, 1182 bp, Muscodor strobelii
  misc_feature: SGI cDNA ID NO. 570791
  misc_feature: Encodes the peptide sequence at SEQ ID NO 31351
atggctgaatggggccgaggactcctccaaacggaggacgatgtcaacatcgcggcggagctcgctcaagacttcggtttcccgctatgtgcaccgtttggccctcccgatccatcgcagccccagcaagacgttgaacacccgttgattgttcctcgtgagctgtccagactcaagaagggcgacccaatccgcgtccttcgccctgcgactgagcagcgcccagagaagcgatacactggttggttcatcggcatggaggaggatgctaaaggcaagcaagttgtcaacttcttttgctacgaaagtaaccgtaccaaatcactcccagcttcatggtgcacacctggagtgatgagacacaatgtgtttcccgccatgatggagtactttgactgggaagagttcgaccgtcgtgcgacggcaaagaagctcaacgacaacgatctactacgcaactacttcaacgaccttctgtcaatcgaaccaatctccgcgttagcctaccacaagcgcaatcacaaagccatcgtgctcggtatgctagctatgatgaccgccgctcgtatcgacaagaagcacatggatgctctacgatctctacgccatactctgccgactatcgagcagcaggttcagcttcttgctgcgctggatggatacagccaggatgaggacatgcactggatgtgcggaagcaagacgtttgccgaggttcagcagacgaatgccactgataacacgttgtaccccgatgatcttggagacgagtttctgtacagcggacttggattcaattaccacgatttcccttcgtctaacatggaaagcacaagctgcatgtgctgtggcaaggtcaaagaggaccttctccgttgtaaccgatgcaagatcgcgcgtttctgcaataaaggctgtcaaaagctggcatggtcgagccacaaagctgtctgcaaagtccgagaggacgttcgttcctgcgctgtctcgcaagatgctattgaaaagcattacatactgcgtttgatggagcgacaaaaaagacgacataacgaatcgaaggataagaacgttgaggcggccgaggagccgttgcctgagccaagcaaggacactagagatgccaaggagatcgaggatggaatccgtgaaattaaagagtttgttagaactctgctgtag

SEQ ID NO: 31351 - protein, 393 aa, Muscodor strobelii
  misc_feature: SGI Peptide ID NO. 570791
  misc_feature (280)..(318): Pfam Id: PF01753 Pfam Desc: MYND finger
  misc_feature (272)..(319): NCBI GI: 225715142 Blast Desc: SET and MYND domain-containing protein 3 [Esox lucius]
  misc_feature (255)..(319): NCBI GI: 213512076 Blast Desc: SET and MYND domain-containing protein 3 [Salmo salar] gi|209155626|gb|ACI34045.1| SET and MYND domain-containing protein 3 [Salmo salar]
  misc_feature (257)..(319): NCBI GI: 82658264 Blast Desc: SET and MYND domain containing 3 [Danio rerio] gi|81097726|gb|AAI09413.1| SET and MYND domain containing 3 [Danio rerio]
  misc_feature (267)..(318): NCBI GI: 187607241 Blast Desc: LOC100145429 [Xenopus (Silurana) tropicalis] gi|170284459|gb|AAI61001.1| LOC100145429 protein [Xenopus (Silurana) tropicalis]
  misc_feature (244)..(318): NCBI GI: 148225404 Blast Desc: MGC80131 protein [Xenopus laevis] gi|49118725|gb|AAH72803.1| MGC80131 protein [Xenopus laevis]
  misc_feature (257)..(325): NCBI GI: 50740707 Blast Desc: : similar to histone methyltransferase [Gallus gallus]
  misc_feature (275)..(319): NCBI GI: 169846112 Blast Desc: [Coprinopsis cinerea okayama7#130] gi|116509099|gb|EAU91994.1| [Coprinopsis cinerea okayama7#130]
  misc_feature (272)..(327): NCBI GI: 156551085 Blast Desc: : similar to ENSANGP00000010446 [Nasonia vitripennis]
  misc_feature (280)..(366): NCBI GI: 119923992 Blast Desc: : similar to egl nine homolog 1 [Bos taurus]
  misc_feature (280)..(319): NCBI GI: 221108687 Blast Desc: : similar to , partial [Hydra magnipapillata]
MAEWGRGLLQTEDDVNIAAELAQDFGFPLCAPFGPPDPSQPQQDVEHPLIVPRELSRLKKGDPIRVLRPATEQRPEKRYTGWFIGMEEDAKGKQVVNFFCYESNRTKSLPASWCTPGVMRHNVFPAMMEYFDWEEFDRRATAKKLNDNDLLRNYFNDLLSIEPISALAYHKRNHKAIVLGMLAMMTAARIDKKHMDALRSLRHTLPTIEQQVQLLAALDGYSQDEDMHWMCGSKTFAEVQQTNATDNTLYPDDLGDEFLYSGLGFNYHDFPSSNMESTSCMCCGKVKEDLLRCNRCKIARFCNKGCQKLAWSSHKAVCKVREDVRSCAVSQDAIEKHYILRLMERQKRRHNESKDKNVEAAEEPLPEPSKDTRDAKEIEDGIREIKEFVRTLL

SEQ ID NO: 31352 - DNA, 1919 bp, Muscodor strobelii
  misc_feature: SGI EST ID NO. CUFF.74195.0
  misc_feature: Variant of the nucleotide sequence at SEQ ID NO 31350
gcttcatggtgcacacctggagtgatgagacacaatgtgtttcccgccatgatggagtactttgactgggaagagttcgaccgtcgtgcgacggcaaagaagctcaacgacaacgatctactacgcaactacttcaacgaccttctgtcaatcgaaccaatctccgcgttagcctaccacaagcgcaatcacaaagccatcgtgctcggtatgctagctatgatgaccgccgctcgtatcgacaagaagcacatggatgctctacgatctctacgccatactctgccgactatcgagcagcaggttcagcttcttgctgcgctggatggatacagccaggatgaggacatgcactggatgtgcggaagcaagacgtttgccgaggttcagcagacgaatgccactgataacacgttgtaccccgatgatcttggagacgagtttctgtacagcggacttgggttggtataactcttagtgtccccccgcgcaattcgtgccattattcctcttattattagtggtacgggttctgatgttttaacccccctagattcaattaccacgatttcccttcgtctaacatggaaagcacaagctgcatgtgctgtggcaaggtcaaagaggaccttctccgttgtaaccgatgcaagatcgcgcgtttctgcaataaaggctgtcaaaagctggcatggtcgagccacaaagctgtctgcaaagtccgagaggacgttcgttcctgcgctgtctcgcaagatgctattgaaaagcattacatactgcgtttgatggagcgacaaaaaaggtcagtaggctcaaacgccaagatattgaagtagcacgaagctgacttcaatatctccagacgacataacgaatcgaaggataagaacgttgaggcggccgaggagccgttgcctgagccaagcaaggacactagagatgccaaggagatcgaggatggaatccgtgaaattaaagagtttgttagaactctgctgtagaggtgccaggagactttgttggcagaaacagggaggatctccagtaagccatgggagtatgctaagtctaggatcgcagttgctgtaacaagacgccatccattgaggcttcccagaatgacacgggcaggcagttgacaaaataattgatacattcatttgagtacccctaacagcgccagtacacaattcggtaaattatgcattgcttagttaatttgaaattatagatattattcgtaaactatttaaaagtgtactcaatgattattcgatctagaaaataggacgctgtaaaattcgttgttttgagcatttaattttttaatgatgccattcattttatgctcgacctgacaggtccctgagaatattatttggttgtgacaaagttgcgtataagaaagtttctggattgactattgatggaaactacaaatgaaatgttccacagtatggaactatatgtctttgaactaaattccccttgcactggattggcaagctgccgacgaggtggcatgatgttaggcgtgtgggcgatgcggattgccggcgctaaggatgtaacagggatcagatcagatctcttaggaccaaggtgctatctatatctaacgataccacaattctagtcattgatagagactgcatgaatgatgggcgtatatgcgtcaataattaccttatgacttgtctgtctatctactgcttttgtatctatcggttgagggtatacaggatatgtacttcgcctcgtttcaatcgaagctgagggctgcattgccatgctgtttacatgtgagagcagctaatctggtactaaggtgtaattgtgtatatggttgcatgtgaaggtccctaaggaacgttggagcaaaacacatgctggaatactacaaaaaatgaaaaaat

SEQ ID NO: 31353 - DNA, 783 bp, Muscodor strobelii
  misc_feature: SGI cDNA ID NO. 570792
  misc_feature: Encodes the peptide sequence at SEQ ID NO 31354
atggtagcagacagaagtacctccgcagtccttcccgatgatgatatcgactatttgccagcccccgactctcacactgaccagatcagtgctgaaaacaaagtcgcgataggctcatctcgcagtcgcgatgctttttttctgctcggtgtcactgggcggttgatcattcttctcccaatatgcggtgtgctgattttgattgtgtactacgcttgcgtcagaggggatacatcttttgaacgcttcattgacagcgactctttcggactgagatttctctttaccagctttggtgttatcatcagcttcctgtggtcttcattctttgatgctgtcgcaatgaaaaccccttatcgactcctatcctacacgccccagattgcttcccgatccatcttactgtcgcatccgacaaatggtgtctcagctattgggtacgctttgcgcacacggcaactattcatcggcgcggtagggcttgcttcgctactctccgaattcctcggtctgttcttgagtagagtcccttaccaagtcacagaaactctcctgttgtctcaagtgagtacctggatgtcagtggccatcttggcgtatatggtccttctggttctttgctcctttttcgttcactggccacaaatgcccgtcgacccaagaaccattgctggtgcaatgtattacatatgcacatcgcccttgatagacgagctttcagcactgagcgctttggacagaaagggtcgcgacaacaagatcgcccggctcgatcattcgtaa

SEQ ID NO: 31354 - protein, 260 aa, Muscodor strobelii
  misc_feature: SGI Peptide ID NO. 570792
  misc_feature (46)..(257): NCBI GI: 116195274 Blast Desc: CHGG_04235 [Chaetomium globosum CBS 148.51] gi|88180148|gb|EAQ87616.1| CHGG_04235 [Chaetomium globosum CBS 148.51]
  misc_feature (22)..(257): NCBI GI: 171691236 Blast Desc: protein product [Podospora anserina] gi|170945566|emb|CAP71679.1| protein product [Podospora anserina]
  misc_feature (10)..(257): NCBI GI: 256725755 Blast Desc: NECHADRAFT_43287 [Nectria haematococca mpVI 77-13-4]
  misc_feature (27)..(257): NCBI GI: 46116628 Blast Desc: FG04156.1 [Gibberella zeae PH-1]
  misc_feature (46)..(257): NCBI GI: 39945810 Blast Desc: MGG_08025 [Magnaporthe grisea 70-15] gi|145019260|gb|EDK03488.1| MGG_08025 [Magnaporthe grisea 70-15]
  misc_feature (20)..(256): NCBI GI: 171695510 Blast Desc: protein product [Podospora anserina] gi|170947997|emb|CAP60161.1| protein product [Podospora anserina]
  misc_feature (39)..(257): NCBI GI: 171679900 Blast Desc: protein product [Podospora anserina] gi|170939576|emb|CAP64803.1| protein product [Podospora anserina]
  misc_feature (61)..(257): NCBI GI: 171678505 Blast Desc: protein product [Podospora anserina] gi|170937322|emb|CAP61980.1| protein product [Podospora anserina]
  misc_feature (41)..(257): NCBI GI: 46123099 Blast Desc: FG05927.1 [Gibberella zeae PH-1]
  misc_feature (54)..(259): NCBI GI: 116181404 Blast Desc: CHGG_01330 [Chaetomium globosum CBS 148.51] gi|88185627|gb|EAQ93095.1| CHGG_01330 [Chaetomium globosum CBS 148.51]
MVADRSTSAVLPDDDIDYLPAPDSHTDQISAENKVAIGSSRSRDAFFLLGVTGRLIILLPICGVLILIVYYACVRGDTSFERFIDSDSFGLRFLFTSFGVIISFLWSSFFDAVAMKTPYRLLSYTPQIASRSILLSHPTNGVSAIGYALRTRQLFIGAVGLASLLSEFLGLFLSRVPYQVTETLLLSQVSTWMSVAILAYMVLLVLCSFFVHWPQMPVDPRTIAGAMYYICTSPLIDELSALSALDRKGRDNKIARLDHS

SEQ ID NO: 31355 - DNA, 332 bp, Muscodor strobelii
  misc_feature: SGI EST ID NO. CUFF.74206.0
  misc_feature: Variant of the nucleotide sequence at SEQ ID NO 31353
cagcccccgactctcacactgaccagatcagtgctgaaaacaaagtcgcgataggctcatctcgcagtcgcgatgctttttttctgctcggtgtcactgggcggttgatcattcttctcccaatatgcggtgtgctgattttgattgtgtactacgcttgcgtcagaggggatacatcttttgaacgcttcattgacagcgactctttcggactgagatttctctttaccagctttggtgttatcatcagcttcctgtggtcttcattctttgatgctgtcgcaatgaaaaccccttatcgactcctatcctacacgccccagattgcttcc

SEQ ID NO: 31356 - DNA, 1494 bp, Muscodor strobelii
  misc_feature: SGI cDNA ID NO. 570793
  misc_feature: Encodes the peptide sequence at SEQ ID NO 31357
atggcactcttgaatctaccaccagagctattagagcagattgttgccgaaaccttgcctgaagcctttgaaaatgtcatgcttagctgtaagaagctctttatgatcggaagcccatttatccaagaacacaagcaggcaaaatatgcgttcagcaacatcagcatatgcggaacgaatggtctctcaggtctatatttgctcaacgagatttccaaaaacccaagaatttcgcactacatgagaacagtggatttatctacccatcatgactggcgtcagtttaaggaaaattctcaatacttaacggaagacaagggagtcgtgactaacgtcagagatttcattgagaatacgccatatctcagtgctccaggtgttaagccaaatttctggggagaacagatactctccgatgttgaaaacccagatatctacagtgaccacaacatgtatgatccctctactttgagactaagtatcaagcaattcctaggaatctttttgttgacattgttcccgactgctacgaccctgactctgcccgggaatagtccaggaatctggccctttcgcgaacgtgaggagtctgccagacaatgtcagagcgtattcaataggattctggatagaagccgctcgaaaagcatgcacgcatctttgagaaatctcaaatgtctgaaatactttttgcaggcagattatgataccaaggaaaatttaactttcatacatccgctactagccctgccaaatcttgaggagttatatgcgacgagtctagtggctgtcgacttccacaatgatttccactggcaatatccagatattaattccagtcttcggacgatcgagcttgcggattcctgcatggacggtgtgagcgtatctcagctactagcccacacgccgaatctcacttctttcagatacgaacatgcttcaaagcatcatggcctactagcatattgggatgccggagaattcatggctgcagtcgaaaagcacgttggtgcccaactacgtcatctcgctgtcacaatcaagccacgttcgaccaatggaattgaggcaggcgtcacctcgatgcgtggatttacacaattgagcacactggaaattgactggacagtgtttttcggaccgtcgctcgagtcgggtgagaaacccttcctcgcgacccctccgaagccaggatattccaaatggagcgtgaatgatattccgccacttcgaaagattctaccctatggccttgagaagtttaccctttttgtcgatatcaacagctctctatgtcaaggctctttgcctcggttcttcgaggggctttttatgacaagtgatattattgctgccgagtcttgcttcgtgagacagagaggcgacggcgacggaaaagatgctagaacaatactccccgagcaaaatgtgttcgtgaataggtcagcaatcccccaatggaggaagaatttcggcttagtaggtacttga

SEQ ID NO: 31357 - protein, 497 aa, Muscodor strobelii
  misc_feature: SGI Peptide ID NO. 570793
  misc_feature (14)..(492): NCBI GI: 169600769 Blast Desc: SNOG_03233 [Phaeosphaeria nodorum SN15] gi|111068844|gb|EAT89964.1| SNOG_03233 [Phaeosphaeria nodorum SN15]
  misc_feature (1)..(422): NCBI GI: 189192230 Blast Desc: conserved [Pyrenophora tritici-repentis Pt-1C-BFP] gi|187974060|gb|EDU41559.1| conserved [Pyrenophora tritici-repentis Pt-1C-BFP]
  misc_feature (1)..(491): NCBI GI: 154319175 Blast Desc: [Botryotinia fuckeliana B05.10] gi|150856970|gb|EDN32162.1| [Botryotinia fuckeliana B05.10]
  misc_feature (1)..(378): NCBI GI: 121714845 Blast Desc: F-box domain protein [Aspergillus clavatus NRRL 1] gi|119403188|gb|EAW13606.1| F-box domain protein [Aspergillus clavatus NRRL 1]
  misc_feature (13)..(444): NCBI GI: 238493137 Blast Desc: conserved [Aspergillus flavus NRRL3357] gi|220696299|gb|EED52641.1| conserved [Aspergillus flavus NRRL3357]
  misc_feature (1)..(374): NCBI GI: 121712451 Blast Desc: F-box domain protein [Aspergillus clavatus NRRL 1] gi|119401989|gb|EAW12411.1| F-box domain protein [Aspergillus clavatus NRRL 1]
  misc_feature (13)..(427): NCBI GI: 255941258 Blast Desc: Pc16g10920 [Penicillium chrysogenum Wisconsin 54-1255] gi|211586021|emb|CAP93762.1| Pc16g10920 [Penicillium chrysogenum Wisconsin 54-1255]
  misc_feature (167)..(428): NCBI GI: 145604531 Blast Desc: [Magnaporthe grisea 70-15] gi|145012535|gb|EDJ97189.1| [Magnaporthe grisea 70-15]
  misc_feature (235)..(444): NCBI GI: 169783360 Blast Desc: [Aspergillus oryzae RIB40] gi|83774886|dbj|BAE65009.1| protein product [Aspergillus oryzae]
MALLNLPPELLEQIVAETLPEAFENVMLSCKKLFMIGSPFIQEHKQAKYAFSNISICGTNGLSGLYLLNEISKNPRISHYMRTVDLSTHHDWRQFKENSQYLTEDKGVVTNVRDFIENTPYLSAPGVKPNFWGEQILSDVENPDIYSDHNMYDPSTLRLSIKQFLGIFLLTLFPTATTLTLPGNSPGIWPFREREESARQCQSVFNRILDRSRSKSMHASLRNLKCLKYFLQADYDTKENLTFIHPLLALPNLEELYATSLVAVDFHNDFHWQYPDINSSLRTIELADSCMDGVSVSQLLAHTPNLTSFRYEHASKHHGLLAYWDAGEFMAAVEKHVGAQLRHLAVTIKPRSTNGIEAGVTSMRGFTQLSTLEIDWTVFFGPSLESGEKPFLATPPKPGYSKWSVNDIPPLRKILPYGLEKFTLFVDINSSLCQGSLPRFFEGLFMTSDIIAAESCFVRQRGDGDGKDARTILPEQNVFVNRSAIPQWRKNFGLVGT

SEQ ID NO: 31358 - DNA, 1776 bp, Muscodor strobelii
  misc_feature: SGI cDNA ID NO. 570794
  misc_feature: Encodes the peptide sequence at SEQ ID NO 31359
atgagatctgtttctatcatcccattgctggccgccgtggcttacacgctaccatccctctcgaagtatagtcggggcgaaaatgagaccatccctttttctattcccagtaaagacagagattctcaatcgagggcttctgctctcgatatcaaacgacaaggttggagttatggatcatttcccctgggcattgcgccacttccagctggggatctagctgagaaagcaatggccgaggaatacgtcgagtggctccccgatactgccaaaggaagcaaaaatgctcagatagatgagaagttagcaagagacgcacttctaagtggaagtaacttcacctctctcgacgactacaagagactatacgatggtttatggcaagtatcgttgccggagggcgtttttgatggcatgaacttctctatcaccaggctcacaaactatactgacgatcgcatgttttccatgatgcgtctttctgcaagcccttatcgagttcgacgagtacagttggaagaggctctgctatttcatgtagataatgccgcttcaataacgggactttctcaaaaagagctgcagtcgcaagggcgcctgttttcaattgattacagcgatctcaaagatcagacttcgtcagggttgtatggcgctggttgtcaggcatatttctacatttcgccgacatcgggtgacttcttgcctttggcaatcaaaggtattttcaagggcatagaagacaaggccctagtgtacacgccagaagattctgcagacgactggatgctcgccaaattgatgttcaactctaatgataactggcactgtctgtatagccatgttgtttattctcatgcggctgcggagggcccgtaccttgcggccatcagagctttcagcgacgatcatcccattttagccataatgaaaagatatgagaacacgccgtggggtatccgacctgctttatggcaaaatgtcgttacctcgaaacaagttgattcgtattacccctggactggttacgccgctgacacttccggcgaggctggtaacttcacaagtaactatatcaagacaaatttggaaaacaggggcttaatcaatagtgcatttggtcccgagttgaagaaatttccgttctgggaggattgtttcactgttgttgacaacatccgtgacttcatgagagctttcatctactcatattatcatgaagacatagccgttatgcaggatattgagttacaagactgggctaccgaagctcaagttgccaaagtaccagattttcccacaagaattacgagccgggagcaggtagttgaaatgcttacacatcatgcatatctaggcacagtggttcacagtgtacttagtacggacggttcagttggcgacacagtcgcgctgccatttgccccttctgcgttctggaaaccgttgccaacagaaaagggcgcaacaaatattattcagtatatgccccaagttgatgcggcgatctatcaggttgcgattctggctgccgtcaaccgccctttctggaaggacagtaatcaaacgatgtcacacatgttcgatgatactgcgatgttgcaaaggatgaacagtgcaaccaacatcgcagcagcaaaatacaagaaggcacagaacgacttcagtgagatagtccgtgctcgaaaatttgaccaagacggactcatgaacgggatgccctttgcgtggaaagtgcttgatcccaattgggcaccttattggagcacagtttag

SEQ ID NO: 31359 - protein, 591 aa, Muscodor strobelii
  misc_feature: SGI Peptide ID NO. 570794
  misc_feature (33)..(591): NCBI GI: 17861374 Blast Desc: manganese lipoxygenase [Gaeumannomyces graminis var. avenae]
  misc_feature (33)..(591): NCBI GI: 159122314 Blast Desc: arachidonate 5-lipoxygenase, [Aspergillus fumigatus A1163]
  misc_feature (33)..(591): NCBI GI: 70981869 Blast Desc: arachidonate 5-lipoxygenase [Aspergillus fumigatus Af293] gi|66844086|gb|EAL84425.1| arachidonate 5-lipoxygenase, [Aspergillus fumigatus Af293]
  misc_feature (33)..(591): NCBI GI: 119487626 Blast Desc: lipoxygenase, [Neosartorya fischeri NRRL 181] gi|119410702|gb|EAW20648.1| lipoxygenase, [Neosartorya fischeri NRRL 181]
  misc_feature (14)..(591): NCBI GI: 145604322 Blast Desc: MGG_08499 [Magnaporthe grisea 70-15] gi|145012339|gb|EDJ96995.1| MGG_08499 [Magnaporthe grisea 70-15]
  misc_feature (33)..(568): NCBI GI: 17861376 Blast Desc: manganese lipoxygenase [Gaeumannomyces graminis var. tritici]
  misc_feature (7)..(423): NCBI GI: 238495959 Blast Desc: conserved [Aspergillus flavus NRRL3357] gi|220694095|gb|EED50439.1| conserved [Aspergillus flavus NRRL3357]
  misc_feature (350)..(591): NCBI GI: 154300392 Blast Desc: BC1G_11385 [Botryotinia fuckeliana B05.10] gi|150856708|gb|EDN31900.1| BC1G_11385 [Botryotinia fuckeliana B05.10]
  misc_feature (7)..(306): NCBI GI: 186966745 Blast Desc: lipoxygenase [Aspergillus flavus]
  misc_feature (157)..(418): NCBI GI: 256719967 Blast Desc: NECHADRAFT_89463 [Nectria haematococca mpVI 77-13-4]
  misc_feature (43)..(514): SWISSPROT Homolog: EC 1.13.11.31 Arachidonate 12-lipoxygenase
MRSVSIIPLLAAVAYTLPSLSKYSRGENETIPFSIPSKDRDSQSRASALDIKRQGWSYGSFPLGIAPLPAGDLAEKAMAEEYVEWLPDTAKGSKNAQIDEKLARDALLSGSNFTSLDDYKRLYDGLWQVSLPEGVFDGMNFSITRLTNYTDDRMFSMMRLSASPYRVRRVQLEEALLFHVDNAASITGLSQKELQSQGRLFSIDYSDLKDQTSSGLYGAGCQAYFYISPTSGDFLPLAIKGIFKGIEDKALVYTPEDSADDWMLAKLMFNSNDNWHCLYSHVVYSHAAAEGPYLAAIRAFSDDHPILAIMKRYENTPWGIRPALWQNVVTSKQVDSYYPWTGYAADTSGEAGNFTSNYIKTNLENRGLINSAFGPELKKFPFWEDCFTVVDNIRDFMRAFIYSYYHEDIAVMQDIELQDWATEAQVAKVPDFPTRITSREQVVEMLTHHAYLGTVVHSVLSTDGSVGDTVALPFAPSAFWKPLPTEKGATNIIQYMPQVDAAIYQVAILAAVNRPFWKDSNQTMSHMFDDTAMLQRMNSATNIAAAKYKKAQNDFSEIVRARKFDQDGLMNGMPFAWKVLDPNWAPYWSTV

SEQ ID NO: 31360 - DNA, 1866 bp, Muscodor strobelii
  misc_feature: SGI cDNA ID NO. 570795
  misc_feature: Encodes the peptide sequence at SEQ ID NO 31361
atgatgaccaacgagagatcgctgaagagggacgcgattgactattccggtgttagtgaagcgagaccagctttgacggttgttcagctgggccatagcgtcctatgcctaacccaagaagttttgcggctgatcactaaggaatacagaaacgaaataaatgttaacaacatctcaattcctatacttcccgattcgctatcgggcggcatccttgctccggtcttcgcaatcgtactccagataggcatcattgccgcgctcgcgctttcgataggcttcgacttttacttctttgtcgaaaatgggtcaggacgagcaaatggggaaataccatcagcatattcggtgtcatatgtgacgggtatcactattctcgctacggctgcgtcgattttcactactgggcaaatccgacgcctttggatcaatgaccatggtgaacaccttggcgcctttgcgtctaccgcagagaggcgccatttttcagttttaacaggtacagcttcgttgaaaagtcagctcattcgatgggatataactacctcccttgccgttgtcagtttgttgacaacatcaatcgtcgccggcctgagtccgaaatctgtcctagcggagttctcgatatcagcagatttatacccagttcgcaacttgtccacctacgatcgatgctacacgccaaatagcgataatgtgacatcgattgccagtcagtggtttaattggactacatcaagcggcaactttgtgattcaagggtcatcttatgtgatggacagtagcttttccgaagatgaccctacactagatcgatgtgaaacaaagtggattctccctacactcatgaactatcaatcgacacccggcgacttcgcctactcacttggtggcactgccgtccattcatccgctctaggcgtccctttcaactcgaatagttacacctttggtgatacttttgcaggagatcgaggcggaggtggcaacactaatgcacgcatgctgggagttgacgaccaattttccacaatatgcatgcctgtcttagcatacaatccagtcacttgtacgctgagagaggatagctctgctttcaatctcctagttgacaagaacagcctgtctatcagcagtagcgagggctgcaccatcacgagtcctacattacaggtagatccaagcagctacccaggtgctactgttgccggtgcctgcacccaggatcatgaactgggcacagcgactatccttattggatctacgagaaatcatgctgaattattagcatacataatgggacaagaagatacatatcccaatcttgctgcagttcaatgttctatcgacgtacgatctgttgttgaattccggcaggtcaatatttctcgaccgggtcacgaggtcacagtactagatatcgatgacggtctagggaaagtcacctttctcgttcgaggagatgacgcgacgacttgcattccgcgggatgagaacggcgaatcgattgacatctcccgattcctaccagatacagccttggcgactgcagcagcggcatcgtgggagctcctggcagagaatcgatttgatgatggattcttagacacaataatccgcgcggcagaccacagatctcattatgtgccaaaaaaggaaggggcggtcacaaaactggagggcgttcttggaacggcgactggcattgcgctaggaatgtattggggtcggaaagtgaaaagagtccgagttggcccaggtgagttgtgggccattgtctatgctattccgcctttattttcggccggccttctactttacttgctgtgtccccatttccttggcggcaagaagacgagacattga

SEQ ID NO: 31361 - protein, 621 aa, Muscodor strobelii
  misc_feature: SGI Peptide ID NO. 570795
MMTNERSLKRDAIDYSGVSEARPALTVVQLGHSVLCLTQEVLRLITKEYRNEINVNNISIPILPDSLSGGILAPVFAIVLQIGIIAALALSIGFDFYFFVENGSGRANGEIPSAYSVSYVTGITILATAASIFTTGQIRRLWINDHGEHLGAFASTAERRHFSVLTGTASLKSQLIRWDITTSLAVVSLLTTSIVAGLSPKSVLAEFSISADLYPVRNLSTYDRCYTPNSDNVTSIASQWFNWTTSSGNFVIQGSSYVMDSSFSEDDPTLDRCETKWILPTLMNYQSTPGDFAYSLGGTAVHSSALGVPFNSNSYTFGDTFAGDRGGGGNTNARMLGVDDQFSTICMPVLAYNPVTCTLREDSSAFNLLVDKNSLSISSSEGCTITSPTLQVDPSSYPGATVAGACTQDHELGTATILIGSTRNHAELLAYIMGQEDTYPNLAAVQCSIDVRSVVEFRQVNISRPGHEVTVLDIDDGLGKVTFLVRGDDATTCIPRDENGESIDISRFLPDTALATAAAASWELLAENRFDDGFLDTIIRAADHRSHYVPKKEGAVTKLEGVLGTATGIALGMYWGRKVKRVRVGPGELWAIVYAIPPLFSAGLLLYLLCPHFLGGKKTRH

SEQ ID NO: 31362 - DNA, 972 bp, Muscodor strobelii
  misc_feature: SGI cDNA ID NO. 570796
  misc_feature: Encodes the peptide sequence at SEQ ID NO 31363
atgactaccgcattctgtgatcctacaaagacaaactgcctccctgatagagcactgggcatgacacttgaccttaacttcctagagaagtttgtagcggacgacccacccttttattactacacaggagcagattggacagaagatggcatcacgttgaccatccagaacgagacggatattcccctgattgtgttcccgaagtacatgttcttcggtcggctcgatctcgtaatgcatgcagccccgggaacaggtatcgcaacagttgtcgcgctcgtctcagacgacaatgatgaaatcgattgggaattcgtcggtgcagacttaaaccatgttcaaagtaattacattgggaaaggagacccgtccacgcccgatcgtaccaagtatcacgatgcttcgaatattacgacagcatggcaccaatatagcattgattggacacctcagtcaatatcatggcttgtagacgggatcgtgatgcggacgttgacttacaacgaggcaaacaacggcactctgtacccacaaacacctatgcaatgtaaaatatacagctacgttgtagggaagcacaactcatcgcagcaggatctcgaatggggtcacggctacgctaatctgtcccttgctccattcactacctatgtagaagctgcaagattccaagactatatgaacggcgagactagcgccaaggagtatgaatatacagacatgagtggctcctacgaggctatcagcatcgtaccaaacccttcgacgatcattacgtccagctatacgccaataagcacgagcccggctgtccagacatcaaaaccagctgttgaaacaaataagacctcacccaaactcaactctggggcaatagcgggcgtcgctgtcggtgctgtagcgttgatcgtgttggggatacttctcttcttcataatacggcggcgcaaggccatcaacagtaggcgttag

SEQ ID NO: 31363 - protein, 323 aa, Muscodor strobelii
  misc_feature: SGI Peptide ID NO. 570796
  misc_feature (34)..(204): Pfam Id: PF00722 Pfam Desc: Glycosyl hydrolases family 16
  misc_feature (34)..(182): Pfam Id: PF00722 Pfam Desc: Glycosyl hydrolases family 16
  misc_feature (6)..(256): NCBI GI: 84795041 Blast Desc: cell wall glucanosyltransferase Mwg1 [Metarhizium anisopliae] gi|84795043|gb|ABC65825.1| cell wall glucanosyltransferase Mwg1 [Metarhizium anisopliae]
  misc_feature (6)..(256): NCBI GI: 85090875 Blast Desc: NCU05974 [Neurospora crassa OR74A] gi|28920004|gb|EAA29391.1| NCU05974 [Neurospora crassa OR74A]
  misc_feature (6)..(261): NCBI GI: 46134299 Blast Desc: FG09289.1 [Gibberella zeae PH-1]
  misc_feature (6)..(318): NCBI GI: 239612999 Blast Desc: cell wall glucanase [Ajellomyces dermatitidis ER-3]
  misc_feature (6)..(318): NCBI GI: 119492047 Blast Desc: Glycosyl hydrolases family 16, [Neosartorya fischeri NRRL 181] gi|119411678|gb|EAW21621.1| Glycosyl hydrolases family 16, [Neosartorya fischeri NRRL 181]
  misc_feature (6)..(318): NCBI GI: 121705348 Blast Desc: Glycosyl hydrolases family 16, [Aspergillus clavatus NRRL 1] gi|119399083|gb|EAW09511.1| Glycosyl hydrolases family 16, [Aspergillus clavatus NRRL 1]
  misc_feature (6)..(274): NCBI GI: 42742375 Blast Desc: allergen rAsp f9-like protein [Verticillium dahliae]
  misc_feature (1)..(248): NCBI GI: 256727252 Blast Desc: NECHADRAFT_66036 [Nectria haematococca mpVI 77-13-4]
  misc_feature (6)..(318): NCBI GI: 261189647 Blast Desc: cell wall glucanase [Ajellomyces dermatitidis SLH14081] gi|239591470|gb|EEQ74051.1| cell wall glucanase [Ajellomyces dermatitidis SLH14081]
  misc_feature (6)..(318): NCBI GI: 146323378 Blast Desc: cell wall glucanase [Aspergillus fumigatus Af293] gi|129558320|gb|EAL92657.2| cell wall glucanase, [Aspergillus fumigatus Af293] gi|159127703|gb|EDP52818.1| cell wall glucanase,
MTTAFCDPTKTNCLPDRALGMTLDLNFLEKFVADDPPFYYYTGADWTEDGITLTIQNETDIPLIVFPKYMFFGRLDLVMHAAPGTGIATVVALVSDDNDEIDWEFVGADLNHVQSNYIGKGDPSTPDRTKYHDASNITTAWHQYSIDWTPQSISWLVDGIVMRTLTYNEANNGTLYPQTPMQCKIYSYVVGKHNSSQQDLEWGHGYANLSLAPFTTYVEAARFQDYMNGETSAKEYEYTDMSGSYEAISIVPNPSTIITSSYTPISTSPAVQTSKPAVETNKTSPKLNSGAIAGVAVGAVALIVLGILLFFIIRRRKAINSRR

SEQ ID NO: 31364 - DNA, 1312 bp, Muscodor strobelii
  misc_feature: SGI EST ID NO. CUFF.74242.0
  misc_feature: Variant of the nucleotide sequence at SEQ ID NO 31362
gcaatatgacaacctagaacagcttggcacgattgaccacaccaattgacccgaaccgatcgttgattcctcgataagtatcaatgcctgcggctcacgtctgcactttttgatgcgtgaattggttgacggcctcttcatctaagacccgattgctccgagactgttacccgctttgacaagattgaaaacatgactaccgcattctgtgatcctacaaagacaagtaagtctctcaaaaatatggctcatatgtaagtgacgagactgaatttcaatagactgcctccctgatagagcactgggcatgacacttgaccttaacttcctagagaagtttgtagcggacgacccacccttttattactacacaggagcagattggacagaagatggcatcacgttgaccatccagaacgagacggatattcccctgattgtgttcccgaagtacatgttcttcggtcggctcgatctcgtaatgcatgcagccccgggaacaggtatcgcaacagttgtcgcgctcgtctcagacgacaatgatgaaatcgattgggtaagtcgcgcatatcccccatgcaagatatccggcaatcatcttattacaaaaaggaattcgtcggtgcagacttaaaccatgttcaaagtaattacattgggaaaggagacccgtccacgcccgatcgtaccaagtatcacgatgcttcgaatattacgacagcatggcaccaatatagcattgattggacacctcagtcaatatcatggcttgtagacgggatcgtgatgcggacgttgacttacaacgaggcaaacaacggcactctgtacccacaaacacctatgcaatgtaaaatatacagctacgttgtagggaagcacaactcatcgcagcaggatctcgaatggggtcacggctacgctaatctgtcccttgctccattcactacctatgtagaagctgcaagattccaagactatatgaacggcgagactagcgccaaggagtatgaatatacagacatgagtggctcctacgaggctatcagcatcgtaccaaacccttcgacgatcattacgtccagctatacgccaataagcacgagcccggctgtccagacatcaaaaccagctgttgaaacaaataagacctcacccaaactcaactctggggcaatagcgggcgtcgctgtcggtgctgtagcgttgatcgtgttggggatacttctcttcttcataatacggcggcgcaaggccatcaacagtaggcgttagcttgtaattacagaagagttttgtcggtggttcggat

SEQ ID NO: 31365 - DNA, 489 bp, Muscodor strobelii
  misc_feature: SGI cDNA ID NO. 570797
  misc_feature: Elevated expression when VOC is produced
  misc_feature: Encodes the peptide sequence at SEQ ID NO 31366
atggctgcaactcaccaacctcatcaacaggtggcaagacaggttcagccgatggctgcttatggtcaacaaggaggcaaatggcaagctggactctgcgactgtagcccttgtgacagttgtctattaggatggtgcttaccgtgtatcttggttggccaaacatccgaacgaatgcgcgatccatctggccagactcacgactcttttaactcggattgtatcgtgtttggtctcatccactgtttcacgggctgtggttggatctacggtttactcaagcgaggcgagattcgcgagaaatacaatattgagggtggcggagccagtgattgctgtacttcatactggtgcttgtgctgctctctgattcaacaagacaacgaggttaagctgcgccagaagaatgctcttcaatcccaacagtatcaatcgcagcccgggatgcatatgccagcgccacagccggcgcaccacccacaacattag

SEQ ID NO: 31366 - protein, 162 aa, Muscodor strobelii
  misc_feature: SGI Peptide ID NO. 570797
  misc_feature (28)..(130): Pfam Id: PF04749 Pfam Desc: PLAC8 family
  misc_feature (24)..(153): NCBI GI: 46107954 Blast Desc: FG00860.1 [Gibberella zeae PH-1]
  misc_feature (24)..(153): NCBI GI: 256735437 Blast Desc: NECHADRAFT_105841 [Nectria haematococca mpVI 77-13-4]
  misc_feature (27)..(152): NCBI GI: 256730269 Blast Desc: NECHADRAFT_82596 [Nectria haematococca mpVI 77-13-4]
  misc_feature (27)..(151): NCBI GI: 261355381 Blast Desc: PLAC8 family protein [Verticillium albo-atrum VaMs.102]
  misc_feature (19)..(152): NCBI GI: 115492161 Blast Desc: conserved [Aspergillus terreus NIH2624] gi|114197568|gb|EAU39268.1| conserved [Aspergillus terreus NIH2624]
  misc_feature (27)..(152): NCBI GI: 70996068 Blast Desc: DUF614 domain protein [Aspergillus fumigatus Af293] gi|66850424|gb|EAL90751.1| DUF614 domain protein [Aspergillus fumigatus Af293] gi|159131543|gb|EDP56656.1| DUF614 domain A1163]
  misc_feature (23)..(155): NCBI GI: 238488969 Blast Desc: DUF614 domain protein [Aspergillus flavus NRRL3357] gi|220698110|gb|EED54450.1| DUF614 domain protein [Aspergillus flavus NRRL3357]
  misc_feature (27)..(152): NCBI GI: 119495088 Blast Desc: PLAC8 family protein [Neosartorya fischeri NRRL 181] gi|119412499|gb|EAW22440.1| PLAC8 family protein [Neosartorya fischeri NRRL 181]
  misc_feature (11)..(152): NCBI GI: 259483452 Blast Desc: TPA: DUF614 domain protein (AFU_orthologue; AFUA_5G00975) [Aspergillus nidulans FGSC A4]
  misc_feature (28)..(152): NCBI GI: 146323968 Blast Desc: DUF614 domain protein [Aspergillus fumigatus Af293] gi|129556389|gb|EAL86206.2| DUF614 domain protein [Aspergillus fumigatus Af293]
  misc_feature: Useful for introducing or modulating the production of volatile compounds
MAATHQPHQQVARQVQPMAAYGQQGGKWQAGLCDCSPCDSCLLGWCLPCILVGQTSERMRDPSGQTHDSFNSDCIVFGLIHCFTGCGWIYGLLKRGEIREKYNIEGGGASDCCTSYWCLCCSLIQQDNEVKLRQKNALQSQQYQSQPGMHMPAPQPAHHPQH

SEQ ID NO: 31367 - DNA, 1534 bp, Muscodor strobelii
  misc_feature: SGI EST ID NO. CUFF.74246.0
  misc_feature: Variant of the nucleotide sequence at SEQ ID NO 31365
tggctcgaggctttcacggttacccacatcatcatctctgggtagtccacgagagtacaaagtgattataattataggtacaagtagtgtgctatgacgttctgacttttctcgtagtttgcttttattcgcacttggttgttgttggtccgttttcgacattgtctttccgtctttccatcccccaacctcgtcacattcttgtcattgctagatttcctacattcctagagattgctagaacaaccaaaattcaaccttgcccccaacacaccgagctctaatagtacattaatagactctaataagtcaagaaatggcagaccaagaaaaattcgttggtagcccgccaccacaatatacaggcgaccagcagcaacatcaatatcctcattctcctagccatttcggacagccggaacagcaccaacagcaggctcaatactataatccgcataacccacaatcttctcccccatccccagcaatcatatcagcagcaaccgtacactcaagctgcgccaatggctgcaactcaccaacctcatcaacaggtggcaagacaggttcagccgatggctgcttatggtcaacaaggaggcaaatggcaagctggactctgcgactgtagcccttgtgacagttgtctattaggatggtgcttaccgtgtatcttggttggccaaacatccgaacgaatgcgcgatccatctggccagactcacgactcttttaactcggattgtatcgtgtttggtctcatccactgtttcacgggctgtggttggatctacggtttactcaagcgaggcgagattcgcgagaaatacaatattgagggtggcggagccagtgattgctgtacttcatactggtgcttgtgctgctctctgattcaacaagacaacgaggttaagctgcgccagaagaatgctcttcaatcccaacagtatcaatcgcagcccgggatgcatatgccagcgccacagccggcgcaccacccacaacattagggaagcatgttgccttgagagcacgatcaagcttacaaatgtgagacgaacttgtcagatattgtcatatccaggataccctttacttttcaattttgtaacaagctgcgctttcgaaatcaataccgtgcgtggcgtgcgcaaacgacatctctttattgtgtcaacataaactaaggctagtcagtgtcagtgggacacccaaagtggctcggcgtaaggagaataaattgtgcgccataagataatagcaatcaaatatccaagatcattgcccaagatcattagtttcttcgcacggcgtgagttcgtatgatttgggttacttcaacgtgcgtggtataattctcgatgcctgcttacttcatttattcgattgtctgataagggccctacaacgacacttgcatggcttctctgatacatgtagatgtataaacaagatgcgaccggctctaataaagtatcaggtaccatagcgtccattctctgtgaatgctttcgtagggtttacaatgtta

SEQ ID NO: 31368 - DNA, 990 bp, Muscodor strobelii
  misc_feature: SGI cDNA ID NO. 570798
  misc_feature: Encodes the peptide sequence at SEQ ID NO 31369
atgcttgacgcgttcctctccggcgctgcgttcggtgccgcccttggggcgagcggcatgtatcagccggctgtcattctatcacagatgaaactggagaatttccatatgatgcagacgtttcttgttgcttcggctgctagcactgtcattgtcgctgcaggtcaacgatcaggttatctaaacatgaacccccgatcctactcgtcactcggtctccttggaccgctagacggcaatattctcggcggtactatgctaggagctggtatgacgcttactggctcttgtccgggcacagtcttcacacaagttggtgctgggatacaatctggtctatatgtcctcggtggtggtatcctaggcggcatcgtatgggctggtgtcttacgaccgggtttagcaaagttgaaaccgaagacaaaagaggctgcacaaaaccctgacagcctcactatctatggagcgctgggaactagcaagagcgtagcgctcgcgggagttgaagtgatgtttgggagctgcatcgccttgttatcagttcttggacttgtcaaaacaaggggctattttagtccgatactcggcggtgcaatcatcgcaacggcgcagctgttctctgtaatggctcgaagaacacttctaggaacatcaacatcatttgaggaagtcggagatctcatcttgtggttactcggcgccgggagtaaaccgaaagggttcggtgcttcgacactagtcactggtatgatcacgggcatgtttgcgctttcgaaagccgtggaacttccaacggcttcgcttcctgacactaacttaggtcctgagagactcattcttggaggtgttctgcttgtattgggctcgagaatgggtggtggatgtacgtctggacatggcataagtggtatctcgctactgtccgtgtcgagtttcgtctcggttcttgctatgtttgctggagcgtttgctacggctgccttgatatga

SEQ ID NO: 31369 - protein, 329 aa, Muscodor strobelii
  misc_feature: SGI Peptide ID NO. 570798
  misc_feature (269)..(329): Pfam Id: PF04143 Pfam Desc: YeeE/YedE family (DUF395)
  misc_feature (1)..(328): NCBI GI: 39976035 Blast Desc: MGG_06056 [Magnaporthe grisea 70-15] gi|145011663|gb|EDJ96319.1| MGG_06056 [Magnaporthe grisea 70-15]
  misc_feature (2)..(329): NCBI GI: 256726868 Blast Desc: NECHADRAFT_90894 [Nectria haematococca mpVI 77-13-4]
  misc_feature (4)..(320): NCBI GI: 46123647 Blast Desc: FG06201.1 [Gibberella zeae PH-1]
  misc_feature (2)..(322): NCBI GI: 85106433 Blast Desc: NCU07046 [Neurospora crassa OR74A] gi|28923783|gb|EAA32949.1| NCU07046 [Neurospora crassa OR74A]
  misc_feature (1)..(328): NCBI GI: 121712341 Blast Desc: YeeE/YedE family protein [Aspergillus clavatus NRRL 1] gi|119401934|gb|EAW12356.1| YeeE/YedE family protein [Aspergillus clavatus NRRL 1]
  misc_feature (6)..(321): NCBI GI: 242759906 Blast Desc: conserved [Talaromyces stipitatus ATCC 10500] gi|218723077|gb|EED22494.1| conserved [Talaromyces stipitatus ATCC 10500]
  misc_feature (91)..(320): NCBI GI: 171683467 Blast Desc: protein product [Podospora anserina] gi|170941693|emb|CAP67347.1| protein product [Podospora anserina]
  misc_feature (4)..(321): NCBI GI: 156034258 Blast Desc: SS1G_13432 [Sclerotinia sclerotiorum 1980] gi|154698835|gb|EDN98573.1| SS1G_13432 [Sclerotinia sclerotiorum 1980]
  misc_feature (2)..(305): NCBI GI: 46139555 Blast Desc: FG11292.1 [Gibberella zeae PH-1]
  misc_feature (3)..(321): NCBI GI: 154310877 Blast Desc: BC1G_06417 [Botryotinia fuckeliana B05.10] gi|150851216|gb|EDN26409.1| BC1G_06417 [Botryotinia fuckeliana B05.10]
MLDAFLSGAAFGAALGASGMYQPAVILSQMKLENFHMMQTFLVASAASTVIVAAGQRSGYLNMNPRSYSSLGLLGPLDGNILGGTMLGAGMTLTGSCPGTVFTQVGAGIQSGLYVLGGGILGGIVWAGVLRPGLAKLKPKTKEAAQNPDSLTIYGALGTSKSVALAGVEVMFGSCIALLSVLGLVKTRGYFSPILGGAIIATAQLFSVMARRTLLGTSTSFEEVGDLILWLLGAGSKPKGFGASTLVTGMITGMFALSKAVELPTASLPDTNLGPERLILGGVLLVLGSRMGGGCTSGHGISGISLLSVSSFVSVLAMFAGAFATAALI

SEQ ID NO: 31370 - DNA, 1188 bp, Muscodor strobelii
  misc_feature: SGI EST ID NO. CUFF.74255.0
  misc_feature: Variant of the nucleotide sequence at SEQ ID NO 31368
ggcgactggaactcatgcttgctggaaacgaaaagccgggtagccgggcgggcgatgtgggactaaagtgatggcttttaaagatgggatgaactctcacgagccctgatctttagctatcacacctctgcaactttctctatcgaaaaattcttgttcggacatatttattagtgatcaagatgcttgacgcgttcctctccggcgctgcgttcggtgccgcccttggggcgagcggcatgtatcagccggctgtcattctatcacagatgaaactggagaatttccatatgatgcagacgtttcttgttgcttcggctgctagcactgtcattgtcgctgcaggtcaacgatcaggttatctaaacatgaacccccgatcctactcgtcactcggtctccttggaccgctagacggcaatattctcggcggtactatgctaggagctggtatgacgcttactggctcttgtccgggcacagtcttcacacaagttggtgctgggatacaatctggtctatatgtcctcggtggtggtatcctaggcggcatcgtatgggctggtgtcttacgaccgggtttagcaaagttgaaaccgaagacaaaagaggctgcacaaaaccctgacagcctcactatctatggagcgctgggaactagcaagagcgtagcgctcgcgggagttgaagtgatgtttgggagctgcatcgccttgttatcagttcttggacttgtcaaaacaaggggctattttagtccgatactcggcggtgcaatcatcgcaacggcgcagctgttctctgtaatggctcgaagaacacttctaggaacatcaacatcatttgaggaagtcggagatctcatcttgtggttactcggcgccgggagtaaaccgaaagggttcggtgcttcgacactagtcactggtatgatcacgggcatgtttgcgctttcgaaagccgtggaacttccaacggcttcgcttcctgacactaacttaggtcctgagagactcattcttggaggtgttctgcttgtattgggctcgagaatgggtggtggatgtacgtctggacatggcataagtggtatctcgctactgtccgtgtcgagtttcgtctcggttcttgctatgtttgctggagcgtttgctacggctgccttgatatgaataaacacaatttaag

SEQ ID NO: 31371 - DNA, 396 bp, Muscodor strobelii
  misc_feature: SGI cDNA ID NO. 570799
  misc_feature: Reduced expression when VOC is produced
  misc_feature: Encodes the peptide sequence at SEQ ID NO 31372
atggagcgtgtcctcatcagctccggctctgcattcgaagaagcgattgggtattcgagggcagtcgtcaccggggatttcatctttgtttcgggatgcaccggctacgactacgaaacaaacgaaatatcaccagacgtcgtccagcaagccgagcaagcactcaagaatgtagcgtcggcgcttgaggaagcgggctcgggcattgaggatgtggtgagggtgcagtatacgcttgtggataggagagagttcgagagtgtttggccggtgctgaggaagtggtttggcgatgttaggcccgcggctacgatggtgcaggctgggttgatgagcgaggatatgaggattgaggttgaggttactgctgttaaggggtccggcaggaagagttag

SEQ ID NO: 31372 - protein, 131 aa, Muscodor strobelii
  misc_feature: SGI Peptide ID NO. 570799
  misc_feature (12)..(125): Pfam Id: PF01042 Pfam Desc: Endoribonuclease L-PSP
  misc_feature (5)..(125): NCBI GI: 116194480 Blast Desc: CHGG_03838 [Chaetomium globosum CBS 148.51] gi|88179751|gb|EAQ87219.1| CHGG_03838 [Chaetomium globosum CBS 148.51]
  misc_feature (1)..(131): NCBI GI: 256727431 Blast Desc: NECHADRAFT_76280 [Nectria haematococca mpVI 77-13-4]
  misc_feature (6)..(130): NCBI GI: 46123645 Blast Desc: FG06200.1 [Gibberella zeae PH-1]
  misc_feature (3)..(123): NCBI GI: 171683487 Blast Desc: protein product [Podospora anserina] gi|170941703|emb|CAP67357.1| protein product [Podospora anserina]
  misc_feature (2)..(126): NCBI GI: 145603434 Blast Desc: MGG_13229 [Magnaporthe grisea 70-15] gi|145011665|gb|EDJ96321.1| MGG_13229 [Magnaporthe grisea 70-15]
  misc_feature (1)..(123): NCBI GI: 254514787 Blast Desc: endoribonuclease L-PSP [gamma proteobacterium NOR5-3] gi|219677030|gb|EED33395.1| endoribonuclease L-PSP [gamma proteobacterium NOR5-3]
  misc_feature (1)..(128): NCBI GI: 239930600 Blast Desc: acetyltransferase [Streptomyces ghanaensis ATCC 14672]
  misc_feature (1)..(123): NCBI GI: 261355835 Blast Desc: endoribonuclease L-PSP [Verticillium albo-atrum VaMs.102]
  misc_feature (1)..(125): NCBI GI: 50424739 Blast Desc: DEHA0F14883g [Debaryomyces hansenii CBS767] gi|49656628|emb|CAG89317.1| DEHA2F13706p [Debaryomyces hansenii]
  misc_feature (2)..(123): NCBI GI: 125988260 Blast Desc: endoribonuclease L-PSP [Streptomyces sp. FLA]
  misc_feature: Useful for introducing or modulating the production of volatile compounds
MERVLISSGSAFEEAIGYSRAVVTGDFIFVSGCTGYDYETNEISPDVVQQAEQALKNVASALEEAGSGIEDVVRVQYTLVDRREFESVWPVLRKWFGDVRPAATMVQAGLMSEDMRIEVEVTAVKGSGRKS

SEQ ID NO: 31373 - DNA, 690 bp, Muscodor strobelii
  misc_feature: SGI EST ID NO. CUFF.74475.1
  misc_feature: Variant of the nucleotide sequence at SEQ ID NO 31371
ttcgaacaaagactgaaaactatgacaggaacttatgacatctcgtgggaggtatatttcaaaattcatattcatctacaacattattcttcgattcgtctaaacttctttatacaaggatggagcgtgtcctcatcagctccggctctgcattcgaagaagcgattgggtattcgagggcagtcgtcaccggggatttcatctttgtttcgggatgcaccggctacgactacgaaacaaacgaaatatcaccagacgtcgtccagcaagccgagcaagcactcaagaatgtagcgtcggcgcttgaggaagcgggctcgggcattgaggatgtggtgagggtgcagtatacgcttgtggataggagagagttcgagagtgtttggccggtgctgaggaagtggtttggcgatgttaggcccgcggctacgatggtgcaggctgggttgatgagcgaggatatgaggattgaggttgaggttactgctgttaaggggtccggcaggaagagttaggggaggaatgaggagtggtgatggggatggtgaggtttgttaggattgttctggctttgttttgtgagttgatgtttaggtgtgggattgtgttagaaatataatctgtggctattgcttggttttaccttgagatttgcactatattctttgagtttgtagatgatgatcgttc

SEQ ID NO: 31374 - DNA, 2658 bp, Muscodor strobelii
  misc_feature: SGI cDNA ID NO. 570800
  misc_feature: Reduced expression when VOC is produced
  misc_feature: Encodes the peptide sequence at SEQ ID NO 31375
atggattcatacccctaccgcgatggttccggccgttcgccgcccgaccgaagctttggcagtcgcgatgaccggccaaggcaggaacctcgtgacgacttctatcgtggtcgttctcctggctatgaccgtcctagacgtcgatctcgctcccctcaagctgtagaccgatacgaacctcgaggtcgtggtcgagacgagtaccagcctccccgcgatcgcgatgatcgtcgccgagttcctacaccgccagccaacattgaccgttatgttcctggtgccagtaacaaccctggcggcaatagcgccagcgcccaaccacctcctcctactgtgaatccacttcaggatcctgtgaagctccccttccaggtcggcttctcctatttcggtgaatggtggcgagccaacgagaagattaaggaggaaaaggagcgtgcgcgcactggacgtagacgcgagccggaccgcccccgtggccgcgagactcaagaggatcgcgacaaggagaaggccaagatccagactgcgtatgatgcctaccgagaagacttacaggccaaaatggccagagcctttgtttccgaacacaagaaagagcagtggtttcgcgagaagtatgttcccgaggcaagggacgcattacgttcgcagatcaacgacttccgtcgcaatgtgtacctctcatgggaacaggacctggaatcgggcacatttgatgaattctcgctagaagggcttcccaagagcgagagcaacggggctggtggcgtgattgagaaagaagagggcgaggcaaccgctgctaacgaagtcctgggtgttggggatctggtgccagtgtctggcaatgatctacgagacgagagtttgtaccagcctacgctcttgatcaagaccatagcccctcatgtcagtcggcagaatcttgaagctttttgcaaagagcatctcggagaagatgagggtggtttcaaatggctgtccctcagcgatcccaaccctagcaagagatatcaccgcatgggctgggttatgctccatcctgcatctgagacggctgcatctgccgatcgaccggatcccaaagacgaggatggcgacgtcgacatcaaatccccagtaccagtttcgacagccgacaaagcactggaagccgttaatggcaaaacggtgaaggacgaagtgcgaggcgattttgtttgccatgttggtgttcataacccacccagcaaccctcgtaaaaaggccctctgggatctcttctcagctcccgagcgagtcgagaaggatcttagtcttgctcagaagctcgtcgaacatttcgagcaagattttggttctgacttcaatgccgctcttagaattgaagaacgggttgagtctctgcggaacgccgggcgtctccaaccagctattccggctacatctactaagaagcccaagcgggagcgcaatctcgatttcgacgacatggatgaaggagaggagggcgagatgggcgaatcggatgaggaaggcgcgattgacgacgaagaagtcgacgacgaggatcttttgatcaagaagaaacaactcgacctcacaatcgagtatctgcgtcgtgtcttcaatttctgtttcttctgcgtttttgagagcgattctattcatgagcttactcgaaaatgtcctggtggccatctgcgacgacctcgaagcacgctgtcgtcttctgctaagaacgtcgcccgtgccagtgctaatggcgatcctttcccttctaagaaacgagaggccaaagatgaggaagaaggcgaagctcctgagcccgatcgcaaattccggaatgcctcgaagaccgagcaacagttagaacgagcatacaagtgggtcaagacttttgaagacaagattatgcagattctcgaccctgggcacgcagacgtgaagaaactgggcggcaagccgacagaagaggctctcaacgatgagctcgccaagttcgtcaagcaggaagacgaacacaagttcaggtgtaaggtgcctgagtgcgccaagttattcaaagaagagcacttctggaagaagcatgtagaaaagcgacacaccgagtggctggacggcatgcgacaggagtttgatttgatcaattcctatgtcctggacccgtcccacattgctccatctaagacggacgctaatagcaatgggcatttccccccgtcaaatgggcagccgcaacagggtactcctcgtggcttcaatcttcagaattacaccatgaacaatatcatggcccaattccctggatttccgaatatgccaggcatgcctatgttcccgaataatgcgatgcaggctgctggatggaatgctggtggcgatgaacgtggtggtggtccgatccgccgtaatggccctggaggcatggggggtagattccaaaaccgagctggaccatacgaccgccgtcaacagcagggacgttggggccacgatggtcaaggtggtggcgctggtcgtggtagaggaggaggaggtgctggccgatggggtgatggcgcagcgggcggtgctgccgttggtcctcgcgaagctgttcaaggccgcagcctgaagtcgtacgaggatctggaccatgttgctggaggcggtggcggagaactgaactattaa

SEQ ID NO: 31375 - protein, 885 aa, Muscodor strobelii
  misc_feature: SGI Peptide ID NO. 570800
  misc_feature (1)..(885): NCBI GI: 256734417 Blast Desc: NECHADRAFT_30647 [Nectria haematococca mpVI 77-13-4]
  misc_feature (82)..(885): NCBI GI: 171696198 Blast Desc: protein product [Podospora anserina] gi|170948341|emb|CAP60505.1| protein product [Podospora anserina]
  misc_feature (1)..(885): NCBI GI: 46108448 Blast Desc: FG01106.1 [Gibberella zeae PH-1]
  misc_feature (43)..(885): NCBI GI: 164427702 Blast Desc: NCU02800 [Neurospora crassa OR74A] gi|157071850|gb|EAA35220.2| conserved [Neurospora crassa OR74A]
  misc_feature (16)..(885): NCBI GI: 154319241 Blast Desc: BC1G_02572 [Botryotinia fuckeliana B05.10] gi|150857003|gb|EDN32195.1| BC1G_02572 [Botryotinia fuckeliana B05.10]
  misc_feature (6)..(885): NCBI GI: 116181624 Blast Desc: CHGG_01440 [Chaetomium globosum CBS 148.51] gi|88185737|gb|EAQ93205.1| CHGG_01440 [Chaetomium globosum CBS 148.51]
  misc_feature (3)..(885): NCBI GI: 156063402 Blast Desc: SS1G_01819 [Sclerotinia sclerotiorum 1980] gi|154697153|gb|EDN96891.1| SS1G_01819 [Sclerotinia sclerotiorum 1980]
  misc_feature (108)..(885): NCBI GI: 145613500 Blast Desc: MGG_01586 [Magnaporthe grisea 70-15] gi|145020569|gb|EDK04698.1| MGG_01586 [Magnaporthe grisea 70-15]
  misc_feature (30)..(885): NCBI GI: 226283667 Blast Desc: conserved [Paracoccidioides brasiliensis Pb01]
  misc_feature (30)..(885): NCBI GI: 225683242 Blast Desc: conserved [Paracoccidioides brasiliensis Pb03]
  misc_feature: Useful for introducing or modulating the production of volatile compounds
MDSYPYRDGSGRSPPDRSFGSRDDRPRQEPRDDFYRGRSPGYDRPRRRSRSPQAVDRYEPRGRGRDEYQPPRDRDDRRRVPTPPANIDRYVPGASNNPGGNSASAQPPPPTVNPLQDPVKLPFQVGFSYFGEWWRANEKIKEEKERARTGRRREPDRPRGRETQEDRDKEKAKIQTAYDAYREDLQAKMARAFVSEHKKEQWFREKYVPEARDALRSQINDFRRNVYLSWEQDLESGTFDEFSLEGLPKSESNGAGGVIEKEEGEATAANEVLGVGDLVPVSGNDLRDESLYQPTLLIKTIAPHVSRQNLEAFCKEHLGEDEGGFKWLSLSDPNPSKRYHRMGWVMLHPASETAASADRPDPKDEDGDVDIKSPVPVSTADKALEAVNGKTVKDEVRGDFVCHVGVHNPPSNPRKKALWDLFSAPERVEKDLSLAQKLVEHFEQDFGSDFNAALRIEERVESLRNAGRLQPAIPATSTKKPKRERNLDFDDMDEGEEGEMGESDEEGAIDDEEVDDEDLLIKKKQLDLTIEYLRRVFNFCFFCVFESDSIHELTRKCPGGHLRRPRSTLSSSAKNVARASANGDPFPSKKREAKDEEEGEAPEPDRKFRNASKTEQQLERAYKWVKTFEDKIMQILDPGHADVKKLGGKPTEEALNDELAKFVKQEDEHKFRCKVPECAKLFKEEHFWKKHVEKRHTEWLDGMRQEFDLINSYVLDPSHIAPSKTDANSNGHFPPSNGQPQQGTPRGFNLQNYTMNNIMAQFPGFPNMPGMPMFPNNAMQAAGWNAGGDERGGGPIRRNGPGGMGGRFQNRAGPYDRRQQQGRWGHDGQGGGAGRGRGGGGAGRWGDGAAGGAAVGPREAVQGRSLKSYEDLDHVAGGGGGELNY

SEQ ID NO: 31376 - DNA, 3154 bp, Muscodor strobelii
  misc_feature: SGI EST ID NO. CUFF.74587.1
  misc_feature: Variant of the nucleotide sequence at SEQ ID NO 31374
acctcttttgtcccgacggcgacaaaggtgcgtgtttatctggctgacctcaccgcagccgcgacatcgcgaggggcattatctctcagcaacatcacctttgcaatcttttttgcagacttctgttgccgtgctgcgtgtctgcagccatctccaactcttttactgcatcttcaagcgcaacaagcattccaagtcccccaacgaccaccttcacgaccgaccgaccgtaacgtacataaacgcgatagggcctctatgagtaaaagatactgcctgctgtcaccttattagactacgtcacacaatggattcatacccctaccgcgatggttccggccgttcgccgcccgaccgaagctttggcagtcgcgatgaccggccaaggcaggaacctcgtgacgacttctatcgtggtcgttctcctggctatgaccgtcctagacgtcgatctcgctcccctcaagctgtagaccgatacgaacctcgaggtcgtggtcgagacgagtaccagcctccccgcgatcgcgatgatcgtcgccgagttcctacaccgccagccaacattgaccgttatgttcctggtgccagtaacaaccctggcggcaatagcgccagcgcccaaccacctcctcctactgtgaatccacttcaggatcctgtgaagctccccttccaggtcggcttctcctatttcggtgaatggtggcgagccaacgagaagattaaggaggaaaaggagcgtgcgcgcactggacgtagacgcgagccggaccgcccccgtggccgcgagactcaagaggatcgcgacaaggagaaggccaagatccagactgcgtatgatgcctaccgagaagacttacaggccaaaatggccagagcctttgtttccgaacacaagaaagagcagtggtttcgcgagaagtatgttcccgaggcaagggacgcattacgttcgcagatcaacgacttccgtcgcaatgtgtacctctcatgggaacaggacctggaatcgggcacatttgatgaattctcgctagaagggcttcccaagagcgagagcaacggggctggtggcgtgattgagaaagaagagggcgaggcaaccgctgctaacgaagtcctgggtgttggggatctggtgccagtgtctggcaatgatctacgagacgagagtttgtaccagcctacgctcttgatcaagaccatagcccctcatgtcagtcggcagaatcttgaagctttttgcaaagagcatctcggagaagatgagggtggtttcaaatggctgtccctcagcgatcccaaccctagcaagagatatcaccgcatgggctgggttatgctccatcctgcatctgagacggctgcatctgccgatcgaccggatcccaaagacgaggatggcgacgtcgacatcaaatccccagtaccagtttcgacagccgacaaagcactggaagccgttaatggcaaaacggtgaaggacgaagtgcgaggcgattttgtttgccatgttggtgttcataacccacccagcaaccctcgtaaaaaggccctctgggatctcttctcagctcccgagcgagtcgagaaggatcttagtcttgctcagaagctcgtcgaacatttcgagcaagattttggttctgacttcaatgccgctcttagaattgaagaacgggttgagtctctgcggaacgccgggcgtctccaaccagctattccggctacatctactaagaagcccaagcgggagcgcaatctcgatttcgacgacatggatgaaggagaggagggcgagatgggcgaatcggatgaggaaggcgcgattgacgacgaagaagtcgacgacgaggatcttttgatcaagaagaaacaactcgacctcacaatcgagtatctgcgtcgtgtcttcaatttctgtttcttctgcgtttttgagagcgattctattcatgagcttactcgaaaatgtcctggtggccatctgcgacgacctcgaagcacgctgtcgtcttctgctaagaacgtcgcccgtgccagtgctaatggcgatcctttcccttctaagaaacgagaggccaaagatgaggaagaaggcgaagctcctgagcccgatcgcaaattccggaatgcctcgaagaccgagcaacagttagaacgagcatacaagtgggtcaagacttttgaagacaagattatgcagattctcgaccctgggcacgcagacgtgaagaaactgggcggcaagccgacagaagaggctctcaacgatgagctcgccaagttcgtcaagcaggaagacgaacacaagttcaggtgtaaggtgcctgagtgcgccaagttattcaaagaagagcacttctggaagaagcatgtagaaaagcgacacaccgagtggctggacggcatgcgacaggagtttgatttgatcaattcctatgtcctggacccgtcccacattgctccatctaagacggacgctaatagcaatgggcatttccccccgtcaaatgggcagccgcaacagggtactcctcgtggcttcaatcttcagaattacaccatgaacaatatcatggcccaattccctggatttccgaatatgccaggcatgcctatgttcccgaataatgcgatgcaggctgctggatggaatgctggtggcgatgaacgtggtggtggtccgatccgccgtaatggccctggaggcatggggggtagattccaaaaccgagctggaccatacgaccgccgtcaacagcagggacgttggggccacgatggtcaaggtggtggcgctggtcgtggtagaggaggaggaggtgctggccgatggggtgatggcgcagcgggcggtgctgccgttggtcctcgcgaagctgttcaaggccgcagcctgaagtcgtacgaggatctggaccatgttgctggaggcggtggcggagaactgaactattaagtactctcatatggagcaaggcgttgacttcaagtacaattcacgggcgctctttgtaacagtagctagctaatttgtttgcctgagatcaaaaacaatggcgtgttcgtatatactataaaatgcgtggtttttgcagaacgattgcatttgcagtgtggttcatgatgtggcataatttgacttccg

SEQ ID NO: 31377 - DNA, 567 bp, Muscodor strobelii
  misc_feature: SGI cDNA ID NO. 570801
  misc_feature: Reduced expression when VOC is produced
  misc_feature: Encodes the peptide sequence at SEQ ID NO 31378
atgacgacgtatctcccgaagctaaacacgataccatatgatgtcttcgtcaaccccacggcatccgtcctcctaccaattgtcctcggcacggccgtaggttacagcacgcgaccaaagcaaacccaagaaacctacgccgcgatgaaacaaccccctctgcgccctccccctcaaatattcggacccgtatggacaatcctctacggaatgatgggctacgccgcccaccgcgccgtagtcgcttctcccactcccgcctccgccgacagcatacgaacgctctactcggcacagctgggtctgaacctgatctggatgccgctcttcttctcctaccggaagcccgctctcgcgctcgccaatatcgtgtcgctagtgggattgaatgggtatttgacgaatctgtatttcggtattgatgatgttgcgggttggtgtatggtcccttatatggcttggttgggctttgctacttatttgaatgccggcacggggtacttgaatcagtgggatatctctgagtcgacgctcgctacgaggaaggctttgggtaaggatttgtag

SEQ ID NO: 31378 - protein, 188 aa, Muscodor strobelii
  misc_feature: SGI Peptide ID NO. 570801
  misc_feature (13)..(172): Pfam Id: PF03073 Pfam Desc: TspO/MBR family
  misc_feature (13)..(162): Pfam Id: PF03073 Pfam Desc: TspO/MBR family
  misc_feature (1)..(179): NCBI GI: 154319239 Blast Desc: BC1G_02571 [Botryotinia fuckeliana B05.10] gi|150857002|gb|EDN32194.1| BC1G_02571 [Botryotinia fuckeliana B05.10]
  misc_feature (1)..(187): NCBI GI: 156063404 Blast Desc: SS1G_01820 [Sclerotinia sclerotiorum 1980] gi|154697154|gb|EDN96892.1| SS1G_01820 [Sclerotinia sclerotiorum 1980]
  misc_feature (1)..(176): NCBI GI: 145613502 Blast Desc: MGG_01585 [Magnaporthe grisea 70-15] gi|145020570|gb|EDK04699.1| MGG_01585 [Magnaporthe grisea 70-15]
  misc_feature (1)..(186): NCBI GI: 171696196 Blast Desc: protein product [Podospora anserina] gi|170948340|emb|CAP60504.1| protein product [Podospora anserina]
  misc_feature (1)..(182): NCBI GI: 256735165 Blast Desc: [Nectria haematococca mpVI 77-13-4]
  misc_feature (1)..(182): NCBI GI: 46108298 Blast Desc: FG01031.1 [Gibberella zeae PH-1]
  misc_feature (1)..(178): NCBI GI: 85113065 Blast Desc: NCU02801 [Neurospora crassa OR74A] gi|28926240|gb|EAA35221.1| [Neurospora crassa OR74A]
  misc_feature (1)..(176): NCBI GI: 169602999 Blast Desc: SNOG_04505 [Phaeosphaeria nodorum SN15] gi|160706305|gb|EAT88265.2| SNOG_04505 [Phaeosphaeria nodorum SN15]
  misc_feature (10)..(182): NCBI GI: 212526288 Blast Desc: benzodiazepine receptor family protein [Penicillium marneffei ATCC 18224] gi|210072699|gb|EEA26786.1| benzodiazepine receptor family protein [Penicillium marneffei ATCC 18224]
  misc_feature (1)..(175): NCBI GI: 189203053 Blast Desc: translocator protein [Pyrenophora tritici-repentis Pt-1C-BFP] gi|187984961|gb|EDU50449.1| translocator protein [Pyrenophora tritici-repentis Pt-1C-BFP]
  misc_feature: Useful for introducing or modulating the production of volatile compounds
MTTYLPKLNTIPYDVFVNPTASVLLPIVLGTAVGYSTRPKQTQETYAAMKQPPLRPPPQIFGPVWTILYGMMGYAAHRAVVASPTPASADSIRTLYSAQLGLNLIWMPLFFSYRKPALALANIVSLVGLNGYLTNLYFGIDDVAGWCMVPYMAWLGFATYLNAGTGYLNQWDISESTLATRKALGKDL

SEQ ID NO: 31379 - DNA, 1049 bp, Muscodor strobelii
  misc_feature: SGI EST ID NO. CUFF.74264.0
  misc_feature: Variant of the nucleotide sequence at SEQ ID NO 31377
tgacaatattcctcatcgtaccacccattgactctctttgtgtactgtcactaccgtgttttgatttattcatttcaacacatattccagtcgtaagagattctaaatctcccagaattcttctttgcctatcttgaaacaccttcactgcgcacaccatctcaatcgcaaaccgcaatcatgacgacgtatctcccgaagctaaacacgataccatatgatgtcttcgtcaaccccacggcatccgtcctcctaccaattgtcctcggcacggccgtaggttacagcacgcgaccaaagcaaacccaagaaacctacgccgcgatgaaacaaccccctctgcgccctccccctcaaatattcggacccgtatggacaatcctctacggaatgatgggctacgccgcccaccgcgccgtagtcgcttctcccactcccgcctccgccgacagcatacgaacgctctactcggcacagctgggtctgaacctgatctggatgccgctcttcttctcctaccggaagcccgctctcgcgctcgccaatatcgtgtcgctagtgggattgaatgggtatttgacgaatctgtatttcggtattgatgatgttgcgggttggtgtatggtcccttatatggcttggttgggctttgctacttatttgaatgccggcacggggtacttgaatcagtgggatatctctgagtcgacgctcgctacgaggaaggctttgggtaaggatttgtagaaagagatgttaggagttgatagggaagaatgaacatttgatatcattatcctgaatgtgacataaaggctttctgatttgatccaaattgtttaccattttgtcatccttttggtgtggaatttggaacatcctagctctgacttgcggtgctgtggaggtaaggagcttccgaacatgccaccttgaagtctaggtttcgagtcctcctcagactgttctggtttttttgaagtcatacacacaagttttgatactctcttgcagttttgtaagctcttcaaagggaaagataagattcg

SEQ ID NO: 31380 - DNA, 357 bp, Muscodor strobelii
  misc_feature: SGI cDNA ID NO. 570802
  misc_feature: Reduced expression when VOC is produced
  misc_feature: Encodes the peptide sequence at SEQ ID NO 31381
atgatgggctacgccgcccaccgcgccgtagtcgcttctcccactcccgcctccgccgacagcatacgaacgctctactcggcacagctgggtctgaacctgatctggatgccgctcttcttctcctaccggaagcccgctctcgcgctcgccaatatcgtgtcgctagtgggattgaatgggtatttgacgaatctgtatttcggtattgatgatgttgcgggttggtgtatggtcccttatatggcttggttgggctttgctacttatttgaatgccggcacggggtacttgaatcagtgggatatctctgagtcgacgctcgctacgaggaaggctttgggtaaggatttgtag

SEQ ID NO: 31381 - protein, 118 aa, Muscodor strobelii
  misc_feature: SGI Peptide ID NO. 570802
  misc_feature (1)..(102): Pfam Id: PF03073 Pfam Desc: TspO/MBR family
  misc_feature (2)..(92): Pfam Id: PF03073 Pfam Desc: TspO/MBR family
  misc_feature (1)..(118): NCBI GI: 261356384 Blast Desc: benzodiazepine receptor family protein [Verticillium albo-atrum VaMs.102]
  misc_feature (1)..(104): NCBI GI: 171696196 Blast Desc: protein product [Podospora anserina] gi|170948340|emb|CAP60504.1| protein product [Podospora anserina]
  misc_feature (1)..(109): NCBI GI: 154319239 Blast Desc: BC1G_02571 [Botryotinia fuckeliana B05.10] gi|150857002|gb|EDN32194.1| BC1G_02571 [Botryotinia fuckeliana B05.10]
  misc_feature (1)..(117): NCBI GI: 156063404 Blast Desc: SS1G_01820 [Sclerotinia sclerotiorum 1980] gi|154697154|gb|EDN96892.1| SS1G_01820 [Sclerotinia sclerotiorum 1980]
  misc_feature (1)..(112): NCBI GI: 145613502 Blast Desc: MGG_01585 [Magnaporthe grisea 70-15] gi|145020570|gb|EDK04699.1| MGG_01585 [Magnaporthe grisea 70-15]
  misc_feature (2)..(108): NCBI GI: 85113065 Blast Desc: NCU02801 [Neurospora crassa OR74A] gi|28926240|gb|EAA35221.1| [Neurospora crassa OR74A]
  misc_feature (1)..(112): NCBI GI: 46108298 Blast Desc: FG01031.1 [Gibberella zeae PH-1]
  misc_feature (2)..(112): NCBI GI: 212526288 Blast Desc: benzodiazepine receptor family protein [Penicillium marneffei ATCC 18224] gi|210072699|gb|EEA26786.1| benzodiazepine receptor family protein [Penicillium marneffei ATCC 18224]
  misc_feature (2)..(112): NCBI GI: 242780479 Blast Desc: benzodiazepine receptor family protein [Talaromyces stipitatus ATCC 10500] gi|218719751|gb|EED19170.1| benzodiazepine receptor family protein [Talaromyces stipitatus ATCC 10500]
  misc_feature (1)..(106): NCBI GI: 169768356 Blast Desc: [Aspergillus oryzae RIB40] gi|83766506|dbj|BAE56646.1| protein product [Aspergillus oryzae]
  misc_feature: Useful for introducing or modulating the production of volatile compounds
MMGYAAHRAVVASPTPASADSIRTLYSAQLGLNLIWMPLFFSYRKPALALANIVSLVGLNGYLTNLYFGIDDVAGWCMVPYMAWLGFATYLNAGTGYLNQWDISESTLATRKALGKDL

SEQ ID NO: 31382 - DNA, 1049 bp, Muscodor strobelii; identical to SEQ ID NO: 31379
  misc_feature: SGI EST ID NO. CUFF.74264.0
  misc_feature: Variant of the nucleotide sequence at SEQ ID NO 31380

SEQ ID NO: 31383 - DNA, 960 bp, Muscodor strobelii
  misc_feature: SGI cDNA ID NO. 570803
  misc_feature: Reduced expression when VOC is produced
  misc_feature: Encodes the peptide sequence at SEQ ID NO 31384
atgactgccccggtggctgctcgcgagaggtcctcggccatggaggccattgaggacatcgtctacggttcttttgccggcattgtggggaaatacatagaataccctttcgatacagtcaaagtgcggctacagtcgcagcccgaccacctcccccttcgttacaccggcccgctcgactgcttccgacaatccatcaaagctgacggcttcctgggactgtaccgtggcatcagtgccccgctcgtcggagccgcagccgagaccagcagcctgtttttcttcgagcgcatgggacgagaagcagtgtatgcatcaggttattgttcgcgagatcgcgtgctcccattgtctgcactctggttcacgggcgccttctcgggtgccttcacatccgtcgttcttacccccattgagctcgtcaaatgcaaagttcaggttccagcgagcacagatggcgtggcacccaaggtcccaagtgtcatgtccgtgattcgtgatgtctacaaacacgagggcatcaaaggtttctggcatggccagatgggaacattcctgcgagaggcaggtggttgcgcagcctggttcggttcgaaagagacgaccaccaagatgttctatctatggaatgaaaaatctgcgacctcacaactggacaagaatgccctcgcgacagaagcgctgccactatggcagcaagctgtagccggcgcatcggccggcatgtcttacaacttcttattctttcctgccgacacagtgaagagtcgcatgcagacctccccggtgggcggcacggcacaaaatcgcacatttatgcaagaaagcaaagccttatggaaccagcatgggctccgaggcttctatcgcggctgcggtatcacggtactgagatcagcaccgagttctgcctttattttcattgtttacgatggcctgaagcgacatctacccttatag

SEQ ID NO: 31384 - protein, 319 aa, Muscodor strobelii
  misc_feature: SGI Peptide ID NO. 570803
  misc_feature (15)..(107): Pfam Id: PF00153 Pfam Desc: Mitochondrial carrier protein
  misc_feature (229)..(319): Pfam Id: PF00153 Pfam Desc: Mitochondrial carrier protein
  misc_feature (116)..(210): Pfam Id: PF00153 Pfam Desc: Mitochondrial carrier protein
  misc_feature (15)..(95): Pfam Id: PF00153 Pfam Desc: Mitochondrial carrier protein
  misc_feature (229)..(317): Pfam Id: PF00153 Pfam Desc: Mitochondrial carrier protein
  misc_feature (8)..(319): NCBI GI: 116181628 Blast Desc: CHGG_01442 [Chaetomium globosum CBS 148.51] gi|88185739|gb|EAQ93207.1| CHGG_01442 [Chaetomium globosum CBS 148.51]
  misc_feature (1)..(319): NCBI GI: 171696194 Blast Desc: protein product [Podospora anserina] gi|170948339|emb|CAP60503.1| protein product [Podospora anserina]
  misc_feature (9)..(319): NCBI GI: 39951883 Blast Desc: MGG_01584 [Magnaporthe grisea 70-15] gi|145020571|gb|EDK04700.1| MGG_01584 [Magnaporthe grisea 70-15]
  misc_feature (4)..(319): NCBI GI: 85113069 Blast Desc: NCU02802 [Neurospora crassa OR74A] gi|2497987|sp|Q01356.1|ARG13_NEUCR RecName: Full=Amino-acid transporter arg-13 gi|9454368|gb|AAF87777.1|AF279268_1 ornithine
  misc_feature (10)..(317): NCBI GI: 256734445 Blast Desc: [Nectria haematococca mpVI 77-13-4]
  misc_feature (22)..(319): NCBI GI: 261356383 Blast Desc: amino-acid transporter arg-13 [Verticillium albo-atrum VaMs.102]
  misc_feature (8)..(319): NCBI GI: 46108300 Blast Desc: FG01032.1 [Gibberella zeae PH-1]
  misc_feature (7)..(314): NCBI GI: 154319237 Blast Desc: BC1G_02570 [Botryotinia fuckeliana B05.10] gi|150857001|gb|EDN32193.1| BC1G_02570 [Botryotinia fuckeliana B05.10]
  misc_feature (5)..(319): NCBI GI: 156063406 Blast Desc: SS1G_01821 [Sclerotinia sclerotiorum 1980] gi|154697155|gb|EDN96893.1| SS1G_01821 [Sclerotinia sclerotiorum 1980]
  misc_feature (8)..(317): NCBI GI: 258575471 Blast Desc: amino acid transporter arg-13 [Uncinocarpus reesii 1704] gi|237902183|gb|EEP76584.1| amino acid transporter arg-13 [Uncinocarpus reesii 1704]
  misc_feature: Useful for introducing or modulating the production of volatile compounds
MTAPVAARERSSAMEAIEDIVYGSFAGIVGKYIEYPFDTVKVRLQSQPDHLPLRYTGPLDCFRQSIKADGFLGLYRGISAPLVGAAAETSSLFFFERMGREAVYASGYCSRDRVLPLSALWFTGAFSGAFTSVVLTPIELVKCKVQVPASTDGVAPKVPSVMSVIRDVYKHEGIKGFWHGQMGTFLREAGGCAAWFGSKETTTKMFYLWNEKSATSQLDKNALATEALPLWQQAVAGASAGMSYNFLFFPADTVKSRMQTSPVGGTAQNRTFMQESKALWNQHGLRGFYRGCGITVLRSAPSSAFIFIVYDGLKRHLPL

SEQ ID NO: 31385 - DNA, 1854 bp, Muscodor strobelii
  misc_feature: SGI EST ID NO. CUFF.74417.1
  misc_feature: Variant of the nucleotide sequence at SEQ ID NO 31383
cgggaagaagcatctgcagggcgcaaaggcaaattatccactgtgacaacggccggaactcctgatgcggaaaggcgacattgctgggtgcgtcagaaatttcttgggtgcctcaattcaacacagatgccgaccgcacgacgccgaccacggatccaggtttcccttgcctcgcctgcgtctgtggtcgtgatttgtatgtgcgagtgagccaacaaccgttgaattgaaaattgtcgctctactgaatttccactttttaaccggctccacgaaaatgccgcttggtgtagcgacgatcgtccaagattggcggtgactgattcaatcaggccgcgtcgttggtcctcgccggccacacacactaacagcgttatacaagtactagccaacaaccagactcccaactcgaaaccctcccctctaatactacgtacggtctcacaatgttatagcattgtactcctagttcttgccgctgcagcgctctgctcctgtgcatgctcctcttcccacagccctagccaagctcttgggggctcttttccatcctctccctcgagtacaagatcgctgtcatggccacacctgaactcgcatcgagcaccatgactgccccggtggctgctcgcgagaggtcctcggccatggaggccattgaggacatcgtctacggttcttttgccggcattgtggggaaatacatagaataccctttcgatacagtcaaagtgcggctacagtcgcagcccgaccacctcccccttcgttacaccggcccgctcgactgcttccgacaatccatcaaagctgacggcttcctgggactgtaccgtggcatcagtgccccgctcgtcggagccgcagccgagaccagcagcctgtttttcttcgagcgcatgggacgagaagcagtgtatgcatcaggttattgttcgcgagatcgcgtgctcccattgtctgcactctggttcacgggcgccttctcgggtgccttcacatccgtcgttcttacccccattgagctcgtcaaatgcaaagttcaggttccagcgagcacagatggcgtggcacccaaggtcccaagtgtcatgtccgtgattcgtgatgtctacaaacacgagggcatcaaaggtttctggcatggccagatgggaacattcctgcgagaggcaggtggttgcgcagcctggttcggttcgaaagagacgaccaccaagatgttctatctatggaatgaaaaatctgcgacctcacaactggacaagaatgccctcgcgacagaagcgctgccactatggcagcaagctgtagccggcgcatcggccggcatgtcttacaacttcttattctttcctgccgacacagtgaagagtcgcatgcagacctccccggtgggcggcacggcacaaaatcgcacatttatgcaagaaagcaaagccttatggaaccagcatgggctccgaggcttctatcgcggctgcggtatcacggtactgagatcagcaccgagttctgcctttattttcattgtttacgatggcctgaagcgacatctacccttatagacggagagtcatactgctacctgatggaactggtatatagacacaaacagatagaatctcggaggcatgtaagcgcgtttggcgttagggcgcatattttcacggtgttgactttggaatgttgtagacgaataaaagttgaagagccgccacgcattaggcgattggctttgaagaggtccctttgaagggacatggcaatggtatagacatgatatccgtagcaaccagatgttcaatctagtctttaaacgaagagggcaccacaagactgcctgtgtgcaat

SEQ ID NO: 31386 - DNA, 2082 bp, Muscodor strobelii
  misc_feature: SGI cDNA ID NO. 570804
  misc_feature: Encodes the peptide sequence at SEQ ID NO 31387
atgggtaaggataagaaaggcaagtctgactccaaaaagcagaagcttgcggagaagaaacagaagcaagagaaaaaggcgcagaagaaagagaagacaaaaacatcaaagctggaaggtagtgatgcggaagatgttgatctcgatgctgtcctggctgaatacaagaagcaacaagagttgttcttgaaggttactgaaaccgtgctcgaggcccctcccaaaccccggtcgtccgccacgttcttagcctcgccttctcatagtaaccaattgcttctgttcgggggagaaacgtggaatggtgcacttgctagtttcttcaacgatctcaacatctactataccgatcgggatgagtggcattgtgtaacctcgcctaacgcccctctccccagatctggtcatgcctggtgccgaggtggtaatcagaaagattccgtgttcttgttcggaggagagttcagcagtccaaaacagggtacgttttatcattacaatgacttctggagacttgagcctagtactagagaatggacacgagtcgatgtcaaggggaagactcctccctcaagaagtggtcatcggatgacatactacaagaattacatcatcctctttggtggtttccaagatacttctaatcaaacgaaatatttgaacgatctttggctgttcgacacacagaacttcttctggcacagcccggtgcttccacctgctcagttgaagcctgatgcgcggtcatcttttacctttcttccgcacgagcagggtgcagttttgtttggcggttactctcgtgttaaagcaactgttctcgcgaataaatcggcgaagggggcttcacaaggccagaagaatatcttgaaaccgatggttcatcaagattgctacttcctgcgaattactcagcctcccgctgattcgcccccgaacactcccccaaatgtgagatgggaaaagagaaagatgccagcaaataagccaagcccagctcgcgttggagccacgatggcgtaccacaaaggtcgcgggatcttattcggcggagtccacgatgtagagcaaagtgaggagggtatggacagtgaattcttcaatcaaatgttcacttggaacatcgagcgtaatagattctttccgatgaccctccgaaagccaagaacgcagaagaaagtagcaccgtccgagcagcgagtcggaagacgaggcagagcgcaagctaatgaacaagaactattgaaacaacttgccgcattggagaccggtgcatcacttgaggatgctgatgaaatggacatcgacgtcaaaccagcggacaacaccgaagagcctgagaaaccggtcagagagatgccagtttcaatggaatatccatctgctagattcaacgcccaattggcagtacaagatgactttttgtacatctatggaggcacatatgaagcaaaagatcgggaatacacattcgacgacttatactccattgatcttggcaagatggacggctgcaaggaaatattcaagagagaggacgaaacctgggtcggctccgaagatgaagatgaagatgacgatgaagaggaagatgaggatatggacgatgaagaagatgacgaggacgatgatgttgacatggatgacgaggctccgaagttcacgccaagcaagcggaagaaaaagcagggcgacgatgaagtcagcatcgacacagcatctgttgcggactcaacagcaccgagtgaggaggaaagcgaggcagacactgaagcaacttctgtcgacgatgggctcccacatcctcgacctttcgaaacccggagagatttcttcactcggacatcagcagaatggcaagagattctgatgacgagcctgaggtggaagaacatccaaccggagacgctcaccattaaagaaatcaagagcaaggctttcgagcttagtgaagagaaatggtgggattgcagagaagagatcacagctcttgaggatgaacaagaagccgcaggaattggcgaagttgtttcgcttactgatagaggtgatgctgcgggcggtgctgggaggagacgttga

SEQ ID NO: 31387 - protein, 693 aa, Muscodor strobelii
  misc_feature: SGI Peptide ID NO. 570804
  misc_feature (191)..(228): Pfam Id: PF01344 Pfam Desc: Kelch motif
  misc_feature (1)..(693): NCBI GI: 46125433 Blast Desc: FG07094.1 [Gibberella zeae PH-1]
  misc_feature (1)..(682): NCBI GI: 85091987 Blast Desc: NCU09227 [Neurospora crassa OR74A] gi|28920572|gb|EAA29935.1| conserved [Neurospora crassa OR74A]
  misc_feature (38)..(693): NCBI GI: 39969993 Blast Desc: MGG_10605 [Magnaporthe grisea 70-15] gi|145010140|gb|EDJ94796.1| MGG_10605 [Magnaporthe grisea 70-15]
  misc_feature (38)..(681): NCBI GI: 256732620 Blast Desc: NECHADRAFT_37884 [Nectria haematococca mpVI 77-13-4]
  misc_feature (1)..(681): NCBI GI: 116180656 Blast Desc: CHGG_00956 [Chaetomium globosum CBS 148.51] gi|88185253|gb|EAQ92721.1| CHGG_00956 [Chaetomium globosum CBS 148.51]
  misc_feature (34)..(693): NCBI GI: 154319492 Blast Desc: BC1G_02227 [Botryotinia fuckeliana B05.10] gi|150855885|gb|EDN31077.1| BC1G_02227 [Botryotinia fuckeliana B05.10]
  misc_feature (34)..(679): NCBI GI: 156061639 Blast Desc: SS1G_02965 [Sclerotinia sclerotiorum 1980] gi|154700366|gb|EDO00105.1| SS1G_02965 [Sclerotinia sclerotiorum 1980]
  misc_feature (22)..(693): NCBI GI: 258574621 Blast Desc: conserved [Uncinocarpus reesii 1704] gi|237901758|gb|EEP76159.1| conserved [Uncinocarpus reesii 1704]
  misc_feature (33)..(693): NCBI GI: 240105738 Blast Desc: Kelch repeat containing protein [Coccidioides posadasii C735 delta SOWgp]
  misc_feature (12)..(693): NCBI GI: 239610644 Blast Desc: kelch repeats protein [Ajellomyces dermatitidis ER-3]
MGKDKKGKSDSKKQKLAEKKQKQEKKAQKKEKTKTSKLEGSDAEDVDLDAVLAEYKKQQELFLKVTETVLEAPPKPRSSATFLASPSHSNQLLLFGGETWNGALASFFNDLNIYYTDRDEWHCVTSPNAPLPRSGHAWCRGGNQKDSVFLFGGEFSSPKQGTFYHYNDFWRLEPSTREWTRVDVKGKTPPSRSGHRMTYYKNYIILFGGFQDTSNQTKYLNDLWLFDTQNFFWHSPVLPPAQLKPDARSSFTFLPHEQGAVLFGGYSRVKATVLANKSAKGASQGQKNILKPMVHQDCYFLRITQPPADSPPNTPPNVRWEKRKMPANKPSPARVGATMAYHKGRGILFGGVHDVEQSEEGMDSEFFNQMFTWNIERNRFFPMTLRKPRTQKKVAPSEQRVGRRGRAQANEQELLKQLAALETGASLEDADEMDIDVKPADNTEEPEKPVREMPVSMEYPSARFNAQLAVQDDFLYIYGGTYEAKDREYTFDDLYSIDLGKMDGCKEIFKREDETWVGSEDEDEDDDEEEDEDMDDEEDDEDDDVDMDDEAPKFTPSKRKKKQGDDEVSIDTASVADSTAPSEEESEADTEATSVDDGLPHPRPFETRRDFFTRTSAEWQEILMTSLRWKNIQPETLTIKEIKSKAFELSEEKWWDCREEITALEDEQEAAGIGEVVSLTDRGDAAGGAGRRR

SEQ ID NO: 31388 - DNA, 2297 bp, Muscodor strobelii
  misc_feature: SGI EST ID NO. CUFF.74266.0
  misc_feature: Variant of the nucleotide sequence at SEQ ID NO 31386
atcatatctctaatttagaggctggcccgtcgatagccaatgataatatctcacatctttgatttattgataagagtaggactctgatcatcatccgtgacctggccttttgtagagtctacgtcatgggtaaggataagaaaggcaagtctgactccaaaaagcagaagcttgcggagaagaaacagaagcaagagaaaaaggcgcagaagaaagagaagacaaaaacatcaaagctggaaggtagtgatgcggaagatgttgatctcgatgctgtcctggctgaatacaagaagcaacaagagttgttcttgaaggttactgaaaccgtgctcgaggcccctcccaaaccccggtcgtccgccacgttcttagcctcgccttctcatagtaaccaattgcttctgttcgggggagaaacgtggaatggtgcacttgctagtttcttcaacgatctcaacatctactataccgatcgggatgagtggcattgtgtaacctcgcctaacgcccctctccccagatctggtcatgcctggtgccgaggtggtaatcagaaagattccgtgttcttgttcggaggagagttcagcagtccaaaacagggtacgttttatcattacaatgacttctggagacttgagcctagtactagagaatggacacgagtcgatgtcaaggggaagactcctccctcaagaagtggtcatcggatgacatactacaagaattacatcatcctctttggtggtttccaagatacttctaatcaaacgaaatatttgaacgatctttggctgttcgacacacagaacttcttctggcacagcccggtgcttccacctgctcagttgaagcctgatgcgcggtcatcttttacctttcttccgcacgagcagggtgcagttttgtttggcggttactctcgtgttaaagcaactgttctcgcgaataaatcggcgaagggggcttcacaaggccagaagaatatcttgaaaccgatggttcatcaagattgctacttcctgcgaattactcagcctcccgctgattcgcccccgaacactcccccaaatgtgagatgggaaaagagaaagatgccagcaaataagccaagcccagctcgcgttggagccacgatggcgtaccacaaaggtcgcgggatcttattcggcggagtccacgatgtagagcaaagtgaggagggtatggacagtgaattcttcaatcaaatgttcacttggaacatcgagcgtaatagattctttccgatgaccctccgaaagccaagaacgcagaagaaagtagcaccgtccgagcagcgagtcggaagacgaggcagagcgcaagctaatgaacaagaactattgaaacaacttgccgcattggagaccggtgcatcacttgaggatgctgatgaaatggacatcgacgtcaaaccagcggacaacaccgaagagcctgagaaaccggtcagagagatgccagtttcaatggaatatccatctgctagattcaacgcccaattggcagtacaagatgactttttgtacatctatggaggcacatatgaagcaaaagatcgggaatacacattcgacgacttatactccattgatcttggcaagatggacggctgcaaggaaatattcaagagagaggacgaaacctgggtcggctccgaagatgaagatgaagatgacgatgaagaggaagatgaggatatggacgatgaagaagatgacgaggacgatgatgttgacatggatgacgaggctccgaagttcacgccaagcaagcggaagaaaaagcagggcgacgatgaagtcagcatcgacacagcatctgttgcggactcaacagcaccgagtgaggaggaaagcgaggcagacactgaagcaacttctgtcgacgatgggctcccacatcctcgacctttcgaaacccggagagatttcttcactcggacatcagcagaatggcaagagattctgatgacgagcctgaggtggaagaacatccaaccggagacgctcaccattaaagaaatcaagagcaaggctttcgagcttagtgaagagaaatggtgggattgcagagaagagatcacagctcttgaggatgaacaagaagccgcaggaattggcgaagttgtttcgcttactgatagaggtgatgctgcgggcggtgctgggaggagacgttgagatacagatatgcgaatgtgtgaatagctttatgaaaagaaataaatcggatccagccgattttcttcttcttgtgctcttggaatattg

SEQ ID NO: 31389 - DNA, 1353 bp, Muscodor strobelii
  misc_feature: SGI cDNA ID NO. 570805
  misc_feature: Encodes the peptide sequence at SEQ ID NO 31390
atgccactaggtttcgagagattgaattctcggaagagccaaccaaatgaccacatcaacttcattaagcctctcaaagggccagatgagaagattgctcaggatttcttggagcgcattgctgctcagtgtgtccctgtgatgagggagcatcacatctatgttatggctctggaagaatttccgcccaacagagaatttgtcggccgaaacttcaatgctggagaggttgttcaactggttctaaagtctccatcaaccggacgatggctaccatttaactatgtgcagatggtgatgatgcatgaacttgcacattgcaaacagatgaatcattctaaagcattttgggctgtccgaaaccagtacgcagagcagatgaggggactatggtcgaaaaagtatagtggcgaagggatttggggtcgtggtgtactgttaactaccggggagttcgaggcaaatacagtcctcgcggacgacagtctaccagaacacctgtgcggcggtacataccgttctagaggaaggaaacgaaagcctaaacagcagctttcataccaagagagaaaggagcgtcgcatcttgaagaagttcggtgcaaatggggtcgcacttggcgaagacgaagagatcaaggccgaactcgaaaatggcaggaaaccgaagggcaagcctcgagtcgccggaagcaagcgaggacgcgaactacgagctgctgcagctctggcgagattcgaccaacaaaacaagactgaggagttactaaaagaagaggacgatgatgacggcacagagtcagatttcgagtctgacagtgaaatcaagggcgagagcattgtcgataatgaaggacgtcatctgatcaaggtctgtgaagacgaggacccggcggacgtcgacgcgcaaaatgaacttcgggaattggtttctgcatcgactattaagcgtgaaagatccgagtctcccacatttatcaacataccggatattgaggaggaagcagaggcaccgcctcgtcgctctccaacggcctctaaatccaagacgaaagctcctgaacgaggaaagccgggcatctcttcgaccagagatattgcacccaagacagaagaagagttacaacccaaaatcttacctcaacttgttcttgggaattgcccaatctgttcatacaagaacacaagtggctctctcatttgtgaagtctgtcagcatgtcttagcgccaggcaaggtatcgttttggaaatgcaaaagcaaggcatgccgggacagtcagtccctttaccttaatccgactgactcggcaatttgcggagtttgtggtgagcgaagaacaccaggcaaatga

SEQ ID NO: 31390 - protein, 450 aa, Muscodor strobelii
  misc_feature: SGI Peptide ID NO. 570805
  misc_feature (12)..(247): Pfam Id: PF08325 Pfam Desc: WLM domain
  misc_feature (102)..(118): Pfam Id: PF01863 Pfam Desc: Domain of function DUF45
  misc_feature (1)..(446): NCBI GI: 46108370 Blast Desc: FG01067.1 [Gibberella zeae PH-1]
  misc_feature (1)..(423): NCBI GI: 116180654 Blast Desc: CHGG_00955 [Chaetomium globosum CBS 148.51] gi|88185252|gb|EAQ92720.1| CHGG_00955 [Chaetomium globosum CBS 148.51]
  misc_feature (1)..(447): NCBI GI: 256735146 Blast Desc: NECHADRAFT_74687 [Nectria haematococca mpVI 77-13-4]
  misc_feature (1)..(446): NCBI GI: 171687555 Blast Desc: protein product [Podospora anserina] gi|170943739|emb|CAP69391.1| protein product [Podospora anserina]
  misc_feature (1)..(449): NCBI GI: 85091985 Blast Desc: NCU09226 [Neurospora crassa OR74A] gi|28920571|gb|EAA29934.1| [Neurospora crassa OR74A]
  misc_feature (1)..(446): NCBI GI: 156061637 Blast Desc: SS1G_02964 [Sclerotinia sclerotiorum 1980] gi|154700365|gb|EDO00104.1| SS1G_02964 [Sclerotinia sclerotiorum 1980]
  misc_feature (56)..(449): NCBI GI: 145615673 Blast Desc: MGG_13172 [Magnaporthe grisea 70-15] gi|145022459|gb|EDK06479.1| MGG_13172 [Magnaporthe grisea 70-15]
  misc_feature (1)..(443): NCBI GI: 169617786 Blast Desc: SNOG_12074 [Phaeosphaeria nodorum SN15] gi|160703485|gb|EAT80486.2| SNOG_12074 [Phaeosphaeria nodorum SN15]
  misc_feature (1)..(312): NCBI GI: 261357352 Blast Desc: conserved [Verticillium albo-atrum VaMs.102]
  misc_feature (1)..(436): NCBI GI: 189194339 Blast Desc: WLM domain containing protein [Pyrenophora tritici-repentis Pt-1C-BFP] gi|187979072|gb|EDU45698.1| WLM domain containing protein [Pyrenophora tritici-repentis
MPLGFERLNSRKSQPNDHINFIKPLKGPDEKIAQDFLERIAAQCVPVMREHHIYVMALEEFPPNREFVGRNFNAGEVVQLVLKSPSTGRWLPFNYVQMVMMHELAHCKQMNHSKAFWAVRNQYAEQMRGLWSKKYSGEGIWGRGVLLTTGEFEANTVLADDSLPEHLCGGTYRSRGRKRKPKQQLSYQERKERRILKKFGANGVALGEDEEIKAELENGRKPKGKPRVAGSKRGRELRAAAALARFDQQNKTEELLKEEDDDDGTESDFESDSEIKGESIVDNEGRHLIKVCEDEDPADVDAQNELRELVSASTIKRERSESPTFINIPDIEEEAEAPPRRSPTASKSKTKAPERGKPGISSTRDIAPKTEEELQPKILPQLVLGNCPICSYKNTSGSLICEVCQHVLAPGKVSFWKCKSKACRDSQSLYLNPTDSAICGVCGERRTPGK

SEQ ID NO: 31391 - DNA, 3075 bp, Muscodor strobelii
  misc_feature: SGI EST ID NO. CUFF.74269.0
  misc_feature: Variant of the nucleotide sequence at SEQ ID NO 31389
gccagtcactccctcgtcttcacctcatacttttctcatgcgcaaagttctgcaggagatgcttgtgaacgacggagattgatttctgttctagggcggccacagacagtcgagatttgcaacatctacgacagtcttcacgtcatcacttatttcaaccatgccactaggtttcgagagattgaattctcggaagagccaaccaaatgaccacatcaacttcattaagcctctcaaagggccagatgagaagattgctcaggatttcttggagcgcattgctgctcagtgtgtccctgtgatgagggagcatcacatctatgttatggctctggaagaatttccgcccaacagagaatttgtcggccgaaacttcaatgctggagaggttgttcaactggttctaaagtctccatcaaccggacgatggctaccatttaactatgtgcagatggtgatgatgcatgaacttgcacattgcaaacagatgaatcattctaaagcattttgggctgtccgaaaccagtacgcagagcagatgaggggactatggtcgaaaaagtatagtggcgaagggatttggggtcgtggtgtactgttaactaccggggagttcgaggcaaatacagtcctcgcggacgacagtctaccagaacacctgtgcggcggtacataccgttctagaggaaggaaacgaaagcctaaacagcagctttcataccaagagagaaaggagcgtcgcatcttgaagaagttcggtgcaaatggggtcgcacttggcgaagacgaagagatcaaggccgaactcgaaaatggcaggaaaccgaagggcaagcctcgagtcgccggaagcaagcgaggacgcgaactacgagctgctgcagctctggcgagattcgaccaacaaaacaagactgaggagttactaaaagaagaggacgatgatgacggcacagagtcagatttcgagtctgacagtgaaatcaagggcgagagcattgtcgataatgaaggacgtcatctgatcaaggtctgtgaagacgaggacccggcggacgtcgacgcgcaaaatgaacttcgggaattggtttctgcatcgactattaagcgtgaaagatccgagtctcccacatttatcaacataccggatattgaggaggaagcagaggcaccgcctcgtcgctctccaacggcctctaaatccaagacgaaagctcctgaacgaggaaagccgggcatctcttcgaccagagatattgcacccaagacagaagaagagttacaacccaaaatcttacctcaacttgttcttgggaattgcccaatctgttcatacaagaacacaagtggctctctcatttgtgaagtctgtcagcatgtcttagcgccaggcaaggtatcgttttggaaatgcaaaagcaaggcatgccgggacagtcagtccctttaccttaatccgactgactcggcaatttgcggagtttgtggtgagcgaagaacaccaggcaaatgagagctaccaaaaatgctttaccagccagcttctattcctttgctcttcagtcactactgcaatatgcattcccgagacgtgcgagcttgatacaacagagccaatgaacgtcggaatcaccaccatgcgatacctggaaggtcaaaagacgccggcttcgctattgacgcctgtctcctcatccctttaaagaatcagtctccaactgggttgtaaggatatgcagtggctcaagtgaataaggaacttagcacgccaaagtaccaatctagatggccaagcatactcaaaataggtattcgaagctggatatggttccggagttggactacacgcttcccgaaaccgcttgcgaatgagagacgagctttggaacataggggtatgatggacttaactggcatcatgtttcctcttacatacattgacagactactagctacagtacacgctcctcttagatgacctcgtgtaacactacatagccttcttcgtctcgaaattgagtaatgagaatacacgcagatgtctgttctcacaaaggcatcgtctaagcagagtttcaaccgcgtgatgtgacattataatcgttttaatttgctactccatatacaagtgatcggagtctatcattatcttttcgcttgacagcaaaactgctactcgaattgggtgtccaggccctggtatacaagctttctgtcgtgattgatcggaccatgccctccattattggccaagcccccgtgttcacatatcctgtttttgcttctatattcccccggctcttttccccgtctacttaaatttcgtagtttggctcgcagtttcgtacggcaactcgtatcttgtcgaggcggtcccgctgacctccggaaccgactcctcgtactgattactatagaccgttggtgccgcctcatgctgatgataggtgttgaacggagtagacgatggggaagggtggttcttcgtggcagctagttgtttctttgccctcgctaggaagatactcgtgacgacgagagcgatcaggagtggtagtccaacccccaaccctgccgcgatcccaacagtagacacatacgcccacgcggcaccacactcatctgccgatatcgtcgaccccgtcggtgaaggaggtcccgtactcgaagtcggacccgcagtagtagaagtctgttggacgccatcattggtgatattccccgcttgtataacattattgaacgtcgcatttcggccatctttgacgaatcctggtttcaacgtgaagatattcgagtcgtcattgcaaccattgacatcctgcccgcatatccaattcgtattgctcccgtcgcactgtcgtagatttccccagtccgctatactgtagtcttgggcgcattggtcgacacagtcgcctccaaaccccttttccgtgcacgctcctcgaaggacatgcagattaacaccgtcgaaacatagtccgttgctcagacaggtgtgtgttgcatggcagcaggtctgagcaccactttggccgggaaaacaaggctggctgtcttctgagaccgttc

SEQ ID NO: 31392 - DNA, 831 bp, Muscodor strobelii
  misc_feature: SGI cDNA ID NO. 570806
  misc_feature: Encodes the peptide sequence at SEQ ID NO 31393
atgttggcagcgctcttccttgtcacagcgaccatcgcgagcgcacaaacctgctactggctagacggaacggtctcagaagacagccagccttgttttcccggccaaagtggtgctcagacctgctgccatgcaacacacacctgtctgagcaacggactatgtttcgacggtgttaatctgcatgtccttcgaggagcgtgcacggaaaaggggtttggaggcgactgtgtcgaccaatgcgcccaagactacagtatagcggactggggaaatctacgacagtgcgacgggagcaatacgaattggatatgcgggcaggatgtcaatggttgcaatgacgactcgaatatcttcacgttgaaaccaggattcgtcaaagatggccgaaatgcgacgttcaataatgttatacaagcggggaatatcaccaatgatggcgtccaacagacttctactactgcgggtccgacttcgagtacgggacctccttcaccgacggggtcgacgatatcggcagatgagtgtggtgccgcgtgggcgtatgtgtctactgttgggatcgcggcagggttgggggttggactaccactcctgatcgctctcgtcgtcacgagtatcttcctagcgagggcaaagaaacaactagctgccacgaagaaccacccttccccatcgtctactccgttcaacacctatcatcagcatgaggcggcaccaacggtctatagtaatcagtacgaggagtcggttccggaggtcagcgggaccgcctcgacaagatacgagttgccgtacgaaactgcgagccaaactacgaaatttaagtag

SEQ ID NO: 31393 - protein, 276 aa, Muscodor strobelii
  misc_feature: SGI Peptide ID NO. 570806
  misc_feature (2)..(106): NCBI GI: 70992489 Blast Desc: AFUA_6G12140 [Aspergillus fumigatus Af293] gi|66848726|gb|EAL89055.1| AFUA_6G12140 [Aspergillus fumigatus Af293] gi|159124663|gb|EDP49781.1| AFUB_078130 [Aspergillus
  misc_feature (1)..(240): NCBI GI: 116208670 Blast Desc: CHGG_03628 [Chaetomium globosum CBS 148.51] gi|88184225|gb|EAQ91693.1| CHGG_03628 [Chaetomium globosum CBS 148.51]
  misc_feature (10)..(215): NCBI GI: 119182201 Blast Desc: CIMG_06143 [Coccidioides immitis RS]
  misc_feature (2)..(215): NCBI GI: 226281696 Blast Desc: [Paracoccidioides brasiliensis Pb01]
  misc_feature (10)..(215): NCBI GI: 240109195 Blast Desc: CPC735_027000 [Coccidioides posadasii C735 delta SOWgp]
  misc_feature (6)..(221): NCBI GI: 258572334 Blast Desc: [Uncinocarpus reesii 1704] gi|237905199|gb|EEP79600.1| [Uncinocarpus reesii 1704]
  misc_feature (17)..(106): NCBI GI: 119472515 Blast Desc: NFIA_058090 [Neosartorya fischeri NRRL 181] gi|119406508|gb|EAW16459.1| conserved [Neosartorya fischeri NRRL 181]
  misc_feature (5)..(214): NCBI GI: 238837776 Blast Desc: conserved [Microsporum canis CBS 113480]
  misc_feature (1)..(84): NCBI GI: 238507954 Blast Desc: conserved [Aspergillus flavus NRRL3357] gi|220688697|gb|EED45049.1| conserved [Aspergillus flavus NRRL3357]
  misc_feature (5)..(142): NCBI GI: 258571842 Blast Desc: [Uncinocarpus reesii 1704] gi|237904994|gb|EEP79395.1| [Uncinocarpus reesii 1704]
MLAALFLVTATIASAQTCYWLDGTVSEDSQPCFPGQSGAQTCCHATHTCLSNGLCFDGVNLHVLRGACTEKGFGGDCVDQCAQDYSIADWGNLRQCDGSNTNWICGQDVNGCNDDSNIFTLKPGFVKDGRNATFNNVIQAGNITNDGVQQTSTTAGPTSSTGPPSPTGSTISADECGAAWAYVSTVGIAAGLGVGLPLLIALVVTSIFLARAKKQLAATKNHPSPSSTPFNTYHQHEAAPTVYSNQYEESVPEVSGTASTRYELPYETASQTTKFK

SEQ ID NO: 31394 - DNA, 459 bp, Muscodor strobelii
  misc_feature: SGI cDNA ID NO. 570807
  misc_feature: Elevated expression when VOC is produced
  misc_feature: Encodes the peptide sequence at SEQ ID NO 31395
atgcactactcaattttcttcgttctggctagcagccttgcagcctacgcctctcccgtctggcctcgctacacagtctccaacgaccacttcgaggtcctggccatgcgagcgtcgacggaagtaaaccctgcagccgtcaatgacgtgaagtgccttgatcgcaacgtcaacatcgcctcccacgaccagaatgtggccgagctagccatctgcggaggcatcgccggcactatccagaagtgtggtggcgcacccgagagcaccgacggcacatcgggaactgctcagttcaccctcaacactgtgactaatggtgctactatcaacatctctaagggtcgatgggagcaatgcgttcgagctgctcgcgctgtctgcccaaccggcagcatgaccgctacttgcgcaggcggtgcctcaagcggcgatgtcgagttcactctcgacaacccgtaa

SEQ ID NO: 31395 - protein, 152 aa, Muscodor strobelii
  misc_feature: SGI Peptide ID NO. 570807
  misc_feature (21)..(152): NCBI GI: 261357351 Blast Desc: conserved [Verticillium albo-atrum VaMs.102]
  misc_feature (1)..(149): NCBI GI: 154298033 Blast Desc: [Botryotinia fuckeliana B05.10] gi|150858296|gb|EDN33488.1| [Botryotinia fuckeliana B05.10]
  misc_feature (5)..(149): NCBI GI: 116180652 Blast Desc: CHGG_00954 [Chaetomium globosum CBS 148.51] gi|88185251|gb|EAQ92719.1| CHGG_00954 [Chaetomium globosum CBS 148.51]
  misc_feature (34)..(149): NCBI GI: 242774621 Blast Desc: conserved [Talaromyces stipitatus ATCC 10500] gi|218722096|gb|EED21514.1| conserved [Talaromyces stipitatus ATCC 10500]
  misc_feature (24)..(149): NCBI GI: 212532053 Blast Desc: conserved [Penicillium marneffei ATCC 18224] gi|210071547|gb|EEA25636.1| conserved [Penicillium marneffei ATCC 18224]
  misc_feature (23)..(151): NCBI GI: 171687553 Blast Desc: protein product [Podospora anserina] gi|170943738|emb|CAP69390.1| protein product [Podospora anserina]
  misc_feature: Useful for introducing or modulating the production of volatile compounds
MHYSIFFVLASSLAAYASPVWPRYTVSNDHFEVLAMRASTEVNPAAVNDVKCLDRNVNIASHDQNVAELAICGGIAGTIQKCGGAPESTDGTSGTAQFTLNTVTNGATINISKGRWEQCVRAARAVCPTGSMTATCAGGASSGDVEFTLDNP

SEQ ID NO: 31396 - DNA, 2811 bp, Muscodor strobelii
  misc_feature: SGI EST ID NO. CUFF.74281.0
  misc_feature: Variant of the nucleotide sequence at SEQ ID NO 31394
gtgaaatagaaaatactaataacaccgacatgccaagctaaaatatacgaaatgcgacacgacactatatgagatctctaaatagtgaatgcttgcagatccgggtatcaaccgcacgaaccaacttccatttcctgctccttccccggtcctgactcctccggatttagtcttctcttttaagaagccaccacgtccccggttcgcccgcgcctgttcacttccaatcactcaagttgaaaccagcaactgcagaggctcaaattgtctcgccatctctccttcacttccttttctttcaccacgacggcaggtcacgttcatttcattcattccgcgacaccaggctcgaagtctgcttaccttcgtcaacgtttcatttcagtcgtcatttcagtcgtcttatatacccttgtcacacttctagagccggtcacaactcaaagatccgatctcaacatccgtctacacgcaactttcattactgagaccacctaccgcaccattccctaaccaatcatcatgcactactcaattttcttcgttctggctagcagccttgcagcctacgcctctcccgtctggcctcgctacacagtctccaacgaccacttcgaggtcctggccatgcgagcgtcgacggaagtaaaccctgcagccgtcaatgacgtgaagtgccttgatcgcaacgtcaacatcgcctcccacgaccagaatgtggccgagctagccatctgcggaggcatcgccggcactatccagaagtgtggtggcgcacccgagagcaccgacggcacatcgggaactgctcagttcaccctcaacactgtgactaatggtgctactatcaacatctctaagggtcgatgggagcaatgcgttcgagctgctcgcgctgtctgcccaaccggcagcatgaccgctacttgcgcaggcggtgcctcaagcggcgatgtcgagttcactctcgacaacccgtaaacgactaccaacgacaattgacttatgagacgacgacggctgggaaatagacaatttgggacgcggcaaaagaggacaatctcctttctgggacgggagctggcggtctttacttttcttattcgattcggacatgcgagcatgtcgaccaaaaaggtctttgagaaaatggggcggaaatgacggtgtgtaagatatcagcaatgcgatgtgcccgttttgctgtggaagatatgaaacggggacctaaggaaatctgactggcacgatgcaagatatggctgactcttgctgtatatatgaacgccagaaacactgggatcatctgctttgatctgagaatccgggcagggagacatagagccaaaagagaacagataactccaaaaggttgtcgaaatacaagattcttggaatcaataaaaaaacacataacgcctttgattgtatgggtatcatatccgctaaatgctttcgcgtttgcccgtcctcttcccatcatgacatgttatgtatacatctctaccaatattcgtattgatgtgatattcctcagataccatatcgcgtgacacactcctctctatgcgtctccagacaatccagcgcacataccctcgtcccacatttcatgcacctcactctcccccaatacccacacacagcgcagaaaacgcgagccgggtattttgacccctcgggccacttcccccgtgcttcctggtagcttaacgggggagccgccaacagagcagcgagctcttcatctgagggcataggggggagatgggaggcgaggagcggatttgagtcctccggatgcggtggtaacggtgcgtgtggcgtgaggtatttgctccgcggtggtgcatcaagcatctccgtatcttcagtcgtagcaatttgtttctttttcttgtccaaagccagcaagcttttcctcacgagctcattcgtagccttctcctgctgagccgcagcctgcgcctgcgcgggattcgcctcgagctgcgcgatcaacgcattgtagtcgtcgaggtggttgttgaatgtcttctgcgactgcagtatcctcctcacgttcggtgtgaatttcttcgtggcggcgctggtgcgtcccttgcctggtttgggcaggatggggatctgctggtcgcggttgttgtcgcggtctaggatctcgatctcgcgccgggctttggcttcttgtcgtgcgttcgcgtcggcgagacttaggtttccgccgcctgttgtgttgcgcgcgcgtttgcgattcccggtcgtgggcgcgtgttggggccctggtcgggtgtccgggacgtaggcccagcctggtgcattggtcgtttttgtgctggctagctcgattacgccgaagttgctcattgtgtcgagcctctctgctatcggagacttgcacaagtgtgtggtagaagaaaagacgttcaattttatggtttacgacgttgcatggaagcactatgtcagggtttgtggaagttggtggtctgacgtgcagcatatcccaccctacccggtaattgccatctacaccaccacctcactggtcaaccgttcgaggagatttgataatgagccgacgactacagggacggtcgaagagagagggaaggaaaaaaaagagcactaacaaggtagtctaacagggacagttcagatgcacaattcctgatactttcaacgcacccaatggtatttttgagaagtctcgccgtcccgactggcagaaaccacgttggacatatcgtctctaatgcaaagcagcaatcaaacctttccttccattatacaactgatttaaaaacaaga

SEQ ID NO: 31397 - DNA, 834 bp, Muscodor strobelii
  misc_feature: SGI cDNA ID NO. 570808
  misc_feature: Encodes the peptide sequence at SEQ ID NO 31398
atgagcaacttcggcgtaatcgagctagccagcacaaaaacgaccaatgcaccaggctgggcctacgtcccggacacccgaccagggccccaacacgcgcccacgaccgggaatcgcaaacgcgcgcgcaacacaacaggcggcggaaacctaagtctcgccgacgcgaacgcacgacaagaagccaaagcccggcgcgagatcgagatcctagaccgcgacaacaaccgcgaccagcagatccccatcctgcccaaaccaggcaagggacgcaccagcgccgccacgaagaaattcacaccgaacgtgaggaggatactgcagtcgcagaagacattcaacaaccacctcgacgactacaatgcgttgatcgcgcagctcgaggcgaatcccgcgcaggcgcaggctgcggctcagcaggagaaggctacgaatgagctcgtgaggaaaagcttgctggctttggacaagaaaaagaaacaaattgctacgactgaagatacggagatgcttgatgcaccaccgcggagcaaatacctcacgccacacgcaccgttaccaccgcatccggaggactcaaatccgctcctcgcctcccatctcccccctatgccctcagatgaagagctcgctgctctgttggcggctcccccgttaagctaccaggaagcacgggggaagtggcccgaggggtcaaaatacccggctcgcgttttctgcgctgtgtgtgggtattgggggagagtgaggtgcatgaaatgtgggacgagggtatgtgcgctggattgtctggagacgcatagagaggagtgtgtcacgcgatatggtatctga

SEQ ID NO: 31398 - protein, 277 aa, Muscodor strobelii
  misc_feature: SGI Peptide ID NO. 570808
  misc_feature (236)..(265): Pfam Id: PF04438 Pfam Desc: HIT zinc finger
  misc_feature (1)..(277): NCBI GI: 256734350 Blast Desc: NECHADRAFT_74516 [Nectria haematococca mpVI 77-13-4]
  misc_feature (2)..(277): NCBI GI: 261357350 Blast Desc: conserved [Verticillium albo-atrum VaMs.102]
  misc_feature (1)..(277): NCBI GI: 39941678 Blast Desc: MGG_05750 [Magnaporthe grisea 70-15] gi|145022457|gb|EDK06477.1| MGG_05750 [Magnaporthe grisea 70-15]
  misc_feature (7)..(275): NCBI GI: 258574613 Blast Desc: [Uncinocarpus reesii 1704] gi|237901754|gb|EEP76155.1| [Uncinocarpus reesii 1704]
  misc_feature (4)..(269): NCBI GI: 70989569 Blast Desc: HIT finger domain protein [Aspergillus fumigatus Af293] gi|66847265|gb|EAL87596.1| HIT finger domain protein, [Aspergillus fumigatus Af293] gi|159129040|gb|EDP54154.1| HIT
  misc_feature (18)..(275): NCBI GI: 225681063 Blast Desc: [Paracoccidioides brasiliensis Pb03]
  misc_feature (175)..(277): NCBI GI: 116180650 Blast Desc: CHGG_00953 [Chaetomium globosum CBS 148.51] gi|88185250|gb|EAQ92718.1| CHGG_00953 [Chaetomium globosum CBS 148.51]
  misc_feature (1)..(274): NCBI GI: 240105743 Blast Desc: HIT zinc finger family protein [Coccidioides posadasii C735 delta SOWgp]
  misc_feature (6)..(269): NCBI GI: 242765106 Blast Desc: HIT finger domain protein, [Talaromyces stipitatus ATCC 10500] gi|218724103|gb|EED23520.1| HIT finger domain protein, [Talaromyces stipitatus ATCC 10500]
  misc_feature (4)..(269): NCBI GI: 119480195 Blast Desc: HIT finger domain protein, [Neosartorya fischeri NRRL 181] gi|119408280|gb|EAW18229.1| HIT finger domain protein, [Neosartorya fischeri NRRL 181]
MSNFGVIELASTKTTNAPGWAYVPDTRPGPQHAPTTGNRKRARNTTGGGNLSLADANARQEAKARREIEILDRDNNRDQQIPILPKPGKGRTSAATKKFTPNVRRILQSQKTFNNHLDDYNALIAQLEANPAQAQAAAQQEKATNELVRKSLLALDKKKKQIATTEDTEMLDAPPRSKYLTPHAPLPPHPEDSNPLLASHLPPMPSDEELAALLAAPPLSYQEARGKWPEGSKYPARVFCAVCGYWGRVRCMKCGTRVCALDCLETHREECVTRYGI

SEQ ID NO: 31399 - DNA, 621 bp, Muscodor strobelii
  misc_feature: SGI cDNA ID NO. 570809
  misc_feature: Encodes the peptide sequence at SEQ ID NO 31400
atggagcaaatacaaacccaaccaccatccataaccgccaccctcaacatatccccacgaacctaccaccaaagcaacgacgacaacgtccctgaactcacaattcgagcaacactcaaccctacgacagcgaaaggaccccttacaattctaacatactcaacgatattcaacccacaacttgctttaaaaagacgcaatttttttgtcctcgatataacagaaagttccgagacaccgagatatatcaacttagaaactacgaaaggcccgaaacggcccgctcttcaatgcagaaagggccaagctgatgagcgtttctacatgactttttgcccaggtgttgaagtcactatctcggtaccatttaaggtcatctggagacagcccacgagtgattctctttatgatggggaagtagtggagagagggtttcgcgcaggacataaatatcgtcttggagttgtagatgagtttaaggaggtcatgagttggtggtggggagtgagggatgacgttttggacgagagagatggttctacgaaggatgtttcgggtattgagggaaagggatatgtgcgtgtcgtggctgatatggctgatttcgctgttgaggagtga

SEQ ID NO: 31400 - protein, 206 aa, Muscodor strobelii
  misc_feature: SGI Peptide ID NO. 570809
  misc_feature (5)..(206): NCBI GI: 119474225 Blast Desc: NFIA_004490 [Neosartorya fischeri NRRL 181] gi|119407141|gb|EAW17091.1| NFIA_004490 [Neosartorya fischeri NRRL 181]
MEQIQTQPPSITATLNISPRTYHQSNDDNVPELTIRATLNPTTAKGPLTILTYSTIFNPQLALKRRNFFVLDITESSETPRYINLETTKGPKRPALQCRKGQADERFYMTFCPGVEVTISVPFKVIWRQPTSDSLYDGEVVERGFRAGHKYRLGVVDEFKEVMSWWWGVRDDVLDERDGSTKDVSGIEGKGYVRVVADMADFAVEE

SEQ ID NO: 31401 - DNA, 1488 bp, Muscodor strobelii
  misc_feature: SGI cDNA ID NO. 570810
  misc_feature: Encodes the peptide sequence at SEQ ID NO 31402
atgttcgccgtgcacccaagccatggaaattcaatgcagatgcggccggaccaaatcaaaaacgctctgtcaccaaggccaaggccctgcggacatccacaagtagctcaccactgtcattcagacgatacgccatgtcctaagtgtcctttcctggttgaaaagcaatgcatttgcggtaaaaaggcactcaaaaaccagccttgttggttcgaagaatcgagatgtggtctaccatgcggtaggaagctcaaatgcggaacccatctatgcactaaactctgtcatcgccctggagagtgtgaagatgaaggcattccgggctcccgctgtcaacagccatgtggcaagactcgcaactgcggacacttggacgttgagccgtgtcacgctccttacccatgcaaagaggacaaaccgtgtcaggcaaagacattcgtgacctgcgaatgccaacacaggaagcaggaggtcaaatgtcttgcaaccaagacgaacccctttcctgagcgtccagttctgaaatgtgatgacgagtgcctccgcctacaacgtaatgccagactggccaccgctctcaatatcgatccctcgacacacacggacgatcatgtgccgtattctgacaccactctcaagttctatagagagcatgcacagtgggctcatacctatgaacgcgagtttcgcgtcttcggtggtgatcctggagagaagcgattgagattcaaacctatgaagcctcatcaacgagcctttcttcactcgctagctgaagattttggcttcgacagtgaaagcagtgatcccgagcctcataggcatgtgtctcttttcaagacaccgcgttttgtgtcaagtccgatgaagactttggcccaatgcgttaagatccaagccggacaagacttactaaaacaggagtcatcgtccaacgacgtaactgctgccgtcgtcccatacaatgccctccttctcaccaaccctcaatttggattaactatcgaagagctagatacagctctcagaaaggagtacgcagctcacccgactgtcagattccaaacaagctttctaccgtcagaggaagtcgtcattaaggggtcaggctcatggacagcacagaccctcgaaacatccctgactgcactaaagcctacattgttacagacagtgaagcggctcaagcttgctgataacgtccttttctgcaccgttgacgattcattaaatttggtccggcgagaacaaactcgagagcagggaacagggggttggaatgcggtagctggccgttcggcggctcgcccgaagacggttgcaccgccacagtctggctctatgccgctccgtagtcgattcgtcgctctcaagaaagaatccaagaagaaggtggacgacgagccggttgaggatgattgggaggctgctgcggagaagttggatgaggcaccggaggtctcagaagaagtcaatactgtagcatag

SEQ ID NO: 31402 - protein, 495 aa, Muscodor strobelii
  misc_feature: SGI Peptide ID NO. 570810
  misc_feature (226)..(281): Pfam Id: PF01424 Pfam Desc: R3H domain
  misc_feature (86)..(113): Pfam Id: PF01422 Pfam Desc: NF-X1 type zinc finger
  misc_feature (26)..(482): NCBI GI: 154323860 Blast Desc: BC1G_00329 [Botryotinia fuckeliana B05.10] gi|150842558|gb|EDN17751.1| BC1G_00329 [Botryotinia fuckeliana B05.10]
  misc_feature (26)..(482): NCBI GI: 171695386 Blast Desc: protein product [Podospora anserina] gi|170947935|emb|CAP60099.1| protein product [Podospora anserina]
  misc_feature (46)..(464): NCBI GI: 164427171 Blast Desc: NCU03273 [Neurospora crassa OR74A] gi|157071636|gb|EAA35190.2| NCU03273 [Neurospora crassa OR74A]
  misc_feature (15)..(483): NCBI GI: 261355979 Blast Desc: shuttle craft [Verticillium albo-atrum VaMs.102]
  misc_feature (26)..(326): NCBI GI: 116182440 Blast Desc: CHGG_01848 [Chaetomium globosum CBS 148.51] gi|88186145|gb|EAQ93613.1| CHGG_01848 [Chaetomium globosum CBS 148.51]
  misc_feature (48)..(489): NCBI GI: 145611764 Blast Desc: MGG_00137 [Magnaporthe grisea 70-15] gi|145019016|gb|EDK03295.1| MGG_00137 [Magnaporthe grisea 70-15]
  misc_feature (26)..(367): NCBI GI: 189205519 Blast Desc: PTRG_08762 [Pyrenophora tritici-repentis Pt-1C-BFP] gi|187975187|gb|EDU41813.1| PTRG_08762 [Pyrenophora tritici-repentis Pt-1C-BFP]
  misc_feature (26)..(432): NCBI GI: 256732614 Blast Desc: NECHADRAFT_38940 [Nectria haematococca mpVI 77-13-4]
  misc_feature (153)..(482): NCBI GI: 156056641 Blast Desc: SS1G_04051 [Sclerotinia sclerotiorum 1980] gi|154701837|gb|EDO01576.1| SS1G_04051 [Sclerotinia sclerotiorum 1980]
  misc_feature (26)..(439): NCBI GI: 46125397 Blast Desc: FG07076.1 [Gibberella zeae PH-1]
MFAVHPSHGNSMQMRPDQIKNALSPRPRPCGHPQVAHHCHSDDTPCPKCPFLVEKQCICGKKALKNQPCWFEESRCGLPCGRKLKCGTHLCTKLCHRPGECEDEGIPGSRCQQPCGKTRNCGHLDVEPCHAPYPCKEDKPCQAKTFVTCECQHRKQEVKCLATKTNPFPERPVLKCDDECLRLQRNARLATALNIDPSTHTDDHVPYSDTTLKFYREHAQWAHTYEREFRVFGGDPGEKRLRFKPMKPHQRAFLHSLAEDFGFDSESSDPEPHRHVSLFKTPRFVSSPMKTLAQCVKIQAGQDLLKQESSSNDVTAAVVPYNALLLTNPQFGLTIEELDTALRKEYAAHPTVRFQTSFLPSEEVVIKGSGSWTAQTLETSLTALKPTLLQTVKRLKLADNVLFCTVDDSLNLVRREQTREQGTGGWNAVAGRSAARPKTVAPPQSGSMPLRSRFVALKKESKKKVDDEPVEDDWEAAAEKLDEAPEVSEEVNTVA

SEQ ID NO: 31403 - DNA, 4921 bp, Muscodor strobelii
  misc_feature: SGI EST ID NO. CUFF.74288.0
  misc_feature: Variant of the nucleotide sequence at SEQ ID NO 31401
gttgcatagcctacctagtaagaaacagtcacattctggggcgatcctcacatggcccgtgagctcctgcagccgggttgggtagggcagcattcttccctccaaaatcgaaaacgataagaatagataggcccacctgcttccctaggtattcttccgcagcagtgtaacggaaatgttagcgaggcgtgtccaccgtagttagtggttctgccactggaatggaatggtcaatactggctgcgggccgcaaagctagaaacaaactgcacagaaatgattcataacgtctcatccactgggtgactcatcagccaatcagccacagtggaaaatcgcccctcgacgccgtttttcatgtatagatcggacctcataacggataacgtcgtgacatagcaaagagtgcaatactcattcctttcgatacagcatcattgcgttgcgttgcctcatttcctggtttcaaagtcgctgtatttcaaaaagcgcatttcatacttctagctacatcgcatttaggtgccgaaggtgcgtctttctcattcaccattttgcaacgcatcattccttggagtcaaccttggaacagaagaatggagggcactgtgccttcagggcctcggagcggccaggcagatcgatctcgaggtcaacgaccaagaggcggaaggccttcaagaagaggccgcggccaccggccacggggctcgccaaatcagagtactggcaatctgccagcaatagccccaacggatgataatacaatccaagaccggccttcaccaggcccagctcaaagtggcagtaatttttcgcgaggaaggggcagaaatggtcgtggtgcaaggaggggtggagcccctggaaggcagaggactaccatgccggcaaaccgaacctttggtggtcatctcactcaagaacatgagtccgagggacaaaatcgtgaggattccgctaccctcaacgctggtgcctcagtttttgtcccaggtcaacctttcgccacgacaagtgcgggtgtaccaatcagtgcccctaaacatgttcgtcgagcatctaaatcaagtgcctctgatctccccacaagaattcacgaggacatcagtaacggacagtatgaatgcgtcatctgtactaatgaggttctgcgaaattctcgcgtgtggtcatgctcaatatgctggaccgtgacccacatgtcctgcgtgaagaagtggtatacaaatagagcaaagccacccgatcaagaacaagacacacctcagcaacagacatggaggtgtcctggctgtaattcaggaatggatgatgaacctggagtttatcattgctggtgcggaaaggaaatcaccccaaagcctgtcggaagtctaaatccacatagctgtggtcagacatgcgccaaaccaagagggacatgtccacacccgtgtcccctgcaatgtcatgcgggaccttgcctgccatgcctgttaatggcgccaagtcaatcatgcttttgtggcaagaatgcgtcttcgaagcgatgtagcgagacagactactccaaaggatggagctgccaccaaaagtgcggcgatttgcttgcttgtggagagcatgaatgcgagaatgaatgccaccccggtctctgcggtagttgtgatatcccagtcacttctcgatgttattgcggacaagaatataagaaaataccttgcgcagaacagggagaaaagttagattcttacaattatggccagctgagccgatcagatacgacattggaagacgaagaagacctgacagcgtggtttgttggagctttcaagtgcactcgagtttgtggcaggacgtttgattgtggcaagcatcattgcaagttagaatgccaccctcaagatgagacacaagctcattgtcctttatctcccgatgtcgttacgcattgtccctgcggcaagacaccgatttccgatataattgccacccgagagaactgctcagaccctataccgaactgcggcaaagtctgcgataagatcctagactgtgggcatttttgtcaggacaaatgtcatactggcccatgttcgccgtgcacccaagccatggaaattcaatgcagatgcggccggaccaaatcaaaaacgctctgtcaccaaggtaaactggatcatcctcagtgtatgagaatatgccgtgctcagttgaactgtgggcggcatgaacatggagagcattgctgctcgggagagaagcgtgcgatagagagagttgcatcaagacgaaagaatagaaatctggcccctactaatgaagattacgaggcggaacatatctgcatacggatctgtggaagggatttaaaatgcgggagacatcgatgtcagcaaatatgccacagagggccttgtcccagttgccccgaagcgattttcgaggaaatcagttgcaactgtgggagatcggtcctacaaccaccacagccatgcggcacacagcctccgctatgccgggcagattgcactaggccaaggccctgcggacatccacaagtagctcaccactgtcattcagacgatacgccatgtcctaagtgtcctttcctggttgaaaagcaatgcatttgcggtaaaaaggcactcaaaaaccagccttgttggttcgaagaatcgagatgtggtctaccatgcggtaggaagctcaaatgcggaacccatctatgcactaaactctgtcatcgccctggagagtgtgaagatgaaggcattccgggctcccgctgtcaacagccatgtggcaagactcgcaactgcggacacttggacgttgagccgtgtcacgctccttacccatgcaaagaggacaaaccgtgtcaggcaaagacattcgtgacctgcgaatgccaacacaggaagcaggaggtcaaatgtcttgcaaccaagacgaacccctttcctgagcgtccagttctgaaatgtgatgacgagtgcctccgcctacaacgtaatgccagactggccaccgctctcaatatcgatccctcgacacacacggacgatcatgtgccgtattctgacaccactctcaagttctatagagagcatgcacagtgggctcatacctatgaacgcgagtttcgcgtcttcggtggtgatcctggagagaagcgattgagattcaaacctatgaagcctcatcaacgagcctttcttcactcgctagctgaagattttggcttcgacagtgaaagcagtgatcccgagcctcataggcatgtgtctcttttcaagacaccgcgttttgtgtcaagtccgatgaagactttggcccaatgcgttaagatccaagccggacaagacttactaaaacaggagtcatcgtccaacgacgtaactgctgccgtcgtcccatacaatgccctccttctcaccaaccctcaatttggattaactatcgaagagctagatacagctctcagaaaggagtacgcagctcacccgactgtcagattccaaacaagctttctaccgtcagaggaagtcgtcattaaggggtcaggctcatggacagcacagaccctcgaaacatccctgactgcactaaagcctacattgttacagacagtgaagcggctcaagcttgctgataacgtccttttctgcaccgttgacgattcattaaatttggtccggcgagaacaaactcgagagcagggaacagggggttggaatgcggtagctggccgttcggcggctcgcccgaagacggttgcaccgccacagtctggctctatgccgctccgtagtcgattcgtcgctctcaagaaagaatccaagaagaaggtggacgacgagccggttgaggatgattgggaggctgctgcggagaagttggatgaggcaccggaggtctcagaagaagtcaatactgtagcatagtgaatgagccatgccaaagtcaaatccaaagaaattgctgcatcatcacatagcctgttgtatagctaggtaaagaagcattcacatgtgctcggaacaatatcttggttcgctatcaaaactttgtcccaatattgcgaaagcgatttcaataccgtgctaattcagggatgctgcacgaaagattgcggttatattcgcttccaattaaggggcatcgttctagctatataactagatatcttggacactttaatataagagtcaagacacgaacggcgaacctcaccctcgattcactcctcaacagcgaaatcagccatatcagccacgacacgcacatatccctttccctcaatacccgaaacatccttcgtagaaccatctctctcgtccaaaacgtcatccctcactccccaccaccaactcatgacctccttaaactcatctacaactccaagacgatatttatgtcctgcgcgaaaccctctctccactacttccccatcataaagagaatcactcgtgggctgtctccagatgaccttaaatggtaccgagatagtgacttcaacacctgggcaaaaagtcatgtagaaacgctcatcagcttggccctttctgcattgaagagcgggccgtttcgggcctttcgtagtttctaagttgatatatctcggtgtctcggaactttctgttatatcgaggacaaaaaaattgcgtctttttaaagcaagttgtgggttgaatatcgttgagtatgttagaattgtaaggggtcctttcgctgtcgtagggttgagtgttgctcgaattgtgagttcagggacgttgtcgtcgttgctttggtggtaggttcgtggggatatgttgagggtggcggttatggatggtggttgggtttgtatttgctccatggtcggttgtagctggctgtgaaggataaaggatgaaacaattactcgcacttgaacgtaggtttagggtttttt

SEQ ID NO: 31404 - DNA, 753 bp, Muscodor strobelii
  misc_feature: SGI cDNA ID NO. 570811
  misc_feature: Encodes the peptide sequence at SEQ ID NO 31405
atgcatctgccagagctggacaatcgcctcgtttcagtgacggactcatctatttcctctgggacggatcgccatctaacgaagagaagggactgtaatattgcagttgataacaaaccgcattacgattgtgatggccgttccataaccaacgatgatggcacatgtggcacgaagaatgagtgggataacgccgatgtctactgtgccgcgtactgtgaagtcaggcgcaccacatggttaggtccgcaccaaaatgccccaggggacttcggagatcttcagtccccaggtcaggccctgcaacttgaggaaggccacgagacaaccataacaacgggtttctctgtcggcggcgatagcacctgggaggatgctatctctggcggcgctagtttcgagttctccgtctcgcacacaacttccgagtcggtgcaacatagcttcgagcctaaagacgaatatcgtgctaggtgggtgcaatggcctgtcctcgcagaaacttgcggtgatgttagctacaagcggtatgtgccaatgactaccggaggagggatctcatcgtttccggcttattgcactgatggactcggcacaacccataatgtatgctccaccggccaagtaataaacgatgcagggcatgctcttgttatttgggatgtggccttctacaaggacgatggaactttagcgccgatggaggaccaaactgcgggctttcaaagtaatgaaaaatacgtgaggacttag

SEQ ID NO: 31405 - protein, 250 aa, Muscodor strobelii
  misc_feature: SGI Peptide ID NO. 570811
MHLPELDNRLVSVTDSSISSGTDRHLTKRRDCNIAVDNKPHYDCDGRSITNDDGTCGTKNEWDNADVYCAAYCEVRRTTWLGPHQNAPGDFGDLQSPGQALQLEEGHETTITTGFSVGGDSTWEDAISGGASFEFSVSHTTSESVQHSFEPKDEYRARWVQWPVLAETCGDVSYKRYVPMTTGGGISSFPAYCTDGLGTTHNVCSTGQVINDAGHALVIWDVAFYKDDGTLAPMEDQTAGFQSNEKYVRT

SEQ ID NO: 31406 - DNA, 987 bp, Muscodor strobelii
  misc_feature: SGI cDNA ID NO. 570812
  misc_feature: Encodes the peptide sequence at SEQ ID NO 31407
atggacacgacttccgactcaatcacccaatatccggtgtatgttggactatggataaactggtcctacggtcgggtattaggcgctactctgactttgaatcgacaagacgcaaactttctgattgcctttatagcctccttcatctcgtttgttgggggtcgattctggcgaatattgggtttccttattcatagattttggtccacaagtggtccccagtatgttgttcattaccagcaacaggtgatattgcgcaatacttccagcccagaagacgcgttgcggctttttttctcgctcgcttgggcaaacagacgttccaaactactgtttagacccatgtccacagggaccgcggccgtcatctgcctagtgttcttcactgttgctggtggctactcttcccatgtttctacagttacgcgcgatgaagtgcttctaaaaagctccaattgtggatatagaagtccctctctgttcgctacacaatcggacgcggcaaacacctactacagcaaccgggtccagaatgcggcgggctatgctgctcaatgttatacgaaagctgccaatgcgcagatatctgaatgtaatcagtttgtcaagagtcaaatcatcggcaagatgaacacacaagcacgatgtccgtttaacgaaacattgtgtcgagactcgtcaaacaatcttgtcattgattccggtcttctcgacagccacatccactttggcttgaactctcctccaggtaagagatttgcaatgaaacatgctcttcactgtgctcccttggttacggaaggttacacaagtatctattcaagccagtatccctctctaaacggctccaccaaataccactatggcacatatccctggctctccgaacaagattacttgttccttgctagacctctatcgtctcagtacgacttgatttcctctgatgacgcaatcttgtcatactcaagccttgacttgcagtaa

SEQ ID NO: 31407 - protein, 328 aa, Muscodor strobelii
  misc_feature: SGI Peptide ID NO. 570812
  misc_feature (6)..(290): NCBI GI: 169615058 Blast Desc: SNOG_10683 [Phaeosphaeria nodorum SN15] gi|111060957|gb|EAT82077.1| SNOG_10683 [Phaeosphaeria nodorum SN15]
  misc_feature (13)..(289): NCBI GI: 159128250 Blast Desc: conserved [Aspergillus fumigatus A1163]
  misc_feature (13)..(289): NCBI GI: 119474227 Blast Desc: NFIA_004500 [Neosartorya fischeri NRRL 181] gi|119407142|gb|EAW17092.1| conserved [Neosartorya fischeri NRRL 181]
  misc_feature (13)..(289): NCBI GI: 70986226 Blast Desc: conserved [Aspergillus fumigatus Af293] gi|66846236|gb|EAL86569.1| conserved [Aspergillus fumigatus Af293]
  misc_feature (13)..(278): NCBI GI: 115399382 Blast Desc: [Aspergillus terreus NIH2624] gi|114192163|gb|EAU33863.1| [Aspergillus terreus NIH2624]
  misc_feature (13)..(269): NCBI GI: 189194015 Blast Desc: conserved [Pyrenophora tritici-repentis Pt-1C-BFP] gi|187978910|gb|EDU45536.1| conserved [Pyrenophora tritici-repentis Pt-1C-BFP]
  misc_feature (13)..(306): NCBI GI: 115433432 Blast Desc: [Aspergillus terreus NIH2624] gi|114189705|gb|EAU31405.1| [Aspergillus terreus NIH2624]
  misc_feature (13)..(296): NCBI GI: 169772941 Blast Desc: [Aspergillus oryzae RIB40] gi|83768800|dbj|BAE58937.1| protein product [Aspergillus oryzae]
  misc_feature (5)..(264): NCBI GI: 121699395 Blast Desc: ACLA_082720 [Aspergillus clavatus NRRL 1] gi|119396149|gb|EAW06581.1| ACLA_082720 [Aspergillus clavatus NRRL 1]
  misc_feature (13)..(292): NCBI GI: 169618215 Blast Desc: SNOG_12297 [Phaeosphaeria nodorum SN15] gi|160703576|gb|EAT80110.2| SNOG_12297 [Phaeosphaeria nodorum SN15]
MDTTSDSITQYPVYVGLWINWSYGRVLGATLTLNRQDANFLIAFIASFISFVGGRFWRILGFLIHRFWSTSGPQYVVHYQQQVILRNTSSPEDALRLFFSLAWANRRSKLLFRPMSTGTAAVICLVFFTVAGGYSSHVSTVTRDEVLLKSSNCGYRSPSLFATQSDAANTYYSNRVQNAAGYAAQCYTKAANAQISECNQFVKSQIIGKMNTQARCPFNETLCRDSSNNLVIDSGLLDSHIHFGLNSPPGKRFAMKHALHCAPLVTEGYTSIYSSQYPSLNGSTKYHYGTYPWLSEQDYLFLARPLSSQYDLISSDDAILSYSSLDLQ

SEQ ID NO: 31408 - DNA, 610 bp, Muscodor strobelii
  misc_feature: SGI EST ID NO. CUFF.74325.0
  misc_feature: Variant of the nucleotide sequence at SEQ ID NO 31406
tatacaccaacatggctgcaggttgcgatatactgcatttctcctgattctgacgaaacgcggcttgcggcacgcatcagccagttgtctttgaggtctcatggggaataggactacgctataattaggttaattttcgatccccaatgtgcacaatccagccctataatttctttggacatcgccattgggcaaagacctgaagttagacatttatctaatcgccactttcattgccttccaacctttacattatcatggacacgacttccgactcaatcacccaatatccggtgtatgttggactatggataaactggtcctacggtcgggtattaggcgctactctgactttgaatcgacaagacgcaaactttctgattgcctttatagcctccttcatctcgtttgttgggggtcgattctggcgaatattgggtttccttattcatagattttggtccacaagtggtccccagtatgttgttcattaccagcaacaggtgatattgcgcaatacttccagcccagaagacgcgttgcggctttttttctcgctcgcttgggcaaacagacgttccaaactactgtttagacccatgtccacagg

SEQ ID NO: 31409 - DNA, 1812 bp, Muscodor strobelii
  misc_feature: SGI cDNA ID NO. 570813
  misc_feature: Encodes the peptide sequence at SEQ ID NO 31410
atgatcattcaaactgtgtcactcaaggacccaaacgggaaatatctctcttgcaaacccgaagatgggggcctggtatttgacgtcgatcatctggacccctcctgtaagttcttcatggttcctcacggtgctggaagaacttgcttgaaaggccccaatggaaagtttgtcgatctccatgacaaccgattccggtgcgatggtattatcactggcgtgggcttcgtcttctctgatacgaccctgcagctcgacagcggcaaattcctcagcaatgctgtcgatagaaacactatcacagcaggcgatactgctactagtctggtgatcgagtcgacatcgttcgagagtttcaatgtgaacatgtcgttgtctgctccagcaatcaccttcaacgagaatgtgctcattgagagtcgctacagaccggggaagagctacctggctctgaaaaaatcaagcggaatcatcgatatcctcttctccgtcccctattcgatggacggagagagaaacggaacggtcgagcttatcctgaaccacatgagggattttacagctgggggagtcatcgacattgacttgaacggcagttcccttattcagaaatacgcccccccctgtcactgccgaggctttgtgggtacctattgcttttctgatgctgctttagtattcaaagatagtgagggatacttgaggcaggagaattccgtgtatgctcttgggctatcatctgggtcgtcatacagtggtggtagattgaaggacgatttaagggaaagaaacccttatctctctttggaaggagggtcatcttggtcaaagatcacatttacggtcaggaaagagttattgggtattggaaagtttgtggtgaagattcaacataggcgggagtcgagaacgtcgatcgagatctggctcaacgacaagaggattgaggacggctataatgatattcccatcgactcgtttggtacatccaccttttatgttgatcgcgagaggctgggcgagagcaatgagcttgtgatacggccccgtgacgggcaatattatatctccgatgttggtgtggacgtggtttccatcctcccgaatgcgacggaggagaatttcaagacctatgtcaaaaactgggttctacagcagaggcgaaatatcggagagcttaataagattcccagagaggatctcccagcttggaggttcgttcaagaggcaccttactggttcttcattccattccttcccgtctcacccgaagagatcagtgttctcttcgactaccacaacatgtttttcatttctaccgcgttcgagatcagggatctcaataacagggcaagagactttcacagggagctcataagcactgaccttcccagaaaaaacgccctcaggcatgcctactggactgcaatgctatccagacgatttggcatgtttctcgctctggatctctcgacagcacatgaagaagctcatgtcgaccttacgattgaagggccctacgatcatgtcacggacaagatcaacaatgcagtgggatcccttctgggttcgaggactcccagggccaaggatctccgagatgtgatagacgcagcttggaggaatgaagagctggcgtatgcgaaagacttcagagagactgcttcgggacagacagctcgggtgtcttggcagaccccactggataggatggcgctgaagtataacgtaaaaccgagattcagtttgtcggaaaaggcgagtttaacgaaggcaggggtgaaggagcaggatgttccaattatatactaa

SEQ ID NO: 31410 - protein, 603 aa, Muscodor strobelii
  misc_feature: SGI Peptide ID NO. 570813
  misc_feature (426)..(567): NCBI GI: 257054948 Blast Desc: Svir_08930 [Saccharomonospora viridis DSM 43017] gi|256584820|gb|ACU95953.1| Svir_08930 [Saccharomonospora viridis DSM 43017]
MIIQTVSLKDPNGKYLSCKPEDGGLVFDVDHLDPSCKFFMVPHGAGRTCLKGPNGKFVDLHDNRFRCDGIITGVGFVFSDTTLQLDSGKFLSNAVDRNTITAGDTATSLVIESTSFESFNVNMSLSAPAITFNENVLIESRYRPGKSYLALKKSSGIIDILFSVPYSMDGERNGTVELILNHMRDFTAGGVIDIDLNGSSLIQKYAPPCHCRGFVGTYCFSDAALVFKDSEGYLRQENSVYALGLSSGSSYSGGRLKDDLRERNPYLSLEGGSSWSKITFTVRKELLGIGKFVVKIQHRRESRTSIEIWLNDKRIEDGYNDIPIDSFGTSTFYVDRERLGESNELVIRPRDGQYYISDVGVDVVSILPNATEENFKTYVKNWVLQQRRNIGELNKIPREDLPAWRFVQEAPYWFFIPFLPVSPEEISVLFDYHNMFFISTAFEIRDLNNRARDFHRELISTDLPRKNALRHAYWTAMLSRRFGMFLALDLSTAHEEAHVDLTIEGPYDHVTDKINNAVGSLLGSRTPRAKDLRDVIDAAWRNEELAYAKDFRETASGQTARVSWQTPLDRMALKYNVKPRFSLSEKASLTKAGVKEQDVPIIY

SEQ ID NO: 31411 - DNA, 414 bp, Muscodor strobelii
  misc_feature: SGI cDNA ID NO. 570814
  misc_feature: Encodes the peptide sequence at SEQ ID NO 31412
atgactccgttcttcacccaagcgttaggctttttgagacaccactacccacaacatcattgcaccttaggctggcagtgcaactcatatttgaaatccgacccagcaaaccctaaaagttgtcgtcacttcaaatttcgaaccatccatcatccactatacatagacaagatgggcggcatcacgataaccaacaacacctcagaggccatcaatgtcagtgtcactgcaactggtagtgattttggccaggggggaaacgaggactggtacgttctcgcggccaaaggaggaacagatacttggggcagcaggaaccagaagcaggtgatcagatttaccagaagcctgactcccggaacgctagtggagattgttcttggtgtaccaggttctactacaaacatctattag

SEQ ID NO: 31412 - protein, 137 aa, Muscodor strobelii
  misc_feature: SGI Peptide ID NO. 570814
  misc_feature (45)..(137): NCBI GI: 1177244 Blast Desc: esterase [Botryotinia fuckeliana]
  misc_feature (36)..(136): NCBI GI: 156058574 Blast Desc: SS1G_03299 [Sclerotinia sclerotiorum 1980] gi|154701086|gb|EDO00825.1| SS1G_03299 [Sclerotinia sclerotiorum 1980]
MTPFFTQALGFLRHHYPQHHCTLGWQCNSYLKSDPANPKSCRHFKFRTIHHPLYIDKMGGITITNNTSEAINVSVTATGSDFGQGGNEDWYVLAAKGGTDTWGSRNQKQVIRFTRSLTPGTLVEIVLGVPGSTTNIY

SEQ ID NO: 31413 - DNA, 1398 bp, Muscodor strobelii
  misc_feature: SGI EST ID NO. CUFF.74385.0
  misc_feature: Variant of the nucleotide sequence at SEQ ID NO 31411
gtcgggcattccgggttcctcagccgaacctctggtctaattgtagctatataatcgcaaagatgactccgttcttcacccaagcgttaggctttttgagacaccactacccacaacatcattgcaccttaggctggcagtgcaactcatatttgaaatccgacccagcaaaccctaaaagttgtcgtcacttcaaatttcgaaccatccatcatccactatacacaagatgggcggcatcacgataaccaacaacacctcagaggccatcaatgtcagtgtcactgcaactggtagtgattttggccaggggggaaacgaggactggtacgttctcgcggccaaaggaggaacagatacttggggcagcaggaaccagaagcaggtgatcagatttaccagaagcctgactcccggaacgctagtggagattgttcttggtgtaccaggttctactacaaacatctattagctagggttttattgcagtcacctaaccctaagggatggaataagccatgcgttatgatgctgttctatgttgatgttatggatgcttaatggctttaaagtatagttgcgcatgctaaacagcatgcctttcgtgaaaaaagttacttcaaacttgttaataaagttgccaggctgcatttccttgctttatgtggtgtggtggtcgcctctatctgcgtatgcagatacaggctttcccaatatataagggcagatgttaaggacgagtgtagcttactaattactgtcgtaaggccatgtttaagacaatgggctttttttcaacgaggaggaaggttctcaacttctcccacactagttccttccctttcacagccttgaaatcgaactgccacagcagcttagcaagcactaagcgcatctccgcctttgctaaatgtattcccatacaggaccgtggcccaacgctgaaaggttgaaatgcatgtcgctggtcgtccctgaatattgactcgggattttcaatctcctcggacaaccatctttctggcatgaaagaggtggcagcatgaaacagagctgtgtcgcggttaatagtgtatgcctggatcgatacttgagtctgtaaagcgaggttaacaagagctcaagcgcattcaaggttcatgccatacccctcctggtagccaaactccacagacattctgacccttgccgggcactcgacgtgggagcatccaggggattggtggacataaccggaggccttctgtgatgacagcattcagatactgtacctgactgagtgcatccagcgtcatgtcttcagatgaattgaagcttcctcggatttcttctgtaagtttcttcagcttatccgggtgattgacgaggtagtttgttgtgcctccaaggacagtggct

SEQ ID NO: 31414 - DNA, 1515 bp, Muscodor strobelii
  misc_feature: SGI cDNA ID NO. 570815
  misc_feature: Elevated expression when VOC is produced
  misc_feature: Encodes the peptide sequence at SEQ ID NO 31415
atgccctctgaaggattaccggttggacttgttgtctcaacattcgcattggcattgatcctttatttcctttgtcgcgctgcctacaatgtctacctccatccactctccaaagtccctgggcctcgactgtggtctgcctcacgactgcctttcatccatgccctcctcaaaggaactattgttcatgattttcagcggctgcgtcaacaatatggaccgatactcaggattgcaccgaacgaagtaacatttgctcgtggcgatgcctgggtcgacatcttccagcctcgaactgacgactttctcaaggaccctgtttggtgggctccacaacctggccagcccaactccttgatcagcgctatcaatccagataaacacgtaaggatgcggaaagcattggcacccgggtttacgccgcgcgcactcaaagagcaagagcctgtccttcaccaatacgccaacctattaatcgagcgactggatcggatcgccagatcttcgggcaattgcacaagctatgtcgagattaacatcgcgccttggttcaacttcatcacatttgacatcttcggggatctaggattcggggagtcattcaactgcctgcacgattcaaaataccacccgtggatttctctccttttcagtagcgttaaggctgcatcttacgttgccgctactcgattctatcctgttgtccaatggatactcatgacctgcatcccaccctccttgagaaagatgcagagagaccacttccgacagattgttgacaaagtagaccgtcgactaaaccttgagcaggagcgccctgacattatgtcccacgtcattgccaggcacgacaaggactcattctcacaggatgaaatctatcaaacattcatggtgttgacaacggctggaagcgagaccacagccactgtccttggaggcacaacaaactacctcgtcaatcacccggataagctgaagaaacttacagaagaaatccgaggaagcttcaattcatctgaagacatgacgctggatgcactcagtcaggtacagtatctgaatgctgtcatcacagaaggcctccggttatgtccaccaatcccctggatgctcccacgtcgagtgcccggcaagggtcagaatgtctgtggagtttggctaccaggagggactcaagtatcgatccaggcatacactattaaccgcgacacagctctgtttcatgctgccacctctttcatgccagaaagatggttgtccgaggagattgaaaatcccgagtcaatattcagggacgaccagcgacatgcatttcaacctttcagcgttgggccacggtcctgtatgggaatacatttagcaaaggcggagatgcgcttagtgcttgctaagctgctgtggcagttcgatttcaaggctgtgaaagggaaggaactagtgtgggagaagttgagaaccttcctcctcgttgaaaaaaagcccattgtcttaaacatggccttacgacagtaa

SEQ ID NO: 31415 - protein, 504 aa, Muscodor strobelii
  misc_feature: SGI Peptide ID NO. 570815
  misc_feature (42)..(499): Pfam Id: PF00067 Pfam Desc: Cytochrome P450
  misc_feature (248)..(499): Pfam Id: PF00067 Pfam Desc: Cytochrome P450
  misc_feature (124)..(208): Pfam Id: PF00067 Pfam Desc: Cytochrome P450
  misc_feature (22)..(496): NCBI GI: 238841667 Blast Desc: benzoate 4-monooxygenase cytochrome P450 [Microsporum canis CBS 113480]
  misc_feature (13)..(496): NCBI GI: 67540592 Blast Desc: AN6466.2 [Aspergillus nidulans FGSC A4] gi|40739298|gb|EAA58488.1| AN6466.2 [Aspergillus nidulans FGSC A4]
  misc_feature (13)..(503): NCBI GI: 259479302 Blast Desc: TPA: cytochrome P450, (Eurofung) [Aspergillus nidulans FGSC A4]
  misc_feature (19)..(502): NCBI GI: 145240775 Blast Desc: An08g09230 [Aspergillus niger] gi|134077558|emb|CAK96702.1| protein product [Aspergillus niger]
  misc_feature (17)..(500): NCBI GI: 171677071 Blast Desc: protein product [Podospora anserina] gi|170936603|emb|CAP61262.1| protein product [Podospora anserina]
  misc_feature (3)..(474): NCBI GI: 156066019 Blast Desc: SS1G_01020 [Sclerotinia sclerotiorum 1980] gi|154691879|gb|EDN91617.1| SS1G_01020 [Sclerotinia sclerotiorum 1980]
  misc_feature (7)..(500): NCBI GI: 119481647 Blast Desc: benzoate 4-monooxygenase cytochrome P450 [Neosartorya fischeri NRRL 181] gi|119409006|gb|EAW18955.1| benzoate 4-monooxygenase cytochrome P450 [Neosartorya fischeri NRRL 181]
  misc_feature (10)..(500): NCBI GI: 156032451 Blast Desc: SS1G_13923 [Sclerotinia sclerotiorum 1980] gi|154699325|gb|EDN99063.1| SS1G_13923 [Sclerotinia sclerotiorum 1980]
  misc_feature (10)..(500): NCBI GI: 121716300 Blast Desc: benzoate 4-monooxygenase cytochrome P450 [Aspergillus clavatus NRRL 1] gi|119403916|gb|EAW14333.1| benzoate 4-monooxygenase cytochrome P450 [Aspergillus clavatus NRRL 1]
  misc_feature (12)..(504): NCBI GI: 212544784 Blast Desc: RNA polymerase II mediator complex component Srb8, [Penicillium marneffei ATCC 18224] gi|210065515|gb|EEA19609.1| RNA polymerase II mediator complex component Srb8, [Penicillium
  misc_feature (29)..(503): SWISSPROT Homolog: EC 1.14.14.1 Unspecific monooxygenase
  misc_feature: Useful for introducing or modulating the production of volatile compounds
MPSEGLPVGLVVSTFALALILYFLCRAAYNVYLHPLSKVPGPRLWSASRLPFIHALLKGTIVHDFQRLRQQYGPILRIAPNEVTFARGDAWVDIFQPRTDDFLKDPVWWAPQPGQPNSLISAINPDKHVRMRKALAPGFTPRALKEQEPVLHQYANLLIERLDRIARSSGNCTSYVEINIAPWFNFITFDIFGDLGFGESFNCLHDSKYHPWISLLFSSVKAASYVAATRFYPVVQWILMTCIPPSLRKMQRDHFRQIVDKVDRRLNLEQERPDIMSHVIARHDKDSFSQDEIYQTFMVLTTAGSETTATVLGGTTNYLVNHPDKLKKLTEEIRGSFNSSEDMTLDALSQVQYLNAVITEGLRLCPPIPWMLPRRVPGKGQNVCGVWLPGGTQVSIQAYTINRDTALFHAATSFMPERWLSEEIENPESIFRDDQRHAFQPFSVGPRSCMGIHLAKAEMRLVLAKLLWQFDFKAVKGKELVWEKLRTFLLVEKKPIVLNMALRQ

SEQ ID NO: 31416 - DNA, 2720 bp, Muscodor strobelii
  misc_feature: SGI EST ID NO. CUFF.74386.1
  misc_feature: Variant of the nucleotide sequence at SEQ ID NO 31414
taatcttgatcatgtcttcaccgattgcacctaagatgcactgacctttgcatctcagagtcgcaaatacgaccagtcttgtgtttctggccaattgcttgtcgtcaacagaccatcaagtttctctacctgcgggtttgccatccattgggggccacgggtatacgcacggcaccgccccagaggggtacataccctgcaggcctttcgctgcgggttgctttccagtccgtttggccagaatgcccgacctactgttaggtaagctggaggtgctcagaggcgatctccttgctctcgtcctcaaagcacccctttgtctaacgtcctccattgctgcacgacgtcatttataccatctttgcgttctctttcccttacatttttcttcgtaagcgtcaaacattagaagtctgaatctaccactttcttcgcattgcccgtcagttctggtgaccttcaatcttgtatgcagctatcatatcatatataggagctggacctagcgtgaaagcgaaacaaactcaacatgccctctgaaggattaccggttggacttgttgtctcaacattcgcattggcattgatcctttatttcctttgtcgcgctgcctacaatgtctacctccatccactctccaaagtccctgggcctcgactgtggtctgcctcacgactgcctttcatccatgccctcctcaaaggaactattgttcatgattttcagcggctgcgtcaacaatatggaccgatactcaggattgcaccgaacgaagtaacatttgctcgtggcgatgcctgggtcgacatcttccagcctcgaactgacgactttctcaaggaccctgtttggtgggctccacaacctggccagcccaactccttgatcagcgctatcaatccagataaacacgtaaggatgcggaaagcattggcacccgggtttacgccgcgcgcactcaaagagcaagagcctgtccttcaccaatacgccaacctattaatcgagcgactggatcggatcgccagatcttcgggcaattgcacaagctatgtcgagattaacatcgcgccttggttcaacttcatcacatttgacatcttcggggatctaggattcggggagtcattcaactgcctgcacgattcaaaataccacccgtggatttctctccttttcagtagcgttaaggctgcatcttacgttgccgctactcgattctatcctgttgtccaatggatactcatgacctgcatcccaccctccttgagaaagatgcagagagaccacttccgacagattgttgacaaagtagaccgtcgactaaaccttgagcaggagcgccctgacattatgtcccacgtcattgccaggcacgacaaggactcattctcacaggatgaaatctatcaaacattcatggtgttgacaacggctggaagcgagaccacagccactgtccttggaggcacaacaaactacctcgtcaatcacccggataagctgaagaaacttacagaagaaatccgaggaagcttcaattcatctgaagacatgacgctggatgcactcagtcaggtacagtatctgaatgctgtcatcacagaaggcctccggttatgtccaccaatcccctggatgctcccacgtcgagtgcccggcaagggtcagaatgtctgtggagtttggctaccaggagggactcaagtatcgatccaggcatacactattaaccgcgacacagctctgtttcatgctgccacctctttcatgccagaaagatggttgtccgaggagattgaaaatcccgagtcaatattcagggacgaccagcgacatgcatttcaacctttcagcgttgggccacggtcctgtatgggaatacatttagcaaaggcggagatgcgcttagtgcttgctaagctgctgtggcagttcgatttcaaggctgtgaaagggaaggaactagtgtgggagaagttgagaaccttcctcctcgttgaaaaaaagcccattgtcttaaacatggccttacgacagtaattataacttttttcacgaaaggcatgctgtttagcatgcgcaactatactttaaagccattaagcatccataacatcaacatagaacagcatcataacgcatggcttattccatcccttagggttaggtgactgcaataaaaccctagctaatagatgtttgtagtagaacctggtacaccaagaacaatctccactagcgttccgggagtcaggcttctggtaaatctgatcacctgcttctggttcctgctgccccaagtatctgttcctcctttggccgcgagaacgtaccagtcctcgtttcccccctggccaaaatcactaccagttgcagtgacactgacattgatggcctctgaggtgttgttggttatcgtgatgccgcccatcttgtctatctgaaatattagcttgtttcgtcagtcaacaatcgcatgaaagatgacttgcgtatagtggatgatggatggttcgaaatttgaagtgacgacaacttttagggtttgctgggtcggatttcaaatatgagttgcactgccagcctaaggtgcaatgatgttgtgggtagtggtgtctcaaaaagcctaacgcttgggtgaagaacggagtcatctttgcgattatatagctacaattagaccagaggttcggctgaggaacccggaatgcccgac

SEQ ID NO: 31417 - DNA, 2523 bp, Muscodor strobelii
  misc_feature: SGI cDNA ID NO. 570816
  misc_feature: Encodes the peptide sequence at SEQ ID NO 31418
atgcgcagtgtgattcttgcttcagagccctcaggagatgtcatcaaagctgtactgaaacccgacagccagcgatggccatacgagggagcgcagtccgcaaatgatatcagtctcgtttacaccgtaccaccgcatgaagctcggccagttggcgaagatgccttcgaatacgtgaccggaggcgacttgctcgacgttaagtggaaacacggtacgcagacagcgaccgcagatgcgcaaaacgtcgagtacattggggaggcgcatctatgcaacgcatgtcttagcgcactcgggtatttagcgcagaatcttaaagactgcatcgataacgaaggtgttcaaggtttcgagaccaagaggtcggtcgtccaacaccaaaacctgatggctttatacgcggcagcgaacgaaggctgtcaattgtgcaagacgatatggactcgtcggtttaagaagagcggtatggctactgccgaaggctacaggatcgagttctgctggaacacgacggatcgagcgagctgggatggtggacgtccaggcgatgcacgactgatttgcaatatggttcggacggatgtgcaaaattacaataaatacacgtgggaaactatcttccggtttcaattatggccatccccggagttcgattctttctttgacatgaagaaatctcgattgttgagttctgcccagaggggcaacactcggtctagtcggccatttgtttcgcaatggttgtcagaatgcagagataatgcggatggcaagcattcagcatgcagagtcagtgatgccatatcctatcctacacgacttctcgatctctctatgctcaaggagacaggaagattacttcttgcagtcactgatttgatggatcgttcctcgctatctgggagcgactacattaccctgagccattgttggggcacatggggcgcgaaggaactaccagtactcaccacatcgaacattgatgagagggtgagctacggcatgaaagtccaattgctgcctccaacattcagagacgcaatagaaatagcagattggtttaacgtcagatggctctggatcgactcgctttgtataatccaggattcaagagaagattgggaacgtgaagcgccgatgatgtgcgacgtctaccagaatgcatttctaaatatctccgccgatcatgcggtcgatgctagaggaggttgctttcgcgatcgatattacgccaccgtggatccttccaagctgcatatgaagccgatagataccacatggtggatgtcggttgacgagcgaaatctcttcgaatgggtcaaagatgctcccagctccgaaagggcttggatttatcaggaacgacaccttgcgcgacgtgtagtacatttcaccgagcacgaagtcttctgggagtgccgggccgaggcaccatcatttcgaagcgaaacgtacatcaatggcgcgccattccggagagattttctgggtcaagctaaatttgggttgcgggatatttcaaccggctcccttactgacaacccctatcttatgcttgagtggaatgtcgcgtgcagggactactctcgacgcaagcttacctaccaatctgacaagcttcccgcattctcaggaattgcccggaatttcggggctcgctgtctggaagacacatacgtcgctggcgtctggctctcgcaactaccgcgtggtctcctgtggacgataccacagaaagagcggcccaagtcccgtccaccacccaccgaatctagcgcgccatcatggtcatggatgtcaagcgccggacccgtggagccttccacggtggaggattcattccatgttgcggatgtggtaggaattctagcggagtacaaacataaaggggaccagtatggcgcggtcacgacggccagtctccacatgtttggctacgtgcgtcgcatcacctcagtcatgaaggaaattgcacccgacgatcctaacagcgacgcctacgagagcctcatacaactcgataacgggcttaaattccgccatctgtatgtagacgggcaattagatcgcgacatcggtcacgggccccgtggggatcagcaatttggcgaaagggcagattggtcgcacgcacttgggccggtcgaatattactgtctattcatttccgtgacgcagaaaagccctcagaatgaccgtgtgctacagtgtctgcttattgagccagcagagtcgcagggcacgtttcggcgtgtagggcagatctctttttccggacaatgtgcgttacaaatgcgttaccgactgcgatctggccagagcgaacagcctgacgtcgcatggagtcgcttgtgggatcacgtggcaccttattggggaggggttgaagggagatcaagggggccagttccagtcgatattcagacaacaggacctcagtcgctatatgagtttgacggcgatctagtggcggacgccgcctttgagcagttgaaatcacaaatagtcacattggtatga

SEQ ID NO: 31418 - protein, 840 aa, Muscodor strobelii
  misc_feature: SGI Peptide ID NO. 570816
  misc_feature (305)..(455): Pfam Id: PF06985 Pfam Desc: Heterokaryon incompatibility protein (HET)
  misc_feature (89)..(785): NCBI GI: 171694732 Blast Desc: protein product [Podospora anserina] gi|170947608|emb|CAP59769.1| protein product [Podospora anserina]
  misc_feature (91)..(795): NCBI GI: 46139991 Blast Desc: FG11510.1 [Gibberella zeae PH-1]
  misc_feature (90)..(770): NCBI GI: 46127719 Blast Desc: FG08237.1 [Gibberella zeae PH-1]
  misc_feature (335)..(840): NCBI GI: 169598007 Blast Desc: SNOG_01801 [Phaeosphaeria nodorum SN15] gi|160707639|gb|EAT91450.2| SNOG_01801 [Phaeosphaeria nodorum SN15]
  misc_feature (127)..(754): NCBI GI: 256724255 Blast Desc: NECHADRAFT_87557 [Nectria haematococca mpVI 77-13-4]
  misc_feature (119)..(687): NCBI GI: 164425425 Blast Desc: NCU05840 [Neurospora crassa OR74A] gi|157070921|gb|EAA30864.2| NCU05840 [Neurospora crassa OR74A]
  misc_feature (236)..(651): NCBI GI: 256725280 Blast Desc: NECHADRAFT_82999 [Nectria haematococca mpVI 77-13-4]
  misc_feature (244)..(648): NCBI GI: 145251023 Blast Desc: An15g04930 [Aspergillus niger] gi|134082553|emb|CAK42468.1| protein product [Aspergillus niger]
  misc_feature (117)..(648): NCBI GI: 171677825 Blast Desc: protein product [Podospora anserina] gi|170936981|emb|CAP61639.1| protein product [Podospora anserina]
  misc_feature (119)..(649): NCBI GI: 154302191 Blast Desc: BC1G_09776 [Botryotinia fuckeliana B05.10] gi|150855550|gb|EDN30742.1| BC1G_09776 [Botryotinia fuckeliana B05.10]
MRSVILASEPSGDVIKAVLKPDSQRWPYEGAQSANDISLVYTVPPHEARPVGEDAFEYVTGGDLLDVKWKHGTQTATADAQNVEYIGEAHLCNACLSALGYLAQNLKDCIDNEGVQGFETKRSVVQHQNLMALYAAANEGCQLCKTIWTRRFKKSGMATAEGYRIEFCWNTTDRASWDGGRPGDARLICNMVRTDVQNYNKYTWETIFRFQLWPSPEFDSFFDMKKSRLLSSAQRGNTRSSRPFVSQWLSECRDNADGKHSACRVSDAISYPTRLLDLSMLKETGRLLLAVTDLMDRSSLSGSDYITLSHCWGTWGAKELPVLTTSNIDERVSYGMKVQLLPPTFRDAIEIADWFNVRWLWIDSLCIIQDSREDWEREAPMMCDVYQNAFLNISADHAVDARGGCFRDRYYATVDPSKLHMKPIDTTWWMSVDERNLFEWVKDAPSSERAWIYQERHLARRVVHFTEHEVFWECRAEAPSFRSETYINGAPFRRDFLGQAKFGLRDISTGSLTDNPYLMLEWNVACRDYSRRKLTYQSDKLPAFSGIARNFGARCLEDTYVAGVWLSQLPRGLLWTIPQKERPKSRPPPTESSAPSWSWMSSAGPVEPSTVEDSFHVADVVGILAEYKHKGDQYGAVTTASLHMFGYVRRITSVMKEIAPDDPNSDAYESLIQLDNGLKFRHLYVDGQLDRDIGHGPRGDQQFGERADWSHALGPVEYYCLFISVTQKSPQNDRVLQCLLIEPAESQGTFRRVGQISFSGQCALQMRYRLRSGQSEQPDVAWSRLWDHVAPYWGGVEGRSRGPVPVDIQTTGPQSLYEFDGDLVADAAFEQLKSQIVTLV

SEQ ID NO: 31419 - DNA, 2456 bp, Muscodor strobelii
  misc_feature: SGI EST ID NO. CUFF.74337.0
  misc_feature: Variant of the nucleotide sequence at SEQ ID NO 31417
acgcaatagaaatagcagattggtttaacgtcagatggctctggatcgactcgctttgtataatccaggattcaagagaagattgggaacgtgaagcgccgatgatgtgcgacgtctaccagaatgcatttctaaatatctccgccgatcatgcggtcgatgctagaggaggttgctttcgcgatcgatattacgccaccgtggatccttccaagctgcatatgaagccgatagataccacatggtggatgtcggttgacgagcgaaatctcttcgaatgggtcaaagatgctcccagctccgaaagggcttggatttatcaggaacgacaccttgcgcgacgtgtagtacatttcaccgagcacgaagtcttctgggagtgccgggccgaggcaccatcatttcgaagcgaaacgtacatcaatggcgcgccattccggagagattttctgggtcaagctaaatttgggttgcgggatatttcaaccggctcccttactgacaacccctatcttatgcttgagtggaatgtcgcgtgcagggactactctcgacgcaagcttacctaccaatctgacaagcttcccgcattctcaggaattgcccggaatttcggggctcgctgtctggaagacacatacgtcgctggcgtctggctctcgcaactaccgcgtggtctcctgtggacgataccacagaaagagcggcccaagtcccgtccaccacccaccgaatctagcgcgccatcatggtcatggatgtcaagcgccggacccgtggagccttccacggtggaggattcattccatgttgcggatgtggtaggaattctagcggagtacaaacataaaggggaccagtatggcgcggtcacgacggccagtctccacatgtttggctacgtgcgtcgcatcacctcagtcatgaaggaaattgcacccgacgatcctaacagcgacgcctacgagagcctcatacaactcgataacgggcttaaattccgccatctgtatgtagacgggcaattagatcgcgacatcggtcacgggccccgtggggatcagcaatttggcgaaagggcagattggtcgcacgcacttgggccggtcgaatattactgtctattcatttccgtgacgcagaaaagccctcagaatgaccgtgtgctacagtgtctgcttattgagccagcagagtcgcagggcacgtttcggcgtgtagggcagatctctttttccggacaatgtgcgttacaaatgcgttaccgactgcgatctggccagagcgaacagcctgacgtcgcatggagtcgcttgtgggatcacgtggcaccttattggggaggggttgaagggagatcaagggggccagttccagtcgatattcagacaacaggacctcagtcgctatatgagtttgacggcgatctagtggcggacgccgcctttgagcagttgaaatcacaaatagtcacattggtatgagcgtcagacgtttgaaagtggttgggcaagttgctagaaatagagccacagctatgtgttctgttttatatttgactagaggcagaaatgggaaagtgttacacgtgatttgtgaggcatcaagtcacacaggcattgtgataaacaaggtatgaacagctaaccaacgaagacatccatctcataaggcactgcgaagccagctatacttccatcgaggtcggcaaggcgcatatgtaaaacatcgaaggaaactctagccagccttgaatctcacccgatgtgataccgtccgctgattctaaaagcggctccagcccaatcatacgactagttatcaccctgcctgaggcaacagtattgaatgtgagtgcagtgatgtacaaatatgtagtacagtatattccaatagtgatacaccccaatccctatctcaacttcgtctctcttctagtctttcccatctagttattgttatattacgggccacatttcccctttacacaacacagtcgcgccaataccacaattggtagcttagcactcgacagacggagccccattggaatgcgggcggtcagtgcaaccacacccgattcccacggcgtaacccatctgtgcaaggcgatgggcgacgctgaagagccatcccttacagcctcgcgatacacagcgcgatgccacacccatcaggtaccccataccgcctctcagctcgatctaggcgcaatctacacctgagcactcgggccatcccccttcggcgcaggcggcggaacacccgcaagaccacccgcagccttctccttggcctggcgttcataataaagcctcatcttcctcatcttcgccgcacgctgctgatcaagtgcctccttccgtctggcaatcttatcagccctggcctctctcatctccagaccaatagccttcgtctttctcctcctatgcttcatcgccacgcgtctggag

SEQ ID NO: 31420 - DNA, 1791 bp, Muscodor strobelii
  misc_feature: SGI cDNA ID NO. 570817
  misc_feature: Encodes the peptide sequence at SEQ ID NO 31421
atggctcctatcctatcgttccttgccggctcactcttggccatcggggctctcgcccagccatttgacaagctctttaatgttccagaaggatggaaactccaatctcctgcagctaacagccaaatcttgaggctcaagattgcgctccagcaaggtgacgccgctggcttcgagcaagctgtcttggatatgtccactcccagtcacccgaactacggacagcatttccagtcacacgatgagatgaagcgcatgttgatgcccaaatctgagtcagttgcttcggtctatacatggcttcagaacgccggagccgaagagatcgagcaggatgccgattggataagcttcaagacgaccgtcggagctgccaacaagatgctcgacacccaatttgcttggttcatcactgagggagcaaaccctcaaagaatcctccgcactttggaatactcagtgcccgatgttgtagcggaccacattgcactggtcacacctacgacccgcttcgctggcctgaaggccgagcatggtattggaagcgagctggagagccttgagcttatcggtgccgcagccccgatcacagccaactgtgaaacaagaatttcgccacagtgtctaaccgacctctacgatattgactatactcccaaccctaagagtggtagcacggttgcagtcgctagctaccttgaggagtacgctcgttacaacgacctgacttcgttccaagagaatatccttcaggcagacattggccaaaactttaccgtcattcagtacaatggcggtctcaataaccagacaagcactgatgactcaggagaagccaacttggatatccaatacatcattggcatggctcaccctcttccgaccacggagtactccactggtggccgcggcccatgggttgcggacctggaccagccagacgaagctgattctgccaatgagccgtatcttaaattcctgcaaagtgtactgaagcagccccagcacaagctgcctcatgtaatttctacctcgtacggagagaatgaacagagcgtgcccaagagctacgcgcttgctgtttgcaacctcttcgcccagctgacttcgcgcggcgtgtcggtcattttctcatcgggagactcgggtactggcagtgcttgcttgtctaacgacggcaagaatacgactaagttccagccgcaataccctgcatcctgcccctgggtgacctcggtaggggccactacttacacgaaccagaccgccgtgtacttctcttctggaggcttttctgattactgggctcgtcccatctggcaggagaaggctgtcaccgggtacttgaagcaaattggcaacaagttcaagccttacttcaatgctcatggccgtggtttccccgatgttgctgttcaaggtgttggctactatgtttatgatcagggagcgcttaaggcctatcaagggacgtcttgctcagcccctgctttcgctggcatcatcggtcttctcaatgacgctcgtctacgggctggaaagtctgttcttggtttcttgaacccattgttgtactcgcaccccgatgctttgaacgatatcattctcggtggaagcacaggctgcgatggtacggctagattccatggcgcacctaacggcagccctgtcattccttacgcctcttggaacgccaccaagggatgggaccctgtcacgggcttgggttcaccaaacttccccaagcttctcaaggctgtgctccctggcagatactcttacaagtcgtaa

SEQ ID NO: 31421 - protein, 596 aa, Muscodor strobelii
  misc_feature: SGI Peptide ID NO. 570817
  misc_feature (29)..(171): Pfam Id: PF09286 Pfam Desc: Pro-kumamolisin, activation domain
  misc_feature (1)..(592): NCBI GI: 169612680 Blast Desc: SNOG_09464 [Phaeosphaeria nodorum SN15] gi|111061609|gb|EAT82729.1| SNOG_09464 [Phaeosphaeria nodorum SN15]
  misc_feature (1)..(592): NCBI GI: 189195764 Blast Desc: tripeptidyl-peptidase 1 precursor [Pyrenophora tritici-repentis Pt-1C-BFP] gi|187980099|gb|EDU46725.1| tripeptidyl-peptidase 1 precursor [Pyrenophora tritici-repentis
  misc_feature (5)..(588): NCBI GI: 121714541 Blast Desc: tripeptidyl-peptidase (TppA), [Aspergillus clavatus NRRL 1] gi|119403035|gb|EAW13455.1| tripeptidyl-peptidase (TppA), [Aspergillus clavatus NRRL 1]
  misc_feature (11)..(588): NCBI GI: 119487210 Blast Desc: tripeptidyl-peptidase (TppA), [Neosartorya fischeri NRRL 181] gi|119410617|gb|EAW20563.1| tripeptidyl-peptidase (TppA), [Neosartorya fischeri NRRL 181]
  misc_feature (11)..(588): NCBI GI: 70982015 Blast Desc: tripeptidyl-peptidase (TppA) [Aspergillus fumigatus Af293] gi|74628155|sp|Q70J59.1|SED2_ASPFU RecName: Full=Tripeptidyl-peptidase sed2; AltName: Full=Sedolisin-B;
  misc_feature (5)..(588): NCBI GI: 145249068 Blast Desc: An14g02470 [Aspergillus niger] gi|134081548|emb|CAK41984.1| protein product [Aspergillus niger]
  misc_feature (22)..(585): NCBI GI: 115387645 Blast Desc: ATEG_02150 [Aspergillus terreus NIH2624] gi|114195412|gb|EAU37112.1| ATEG_02150 [Aspergillus terreus NIH2624]
  misc_feature (22)..(585): NCBI GI: 255933786 Blast Desc: Pc12g14680 [Penicillium chrysogenum Wisconsin 54-1255] gi|211582891|emb|CAP81095.1| Pc12g14680 [Penicillium chrysogenum Wisconsin 54-1255]
  misc_feature (22)..(588): NCBI GI: 67541991 Blast Desc: AN7159.2 [Aspergillus nidulans FGSC A4] gi|40742221|gb|EAA61411.1| AN7159.2 [Aspergillus nidulans FGSC A4] gi|259483510|tpe|CBF78959.1| TPA: tripeptidyl-peptidase FGSC
  misc_feature (19)..(588): NCBI GI: 169782882 Blast Desc: [Aspergillus oryzae RIB40] gi|28189087|dbj|BAC56232.1| tripeptidyl peptidase A [Aspergillus oryzae] gi|51832346|gb|AAU10333.1| tripeptidyl aminopeptidase oryzae]
  misc_feature (23)..(588): SWISSPROT Homolog: EC 3.4.14.9 Tripeptidyl-peptidase I
MAPILSFLAGSLLAIGALAQPFDKLFNVPEGWKLQSPAANSQILRLKIALQQGDAAGFEQAVLDMSTPSHPNYGQHFQSHDEMKRMLMPKSESVASVYTWLQNAGAEEIEQDADWISFKTTVGAANKMLDTQFAWFITEGANPQRILRTLEYSVPDVVADHIALVTPTTRFAGLKAEHGIGSELESLELIGAAAPITANCETRISPQCLTDLYDIDYTPNPKSGSTVAVASYLEEYARYNDLTSFQENILQADIGQNFTVIQYNGGLNNQTSTDDSGEANLDIQYIIGMAHPLPTTEYSTGGRGPWVADLDQPDEADSANEPYLKFLQSVLKQPQHKLPHVISTSYGENEQSVPKSYALAVCNLFAQLTSRGVSVIFSSGDSGTGSACLSNDGKNTTKFQPQYPASCPWVTSVGATTYTNQTAVYFSSGGFSDYWARPIWQEKAVTGYLKQIGNKFKPYFNAHGRGFPDVAVQGVGYYVYDQGALKAYQGTSCSAPAFAGIIGLLNDARLRAGKSVLGFLNPLLYSHPDALNDIILGGSTGCDGTARFHGAPNGSPVIPYASWNATKGWDPVTGLGSPNFPKLLKAVLPGRYSYKS

SEQ ID NO: 31422 - DNA, 2115 bp, Muscodor strobelii
  misc_feature: SGI EST ID NO. CUFF.74344.0
  misc_feature: Variant of the nucleotide sequence at SEQ ID NO 31420
cggtgatatcgcctaacctgttgattatcacctcctcgtttgctcttggacagatccaggaacattagatcgtctccaccggcgacatgggagtatcgcgcataggcacgcgatgcggcaatcaagagctgttcgtgtgtcgtttaaaggccagggtgaagcccgcgatctgaatccgaagctttctccctgtcgcactcgcttccgcacttcagtcaattcgtaggagagtgcatagctgtcaagatggctcctatcctatcgttccttgccggctcactcttggccatcggggctctcgcccagccatttgacaagctctttaatgttccagaaggatggaaactccaatctcctgcagctaacagccaaatcttgaggctcaagattgcgctccagcaaggtgacgccgctggcttcgagcaagctgtcttggatatgtccactcccagtcacccgaactacggacagcatttccagtcacacgatgagatgaagcgcatgttgatgcccaaatctgagtcagttgcttcggtctatacatggcttcagaacgccggagccgaagagatcgagcaggatgccgattggataagcttcaagacgaccgtcggagctgccaacaagatgctcgacacccaatttgcttggttcatcactgagggagcaaaccctcaaagaatcctccgcactttggaatactcagtgcccgatgttgtagcggaccacattgcactggtcacacctacgacccgcttcgctggcctgaaggccgagcatggtattggaagcgagctggagagccttgagcttatcggtgccgcagccccgatcacagccaactgtgaaacaagaatttcgccacagtgtctaaccgacctctacgatattgactatactcccaaccctaagagtggtagcacggttgcagtcgctagctaccttgaggagtacgctcgttacaacgacctgacttcgttccaagagaatatccttcaggcagacattggccaaaactttaccgtcattcagtacaatggcggtctcaataaccagacaagcactgatgactcaggagaagccaacttggatatccaatacatcattggcatggctcaccctcttccgaccacggagtactccactggtggccgcggcccatgggttgcggacctggaccagccagacgaagctgattctgccaatgagccgtatcttaaattcctgcaaagtgtactgaagcagccccagcacaagctgcctcatgtaatttctacctcgtacggagagaatgaacagagcgtgcccaagagctacgcgcttgctgtttgcaacctcttcgcccagctgacttcgcgcggcgtgtcggtcattttctcatcgggagactcgggtactggcagtgcttgcttgtctaacgacggcaagaatacgactaagttccagccgcaataccctgcatcctgcccctgggtgacctcggtaggggccactacttacacgaaccagaccgccgtgtacttctcttctggaggcttttctgattactgggctcgtcccatctggcaggagaaggctgtcaccgggtacttgaagcaaattggcaacaagttcaagccttacttcaatgctcatggccgtggtttccccgatgttgctgttcaaggtgttggctactatgtttatgatcagggagcgcttaaggcctatcaagggacgtcttgctcagcccctgctttcgctggcatcatcggtcttctcaatgacgctcgtctacgggctggaaagtctgttcttggtttcttgaacccattgttgtactcgcaccccgatgctttgaacgatatcattctcggtggaagcacaggctgcgatggtacggctagattccatggcgcacctaacggcagccctgtcattccttacgcctcttggaacgccaccaagggatgggaccctgtcacgggcttgggttcaccaaacttccccaagcttctcaaggctgtgctccctggcagatactcttacaagtcgtaaagatggagtatagaaacagatgagaaccagatgtatatccagaaagtatttaaatagaacgacatcattgcaaagagt

SEQ ID NO: 31423 - DNA, 747 bp, Muscodor strobelii
  misc_feature: SGI cDNA ID NO. 570818
  misc_feature: Encodes the peptide sequence at SEQ ID NO 31424
atgtcgtctccaggagttatcctgattattggtgcagggccgcggatgggccaagcgattagcaatcggttcctcgaaggaggctacagagtcgtattagtagcacggagcgtcgctccaagttcctcgacgagtaatgtgtggaacattcagtgcgatgtatccgagcccttaagagtgcctcagatctttgaaactgtgcgcaagttctggggaatccccaatgtcgttgtctacaacgcacataatcgcataacaacaccgccggatgaccccttttcagcatctctcgagtcaatcaaggcttctcggacagtcggattcgacagcgcgtacattgcggcccaagaagctctatccggtttcaaaaaacttccttcttctctgccgaggactttcatattcattggaaacacgctcaatcaaatcggaattccaggtgtcatgccatttgctctcagcaaatcagccgccgcgatgatgatcgaatacggcgcgaatgcgtatgggaaacatgggtatagattttactacatggatgaacgattaccagacggccggccttcaggcactgatgttgatgcgtcagcacatgcgccccttgcctgggagttggttcatgagatggaacaatcaccatggttggtaacatttacgaaggatggagggagaaaggaatttactggagtggattttgacgggaatacgcgccaagatcatatcaggagtgctagaaaagcgttataa

SEQ ID NO: 31424 - protein, 248 aa, Muscodor strobelii
  misc_feature: SGI Peptide ID NO. 570818
  misc_feature (5)..(170): Pfam Id: PF00106 Pfam Desc: short chain dehydrogenase
  misc_feature (1)..(227): NCBI GI: 242814356 Blast Desc: short-chain dehydrogenase, [Talaromyces stipitatus ATCC 10500] gi|218714692|gb|EED14115.1| short-chain dehydrogenase, [Talaromyces stipitatus ATCC 10500]
  misc_feature (6)..(230): NCBI GI: 256720872 Blast Desc: NECHADRAFT_50337 [Nectria haematococca mpVI 77-13-4]
  misc_feature (1)..(227): NCBI GI: 212529432 Blast Desc: short-chain dehydrogenases/reductase, [Penicillium marneffei ATCC 18224] gi|210074271|gb|EEA28358.1| short-chain dehydrogenases/reductase, [Penicillium marneffei ATCC 18224]
  misc_feature (6)..(227): NCBI GI: 116214433 Blast Desc: CHGG_11057 [Chaetomium globosum CBS 148.51] gi|88175412|gb|EAQ82881.1| CHGG_11057 [Chaetomium globosum CBS 148.51]
  misc_feature (6)..(235): NCBI GI: 156059224 Blast Desc: SS1G_03624 [Sclerotinia sclerotiorum 1980] gi|154701411|gb|EDO01150.1| SS1G_03624 [Sclerotinia sclerotiorum 1980]
  misc_feature (1)..(227): NCBI GI: 212545000 Blast Desc: short chain type dehydrogenase, [Penicillium marneffei ATCC 18224] gi|210065623|gb|EEA19717.1| short chain type dehydrogenase, [Penicillium marneffei ATCC 18224]
  misc_feature (2)..(227): NCBI GI: 242797822 Blast Desc: short-chain dehydrogenase, [Talaromyces stipitatus ATCC 10500] gi|218716386|gb|EED15807.1| short-chain dehydrogenase, [Talaromyces stipitatus ATCC 10500]
  misc_feature (1)..(228): NCBI GI: 242777459 Blast Desc: conserved [Talaromyces stipitatus ATCC 10500] gi|218722657|gb|EED22075.1| conserved [Talaromyces stipitatus ATCC 10500]
  misc_feature (6)..(229): NCBI GI: 154317362 Blast Desc: BC1G_03583 [Botryotinia fuckeliana B05.10] gi|150845000|gb|EDN20193.1| BC1G_03583 [Botryotinia fuckeliana B05.10]
  misc_feature (6)..(227): NCBI GI: 169625126 Blast Desc: SNOG_15832 [Phaeosphaeria nodorum SN15] gi|160705606|gb|EAT76670.2| SNOG_15832 [Phaeosphaeria nodorum SN15]
MSSPGVILIIGAGPRMGQAISNRFLEGGYRVVLVARSVAPSSSTSNVWNIQCDVSEPLRVPQIFETVRKFWGIPNVVVYNAHNRITTPPDDPFSASLESIKASRTVGFDSAYIAAQEALSGFKKLPSSLPRTFIFIGNTLNQIGIPGVMPFALSKSAAAMMIEYGANAYGKHGYRFYYMDERLPDGRPSGTDVDASAHAPLAWELVHEMEQSPWLVTFTKDGGRKEFTGVDFDGNTRQDHIRSARKAL

SEQ ID NO: 31425 - DNA, 590 bp, Muscodor strobelii
  misc_feature: SGI EST ID NO. CUFF.74361.0
  misc_feature: Variant of the nucleotide sequence at SEQ ID NO 31423
ttagaagctaatgtgtaacccttggccgctgtcatacaaacgatagttgcagtggttgataacggacttcaattcggataaagcatgtcgtctccaggagttatcctgattattggtgcagggccgcggatgggccaagcgattagcaatcggttcctcgaaggaggctacagagtcgtattagtagcacggagcgtcgctccaagttcctcgacgagtaatgtgtggaacattcagtgcgatgtatccgagcccttaagagtgcctcagatctttgaaactgtgcgcaagttctggggaatccccaatgtcgttgtctacaacgcacataatcgcataacaacaccgccggatgaccccttttcagcatctctcgagtcaatcaaggcttctcggacagtcggattcgacagcgcgtacattgcggcccaagaagctctatccggtttcaaaaaacttccttcttctctgccgaggactttcatattcattggaaacacgctcaatcaaatcggaattccaggtgtcatgccatttgctctcagcaaatcagccgccgcgatgatgatcgaatacggcgcgaatgcgta

SEQ ID NO: 31426 - DNA, 1227 bp, Muscodor strobelii
  misc_feature: SGI cDNA ID NO. 570819
  misc_feature: Encodes the peptide sequence at SEQ ID NO 31427
atgttttcactctcgatcctcacaattgcttgcgcagccttggggagcgcagttggttctccgcttgcggccgagccagttaagcgccaagatgcagtaattgatcgttctacattgaatggcaaattctttgtcggatatcaggcttggtttcgaaaaccaggggaggacgatggaaactcgcattggacgacagatactccatcacctgaagttgggcatgtgggagttgatatgatccctaatgtgaccggatatccatccgagtgcttattcgacaccgtttttacattgcctgatggctcacctacccaattctacacgaatgactgcgaaggcgtcgtcgatcttcactttaagatgatggccgataatgatatcagcggagcttttgttcaaagattctttgggtacctcaacgagaactctaatggtggttgggtcaatattctcaactatgctaaagcggcggctgagaaatatggaagaggattcgtaatcgaatacgatcttaatggcgctgatacgtccgccacaaatatcacggcggcgtatctttcagaccttgcctctctgacctcgatcatctcatcccccgcgtatatgcatcacgatggtaagcctgtcatagaaatatggggcttcgggattgtgaactcagtgacagttgacgatggcattgccattgtgaccgcactaaagaacgcagggttctatgtgattctcggtgtgcagcaggcatggcacgcagaattaacccaaaatcagcctggcaactacgggcctgtgtatgagctcgcctatatgcttcagccatggactgttggtgcgtacgacaacgacggctacgaagatttcttgactgggagacaagctgtcgaggatgcgagcgctcttcgagacctgggaattgagagcagcatagttgtctggcccggtggctctaatggcaactcaaatcccaatgacatctttgaccacttcccgaggtggaacggaactttctatcagaagcagcttgacggcgctgtatcattgaggccgagttttatcttcggtgccatgttcgatgaggtgaacgaagggacagcaatcctgcctttactgcgaaactccgaactgccgacgaatcaaagattcttgggcattgacgatgacatggaaccagatgcttacttaaagatggctggtcaggcttctacaagcttggctcaggcatgggcatga

SEQ ID NO: 31427 - protein, 408 aa, Muscodor strobelii
  misc_feature: SGI Peptide ID NO. 570819
  misc_feature (1)..(400): NCBI GI: 256678907 Blast Desc: SSPB78_21490 [Streptomyces sp. SPB78]
  misc_feature (4)..(405): NCBI GI: 223940030 Blast Desc: Cflav_PD0893 [bacterium Ellin514] gi|223891297|gb|EEF57793.1| Cflav_PD0893 [bacterium Ellin514]
  misc_feature (34)..(403): NCBI GI: 223939986 Blast Desc: Cflav_PD0807 [bacterium Ellin514] gi|223891330|gb|EEF57825.1| Cflav_PD0807 [bacterium Ellin514]
  misc_feature (37)..(408): NCBI GI: 255690205 Blast Desc: xylosidase/arabinosidase [Bacteroides finegoldii DSM 17565] gi|260624224|gb|EEX47095.1| xylosidase/arabinosidase [Bacteroides finegoldii DSM 17565]
  misc_feature (37)..(405): NCBI GI: 260173381 Blast Desc: xylosidase/arabinosidase [Bacteroides sp. D2]
  misc_feature (34)..(403): NCBI GI: 32470998 Blast Desc: RB588 [Rhodopirellula baltica SH 1] gi|32396700|emb|CAD71665.1| -transmembrane prediction [Rhodopirellula baltica SH 1]
  misc_feature (38)..(403): NCBI GI: 256425735 Blast Desc: Cpin_6786 [Chitinophaga pinensis DSM 2588] gi|256040643|gb|ACU64187.1| Cpin_6786 [Chitinophaga pinensis DSM 2588]
  misc_feature (37)..(405): NCBI GI: 253571929 Blast Desc: xylosidase/arabinosidase [Bacteroides sp. 1_1_6] gi|251838526|gb|EES66612.1| xylosidase/arabinosidase [Bacteroides sp. 1_1_6]
  misc_feature (37)..(405): NCBI GI: 29347191 Blast Desc: xylosidase/arabinosidase [Bacteroides thetaiotaomicron VPI-5482] gi|29339090|gb|AAO76888.1| xylosidase/arabinosidase [Bacteroides thetaiotaomicron VPI-5482]
  misc_feature (6)..(405): NCBI GI: 255533241 Blast Desc: Phep_3357 [Pedobacter heparinus DSM 2366] gi|255346225|gb|ACU05551.1| conserved [Pedobacter heparinus DSM 2366]
MFSLSILTIACAALGSAVGSPLAAEPVKRQDAVIDRSTLNGKFFVGYQAWFRKPGEDDGNSHWTTDTPSPEVGHVGVDMIPNVTGYPSECLFDTVFTLPDGSPTQFYTNDCEGVVDLHFKMMADNDISGAFVQRFFGYLNENSNGGWVNILNYAKAAAEKYGRGFVIEYDLNGADTSATNITAAYLSDLASLTSIISSPAYMHHDGKPVIEIWGFGIVNSVTVDDGIAIVTALKNAGFYVILGVQQAWHAELTQNQPGNYGPVYELAYMLQPWTVGAYDNDGYEDFLTGRQAVEDASALRDLGIESSIVVWPGGSNGNSNPNDIFDHFPRWNGTFYQKQLDGAVSLRPSFIFGAMFDEVNEGTAILPLLRNSELPTNQRFLGIDDDMEPDAYLKMAGQASTSLAQAWA

SEQ ID NO: 31428 - DNA, 1377 bp, Muscodor strobelii
  misc_feature: SGI cDNA ID NO. 570820
  misc_feature: Encodes the peptide sequence at SEQ ID NO 31429
atgacgaagccccgtcgcggggtgcgcttccccaaccgctccaacggtcacatctcagccgacggcaggagatccagtatgagtgaggctagcgaggatggtgaaaggtcgccgcttaggccgaggaggacgtcggagctcgccaacataagtgagaagacagacgcacctcaaccaaccgaatatgaaaagaagaaagcaaacttcctcgtccggacgttctggaccttcgtcatgatcggcctcttcttcacggccctcttctccggccacatctacatcatcgcctgcatcaccgtcgtacagatcgtctccttcaaggaggtcatcgccatcgctagcgtaccgagtcgagccagacagctgcgacccaccaagagcctcaactggtactggctcgccagcaccatgtactttctctacggagagtccgtcatctactacttcaagcatatcgtgctcgtcgacaaggtcctcttaccgctagctacgcaccaccgcttcatcagcttcattctctatgtcatcggcttcgttttcttcgtcgccaaccttaagggtggacacttgaaattccagttcactaacttcgcatggacgcacatggccctgtaccttatcgttgtacaggctcatttcgtcatgaacaatgtcttcgagggcatgatatggttctttttgcccgcttctttagtcatctgtaacgatattttcgcctacatctgcggtatcaccatgggccggactcaactcatcaagctctcccccaagaagacagtcgaggggttcgtgggtgcttgggtctgcaccgtgatctgggggttcatgatgacgaatttgctcatgagatctaagtacttcatctgccccgtcaatgacctcggcgctactgtcttcaccggtctcaactgcgatccgaacccggtcttcctaccgcatacgtatacactcccccaactgttcttcctgcccgagggcaccggtctctccttcacatgggaacccatgcaattccacactctcgtcctcgcctccttcgcctcgctgattgcgccattcggcggtttcttcgcctcgggtctaaaacgtactttcaagatcaaggatttcggcgactcgatcccaggacacggtgggatgacggacaggatggattgtcagttcatcatgggatttttcgcgttcatctacttccagacttttatcgcgcagcataaggttaattttgggaatgtcatggagcttgctattactggcttgagcctggaggaacaagtggatcttgtgaggggtatgagtagatatcttgagaatcagggggcttgggggtctgaggtcgttgagtgtcttgataaggcgttaatggcgaggagataa

SEQ ID NO: 31429 - protein, 458 aa, Muscodor strobelii
  misc_feature: SGI Peptide ID NO. 570820
  misc_feature (70)..(401): Pfam Id: PF01148 Pfam Desc: Cytidylyltransferase family
  misc_feature (3)..(454): NCBI GI: 116197300 Blast Desc: CHGG_05248 [Chaetomium globosum CBS 148.51] gi|88181161|gb|EAQ88629.1| CHGG_05248 [Chaetomium globosum CBS 148.51]
  misc_feature (1)..(440): NCBI GI: 46116790 Blast Desc: FG04237.1 [Gibberella zeae PH-1]
  misc_feature (1)..(457): NCBI GI: 121702389 Blast Desc: phosphatidate cytidylyltransferase [Aspergillus clavatus NRRL 1] gi|119397602|gb|EAW08033.1| phosphatidate cytidylyltransferase [Aspergillus clavatus NRRL 1]
  misc_feature (1)..(457): NCBI GI: 115388615 Blast Desc: phosphatidate cytidylyltransferase [Aspergillus terreus NIH2624] gi|114195897|gb|EAU37597.1| phosphatidate cytidylyltransferase [Aspergillus terreus NIH2624]
  misc_feature (1)..(457): NCBI GI: 119496383 Blast Desc: phosphatidate cytidylyltransferase [Neosartorya fischeri NRRL 181] gi|119413127|gb|EAW23068.1| phosphatidate cytidylyltransferase [Neosartorya fischeri NRRL 181]
  misc_feature (5)..(457): NCBI GI: 242807602 Blast Desc: phosphatidate cytidylyltransferase [Talaromyces stipitatus ATCC 10500] gi|218715615|gb|EED15037.1| phosphatidate cytidylyltransferase [Talaromyces stipitatus ATCC 10500]
  misc_feature (1)..(457): NCBI GI: 169763984 Blast Desc: [Aspergillus oryzae RIB40] gi|83770920|dbj|BAE61053.1| protein product [Aspergillus oryzae]
  misc_feature (5)..(457): NCBI GI: 212538095 Blast Desc: phosphatidate cytidylyltransferase [Penicillium marneffei ATCC 18224] gi|210068945|gb|EEA23036.1| phosphatidate cytidylyltransferase [Penicillium marneffei ATCC 18224]
  misc_feature (1)..(454): NCBI GI: 145238768 Blast Desc: An07g09570 [Aspergillus niger] gi|134076527|emb|CAK39722.1| protein product [Aspergillus niger]
  misc_feature (1)..(454): NCBI GI: 259484620 Blast Desc: TPA: phosphatidate cytidylyltransferase (AFU_orthologue; AFUA_1G07010) [Aspergillus nidulans FGSC A4]
  misc_feature (12)..(447): SWISSPROT Homolog: EC 2.7.7.41 Phosphatidate cytidylyltransferase
MTKPRRGVRFPNRSNGHISADGRRSSMSEASEDGERSPLRPRRTSELANISEKTDAPQPTEYEKKKANFLVRTFWTFVMIGLFFTALFSGHIYIIACITVVQIVSFKEVIAIASVPSRARQLRPTKSLNWYWLASTMYFLYGESVIYYFKHIVLVDKVLLPLATHHRFISFILYVIGFVFFVANLKGGHLKFQFTNFAWTHMALYLIVVQAHFVMNNVFEGMIWFFLPASLVICNDIFAYICGITMGRTQLIKLSPKKTVEGFVGAWVCTVIWGFMMTNLLMRSKYFICPVNDLGATVFTGLNCDPNPVFLPHTYTLPQLFFLPEGTGLSFTWEPMQFHTLVLASFASLIAPFGGFFASGLKRTFKIKDFGDSIPGHGGMTDRMDCQFIMGFFAFIYFQTFIAQHKVNFGNVMELAITGLSLEEQVDLVRGMSRYLENQGAWGSEVVECLDKALMARR

SEQ ID NO: 31430 - DNA, 2375 bp, Muscodor strobelii
  misc_feature: SGI EST ID NO. CUFF.74549.0
  misc_feature: Variant of the nucleotide sequence at SEQ ID NO 31428
catcagtggatgcgtcgggttccattgtcgatcgggtcgagtgttgaggaaatcaaggcaaagcagcaggtcggctgctagcttcaaaatttctccttagggtgcagcttctgacgacatggccatgcacgtcagtctgcacacctgtctgccaatgatttgagcttccgttcattcattccccctcctcacgtattaatcggcacatgcatctacatgcacccgtagacaacatcatagaccattgagtgtttgcggtcttgtcattgtcccgcgccgactctgccccccatgtcagcctaagtccttcattgcgcagctgaacttgttcgcgtcgtcatctacgggttatctcataaaacaacgggcttttccatatcagctttgtcactgtttgcgcaacaattcgcctgtcggaataaaaacgaaacgcagggcaacagcaaaaaggagcaatagaatccgcacaggcatccggcaaccttgtctcccgtcgcgtcgccctggtccttgcgccgacgtcaacatcccacgttccccaccaacaccgcgtgtttgcgtccgccctgaacgacctcccgcattccatccaccgccgcatatcccctccgccgccatgacgaagccccgtcgcggggtgcgcttccccaaccgctccaacggtcacatctcagccgacggcaggagatccagtatgagtgaggctagcgaggatggtgaaaggtcgccgcttaggccgaggaggacgtcggagctcgccaacataagtgagaagacagacgcacctcaaccaaccgaatatgaaaagaagaaagcaaacttcctcgtccggacgttctggaccttcgtcatgatcggcctcttcttcacggccctcttctccggccacatctacatcatcgcctgcatcaccgtcgtacagatcgtctccttcaaggaggtcatcgccatcgctagcgtaccgagtcgagccagacagctgcgacccaccaagagcctcaactggtactggctcgccagcaccatgtactttctctacggagagtccgtcatctactacttcaagcatatcgtgctcgtcgacaaggtcctcttaccgctagctacgcaccaccgcttcatcagcttcattctctatgtcatcggcttcgttttcttcgtcgccaaccttaagggtggacacttgaaattccagttcactaacttcgcatggacgcacatggccctgtaccttatcgttgtacaggctcatttcgtcatgaacaatgtcttcgagggcatgatatggttctttttgcccgcttctttagtcatctgtaacgatattttcgcctacatctgcggtatcaccatgggccggactcaactcatcaagctctcccccaagaagacagtcgaggggttcgtgggtgcttgggtctgcaccgtgatctgggggttcatgatgacgaatttgctcatgagatctaagtacttcatctgccccgtcaatgacctcggcgctactgtcttcaccggtctcaactgcgatccgaacccggtcttcctaccgcatacgtatacactcccccaactgttcttcctgcccgagggcaccggtctctccttcacatgggaacccatgcaattccacactctcgtcctcgcctccttcgcctcgctgattgcgccattcggcggtttcttcgcctcgggtctaaaacgtactttcaagatcaaggatttcggcgactcgatcccaggacacggtgggatgacggacaggatggattgtcagttcatcatgggatttttcgcgttcatctacttccagacttttatcgcgcagcataaggttaattttgggaatgtcatggagcttgctattactggcttgagcctggaggaacaagtggatcttgtgaggggtatgagtagatatcttgagaatcagggggcttgggggtctgaggtatgttctaatctctttctgatgatgggttttttgttgagcacttgagtaccttgctaatgagatgttataggtcgttgagtgtcttgataaggcgttaatggcgaggagataaggctggggtgtttttggatttgggggtgggtttgaggcgggtgtaatggtggatggaatgaaaagaaaattgtttgggttggtgctagatcgtgcttcggctgcgtggcttgtgtatgctttgtgccataccctgtgtttcgtttcatagcgaatgcgcatttttttcgaacgtgttgtcatgatacttgattctgtgagagtatggaaaatgttgacgtgtgtcttgctcactttttactcttgtgcttgtgtgtgaacctctgatgggaatgatttttggtattggagaggggtttgttggcctgtg

SEQ ID NO: 31431 - DNA, 2268 bp, Muscodor strobelii
  misc_feature: SGI cDNA ID NO. 570821
  misc_feature: Encodes the peptide sequence at SEQ ID NO 31432
atggacgatttcttcgacgatgacctcgacgatctcaacgacaatgctctgcaagaactcgagaataacgccatccaattcacccaggcccacaagagcgtcgcacccagccagtatcaaaatgaacccgggctgaactacgattacgaggatgacgatctcgacgatacggtcgtgcagaacgcctttcaggcacaaccagctctctcgtcgcaatccgccgctctgaccggacagttacctgctaggctagcacaacagcagcagcaacaggatacctggggcccggttccaattcctgcgagcagaatttatcccaatgctgtcgccactgcctcccgtacctcccagcagatcccagctcggagtccagcccctccctatggccagctcccatatcccgccgccggcctcccgcggcctcctccttcaataccctcggcctaccgggcatcacaagcgcaacgtccccctgctgcgccttcttcccgtgagcttgccgcgctggaggcgcaaatcaaagacctgaagtcaaagcttgacacgaaaaatggagagattggtattgtgcggagccgactggaaaagtcacagatcgaccatgagcgcgaacttaaggccctcaaagtacagaccgcggagcaattggcaaagcaacaaagagctatcgacgctgctacagctgcccggaagactgccgtcaccgagctagagtttacaaaacgagacttgggagaagaacttagtcgagctagacgtcaagatgtggtcgggacgcccaagaagaatgcagccacgaaggcgtggggcgtgtccgatgggtttgaagacatcgaaatggctggcagtcctagcagaggccaacgcgggagaactgcaggcgcagtagcagcatctgtcgttgaacctccgccaaaactgctcaggacaccgacgaaaaacaagcggaaacgcacggtcatggagagtccagttatggctctcgaaacgcattctgacgatgtcgttatgacggatgatgcagatacacataataagtatttgggtcaagcatttcctacaattcagcacaatgaaccttttgactatatgaaaatgattttgaatcacagtggggggcgtgaccgacccctgagtttccagtttttgtcgagcttcgagctcccatccagaccaggagagagtctctcatctattcttctaaggaaactcagcacagccggtgatccccaggacccaacccgacttccgatcgaattttgtctcgaagtgatccggctttgggatagctgcaagagagaaggaatcttggctcccataacggagcttgtctcgatggtgtctttcacgctactcttacaaacggttgcgctggcaccgtacattgcgccgtctctacttacggtggccatggactcgtcttacgaagtagccatcccgcgattcaacaacccgaaacctggtgagccgacagatgaatcattcatcgcattcagagacaacatcaacacgaaacagatcctgtcactactatatctcacagcgctgggatgtgcgacatgtgagccagacggcggaagtgtctcttcgccgatcgttgaattttggagttcggtgcatatacactttgtgctaatgaacctcagccgcaagcagcccgcggaggacttcgtcacgatgttgcagctgttagggacctctgtgtttccaagcagcatcggacccatcaacccggacaaaacgccggaaatagtggcacaactactcatagaccgggtatcgacgcatcttacagatacgcagcgtcaagatgtggatgagatgggagttcggaacatacgccttacagtattgcaaacgctctcatcatttgcgagatgtgaattcggcctagcgcaactggtcaaacatgactggttgattacgcgattggtaacgctcctgtcatattgcatcgaggagctatatgacagtggaatgcaatattcaccatcagataagcacccgatggcggagagccttcagttgcttgtcacgcacacaatgcttctactacatctcattatcactactctcgatcccacgacagtcgccgctaaattggcgaagacaatggggtgtgcgcagagatatcagctgagtctggcgcgactgaacttcgctgatgacatggtgtcggatgagacggcggagctggcgcatgagctgctagagcttgcggttacttcggaagctggggaggaacttggagagttctttggaggttga

SEQ ID NO: 31432 - protein, 755 aa, Muscodor strobelii
  misc_feature: SGI Peptide ID NO. 570821
  misc_feature (1)..(753): NCBI GI: 256725580 Blast Desc: NECHADRAFT_11671 [Nectria haematococca mpVI 77-13-4]
  misc_feature (12)..(753): NCBI GI: 145606649 Blast Desc: MGG_12011 [Magnaporthe grisea 70-15] gi|145014326|gb|EDJ98894.1| MGG_12011 [Magnaporthe grisea 70-15]
  misc_feature (1)..(754): NCBI GI: 261360035 Blast Desc: conserved [Verticillium albo-atrum VaMs.102]
  misc_feature (1)..(754): NCBI GI: 46116792 Blast Desc: FG04238.1 [Gibberella zeae PH-1]
  misc_feature (12)..(753): NCBI GI: 116197298 Blast Desc: CHGG_05247 [Chaetomium globosum CBS 148.51] gi|88181160|gb|EAQ88628.1| CHGG_05247 [Chaetomium globosum CBS 148.51]
  misc_feature (151)..(754): NCBI GI: 171676712 Blast Desc: protein product [Podospora anserina] gi|170936423|emb|CAP61080.1| protein product [Podospora anserina]
  misc_feature (169)..(751): NCBI GI: 156049451 Blast Desc: SS1G_08432 [Sclerotinia sclerotiorum 1980] gi|154692831|gb|EDN92569.1| SS1G_08432 [Sclerotinia sclerotiorum 1980]
  misc_feature (18)..(590): NCBI GI: 85091046 Blast Desc: NCU09644 [Neurospora crassa OR74A] gi|26251318|gb|AAK15754.2|AF329401_1 UVS-3 [Neurospora crassa] gi|28920092|gb|EAA29474.1| [Neurospora crassa OR74A]
  misc_feature (172)..(753): NCBI GI: 240110653 Blast Desc: CPC735_040750 [Coccidioides posadasii C735 delta SOWgp]
  misc_feature (172)..(753): NCBI GI: 119196151 Blast Desc: CIMG_02450 [Coccidioides immitis RS]
MDDFFDDDLDDLNDNALQELENNAIQFTQAHKSVAPSQYQNEPGLNYDYEDDDLDDTVVQNAFQAQPALSSQSAALTGQLPARLAQQQQQQDTWGPVPIPASRIYPNAVATASRTSQQIPARSPAPPYGQLPYPAAGLPRPPPSIPSAYRASQAQRPPAAPSSRELAALEAQIKDLKSKLDTKNGEIGIVRSRLEKSQIDHERELKALKVQTAEQLAKQQRAIDAATAARKTAVTELEFTKRDLGEELSRARRQDVVGTPKKNAATKAWGVSDGFEDIEMAGSPSRGQRGRTAGAVAASVVEPPPKLLRTPTKNKRKRTVMESPVMALETHSDDVVMTDDADTHNKYLGQAFPTIQHNEPFDYMKMILNHSGGRDRPLSFQFLSSFELPSRPGESLSSILLRKLSTAGDPQDPTRLPIEFCLEVIRLWDSCKREGILAPITELVSMVSFTLLLQTVALAPYIAPSLLTVAMDSSYEVAIPRFNNPKPGEPTDESFIAFRDNINTKQILSLLYLTALGCATCEPDGGSVSSPIVEFWSSVHIHFVLMNLSRKQPAEDFVTMLQLLGTSVFPSSIGPINPDKTPEIVAQLLIDRVSTHLTDTQRQDVDEMGVRNIRLTVLQTLSSFARCEFGLAQLVKHDWLITRLVTLLSYCIEELYDSGMQYSPSDKHPMAESLQLLVTHTMLLLHLIITTLDPTTVAAKLAKTMGCAQRYQLSLARLNFADDMVSDETAELAHELLELAVTSEAGEELGEFFGG

SEQ ID NO: 31433 - DNA, 1478 bp, Muscodor strobelii
  misc_feature: SGI EST ID NO. CUFF.74392.0
  misc_feature: Variant of the nucleotide sequence at SEQ ID NO 31431
tgccgatacgagaaatcaattaaattcgttatcagcgcgaccgcgaccgcgacctgcatagatacagtacaatcacccctccaacgctcgagccttgtcgaaggaaagaaacaaaaacagacgatgatattagcctttggaaagtcttcatgtagctccaattagcttcttggccaattggactatctcgaacttgtttcccagaggtgcggactcacgactggcgtgatatcgtcaagccaatggtcggtttcatcttcgcagactcttcgagtcgccatggacgatttcttcgacgatgacctcgacgatctcaacgacaatgctctgcaagaactcgagaataacgccatccaattcacccaggcccacaagagcgtcgcacccagccagtatcaaaatgaacccgggctgaactacgattacgaggatgacgatctcgacgatacggtcgtgcagaacgcctttcaggcacaaccagctctctcgtcgcaatccgccgctctgaccggacagttacctgctaggctagcacaacagcagcagcaacaggatacctggggcccggttccaattcctgcgagcagaatttatcccaatgctgtcgccactgcctcccgtacctcccagcagatcccagctcggagtccagcccctccctatggccagctcccatatcccgccgccggcctcccgcggcctcctccttcaataccctcggcctaccgggcatcacaagcgcaacgtccccctgctgcgccttcttcccgtgagcttgccgcgctggaggcgcaaatcaaagacctgaagtcaaagcttgacacgaaaaatggagagattggtattgtgcggagccgactggaaaagtcacagatcgaccatgagcgcgaacttaaggccctcaaagtacagaccgcggagcaattggcaaagcaacaaagagctatcgacgctgctacagctgcccggaagactgccgtcaccgagctagagtttacaaaacgagacttgggagaagaacttagtcgagctagacgtcaagatgtggtcgggacgcccaagaagaatgcagccacgaaggcgtggggcgtgtccgatgggtttgaagacatcgaaatggctggcagtcctagcagaggccaacgcgggagaactgcaggcgcagtagcagcatctgtcgttgaacctccgccaaaactgctcaggacaccgacgaaaaacaagcggaaacgcacggtcatggagagtccagttatggctctcgaaacgcattctgacgatgtcgttatgacggatgatgcagatacacataataagtatttgggtcaagcatttcctacaattcagcacaatgaaccttttgactatatgaaaatgattttgaatcacagtggggggcgtgaccgacccctgagtttccagtttttgtcgagcttcgagctcccatccagaccaggagagagtctctcatctattct

SEQ ID NO: 31434 - DNA, 561 bp, Muscodor strobelii
  misc_feature: SGI cDNA ID NO. 570822
  misc_feature: Encodes the peptide sequence at SEQ ID NO 31435
atgcctatcacgaagcctttcactcgtcttgataacggaacttatttacatgatcggcccgaaattgatgtctatcgttccaattcatttccctcgctgagccgtgtcttgattgatgcataccgcatgcgtatagaagacgagtacaatttcgaaggcgatacagctgaagacatatacggcggccgctctgacagtctccttgggttctccaagttcctccgcaaggcaaccagcagtggcttgctaccggcctggtggaacgcggagaaagaagcggcatgcaaagaacttggcatggatgcgaaccagtggtgggaccttcgttgtgctgtcgagaagagtgacattgttgagcaatacggcgatcagcgctatccaatgcagcttcgcatgctcgctgaagctattctcggccgaggatttgctggaaatgacggtacggcgatgcggaagatgatggcgagcatggaagacggtaacagttttggaggtcaggctgcttctgtggcaatgatggacatgaccactggaaatcatgtgatgcatcattcccagtag

SEQ ID NO: 31435 - protein, 186 aa, Muscodor strobelii
  misc_feature: SGI Peptide ID NO. 570822
  misc_feature (2)..(162): NCBI GI: 256730323 Blast Desc: NECHADRAFT_82692 [Nectria haematococca mpVI 77-13-4]
  misc_feature (3)..(165): NCBI GI: 169621921 Blast Desc: SNOG_14173 [Phaeosphaeria nodorum SN15] gi|111057290|gb|EAT78410.1| SNOG_14173 [Phaeosphaeria nodorum SN15]
  misc_feature (1)..(181): NCBI GI: 189197375 Blast Desc: conserved [Pyrenophora tritici-repentis Pt-1C-BFP] gi|187980973|gb|EDU47599.1| conserved [Pyrenophora tritici-repentis Pt-1C-BFP]
  misc_feature (3)..(160): NCBI GI: 238492439 Blast Desc: MYND domain protein, [Aspergillus flavus NRRL3357] gi|220695950|gb|EED52292.1| MYND domain protein, [Aspergillus flavus NRRL3357]
  misc_feature (5)..(169): NCBI GI: 121699383 Blast Desc: MYND domain protein, [Aspergillus clavatus NRRL 1] gi|119396145|gb|EAW06577.1| MYND domain protein, [Aspergillus clavatus NRRL 1]
  misc_feature (3)..(162): NCBI GI: 212537777 Blast Desc: MYND domain protein, [Penicillium marneffei ATCC 18224] gi|210068786|gb|EEA22877.1| MYND domain protein, [Penicillium marneffei ATCC 18224]
  misc_feature (5)..(161): NCBI GI: 119474305 Blast Desc: MYND domain protein, [Neosartorya fischeri NRRL 181] gi|119407181|gb|EAW17131.1| MYND domain protein, [Neosartorya fischeri NRRL 181]
  misc_feature (4)..(159): NCBI GI: 256733711 Blast Desc: NECHADRAFT_78094 [Nectria haematococca mpVI 77-13-4]
  misc_feature (5)..(153): NCBI GI: 159128226 Blast Desc: MYND domain protein, [Aspergillus fumigatus A1163]
  misc_feature (5)..(153): NCBI GI: 70986270 Blast Desc: MYND domain protein [Aspergillus fumigatus Af293] gi|66846258|gb|EAL86591.1| MYND domain protein, [Aspergillus fumigatus Af293]
MPITKPFTRLDNGTYLHDRPEIDVYRSNSFPSLSRVLIDAYRMRIEDEYNFEGDTAEDIYGGRSDSLLGFSKFLRKATSSGLLPAWWNAEKEAACKELGMDANQWWDLRCAVEKSDIVEQYGDQRYPMQLRMLAEAILGRGFAGNDGTAMRKMMASMEDGNSFGGQAASVAMMDMTTGNHVMHHSQ

SEQ ID NO: 31436 - DNA, 2175 bp, Muscodor strobelii
  misc_feature: SGI cDNA ID NO. 570823
  misc_feature: Encodes the peptide sequence at SEQ ID NO 31437
atgtttaacatgaagagggatatgggaatggactcagatattatgggggcaacgagcgacgaatgccggtcttcgaatcgaccatggctacagacaatagcatactgcattcaacagaactgtgttgccgatggatattctatcgagaaaaaggccaagtgtttcagcactgtcgcagttgctggggcttcggagccaagttatcagagcagtcttccgccaaaggctcctactgttgaactcgagatggacgcaatgtggctaaataccacgagcctagtgaacagccatatgtatcacagcacatatggcacatacgctgaatttcagagttctgaggtgtttcatactagatacgcgatgataatctacctagttacgatgggtgcatgcctagtatacgggatgatggctcgactcagcacgcttcttggtctacgaaaagcgctaagttcctcttatccatggtcgaaggttcgacagtatgtaatgttgccagctctcttcgggtctcgaaatctggagccccttcccggcaacgttggctatgttcccaacagagcactgtccatctccatcgctgtgtacatcattcttaacattgttttctcttccatctcattttctacattttcgccaaatatttactgggcttcgcctcaattccagctttgcgaatatgttggcaatcgaaccggcactctcagtcttgtcaatctgagcatatctgtattgttcgcgggtcgcaacaacgtactcctcggtgttactggattgagtcagacaaccttcttgacattacaccgctgggcagcccgagttgctactttgcaggctattgttcactcgattgtgtacactttggcatatttcgagccaggatatgctggggcctcggcatacgccgctgccgcagcgcagccattctattggtggggaataatcgcgacaattgcatttgctcttgcaacgtcactagctgccttacctcttcgcaaggcattttacgagtccttcttagttattcacatatctcttgccattctcgcgcttgtcgggtgttggtatcacctcgttccgcatttcggcttcgactacgggtatcaagtctggctgtatattacattcgctttctggtcttttgatcgatttgcacgcttggctcgggttgcgttttacaatcgcttcgggaattcgaccgcagttttcgaatcaattccggactgtaatattttgcaggtgaccatattcccacgcacaacaaaaggatttggacctgggcagcacacgtttctctactttcctggcttgggcaggttctgggagaaccacccgtttagtatcgcgagctggagcgagagtggacattctcaatctggagttgggtcccgatcggattctggcgaaaagcaaagtcgtgtacatgtcgaagagaggacgacggaacggcacgcaagatattcaggtccggaacagaaacataaactgaaaaagaagcaatcagcattctcggatgactccgacataatatcgaggccaagcatccgcttgatgatgcgtgtccattcaggcgtcacatcaacgctgtatgactgtctctcgagcccctctgtatcgggattgaggttagcagcctataatgaaggaccttactctggccatcgtcttgctctcagaccattctttgaggcagatacagttatctgtatcattggtggcctaggcataactcatgcgcttggatttgtacagcaatatgctggtcaagcatcacaagccaacagggggcgaagggagagaggtatcatggcgaaggcgagacgcttcgtgcttgcttggtctgctagggaaatggggttcatcaaccatgtgaggcgaaatttcctggtcgatatcggggacatcgaatgcctcttctggtgcaccgatcctctcaacatgataacagagaaccacgccaagagtgcaagcccgatcaacaggtcgctcaacggcgtcatcgccgacaggatggatattcgatcagttctgagaaacatactggagttcggtcatcaaagtgtcgtattagtatgtggtcctggtggaatggccgacgaagctcgcagagaggttgttacgtgcgtgaaagatggattcaaggtcgatctcgtcgatgaggcctacgcgtggtag

SEQ ID NO: 31437 - protein, 724 aa, Muscodor strobelii
  misc_feature: SGI Peptide ID NO. 570823
  misc_feature (232)..(354): Pfam Id: PF01794 Pfam Desc: Ferric reductase like transmembrane component
  misc_feature (395)..(555): Pfam Id: PF08022 Pfam Desc: FAD-binding domain
  misc_feature (424)..(450): Pfam Id: PF08022 Pfam Desc: FAD-binding domain
  misc_feature (15)..(724): NCBI GI: 145609433 Blast Desc: MGG_13426 [Magnaporthe grisea 70-15] gi|145016795|gb|EDK01225.1| MGG_13426 [Magnaporthe grisea 70-15]
  misc_feature (2)..(469): NCBI GI: 256721791 Blast Desc: NECHADRAFT_64609 [Nectria haematococca mpVI 77-13-4]
  misc_feature (19)..(724): NCBI GI: 256730138 Blast Desc: NECHADRAFT_95035 [Nectria haematococca mpVI 77-13-4]
  misc_feature (17)..(724): NCBI GI: 261356805 Blast Desc: ferric reductase transmembrane component 4 [Verticillium albo-atrum VaMs.102]
  misc_feature (19)..(724): NCBI GI: 70983095 Blast Desc: ferric-chelate reductase (Fre2) [Aspergillus fumigatus Af293] gi|66844700|gb|EAL85037.1| ferric-chelate reductase (Fre2), [Aspergillus fumigatus Af293]
  misc_feature (19)..(724): NCBI GI: 159123961 Blast Desc: ferric-chelate reductase (Fre2), [Aspergillus fumigatus A1163]
  misc_feature (19)..(724): NCBI GI: 46109814 Blast Desc: FG01789.1 [Gibberella zeae PH-1]
  misc_feature (8)..(724): NCBI GI: 238482547 Blast Desc: ferric-chelate reductase (Fre2), [Aspergillus flavus NRRL3357] gi|220700562|gb|EED56900.1| ferric-chelate reductase (Fre2), [Aspergillus flavus NRRL3357]
  misc_feature (18)..(448): NCBI GI: 116181428 Blast Desc: CHGG_01342 [Chaetomium globosum CBS 148.51] gi|88185639|gb|EAQ93107.1| CHGG_01342 [Chaetomium globosum CBS 148.51]
  misc_feature (3)..(724): NCBI GI: 261357112 Blast Desc: ferric reductase transmembrane component 4 [Verticillium albo-atrum VaMs.102]
MFNMKRDMGMDSDIMGATSDECRSSNRPWLQTIAYCIQQNCVADGYSIEKKAKCFSTVAVAGASEPSYQSSLPPKAPTVELEMDAMWLNTTSLVNSHMYHSTYGTYAEFQSSEVFHTRYAMIIYLVTMGACLVYGMMARLSTLLGLRKALSSSYPWSKVRQYVMLPALFGSRNLEPLPGNVGYVPNRALSISIAVYIILNIVFSSISFSTFSPNIYWASPQFQLCEYVGNRTGTLSLVNLSISVLFAGRNNVLLGVTGLSQTTFLTLHRWAARVATLQAIVHSIVYTLAYFEPGYAGASAYAAAAAQPFYWWGIIATIAFALATSLAALPLRKAFYESFLVIHISLAILALVGCWYHLVPHFGFDYGYQVWLYITFAFWSFDRFARLARVAFYNRFGNSTAVFESIPDCNILQVTIFPRTTKGFGPGQHTFLYFPGLGRFWENHPFSIASWSESGHSQSGVGSRSDSGEKQSRVHVEERTTERHARYSGPEQKHKLKKKQSAFSDDSDIISRPSIRLMMRVHSGVTSTLYDCLSSPSVSGLRLAAYNEGPYSGHRLALRPFFEADTVICIIGGLGITHALGFVQQYAGQASQANRGRRERGIMAKARRFVLAWSAREMGFINHVRRNFLVDIGDIECLFWCTDPLNMITENHAKSASPINRSLNGVIADRMDIRSVLRNILEFGHQSVVLVCGPGGMADEARREVVTCVKDGFKVDLVDEAYAW

SEQ ID NO: 31438 - DNA, 1263 bp, Muscodor strobelii
  misc_feature: SGI cDNA ID NO. 570824
  misc_feature: Reduced expression when VOC is produced
  misc_feature: Encodes the peptide sequence at SEQ ID NO 31439
atgtcgacccaaaagacgaacccctacgcgagtataggagatcttctcagcaatgtcaacaatttcaagatcatcgagagtaccctcagagagggcgagcagttctgccaggcctatttcgacacggagaccaagatcaaaatagcaacgatgctgtctgacttcggtgtggactacatcgaattgaccaatcctgcggccagcccgcagtcccgcgccgattgtgaagccatctgcaagctcggtctcaaatccaagatcctgactcacacgaggtgtactatggacgacgccaagctcgcatgtgactgcggcgtcgacggcgtagatgtcgttatcggcacatcccagttccttcgcgagcactctctgggagggaaggacatgactgccatcaccaagcaagcccttgaggttatccagtatatcaagagcagagggtgcgaagtccggttttcaagcgaagactctttccgctcggatttggtagatctcctttccatttaccgcgccgtcagcaatgccggcgtctgccgcgttggagttgctgatactgtcggatgcgcctctccccgccaagtctatgacctcgtcagaactctgagaggttgtgtctccacagacatcgaagtacatttccacgacgacactggtactgctgtcgccaatgcttttactgctttagaagccggcgcgacgcatgtggatacgtcagtgcttggtatcggagagcgcaatggcattacgcccttgggagctctcatggctagaatgatgccaaccagccgagactatgtcctctccaagtacaagctccacaagctcaaggccattgaggacttcatcagtgaccaagtcgcaatcaacgtaccttttaacaatccgatcaccggtttctgcgcctttacgcacaaggccggcatccacgccaaggcaatccttaacaacccttccacttacgagattcttaagccagaagactttggtttgacgagatatgtgcacttcgcatccagacttacgggctggaatgctatcaagagtcgtgctgaccagcttggtctgaacatgactgatgaccaagttaaggcagttactgccaagattaagcaactggccgatgtccgacctcttgctttggacgacaccgattcaatcattcggtcatttcactttgagctacaaaataagaacaaagaatccgttcaaaacggcacaaacggcacaaatgaaacaaatggaacaaatggagtaacggcatag

SEQ ID NO: 31439 - protein, 420 aa, Muscodor strobelii
  misc_feature: SGI Peptide ID NO. 570824
  misc_feature (30)..(288): Pfam Id: PF00682 Pfam Desc: HMGL-like
  misc_feature (2)..(396): NCBI GI: 225877966 Blast Desc: homocitrate synthase [Gibberella fujikuroi]
  misc_feature (8)..(395): NCBI GI: 46116302 Blast Desc: FG03993.1 [Gibberella zeae PH-1]
  misc_feature (5)..(405): NCBI GI: 171681604 Blast Desc: protein product [Podospora anserina] gi|170940761|emb|CAP66410.1| protein product [Podospora anserina]
  misc_feature (3)..(405): NCBI GI: 169611684 Blast Desc: SNOG_08956 [Phaeosphaeria nodorum SN15] gi|111063004|gb|EAT84124.1| SNOG_08956 [Phaeosphaeria nodorum SN15]
  misc_feature (8)..(396): NCBI GI: 256735561 Blast Desc: NECHADRAFT_90471 [Nectria haematococca mpVI 77-13-4]
  misc_feature (7)..(399): NCBI GI: 189206345 Blast Desc: homocitrate synthase [Pyrenophora tritici-repentis Pt-1C-BFP] gi|187975600|gb|EDU42226.1| homocitrate synthase [Pyrenophora tritici-repentis Pt-1C-BFP]
  misc_feature (4)..(411): NCBI GI: 154299629 Blast Desc: BC1G_10777 [Botryotinia fuckeliana B05.10] gi|150857269|gb|EDN32461.1| BC1G_10777 [Botryotinia fuckeliana B05.10]
  misc_feature (4)..(411): NCBI GI: 156030734 Blast Desc: SS1G_14306 [Sclerotinia sclerotiorum 1980] gi|154700697|gb|EDO00436.1| SS1G_14306 [Sclerotinia sclerotiorum 1980]
  misc_feature (7)..(391): NCBI GI: 39973523 Blast Desc: MGG_01092 [Magnaporthe grisea 70-15] gi|145017945|gb|EDK02224.1| MGG_01092 [Magnaporthe grisea 70-15]
  misc_feature (7)..(400): NCBI GI: 258567434 Blast Desc: homocitrate synthase [Uncinocarpus reesii 1704] gi|237905907|gb|EEP80308.1| homocitrate synthase [Uncinocarpus reesii 1704]
  misc_feature (7)..(396): SWISSPROT Homolog: EC 2.3.3.14 Homocitrate synthase
  misc_feature: Useful for introducing or modulating the production of volatile compounds
MSTQKTNPYASIGDLLSNVNNFKIIESTLREGEQFCQAYFDTETKIKIATMLSDFGVDYIELTNPAASPQSRADCEAICKLGLKSKILTHTRCTMDDAKLACDCGVDGVDVVIGTSQFLREHSLGGKDMTAITKQALEVIQYIKSRGCEVRFSSEDSFRSDLVDLLSIYRAVSNAGVCRVGVADTVGCASPRQVYDLVRTLRGCVSTDIEVHFHDDTGTAVANAFTALEAGATHVDTSVLGIGERNGITPLGALMARMMPTSRDYVLSKYKLHKLKAIEDFISDQVAINVPFNNPITGFCAFTHKAGIHAKAILNNPSTYEILKPEDFGLTRYVHFASRLTGWNAIKSRADQLGLNMTDDQVKAVTAKIKQLADVRPLALDDTDSIIRSFHFELQNKNKESVQNGTNGTNETNGTNGVTA

SEQ ID NO: 31440 - DNA, 1757 bp, Muscodor strobelii
  misc_feature: SGI EST ID NO. CUFF.74459.0
  misc_feature: Variant of the nucleotide sequence at SEQ ID NO 31438
ccaaattctatactctttgtcattcattatactgccaccactttgcactttgcgatacccagccctgagagagtgcgacgtgagcaattgccaaagccgacaagtacagctttgccagcaatatcccccatcagccgagtacctcaattgtcgttcacttaaccctgcaccactgacaccatgtcgacccaaaagacgaacccctacgcgagtataggagatcttctcagcaatgtcaacaatttcaagatcatcgagagtaccctcagagagggcgagcagttctgccaggcctatttcgacacggagaccaagatcaaaatagcaacgatgctgtctgacttcggtgtggactacatcgaattgaccaatcctgcggccagcccgcagtcccgcgccgattgtgaagccatctgcaagctcggtctcaaatccaagatcctgactcacacgaggtgtactatggacgacgccaagctcgcatgtgactgcggcgtcgacggcgtagatgtcgttatcggcacatcccagttccttcgcgagcactctctgggagggaaggacatgactgccatcaccaagcaagcccttgaggttatccagtatatcaagagcagagggtgcgaagtccggttttcaagcgaagactctttccgctcggatttggtagatctcctttccatttaccgcgccgtcagcaatgccggcgtctgccgcgttggagttgctgatactgtcggatgcgcctctccccgccaagtctatgacctcgtcagaactctgagaggttgtgtctccacagacatcgaagtacatttccacgacgacactggtactgctgtcgccaatgcttttactgctttagaagccggcgcgacgcatgtggatacgtcagtgcttggtatcggagagcgcaatggcattacgcccttgggagctctcatggctagaatgatgccaaccagccgagactatgtcctctccaagtacaagctccacaagctcaaggccattgaggacttcatcagtgaccaagtcgcaatcaacgtaccttttaacaatccgatcaccggtttctgcgcctttacgcacaaggccggcatccacgccaaggcaatccttaacaacccttccacttacgagattcttaagccagaagactttggtttgacgagatatgtgcacttcgcatccagacttacgggctggaatgctatcaagagtcgtgctgaccagcttggtctgaacatgactgatgaccaagttaaggcagttactgccaagattaagcaactggccgatgtccgacctcttgctttggacgacaccgattcaatcattcggtcatttcactttgagctacaaaataagaacaaagaatccgttcaaaacggcacaaacggcacaaatgaaacaaatggaacaaatggagtaacggcatagtgcaagagggttggagtctgggatccaataggccaaaaagtgtattctaatgttctggcgttcaaaatcaaaaagtggcgttcaagattcaataccattttctcgaataatacaagagattcatctcatacttactatcttctcattcatcgagctcagtttgtctcccaatgtcttatcgaccaggagactcggaccaaagtcatgcattgactacatcctgccctgctcgttaggtgctagcatacaaggaaatttttgttactactattcgttccaaactaataacatggacaattctgatttaatgccaa

SEQ ID NO: 31441 - DNA, 996 bp, Muscodor strobelii
  misc_feature: SGI cDNA ID NO. 570825
  misc_feature: Encodes the peptide sequence at SEQ ID NO 31442
atgtctgcgcctcacgacgaccaaaacgatggaaatgggccgaacttaccgccaatccacaatcgatggcgaattcaacatcctggcgaaaccagacggtgggagcccgtcagtgacaattgggctaggttctataacccaacaccaatgaccattccgcagccagctatggtcaactccgatggtcaagtgcccatcacgagcaactatgtggtagactggatgaacgcctgcgacgaaaatggtaacatccccgcaacaacatgtttccgcgtccagtgtcagctgtgtaataacgaacgattcgcagtagatgaagactacgtcccaggttggaacatcgtccccttcgtaattctcccatgtggacatgcatttagcgagaattgtacccgcacatattggggcatggctccattcggcctcaacggtgtccgtggggaatcagcccgttgtccaacatgccatgaacgtatacgctggccactatgcgcccatcgcatggtagctgacgagatcgaacggttcgaaccatataaatggcccttcgacggccccgagtcctggttccagcgtttcgaaatccatctcgccaccgctcagctctgcaagcgatgcgttgcccctcaagaaccagaaagtatatatgagcggtctttgccccacgatccaatggaagaatatattcggcttgttcatgcgcatattttttggctgaagcaacaaggttttatcaatgggatcgacctaagtgataagaccgatgattggtgtctacaggcgctcatcgacttgacgcgtgtgcactattcgtacctaatcccttcaggccctgcccaccagctaccgcttcttttggcgcaactggctcgatttgtagacagtgacacggcttctgatatcgcagggacgaaattggcgccgacgttggatttttcgggttctgctagagatcggctaatcaacatgttacaggagctcagttcctcgacttga

SEQ ID NO: 31442 - protein, 331 aa, Muscodor strobelii
  misc_feature: SGI Peptide ID NO. 570825
MSAPHDDQNDGNGPNLPPIHNRWRIQHPGETRRWEPVSDNWARFYNPTPMTIPQPAMVNSDGQVPITSNYVVDWMNACDENGNIPATTCFRVQCQLCNNERFAVDEDYVPGWNIVPFVILPCGHAFSENCTRTYWGMAPFGLNGVRGESARCPTCHERIRWPLCAHRMVADEIERFEPYKWPFDGPESWFQRFEIHLATAQLCKRCVAPQEPESIYERSLPHDPMEEYIRLVHAHIFWLKQQGFINGIDLSDKTDDWCLQALIDLTRVHYSYLIPSGPAHQLPLLLAQLARFVDSDTASDIAGTKLAPTLDFSGSARDRLINMLQELSSST

SEQ ID NO: 31443 - DNA, 311 bp, Muscodor strobelii
  misc_feature: SGI EST ID NO. CUFF.74435.0
  misc_feature: Variant of the nucleotide sequence at SEQ ID NO 31441
gcgaaaccagacggtgggagcccgtcagtgacaattgggctaggttctataacccaacaccaatgaccattccgcagccagctatggtcaactccgatggtcaagtgcccatcacgagcaactatgtggtagactggatgaacgcctgcgacgaaaatggtaacatccccgcaacaacatgtttccgcgtccagtgtcagctgtgtaataacgaacgattcgcagtagatgaagactacgtcccaggttggaacatcgtccccttcgtaattctcccatgtggacatgcatttagcgagaattgtacccgc

SEQ ID NO: 31444 - DNA, 1176 bp, Muscodor strobelii
  misc_feature: SGI cDNA ID NO. 570826
  misc_feature: Encodes the peptide sequence at SEQ ID NO 31445
atggacggctgggctgctgaagtccagcaacgccacgactgcgcaactcaacatgagtacatgccagatcctgaggacgccgcggaattcggatacgagctcatacctcacagctatgattccgaggacttacaaacagcgatgaacaacatcgtctttagaccaagtccaactccccgacagcaacgcctgcgggataacctactcgctgattatctcacaacagatacagacagcgcaacactgacagacttatctgacactcttaactcatggctcgcccaaatcgaccaatacttccttttcggatctctgacccaaggcgttcagcgcctttgtcatgtaagtatatatgatcaggcactcaggaacgacaacgcttctacccatgcgctgctgaataggcccaagactcgtattaacatcttcccgacagatccggacacaggtcgtcgcaaacccaaaattttgctatttacgatcctcatacacgaagctatgcacgcctatctcagtacgttttttaatttctgtcctgagaaaaataatactgcacaggttcgtggtccgaagagaaacggacatggaggactttggtatcatatgtatttcgatcttgtaagtgtgcacatgcgtcaatggcatccttccttagctcaggtcggtcacgatgcccggataccgctcccacacattgcacccgcttggttcatgcggctctacaaaactcaaatacgacggttgccgtatctgagacgagaatgggattccactgacgcacaatatgatcagatcggtctgcttcgctggaggaagacagggctacagggtcctgagttcaagcgtgcttggctacggctcaactacgcaaattacaatgagtttgttcgcaaccggaccccatatccagacactgcattcataatagcgctttcagttctcacgattgtcctgtcgtccattctatcgttttggcatctctggattccgattctgcaatatttggctctgctttactggggttacgaccaacctctcggcttgtcaggcaagctgttgtcaagataccgtcgtcaacccattggaagagtcgtcactgatttcagacgggctattcaaattttgggcgttttccggcaagtaggtggtgtgattaatggtttcatgaaccggtaa

SEQ ID NO: 31445 - protein, 391 aa, Muscodor strobelii
  misc_feature: SGI Peptide ID NO. 570826
MDGWAAEVQQRHDCATQHEYMPDPEDAAEFGYELIPHSYDSEDLQTAMNNIVFRPSPTPRQQRLRDNLLADYLTTDTDSATLTDLSDTLNSWLAQIDQYFLFGSLTQGVQRLCHVSIYDQALRNDNASTHALLNRPKTRINIFPTDPDTGRRKPKILLFTILIHEAMHAYLSTFFNFCPEKNNTAQVRGPKRNGHGGLWYHMYFDLVSVHMRQWHPSLAQVGHDARIPLPHIAPAWFMRLYKTQIRRLPYLRREWDSTDAQYDQIGLLRWRKTGLQGPEFKRAWLRLNYANYNEFVRNRTPYPDTAFIIALSVLTIVLSSILSFWHLWIPILQYLALLYWGYDQPLGLSGKLLSRYRRQPIGRVVTDFRRAIQILGVFRQVGGVINGFMNR

SEQ ID NO: 31446 - DNA, 266 bp, Muscodor strobelii
  misc_feature: SGI EST ID NO. CUFF.74438.0
  misc_feature: Variant of the nucleotide sequence at SEQ ID NO 31444
cgagaatgggattccactgacgcacaatatgatcagatcggtctgcttcgctggaggaagacagggctacagggtcctgagttcaagcgtgcttggctacggctcaactacgcaaattacaatgagtttgttcgcaaccggaccccatatccagacactgcattcataatagcgctttcagttctcacgattgtcctgtcgtccattctatcgttttggcatctctggattccgattctgcaatatttggctctgctttactgggg

SEQ ID NO: 31447 - DNA, 2028 bp, Muscodor strobelii
  misc_feature: SGI cDNA ID NO. 570827
  misc_feature: Encodes the peptide sequence at SEQ ID NO 31448
atggccaagttaaaacaattggcggcggcctttctcttgctagctagcacggcagtagccaagaacgcgactaatattgtcgtcagagcagagggcggcaacgtgactggaggcttccgatatggcttcctacatgaggacatcaacaattccggagatggtggtctctacgctgagctcatccgaaacagagcttttcaaggaagcgggaaatacccaattactctcagtggatggtcacccgtcaatggagcgactttatctctcaagaacctcaccaaacccctatccgaagccctacccgtttcaatgaatgtcgcaagctccgggaaaggaggtcagatcggatttgcgaacgatggatactggggcatggatatcaagcggcagaggtatacgggttcgttctgggttaaaggcgattatcatggagacttcactgcctccgttcaatcgaacatcaccggtgagaagttcggtgccacgaagatcaagtcaaagtcccgtgcgaaccaatggacggaacacgagttcgagcttaccccattcaagaatgcgcctagctctaacaatactttcgccattacgtttgactccaagggtgctaactcgacttcacttgatttcaatctgatcagcttattcccgccgacgtttaagaatcgcccgaacggcatgcgtctcgatctcaccgaagccttggcccagatacatcctacgattttcagaatgccgggcggcaatatgctcgaggggaacaccaacgcaacatggtggaattggaaaaactcgatcggaccgctcaaggatcgacctggcttcgaaggagtgtggggttatgagcagacaaatggactcggattatacgaatacctactgtacgctgaagatatgggaatggaactcgtcctcgccgtatacgccggattagctctcaacggtgacattacacctaaggaggacctgcagccctttatcgacaacgcgctcgaggagatcgagttcattaccggacccgcagactcaaaatggggtagtgtccgcgctcagcttggccacccggagccatggaaactgccttatgtcgaggttggcaacgaagattggctagcaggcggtgctgagggttgggacacttataaggcgtatagattccctatgtttcttaaggctatcaaccaagcttggtgcgattatcccccctttttcaacgctgacgaggaactagacccggacataaaggttttgtcatcaggatccatctacgacggttatgatattccggcccctggagccggcgattgccacatttacggaacacccgatacctacgttgagctttttggcgagttcgataacgtcactataccccatctactcggcgagatggcttcagtgcacccaaatggtggaaccgcttgggacggtccattacagccattcccttggtggggaggatcagtcggagaagcaatcggcgtgatcagttacgagcgaaacgcccccagagtttttggagcagtctacgctccgattgtccgcaatatgaacagatggcagtggtcaattaccatgatccaattcgcagctgatccaaagctcactacccgctcaacgagctggtatgtttgggagctaatggccgctcacccgatcaccgaaaccttgccgatgaccgaagaattcgatccactatactacgtcgcaggcaagaacgagcaaacgggtggtcacatattcaaagctgcagtctacaactcgactaacagcgccgacgtccctgtacagctcacgttcgaagatgttgctccgttttcgaccgccgagctgacggtgctcacgggcccagagaatccctatggctttaacgaccctttcacgaatgagatcaatgtagtgaaaacagtcaagactaccgtgacggcagataaatttggaactttctcgattcaactacctaatctcagtgttgcggttttggacacgaagggttcaaatgcagataagcggcggagtgatggtccgtag

SEQ ID NO: 31448 - protein, 675 aa, Muscodor strobelii
  misc_feature: SGI Peptide ID NO. 570827
  misc_feature (484)..(656): Pfam Id: PF06964 Pfam Desc: Alpha-L-arabinofuranosidase C-terminus
  misc_feature (1)..(671): NCBI GI: 256726588 Blast Desc: NECHADRAFT_93118 [Nectria haematococca mpVI 77-13-4]
  misc_feature (9)..(662): NCBI GI: 46124171 Blast Desc: FG06463.1 [Gibberella zeae PH-1]
  misc_feature (25)..(672): NCBI GI: 39973413 Blast Desc: MGG_01147 [Magnaporthe grisea 70-15] gi|145017880|gb|EDK02159.1| MGG_01147 [Magnaporthe grisea 70-15]
  misc_feature (1)..(670): NCBI GI: 261361073 Blast Desc: alpha-N-arabinofuranosidase A [Verticillium albo-atrum VaMs.102]
  misc_feature (25)..(671): NCBI GI: 189207002 Blast Desc: alpha-N-arabinofuranosidase A precursor [Pyrenophora tritici-repentis Pt-1C-BFP] gi|187975928|gb|EDU42554.1| alpha-N-arabinofuranosidase A precursor [Pyrenophora Pt-1C-BFP]
  misc_feature (1)..(667): NCBI GI: 169624381 Blast Desc: SNOG_15449 [Phaeosphaeria nodorum SN15] gi|160705159|gb|EAT77114.2| SNOG_15449 [Phaeosphaeria nodorum SN15]
  misc_feature (12)..(664): NCBI GI: 40804597 Blast Desc: related to alpha-L-arabinofuranosidase A precursor [Neurospora crassa]
  misc_feature (23)..(662): NCBI GI: 171678946 Blast Desc: protein product [Podospora anserina] gi|170937544|emb|CAP62201.1| protein product [Podospora anserina]
  misc_feature (12)..(664): NCBI GI: 85092578 Blast Desc: NCU02343 [Neurospora crassa OR74A] gi|28920894|gb|EAA30229.1| NCU02343 [Neurospora crassa OR74A]
  misc_feature (6)..(665): NCBI GI: 119481903 Blast Desc: alpha-L-arabinofuranosidase A [Neosartorya fischeri NRRL 181] gi|119409134|gb|EAW19083.1| alpha-L-arabinofuranosidase A [Neosartorya fischeri NRRL 181]
  misc_feature (25)..(660): SWISSPROT Homolog: EC 3.2.1.55 Alpha-N-arabinofuranosidase
MAKLKQLAAAFLLLASTAVAKNATNIVVRAEGGNVTGGFRYGFLHEDINNSGDGGLYAELIRNRAFQGSGKYPITLSGWSPVNGATLSLKNLTKPLSEALPVSMNVASSGKGGQIGFANDGYWGMDIKRQRYTGSFWVKGDYHGDFTASVQSNITGEKFGATKIKSKSRANQWTEHEFELTPFKNAPSSNNTFAITFDSKGANSTSLDFNLISLFPPTFKNRPNGMRLDLTEALAQIHPTIFRMPGGNMLEGNTNATWWNWKNSIGPLKDRPGFEGVWGYEQTNGLGLYEYLLYAEDMGMELVLAVYAGLALNGDITPKEDLQPFIDNALEEIEFITGPADSKWGSVRAQLGHPEPWKLPYVEVGNEDWLAGGAEGWDTYKAYRFPMFLKAINQAWCDYPPFFNADEELDPDIKVLSSGSIYDGYDIPAPGAGDCHIYGTPDTYVELFGEFDNVTIPHLLGEMASVHPNGGTAWDGPLQPFPWWGGSVGEAIGVISYERNAPRVFGAVYAPIVRNMNRWQWSITMIQFAADPKLTTRSTSWYVWELMAAHPITETLPMTEEFDPLYYVAGKNEQTGGHIFKAAVYNSTNSADVPVQLTFEDVAPFSTAELTVLTGPENPYGFNDPFTNEINVVKTVKTTVTADKFGTFSIQLPNLSVAVLDTKGSNADKRRSDGP

SEQ ID NO: 31449 - DNA, 2712 bp, Muscodor strobelii
  misc_feature: SGI EST ID NO. CUFF.74441.0
  misc_feature: Variant of the nucleotide sequence at SEQ ID NO 31447
gtttcgtggaacaaatcccaactgcatgcctgtagatggggatcgagagcattctatgcataccgatacctcgggatgcgggggacgtcgatgtgcggatgagatcgcttgttcaatcccgaatgatgctctcgtcgagcgtctaatcatgcgagatggcaattacacatataaatcctagctaccccaatctccgagaagatggaagcgatttatcgtactagtgaagcgttgggaacactattgttgccaatattactctctgacttggatcacgatggccaagttaaaacaattggcggcggcctttctcttgctagctagcacggcagtagccaagaacgcgactaatattgtcgtcagagcagagggcggcaacgtgactggaggcttccgatatggcttcctacatgaggacatcaacaattccggagatggtggtctctacgctgagctcatccgaaacagagcttttcaaggaagcgggaaatacccaattactctcagtggatggtcacccgtcaatggagcgactttatctctcaagaacctcaccaaacccctatccgaagccctacccgtttcaatgaatgtcgcaagctccgggaaaggaggtcagatcggatttgcgaacgatggatactggggcatggatatcaagcggcagaggtatacgggttcgttctgggttaaaggcgattatcatggagacttcactgcctccgttcaatcgaacatcaccggtgagaagttcggtgccacgaagatcaagtcaaagtcccgtgcgaaccaatggacggaacacgagttcgagcttaccccattcaagaatgcgcctagctctaacaatactttcgccattacgtttgactccaagggtgctaactcgacttcacttgatttcaatctgatcagcttattcccgccgacgtttaagaatcgcccgaacggcatgcgtctcgatctcaccgaagccttggcccagatacatcctacgattttcagaatgccgggcggcaatatgctcgaggggaacaccaacgcaacatggtggaattggaaaaactcgatcggaccgctcaaggatcgacctggcttcgaaggagtgtggggttatgagcagacaaatggactcggattatacgaatacctactgtacgctgaagatatgggaatggaactcgtcctcgccgtatacgccggattagctctcaacggtgacattacacctaaggaggacctgcagccctttatcgacaacgcgctcgaggagatcgagttcattaccggacccgcagactcaaaatggggtagtgtccgcgctcagcttggccacccggagccatggaaactgccttatgtcgaggttggcaacgaagattggctagcaggcggtgctgagggttgggacacttataaggcgtatagattccctatgtttcttaaggctatcaaccaagcttggtgcgattatcccccctttttcgtggacggaatatgaagactaatcttgccttgcagtacgtggccaaactcacatcaccgaatctaattacactcctgatcttgaatgagagcatgataatattatttcgatacagaacgctgacgaggaactagacccggacataaaggttttgtcatcaggatccatctacgacggttatgatattccggcccctggagccggcgattgccacatttacggaacacccgatacctacgttgagctttttggcgagttcgataacgtcactataccccatctactcggcgagatggcttcagtgcacccaaatggtggaaccgcttgggacggtccattacagccattcccttggtggggaggatcagtaagttgatttcagtctaagctcgctcttgggcgttgaagtcttgagagtcctgcaaagccaagtcttgctaaatagttgggacccaggtcggagaagcaatcggcgtgatcagttacgagcgaaacgcccccagagtttttggagcagtctacgctccgattgtccgcaatatgaacagatggcagtggtcaattaccatgatccaattcgcagctgatccaaagctcactacccgctcaacgagctggtatgtttgggagctaatggccgctcacccgatcaccgaaaccttgccgatgaccgaagaattcgatccactatactacgtcgcaggcaagaacgagcaaacgggtggtcacatattcaaagctgcagtctacaactcgactaacagcgccgacgtccctgtacagctcacgttcgaagatgttgctccgttttcgaccgccgagctgacggtgctcacgggcccagagaatccctatggctttaacgaccctttcacgaatgagatcaatgtagtgaaaacagtcaagactaccgtgacggcagataaatttggaactttctcgattcaactacctaatctcagtgttgcggttttggacacgaagggttcaaatgcagataagcggcggagtgatggtccgtagacaagatgtgcgccaagatgacttctcatgcaaagtcttgtaccccagcatctcttttccctagagcctaagcatatcctaccctagagtcgctgtattcttagaagaataaacactaaagcggtactccagatagaatattttcaatgttctcagaatacccagactatctcatgctcgatcctcatgttcgatactcaagc

SEQ ID NO: 31450 - DNA, 1419 bp, Muscodor strobelii
  misc_feature: SGI cDNA ID NO. 570828
  misc_feature: Encodes the peptide sequence at SEQ ID NO 31451
atggagaagccaagcaacagctggcagggctttgcatgcccgattctactatcagatgaagagacatacggagcagttaaagacatcgtcgacaacgcagacttcaaatacctggcaatgtgcgcactaaattcacgaaggaagcatgatccggatctaccgccttcggttgtgtgcagcattgatttggaccgatttacgaatggaaaaaataacttagtcgttgaacttgcattttccgatggtgtctactggattgcgcgcattccgaccttcttccttaatgagaacgagggtaggacggcaatgctcagcgagatcgctacaatgaggctaattcgcaaacacaccaccattcctctgcctcaaatctttgactttgaggcgagcatggaacagccgttcaagtgcccgtacattttcatggaatatctgcgtggaggtcctcttccaaagagccacgcgccgataaccttaataccgcgccattaccgtcaaaaattcgccgcacagctcgcaaatattcttgtgcagctggaaaacttgacgttcactcgcattggacatctttggtgcggtgagactaccgatgagcccgtcagagtgatagggagccagttcgactcttcaagtgcggctacaacaacatccattgaacatttctatgagaaaaggcgcattgacaatcaagtattgatgcgcaagaacccagccaatctcgaatgttccacggcgtgttgggtagcagcaatggcgatagaccatttcaccatagaggacaaggtcaacggtcccttccccctttgccatatggatttgcatttcggcaacatactattcgacgaagagttcaatatcacggggattattgattggagcgatgcccaggccgcaccgttcgagcatttagcaatgatgcccgaatgcatcactcctgtctccaatacatgtacgcaggaagacattcaagccgcggaggagttccaagagcatcttgcgaaatgcttgagggacactgagagcgctcaagaaagaagggatccattggataaagagacaagcgtacatgtggtccagacgaacggaaacaatgctctggtaaagagatcgggaacgccgatagatgagactaatgcggtaacagagtcggcttcaaacccaactctgctctctacctatatagagtcgggaaagtggcagctcgccactcttgagtgtattgttgctactgcatcgcgagtcaaatatgcccgggcgctctttaagttgatgggtggagttggaaactcctgggaagagcagaagaagaagcaccgcctttacccctggtcagatgaacctcttcaggaactcttgaaaaggccttacatgacttcatttgggtttccatgttcattggaggacataggaatgaagtaa

SEQ ID NO: 31451 - protein, 472 aa, Muscodor strobelii
  misc_feature: SGI Peptide ID NO. 570828
  misc_feature (1)..(308): NCBI GI: 256726739 Blast Desc: NECHADRAFT_76042 [Nectria haematococca mpVI 77-13-4]
  misc_feature (3)..(438): NCBI GI: 238841944 Blast Desc: [Microsporum canis CBS 113480]
  misc_feature (61)..(338): NCBI GI: 255950420 Blast Desc: Pc22g20780 [Penicillium chrysogenum Wisconsin 54-1255] gi|211592994|emb|CAP99366.1| Pc22g20780 [Penicillium chrysogenum Wisconsin 54-1255]
  misc_feature (69)..(414): NCBI GI: 261188706 Blast Desc: conserved [Ajellomyces dermatitidis SLH14081] gi|239593125|gb|EEQ75706.1| conserved [Ajellomyces dermatitidis SLH14081]
  misc_feature (69)..(359): NCBI GI: 255937449 Blast Desc: Pc13g13370 [Penicillium chrysogenum Wisconsin 54-1255] gi|211584371|emb|CAP92406.1| Pc13g13370 [Penicillium chrysogenum Wisconsin 54-1255]
  misc_feature (34)..(286): NCBI GI: 46105060 Blast Desc: FG00158.1 [Gibberella zeae PH-1]
  misc_feature (28)..(307): NCBI GI: 255937385 Blast Desc: Pc13g13050 [Penicillium chrysogenum Wisconsin 54-1255] gi|211584339|emb|CAP92374.1| Pc13g13050 [Penicillium chrysogenum Wisconsin 54-1255]
  misc_feature (41)..(338): NCBI GI: 255934768 Blast Desc: Pc12g16130 [Penicillium chrysogenum Wisconsin 54-1255] gi|211583030|emb|CAP81240.1| Pc12g16130 [Penicillium chrysogenum Wisconsin 54-1255]
  misc_feature (19)..(299): NCBI GI: 238502793 Blast Desc: conserved [Aspergillus flavus NRRL3357] gi|220691440|gb|EED47788.1| conserved [Aspergillus flavus NRRL3357]
  misc_feature (69)..(315): NCBI GI: 240281170 Blast Desc: conserved [Ajellomyces capsulatus H143]
MEKPSNSWQGFACPILLSDEETYGAVKDIVDNADFKYLAMCALNSRRKHDPDLPPSVVCSIDLDRFTNGKNNLVVELAFSDGVYWIARIPTFFLNENEGRTAMLSEIATMRLIRKHTTIPLPQIFDFEASMEQPFKCPYIFMEYLRGGPLPKSHAPITLIPRHYRQKFAAQLANILVQLENLTFTRIGHLWCGETTDEPVRVIGSQFDSSSAATTTSIEHFYEKRRIDNQVLMRKNPANLECSTACWVAAMAIDHFTIEDKVNGPFPLCHMDLHFGNILFDEEFNITGIIDWSDAQAAPFEHLAMMPECITPVSNTCTQEDIQAAEEFQEHLAKCLRDTESAQERRDPLDKETSVHVVQTNGNNALVKRSGTPIDETNAVTESASNPTLLSTYIESGKWQLATLECIVATASRVKYARALFKLMGGVGNSWEEQKKKHRLYPWSDEPLQELLKRPYMTSFGFPCSLEDIGMK

SEQ ID NO: 31452 - DNA, 274 bp, Muscodor strobelii
  misc_feature: SGI EST ID NO. CUFF.74444.0
  misc_feature: Variant of the nucleotide sequence at SEQ ID NO 31450
gcggaggagttccaagagcatcttgcgaaatgcttgagggacactgagagcgctcaagaaagaagggatccattggataaagagacaagcgtacatgtggtccagacgaacggaaacaatgctctggtaaagagatcgggaacgccgatagatgagactaatgcggtaacagagtcggcttcaaacccaactctgctctctacctatatagagtcgggaaagtggcagctcgccactcttgagtgtattgttgctactgcatcgcgagtcaaat

SEQ ID NO: 31453 - DNA, 390 bp, Muscodor strobelii
  misc_feature: SGI cDNA ID NO. 570829
  misc_feature: Encodes the peptide sequence at SEQ ID NO 31454
atgcgtacttctgttctctctatccccttcttcatggccgttattgcagtcaaagcgcagtcggcatgtttctcaggtggtcaaccttggggcgatcgaagcgccgctatgcaattcgccaacgatgactgcactacagtcttcaacaacatcgcctgggaccaaacccagacgcaatttcagacctgtcataacctagacgcttcgaccagggttgacttcaccgtgttttacgccgaaggcccgactccgggctcatttgatgtatcgaactgccaattcggtctagaatcgcccattagcgattgttcattcggaggaaacttcatccaagttgggccgactgatgggtggcagtatactgccgaccctaatgctggccaatgttaa

SEQ ID NO: 31454 - protein, 129 aa, Muscodor strobelii
  misc_feature: SGI Peptide ID NO. 570829
  misc_feature (16)..(129): NCBI GI: 226282594 Blast Desc: PAAG_01081 [Paracoccidioides brasiliensis Pb01]
  misc_feature (17)..(129): NCBI GI: 226292240 Blast Desc: PADG_03744 [Paracoccidioides brasiliensis Pb18]
  misc_feature (17)..(129): NCBI GI: 225681061 Blast Desc: [Paracoccidioides brasiliensis Pb03]
  misc_feature (1)..(129): NCBI GI: 171693607 Blast Desc: protein product [Podospora anserina] gi|170946752|emb|CAP73556.1| protein product [Podospora anserina]
MRTSVLSIPFFMAVIAVKAQSACFSGGQPWGDRSAAMQFANDDCTTVFNNIAWDQTQTQFQTCHNLDASTRVDFTVFYAEGPTPGSFDVSNCQFGLESPISDCSFGGNFIQVGPTDGWQYTADPNAGQC

SEQ ID NO: 31455 - DNA, 2583 bp, Muscodor strobelii
  misc_feature: SGI cDNA ID NO. 570830
  misc_feature: Encodes the peptide sequence at SEQ ID NO 31456
atggctccgtcaaagcagagcatgttccgctcggcggacatgagcatggtgcagctatatatatcgaacgagattgggagagaatgtgttaccgcgctgggagagctggggcttgtccagtttcgtgacctcaacagcgaggtcagcgcctttcaacgcaccttcacccaggagatccgccgtctagataatgtcgaacgtcagcttcgatacttccacgcgcagatggaaaaggccaacatcccgactcgcaagctcgacctcgacgtcgagaccctcgccgcaccctcgacctcggagatcgacgagctctcggagcgcagccagagcctcgaacaacgcatcgcacaacttaacgacagctacgagacgttgaagaagcgcgaggtcgagctgaccgagtggcgctgggtgctgcgcgaggccggcggcttcttcgaccgcgcccacggcaacgtcgacgagatccgcgcctccaccgacgacgacgacgcccccttgctgcaggacgtcgagcagcacaaccaagcccaagacgtcgaccgctccttctccggcatgaacattggcttcgtcgccggcgtcatcaaccgcgagcgcgttgccgccttcgagcgcattctctggcgcaccctgcgcggtaacctgtacatgaaccagtccgagatccccgagccgctcatcgatccgaccaacaacgagcctatccgcaagaacgtcttcgtcatcttcgcccacggcaaggagattctcgccaagatccgcaagatatccgagtctatgggagccgagatctacagtgtcgacgagaacaccgatctgcgccgcgaccagatgcacgaggtcaacgcccgcctcaacgacgtccagaatgtcctgcagaacacccagaacaccctcgaggctgagctgactcagatcggccagtccgtggcggcctggatgatcttggtcaccaaggagaaggccacctaccagacgctcaatctcttctcgttcgaccgccagcgacgcactctcatcgccgaggcctggtgcccgaccaacgatctcccccgcatccgctccaccctccaagatgtcaccaaccgcgcaggcttgtctgtcccctccattatcaacgagatccggaccagcaagacaccgcctacatatctcaagacgaacaagttcaccgaagctttccaaactattgtcaacgcttacggaaccgctacttatcaggaagttaaccctgccctccccgccatcgtcaccttcccttttctcttcgccgtcatgttcggtgatttcggacatgctatcatcatgcttctcgccgccctcgccatgatatactgggagcggtccttgaagaaggttacctttgagcttttcgccatgatcttctacggtcgttatattgccttagtcatggctgtcttctctatcttcactggtctcatctacaacgatgtgttttcgaagtcccttactctattcgatagtgcatgggagtggaacgtcccagagggctggcaagagggtcaggccctcactggcgagctcaagggcgactaccgatatccattcggcctcgactggatgtggcatggcaccgagaacaatctcctgttcaccaacagctacaagatgaagatgtccattatcttgggctgggcccacatgacctactcgcttatcctctcctggttcaacgcaagacacttcaagaagcccatcgatatctggggcaactttgtgcctggcatgatctttttccagtccattttcggctacctagttgtctgcgttatctacaaatggtccgtaaattggtacgctagaggcgactcgcctcctggactgttgaacatgttgatctacatgttcctacagcctggtactatcgacgagcagttgtatgctggccaggccggcgtccagaagttcttacttgcttttgcattcatccaggtcccgatccttctcttcctcaagccattctatctgcgttgggagcacaacaaggctcgcgctaagggctatcgcggcataggtgaaaactcgagagtctcagcgcttgacgacgacgacgagggacatggtgcaggcaacgggaacggacgctatagtatggacaccgacgatggcgagggtgtcgctatgatcgcacaaagcggagacgacgaagagcacgaggagttcgaattcagcgaagtcatgatccaccagatcattcacaccatcgaattctgtcttaactgtgtttcccataccgcctcatatctacgtctgtgggccttgtcattggctcaccaacagctcagtactgtgctctgggacatgacacttggtccgtctattggtaaagagggcgtccttggtgtctttatgctcgtggttgccttctggctctggtttgtgcttacatgcgctattcttattgccatggaaggatgtagtgccatgttgcactctctccgtctccaatgggtcgaagcgcaatccaagtatgccgaatttgccggtcatatgtttacccccttttcctttgtcaccatgttagaagaagacgaagggttagcagacttcagaggataa

SEQ ID NO: 31456 - protein, 860 aa, Muscodor strobelii
  misc_feature: SGI Peptide ID NO. 570830
  misc_feature (30)..(846): Pfam Id: PF01496 Pfam Desc: V-type ATPase 116kDa subunit family
  misc_feature (1)..(845): NCBI GI: 261356739 Blast Desc: vacuolar ATP synthase 98 kDa subunit [Verticillium albo-atrum VaMs.102]
  misc_feature (1)..(845): NCBI GI: 116200045 Blast Desc: vacuolar ATP synthase 98 kDa subunit [Chaetomium globosum CBS 148.51] gi|88179457|gb|EAQ86925.1| vacuolar ATP synthase 98 kDa subunit [Chaetomium globosum CBS 148.51]
  misc_feature (1)..(860): NCBI GI: 85077752 Blast Desc: NCU03463 [Neurospora crassa OR74A] gi|3929395|sp|Q01290.1|VPH1_NEUCR RecName: Full=V-type proton ATPase subunit a; Short=V-ATPase a subunit; AltName: proton a; a
  misc_feature (1)..(860): NCBI GI: 39943872 Blast Desc: MGG_03947 [Magnaporthe grisea 70-15] gi|145014656|gb|EDJ99224.1| MGG_03947 [Magnaporthe grisea 70-15]
  misc_feature (1)..(860): NCBI GI: 46107870 Blast Desc: FG00818.1 [Gibberella zeae PH-1]
  misc_feature (1)..(857): NCBI GI: 156040359 Blast Desc: SS1G_12196 [Sclerotinia sclerotiorum 1980] gi|154696252|gb|EDN95990.1| SS1G_12196 [Sclerotinia sclerotiorum 1980]
  misc_feature (1)..(852): NCBI GI: 225682644 Blast Desc: vacuolar ATP synthase 98 kDa subunit [Paracoccidioides brasiliensis Pb03]
  misc_feature (1)..(852): NCBI GI: 169771437 Blast Desc: [Aspergillus oryzae RIB40] gi|238486004|ref|XP_002374240.1| vacuolar ATPase 98 kDa subunit, [Aspergillus flavus NRRL3357] gi|83768047|dbj|BAE58186.1| protein
  misc_feature (1)..(852): NCBI GI: 242769404 Blast Desc: vacuolar ATPase 98 kDa subunit, [Talaromyces stipitatus ATCC 10500] gi|218724957|gb|EED24374.1| vacuolar ATPase 98 kDa subunit, [Talaromyces stipitatus ATCC 10500]
  misc_feature (1)..(847): NCBI GI: 171689950 Blast Desc: protein product [Podospora anserina] gi|170944937|emb|CAP71048.1| protein product [Podospora anserina]
MAPSKQSMFRSADMSMVQLYISNEIGRECVTALGELGLVQFRDLNSEVSAFQRTFTQEIRRLDNVERQLRYFHAQMEKANIPTRKLDLDVETLAAPSTSEIDELSERSQSLEQRIAQLNDSYETLKKREVELTEWRWVLREAGGFFDRAHGNVDEIRASTDDDDAPLLQDVEQHNQAQDVDRSFSGMNIGFVAGVINRERVAAFERILWRTLRGNLYMNQSEIPEPLIDPTNNEPIRKNVFVIFAHGKEILAKIRKISESMGAEIYSVDENTDLRRDQMHEVNARLNDVQNVLQNTQNTLEAELTQIGQSVAAWMILVTKEKATYQTLNLFSFDRQRRTLIAEAWCPTNDLPRIRSTLQDVTNRAGLSVPSIINEIRTSKTPPTYLKTNKFTEAFQTIVNAYGTATYQEVNPALPAIVTFPFLFAVMFGDFGHAIIMLLAALAMIYWERSLKKVTFELFAMIFYGRYIALVMAVFSIFTGLIYNDVFSKSLTLFDSAWEWNVPEGWQEGQALTGELKGDYRYPFGLDWMWHGTENNLLFTNSYKMKMSIILGWAHMTYSLILSWFNARHFKKPIDIWGNFVPGMIFFQSIFGYLVVCVIYKWSVNWYARGDSPPGLLNMLIYMFLQPGTIDEQLYAGQAGVQKFLLAFAFIQVPILLFLKPFYLRWEHNKARAKGYRGIGENSRVSALDDDDEGHGAGNGNGRYSMDTDDGEGVAMIAQSGDDEEHEEFEFSEVMIHQIIHTIEFCLNCVSHTASYLRLWALSLAHQQLSTVLWDMTLGPSIGKEGVLGVFMLVVAFWLWFVLTCAILIAMEGCSAMLHSLRLQWVEAQSKYAEFAGHMFTPFSFVTMLEEDEGLADFRG

SEQ ID NO: 31457 - DNA, 2915 bp, Muscodor strobelii
  misc_feature: SGI EST ID NO. CUFF.74527.0
  misc_feature: Variant of the nucleotide sequence at SEQ ID NO 31455
cgggactggagctctcctcctgacatcgaacttatcaccaccacccatcaccatcttgctttgataccggagcggccaccgtcacgatggctccgtcaaagcagagcatgttccgctcggcggacatgagcatggtgcagctatatatatcgaacgagattgggagagaatgtgttaccgcgctgggagagctggggcttgtccagtttcgtgacctcaacagcgaggtcagcgcctttcaacgcaccttcacccaggagatccgccgtctagataatgtcgaacgtcagcttcgatacttccacgcgcagatggaaaaggccaacatcccgactcgcaagctcgacctcgacgtcgagaccctcgccgcaccctcgacctcggagatcgacgagctctcggagcgcagccagagcctcgaacaacgcatcgcacaacttaacgacagctacgagacgttgaagaagcgcgaggtcgagctgaccgagtggcgctgggtgctgcgcgaggccggcggcttcttcgaccgcgcccacggcaacgtcgacgagatccgcgcctccaccgacgacgacgacgcccccttgctgcaggacgtcgagcagcacaaccaagcccaagacgtcgaccgctccttctccggcatgaacattggcttcgtcgccggcgtcatcaaccgcgagcgcgttgccgccttcgagcgcattctctggcgcaccctgcgcggtaacctgtacatgaaccagtccgagatccccgagccgctcatcgatccgaccaacaacgagcctatccgcaagaacgtcttcgtcatcttcgcccacggcaaggagattctcgccaagatccgcaagatatccgagtctatgggagccgagatctacagtgtcgacgagaacaccgatctgcgccgcgaccagatgcacgaggtcaacgcccgcctcaacgacgtccagaatgtcctgcagaacacccagaacaccctcgaggctgagctgactcagatcggccagtccgtggcggcctggatgatcttggtcaccaaggagaaggccacctaccagacgctcaatctcttctcgttcgaccgccagcgacgcactctcatcgccgaggcctggtgcccgaccaacgatctcccccgcatccgctccaccctccaagatgtcaccaaccgcgcaggcttgtctgtcccctccattatcaacgagatccggaccagcaagacaccgcctacatatctcaagacgaacaagttcaccgaagctttccaaactattgtcaacgcttacggaaccgctacttatcaggaagttaaccctgccctccccgccatcgtcaccttcccttttctcttcgccgtcatgttcggtgatttcggacatgctatcatcatgcttctcgccgccctcgccatgatatactgggagcggtccttgaagaaggttacctttgagcttttcgccatgatcttctacggtcgttatattgccttagtcatggctgtcttctctatcttcactggtctcatctacaacgatgtgttttcgaagtcccttactctattcgatagtgcatgggagtggaacgtcccagagggctggcaagagggtcaggccctcactggcgagctcaagggcgactaccgatatccattcggcctcgactggatgtggcatggcaccgagaacaatctcctgttcaccaacagctacaagatgaagatgtccattatcttgggctgggcccacatgacctactcgcttatcctctcctggttcaacgcaagacacttcaagaagcccatcgatatctggggcaactttgtgcctggcatgatctttttccagtccattttcggctacctagttgtctgcgttatctacaaatggtccgtaaattggtacgctagaggcgactcgcctcctggactgttgaacatgttgatctacatgttcctacagcctggtactatcgacgagcagttgtatgctggccaggccggcgtccagaagttcttacttgcttttgcattcatccaggtcccgatccttctcttcctcaagccattctatctgcgttgggagcacaacaaggctcgcgctaagggctatcgcggcataggtgaaaactcgagagtctcagcgcttgacgacgacgacgagggacatggtgcaggcaacgggaacggacgctatagtatggacaccgacgatggcgagggtgtcgctatgatcgcacaaagcggagacgacgaagagcacgaggagttcgaattcagcgaagtcatgatccaccagatcattcacaccatcgaattctgtcttaactgtgtttcccataccgcctcatatctacgtctgtgggccttgtcattggctcaccaacagctcagtactgtgctctgggacatgacacttggtccgtctattggtaaagagggcgtccttggtgtctttatgctcgtggttgccttctggctctggtttgtgcttacatgcgctattcttattgccatggaaggatgtagtgccatgttgcactctctccgtctccaatgggtcgaagcgcaatccaagtatgccgaatttgccggtcatatgtttacccccttttcctttgtcaccatgttagaagaagacgaagggttagcagacttcagaggataatgttattgcatcgttattgggggcgtgtgtgtacgactacacctgtattttgtgtcgcattacatagaactgcatgacagtgctacaatattgtagtactagacctttaccttccctgtcgctgttgctattgcctttgttgaagtgggtgaaaatgattatgtgccttcctagttgttgctggaggtcggaatctggccaggagcaaggagccgttgcgccttctcgcaacgacgatgacccaag

SEQ ID NO: 31458 - DNA, 231 bp, Muscodor strobelii
  misc_feature: SGI cDNA ID NO. 570831
  misc_feature: Encodes the peptide sequence at SEQ ID NO 31459
atgctgcactctccatctatgttgtactccgacaccgacggcgttggcgacggtgatggctttggtcctggtcttggtgccggattcttgaacggctatcttcgaacccatagggcacgggaaattccaccgtcgtgtatggatagcgcgagctatgctgttgatcgccagctgaggaacgcctctgctctctcattgaatatggcgtccacggttctaggtcatcgctaa

SEQ ID NO: 31459 - protein, 76 aa, Muscodor strobelii
  misc_feature: SGI Peptide ID NO. 570831
MLHSPSMLYSDTDGVGDGDGFGPGLGAGFLNGYLRTHRAREIPPSCMDSASYAVDRQLRNASALSLNMASTVLGHR

SEQ ID NO: 31460 - DNA, 1302 bp, Muscodor strobelii
  misc_feature: SGI cDNA ID NO. 570832
  misc_feature: Encodes the peptide sequence at SEQ ID NO 31461
atggtactcgcatcgaattgtccgtccccaccgccgatggccgtgaactcagcgtctggagatggtgccaaaattgctctgagcaaccctcttggggaagtcaaatcacttgcagagctagaacgcgaagcgcgtgcaaagatagaagctaacaatccagctgcactaaaagctgctggagcacaagaagaagagacaaagattaaagagaatattgagatgatgaaacgaatgatgatttcgctcgttgaaaaggagactaggagggaagaggcagaagcagcggccgctgccgcggccgaggctgcagccgcaaaagcaaaggattctcttcgcttcaaggatgcgctcggacggaggtttagctttccctttcatatatgtcagacttggcagggcatggaagatctaatcaaacaagcatttttacatgtcgatgtaataggaccgcatgtaatggccgggcattacaacctcgtcggacctaagggagaaatcattctcccacaagtatgggaacaagtgatagagccaaattgggcagtgaccatggaaatgtggcctatggatcagaaaccgcagccagagccaaggagggaccagagaccaccgctggacccaagatcacagccccaacgaccatcttcacagcagtggggaggaggaaatgcacaagctcaacgtcaatcacctcccagcctctccgatccaacagagtccagaaatggcggccgagataatcacgcaggtccaatctccggtgaccgagccggtcctgcaagaccccctctccataccgtgcttccagatctctaccctccaatttggagggaggcttatccgacggcagaggcagattgctccaatgcacgacaggctccggttgctcacgaccaaagtagcagaagtcctatcgagcgatttcagaccttcgatcctcccccgtcttattatcaagccgaaggggtcccatttacaccctcgaagttcataatgctggataaattcgatccgcactggcgggagaaatacagcgagtggatagcaagatctggatggacggacgatttcatccgacagaaccagtctcagatcatcgacctcttgaatatgttgaacgcaaaagatgttagcagtagtgaaaatgcatcagagggcatgaacgacgaccgagtttcccaagcgcgccgcacgaggaaaatcttcaggcgccgcgaaacatcgtctaggtataaaccgactcctagacggaatctggatgtaaatggatggatagatggatgggaaacagaggaagattga

SEQ ID NO: 31461 - protein, 433 aa, Muscodor strobelii
  misc_feature: SGI Peptide ID NO. 570832
  misc_feature (111)..(204): NCBI GI: 116206700 Blast Desc: CHGG_02643 [Chaetomium globosum CBS 148.51] gi|88183240|gb|EAQ90708.1| CHGG_02643 [Chaetomium globosum CBS 148.51]
  misc_feature (108)..(207): NCBI GI: 164425313 Blast Desc: NCU04650 [Neurospora crassa OR74A] gi|157070878|gb|EAA29957.2| [Neurospora crassa OR74A]
  misc_feature (108)..(204): NCBI GI: 21622317 Blast Desc: related to kinetoplast-associated protein KAP [Neurospora crassa]
  misc_feature (39)..(208): NCBI GI: 154291805 Blast Desc: BC1G_14979 [Botryotinia fuckeliana B05.10] gi|150846587|gb|EDN21780.1| BC1G_14979 [Botryotinia fuckeliana B05.10]
  misc_feature (93)..(198): NCBI GI: 46126105 Blast Desc: FG07430.1 [Gibberella zeae PH-1]
  misc_feature (93)..(207): NCBI GI: 171692263 Blast Desc: protein product [Podospora anserina] gi|170946080|emb|CAP72881.1| protein product [Podospora anserina]
  misc_feature (115)..(197): NCBI GI: 39972355 Blast Desc: MGG_07479 [Magnaporthe grisea 70-15] gi|145016667|gb|EDK01097.1| MGG_07479 [Magnaporthe grisea 70-15]
  misc_feature (97)..(210): NCBI GI: 256731274 Blast Desc: [Nectria haematococca mpVI 77-13-4]
  misc_feature (108)..(194): NCBI GI: 119482520 Blast Desc: NFIA_024620 [Neosartorya fischeri NRRL 181] gi|119409443|gb|EAW19391.1| NFIA_024620 [Neosartorya fischeri NRRL 181]
  misc_feature (108)..(194): NCBI GI: 70987456 Blast Desc: conserved [Aspergillus fumigatus Af293] gi|66846771|gb|EAL87103.1| conserved [Aspergillus fumigatus Af293]
MVLASNCPSPPPMAVNSASGDGAKIALSNPLGEVKSLAELEREARAKIEANNPAALKAAGAQEEETKIKENIEMMKRMMISLVEKETRREEAEAAAAAAAEAAAAKAKDSLRFKDALGRRFSFPFHICQTWQGMEDLIKQAFLHVDVIGPHVMAGHYNLVGPKGEIILPQVWEQVIEPNWAVTMEMWPMDQKPQPEPRRDQRPPLDPRSQPQRPSSQQWGGGNAQAQRQSPPSLSDPTESRNGGRDNHAGPISGDRAGPARPPLHTVLPDLYPPIWREAYPTAEADCSNARQAPVAHDQSSRSPIERFQTFDPPPSYYQAEGVPFTPSKFIMLDKFDPHWREKYSEWIARSGWTDDFIRQNQSQIIDLLNMLNAKDVSSSENASEGMNDDRVSQARRTRKIFRRRETSSRYKPTPRRNLDVNGWIDGWETEED

SEQ ID NO: 31462 - DNA, 1197 bp, Muscodor strobelii
  misc_feature: SGI EST ID NO. CUFF.74484.0
  misc_feature: Variant of the nucleotide sequence at SEQ ID NO 31460
tttccctttcatatatgtcagacttggcagggcatggaagatctaatcaaacaagcatttttacatgtcgatgtaataggaccgcatgtaatggccgggcattacaacctcgtcggacctaagggagaaatcattctcccacaagtatgggaacaagtgatagagccaaattgggcagtgaccatggaaatgtggcctatggatcagaaaccgcagccagagccaaggagggaccagagaccaccgctggacccaagatcacagccccaacgaccatcttcacagcagtggggaggaggaaatgcacaagctcaacgtcaatcacctcccagcctctccgatccaacagagtccagaaatggcggccgagataatcacgcaggtccaatctccggtgaccgagccggtcctgcaagaccccctctccataccgtgcttccagatctctaccctccaatttggagggaggcttatccgacggcagaggcagattgctccaatgcacgacaggctccggttgctcacgaccaaagtagcagaagtcctatcgagcgatttcagaccttcgatcctcccccgtcttattatcaagccgaaggggtcccatttacaccctcgaagttcataatgctggataaattcgatccgcactggcgggagaaatacagcgagtggatagcaagatctggatggacggacgatttcatccgacagaaccagtctcagatcatcgacctcttgaatatgttgaacgcaaaagatgttagcagtagtgaaaatgcatcagagggcatgaacgacgaccgagtttcccaagcgcgccgcacgaggaaaatcttcaggcgccgcgaaacatcgtctaggtataaaccgactcctagacggaatctggatgtaaatggatggatagatggatgggaaacagaggaagattgaatgggcggattatgattgacagtgtgtaacagatccattatcatcttcacacggcttcagatgttcagcaaccccctatgataaacatgactgaaagctttttcaatcttcgttagtcgatactttcaaggtacttgaccttcaccgagacacacatataccatcctatgacgtgtcgagtccggcattgtaaatctcctgagtagtgatgagaagattgctgaggtagctagtcaagctagttgatacagtttttttcca

SEQ ID NO: 31463 - DNA, 2361 bp, Muscodor strobelii
  misc_feature: SGI cDNA ID NO. 570833
  misc_feature: Encodes the peptide sequence at SEQ ID NO 31464
atggaggatgtagatttagttacccgagagactcctcctcattcagaagtgtcgacccccgtggtcaagttcccagtgagaacagacttggagaacaaagcacacaaggcagtcgcaggagtacactcgcagtctccagcagatgtgatcaaatctgtctttgacatgtcacatgtcaaaccggctcccgcgacacctcgccctgctctcatgcctaaggtaaaagacatcaattttaatgcgaccaaacgggtcttcgcaacgcccgttccatccaatactccaaggattctgccgacgtacaaatcagatatcaagacttcaagtttgcggaagccgaaatttacggagtacaggtctaaaattgaggattccgaatcagacttcgattcgaaatccaagcgcgactccgactcggagtcagattctggcgtaacaaatgtggacgaagttaccactcggtttcgcaaagtgaacttagtccccaaagatggaaaggctgacatcactctttccaatcaagtagatgcatccgttccatcacgcaccgacctacctataggtccggccacttcaactcgaggtaccgcggagaatatagaaaacggtcgagacggagtgtatggaagccttacaccttcaaattggatgagacaaagattgcaagagcttgctccatttcgaaatggcactcagggaaggctgaatggattccatggggacgcccttgagaacacgaaggacattatcactgctcataacgacgaggctcaagtcgacgatggaggtgacgaatctgaagtcgagtccgttgacgacgatcctcttcgagataagcatctcagctggatgaagcagtctcttcctaaacaggaactcagcgagctcgaatcatcacccttgtttacgcgccctgttctacgtcacgctttagaaatacaccagaaagcggatgacaaaggaacggtgggaaagccattctctcagtatggtctttttgcagctagcatcgacgctgggatggccgaccctcgattgttctataatgtcacggcaccgtcaagtgctttcatatgtggtagccagggctctggaaagagttataccttatcaacaatgctggaaacttcactcatcaacaacagtgatattggagacctaccacgaccactctgtggccttctcttccactatgacaccttcatatcagatgtcagcgcgacgccatgtgaagcagcctatatttcatcgcatagtggtgtcaaagtcagagtactgtgtgcacctaccaatatcacgaccatgaagagagtttatggaagcctgaaaaatgtccaagtcgaagagttgcgactcggtgcgggttatctgaacacgaagcgcatgcttgatctaatggcggtgggaggacgtactatgccgctgtacatgtcggtcgtgcagcgtgtgctccgagaacttcgtatggcacagcagcacggcaaagccgcgttcaattatcgtgaattccgcacgaaaatattgaatgaagatctaaaacccgaccaacgtcttcctcttctccagcgcctcgatactttggaaagcttcatggcttcggttgatacgctgcttcctacaccacatgtcatgtcaaaacttacgggcacaagatggaaaccaaaggtagccgaattgactattgttgatctttcatgtccgtgcgtcaccgccgagatggcatgctcactctttaatatctgtctttctatatttttggagcaagatttgtccattggtcgcctggttgctcttgacgaggcccataagtgtcaagcgccttttcgaaaccaaatagccggcttttacatgggcgagtcggcagagtgtgtgatcctgaccaattccctgttatctacaatccggctccagagacacattggaacaagaatcatcatctcgacccaggagccgacaatctcacccaaactgctggatctttgtagtattacgatcgtacatcgcttcacgtcccctgactggctcgccatgctcaaaggccatctagccggcatttccacagcctctaagcttgcgcgaaaactcaagaagaaattgggcacggacgatactgtcaatagtggcctcaagggtgttgaagtacagtctgatccaacattagagctgttctcacagattgttgagctcggacgaggcgaagctctcgtattcgcgcccggtgcaatcgtcggcctgaagaagaacaagagcaccgaaggcgcagtaacagtaattccaaagcgactaggacatgatgttctccgcgttcagatacgaccgagattcaccaatgatggaggtgaaagcattatggcgacctga

SEQ ID NO: 31464 - protein, 786 aa, Muscodor strobelii
  misc_feature: SGI Peptide ID NO. 570833
  misc_feature (280)..(785): NCBI GI: 116193859 Blast Desc: CHGG_06647 [Chaetomium globosum CBS 148.51] gi|88182560|gb|EAQ90028.1| CHGG_06647 [Chaetomium globosum CBS 148.51]
  misc_feature (250)..(747): NCBI GI: 85118866 Blast Desc: NCU01896 [Neurospora crassa OR74A] gi|28927337|gb|EAA36291.1| conserved [Neurospora crassa OR74A]
  misc_feature (266)..(785): NCBI GI: 149210351 Blast Desc: MGCH7_ch7g653 [Magnaporthe grisea 70-15] gi|86196608|gb|EAQ71246.1| MGCH7_ch7g653 [Magnaporthe grisea 70-15]
  misc_feature (290)..(786): NCBI GI: 156045245 Blast Desc: SS1G_09811 [Sclerotinia sclerotiorum 1980] gi|154694206|gb|EDN93944.1| SS1G_09811 [Sclerotinia sclerotiorum 1980]
  misc_feature (266)..(785): NCBI GI: 145609898 Blast Desc: MGG_02890 [Magnaporthe grisea 70-15] gi|145017286|gb|EDK01649.1| MGG_02890 [Magnaporthe grisea 70-15]
  misc_feature (268)..(785): NCBI GI: 261354696 Blast Desc: conserved [Verticillium albo-atrum VaMs.102]
  misc_feature (280)..(785): NCBI GI: 46138263 Blast Desc: FG10646.1 [Gibberella zeae PH-1]
  misc_feature (328)..(785): NCBI GI: 212545466 Blast Desc: conserved [Penicillium marneffei ATCC 18224] gi|210065856|gb|EEA19950.1| conserved [Penicillium marneffei ATCC 18224]
  misc_feature (267)..(785): NCBI GI: 258572258 Blast Desc: conserved [Uncinocarpus reesii 1704] gi|237905161|gb|EEP79562.1| conserved [Uncinocarpus reesii 1704]
  misc_feature (310)..(785): NCBI GI: 145246780 Blast Desc: An12g05740 [Aspergillus niger] gi|134080360|emb|CAK46282.1| protein product [Aspergillus niger]
MEDVDLVTRETPPHSEVSTPVVKFPVRTDLENKAHKAVAGVHSQSPADVIKSVFDMSHVKPAPATPRPALMPKVKDINFNATKRVFATPVPSNTPRILPTYKSDIKTSSLRKPKFTEYRSKIEDSESDFDSKSKRDSDSESDSGVTNVDEVTTRFRKVNLVPKDGKADITLSNQVDASVPSRTDLPIGPATSTRGTAENIENGRDGVYGSLTPSNWMRQRLQELAPFRNGTQGRLNGFHGDALENTKDIITAHNDEAQVDDGGDESEVESVDDDPLRDKHLSWMKQSLPKQELSELESSPLFTRPVLRHALEIHQKADDKGTVGKPFSQYGLFAASIDAGMADPRLFYNVTAPSSAFICGSQGSGKSYTLSTMLETSLINNSDIGDLPRPLCGLLFHYDTFISDVSATPCEAAYISSHSGVKVRVLCAPTNITTMKRVYGSLKNVQVEELRLGAGYLNTKRMLDLMAVGGRTMPLYMSVVQRVLRELRMAQQHGKAAFNYREFRTKILNEDLKPDQRLPLLQRLDTLESFMASVDTLLPTPHVMSKLTGTRWKPKVAELTIVDLSCPCVTAEMACSLFNICLSIFLEQDLSIGRLVALDEAHKCQAPFRNQIAGFYMGESAECVILTNSLLSTIRLQRHIGTRIIISTQEPTISPKLLDLCSITIVHRFTSPDWLAMLKGHLAGISTASKLARKLKKKLGTDDTVNSGLKGVEVQSDPTLELFSQIVELGRGEALVFAPGAIVGLKKNKSTEGAVTVIPKRLGHDVLRVQIRPRFTNDGGESIMAT

SEQ ID NO: 31465 - DNA, 444 bp, Muscodor strobelii
  misc_feature: SGI cDNA ID NO. 570834
  misc_feature: Encodes the peptide sequence at SEQ ID NO 31466
atgaacactctctttacagtacaaagcaagattgcgtctcgctccaatgacaacgaggccgaaactgatgttgaagatgaggcgcctactgttggcttcgtctcggaaggcgatggtacgaactcaggcgctgcaggtgatagtgccttctttgatgtcgtcggcgttggtggtgctttatcgggcttgaagagcgatgcatatagttctgaccaggtagtgtcgttcggcgtcgccggcttaaccctggaagacgatgatacaaattcgggtgctaaaggcgatagtgcccttgttgatggcgtaggtgttggcacttggaagatcgacgaacctgggcttgcccagacactggatcttgtctttgctgacctcgccggggatattccagcctccaaggaaggtggtgtgattagactgggcgaaggtggagaaaaggtttga

SEQ ID NO: 31466 - protein, 147 aa, Muscodor strobelii
  misc_feature: SGI Peptide ID NO. 570834
MNTLFTVQSKIASRSNDNEAETDVEDEAPTVGFVSEGDGTNSGAAGDSAFFDVVGVGGALSGLKSDAYSSDQVVSFGVAGLTLEDDDTNSGAKGDSALVDGVGVGTWKIDEPGLAQTLDLVFADLAGDIPASKEGGVIRLGEGGEKV

SEQ ID NO: 31467 - DNA, 888 bp, Muscodor strobelii
  misc_feature: SGI cDNA ID NO. 570835
  misc_feature: Encodes the peptide sequence at SEQ ID NO 31468
atgtcgcacccaagaatagaagaggtgtccgactcggacgacgaagtctccgaccccagcgaaggcgacatcgacgacttcaccgagtccgacatcctacgcgccattccttctcgccccaagcccaacccatcagcagtcgcagcaccctccgcccaaccaccactcttcccaaaccaaccccaagcacagcaacagccacaaatctcccaagacgacataaaagactaccaatgtctgtaccccgtatacttcgacgccacccgctctcgcgcagaaggccgacgcgtcccgtcaaacctcgcggttaaaaatcccttagcccgggaaatagcaaacgcctgcgtagccctaagtctacaaccagtctacgaagcgcaccgcgcgcatccaaaagactggtcgaatccaggacgtgtcaagatccccttgaaaaagagcgtcgcgaggggccatccgataaaaagtaaacaccacctctacatcgtcgtcgcgaaatttctgcaggagaaccccaccacggagaattcggcgagcttgcggacgggtatacaaggcatgggattggcgagtatgggcggtagcagtgatgtgtatgcgaaggggaagccgtggccgaaaccggcggttcctaaggggtggaagatgggggagttgttgccggcttttagcgcggctatgacgggtggtggggttagtgagaatgcttttaaggatatgatgaaggagatgcagggtggtggcggtgggatgccgggtatggggggtatggatccgaatatgatgaatatgttggctaatatggggggtatgggtggtggtggtggtggtgcgagccccggaccgagtgaggggggtgggaagaaggggaagaaggggaagaaatga

SEQ ID NO: 31468 - protein, 295 aa, Muscodor strobelii
  misc_feature: SGI Peptide ID NO. 570835
  misc_feature (78)..(172): Pfam Id: PF01922 Pfam Desc: SRP19 protein
  misc_feature (1)..(256): NCBI GI: 46121549 Blast Desc: FG05153.1 [Gibberella zeae PH-1]
  misc_feature (1)..(256): NCBI GI: 256732967 Blast Desc: [Nectria haematococca mpVI 77-13-4]
  misc_feature (1)..(245): NCBI GI: 39943900 Blast Desc: MGG_03961 [Magnaporthe grisea 70-15] gi|145014673|gb|EDJ99241.1| MGG_03961 [Magnaporthe grisea 70-15]
  misc_feature (1)..(243): NCBI GI: 116200069 Blast Desc: CHGG_08190 [Chaetomium globosum CBS 148.51] gi|88179469|gb|EAQ86937.1| CHGG_08190 [Chaetomium globosum CBS 148.51]
  misc_feature (2)..(243): NCBI GI: 85075489 Blast Desc: NCU03485 [Neurospora crassa OR74A] gi|18376075|emb|CAD21103.1| related to signal recognition particle protein Sec65 [Neurospora crassa] conserved [Neurospora
  misc_feature (1)..(249): NCBI GI: 261356822 Blast Desc: signal recognition particle sec65 subunit [Verticillium albo-atrum VaMs.102]
  misc_feature (1)..(257): NCBI GI: 154322767 Blast Desc: signal recognition particle protein Sec65 [Botryotinia fuckeliana B05.10] gi|150848060|gb|EDN23253.1| signal recognition particle protein Sec65 [Botryotinia fuckeliana B05.10]
  misc_feature (1)..(257): NCBI GI: 156064741 Blast Desc: SS1G_00378 [Sclerotinia sclerotiorum 1980] gi|154691240|gb|EDN90978.1| SS1G_00378 [Sclerotinia sclerotiorum 1980]
  misc_feature (1)..(243): NCBI GI: 171689884 Blast Desc: protein product [Podospora anserina] gi|170944904|emb|CAP71015.1| protein product [Podospora anserina]
  misc_feature (3)..(250): NCBI GI: 169598428 Blast Desc: SNOG_02019 [Phaeosphaeria nodorum SN15] gi|160704391|gb|EAT90231.2| SNOG_02019 [Phaeosphaeria nodorum SN15]
MSHPRIEEVSDSDDEVSDPSEGDIDDFTESDILRAIPSRPKPNPSAVAAPSAQPPLFPNQPQAQQQPQISQDDIKDYQCLYPVYFDATRSRAEGRRVPSNLAVKNPLAREIANACVALSLQPVYEAHRAHPKDWSNPGRVKIPLKKSVARGHPIKSKHHLYIVVAKFLQENPTTENSASLRTGIQGMGLASMGGSSDVYAKGKPWPKPAVPKGWKMGELLPAFSAAMTGGGVSENAFKDMMKEMQGGGGGMPGMGGMDPNMMNMLANMGGMGGGGGGASPGPSEGGGKKGKKGKK

SEQ ID NO: 31469 - DNA, 1315 bp, Muscodor strobelii
  misc_feature: SGI EST ID NO. CUFF.74499.0
  misc_feature: Variant of the nucleotide sequence at SEQ ID NO 31467
cacgtccaaaattacaaccaccatcacactcacgttttacgtcatcttcttcaacaacacgcctatatctgctcagaccgtctacaccagacaggaggaacaatatcgaacagtcatatctaaaaggggcagagatcaacaccacaaagaagcacgcgactgagcaacaaccacaatgtcgcacccaagaatagaagaggtgtccgactcggacgacgaagtctccgaccccagcgaaggcgacatcgacgacttcaccgagtccgacatcctacgcgccattccttctcgccccaagcccaacccatcagcagtcgcagcaccctccgcccaaccaccactcttcccaaaccaaccccaagcacagcaacagccacaaatctcccaagacgacataaaagactaccaatgtctgtaccccgtatacttcgacgccacccgctctcgcgcagaaggccgacgcgtcccgtcaaacctcgcggttaaaaatcccttagcccgggaaatagcaaacgcctgcgtagccctaagtctacaaccagtctacgaagcgcaccgcgcgcatccaaaagactggtcgaatccaggacgtgtcaagatccccttgaaaaagagcgtcgcgaggggccatccgataaaaagtaaacaccacctctacatcgtcgtcgcgaaatttctgcaggagaaccccaccacggagaattcggcgagcttgcggacgggtatacaaggcatgggattggcgagtatgggcggtagcagtgatgtgtatgcgaaggggaagccgtggccgaaaccggcggttcctaaggggtggaagatgggggagttgttgccggcttttagcgcggctatgacgggtggtggggttagtgagaatgcttttaaggatatgatgaaggagatgcagggtggtggcggtgggatgccgggtatggggggtatggatccgaatatgatgaatatgttggctaatatggggggtatgggtggtggtggtggtggtgcgagccccggaccgagtgaggggggtgggaagaaggggaagaaggggaagaaatgatctcttttgctctatgggatatctactctatgggaaatagggaggtgggaatggtatagatctagccggggttggctgaaacgtaaagacatcaattagtgggagcgtagatcatgacgaatgaagcaagttaacggacattcgaaagagagcgattgtttttcaaaggatcgctaggctttacgactctactgattgaccgagatgtactcataatccgcctaagcccaagatgagtagctaacgggcttc

SEQ ID NO: 31470 - DNA, 4056 bp, Muscodor strobelii
  misc_feature: SGI cDNA ID NO. 570836
  misc_feature: Encodes the peptide sequence at SEQ ID NO 31471
atgccggacctcacagtcgggcagcacgtgcagctcacggacgggcgcaatgccgttgtgcgcttcgttggccagaccagctttgccgctggagactgggtcggcatcgagctcgaggatgagaccggcaagaacgacggcaccgtgagaggtgaacgctacttcgactgctcacccaacaagggcatgttcatccggtcccatgccgtcagcgctgttctcccacccccggctcagccatccaaaaccaccgcccccatacgccgaggatctcgagccagcactgtcgtacctgctgctggacgtccaaattctctcaatgacccgtccttgggtaaacgcatgagcttgaatgctcccagtccgagtccagtgccgaggcaatcccggccctctagtatagctgccagggttggtcccctcacgtctcctcactctcccaccaagtccccgacgaaacaacttgccactgccccttcgagtacggcgacctctagaaccggtacgccctcgaatgcccgaccctcaggagtcggcgtcaagcctcgtccttcgatcggggtgaggacatctatgggacccccggcactcccttccgccggcgcaagacgacaaacctcggtctctgcagcaccctcaagaacagttggtggagctggacgaccctcgggtgtaggtgttggttcaagagtatctacggctcctggtcagagactgaatcgccccctatctgggagagtgctctctggtggcgaatcgtctggcgaggaaacaaagcgcaggtcgggaatcagttctcccctcaagagcgacggagagcagacgaccagccccgtccgcacacgtaccaaggccctggagaaagctacaacaggtggtcgcccatcgatggcacccaagtccgcacccgtcgcaggtgctaccagttctggccgagcacccgtccccggagcttccacacgatcgaccgccagcaatgctgccagcagggaaaacgcggatctcaagacgaagttgcaagtcctggagcggaagagaatggaagatagagaaagactcaaagaaatggagcgcctccaagaacagcgtgacaaattcgaaagcatcaacaagaagatcgagggcaagttccaaagtacagtgcaggacaatgtcgctctacgaaagcagctgaaggaagccgaagacaaactcgagcaaatcgagtccctccaagccgagcacgactccatcatggagctggcgaccctggaccgtgagatggccgaggagaccgctgaagttctcaaagttgagctagaggctctaaaatcaaaggccgaagaacttgaactagaggttgaagttctgcgcgaggaaaatgcggaattttcgcaaggcatgtcatccgaggagagagccacgacaggatggctacagatggagaggaacaacgagcggctacgcgaagcccttatccgacttcgcgatatcacccaggagcaggatgaggaaaataaagcgcaaatcaagtcactacaaaaagatgtggaagactttgacgcgatcaaagagcagtatcaaatctccaaggaaaaactattggaatccgagctacgagccgaagacctaagacaacagcttgatgataatctgggagccgaagctatgattgagcagttgagttacgagaagctagcccagaacgaacagatccaagagttgagggctacagtcgaagatctcgaagctttgaaggagatcaacgatgaactagaagtgaaccacgtccagaatgagagagaaatgcaagaggagcttgatttcaaagatacactcataactgaaacggttcgtcgcgtagctgagaaggatgatactattggagatttggagtacacattatcacggttcagggagctcgttacgaacttgcaaactgatcttgaggatatgcgggcttcccacgctgtcaacgaagttgaatcagagcagctcaacagcaatgctcgactcatgatggacctaaaccaaaagcttcagatctcggcggccaagactcagatcaagacaattgatcttgaaatgcaacgcatggacgcgcaagaagcacaacaacacctcgaaattattcaactattcctcccagaaagcttcagtgccgaccgtgactccgtcaaggcagtgcttcgcttctctcggctgtcattcaaggctaacctcctgcatggcttcatcaaggatcgcgttaatggtcagctacagagcggacatgaggacgatgtcttctccggttgtgacgttttagataagctcacttgggtcaggtccatgtgtgatcgcttcgtcaatgctatcagtcactgctctttagaagaatttgctaaataccaggccgcactattcgagctcgaacctgtagagagggcgctgaatggctggatcgatggtctcaaacgggacgagcttaaggagaaacagtgtgccgacgagctacaacgtaccattgctctcatgagccatctgggcgaagtgcatatctctcaaggcctagaagcatttgcagacgagattcaaatgaaggccatgatggcgcagagtcatctggagtcggctgccattgcttttggtacgacgaaggagatggtccagcgtgctgtacccgccagtggcgacgaggatgagcttgcccagcacttcgttaaacgcgcagatactgtcataagccagacacgcagcgccaaggttattgtatccaaagcagtgcgatctcttgaagacttgagtgcgaggtcactagctctcacgcctgaaactgctgaggctttcgaacaatgtgtgactgccagtcaagagctaggagagatctctcgggtcattggtcttgagttgcacaaactattgactgaagaaggtcgtactgagccattcacctaccctgaggttcaaagcaaggtgcacggcatagtcatgactactttcgcttctgccgaatccgacttgttttcgacctacctctccaagattcgaaccttgacgacccaggttactgacctggccgctgtctgtgccgatctatcacaaacgcaagaattcgagcgcagcccagcaccgtggattctgcgtgctcaagaaatcaaggctctcaagactattcctgtcgatgcggaggaagaactccgtcaactcaaggagacgtacaatcagtctcgtcgcgaaatcgcgttgcgtgacgagaaccttagcaccgctactctacgcatcgaaactctagaggcacgtatgcgtgatgcaaacactaaggcctctcgtatctcggatcttgaagctcagatcgtccaagctcaagaccaggttgccagtctcaagaaggacatcgagcagcaagaccgcgaggccaagactctcgaagccgaccgcgacagatggaagaagattgccggcgacagccaaacttacggcgaccaggcttcctcggcaggcgccaaggctggtcaagagcgtgctgtggccactgcccgtgagatggatgccctcaacaaggacatcgctgatctccaggccgctgtacgttacttacgtgaagacaatcgacgcgctcgtatgacggagcagtccaaatacgactggcttgctgagccactgaagaagccaactcccctggccgaacaacgaaaggcactcgttaccgccgaaggcaaggatgtccttagtgagctcctaaacatggctgcatccgccaaggtctacgacttgaagacgcttcccgacgataagttggcctggcgacctgccaagagtacgccacagtatcacgccgcgaaacaagctgaggacttcgcggtctggaagagctggcgagactcggtcgtccagaagacacagatcatccttggacagcagcagagtaggagacacgatgtcgatcatgctcagatgaggaaacctgctgcgagactgcagatccgtctccccgacatgaatggaaaagccattcctggtagcggtggagaggtacagattgtgggatcgagggattgggaggcgctacagggaagacatgctggggctgtgtaa

SEQ ID NO: 31471 - protein, 1351 aa, Muscodor strobelii
  misc_feature: SGI Peptide ID NO. 570836
  misc_feature (6)..(71): Pfam Id: PF01302 Pfam Desc: CAP-Gly domain
  misc_feature (130)..(1208): NCBI GI: 145231813 Blast Desc: An02g02370 [Aspergillus niger] gi|134056284|emb|CAK37518.1| protein product [Aspergillus niger]
  misc_feature (138)..(1284): NCBI GI: 67540306 Blast Desc: AN6323.2 [Aspergillus nidulans FGSC A4] gi|40739517|gb|EAA58707.1| AN6323.2 [Aspergillus nidulans FGSC A4] gi|259479461|tpe|CBF69703.1| TPA: P150 dynactin NUDM nidulans
  misc_feature (138)..(1284): NCBI GI: 26000250 Blast Desc: p150 dynactin NUDM [Emericella nidulans]
  misc_feature (1)..(1348): NCBI GI: 256732521 Blast Desc: [Nectria haematococca mpVI 77-13-4]
  misc_feature (1)..(1350): NCBI GI: 171689886 Blast Desc: protein product [Podospora anserina] gi|170944905|emb|CAP71016.1| protein product [Podospora anserina]
  misc_feature (1)..(1348): NCBI GI: 46121547 Blast Desc: FG05152.1 [Gibberella zeae PH-1]
  misc_feature (4)..(1349): NCBI GI: 39943898 Blast Desc: MGG_03960 [Magnaporthe grisea 70-15] gi|145014672|gb|EDJ99240.1| MGG_03960 [Magnaporthe grisea 70-15]
  misc_feature (4)..(1351): NCBI GI: 164427433 Blast Desc: NCU03483 [Neurospora crassa OR74A] gi|166951800|sp|Q01397.3|DYNA_NEUCR RecName: Full=Dynactin, 150 kDa isoform; AltName: Full=150 kDa dynein-associated polypeptide;
  misc_feature (4)..(1351): NCBI GI: 18376073 Blast Desc: DYNACTIN (150 KDA DYNEIN-ASSOCIATED POLYPEPTIDE) ro-3 [Neurospora crassa]
  misc_feature (4)..(1351): NCBI GI: 1050297 Blast Desc: product p150Glued [Neurospora crassa]
MPDLTVGQHVQLTDGRNAVVRFVGQTSFAAGDWVGIELEDETGKNDGTVRGERYFDCSPNKGMFIRSHAVSAVLPPPAQPSKTTAPIRRGSRASTVVPAAGRPNSLNDPSLGKRMSLNAPSPSPVPRQSRPSSIAARVGPLTSPHSPTKSPTKQLATAPSSTATSRTGTPSNARPSGVGVKPRPSIGVRTSMGPPALPSAGARRQTSVSAAPSRTVGGAGRPSGVGVGSRVSTAPGQRLNRPLSGRVLSGGESSGEETKRRSGISSPLKSDGEQTTSPVRTRTKALEKATTGGRPSMAPKSAPVAGATSSGRAPVPGASTRSTASNAASRENADLKTKLQVLERKRMEDRERLKEMERLQEQRDKFESINKKIEGKFQSTVQDNVALRKQLKEAEDKLEQIESLQAEHDSIMELATLDREMAEETAEVLKVELEALKSKAEELELEVEVLREENAEFSQGMSSEERATTGWLQMERNNERLREALIRLRDITQEQDEENKAQIKSLQKDVEDFDAIKEQYQISKEKLLESELRAEDLRQQLDDNLGAEAMIEQLSYEKLAQNEQIQELRATVEDLEALKEINDELEVNHVQNEREMQEELDFKDTLITETVRRVAEKDDTIGDLEYTLSRFRELVTNLQTDLEDMRASHAVNEVESEQLNSNARLMMDLNQKLQISAAKTQIKTIDLEMQRMDAQEAQQHLEIIQLFLPESFSADRDSVKAVLRFSRLSFKANLLHGFIKDRVNGQLQSGHEDDVFSGCDVLDKLTWVRSMCDRFVNAISHCSLEEFAKYQAALFELEPVERALNGWIDGLKRDELKEKQCADELQRTIALMSHLGEVHISQGLEAFADEIQMKAMMAQSHLESAAIAFGTTKEMVQRAVPASGDEDELAQHFVKRADTVISQTRSAKVIVSKAVRSLEDLSARSLALTPETAEAFEQCVTASQELGEISRVIGLELHKLLTEEGRTEPFTYPEVQSKVHGIVMTTFASAESDLFSTYLSKIRTLTTQVTDLAAVCADLSQTQEFERSPAPWILRAQEIKALKTIPVDAEEELRQLKETYNQSRREIALRDENLSTATLRIETLEARMRDANTKASRISDLEAQIVQAQDQVASLKKDIEQQDREAKTLEADRDRWKKIAGDSQTYGDQASSAGAKAGQERAVATAREMDALNKDIADLQAAVRYLREDNRRARMTEQSKYDWLAEPLKKPTPLAEQRKALVTAEGKDVLSELLNMAASAKVYDLKTLPDDKLAWRPAKSTPQYHAAKQAEDFAVWKSWRDSVVQKTQIILGQQQSRRHDVDHAQMRKPAARLQIRLPDMNGKAIPGSGGEVQIVGSRDWEALQGRHAGAV

SEQ ID NO: 31472 - DNA, 4592 bp, Muscodor strobelii
  misc_feature: SGI EST ID NO. CUFF.74503.0
  misc_feature: Variant of the nucleotide sequence at SEQ ID NO 31470
ctgagcaaaagaacatcgaagtccagttgttggtcatactgtgtgtaaaacagcctgtacgtagtatttcgcacggtatatatgcaggtaccggcagcttaactccagtcatgtccgacagctacacatcgcgtaactgaataaccccagacgcgttcgggacaaagagacccaagctccatcgaaacaccaaaggccatcgtcattagctcggcccatgtgaaccatcccacgtgaatcgccatgtactaacaccagcgtatgcccgatttggtccaaagcaatgccggacctcacagtcgggcagcacgtgcagctcacggacgggcgcaatgccgttgtgcgcttcgttggccagaccagctttgccgctggagactgggtcggcatcgagctcgaggatgagaccggcaagaacgacggcaccgtgagaggtgaacgctacttcgactgctcacccaacaagggcatgttcatccggtcccatgccgtcagcgctgttctcccacccccggctcagccatccaaaaccaccgcccccatacgccgaggatctcgagccagcactgtcgtacctgctgctggacgtccaaattctctcaatgacccgtccttgggtaaacgcatgagcttgaatgctcccagtccgagtccagtgccgaggcaatcccggccctctagtatagctgccaggtctcccaccaagtccccgacgaaacaacttgccactgccccttcgagtacggcgacctctagaaccggtacgccctcgaatgcccgaccctcaggagtcggcgtcaagcctcgtccttcgatcggggtgaggacatctatgggacccccggcactcccttccgccggcgcaagacgacaaacctcggtctctgcagcaccctcaagaacagttggtggagctggacgaccctcgggtgtaggtgttggttcaagagtatctacggctcctggtcagagactgaatcgccccctatctgggagagtgctctctggtggcgaatcgtctggcgaggaaacaaagcgcaggtcgggaatcagttctcccctcaagagcgacggagagcagacgaccagccccgtccgcacacgtaccaaggccctggagaaagctacaacaggtggtcgcccatcgatggcacccaagtccgcacccgtcgcaggtgctaccagttctggccgagcacccgtccccggagcttccacacgatcgaccgccagcaatgctgccagcagggaaaacgcggatctcaagacgaagttgcaagtcctggagcggaagagaatggaagatagagaaagactcaaagaaatggagcgcctccaagaacagcgtgacaaattcgaaagcatcaacaagaagatcgagggcaagttccaaagtacagtgcaggacaatgtcgctctacgaaagcagctgaaggaagccgaagacaaactcgagcaaatcgagtccctccaagccgagcacgactccatcatggagctggcgaccctggaccgtgagatggccgaggagaccgctgaagttctcaaagttgagctagaggctctaaaatcaaaggccgaagaacttgaactagaggttgaagttctgcgcgaggaaaatgcggaattttcgcaaggcatgtcatccgaggagagagccacgacaggatggctacagatggagaggaacaacgagcggctacgcgaagcccttatccgacttcgcgatatcacccaggagcaggatgaggaaaataaagcgcaaatcaagtcactacaaaaagatgtggaagactttgacgcgatcaaagagcagtatcaaatctccaaggaaaaactattggaatccgagctacgagccgaagacctaagacaacagcttgatgataatctgggagccgaagctatgattgagcagttgagttacgagaagctagcccagaacgaacagatccaagagttgagggctacagtcgaagatctcgaagctttgaaggagatcaacgatgaactagaagtgaaccacgtccagaatgagagagaaatgcaagaggagcttgatttcaaagatacactcataactgaaacggttcgtcgcgtagctgagaaggatgatactattggagatttggagtacacattatcacggttcagggagctcgttacgaacttgcaaactgatcttgaggatatgcgggcttcccacgctgtcaacgaagttgaatcagagcagctcaacagcaatgctcgactcatgatggacctaaaccaaaagcttcagatctcggcggccaagactcagatcaagacaattgatcttgaaatgcaacgcatggacgcgcaagaagcacaacaacacctcgaaattattcaactattcctcccagaaagcttcagtgccgaccgtgactccgtcaaggcagtgcttcgcttctctcggctgtcattcaaggctaacctcctgcatggcttcatcaaggatcgcgttaatggtcagctacagagcggacatgaggacgatgtcttctccggttgtgacgttttagataagctcacttgggtcaggtccatgtgtgatcgcttcgtcaatgctatcagtcactgctctttagaagaatttgctaaataccaggccgcactattcgagctcgaacctgtagagagggcgctgaatggctggatcgatggtctcaaacgggacgagcttaaggagaaacagtgtgccgacgagctacaacgtaccattgctctcatgagccatctgggcgaagtgcatatctctcaaggcctagaagcatttgcagacgagattcaaatgaaggccatgatggcgcagagtcatctggagtcggctgccattgcttttggtacgacgaaggagatggtccagcgtgctgtacccgccagtggcgacgaggatgagcttgcccagcacttcgttaaacgcgcagatactgtcataagccagacacgcagcgccaaggttattgtatccaaagcagtgcgatctcttgaagacttgagtgcgaggtcactagctctcacgcctgaaactgctgaggctttcgaacaatgtgtgactgccagtcaagagctaggagagatctctcgggtcattggtcttgagttgcacaaactattgactgaagaaggtcgtactgagccattcacctaccctgaggttcaaagcaaggtgcacggcatagtcatgactactttcgcttctgccgaatccgacttgttttcgacctacctctccaagattcgaaccttgacgacccaggttactgacctggccgctgtctgtgccgatctatcacaaacgcaagaattcgagcgcagcccagcaccgtggattctgcgtgctcaagaaatcaaggctctcaagactattcctgtcgatgcggaggaagaactccgtcaactcaaggagacgtacaatcagtctcgtcgcgaaatcgcgttgcgtgacgagaaccttagcaccgctactctacgcatcgaaactctagaggcacgtatgcgtgatgcaaacactaaggcctctcgtatctcggatcttgaagctcagatcgtccaagctcaagaccaggttgccagtctcaagaaggacatcgagcagcaagaccgcgaggccaagactctcgaagccgaccgcgacagatggaagaagattgccggcgacagccaaacttacggcgaccaggcttcctcggcaggcgccaaggctggtcaagagcgtgctgtggccactgcccgtgagatggatgccctcaacaaggacatcgctgatctccaggccgctgtacgttacttacgtgaagacaatcgacgcgctcgtatgacggagcagtccaaatacgactggcttgctgagccactgaagaagccaactcccctggccgaacaacgaaaggcactcgttaccgccgaaggcaaggatgtccttagtgagctcctaaacatggctgcatccgccaaggtctacgacttgaagacgcttcccgacgataagttggcctggcgacctgccaagagtacgccacagtatcacgccgcgaaacaagctgaggacttcgcggtctggaagagctggcgagactcggtcgtccagaagacacagatcatccttggacagcagcagagtaggagacacgatgtcgatcatgctcagatgaggaaacctgctgcgagactgcagatccgtctccccgacatgaatggaaaagccattcctggtagcggtggagaggtacagattgtgggatcgagggattgggaggcgctacagggaagacatgctggggctgtgtaacgttgatgtcatggcatagtcgcgagttgatactttagtgacgcactggcttttagatacccttttcattgtatcttttttcgttaccgagcgtgttgaaataacataaattttcagaatgattgatcatatgactattggaagactgtcctgtatgtgaggtctcatctctatgtgcattcccaacacattgggtgctgttgtaaatgatcctatcaatctggattacgttcggtcatgcatttggtctcctactgatatcgtaccttaagcccgt

SEQ ID NO: 31473 - DNA, 1377 bp, Muscodor strobelii
  misc_feature: SGI cDNA ID NO. 570837
  misc_feature: Reduced expression when VOC is produced
  misc_feature: Encodes the peptide sequence at SEQ ID NO 31474
atggtgcagatcagcgaggtcaagggcaacaaccgggaccaccgcaccgccgcccacacacacatcagaggccttggcttgaagtctgatggcactgcagagaagcaggccggcggtttcgtcggccagcaacatgcacgagaggctgccggcgttgtggtcgacctgatacgcgcttccaaaatggctggacgaggtgtgctactggctggaggaccaggcacgggaaagacagcccttgcgctcgcactgagccacgaactcggaaccaagatcccattctgccccatcgtcggaagcgaaatatactcgacagaggtcaagaagacggaggtgctgatggagaacttccggagagccatcggcctcaaggtccgcgaaacgaaggaggtctacgaaggcgaagtcacagagctcacccccgaggaggcagagaacccgttgggcggctacggcaagaccatcagcaccctgctgatcggactgaagagcgcaaagggccagaagaagctgcgattggaccccagcatatacgaggccatccagaaggagagagtcacggtcggcgacgtcatctacatcgaggccaacacgggcgcgtgcaaacgagtcggccgctcggacgcctacgccacggagttcgacctcgaggccgaggagtacgtacccattcccaagggcgaggtgcacaagaaaaaggagattgtacaggacgtcacacttcacgatttggacgtggccaatgccaggccgcagggcggacaggacatcatgagcatgatgggccagctgatgaagcccaagatgactgagattactgacaagctacgcggcgagatcaacaaggtcgtcagcaagtacatcgaccagggcgtcgccgagcttgtccccggtgtcctgttcattgacgaggcgcacatgctggacattgagtgctttacctatctcaaccgagccctggaaaccactatctctccgattgtcgttcttgcatcgaatcgcggcatgtgcacgatccggggcaccgacggattggtcgctgcccacggcattccacccgatttcctggcccgccttctcatcatcccaacaacgccttacgatgccgatgaaatcaagcgcatcgtaaagatccgtgcaactacggagggcgtgcaaattacagatgctgcaatcgacaaaatcgccgagcacggcgtgcgcatcagtttacggtattgtctacagttattgacaccatcaagcattcttgcgcgtgtcaacggccgcacccagatcgatgtacaggacgtagcggaatgcgaagagctcttcctcgacgcacgacgaagtgcgagtctattgagtggtgagtccggacaggacttcattgtatga

SEQ ID NO: 31474 - protein, 458 aa, Muscodor strobelii
  misc_feature: SGI Peptide ID NO. 570837
  misc_feature (118)..(441): Pfam Id: PF06068 Pfam Desc: TIP49 C-terminus
  misc_feature (66)..(104): Pfam Id: PF00004 Pfam Desc: ATPase family associated with various cellular activities (AAA)
  misc_feature (1)..(457): NCBI GI: 256732519 Blast Desc: TBP-interacting protein [Nectria haematococca mpVI 77-13-4]
  misc_feature (1)..(457): NCBI GI: 46121543 Blast Desc: FG05150.1 [Gibberella zeae PH-1] gi|84029464|sp|Q4ICA8.1|RUVB1_GIBZE RecName: Full=RuvB-like helicase 1
  misc_feature (1)..(458): NCBI GI: 145607071 Blast Desc: conserved [Magnaporthe grisea 70-15] gi|145014670|gb|EDJ99238.1| conserved [Magnaporthe grisea 70-15]
  misc_feature (1)..(457): NCBI GI: 85075418 Blast Desc: NCU03482 [Neurospora crassa OR74A] gi|74697764|sp|Q8WZS3.1|RUVB1_NEUCR RecName: Full=RuvB-like helicase 1 gi|18376072|emb|CAD21100.1| RUVB-like protein crassa]
  misc_feature (1)..(457): NCBI GI: 171689938 Blast Desc: protein product [Podospora anserina] gi|170944931|emb|CAP71042.1| protein product [Podospora anserina]
  misc_feature (1)..(457): NCBI GI: 156055978 Blast Desc: conserved [Sclerotinia sclerotiorum 1980] gi|154703125|gb|EDO02864.1| conserved [Sclerotinia sclerotiorum 1980]
  misc_feature (1)..(457): NCBI GI: 154310321 Blast Desc: conserved [Botryotinia fuckeliana B05.10] gi|150851412|gb|EDN26605.1| conserved [Botryotinia fuckeliana B05.10]
  misc_feature (1)..(452): NCBI GI: 121707797 Blast Desc: AAA family ATPase Pontin, [Aspergillus clavatus NRRL 1] gi|119400092|gb|EAW10518.1| AAA family ATPase Pontin, [Aspergillus clavatus NRRL 1]
  misc_feature (1)..(452): NCBI GI: 169771531 Blast Desc: [Aspergillus oryzae RIB40] gi|238485894|ref|XP_002374185.1| AAA family ATPase Pontin, [Aspergillus flavus NRRL3357] gi|83768094|dbj|BAE58233.1| protein
  misc_feature (1)..(452): NCBI GI: 119500376 Blast Desc: AAA family ATPase Pontin, [Neosartorya fischeri NRRL 181] gi|119415110|gb|EAW25048.1| AAA family ATPase Pontin, [Neosartorya fischeri NRRL 181]
  misc_feature: Useful for introducing or modulating the production of volatile compounds
MVQISEVKGNNRDHRTAAHTHIRGLGLKSDGTAEKQAGGFVGQQHAREAAGVVVDLIRASKMAGRGVLLAGGPGTGKTALALALSHELGTKIPFCPIVGSEIYSTEVKKTEVLMENFRRAIGLKVRETKEVYEGEVTELTPEEAENPLGGYGKTISTLLIGLKSAKGQKKLRLDPSIYEAIQKERVTVGDVIYIEANTGACKRVGRSDAYATEFDLEAEEYVPIPKGEVHKKKEIVQDVTLHDLDVANARPQGGQDIMSMMGQLMKPKMTEITDKLRGEINKVVSKYIDQGVAELVPGVLFIDEAHMLDIECFTYLNRALETTISPIVVLASNRGMCTIRGTDGLVAAHGIPPDFLARLLIIPTTPYDADEIKRIVKIRATTEGVQITDAAIDKIAEHGVRISLRYCLQLLTPSSILARVNGRTQIDVQDVAECEELFLDARRSASLLSGESGQDFIV

SEQ ID NO: 31475 - DNA, 2239 bp, Muscodor strobelii
  misc_feature: SGI EST ID NO. CUFF.74540.1
  misc_feature: Variant of the nucleotide sequence at SEQ ID NO 31473
gaaaaagtgaattgttgcaatattacagctgatggtgaagttacagtgcctctagactgtacgcacacagtatttacgtcgcgcctcaaaaaagttcgcgaccattgaagctccaagctcccacccgcgaattagtttgcgacgccgacccttcagccttaccgatttggcttttccatcagcaacatccgaactgcgagaccccgtcagacttctctctttgccacttccgcagacccgccaacccgccaacccgccaattttgccctgtttacaacatccattccgacgctcgaagcctccctgcacaccgcagcgcacacgagcgccgtcgcaaccatggtgcagatcagcgaggtcaagggcaacaaccgggaccaccgcaccgccgcccacacacacatcagaggccttggcttgaagtctgatggcactgcagagaagcaggccggcggtttcgtcggccagcaacatgcacgagaggctgccggcgttgtggtcgacctgatacgcgcttccaaaatggctggacgaggtgtgctactggctggaggaccaggcacgggaaagacagcccttgcgctcgcactgagccacgaactcggaaccaagatcccattctgccccatcgtcggaagcgaaatatactcgacagaggtcaagaagacggaggtgctgatggagaacttccggagagccatcggcctcaaggtccgcgaaacgaaggaggtctacgaaggcgaagtcacagagctcacccccgaggaggcagagaacccgttgggcggctacggcaagaccatcagcaccctgctgatcggactgaagagcgcaaagggccagaagaagctgcgattggaccccagcatatacgaggccatccagaaggagagagtcacggtcggcgacgtcatctacatcgaggccaacacgggcgcgtgcaaacgagtcggccgctcggacgcctacgccacggagttcgacctcgaggccgaggagtacgtacccattcccaagggcgaggtgcacaagaaaaaggagattgtacaggacgtcacacttcacgatttggacgtggccaatgccaggccgcagggcggacaggacatcatgagcatgatgggccagctgatgaagcccaagatgactgagattactgacaagctacgcggcgagatcaacaaggtcgtcagcaagtacatcgaccagggcgtcgccgagcttgtccccggtgtcctgttcattgacgaggcgcacatgctggacattgagtgctttacctatctcaaccgagccctggaaaccactatctctccgattgtcgttcttgcatcgaatcgcggcatgtgcacgatccggggcaccgacggattggtcgctgcccacggcattccacccgatttcctggcccgccttctcatcatcccaacaacgccttacgatgccgatgaaatcaagcgcatcgtaaagatccgtgcaactacggagggcgtgcaaattacagatgctgcaatcgacaaaatcgccgagcacggcgtgcgcatcagtttacggtattgtctacagttattgacaccatcaagcattcttgcgcgtgtcaacggccgcacccagatcgatgtacaggacgtagcggaatgcgaagagctcttcctcgacgcacgacgaagtgcgagtctattgagtggtgagtccggacaggacttcattgtatgaaattcatggccgtgagtgtgagactagacaaaaattagaggatctggcacagggatagtccgacaactgccggaacggttaccatggcgccactgattagataatcctcgtttagcgagaggaactactgcgcgtcctactgtgcttgtgttgcacacgcgaacaggacgggttggtaaatttcccgagaccaaaatacagagacggggaccgggggaggggggttcggagttcctttgcgcactggaaaacgtcggatgtaattttactaccactacactatgtgttactatgatcgtgaccatatcgagtacgttaatgccaattcaaactgtgagttgtcttagtgtattgtctgtctacagaaatggggaaccggtacctgagtacctcgtcgctcaatcgctcataccacgtggtgttacacagtctcatataacgacagcgacagccagagacatgccaaacagatagcataacgatgagttaattgagatgagaaatacaggatattggattcggt

SEQ ID NO: 31476 - DNA, 1515 bp, Muscodor strobelii
  misc_feature: SGI cDNA ID NO. 570838
  misc_feature: Encodes the peptide sequence at SEQ ID NO 31477
atggatggaaaggcaacaggttctaaagacaggaccgtcgaacagtggcgacaagaccaaagaaacctaactccagcgacgaatgttgaaacaggcttcttcgacgggcagaaatatctcggcacagaacttctcgaccctagccagctacggtcttatacatcgagcccattctcacaagacggacgacaatctcctataagtctacaaaactttcacgcaccaccaggagaaatcacaacaccattctacgatgctcccccacagccgtcaggaattcgcgggttctttgcgacgcaatggcagaaacaccgagcgcccatactggtcttcattgcgcaggctttcggcgcgttgatgcatttgaccgcgcgactactctctcttggtgaagtcgatgatgcgaagctacatccaatgcaactcctattttatcgtatgattatttcgctgatcctcggcaccgtctacattgccaagcgccagatccctcatggagtattcggcgacccgaaagtccgctggatgcttgttgggcgtggaatctcgggtttcttgggtctttacggcatgtggtattccagcatgtatttgccactcgccgaagccactgtgatcactttcttggggccaaatctggctggattctggtgccacatattcttgaaagacccattcactcgaacggagcaacttgcttctgtcttagcacttgggggcgtcatattaataactaaacctctcagtctgttttctggcggagccgatgtggttgcttcgacttcaccttccgacatggcagacaccatcgcaaacgtgacgacgatcatatctcgagtcgcagagtccgatgatgctcagacggtatttgcaccaacgacaactgaacgactcatcggcatcggtgtcggtctgcttggtgtattagggattggatctggatttgcattcgtgcgtgccctgggccctcgcgcccaccctttggtatccgtgaactactttagcatcacggccctcacggtggcaaccggctcactcctcctcgctccggttctcgacatcggacaacccgatctccggttcacgctgccctcatctcttaggcaaagtgggcttgtgcttctggtcacggtttgtgggtttgttgcgcagctgctcactacccaaggccttgcgattgagcgcagtaaccgggcggtactcatggtttactctcaaatgctctttgcgtcagctttcgattggattttctggggcacgacactcagcgctctgagtcttatcggcgcaggaatgatcatcggcggtgcagtctgggtcgcggttggaaacaaaactaagactgagaagaagtctcgagaggttgatgtggagagagctgctgtcgctggacagggagaggttgcggaaggtattccgatgttgagagacggagagttcgtgattgaagatgagagcgaggatgagagtgttgatgatagacatagagaagaccaaaacagtgccagactatga

SEQ ID NO: 31477 - protein, 504 aa, Muscodor strobelii
  misc_feature: SGI Peptide ID NO. 570838
  misc_feature (309)..(442): Pfam Id: PF00892 Pfam Desc: Integral membrane protein DUF6
  misc_feature (115)..(246): Pfam Id: PF00892 Pfam Desc: Integral membrane protein DUF6
  misc_feature (135)..(246): Pfam Id: PF00892 Pfam Desc: Integral membrane protein DUF6
  misc_feature (50)..(497): NCBI GI: 171689940 Blast Desc: protein product [Podospora anserina] gi|170944932|emb|CAP71043.1| protein product [Podospora anserina]
  misc_feature (42)..(475): NCBI GI: 116200061 Blast Desc: CHGG_08186 [Chaetomium globosum CBS 148.51] gi|88179465|gb|EAQ86933.1| CHGG_08186 [Chaetomium globosum CBS 148.51]
  misc_feature (18)..(485): NCBI GI: 39943892 Blast Desc: MGG_03957 [Magnaporthe grisea 70-15] gi|145014669|gb|EDJ99237.1| MGG_03957 [Magnaporthe grisea 70-15]
  misc_feature (45)..(493): NCBI GI: 18376061 Blast Desc: conserved [Neurospora crassa]
  misc_feature (101)..(475): NCBI GI: 46121667 Blast Desc: FG05212.1 [Gibberella zeae PH-1]
  misc_feature (47)..(451): NCBI GI: 164427427 Blast Desc: NCU11076 [Neurospora crassa OR74A] gi|157071738|gb|EDO65294.1| NCU11076 [Neurospora crassa OR74A]
  misc_feature (101)..(475): NCBI GI: 256732518 Blast Desc: NECHADRAFT_92536 [Nectria haematococca mpVI 77-13-4]
  misc_feature (147)..(451): NCBI GI: 189196198 Blast Desc: conserved [Pyrenophora tritici-repentis Pt-1C-BFP] gi|187980316|gb|EDU46942.1| conserved [Pyrenophora tritici-repentis Pt-1C-BFP]
  misc_feature (86)..(500): NCBI GI: 119184739 Blast Desc: CIMG_07136 [Coccidioides immitis RS]
  misc_feature (86)..(445): NCBI GI: 240109966 Blast Desc: Integral membrane family protein [Coccidioides posadasii C735 delta SOWgp]
MDGKATGSKDRTVEQWRQDQRNLTPATNVETGFFDGQKYLGTELLDPSQLRSYTSSPFSQDGRQSPISLQNFHAPPGEITTPFYDAPPQPSGIRGFFATQWQKHRAPILVFIAQAFGALMHLTARLLSLGEVDDAKLHPMQLLFYRMIISLILGTVYIAKRQIPHGVFGDPKVRWMLVGRGISGFLGLYGMWYSSMYLPLAEATVITFLGPNLAGFWCHIFLKDPFTRTEQLASVLALGGVILITKPLSLFSGGADVVASTSPSDMADTIANVTTIISRVAESDDAQTVFAPTTTERLIGIGVGLLGVLGIGSGFAFVRALGPRAHPLVSVNYFSITALTVATGSLLLAPVLDIGQPDLRFTLPSSLRQSGLVLLVTVCGFVAQLLTTQGLAIERSNRAVLMVYSQMLFASAFDWIFWGTTLSALSLIGAGMIIGGAVWVAVGNKTKTEKKSREVDVERAAVAGQGEVAEGIPMLRDGEFVIEDESEDESVDDRHREDQNSARL

SEQ ID NO: 31478 - DNA, 2221 bp, Muscodor strobelii
  misc_feature: SGI EST ID NO. CUFF.74529.0
  misc_feature: Variant of the nucleotide sequence at SEQ ID NO 31476
aacaacctctcctcaaacatcctctcgaagcttactccagagtctacacccgctaccgaggtggatatggatatccaaagtctatgatccggaggttggtgcggggccccggcatcggatatggccagaacactactagtcggccgccaacctgcatctccagacccaacgtgacaagcccccaaaccaattacagatcagctgaagtgtccgagagccgtaaggctaccgcaagcagcgtgaacatcgaataggccggcagccgggctgtcatatccgttgtcttgccgccctatgatccctctgttccccactaacaatggacagagagaattccgcagtgaggatgagtatggctcgaatggttcggtgcctgctggattgctggcttgcagctgaattttgcacggattcgtttctaatctaggttgggatttctcattgaccctgtgtcctgattccttctcttaggtccgtaaacttacctctcgtccttagtctcattgataattataccatctagaattcgagagtctctttgatccgtagcggatgtgaaaatactaaatctcttgtcatacttgctgctctccttcctatgatcgaagtgtttcttgagatggttaaccatggatggaaaggcaacaggttctaaagacaggaccgtcgaacagtggcgacaagaccaaagaaacctaactccagcgacgaatgttgaaacaggcttcttcgacgggcagaaatatctcggcacagaacttctcgaccctagccagctacggtcttatacatcgagcccattctcacaagacggacgacaatctcctataagtctacaaaactttcacgcaccaccaggagaaatcacaacaccattctacgatgctcccccacagccgtcaggaattcgcgggttctttgcgacgcaatggcagaaacaccgagcgcccatactggtcttcattgcgcaggctttcggcgcgttgatgcatttgaccgcgcgactactctctcttggtgaagtcgatgatgcgaagctacatccaatgcaactcctattttatcgtatgattatttcgctgatcctcggcaccgtctacattgccaagcgccagatccctcatggagtattcggcgacccgaaagtccgctggatgcttgttgggcgtggaatctcgggtttcttgggtctttacggcatgtggtattccagcatgtatttgccactcgccgaagccactgtgatcactttcttggggccaaatctggctggattctggtgccacatattcttgaaagacccattcactcgaacggagcaacttgcttctgtcttagcacttgggggcgtcatattaataactaaacctctcagtctgttttctggcggagccgatgtggttgcttcgacttcaccttccgacatggcagacaccatcgcaaacgtgacgacgatcatatctcgagtcgcagagtccgatgatgctcagacggtatttgcaccaacgacaactgaacgactcatcggcatcggtgtcggtctgcttggtgtattagggattggatctggatttgcattcgtgcgtgccctgggccctcgcgcccaccctttggtatccgtgaactactttagcatcacggccctcacggtggcaaccggctcactcctcctcgctccggttctcgacatcggacaacccgatctccggttcacgctgccctcatctcttaggcaaagtgggcttgtgcttctggtcacggtttgtgggtttgttgcgcagctgctcactacccaaggccttgcgattgagcgcagtaaccgggcggtactcatggtttactctcaaatgctctttgcgtcagctttcgattggattttctggggcacgacactcagcgctctgagtcttatcggcgcaggaatgatcatcggcggtgcagtctgggtcgcggttggaaacaaaactaagactgagaagaagtctcgagaggttgatgtggagagagctgctgtcgctggacagggagaggttgcggaaggtattccgatgttgagagacggagagttcgtgattgaagatgagagcgaggatgagagtgttgatgatagacatagagaagaccaaaacagtgccagactatgataggatatactatatggaaatgcacacacaacatctgaattctatgaagctgagggcgacttcatcgcggatacagg

SEQ ID NO: 31479 - DNA, 3492 bp, Muscodor strobelii
  misc_feature: SGI cDNA ID NO. 570839
  misc_feature: Reduced expression when VOC is produced
  misc_feature: Encodes the peptide sequence at SEQ ID NO 31480
cgccccaacgccgtcgtcttcgccggccccgacgcctggcgcaacgaggcccacgccctgcgcgcacgccagacctacgtcaaagcgcccctctacgccgcgtccccaaccatatcccgcgccctggacgacctgctcgagctgatcctgcgcgactttgtccagtcgtggtacgcccacatcagcaagaaccccgtctttgccaacgctgtcgacagggccatacgccatgccctcctcgccatccgagaccgcctgctcgacaccgacctggtcgaggtcgtcaccacccgcatcgtccccctcctgaccgcccacttccgcgacgcatacgatgccgagcgagcggtgcgtggccgcaagctgaaccgcgacgtcaccgagtccgaggagctcgacctcgccatcgccgccaaataccgcgatggcaggatccacgcagccgcctccctagcttactcggacaccaagctcgtccaacaagaccatctacggcagatcatagccggaatactgcccaaggttctccccgccagccttctcgacagccgcgccgtggcgagcattgtccgtgagatcgtctcgtgcgccgtgctgttccccgtcgtgcagctcctgtccgagcccgatacctggaaccagttgatggagaactacggacgatccatgctgcaagaccgctccaccgtccgcaagctgcgagccgccctcgatgcccacgccgttcctgcccccagctcttctaagcccgtcgccttcccgcgtctggcccccggcgacaacgagcgccggtttgagaagttcgtcagaaccgttcgcaaagtcaacaatctgtctgacgcccggcgattccgcagcgaggtggccagccagctgaagaaggactcccaacagccaggccaaaatcccgtctatctgcggcgcctagagatggtgaagagactcctcgaccaaagagtccagcaactggctgccggcggtagcaatcgctccgtgcccatactcacccagcccgcgccggccgcgacgacttctcgactggaacatgcatcgctggtggacatcttgcgcgatacttccgggctctcctacttcatggagtatatggacaggcagaacaggatgcctctggtccagttttggctagttgtcgacggcttccgcaacccgctcgaggacgatacggctgacgatgatcaactccccgcccatctcagtccatggagcgaatccgatcgcgtcgacctcgctcagatcgaccaggcttacttatcacgaccagagctacgcgtggcacagcccgcacggaaacccattcgtgagttcctggaagctggcaaagcagcatcaccagcacagtattataaagcgcgccgtgctgtgttgaaaatacaaagtcgggttttggaagacatgcagaatagacatcttcaggcattcaagaaatctgacctattctacaaagcactcgcctctgaagaagcatccaaaaccatacctatgccccctcctcctccgccacaggcaggaccatcaacagcgcctcctccacttcaaaaagcatctaactcgtactctttgaagccgagccccgtcacccgcctgaaccctaaactgaccacgcctgctcacgttcggcgggggctgtctacttcggacttgaagaacgcgggtctcaatggtacacacagcccagagcctctgtctaggcaaaggacgtctttcgacgagaacggctcctctcctctctttgacgatgacgatctggaaaatgacccactgggagactctgtacagagcctagatgaagttaacgtgcaacccaacgtgccggataccaaagttgttcaagccatggaggcggctctcattggtatcatggaggatgagcgccctcagaccgcagaagatctccgcgagtccctatttggtgaagaggacggcactgccagtctattttcgggcaacgataaccgatcggctagaggatccatcgatgcgcaaagtccggctgggaatggaaaggaagtcgaaaagcctagcctctcatccctgggcctcgttagtgccgcctccagaattggcgtattcatggacgacgacctctttggtgatgaggagaagctcgtcatggatgaacaagacgacaatgacatcgagggccagaccgatctagaagacgaagtccatgaggcggcaccaggcgatctaggtctcgccgaggccattacagttcttaccaacgacatcgatcggctcgtcgcgcaagaagcagttctcgagtctctgaccaagaaagcagagctaaccaacaatacggccgaattgcggatcctgcgaaagtcgaaagctagtcttcagagggaacttcgacggaaagaattacagcgacagcagtatgtcatacaagagagcgacaacagcctttatggccgtgctaccattcagatcaaatccatacaagtcggccgcgaagaagacggcaaagagtttgccgtgtacgtggtggaggtcactcggaacgcgggcgagaagatgcccgcggctgcgtgggtggtgacacgccgctacagcgagttccatgaccttcaccaaagattgcgtcacagatacccgtcggtgcggaacctggatttcccgcgacgccggatggtgatgaaactacaaagcgagttcctccgcaagagacgcgaagcattggaacactacttgcaagaattactacagttgcccgacgtatgccggagtcgtgacctgcgggcattcttatctcagagcgtcattactcagggcgaagatctgatgagtcgcgaggataagaaggatatgatgacacgactatacgactcggtgacggacggcatggaggatatcttgggcaacatacccgttctcgaccagctgtcgctcgccggacagaatctgatcgcagccgccacgagccagatgaacacgatgccgctcaacgtcggcgaagacgccatgtcagccgccgaggcagaagccgagctcaacgcgttcgagaacaaagagctggagcccttcatcaagcccatctgtgacatctttctcgagatcttcggtctcaaccgcggaaacaactggttgcgcggccgcgccgtcgtagtggtgttgcatcaaatgctcggcggcaccatcgagaagaaggtccgggacaacttcaaaatgctcgtgcaggaggacgccattctgaagtatctcgggctattgagggatagtatgtggcctcagggccaacttaaccgaaacagggtaccccggacggcgtcggagaaggccaagacgagacgtgaggccagcttgatgctagccacgctggtgccggacctggcgggcaatgtggtcggacgagtgaatgcgcaagcagccagtcggaggatcttcgctacgctgaataactctaggctgaactcccaccttgtcttcacgattgtagatgaactagtggatatcctcttctttgatggttga

SEQ ID NO: 31480 - protein, 1163 aa, Muscodor strobelii
  misc_feature: SGI Peptide ID NO. 570839
  misc_feature (1035)..(1143): Pfam Id: PF08628 Pfam Desc: Sorting nexin C terminal
  misc_feature (813)..(926): Pfam Id: PF00787 Pfam Desc: PX domain
  misc_feature (35)..(224): Pfam Id: PF02194 Pfam Desc: PXA domain
  misc_feature (351)..(489): Pfam Id: PF00615 Pfam Desc: Regulator of G protein signaling domain
  misc_feature (1)..(1160): NCBI GI: 39973727 Blast Desc: MGG_00990 [Magnaporthe grisea 70-15] gi|145018055|gb|EDK02334.1| MGG_00990 [Magnaporthe grisea 70-15]
  misc_feature (1)..(1160): NCBI GI: 164426626 Blast Desc: NCU03937 [Neurospora crassa OR74A] gi|157071412|gb|EAA28340.2| NCU03937 [Neurospora crassa OR74A]
  misc_feature (2)..(1143): NCBI GI: 46134287 Blast Desc: FG09283.1 [Gibberella zeae PH-1]
  misc_feature (1)..(1143): NCBI GI: 40882341 Blast Desc: related to intermediate filament protein MDM1 [Neurospora crassa]
  misc_feature (1)..(1160): NCBI GI: 171682126 Blast Desc: protein product [Podospora anserina] gi|170941022|emb|CAP66672.1| protein product [Podospora anserina]
  misc_feature (1)..(1148): NCBI GI: 156030661 Blast Desc: SS1G_14426 [Sclerotinia sclerotiorum 1980] gi|154700817|gb|EDO00556.1| SS1G_14426 [Sclerotinia sclerotiorum 1980]
  misc_feature (1)..(1149): NCBI GI: 116202489 Blast Desc: CHGG_09129 [Chaetomium globosum CBS 148.51] gi|88177647|gb|EAQ85115.1| CHGG_09129 [Chaetomium globosum CBS 148.51]
  misc_feature (4)..(1160): NCBI GI: 115402077 Blast Desc: conserved [Aspergillus terreus NIH2624] gi|114188961|gb|EAU30661.1| conserved [Aspergillus terreus NIH2624]
  misc_feature (5)..(1163): NCBI GI: 121702175 Blast Desc: intermediate filament protein (Mdm1), [Aspergillus clavatus NRRL 1] gi|119397495|gb|EAW07926.1| intermediate filament protein (Mdm1), [Aspergillus clavatus NRRL 1]
  misc_feature (2)..(1163): NCBI GI: 189189840 Blast Desc: conserved [Pyrenophora tritici-repentis Pt-1C-BFP] gi|187972865|gb|EDU40364.1| conserved [Pyrenophora tritici-repentis Pt-1C-BFP]
  misc_feature: Useful for introducing or modulating the production of volatile compounds
RPNAVVFAGPDAWRNEAHALRARQTYVKAPLYAASPTISRALDDLLELILRDFVQSWYAHISKNPVFANAVDRAIRHALLAIRDRLLDTDLVEVVTTRIVPLLTAHFRDAYDAERAVRGRKLNRDVTESEELDLAIAAKYRDGRIHAAASLAYSDTKLVQQDHLRQIIAGILPKVLPASLLDSRAVASIVREIVSCAVLFPVVQLLSEPDTWNQLMENYGRSMLQDRSTVRKLRAALDAHAVPAPSSSKPVAFPRLAPGDNERRFEKFVRTVRKVNNLSDARRFRSEVASQLKKDSQQPGQNPVYLRRLEMVKRLLDQRVQQLAAGGSNRSVPILTQPAPAATTSRLEHASLVDILRDTSGLSYFMEYMDRQNRMPLVQFWLVVDGFRNPLEDDTADDDQLPAHLSPWSESDRVDLAQIDQAYLSRPELRVAQPARKPIREFLEAGKAASPAQYYKARRAVLKIQSRVLEDMQNRHLQAFKKSDLFYKALASEEASKTIPMPPPPPPQAGPSTAPPPLQKASNSYSLKPSPVTRLNPKLTTPAHVRRGLSTSDLKNAGLNGTHSPEPLSRQRTSFDENGSSPLFDDDDLENDPLGDSVQSLDEVNVQPNVPDTKVVQAMEAALIGIMEDERPQTAEDLRESLFGEEDGTASLFSGNDNRSARGSIDAQSPAGNGKEVEKPSLSSLGLVSAASRIGVFMDDDLFGDEEKLVMDEQDDNDIEGQTDLEDEVHEAAPGDLGLAEAITVLTNDIDRLVAQEAVLESLTKKAELTNNTAELRILRKSKASLQRELRRKELQRQQYVIQESDNSLYGRATIQIKSIQVGREEDGKEFAVYVVEVTRNAGEKMPAAAWVVTRRYSEFHDLHQRLRHRYPSVRNLDFPRRRMVMKLQSEFLRKRREALEHYLQELLQLPDVCRSRDLRAFLSQSVITQGEDLMSREDKKDMMTRLYDSVTDGMEDILGNIPVLDQLSLAGQNLIAAATSQMNTMPLNVGEDAMSAAEAEAELNAFENKELEPFIKPICDIFLEIFGLNRGNNWLRGRAVVVVLHQMLGGTIEKKVRDNFKMLVQEDAILKYLGLLRDSMWPQGQLNRNRVPRTASEKAKTRREASLMLATLVPDLAGNVVGRVNAQAASRRIFATLNNSRLNSHLVFTIVDELVDILFFDG

SEQ ID NO: 31481 - DNA, 3882 bp, Muscodor strobelii
  misc_feature: SGI EST ID NO. CUFF.74542.1
  misc_feature: Variant of the nucleotide sequence at SEQ ID NO 31479
gccgtcgtcttcgccggccccgacgcctggcgcaacgaggcccacgccctgcgcgcacgccagacctacgtcaaagcgcccctctacgccgcgtccccaaccatatcccgcgccctggacgacctgctcgagctgatcctgcgcgactttgtccagtcgtggtacgcccacatcagcaagaaccccgtctttgccaacgctgtcgacagggccatacgccatgccctcctcgccatccgagaccgcctgctcgacaccgacctggtcgaggtcgtcaccacccgcatcgtccccctcctgaccgcccacttccgcgacgcatacgatgccgagcgagcggtgcgtggccgcaagctgaaccgcgacgtcaccgagtccgaggagctcgacctcgccatcgccgccaaataccgcgatggcaggatccacgcagccgcctccctagcttactcggacaccaagctcgtccaacaagaccatctacggcagatcatagccggaatactgcccaaggttctccccgccagccttctcgacagccgcgccgtggcgagcattgtccgtgagatcgtctcgtgcgccgtgctgttccccgtcgtgcagctcctgtccgagcccgatacctggaaccagttgatggagaactacggacgatccatgctgcaagaccgctccaccgtccgcaagctgcgagccgccctcgatgcccacgccgttcctgcccccagctcttctaagcccgtcgccttcccgcgtctggcccccggcgacaacgagcgccggtttgagaagttcgtcagaaccgttcgcaaagtcaacaatctgtctgacgcccggcgattccgcagcgaggtggccagccagctgaagaaggactcccaacagccaggccaaaatcccgtctatctgcggcgcctagagatggtgaagagactcctcgaccaaagagtccagcaactggctgccggcggtagcaatcgctccgtgcccatactcacccagcccgcgccggccgcgacgacttctcgactggaacatgcatcgctggtggacatcttgcgcgatacttccgggctctcctacttcatggagtatatggacaggcagaacaggatgcctctggtccagttttggctagttgtcgacggcttccgcaacccgctcgaggacgatacggctgacgatgatcaactccccgcccatctcagtccatggagcgaatccgatcgcgtcgacctcgctcagatcgaccaggcttacttatcacgaccagagctacgcgtggcacagcccgcacggaaacccattcgtgagttcctggaagctggcaaagcagcatcaccagcacagtattataaagcgcgccgtgctgtgttgaaaatacaaagtcgggttttggaagacatgcagaatagacatcttcaggcattcaagaaatctgacctattctacaaagcactcgcctctgaagaagcatccaaaaccatacctatgccccctcctcctccgccacaggcaggaccatcaacagcgcctcctccacttcaaaaagcatctaactcgtactctttgaagccgagccccgtcacccgcctgaaccctaaactgaccacgcctgctcacgttcggcgggggctgtctacttcggacttgaagaacgcgggtctcaatggtacacacagcccagagcctctgtctaggcaaaggacgtctttcgacgagaacggctcctctcctctctttgacgatgacgatctggaaaatgacccactgggagactctgtacagagcctagatgaagttaacgtgcaacccaacgtgccggataccaaagttgttcaagccatggaggcggctctcattggtatcatggaggatgagcgccctcagaccgcagaagatctccgcgagtccctatttggtgaagaggacggcactgccagtctattttcgggcaacgataaccgatcggctagaggatccatcgatgcgcaaagtccggctgggaatggaaaggaagtcgaaaagcctagcctctcatccctgggcctcgttagtgccgcctccagaattggcgtattcatggacgacgacctctttggtgatgaggagaagctcgtcatggatgaacaagacgacaatgacatcgagggccagaccgatctagaagacgaagtccatgaggcggcaccaggcgatctaggtctcgccgaggccattacagttcttaccaacgacatcgatcggctcgtcgcgcaagaagcagttctcgagtctctgaccaagaaagcagagctaaccaacaatacggccgaattgcggatcctgcgaaagtcgaaagctagtcttcagagggaacttcgacggaaagaattacagcgacagcagtatgtcatacaagagagcgacaacagcctttatggccgtgctaccattcagatcaaatccatacaagtcggccgcgaagaagacggcaaagagtttgccgtgtacgtggtggaggtcactcggaacgcgggcgagaagatgcccgcggctgcgtgggtggtgacacgccgctacagcgagttccatgaccttcaccaaagattgcgtcacagatacccgtcggtgcggaacctggatttcccgcgacgccggatggtgatgaaactacaaagcgagttcctccgcaagagacgcgaagcattggaacactacttgcaagaattactacagttgcccgacgtatgccggagtcgtgacctgcgggcattcttatctcagagcgtcattactcagggcgaagatctgatgagtcgcgaggataagaaggatatgatgacacgactatacgactcggtgacggacggcatggaggatatcttgggcaacatacccgttctcgaccagctgtcgctcgccggacagaatctgatcgcagccgccacgagccagatgaacacgatgccgctcaacgtcggcgaagacgccatgtcagccgccgaggcagaagccgagctcaacgcgttcgagaacaaagagctggagcccttcatcaagcccatctgtgacatctttctcgagatcttcggtctcaaccgcggaaacaactggttgcgcggccgcgccgtcgtagtggtgttgcatcaaatgctcggcggcaccatcgagaagaaggtccgggacaacttcaaaatgctcgtgcaggaggacgccattctgaagtatctcgggctattgagggatagtatgtggcctcagggccaacttaaccgaaacagggtaccccggacggcgtcggagaaggccaagacgagacgtgaggccagcttgatgctagccacgctggtgccggacctggcgggcaatgtggtcggacgagtgaatgcgcaagcagccagtcggaggatcttcgctacgctgaataactctaggctgaactcccaccttgtcttcacgattgtagatgaactagtggatatcctcttctttgatggttgaaggatacgtaaataactttccatcgaggtgatggtggatgtggtaatgacattgttgatagcatagcaaatggagttttatttattttcatcacctctttaagtcgtgtcactttaggggttttggacggcaagcacaagagcatgggttggcgttacgtggcagagagatattgataccaggagccagccagtacactaaaaaggacgtttatattcgaattgattcccatttatatttctcctttctgcaaattgaacttgcgcataagagtgtaaataccagggcgggactgtggcaattggcccacgtggtctcgtgactttgggatagggaggtctttgatgtgttggcgaggctctgacagcaatagatgagactccaaaaccgagagtgcta

SEQ ID NO: 31482 - DNA, 960 bp, Muscodor strobelii
  misc_feature: SGI cDNA ID NO. 570840
  misc_feature: Reduced expression when VOC is produced
  misc_feature: Encodes the peptide sequence at SEQ ID NO 31483
atggcttccactgaggtctctgccaccaggctctacctcggcaaccttcccaagggcgccaccaagcaggatgtcgaggcgcactttgccacccacggcaccggcgagatcaccgagatcaagctcatgaatggtttcggcttcgtcgagtacaaggaccctatggatgcccgcgacgtcgtccctgctttccacggatccgacttcatgggcgagcgcctcaccgtccagttcgcgcgcggctctcgtcagcgtgaagggggctttggcggccacgagcgcagcgcgccccggcctcgccgcactcccttccgcatgcagatcaccgggctccccaatgataccagctggcaggacctcaaagattttgcccgccagtccagtctggacgtcgtctactcggagacgggccgcgacggcaatggccgaggcttcgttgagttcgagactgctgctgaccttaagacggccgtggagaaacttgaccagcgcgagttcaagggccagagagtgacttgtgttgccgatatccaggcagacttccctcagcgggaccaccgctcccgctctcccatgggccgccggccttatggcgggccgcccaacggctacgatcgccgaggacctccccgtggctacagcccccgcggctaccgcggcgaagactatcgcgctcgaagccctcctcgccgcgagtactacgatgaccgccgctaccgatcgcccccgcgtcgtggaccccctggtgatgactaccctccgccccgtggccgctacgaggacccctaccgacgggactacccgccccccgatccgtatgcgaacggccctcgctatgagcgccctccccgtgacttccctccgagggaagacggctacggaccccgcgaaggcggtggctatcctcgcgagggcgagtaccgacgaggcggcggtggtggaggcggtggctactggtaa

SEQ ID NO: 31483 - protein, 319 aa, Muscodor strobelii
  misc_feature: SGI Peptide ID NO. 570840
  misc_feature (11)..(76): Pfam Id: PF00076 Pfam Desc: RNA recognition motif. (a.k.a. RRM, RBD, or RNP domain)
  misc_feature (106)..(173): Pfam Id: PF00076 Pfam Desc: RNA recognition motif. (a.k.a. RRM, RBD, or RNP domain)
  misc_feature (4)..(290): NCBI GI: 85096852 Blast Desc: NCU07069 [Neurospora crassa OR74A] gi|28921822|gb|EAA31098.1| [Neurospora crassa OR74A]
  misc_feature (4)..(276): NCBI GI: 154304025 Blast Desc: pre-mRNA splicing factor [Botryotinia fuckeliana B05.10] gi|150854283|gb|EDN29475.1| pre-mRNA splicing factor [Botryotinia fuckeliana B05.10]
  misc_feature (4)..(276): NCBI GI: 156030683 Blast Desc: SS1G_14437 [Sclerotinia sclerotiorum 1980] gi|154700828|gb|EDO00567.1| SS1G_14437 [Sclerotinia sclerotiorum 1980]
  misc_feature (4)..(264): NCBI GI: 116202487 Blast Desc: CHGG_09128 [Chaetomium globosum CBS 148.51] gi|88177646|gb|EAQ85114.1| CHGG_09128 [Chaetomium globosum CBS 148.51]
  misc_feature (4)..(304): NCBI GI: 145610673 Blast Desc: MGG_11457 [Magnaporthe grisea 70-15] gi|145018053|gb|EDK02332.1| MGG_11457 [Magnaporthe grisea 70-15]
  misc_feature (4)..(264): NCBI GI: 171682128 Blast Desc: protein product [Podospora anserina] gi|170941023|emb|CAP66673.1| protein product [Podospora anserina]
  misc_feature (4)..(180): NCBI GI: 46134285 Blast Desc: FG09282.1 [Gibberella zeae PH-1]
  misc_feature (2)..(244): NCBI GI: 242782227 Blast Desc: electron transfer flavoprotein-ubiquinone oxidoreductase [Talaromyces stipitatus ATCC 10500] gi|218720105|gb|EED19524.1| electron transfer oxidoreductase ATCC
  misc_feature (3)..(170): NCBI GI: 256727146 Blast Desc: NECHADRAFT_33691 [Nectria haematococca mpVI 77-13-4]
  misc_feature (4)..(263): NCBI GI: 255936927 Blast Desc: Pc13g10700 [Penicillium chrysogenum Wisconsin 54-1255] gi|211584110|emb|CAP92139.1| Pc13g10700 [Penicillium chrysogenum Wisconsin 54-1255]
  misc_feature: Useful for introducing or modulating the production of volatile compounds
MASTEVSATRLYLGNLPKGATKQDVEAHFATHGTGEITEIKLMNGFGFVEYKDPMDARDVVPAFHGSDFMGERLTVQFARGSRQREGGFGGHERSAPRPRRTPFRMQITGLPNDTSWQDLKDFARQSSLDVVYSETGRDGNGRGFVEFETAADLKTAVEKLDQREFKGQRVTCVADIQADFPQRDHRSRSPMGRRPYGGPPNGYDRRGPPRGYSPRGYRGEDYRARSPPRREYYDDRRYRSPPRRGPPGDDYPPPRGRYEDPYRRDYPPPDPYANGPRYERPPRDFPPREDGYGPREGGGYPREGEYRRGGGGGGGGYW

SEQ ID NO: 31484 - DNA, 2268 bp, Muscodor strobelii
  misc_feature: SGI EST ID NO. CUFF.74671.5
  misc_feature: Variant of the nucleotide sequence at SEQ ID NO 31482
gcgaggtaggtaggttggcacatgcaccgctgtgcaggcatttggctagctgggcgcctgtgcggccggtggtctcccaattgcagcttctgtatccgggtcatcgtcgcccatcgccgttcaagcctctggccgcattctccttccctccccctcctcctgctggcactttcctctgccgttgccgccgctgtatcaatcggcattatctggctctcagccaactcatatcctcatctcaccatagcattgctattgaggccgcgcattgtctatttcatcaccccgtcacccgcagtgcgtacagctacatctgggcttccccacggcgcatcgttcccaacccggcgaggctgcgctgcccacacgtcgtcgtcttctcaacctgccatcgtgactgatcctgggcctagctacgtacttgatcctgctgccggtatctctgcctctgtcctctggcttcgttggcttcgttggattcctcgggatcgccaaccttcgccatggcttccactgaggtctctgccaccaggctctacctcggcaaccttcccaagggcggtaagctcaacaccacttccacaatcctgatgtgattctctgctctgcgcccggccaccaaacccgtcgctttccctctctctgccctggatcaccatccacggcccctccaataccctaggaaacgcgccagtctactaaacaaaacacccgtccagccaccaagcaggatgtcgaggcgcactttgccacccacggcaccggcgagatcaccgagatcaagctcatgaatggtttcggcttcgtcgagtacaaggaccctatggatgcccgcgacgtcgtccctgctttccacggatccgacttcatgggcgagcgcctcaccgtccagttcgcgcgcggctctcgtcagcgtgaagggggctttggcggccacgagcgcagcgcgccccggcctcgccgcactcccttccgcatgcagatcaccgggctccccaatgataccagctggcaggacctcaaagattttgcccgccagtccagtctggacgtcgtctactcggagacgggccgcgacggcaatggccgaggcttcgttgagttcgagactgctgctgaccttaagacggccgtggagaaacttgaccagcgcgagttcaagggccagagagtgacttgtgttgccgatatccaggcagacttccctcagcgggaccaccgctcccgctctcccatgggccgccggccttatggcgggccgcccaacggctacgatcgccgaggacctccccgtggctacagcccccgcggctaccgcggcgaagactatcgcgctcgaagccctcctcgccgcgagtactacgatgaccgccgctaccgatcgcccccgcgtcgtggaccccctggtgatgactaccctccgccccgtggccgctacgaggacccctaccgacgggactacccgccccccgatccgtatgcgaacggccctcgctatgagcgccctccccgtgacttccctccgagggaagacggctacggaccccgcgaaggcggtggctatcctcgcgagggcgagtaccgacgaggcggcggtggtggaggcggtggctactggtaaaccatctttacttctaattgatgaacgcgcccccttacgttgtctagatcctcacccgaaatcggtcagtccagacttggagcagggatatgcgagagtatttaagaagcaacgacaaccactgcagggccgcacgggtgcactcggcggcacaagcatgacgacagtatagggccatgtcgagtatcagaaacgagcggcaaaggtcccccgaagtggaaatgcggcggttctggtccagacattacgaaaacgatagcagaagggcaggtggcgagtggtacaaaaaaacggcgctatcacgttctggggtctaatgtgtatgaacttttccgcctctttcgcctagtaatttgcgtttctgtataatgagttcaaaaatgatgactattgcgaaatccgacgcgacggcttagtgaaatttgggcgcacttgtatcgaacgatatttgacaggatcctgatgactctgtcccaggaacaacttccattgttatcgacagttcgtgctgccgagcaatggaaccaagttctgccttaatgttgagtagctgcgctctgtacaagtgacatcagggatggtgtatataggcttgctgttgtgctagatgtgtacaatatgtgatgcgtgcagattacgataataac

SEQ ID NO: 31485 - DNA, 2394 bp, Muscodor strobelii
  misc_feature: SGI cDNA ID NO. 570841
  misc_feature: Encodes the peptide sequence at SEQ ID NO 31486
atgagcgaaccaaacgactccaaaacacgcgaactggaacggggcagctcgctcagggcctccatgagacggtcgctccaccaggccgacgataacgacgactatgacttgcaagctatgggaatctcggacgggtttcgacctgcacacgtcgcacagaatcacccgtctcacgtcacgcgcgactccatatcgtcactagagcctccggcgccacggcctgtgtctccgcggccgtccagcatcgcaaagccgcatcacccgcgcgagtccttctcgctccgcaacgacggcgccgcacgaggcttggctaggtcgccaagtacgtcgacgcagcccacccttgtggactcggagactccctacaacggcccatccgggccctctcatccttaccagatgtacccgcagaatgtccgactggcaaggacagcgagtgtggctacgtcatccaccgcgccagtatccgaacgatcatacagtggacctcgcggtccgactcatccctacaacatctatccgcagaacgtgacgtcgggggatgccgtcgaggccggggaagctggcctgagtggttccgctgtgcgagacaatatagtaggctttcccggaacggccgaccaatatcgtagacggcttgggcccgatggagaggaagccgcggatctgatcggacccgatggccacactgagcagctgcctccttacacgagatatccggatgcagttagtgctcagaaggccatagacatgggcgccatccccgtgggggcaagtctggatatcgtccaacccacgtccacagcgacgtcgactcctacacagccaaatcttgaaatccccggcgctggtgggataggcctggcaacccggaacccggaatttgcttcgaccgacgatttggaccgccttagctcaccggcgtctcgtcgatccatacggagtttcacatcagatgccagtcatcatgccatcaatacgggtgccctagccgtcgtggacgagaagagaaccgagaagaattggaaaatagctgcgaagcgaaaagtttggggtgtcgtcccctgttggtgcgttgtgctgggcatggtagtgctcgtcttcttgggcattctggtgggagtgctcataggcactgtcttcagccatggtccaccaaagaaacacccgagtgatccggcataccctcaagattctagtaccgccaccactgatgctgtagcatatcctacgctgcctccaggcctgccgtctttaccgtgtgaccgcggaaagatgtatgctgtgggattggggctcccatctcgctcttcgtccgcgtgttttgcggacgagagcttagaagcgtcgtggaactgcaatcccaccttctcccaactaacaatgcagacgcgaagactcgacaacgctccagaaactgccgcctatgctatagacttcaactacaacaagtcgctgacgctagaagcaaacttctacgcgtacggagtgcaaccactcaatttctctaatatcacgcttaccctggtcaacgatacatttcagttaacacaaggaccagcttgggcttttgcagtaccctacaccaaaaccatacttgtacccgaaccttacctgcatgcacctggttccacatcggacaaggaggacaagcactactcacgcgaagctcgcgggcgccatgtcagcccgcgcatgcagtatgggcaagatttcaagcggagaggaatagcacagcgtggtgaaaagccatggatctgccaatggcctgagaccatactggaaatgtttatctatgtcaccgatgaaagcagtcacagcggcgacccgtttgatcatgacgaccatccaccgccgccgccctctcaaggatatccgtcatcgacagccgcgaatgccgcccagagcagccaacctagtcggcgtaatggtggtggtggtggtggtggtggtgatggctatcctccatacggtgatgacgatgatgatgatgatcaccacagctcgtttcctcctatgtcaacaccaccgccatcctcgacgacctcagcgtcgtcttccagtccagctccgtcgtccacagactggtttgggatgcctcccaatataccgccaggtcccccactatatccaaaggtgttcaaagtggatgagcgccgcaatgcccaaccttcaccctctaacatgccaacgtgtcgtcaagtcatcattggggatgacggtgaacaagctcaaccattcatcgtcaatgggcaacaagtcgcttttcagattgcattcaacgacaattacgccgattatgacgggaacacgaagaatcggatgtccaaacgagacagtccatacggcaatgaagtgagcgactgtggatgcctctggtggccgaaccagtga

SEQ ID NO: 31486 - protein, 797 aa, Muscodor strobelii
  misc_feature: SGI Peptide ID NO. 570841
  misc_feature (7)..(595): NCBI GI: 171682104 Blast Desc: protein product [Podospora anserina] gi|170941011|emb|CAP66661.1| protein product [Podospora anserina]
  misc_feature (3)..(605): NCBI GI: 156030665 Blast Desc: SS1G_14428 [Sclerotinia sclerotiorum 1980] gi|154700819|gb|EDO00558.1| SS1G_14428 [Sclerotinia sclerotiorum 1980]
  misc_feature (33)..(793): NCBI GI: 46134259 Blast Desc: FG09269.1 [Gibberella zeae PH-1]
  misc_feature (32)..(599): NCBI GI: 256727733 Blast Desc: NECHADRAFT_66821 [Nectria haematococca mpVI 77-13-4]
  misc_feature (134)..(610): NCBI GI: 116202505 Blast Desc: CHGG_09137 [Chaetomium globosum CBS 148.51] gi|88177655|gb|EAQ85123.1| CHGG_09137 [Chaetomium globosum CBS 148.51]
  misc_feature (1)..(610): NCBI GI: 154304039 Blast Desc: BC1G_09655 [Botryotinia fuckeliana B05.10] gi|150854290|gb|EDN29482.1| BC1G_09655 [Botryotinia fuckeliana B05.10]
  misc_feature (6)..(599): NCBI GI: 145610641 Blast Desc: MGG_01023 [Magnaporthe grisea 70-15] gi|145018023|gb|EDK02302.1| MGG_01023 [Magnaporthe grisea 70-15]
  misc_feature (154)..(610): NCBI GI: 261359663 Blast Desc: conserved [Verticillium albo-atrum VaMs.102]
  misc_feature (280)..(758): NCBI GI: 85085717 Blast Desc: NCU03915 [Neurospora crassa OR74A] gi|16945433|emb|CAB91691.2| related to glucan 1, 4-alpha-glucosidase [Neurospora crassa] [Neurospora crassa OR74A]
  misc_feature (105)..(624): NCBI GI: 119491841 Blast Desc: NFIA_066850 [Neosartorya fischeri NRRL 181] gi|119411575|gb|EAW21518.1| conserved [Neosartorya fischeri NRRL 181]
MSEPNDSKTRELERGSSLRASMRRSLHQADDNDDYDLQAMGISDGFRPAHVAQNHPSHVTRDSISSLEPPAPRPVSPRPSSIAKPHHPRESFSLRNDGAARGLARSPSTSTQPTLVDSETPYNGPSGPSHPYQMYPQNVRLARTASVATSSTAPVSERSYSGPRGPTHPYNIYPQNVTSGDAVEAGEAGLSGSAVRDNIVGFPGTADQYRRRLGPDGEEAADLIGPDGHTEQLPPYTRYPDAVSAQKAIDMGAIPVGASLDIVQPTSTATSTPTQPNLEIPGAGGIGLATRNPEFASTDDLDRLSSPASRRSIRSFTSDASHHAINTGALAVVDEKRTEKNWKIAAKRKVWGVVPCWCVVLGMVVLVFLGILVGVLIGTVFSHGPPKKHPSDPAYPQDSSTATTDAVAYPTLPPGLPSLPCDRGKMYAVGLGLPSRSSSACFADESLEASWNCNPTFSQLTMQTRRLDNAPETAAYAIDFNYNKSLTLEANFYAYGVQPLNFSNITLTLVNDTFQLTQGPAWAFAVPYTKTILVPEPYLHAPGSTSDKEDKHYSREARGRHVSPRMQYGQDFKRRGIAQRGEKPWICQWPETILEMFIYVTDESSHSGDPFDHDDHPPPPPSQGYPSSTAANAAQSSQPSRRNGGGGGGGGDGYPPYGDDDDDDDHHSSFPPMSTPPPSSTTSASSSSPAPSSTDWFGMPPNIPPGPPLYPKVFKVDERRNAQPSPSNMPTCRQVIIGDDGEQAQPFIVNGQQVAFQIAFNDNYADYDGNTKNRMSKRDSPYGNEVSDCGCLWWPNQ

SEQ ID NO: 31487 - DNA, 3817 bp, Muscodor strobelii
  misc_feature: SGI EST ID NO. CUFF.74558.0
  misc_feature: Variant of the nucleotide sequence at SEQ ID NO 31485
cggagacacgacagagtgcatggggagggaaaagggctgattaaaaccaagttaaaccatctcaggcacttttgctgcacgtccaaggcaaggatctgggcaaaagcccgggccaacccccagcccctgtcgacgaggatccatcgaactcgcgcagccggccagtcacgactctgccgtcgccgggctctgcatattcgcccatagcgccatgctgtgttggggtgggtttggggtgtattggggtggaatcggggtggtgtcgcttgtgtgcttcagtcttggccgtttggactgtttggactgtctgggccatctggcgcttgggtttccattcctgtcccgtcgaccccggtcgggcagggcctgcactgggagttgttccgtagtctctctctcgtagagtcgtagcagggtcgtagtctctccgtagtccctcttgtcacctgtcgctggtctgtgtgcggtggtggtgtcttggtgtcccgtacagccactcacgccgcccctgttctcccgttcgccagattcttactgtactctctcgcccagacgagcatcatccatcagcaccacatacccaacgccagccaaacatcgccaatccagtcaatccgcgactggcatccttggaatcgacactgcactgcggaagcgtgcctcgaggcgactaatctcgacgttgaatggaaagatagagataattgtgtgcatccttcgctcgatgactgccgcgaattgacgcccccgaccgtccccagcccgcggaggcggcgaagttgaagcaattgccgcccactcgtcccgtcgaggattctcgccatcacgatctgctttgtaggcacttacagacgccatcatgagcgaaccaaacgactccaaaacacgcgaactggaacggggcagctcgctcagggcctccatgagacggtcgctccaccaggccgacgataacgacgactatgacttgcaagctatgggaatctcggacgggtttcgacctgcacacgtcgcacagaatcacccgtctcacgtcacgcgcgactccatatcgtcactagagcctccggcgccacggcctgtgtctccgcggccgtccagcatcgcaaagccgcatcacccgcgcgagtccttctcgctccgcaacgacggcgccgcacgaggcttggctaggtcgccaagtacgtcgacgcagcccacccttgtggactcggagactccctacaacggcccatccgggccctctcatccttaccagatgtacccgcagaatgtccgactggcaaggacagcgagtgtggctacgtcatccaccgcgccagtatccgaacgatcatacagtggacctcgcggtccgactcatccctacaacatctatccgcagaacgtgacgtcgggggatgccgtcgaggccggggaagctggcctgagtggttccgctgtgcgagacaatatagtaggctttcccggaacggccgaccaatatcgtagacggcttgggcccgatggagaggaagccgcggatctgatcggacccgatggccacactgagcagctgcctccttacacgagatatccggatgcagttagtgctcagaaggccatagacatgggcgccatccccgtgggggcaagtctggatatcgtccaacccacgtccacagcgacgtcgactcctacacagccaaatcttgaaatccccggcgctggtgggataggcctggcaacccggaacccggaatttgcttcgaccgacgatttggaccgccttagctcaccggcgtctcgtcgatccatacggagtttcacatcagatgccagtcatcatgccatcaatacgggtgccctagccgtcgtggacgagaagagaaccgagaagaattggaaaatagctgcgaagcgaaaagtttggggtgtcgtcccctgttggtgcgttgtgctgggcatggtagtgctcgtcttcttgggcattctggtgggagtgctcataggcactgtcttcagccatggtccaccaaagaaacacccgagtgatccggcataccctcaagattctagtaccgccaccactgatgctgtagcatatcctacgctgcctccaggcctgccgtctttaccgtgtgaccgcggaaagatgtatgctgtgggattggggctcccatctcgctcttcgtccgcgtgttttgcggacgagagcttagaagcgtcgtggaactgcaatcccaccttctcccaactaacaatgcagacgcgaagactcgacaacgctccagaaactgccgcctatgctatagacttcaactacaacaagtcgctgacgctagaagcaaacttctacgcgtacggagtgcaaccactcaatttctctaatatcacgcttaccctggtcaacgatacatttcagttaacacaaggaccagcttgggcttttgcagtaccctacaccaaaaccatacttgtacccgaaccttacctgcatgcacctggttccacatcggacaaggaggacaagcactactcacgcgaagctcgcgggcgccatgtcagcccgcgcatgcagtatgggcaagatttcaagcggagaggaatagcacagcgtggtgaaaagccatggatctgccaatggcctgagaccatactggaaatgtttatctatgtcaccgatgaaagcagtcacagcggcgacccgtttgatcatgacgaccatccaccgccgccgccctctcaaggatatccgtcatcgacagccgcgaatgccgcccagagcagccaacctagtcggcgtaatggtggtggtggtggtggtggtggtgatggctatcctccatacggtgatgacgatgatgatgatgatcaccacagctcgtttcctcctatgtcaacaccaccgccatcctcgacgacctcagcgtcgtcttccagtccagctccgtcgtccacagactggtttgggatgcctcccaatataccgccaggtcccccactatatccaaaggtgttcaaagtggatgagcgccgcaatgcccaaccttcaccctctaacatgccaacgtgtcgtcaagtcatcattggggatgacggtgaacaagctcaaccattcatcgtcaatgggcaacaagtcgcttttcagattgcattcaacgacaattacgccgattatgacgggaacacgaagaatcggatgtccaaacgagacagtccatacggcaatgaagtgagcgactgtggatgcctctggtggccgaaccagtgagcggtcgatcacagctcataaagatgggtctcacgaactacaaccgaaatatacatttaccccaccaatcccatcaccacatcgacatacacatctacatattccggggtaaaaaaacttgtacatagcgagggacggttctacggatcgggcatcgggacggtcggctgcggcgttcagggaaagtaaagcgcgtatcatatattgctaattttctttccccttatttgtttttatctggagttcttggagatttcgatccgtccatctatctatctacgtacctacttgattttgtattagaaaacttgcacgggaagcgagttaatgactgggttttgatgaggagggaaagacacacacatacacatatcttcctcctttcctagcctcacgcgaactaggagagacctgcatacctgctgtccttacatatctaccacactctcccgcagaccctgctatgatgatgttgaaggggtcaggggaggaccaaaaaatgtacatagttgatcatacatttcatgaatgatagtatcatgaactagcgcagctttcgcttgg

SEQ ID NO: 31488 - DNA, 294 bp, Muscodor strobelii
  misc_feature: SGI cDNA ID NO. 570842
  misc_feature: Encodes the peptide sequence at SEQ ID NO 31489
atggccctctcctctcgggcgatgcggctcaacgagcccgccgcccagctggtcgcccggcctcggtgtatctgtcattttgcctgtattgcctggggcgcggacgagtctcaaggtgaagaattccagggcgaaagacggcgtcctggcgtcgaaaaggatggtgacgattggctccgagtcattgagccactggaagctgcagatgtaacaaaagaaatggggcttcagcaaccaaccgctgctggtctctcgagcggtggccgaccccatttgaggctgttcatgtactag

SEQ ID NO: 31489 - protein, 97 aa, Muscodor strobelii
  misc_feature: SGI Peptide ID NO. 570842
MALSSRAMRLNEPAAQLVARPRCICHFACIAWGADESQGEEFQGERRRPGVEKDGDDWLRVIEPLEAADVTKEMGLQQPTAAGLSSGGRPHLRLFMY

SEQ ID NO: 31490 - DNA, 423 bp, Muscodor strobelii
  misc_feature: SGI cDNA ID NO. 570843
  misc_feature: Elevated expression when VOC is produced
  misc_feature: Encodes the peptide sequence at SEQ ID NO 31491
atggatcaccaaacactgcaccccatggaccctcgacggcatggttctgatacctcgtcctactactctggctcaacaaactccgtctggtctacctccgattcggtatcgtttgtctacacagatgatccatactggtcatggtggggatatgctcaagctccggatcatcctcgtcaagtcggaggtcaagagcatttccgagacctcagcctatggcattttggtggtgcttaccctcctccacctccgccgccacctccgcctcaggcgatgccgggtcctcccgccggattcgaagctggcttcattcagttaggtggtggcggcggaggccacaaccatcaccatcaccctgaagatccggtgtgggggactgacgctgagtatgacgaagaaacggaacccgacgtttgggactaa

SEQ ID NO: 31491 - protein, 140 aa, Muscodor strobelii
  misc_feature: SGI Peptide ID NO. 570843
  misc_feature: Useful for introducing or modulating the production of volatile compounds
MDHQTLHPMDPRRHGSDTSSYYSGSTNSVWSTSDSVSFVYTDDPYWSWWGYAQAPDHPRQVGGQEHFRDLSLWHFGGAYPPPPPPPPPPQAMPGPPAGFEAGFIQLGGGGGGHNHHHHPEDPVWGTDAEYDEETEPDVWD

SEQ ID NO: 31492 - DNA, 1971 bp, Muscodor strobelii
  misc_feature: SGI cDNA ID NO. 570844
  misc_feature: Elevated expression when VOC is produced
  misc_feature: Encodes the peptide sequence at SEQ ID NO 31493
atggcagaacctacaatgatatcagcttccctagatgactcggctgcaaatgctgctccaaccatgtcctcgccgcctcaactagtagacttcttcttcccaggattcagcatgtttgccagcgtcgtgcaaaagtacctacatgtcgatctgaacctctacattcccctggtgctcttcgccggcatgctcactgtctgttggaactacgtcagtcaatacctcatggatcaactggaaactcacttcatgtcggtggttgacatcagaactgatgacgagatctacaatatcttgatggcctgggttgcgtcgcagagattctcccagggtgcgagaagatttgtagtaaacacgaatttgtcatcgcgaagctggtatctttggcgttgggacgatgacgacgacgacgaaaccgagggagatgatagccggtcatcggacaagaagaaaaagaaagcgctctcgtacactccctcttttggcagccactacttctggtacaaagggcgactactgctcttccgacgcacagccaatcgcgagcagaactcgtatatgctagtatctgagaaagaggaaatttcaatatcttgctttgggcgcaatccatgggtgctgaaagagctcctgatggaagctcaacagaagtacatggagaaggatgagttactctatggcccgcccggcactggcaagagttccctgagtttggcccttgctggattcttcaagatgagaatctatatcgtcagcctcagctcgaataatgcgaacgaggagacgctcggtgctttgttcgccgagctgccccggcgatgtgttgttcttcttgaagacattgacaccgctggtctgactcatactcgtgatgagaatggcaactccaaacaggccgacagcaacgatactgagtctaaggaagagagtcgcgatactggaagcagcagtagcagcaataataacaacaataacaacaccaatactaatagtggtcgcttatcgctatccggtttacttaacatactcgatggtgtggcttctcaggaaggtcgagttctcattatgacaacgaatcacctcgagaagcttgacaaagctttgatccgacccggtcgtgtggacatgatagttgaatttggactcgccgacaactacatgacgactaacatcttcaaaaatatattcgcttatcttgagggtgacgatggctctgatcctcttgccctcgccactcttcgtccagacgaacgagacgccgccatcaagagcaaacgaaaagtgcgagccgctcatgatgcaaagatagatgctctggccgaagagtttgcagctagaatccctgctcatgagttcagccctgctgagcttcaaggccacctcatgaagttcaagcgcgaccccgaaaaggcagtcgagggctccgaggagtttgttgagaagactcgaaaagagcacaaggacaaacaactcaaggcggccgaggagagacgcaaggctgaagaggaaaaggaaaaggaagccaagaagaaagccgaggacgagaagaaatccgccgaagatgaggaaaagaagaaagcagaggaggaaatccggaaaagggtagaggaagagatcaagaagcaatttggtgaggagataaagaagaaggttgaagagcaaatgagacaggcctcggccgaaagccacaaggattcaggaaccagtattgttacgttagaacctctttcgcaatccggctcgaccactactactcttgctcagaccgctgcctctgactcagagtcgagatccaatctggtcaggttggatgcagccagcaagccgccagtcggtgagaaacccgcattgactgatattccggcgattaccacgttgatcaaggagaccgaggcaaaggcacctgcaaacgagaaaggacatacacgaacggactccgggtatgtgacgccatcgagcggcgagccttga

SEQ ID NO: 31493 - protein, 656 aa, Muscodor strobelii
  misc_feature: SGI Peptide ID NO. 570844
  misc_feature (224)..(437): Pfam Id: PF00004 Pfam Desc: ATPase family associated with various cellular activities (AAA)
  misc_feature (59)..(236): Pfam Id: PF08740 Pfam Desc: BCS1 N terminal
  misc_feature (59)..(223): Pfam Id: PF08740 Pfam Desc: BCS1 N terminal
  misc_feature (28)..(483): NCBI GI: 115401702 Blast Desc: conserved [Aspergillus terreus NIH2624] gi|114190380|gb|EAU32080.1| conserved [Aspergillus terreus NIH2624]
  misc_feature (224)..(501): NCBI GI: 46134255 Blast Desc: FG09267.1 [Gibberella zeae PH-1]
  misc_feature (7)..(490): NCBI GI: 71002254 Blast Desc: BCS1-like ATPase [Aspergillus fumigatus Af293] gi|66853446|gb|EAL93770.1| BCS1-like ATPase, [Aspergillus fumigatus Af293] gi|159129865|gb|EDP54979.1| BCS1-like ATPase,
  misc_feature (224)..(492): NCBI GI: 171682110 Blast Desc: protein product [Podospora anserina] gi|170941014|emb|CAP66664.1| protein product [Podospora anserina]
  misc_feature (28)..(490): NCBI GI: 119481819 Blast Desc: BCS1-like ATPase, [Neosartorya fischeri NRRL 181] gi|119409092|gb|EAW19041.1| BCS1-like ATPase, [Neosartorya fischeri NRRL 181]
  misc_feature (224)..(489): NCBI GI: 256727737 Blast Desc: NECHADRAFT_1988 [Nectria haematococca mpVI 77-13-4]
  misc_feature (224)..(491): NCBI GI: 164426614 Blast Desc: NCU03921 [Neurospora crassa OR74A] gi|157071407|gb|EAA28324.2| conserved [Neurospora crassa OR74A]
  misc_feature (224)..(491): NCBI GI: 7899408 Blast Desc: related to BCS1 protein precursor [Neurospora crassa]
  misc_feature (20)..(489): NCBI GI: 169775477 Blast Desc: [Aspergillus oryzae RIB40] gi|238495873|ref|XP_002379172.1| BCS1-like ATPase, [Aspergillus flavus NRRL3357] gi|83770069|dbj|BAE60204.1| protein product
  misc_feature (4)..(479): NCBI GI: 67901124 Blast Desc: AN7549.2 [Aspergillus nidulans FGSC A4] gi|40742939|gb|EAA62129.1| AN7549.2 [Aspergillus nidulans FGSC A4] gi|259483868|tpe|CBF79612.1| TPA: BCS1-like ATPase, nidulans
  misc_feature: Useful for introducing or modulating the production of volatile compounds
MAEPTMISASLDDSAANAAPTMSSPPQLVDFFFPGFSMFASVVQKYLHVDLNLYIPLVLFAGMLTVCWNYVSQYLMDQLETHFMSVVDIRTDDEIYNILMAWVASQRFSQGARRFVVNTNLSSRSWYLWRWDDDDDDETEGDDSRSSDKKKKKALSYTPSFGSHYFWYKGRLLLFRRTANREQNSYMLVSEKEEISISCFGRNPWVLKELLMEAQQKYMEKDELLYGPPGTGKSSLSLALAGFFKMRIYIVSLSSNNANEETLGALFAELPRRCVVLLEDIDTAGLTHTRDENGNSKQADSNDTESKEESRDTGSSSSSNNNNNNNTNTNSGRLSLSGLLNILDGVASQEGRVLIMTTNHLEKLDKALIRPGRVDMIVEFGLADNYMTTNIFKNIFAYLEGDDGSDPLALATLRPDERDAAIKSKRKVRAAHDAKIDALAEEFAARIPAHEFSPAELQGHLMKFKRDPEKAVEGSEEFVEKTRKEHKDKQLKAAEERRKAEEEKEKEAKKKAEDEKKSAEDEEKKKAEEEIRKRVEEEIKKQFGEEIKKKVEEQMRQASAESHKDSGTSIVTLEPLSQSGSTTTTLAQTAASDSESRSNLVRLDAASKPPVGEKPALTDIPAITTLIKETEAKAPANEKGHTRTDSGYVTPSSGEP

SEQ ID NO: 31494 - DNA, 1705 bp, Muscodor strobelii
  misc_feature: SGI EST ID NO. CUFF.74725.0
  misc_feature: Variant of the nucleotide sequence at SEQ ID NO 31492
agtactctatggcccgcccggcactggcaagagttccctgagtttggcccttgctggattcttcaagatgagaatctatatcgtcagcctcagctcgaataatgcgaacgaggagacgctcggtgctttgttcgccgagctgccccggcgatgtgttgttcttcttgaagacattgacaccgctggtctgactcatactcgtgatgagaatggcaactccaaacaggccgacagcaacgatactgagtctaaggaagagagtcgcgatactggaagcagcagtagcagcaataataacaacaataacaacaccaatactaatagtggtcgcttatcgctatccggtttacttaacatactcgatggtgtggcttctcaggaaggtcgagttctcattatgacaacgaatcacctcgagaagcttgacaaagctttgatccgacccggtcgtgtggacatgatagttgaatttggactcgccgacaactacatgacgactaacatcttcaaaaatatattcgcttatcttgagggtgacgatggctctgatcctcttgccctcgccactcttcgtccagacgaacgagacgccgccatcaagagcaaacgaaaagtgcgagccgctcatgatgcaaagatagatgctctggccgaagagtttgcagctagaatccctgctcatgagttcagccctgctgagcttcaaggccacctcatgaagttcaagcgcgaccccgaaaaggcagtcgagggctccgaggagtttgttgagaagactcgaaaagagcacaaggacaaacaactcaaggcggccgaggagagacgcaaggctgaagaggaaaaggaaaaggaagccaagaagaaagccgaggacgagaagaaatccgccgaagatgaggaaaagaagaaagcagaggaggaaatccggaaaagggtagaggaagagatcaagaagcaatttggtgaggagataaagaagaaggttgaagagcaaatgagacaggcctcggccgaaagccacaaggattcaggaaccagtattgttacgttagaacctctttcgcaatccggctcgaccactactactcttgctcagaccgctgcctctgactcagagtcgagatccaatctggtcaggttggatgcagccagcaagccgccagtcggtgagaaacccgcattgactgatattccggcgattaccacgttgatcaaggagaccgaggcaaaggcacctgcaaacgagaaaggacatacacgaacggactccgggtatgtgacgccatcgagcggcgagccttgagacctgcttgttacactcatgatttctttcacttttttttcgcggctgcactctttgcatggaacggcgttctggagccaagcagatggtctactaaggaaaatgacttactatgtgtcacaagattagaccgtaaaataaccgagttgcgtttctgacttcgtagaagttcgtatggtaatcagatctttcctttgacgcgacgtgcatgcgtgtcgactctcttcagggtttactctgaaatagcttctcctatctctctgaactcaagcttgtgccttttgcagatggcaaacacttggtctctagctcgagatgtgagtgcttcagacttcatagttcaaagtgccatggagagcatcgaatagttagatgtatagatatatcacggtaacttcggat

SEQ ID NO: 31495 - DNA, 1068 bp, Muscodor strobelii
  misc_feature: SGI cDNA ID NO. 570845
  misc_feature: Reduced expression when VOC is produced
  misc_feature: Encodes the peptide sequence at SEQ ID NO 31496
cgtgagcgcgtgagggaaagaacgcctgagaaagactcttaccgacctgcttaccgagaccggtcacgcctgcgagataaagaaagaagtcgttcaagggcgagacccgaacgaagagagcgcagtcgatctctggaccgctatcggcccggtcagagggagcacagccgctctcgcgtgagagatgagcaaccgaagactgatcgaccggctgagcggcgagatgatcacagggggcattcccgctctcgggagcgcaaacgcgaaaaggaacgtgagggagaccaggacaaggatcgtaagagccgctcacgatcgcgaccagctacgtctaaggggcctgtcttgaatgacgccgaaagctggaagcaaagtgagattaaaagacgcgagcaggaagctaaggcctatctgaaagcgcaaaaggaagctcgcgagaaaggcctccccattcctggatttgatgatagacgtagtgctggagagaggtcaccggaagtccaaagatctcgtgtccctgacgatattgatcgatatcgaccaggcgatcgtgatagagagtccgaaataccgcggggtgataaatattctggacgagatcgagaccgcgagcgagagcgtgacagggatgccgagttgatcgagagcgagagcgggataggaatagagatagagatgatcgccgcgaccgccgtcgtagcaagacgcggagccggagtcgacatcgtgaacgcgaccgcagccgagttagagatcgttctcgggacagagctagagatcgagatcgagaccatgacagggacagccaccgacctcgtgagatcgataagtatcgtgggggagatcgggatcgtgaacgagatcgcgaccgggatagggagaaggatagggagagagacaaagatcgcgaacgacgacgtcgcgacagaagcactgagagaagttcagacgttagaagagatcgcgatcgtgaccgcgatcgcagagatcgtcgggatggcagtcggagtcgcagaagaagccgtagcccgcgttgaaaaccggatggattgtgtcatgtctggatga

SEQ ID NO: 31496 - protein, 355 aa, Muscodor strobelii
  misc_feature: SGI Peptide ID NO. 570845
  misc_feature (68)..(182): NCBI GI: 256731431 Blast Desc: NECHADRAFT_84876 [Nectria haematococca mpVI 77-13-4]
  misc_feature (99)..(185): NCBI GI: 46123463 Blast Desc: FG06109.1 [Gibberella zeae PH-1]
  misc_feature (120)..(182): NCBI GI: 116199333 Blast Desc: CHGG_07822 [Chaetomium globosum CBS 148.51] gi|88179101|gb|EAQ86569.1| CHGG_07822 [Chaetomium globosum CBS 148.51]
  misc_feature (120)..(171): NCBI GI: 85081565 Blast Desc: NCU01466 [Neurospora crassa OR74A] gi|28917819|gb|EAA27507.1| [Neurospora crassa OR74A] gi|38566831|emb|CAE76137.1| [Neurospora crassa]
  misc_feature (119)..(187): NCBI GI: 261358978 Blast Desc: [Verticillium albo-atrum VaMs.102]
  misc_feature (117)..(183): NCBI GI: 171692705 Blast Desc: protein product [Podospora anserina] gi|170946301|emb|CAP73102.1| protein product [Podospora anserina]
  misc_feature (120)..(184): NCBI GI: 39944036 Blast Desc: MGG_04029 [Magnaporthe grisea 70-15] gi|145014752|gb|EDJ99320.1| MGG_04029 [Magnaporthe grisea 70-15]
  misc_feature: Useful for introducing or modulating the production of volatile compounds
RERVRERTPEKDSYRPAYRDRSRLRDKERSRSRARPERRERSRSLDRYRPGQREHSRSRVRDEQPKTDRPAERRDDHRGHSRSRERKREKEREGDQDKDRKSRSRSRPATSKGPVLNDAESWKQSEIKRREQEAKAYLKAQKEAREKGLPIPGFDDRRSAGERSPEVQRSRVPDDIDRYRPGDRDRESEIPRGDKYSGRDRDRERERDRDAELIESESGIGIEIEMIAATAVVARRGAGVDIVNATAAELEIVLGTELEIEIETMTGTATDLVRSISIVGEIGIVNEIATGIGRRIGRETKIANDDVATEALREVQTLEEIAIVTAIAEIVGMAVGVAEEAVARVENRMDCVMSG

SEQ ID NO: 31497 - DNA, 1464 bp, Muscodor strobelii
  misc_feature: SGI EST ID NO. CUFF.74589.0
  misc_feature: Variant of the nucleotide sequence at SEQ ID NO 31495
gtgagggaaagaacgcctgagaaagactcttaccgacctgcttaccgagaccggtcacgcctgcgagataaagaaagaagtcgttcaagggcgagacccgaacgaagagagcgcagtcgatctctggaccgctatcggcccggtcagagggagcacagccgctctcgcgtgagagatgagcaaccgaagactgatcgaccggctgagcggcgagatgatcacagggggcattcccgctctcgggagcgcaaacgcgaaaaggaacgtgagggagaccaggacaaggatcgtaagagccgctcacgatcgcgaccagctacgtctaaggggcctgtcttgaatgacgccgaaagctggaagcaaagtgagattaaaagacgcgagcaggaagctaaggcctatctgaaagcgcaaaaggaagctcgcgagaaaggcctccccattcctggatttgatgatagacgtagtgctggagagaggtcaccggaagtccaaagatctcgtgtccctgacgatattgatcgatatcgaccaggcgatcgtgatagagagtccgaaataccgcggggtgataaatattctggacgagatcgagaccgcgagcgagagcgtgacagggatgccgagttgtcccggggtgataaatatcttggacgcgatcgagaccgagaccgagacaaggatcgagagcgagagcgggataggaatagagatagagatgatcgccgcgaccgccgtcgtagcaagacgcggagccggagtcgacatcgtgaacgcgaccgcagccgagttagagatcgttctcgggacagagctagagatcgagatcgagaccatgacagggacagccaccgacctcgtgagatcgataagtatcgtgggggagatcgggatcgtgaacgagatcgcgaccgggatagggagaaggatagggagagagacaaagatcgcgaacgacgacgtcgcgacagaagcactgagagaagttcagacgttagaagagatcgcgatcgtgaccgcgatcgcagagatcgtcgggatggcagtcggagtcgcagaagaagccgtagcccgcgttgaaaaccggtatgctacaaaggttgactccaagcaacattcctgtccaactcggctgccaagggaacagaaaaggtcgtactcaaaaatgtctttctctattatcggatacctggagggatattcggcctttttcgtagaagtggtcacgaactgtacgatttcaagactggacaaaagaaaatatgcctgggatattgtagttgacaagagaggcgatgggaagacctgcgctactcttgttcttgcgattacatgttttcaagctgcataggatggattgtgtcatgtctggatgatggacgacttgttgactattgaatctgtacagataccctcaattgtcttgatatgtgtattgtccaagatgctaatgtgaattaaaac

SEQ ID NO: 31498 - DNA, 1461 bp, Muscodor strobelii
  misc_feature: SGI cDNA ID NO. 570846
  misc_feature: Reduced expression when VOC is produced
  misc_feature: Encodes the peptide sequence at SEQ ID NO 31499
atgacgactcctgtagatggcatcgttatcgggctgctgtcctcgtttggctcggctattgttgtcgccctcatcttcctcatcatctatttcttcagacacaccacctccggccgcatcttcctcgaccgcatagggaggccgggcgaatacgatgatgaacaagctttcgcccgcgaggaggctgaggccttggagacgatggacgatatgcagaggactgaatacttaagggccaaagcattcatacagagcaacccgcctgagtcagtccagacggacatttcgttatctcagtacttggctattcaggagaagggcgtttccgcatgggagtttgaacccgagctggagattgcaaactgttttgtggaggcgaggaccgagattgagttctttgactcggaatgcactgtcatgagcaacctgcctgtgcccaagcagaacgaagtgtactactgggaggccaagatatacgagaagcccgaaaacacactactgagcatcggcatgtctacaaagccttatcctttatttagacttccaggattccacaaatattctgttgcgtatacctccacgggtgggcgcagatacaaccaaccattttcttcaacttcctacggcccagcttatgtgcagggtgatgttatcggtgtagggtacaggcctcgcacgggaaccatcttcttcacccgcaacggcaagcgattagacgatgtcattcatgggctgaagacaccaaacttcttcccttcagtcggtgccaatgggcctgccgttgttcatgtgaattttggccaagccggatttgtcttcatcgaggccaatgtcaagaagtggggtctggcaccaatgactggtagtttggcacctccaccgccgtatgggagtgagcaaggcagcatcctcctggagactggtcgtaggaaagatgaggccccagagtcgccgtctcggtctcatgcccgcagctattctcattctattcaaacttatacacacggcggtccgatactagacccgggtcactcacgtacacggagtggaaatttccgagttctcccgcctaccagtccaggaccacagagaagtcctacagatatttcactggcccaattggttcccacggacgagggaggcgaaggcagtagtcatcacaggaatatttcaggggatcacgtggtggacattaccgggcttggtatcaacgaggccgcacatccacctcccgaatacacgagccccgagcattctgatgcagatggtggcgacagcagctctgatagcgatagcacgcccctcattcggacgccagcacgcagccgtggagcttccgtggcgacactgcgagcacataaccctccgatacctagctatagcgatgctgttcgacagggcgccggtagggaccggagtcgcagcgacaccagcgcttggcaaacgagaggtggtcgttaa

SEQ ID NO: 31499 - protein, 486 aa, Muscodor strobelii
  misc_feature: SGI Peptide ID NO. 570846
  misc_feature (149)..(270): Pfam Id: PF00622 Pfam Desc: SPRY domain
  misc_feature (5)..(479): NCBI GI: 85103147 Blast Desc: NCU03678 [Neurospora crassa OR74A] gi|74623279|sp|Q96UB6.1|SSH4_NEUCR RecName: Full=Protein ssh-4 gi|16415985|emb|CAD01107.1| conserved [Neurospora crassa] crassa
  misc_feature (5)..(486): NCBI GI: 116198331 Blast Desc: CHGG_07321 [Chaetomium globosum CBS 148.51] gi|88178600|gb|EAQ86068.1| CHGG_07321 [Chaetomium globosum CBS 148.51]
  misc_feature (6)..(473): NCBI GI: 171692381 Blast Desc: protein product [Podospora anserina] gi|170946139|emb|CAP72940.1| protein product [Podospora anserina]
  misc_feature (2)..(478): NCBI GI: 39957891 Blast Desc: MGG_09210 [Magnaporthe grisea 70-15] gi|145013352|gb|EDJ97993.1| MGG_09210 [Magnaporthe grisea 70-15]
  misc_feature (7)..(475): NCBI GI: 256728679 Blast Desc: [Nectria haematococca mpVI 77-13-4]
  misc_feature (7)..(475): NCBI GI: 46109940 Blast Desc: FG01852.1 [Gibberella zeae PH-1]
  misc_feature (5)..(475): NCBI GI: 154309704 Blast Desc: BC1G_07322 [Botryotinia fuckeliana B05.10] gi|172052492|sp|A6S3E0.1|SSH4_BOTFB RecName: Full=Protein ssh4 gi|150851783|gb|EDN26976.1| BC1G_07322 [Botryotinia fuckeliana
  misc_feature (5)..(475): NCBI GI: 156051984 Blast Desc: SS1G_07399 [Sclerotinia sclerotiorum 1980] gi|171704400|sp|A7EQ00.1|SSH4_SCLS1 RecName: Full=Protein ssh4 gi|154705177|gb|EDO04916.1| SS1G_07399 [Sclerotinia sclerotiorum
  misc_feature (7)..(476): NCBI GI: 225561558 Blast Desc: endosome protein [Ajellomyces capsulatus G186AR]
  misc_feature (7)..(476): NCBI GI: 240274664 Blast Desc: endosome protein [Ajellomyces capsulatus H143]
  misc_feature: Useful for introducing or modulating the production of volatile compounds
MTTPVDGIVIGLLSSFGSAIVVALIFLIIYFFRHTTSGRIFLDRIGRPGEYDDEQAFAREEAEALETMDDMQRTEYLRAKAFIQSNPPESVQTDISLSQYLAIQEKGVSAWEFEPELEIANCFVEARTEIEFFDSECTVMSNLPVPKQNEVYYWEAKIYEKPENTLLSIGMSTKPYPLFRLPGFHKYSVAYTSTGGRRYNQPFSSTSYGPAYVQGDVIGVGYRPRTGTIFFTRNGKRLDDVIHGLKTPNFFPSVGANGPAVVHVNFGQAGFVFIEANVKKWGLAPMTGSLAPPPPYGSEQGSILLETGRRKDEAPESPSRSHARSYSHSIQTYTHGGPILDPGHSRTRSGNFRVLPPTSPGPQRSPTDISLAQLVPTDEGGEGSSHHRNISGDHVVDITGLGINEAAHPPPEYTSPEHSDADGGDSSSDSDSTPLIRTPARSRGASVATLRAHNPPIPSYSDAVRQGAGRDRSRSDTSAWQTRGGR

SEQ ID NO: 31500 - DNA, 2751 bp, Muscodor strobelii
  misc_feature: SGI EST ID NO. CUFF.74728.0
  misc_feature: Variant of the nucleotide sequence at SEQ ID NO 31498
aggcgagccaggctaaccaggtcccctcttgctcctgcatcgtccgctacagcgcctgttaggcgactctcgactctcgactcgctgctctctgctcccgctccgctacttcgctgcaactcacgaactctcttttcgccaccccttcgtaatcccccatttgcccaaatctttttctcctcgtaacaccttcactccctgcctttctttcgccattctcttcgctgtttatccgttgtatccgagcgccttcccgccaacagcgagcccgcgtgcctgccacccactgtagagcgtgacccttatcgccgccggtcgccaatcccgcatccctcgtcgcgaccaggctcgatcgaccacgacgacatttccatcacctatcgaaccccgacagccgttccctacctgtctcactactgtgcaatatcgctcccttatctgggcctcttcgtccgactattagagcaccgatctgctgcctagactgtccgctggcccggggtgttcggcgtcgacccgccctggtctgcatgacgacgacgaaccgatgacgctaacttcccactgttcactgctgtttgcgctccgttcgacattcgcaacccgctgtccttcaacatgacgactcctgtagatggcatcgttatcgggctgctgtcctcgtttggctcggctattgttgtcgccctcatcttcctcatcatctatttcttcagacacaccacctccggccgcatcttcctcgaccgcatagggaggccgggcgaatacgatgatgaacaagctttcgcccgcgaggaggctgaggccttggagacgatggacgatatgcagaggactgaatacttaagggccaaagcattcatacagagcaacccgcctgagtcagtccagacggacatttcgttatctcagtacttggctattcaggagaagggcgtttccgcatgggagtttgaacccgagctggagattgcaaactgttttgtggaggcgaggaccgagattgagttctttgactcggaatgcactgtcatgagcaacctgcctgtgcccaagcagaacgaagtgtactactgggaggccaagatatacgagaagcccgaaaacacactactgagcatcggcatgtctacaaagccttatcctttatttagacttccaggattccacaaatattctgttgcgtatacctccacgggtgggcgcagatacaaccaaccattttcttcaacttcctacggcccagcttatgtgcagggtgatgttatcggtgtagggtacaggcctcgcacgggaaccatcttcttcacccgcaacggcaagcgattagacgatgtcattcatgggctgaagacaccaaacttcttcccttcagtcggtgccaatgggcctgccgttgttcatgtgaattttggccaagccggatttgtcttcatcgaggccaatgtcaagaagtggggtctggcaccaatgactggtagtttggcacctccaccgccgtatgggagtgagcaaggcagcatcctcctggagactggtcgtaggaaagatgaggccccagagtcgccgtctcggtctcatgcccgcagctattctcattctattcaaacttatacacacggcggtccgatactagacccgggtcactcacgtacacggagtggaaatttccgagttctcccgcctaccagtccaggaccacagagaagtcctacagatatttcactggcccaattggttcccacggacgagggaggcgaaggcagtagtcatcacaggaatatttcaggggatcacgtggtggacattaccgggcttggtatcaacgaggccgcacatccacctcccgaatacacgagccccgagcattctgatgcagatggtggcgacagcagctctgatagcgatagcacgcccctcattcggacgccagcacgcagccgtggagcttccgtggcgacactgcgagcacataaccctccgatacctagctatagcgatgctgttcgacagggcgccggtagggaccggagtcgcagcgacaccagcgcttggcaaacgagaggtggtcgttaagagacaaacttacggtccgccttcgcatctgcaggcagtataggtattaaatgcgaagggaataagagaagctgcataggaaaagctctacaccatacttggtaaaacagacctggtatggatccaagactggattttttacttgtgcattaacatggaaagcggcgtctgggtgtctgggacaaggcagtcttgcctgttgctgttattgttttttaaacggtcacgacggcacacacatccatacaatagcatcggcgatgggttggggggcgagtcagcggcgaaacttatatgatacctcgaagttagaagaaatcatgacttattcaaatgaactgtggcttgttacctgttccatctagagtctcggaggcaaggctttgtggcaaaacattgtgatcaaaatgacatctgaaaaatacgactgctggcgtcacactgtatttactcggtcatacaatacaagacgaaaatggatctttgcgaacaaatttccaaggtactgagatggtacaggacatgaattcatacccctcaccagatcgtgccagtaccccctttctttcccctcactagggcacttgtcagaatagatgtcatatatgccttacgagttgaataggtaacaaataatctctacttgtagcatgctatttggatctttgtttg

SEQ ID NO: 31501 - DNA, 1755 bp, Muscodor strobelii
  misc_feature: SGI cDNA ID NO. 570847
  misc_feature: Encodes the peptide sequence at SEQ ID NO 31502
atgtcatctaaacatttcatcaacgatcccacgttactggtgaacagcgccctgcactccctaacattgaccaatccctctcttgccctcgacgcagagaacaagataatctaccaacgaccgtcagactcaccatcccaagtctcgctcatttccggtggtggttcaggccatgagccctcattcggggcatttgtgggcaatggcctactctccgctgccgtagccggcaccatcttcgccagtccgagcgcggagcaggtgaggaaggcgattatgggcagagtggatgcggagaagggagttctagtcacggtcatgaattataccggggatgtgctgaattttggcatggccgtggagaaggcgagggcccaggggttgagggtcgagatgcttgttgttggggatgatgtgggtgtggggaggaagaaagggggcaaggttgggagacgagggatcgctgggacggtattggccggcgcactagctgcccagggcgcgagtcttgatcaagtccacaaagttgcgaaactcacagccgataatatcattagtgtcggcgcgagtttagaacatgttcatgttcctggacgtgcggcactggacgagggcagtctgggcgctgatgaagtcgagatcggcatggggattcacaacgaagctggttctggccgagccaaagtcgagttgcccgagctcgtgaagacgatgcttgcccaactgctcgacaagaatgacgcagatcgagcatttctaaacgtgaattcgaatgaagtcgtgctgctcatcaacaacttgggcggtgtctctgtcctcgagttgggtggcatcacggcggaagttgttcagcagcttgggcaatggggcattcaacctgtgaggatcttggccgggacgtatatgacgagtttgaatgggaacggattcagtatttcgttgctgaatgtggtgaatacggatattggcggaccgagtatgattcagctgcttgattatccatgtgaagctacgggctggtcggcgccgatcaagaaagagacttgggaagcgaggaatacaaatacgcgagaggacggtactggagaggaacaggctgtcaaatccagtgggttgaagggtgacgcggaagtgttcaagagcgcgttgacgagtgggttggaagcacttgtttctgttgagcctgaggttacgaagttcgatactgttgttggtgatggagattgcggtattggcttgaaacggggtgctgaagctgtgctcaagcatctccaagcggctgacttaacaggcgatgtcgtggtcgacgttgctaatatcgttcccgttatcgagaatgccatggacggcacgtctggagcactgtttgctattttcctcaacgcacttgtgcactcacttcgtgtcctgccacctggagaggcaacagcacaagtctggtccgaagccttgaaccagagctgtgaggcactgtccaaatacactccagccagaccaggcgatagaacacttgtcgatgctctatatccattcgtggacactctaggcagctcgggcgatctcaagcaggcagccgaagcatctaagaaagcggcagagggcaccaaaggtatggaagccagtcttggacgagctgtgtatgttggtggctccggtttcgaggatgtccccgacccaggtgcgtttggcctcgcgaccttcttcctggggttagctggactgaagcccaatgaagagggatgggaaactctgtga

SEQ ID NO: 31502 - protein, 584 aa, Muscodor strobelii
  misc_feature: SGI Peptide ID NO. 570847
  misc_feature (18)..(340): Pfam Id: PF02733 Pfam Desc: Dak1 domain
  misc_feature (403)..(573): Pfam Id: PF02734 Pfam Desc: DAK2 domain
  misc_feature (1)..(578): NCBI GI: 154310660 Blast Desc: BC1G_06804 [Botryotinia fuckeliana B05.10] gi|150851344|gb|EDN26537.1| BC1G_06804 [Botryotinia fuckeliana B05.10]
  misc_feature (1)..(574): NCBI GI: 156058486 Blast Desc: dihydroxyacetone kinase [Sclerotinia sclerotiorum 1980] gi|154701042|gb|EDO00781.1| dihydroxyacetone kinase [Sclerotinia sclerotiorum 1980]
  misc_feature (1)..(582): NCBI GI: 261358980 Blast Desc: dihydroxyacetone kinase [Verticillium albo-atrum VaMs.102]
  misc_feature (1)..(573): NCBI GI: 46125279 Blast Desc: FG07017.1 [Gibberella zeae PH-1]
  misc_feature (1)..(572): NCBI GI: 256731407 Blast Desc: [Nectria haematococca mpVI 77-13-4]
  misc_feature (1)..(584): NCBI GI: 116198157 Blast Desc: CHGG_07234 [Chaetomium globosum CBS 148.51] gi|88178513|gb|EAQ85981.1| CHGG_07234 [Chaetomium globosum CBS 148.51]
  misc_feature (1)..(572): NCBI GI: 39944006 Blast Desc: MGG_04014 [Magnaporthe grisea 70-15] gi|145014736|gb|EDJ99304.1| MGG_04014 [Magnaporthe grisea 70-15]
  misc_feature (1)..(582): NCBI GI: 12718490 Blast Desc: glycerone kinase isoform [Neurospora crassa]
  misc_feature (1)..(584): NCBI GI: 164426900 Blast Desc: NCU03779 [Neurospora crassa OR74A] gi|157071521|gb|EAA31889.2| conserved [Neurospora crassa OR74A]
  misc_feature (1)..(575): NCBI GI: 189208115 Blast Desc: dihydroxyacetone kinase [Pyrenophora tritici-repentis Pt-1C-BFP] gi|187976484|gb|EDU43110.1| dihydroxyacetone kinase [Pyrenophora tritici-repentis Pt-1C-BFP]
  misc_feature (4)..(549): SWISSPROT Homolog: EC 2.7.1.29 Glycerone kinase
MSSKHFINDPTLLVNSALHSLTLTNPSLALDAENKIIYQRPSDSPSQVSLISGGGSGHEPSFGAFVGNGLLSAAVAGTIFASPSAEQVRKAIMGRVDAEKGVLVTVMNYTGDVLNFGMAVEKARAQGLRVEMLVVGDDVGVGRKKGGKVGRRGIAGTVLAGALAAQGASLDQVHKVAKLTADNIISVGASLEHVHVPGRAALDEGSLGADEVEIGMGIHNEAGSGRAKVELPELVKTMLAQLLDKNDADRAFLNVNSNEVVLLINNLGGVSVLELGGITAEVVQQLGQWGIQPVRILAGTYMTSLNGNGFSISLLNVVNTDIGGPSMIQLLDYPCEATGWSAPIKKETWEARNTNTREDGTGEEQAVKSSGLKGDAEVFKSALTSGLEALVSVEPEVTKFDTVVGDGDCGIGLKRGAEAVLKHLQAADLTGDVVVDVANIVPVIENAMDGTSGALFAIFLNALVHSLRVLPPGEATAQVWSEALNQSCEALSKYTPARPGDRTLVDALYPFVDTLGSSGDLKQAAEASKKAAEGTKGMEASLGRAVYVGGSGFEDVPDPGAFGLATFFLGLAGLKPNEEGWETL

SEQ ID NO: 31503 - DNA, 3238 bp, Muscodor strobelii
  misc_feature: SGI EST ID NO. CUFF.74810.0
  misc_feature: Variant of the nucleotide sequence at SEQ ID NO 31501
cggagaagtatccgtcgtttgttcacgtctctaattcaatctctagacatcaagcacggaagtttatgtggtgaatctgtccatcgagtgtaattgtacagaaaagatctacagatacaaatactccacgattcacacagcaacgtggacacaccgaacatcaaactgacttctttttctcactatcctctggtatagcgtggtctatacatcacaacgccatcatgtcatctaaacatttcatcaacgatcccacgttactggtgaacagcgccctgcactccctaacattgaccaatccctctcttgccctcgacgcagagaacaagataatctaccaacgaccgtcagactcaccatcccaagtctcgctcatttccggtggtggttcaggccatgagccctcattcggggcatttgtgggcaatggcctactctccgctgccgtagccggcaccatcttcgccagtccgagcgcggagcaggtgaggaaggcgattatgggcagagtggatgcggagaagggagttctagtcacggtcatgaattataccggggatgtgctgaattttggcatggccgtggagaaggcgagggcccaggggttgagggtcgagatgcttgttgttggggatgatgtgggtgtggggaggaagaaagggggcaaggttgggagacgagggatcgctgggacggtattgggtaagattctcatgaattatttgaggcgcaagtgttaacatttatgcagtgagtttcgtctctaccttgggagatgactgccgtggctagagagagagtgtgcgcggtaagagttgaagttgagactaatgtgtgtttgatactaggttcacaagatagccggcgcactagctgcccagggcgcgagtcttgatcaagtccacaaagttgcgaaactcacagccgataatatcattagtgtcggcgcgagtttagaacatgttcatgttcctggacgtgcggcactggacgagggcagtctgggcgctgatgaagtcgagatcggcatggggattcacaacgaagctggttctggccgagccaaagtcgagttgcccgagctcgtgaagacgatgcttgcccaactgctcgacaagaatgacgcagatcgagcatttctaaacgtgaattcgaatgaagtcgtgctgctcatcaacaacttgggcggtgtctctgtcctcgagttgggtggcatcacggcggaagttgttcagcagcttgggcaatggggcattcaacctgtgaggatcttggccgggacgtatatgacgagtttgaatgggaacggattcagtatttcgttgctgaatgtggtgaatacggatattggcggaccgagtatgattcagctgcttgattatccatgtgaagctacgggctggtcggcgccgatcaagaaagagacttgggaagcgaggaatacaaatacgcgagaggacggtactggagaggaacaggctgtcaaatccagtgggttgaagggtgacgcggaagtgttcaagagcgcgttgacgagtgggttggaagcacttgtttctgttgagcctgaggttacgaagttcgatactgttgttggtgatggagattgcggtattggcttgaaacggggtgctgaagctgtgctcaagcatctccaagcggctgacttaacaggcgatgtcgtggtcgacgttgctaatatcgttcccgttatcgagaatgccatggacggcacgtctggagcactgtttgctattttcctcaacgcacttgtgcactcacttcgtgtcctgccacctggagaggcaacagcacaagtctggtccgaagccttgaaccagagctgtgaggcactgtccaaatacactccagccagaccaggcgatagaacacttgtcgatgctctatatccattcgtggacactctaggcagctcgggcgatctcaagcaggcagccgaagcatctaagaaagcggcagagggcaccaaaggtatggaagccagtcttggacgagctgtgtatgttggtggctccggtttcgaggatgtccccgacccaggtgcgtttggcctcgcgaccttcttcctggggttagctggactgaagcccaatgaagagggatgggaaactctgtgataggagcatatgcacatagggaagttcagtcacgagcagcgagaataacagaaaccttgtaatattgtgaatttcattcatttatcaactcgtggtatcccatcctgacgccggtgtcaaataagccacggcaacgagacgtgtaacttatgactgtcctcgtgctgccatttttctgattgttgttgcccaaatgcatcgagcttgtggttctgggatgattctgatacaatgatgctcgtagtctggctgcaccggctggcagaggcttggacgttttcctaatccttatcgcgtgggccatgggtatttctcgtactctcttctcgtaaccacctccccgttcctattaactgagcagtaccagaatgaccgaatctcctctcaagaacctgcaacagagtatgtcagtacttttctgtcccttgaaacaatgtaagggcgcagtctcgcagccaggccgaaagaaagagcagacgtacatcttgctgacgaagcggtccttgttgacgggcctgcccttcttgccgttggagaggcggggcgtctcagtccacatctccttcacgttctcgaggaccatgttgcagtggcgatcgaaggccttgacgcgggcgaggagcttgcggttgttgcggatggagatgagcacctgcgtgtggctgcggacggcggtctgcagaatggacagggggccgttgctgaactcgtactcctcgaggagcgacacttcatattctctacggaatgcatgttagtttgtttctggcgatcgcgctcagaagcagcagggcgagcaaagggtgaggtggaggggtggagggagcggcgtacgtcaactcgtttctgggcttcgtgagaagctccctgttcacaattagctatgcctgatcaaccgcacgtgttgaagcagagacttactggatctttgcgtcggccatggtgcgaggttggtcgtgcagtatggcggcgacaaaggtgggaatgacttggcaaggctgaagtgacgggatgtagcgctgttattgagatggcactggcgatgatgttgttgtcgataagaaattaagatccgcccgcgtttgaggtgcttgggggag

SEQ ID NO: 31504 - DNA, 354 bp, Muscodor strobelii
  misc_feature: SGI cDNA ID NO. 570848
  misc_feature: Encodes the peptide sequence at SEQ ID NO 31505
atggccgacgcaaagatccaggagcttctcacgaagcccagaaacgagttgacagaatatgaagtgtcgctcctcgaggagtacgagttcagcaacggccccctgtccattctgcagaccgccgtccgcagccacacgcaggtgctcatctccatccgcaacaaccgcaagctcctcgcccgcgtcaaggccttcgatcgccactgcaacatggtcctcgagaacgtgaaggagatgtggactgagacgccccgcctctccaacggcaagaagggcaggcccgtcaacaaggaccgcttcgtcagcaagatgttcttgagaggagattcggtcattctggtactgctcagttaa

SEQ ID NO: 31505 - protein, 117 aa, Muscodor strobelii
  misc_feature: SGI Peptide ID NO. 570848
  misc_feature (36)..(116): Pfam Id: PF01423 Pfam Desc: LSM domain
  misc_feature (1)..(117): NCBI GI: 39944004 Blast Desc: MGG_04013 [Magnaporthe grisea 70-15] gi|145014735|gb|EDJ99303.1| MGG_04013 [Magnaporthe grisea 70-15]
  misc_feature (2)..(117): NCBI GI: 164426898 Blast Desc: small nuclear ribonucleoprotein Sm D2 [Neurospora crassa OR74A] gi|157071520|gb|EAA31888.2| small nuclear ribonucleoprotein Sm D2 [Neurospora crassa OR74A]
  misc_feature (1)..(117): NCBI GI: 256731018 Blast Desc: [Nectria haematococca mpVI 77-13-4]
  misc_feature (1)..(117): NCBI GI: 156058484 Blast Desc: SS1G_03254 [Sclerotinia sclerotiorum 1980] gi|154701041|gb|EDO00780.1| SS1G_03254 [Sclerotinia sclerotiorum 1980]
  misc_feature (2)..(117): NCBI GI: 46125281 Blast Desc: FG07018.1 [Gibberella zeae PH-1]
  misc_feature (1)..(117): NCBI GI: 171685514 Blast Desc: protein product [Podospora anserina] gi|170942718|emb|CAP68371.1| protein product [Podospora anserina]
  misc_feature (1)..(117): NCBI GI: 189208117 Blast Desc: small nuclear ribonucleoprotein Sm D2 [Pyrenophora tritici-repentis Pt-1C-BFP] gi|187976485|gb|EDU43111.1| small nuclear ribonucleoprotein Sm D2 [Pyrenophora tritici-repentis
  misc_feature (2)..(106): NCBI GI: 12718491 Blast Desc: small nuclear ribonucleoprotein chain D2 [Neurospora crassa]
  misc_feature (1)..(117): NCBI GI: 212529806 Blast Desc: small nuclear ribonucleoprotein SmD2, [Penicillium marneffei ATCC 18224] gi|210074458|gb|EEA28545.1| small nuclear ribonucleoprotein SmD2, [Penicillium marneffei ATCC 18224]
  misc_feature (1)..(117): NCBI GI: 242762206 Blast Desc: small nuclear ribonucleoprotein SmD2, [Talaromyces stipitatus ATCC 10500] gi|218723525|gb|EED22942.1| small nuclear ribonucleoprotein SmD2, [Talaromyces stipitatus ATCC 10500]
MADAKIQELLTKPRNELTEYEVSLLEEYEFSNGPLSILQTAVRSHTQVLISIRNNRKLLARVKAFDRHCNMVLENVKEMWTETPRLSNGKKGRPVNKDRFVSKMFLRGDSVILVLLS

SEQ ID NO: 31506 - DNA, 1297 bp, Muscodor strobelii
  misc_feature: SGI EST ID NO. CUFF.74811.1
  misc_feature: Variant of the nucleotide sequence at SEQ ID NO 31504
ctcccccaagcacctcaaacgcgggcggatcttaatttcttatcgacaacaacatcatcgccagtgccatctcaataacagcgctacatcccgtcacttcagccttgccaagtcattcccacctttgtcgccgccatactgcacgaccaacctcgcaccatggccgacgcaaagatccaggagcttctcacgaagcccagaaacgagttgacagaatatgaagtgtcgctcctcgaggagtacgagttcagcaacggccccctgtccattctgcagaccgccgtccgcagccacacgcaggtgctcatctccatccgcaacaaccgcaagctcctcgcccgcgtcaaggccttcgatcgccactgcaacatggtcctcgagaacgtgaaggagatgtggactgagacgccccgcctctccaacggcaagaagggcaggcccgtcaacaaggaccgcttcgtcagcaagatgttcttgagaggagattcggtcattctggtactgctcagttaataggaacggggaggtggttacgagaagagagtacgagaaatacccatggcccacgcgataaggattaggaaaacgtccaagcctctgccagccggtgcagccagactacgagcatcattgtatcagaatcatcccagaaccacaagctcgatgcatttgggcaacaacaatcagaaaaatggcagcacgaggacagtcataagttacacgtctcgttgccgtggcttatttgacaccggcgtcaggatgggataccacgagttgataaatgaatgaaattcacaatattacaaggtttctgttattctcgctgctcgtgactgaacttccctatgtgcatatgctcctatcacagagtttcccatccctcttcattgggcttcagtccagctaaccccaggaagaaggtcgcgaggccaaacgcacctgggtcggggacatcctcgaaaccggagccaccaacatacacagctcgtccaagactggcttccatacctttggtgccctctgccgctttcttagatgcttcggctgcctgcttgagatcgcccgagctgcctagagtgtccacgaatggatatagagcatcgacaagtgttctatcgcctggtctggctggagtgtatttggacagtgcctcacagctctggttcaaggcttcggaccagacttgtgctgttgcctctccaggtggcaggacacgaagtgagtgcacaagtgcgttgaggaaaatagcaaacagtgctccagactatacaccgagtgcgtcagtaatgagttgttg

SEQ ID NO: 31507 - DNA, 1440 bp, Muscodor strobelii
  misc_feature: SGI cDNA ID NO. 570849
  misc_feature: Reduced expression when VOC is produced
  misc_feature: Encodes the peptide sequence at SEQ ID NO 31508
atgcctctcaaggccaggatcttgaatcccatcgttgcttcgaaagcacagatgtccacccactcgccttatgccgaaataataaaagaactgcccggcgacgaggtcgacgatgtcgtcttcaacaacctctatggtgtccgcaccatcgaactcaaccgcccggccaagctcaacgccctcaatggctccatgattcgcaagatagtcccacgcctcgtcgagtgggagaagtcagacatggccaatgtcatcgtcatgaagggtgccggtgacaaggctttttgcgccggcggcgacgtgaccgctttggccacgcagaacagggaaggtcccgaaggtcagaaaaggtcaaccgactacttcactctagaatacaagcttgaccacctcatcgccacctataagaagccctacatcgccttcatggacggcatcaccatgggcggcggcgtcgggctcagcatacatgctcccttccgtattgccaccgagcgcacagtcttcgccatgcccgagaccaccatcggcttcttcccggacgtcggcgcctctttcttcatgcccaggctgcccggcgctgtaggcacttacctggccctgacgagtgaccagctcaaaggcgccaacgtcttctactcaggcgttgccacccactacctgcattccaccagtcttcctagtcttgagtcccgtctagccgaactgcggttccgggactatgacagcatagagaagcgactgggcattatcgagatgaccatcgaggaatacgcgacgggcctgcctgccaatgagccaccattgattgctggccctctccgtgccgccatcgaccgctgctttagcaaggagactgtgggtgaggtggttgctgccctaaaggaggagcagggtggccccgcaagtgagtgggcggagaagactctgcacaccttacaccagcgatcacccacagccgtgcacgtcactctcaagcagatgcaggtcggccgggactggtccatcaaggacacatttcagagggagcagcagatcgcctctaaattcatgcagcatggcgactttaccgagggcgtaacggcacgcttgatctcgcgggagaagcctaagcctgcgcccaagtggcaacctgccacgctggatgatgtgcgagccgaggacaagatcgaggagcctttctttgagatggacaaggtgatgcccaggatgaagatgctggtgaatcgtgactacgatgaatacccctacaagtcatttggtgtgcctacggaggcagaggttgaatatatggtactggaaggaaagagaacggccaaggaaatagtggactatttcgtccagaaaaagaacggcaggcaaggtatcaatacaattatccaggaaattttggaccggaagacctcgataggggagggcggtaagcccgtctggaactaa

SEQ ID NO: 31508 - protein, 479 aa, Muscodor strobelii
  misc_feature: SGI Peptide ID NO. 570849
  misc_feature (48)..(222): Pfam Id: PF00378 Pfam Desc: Enoyl-CoA hydratase/isomerase family
  misc_feature (48)..(191): Pfam Id: PF00378 Pfam Desc: Enoyl-CoA hydratase/isomerase family
  misc_feature (1)..(478): NCBI GI: 154310656 Blast Desc: BC1G_06802 [Botryotinia fuckeliana B05.10] gi|150851342|gb|EDN26535.1| BC1G_06802 [Botryotinia fuckeliana B05.10]
  misc_feature (1)..(478): NCBI GI: 156058482 Blast Desc: SS1G_03253 [Sclerotinia sclerotiorum 1980] gi|154701040|gb|EDO00779.1| SS1G_03253 [Sclerotinia sclerotiorum 1980]
  misc_feature (1)..(478): NCBI GI: 116198155 Blast Desc: CHGG_07233 [Chaetomium globosum CBS 148.51] gi|88178512|gb|EAQ85980.1| CHGG_07233 [Chaetomium globosum CBS 148.51]
  misc_feature (1)..(474): NCBI GI: 261358982 Blast Desc: 3-hydroxyisobutyryl-CoA hydrolase [Verticillium albo-atrum VaMs.102]
  misc_feature (1)..(478): NCBI GI: 256731406 Blast Desc: NECHADRAFT_49136 [Nectria haematococca mpVI 77-13-4]
  misc_feature (1)..(478): NCBI GI: 145607135 Blast Desc: MGG_04012 [Magnaporthe grisea 70-15] gi|145014734|gb|EDJ99302.1| MGG_04012 [Magnaporthe grisea 70-15]
  misc_feature (22)..(478): NCBI GI: 46125283 Blast Desc: FG07019.1 [Gibberella zeae PH-1]
  misc_feature (1)..(474): NCBI GI: 171694089 Blast Desc: protein product [Podospora anserina] gi|170946993|emb|CAP73797.1| protein product [Podospora anserina]
  misc_feature (1)..(466): NCBI GI: 85101280 Blast Desc: NCU03777 [Neurospora crassa OR74A] gi|16944696|emb|CAC28821.2| related to enoyl-CoA-hydratase [Neurospora crassa] gi|28922662|gb|EAA31887.1| NCU03777 crassa
  misc_feature (1)..(475): NCBI GI: 240106888 Blast Desc: 3-hydroxyisobutyryl-CoA hydrolase, mitochondrial precursor, [Coccidioides posadasii C735 delta SOWgp]
  misc_feature (34)..(387): SWISSPROT Homolog: EC 3.1.2.4 3-hydroxyisobutyryl-CoA hydrolase
  misc_feature: Useful for introducing or modulating the production of volatile compounds
MPLKARILNPIVASKAQMSTHSPYAEIIKELPGDEVDDVVFNNLYGVRTIELNRPAKLNALNGSMIRKIVPRLVEWEKSDMANVIVMKGAGDKAFCAGGDVTALATQNREGPEGQKRSTDYFTLEYKLDHLIATYKKPYIAFMDGITMGGGVGLSIHAPFRIATERTVFAMPETTIGFFPDVGASFFMPRLPGAVGTYLALTSDQLKGANVFYSGVATHYLHSTSLPSLESRLAELRFRDYDSIEKRLGIIEMTIEEYATGLPANEPPLIAGPLRAAIDRCFSKETVGEVVAALKEEQGGPASEWAEKTLHTLHQRSPTAVHVTLKQMQVGRDWSIKDTFQREQQIASKFMQHGDFTEGVTARLISREKPKPAPKWQPATLDDVRAEDKIEEPFFEMDKVMPRMKMLVNRDYDEYPYKSFGVPTEAEVEYMVLEGKRTAKEIVDYFVQKKNGRQGINTIIQEILDRKTSIGEGGKPVWN

SEQ ID NO: 31509 - DNA, 7512 bp, Muscodor strobelii
  misc_feature: SGI EST ID NO. CUFF.74737.2
  misc_feature: Variant of the nucleotide sequence at SEQ ID NO 31507
aagatgcctaggtcccaggcccaagctctcgaaacaagattggtagatagtagtgcagcttgcagcagactacctaactaagtagaccgtcggcatagatcgccaatcttttgctgagaagcgtggaaacccattgccgcggacttcgaccccgacccatatcaccagcccgtcataccgattcgacacactgcttctcgatgcgcgcccctctatcccatgcgcatcgaggaaacgtgatatccagataaatgtcgttccgcttgcttgtcaggaggccgggcaccacagctcatgcggccaggcgcagcttgaatgtgaacatgcctctcaaggccaggatcttgaatcccatcgttgcttcgaaagcacagatgtccacccactcgccttatgccgaaataataaaagaactgcccggcgacgaggtcgacgatgtcgtcttcaacaacctctatggtgtccgcaccatcgaactcaaccgcccggccaagctcaacgccctcaatggctccatgattcgcaagatagtcccacgcctcgtcgagtgggagaagtcagacatggccaatgtcatcgtcatgaagggtgccggtgacaaggctttttgcgccggcggcgacgtgaccgctttggccacgcagaacagggaaggtcccgaaggtcagaaaaggtcaaccgactacttcactctagaatacaagcttgaccacctcatcgccacctataagaagccctacatcgccttcatggacggcatcaccatgggcggcggcgtcgggctcagcatacatgctcccttccgtattgccaccgagcgcacagtcttcgccatgcccgagaccaccatcggcttcttcccggacgtcggcgcctctttcttcatgcccaggctgcccggcgctgtaggcacttacctggccctgacgagtgaccagctcaaaggcgccaacgtcttctactcaggcgttgccacccactacctgcattccaccagtcttcctagtcttgagtcccgtctagccgaactgcggttccgggactatgacagcatagagaagcgactgggcattatcgagatgaccatcgaggaatacgcgacgggcctgcctgccaatgagccaccattgattgctggccctctccgtgccgccatcgaccgctgctttagcaaggagactgtgggtgaggtggttgctgccctaaaggaggagcagggtggccccgcaagtgagtgggcggagaagactctgcacaccttacaccagcgatcacccacagccgtgcacgtcactctcaagcagatgcaggtcggccgggactggtccatcaaggacacatttcagagggagcagcagatcgcctctaaattcatgcagcatggcgactttaccgagggcgtaacggcacgcttgatctcgcgggagaagcctaagcctgcgcccaagtggcaacctgccacgctggatgatgtgcgagccgaggacaagatcgaggagcctttctttgagatggacaaggtgatgcccaggatgaagatgctggtgaatcgtgactacgatgaatacccctacaagtcatttggtgtgcctacggaggcagaggttgaatatatggtactggaaggaaagagaacggccaaggaaatagtggactatttcgtccagaaaaagaacggcaggcaaggtatcaatacaattatccaggaaattttggaccggaagacctcgataggggagggcggtaagcccgtctggaactaacaatgagaaaatgttggcaaggcttatattgtacaaaattaatgcggcttccgcttgtagaatagaaaatagaaaatcatcaagttacatgcgagaagcgaatttctaatcaaattgctatctactgcacttgcaacacagcggagtcgaaaatgatggccgaattatcactttggcggagcgtgcatcaaaaggggctttcaatcgaggaggcgacgacaaggctggaaatgcaggaggggggcattagttgtgctgtggcagcggttgtaagtggttgagtcataagcgcgacggggataaacggacgttggaatggaggtgggggcgggtgcaattgtgtaagagtataaatacagcggagagtcccctcgaggggttcggaaatgatgggaaattcccaccaagttcacatctcacggcgtggtgcgatagacaaactgaccagaccccggtcgcagcctggttctctgtgtttgactctcgttctttgagagcggcagtcgagtgtggaatctcagactcctaaactccgggtggagattctcgactctgtccataactagaaagtggctcgtgcgctgcaggtctacggccccaccaagaagcagaagaacgttgtcggcactcgggtggctggggctgttcagctcgcagctgtgacgtcctctgcacgcgggacacggtgacggaacacggctccacccataacaacgcgcttatcagaggaaggaacagcactacctagctccctcaagctggttcctatcgcgcgacatccccacggtcgcgcgcgtcacacgcattaaagacgccaaaaagatacatgcgcccaccccattaaactccgctgcaatcttgtacctctgacaacccgcaccgaccatcgtcttcatttctacacctcctccctctccttcaccaccaccacgatataccgcattccacagctgttgggccacggttcagtccgcattggctcttcccggttgtgccttgcggtactccaaaggctccttaccaattgtgctgccaattattaaatttgagacattcatcgtcgtgttgcatctcttgtctttcgtccggtccccgtgtctccgttccttctctgttgtgttgtcgtctcaagttcttcacggccgacacgtgcgcatactaaccacttacgaacatgaacgaaccttgacgagagcattgacttgctaccaccatacatgttgaataaccattttcacaatcgaattccgtagacacacgattgttgccggcgtgacgtgggtcgagcttgattctcgatcaaagcaatacacgtcgtccgcgaccaattgtcgctcaagatggctcatcaccaccagccgtggggcaacacgcctcctccttcgcagcaagaggagaacgggcctcaattcaggcccatgggtttgaaagtccattacaccttcgatagagatggccaggagagatgcctcgctcgattgcctcatcccctccacatccagacgattgccatggacacgcagactattggtgttgttgacctacgaatctgcttacaagccgtctcccactgcagccctgagttgacgggggacggggagagggattacgccatctatgcgaccgactattcagaagccgacacccccttggttggtcaagggctcttatctcaagggctaaatccgggcctcggtcaggaatccaaggtggtggtcggacgcgttacacagaatgtcctggctatcttcggcaatggggtgagggagacgttggaggttaagcttaagctcaccgctcttcccaagttcgcccagcacggacgacacgactcgatgtcacgcccgtcgccagctagtgtgccgccgccgaacctaccaacagcctcctccatggtatccgacagcggcgagtggaacaactcgttcatgctgcctcagcctggccctggtcaccggcagtcggcgccgcccatgcctgcagctatggtcccgacgccgccagcagcgccaactcacccccaaagcaatcccagcttcgaagccaggaacgacacaccggtacgagagtatccgccgattcagcctgcgccgggctctcgacctggctctgtaggtccttactcaatggaaccaaacacaacaactttcatccatgtcccgtcggtcgcacccatgaggcaggaaggcaaatcaaccgcaaaatccacaaagtcccgttctggatcccgaccaaattccagagcatcaagtcgagcacctacggggaatccccgtggccgccctcgcaagagagcgcttgctagcgaaggcaatacttctggatacgaggatggcacagatggagacgagggtccttcgcaagctaagaagcgagcaatcatcaccaaaggcgagcgcagtaacacagcaactttcgggtccgctcctgagtcgctccgtgttgccgccagcaccgctggttccatccgtaacattcgaccctttggctctaccggagatgctccgacgggaaaccatttgcaggaggcgccgagagcaccaacaccagttcctgggcctcgctttcaggggcagccaaatcagagaccggcgggccaaagcagcttgagacgtcaatctacgacaagtccttcagcctttgtaccaaacccgcagtatctcgatgctaaccggtccttcagccaggacgctcgctcaccatcagactcacctgctccgtcaccgtttagtgatgaacccagccctgctgacatcggctcctcacctcccgtgccacgttcggcgatgtatagtatgaactctagtcctgcgccatcaagtcccatcttgccgccgatgcctgcgccagtatcacaacctgactctggatttatgagtggtggcttggacgacaatcgcacggatgtcgatttggcagtcaagcccattgaaactccagtccccgttccgattataccacaaacattcccaatgtcacaagcagttccattgccaaaatcaaaacccaagccgcgccgacggcctgctaagaagcaagagccgaaagctcaccccaaatctgagccagcacctatgccggggcaagattctcagatgcatactgaaatctatgcgcctccgcagccattacctcctcctcgaacacttgattcactacctccgtgcataaccaaccagccaatagttgggacacctcttacaattcaaagtgacttcccagactcaaacgaatccccaatgccatctctggttatcaaaccagatgtggtgggcgcagaggtacgagaggaagcgggaagttgcgagcctgaggtttctgaacagaaccacggcaatccagtgcagacagagcagcctcaagtccagggtccacaagtagatttcacgctcttggaggccgctctgaaggactacccaaacgatcaagacttccttgaaacattaggtctcgggacccagtcttacagccctacccacggtctgccaacggaagaagcttcttttgcgggttcgccacctgatgagatggaaggtagacaggatggcaaaatggatcctcctgctctgcctacgccggttgcagagccgtctattgaaccggaactgccagctatccctgccagtgatcctgtcctgccgcaaatgacgcagtctttccccttgactgaggccccacatccccagaccgatgccgtcgatggtatggactctaggatgaacaagaactttgtaaagagacaagcaatcaaacagaagctggaggaggcagtagctgctggtcaaatgccgtcattttgtagcaactgcggagctctgcagacgcccacctggcgtaagatctggaaacaggaacatcatggtgttcccgcctatcacgagtactcggaaaaacccggacacgtcaccgccatcaacgtccttaagagagacgaaagtggtacaccaacgttatacgaaactattaaaaagtcattgggccccacggatgacaagagcaaatggacagaagttctactgtgtaaccgtgagtattgcattatatcttgactatgacgctgtttctaaccctgaaaagcatgtggaatatggttctcgaaatggaagtcgcatcgtcctccggagaagtgggaaaaggacgagcaacggctcacgcaaacccgcaagaaacgagctggcacaggtggggctgccagacccagaaaatcccgagccaagagtgactcacaaatgaatctcacatcggaggcctgtcttgccactgattcaatcgagccagcagatgctccaagtcaaccagtaacaaacgcaccgagcttcgaccagaacgagaatgcttctgagcatgggtcgggacgcaatcgtaagagagttgccaccgaggccgtagatcaagggtcgactcattcacgtgcttcccgagctggtgattcggcgataagccctatcgatctcgacgacgagcttggaggcacccgccgattactattcccatcgccacgcaaagagggagaacagaagattctgggagaggttgcagtgaatattgtacagactggcccaaagaccttcgagttcaaggacgatgaaggagccgaaaagaagattggcgtagtccgaaatgagaccccagagccgcagtctaatggatttgctgatctgtttggtccgactccacggccatcgacgccacctcccagagccgccaacagcggacccttcaagacaccaacacgaccgacccctagccatcgtcccatcaccagaagtgtgtcaaagagtttgcgctcaaataggtcccgcaattcgccggctcagcgactcttagatcggactcctacccgcacacccaaaagaactccgcggtctgctttcatagattctctgccacgccgctcgcctcgtcatctgaacctgtcagatgcaattggcgggagtcacctaaactcacccatgtcgcaatccatcagccaaatgctgtctgacgggaatcatctgctactgcagactcctacacatggctttgagttagacttcgggtcgctcggacaaatggataacatcgatcaattcggcgatttcgatttcagcctccttaacacggatccactgatgccgagttcgccgcctctacgcgatggtgggatgatggcttttggtggaaatttgacccttgatatggggcacgagagcttgacggagcgcaatcctaaggggaagcgctctgatgggatcggtcctaggagtttgccctcccagtaagctctaaaattatgagctctccttgcccttttaggatgcaacgtcgccttcttcgtgggctggcaagttgcatcaagaaaggctcgatgactgatgaaatggcgttcgagaaattcttacgctgcagcattaaagctaattcgcgatcaattatgggagttcgaccacatgggaatggctacactcatgggcgtttttgcggtgtttctatattgattttgttgtccttcgaggagttgattggcggtggacatacccatgtgttagtgacgcaaatggcgtcgagggaaatgtttgatgatgatatcattgttgctatctcgcttgttgagactagagacgaagaaaagacgaactcattttcgggctcgtgtggtggatggatgtacataggaatggatgtcagctgatagttgactgtgggttgattagtatatagtgtcgatttactgaataaagctaccacgacagtggcagatttttctgtg

SEQ ID NO: 31510 - DNA, 3870 bp, Muscodor strobelii
  misc_feature: SGI cDNA ID NO. 570850
  misc_feature: Reduced expression when VOC is produced
  misc_feature: Encodes the peptide sequence at SEQ ID NO 31511
atggctcatcaccaccagccgtggggcaacacgcctcctccttcgcagcaagaggagaacgggcctcaattcaggcccatgggtttgaaagtccattacaccttcgatagagatggccaggagagatgcctcgctcgattgcctcatcccctccacatccagacgattgccatggacacgcagactattggtgttgttgacctacgaatctgcttacaagccgtctcccactgcagccctgagttgacgggggacggggagagggattacgccatctatgcgaccgactattcagaagccgacacccccttggttggtcaagggctcttatctcaagggctaaatccgggcctcggtcaggaatccaaggtggtggtcggacgcgttacacagaatgtcctggctatcttcggcaatggggtgagggagacgttggaggttaagcttaagctcaccgctcttcccaagttcgcccagcacggacgacacgactcgatgtcacgcccgtcgccagctagtgtgccgccgccgaacctaccaacagcctcctccatggtatccgacagcggcgagtggaacaactcgttcatgctgcctcagcctggccctggtcaccggcagtcggcgccgcccatgcctgcagctatggtcccgacgccgccagcagcgccaactcacccccaaagcaatcccagcttcgaagccaggaacgacacaccggtacgagagtatccgccgattcagcctgcgccgggctctcgacctggctctgtaggtccttactcaatggaaccaaacacaacaactttcatccatgtcccgtcggtcgcacccatgaggcaggaaggcaaatcaaccgcaaaatccacaaagtcccgttctggatcccgaccaaattccagagcatcaagtcgagcacctacggggaatccccgtggccgccctcgcaagagagcgcttgctagcgaaggcaatacttctggatacgaggatggcacagatggagacgagggtccttcgcaagctaagaagcgagcaatcatcaccaaaggcgagcgcagtaacacagcaactttcgggtccgctcctgagtcgctccgtgttgccgccagcaccgctggttccatccgtaacattcgaccctttggctctaccggagatgctccgacgggaaaccatttgcaggaggcgccgagagcaccaacaccagttcctgggcctcgctttcaggggcagccaaatcagagaccggcgggccaaagcagcttgagacgtcaatctacgacaagtccttcagcctttgtaccaaacccgcagtatctcgatgctaaccggtccttcagccaggacgctcgctcaccatcagactcacctgctccgtcaccgtttagtgatgaacccagccctgctgacatcggctcctcacctcccgtgccacgttcggcgatgtatagtatgaactctagtcctgcgccatcaagtcccatcttgccgccgatgcctgcgccagtatcacaacctgactctggatttatgagtggtggcttggacgacaatcgcacggatgtcgatttggcagtcaagcccattgaaactccagtccccgttccgattataccacaaacattcccaatgtcacaagcagttccattgccaaaatcaaaacccaagccgcgccgacggcctgctaagaagcaagagccgaaagctcaccccaaatctgagccagcacctatgccggggcaagattctcagatgcatactgaaatctatgcgcctccgcagccattacctcctcctcgaacacttgattcactacctccgtgcataaccaaccagccaatagttgggacacctcttacaattcaaagtgacttcccagactcaaacgaatccccaatgccatctctggttatcaaaccagatgtggtgggcgcagaggtacgagaggaagcgggaagttgcgagcctgaggtttctgaacagaaccacggcaatccagtgcagacagagcagcctcaagtccagggtccacaagtagatttcacgctcttggaggccgctctgaaggactacccaaacgatcaagacttccttgaaacattaggtctcgggacccagtcttacagccctacccacggtctgccaacggaagaagcttcttttgcgggttcgccacctgatgagatggaaggtagacaggatggcaaaatggatcctcctgctctgcctacgccggttgcagagccgtctattgaaccggaactgccagctatccctgccagtgatcctgtcctgccgcaaatgacgcagtctttccccttgactgaggccccacatccccagaccgatgccgtcgatggtatggactctaggatgaacaagaactttgtaaagagacaagcaatcaaacagaagctggaggaggcagtagctgctggtcaaatgccgtcattttgtagcaactgcggagctctgcagacgcccacctggcgtaagatctggaaacaggaacatcatggtgttcccgcctatcacgagtactcggaaaaacccggacacgtcaccgccatcaacgtccttaagagagacgaaagtggtacaccaacgttatacgaaactattaaaaagtcattgggccccacggatgacaagagcaaatggacagaagttctactgtgtaacccatgtggaatatggttctcgaaatggaagtcgcatcgtcctccggagaagtgggaaaaggacgagcaacggctcacgcaaacccgcaagaaacgagctggcacaggtggggctgccagacccagaaaatcccgagccaagagtgactcacaaatgaatctcacatcggaggcctgtcttgccactgattcaatcgagccagcagatgctccaagtcaaccagtaacaaacgcaccgagcttcgaccagaacgagaatgcttctgagcatgggtcgggacgcaatcgtaagagagttgccaccgaggccgtagatcaagggtcgactcattcacgtgcttcccgagctggtgattcggcgataagccctatcgatctcgacgacgagcttggaggcacccgccgattactattcccatcgccacgcaaagagggagaacagaagattctgggagaggttgcagtgaatattgtacagactggcccaaagaccttcgagttcaaggacgatgaaggagccgaaaagaagattggcgtagtccgaaatgagaccccagagccgcagtctaatggatttgctgatctgtttggtccgactccacggccatcgacgccacctcccagagccgccaacagcggacccttcaagacaccaacacgaccgacccctagccatcgtcccatcaccagaagtgtgtcaaagagtttgcgctcaaataggtcccgcaattcgccggctcagcgactcttagatcggactcctacccgcacacccaaaagaactccgcggtctgctttcatagattctctgccacgccgctcgcctcgtcatctgaacctgtcagatgcaattggcgggagtcacctaaactcacccatgtcgcaatccatcagccaaatgctgtctgacgggaatcatctgctactgcagactcctacacatggctttgagttagacttcgggtcgctcggacaaatggataacatcgatcaattcggcgatttcgatttcagcctccttaacacggatccactgatgccgagttcgccgcctctacgcgatggtgggatgatggcttttggtggaaatttgacccttgatatggggcacgagagcttgacggagcgcaatcctaaggggaagcgctctgatgggatcggtcctaggagtttgccctcccagtaa

SEQ ID NO: 31511 - protein, 1289 aa, Muscodor strobelii
  misc_feature: SGI Peptide ID NO. 570850
  misc_feature (306)..(1255): NCBI GI: 39944000 Blast Desc: MGG_04011 [Magnaporthe grisea 70-15] gi|145014733|gb|EDJ99301.1| MGG_04011 [Magnaporthe grisea 70-15]
  misc_feature (759)..(1266): NCBI GI: 256731405 Blast Desc: NECHADRAFT_20376 [Nectria haematococca mpVI 77-13-4]
  misc_feature (753)..(1245): NCBI GI: 261358983 Blast Desc: conserved [Verticillium albo-atrum VaMs.102]
  misc_feature (792)..(1261): NCBI GI: 85075947 Blast Desc: NCU01461 [Neurospora crassa OR74A] gi|28916871|gb|EAA26613.1| [Neurospora crassa OR74A] gi|28950320|emb|CAD70945.1| conserved [Neurospora crassa]
  misc_feature (759)..(1258): NCBI GI: 46125285 Blast Desc: FG07020.1 [Gibberella zeae PH-1]
  misc_feature (751)..(1259): NCBI GI: 171692717 Blast Desc: protein product [Podospora anserina] gi|170946307|emb|CAP73108.1| protein product [Podospora anserina]
  misc_feature (18)..(518): NCBI GI: 116199319 Blast Desc: CHGG_07815 [Chaetomium globosum CBS 148.51] gi|88179094|gb|EAQ86562.1| CHGG_07815 [Chaetomium globosum CBS 148.51]
  misc_feature (15)..(534): NCBI GI: 256731405 Blast Desc: NECHADRAFT_20376 [Nectria haematococca mpVI 77-13-4]
  misc_feature (756)..(1279): NCBI GI: 156058480 Blast Desc: SS1G_03252 [Sclerotinia sclerotiorum 1980] gi|154701039|gb|EDO00778.1| SS1G_03252 [Sclerotinia sclerotiorum 1980]
  misc_feature (19)..(536): NCBI GI: 154310654 Blast Desc: BC1G_06801 [Botryotinia fuckeliana B05.10] gi|150851341|gb|EDN26534.1| BC1G_06801 [Botryotinia fuckeliana B05.10]
  misc_feature: Useful for introducing or modulating the production of volatile compounds
MAHHHQPWGNTPPPSQQEENGPQFRPMGLKVHYTFDRDGQERCLARLPHPLHIQTIAMDTQTIGVVDLRICLQAVSHCSPELTGDGERDYAIYATDYSEADTPLVGQGLLSQGLNPGLGQESKVVVGRVTQNVLAIFGNGVRETLEVKLKLTALPKFAQHGRHDSMSRPSPASVPPPNLPTASSMVSDSGEWNNSFMLPQPGPGHRQSAPPMPAAMVPTPPAAPTHPQSNPSFEARNDTPVREYPPIQPAPGSRPGSVGPYSMEPNTTTFIHVPSVAPMRQEGKSTAKSTKSRSGSRPNSRASSRAPTGNPRGRPRKRALASEGNTSGYEDGTDGDEGPSQAKKRAIITKGERSNTATFGSAPESLRVAASTAGSIRNIRPFGSTGDAPTGNHLQEAPRAPTPVPGPRFQGQPNQRPAGQSSLRRQSTTSPSAFVPNPQYLDANRSFSQDARSPSDSPAPSPFSDEPSPADIGSSPPVPRSAMYSMNSSPAPSSPILPPMPAPVSQPDSGFMSGGLDDNRTDVDLAVKPIETPVPVPIIPQTFPMSQAVPLPKSKPKPRRRPAKKQEPKAHPKSEPAPMPGQDSQMHTEIYAPPQPLPPPRTLDSLPPCITNQPIVGTPLTIQSDFPDSNESPMPSLVIKPDVVGAEVREEAGSCEPEVSEQNHGNPVQTEQPQVQGPQVDFTLLEAALKDYPNDQDFLETLGLGTQSYSPTHGLPTEEASFAGSPPDEMEGRQDGKMDPPALPTPVAEPSIEPELPAIPASDPVLPQMTQSFPLTEAPHPQTDAVDGMDSRMNKNFVKRQAIKQKLEEAVAAGQMPSFCSNCGALQTPTWRKIWKQEHHGVPAYHEYSEKPGHVTAINVLKRDESGTPTLYETIKKSLGPTDDKSKWTEVLLCNPCGIWFSKWKSHRPPEKWEKDEQRLTQTRKKRAGTGGAARPRKSRAKSDSQMNLTSEACLATDSIEPADAPSQPVTNAPSFDQNENASEHGSGRNRKRVATEAVDQGSTHSRASRAGDSAISPIDLDDELGGTRRLLFPSPRKEGEQKILGEVAVNIVQTGPKTFEFKDDEGAEKKIGVVRNETPEPQSNGFADLFGPTPRPSTPPPRAANSGPFKTPTRPTPSHRPITRSVSKSLRSNRSRNSPAQRLLDRTPTRTPKRTPRSAFIDSLPRRSPRHLNLSDAIGGSHLNSPMSQSISQMLSDGNHLLLQTPTHGFELDFGSLGQMDNIDQFGDFDFSLLNTDPLMPSSPPLRDGGMMAFGGNLTLDMGHESLTERNPKGKRSDGIGPRSLPSQ

SEQ ID NO: 31512 - DNA, 7512 bp, Muscodor strobelii; identical to SEQ ID NO: 31509
  misc_feature: SGI EST ID NO. CUFF.74737.2
  misc_feature: Variant of the nucleotide sequence at SEQ ID NO 31510

SEQ ID NO: 31513 - DNA, 339 bp, Muscodor strobelii
  misc_feature: SGI cDNA ID NO. 570851
  misc_feature: Encodes the peptide sequence at SEQ ID NO 31514
atggattccgtctcaacaccccgcatctctgcctccatgctcgactcgcacgttggcacgaatgtcatggtcgtcggccaagtcatgcaattgcgaggcgatactgctctcctagatgccggcggccagatcagccttctcattgacaacaatgttcatcttgttgctggcaacggtgctcagatcattggcaaagtgaatcccgatatgtctatcaaggtatggaatgccatggatctaggcaataacgttgattttcaagttgcgcagagcgtcgtcgaggtcactcaccagtacaaggacctcttcatctttccttctgacacaaaaatgaactga

SEQ ID NO: 31514 - protein, 112 aa, Muscodor strobelii
  misc_feature: SGI Peptide ID NO. 570851
  misc_feature (1)..(103): Pfam Id: PF08661 Pfam Desc: Replication factor A protein 3
  misc_feature (5)..(103): NCBI GI: 171692715 Blast Desc: protein product [Podospora anserina] gi|170946306|emb|CAP73107.1| protein product [Podospora anserina]
  misc_feature (2)..(105): NCBI GI: 261358987 Blast Desc: conserved [Verticillium albo-atrum VaMs.102]
  misc_feature (1)..(105): NCBI GI: 145607133 Blast Desc: MGG_04010 [Magnaporthe grisea 70-15] gi|145014732|gb|EDJ99300.1| MGG_04010 [Magnaporthe grisea 70-15]
  misc_feature (5)..(105): NCBI GI: 85075943 Blast Desc: NCU01460 [Neurospora crassa OR74A] gi|28916870|gb|EAA26612.1| [Neurospora crassa OR74A] gi|28950321|emb|CAD70946.1| related to single-stranded DNA 12k
  misc_feature (2)..(104): NCBI GI: 256727861 Blast Desc: NECHADRAFT_45969 [Nectria haematococca mpVI 77-13-4]
  misc_feature (2)..(90): NCBI GI: 46130890 Blast Desc: FG09000.1 [Gibberella zeae PH-1]
  misc_feature (2)..(103): NCBI GI: 154310652 Blast Desc: BC1G_06800 [Botryotinia fuckeliana B05.10] gi|150851340|gb|EDN26533.1| BC1G_06800 [Botryotinia fuckeliana B05.10]
  misc_feature (1)..(103): NCBI GI: 189207697 Blast Desc: conserved [Pyrenophora tritici-repentis Pt-1C-BFP] gi|187976275|gb|EDU42901.1| conserved [Pyrenophora tritici-repentis Pt-1C-BFP]
  misc_feature (2)..(103): NCBI GI: 156058478 Blast Desc: [Sclerotinia sclerotiorum 1980] gi|154701038|gb|EDO00777.1| [Sclerotinia sclerotiorum 1980]
  misc_feature (1)..(103): NCBI GI: 169614556 Blast Desc: SNOG_10424 [Phaeosphaeria nodorum SN15] gi|111060698|gb|EAT81818.1| SNOG_10424 [Phaeosphaeria nodorum SN15]
MDSVSTPRISASMLDSHVGTNVMVVGQVMQLRGDTALLDAGGQISLLIDNNVHLVAGNGAQIIGKVNPDMSIKVWNAMDLGNNVDFQVAQSVVEVTHQYKDLFIFPSDTKMN

SEQ ID NO: 31515 - DNA, 1894 bp, Muscodor strobelii
  misc_feature: SGI EST ID NO. CUFF.74618.0
  misc_feature: Variant of the nucleotide sequence at SEQ ID NO 31513
tatgaacagcagggttaaaccttcagtatctcatgactagtgtgagttcgtggggtaatcgtatggaacgagtatgatatgcgtctctgatccaaacaaggtcattgaaatgcgcaatttgcgagagatcatggctcaggatcttgagctcagatagtcatcatacagatgaggttgcctgacccgagatgaaatgagaaataactttggtactttgcactcattacaatggaaggcacgttttgaaatgaagctatgacgacagaatcgaagataggcagctgccagcagctgggtctcttgcatgtagccagtcgcggcaaacctcacatagagacgcggtagtcgcgtctttgcttaatctgaaagcttcatcggttgggtaccttaggtaggggtaagactcgtgtatcgttcaatacaaagcttcaccagactcgccttctgaactcctaacttggccatactgtgaaatttcagtgcatgcctccagagacactgcggacgactaagtctcgcagcattatcctaccaaaatggattccgtctcaacaccccgcatctctgcctccatgctcgactcgcacgttggcacgaatgtcatggtcgtcggccaagtcatgcaattgcgaggcgatactgctctcctagatgccggcggccagatcagccttctcattgacaacaatgttcatcttgttgctggcaacggtgctcagatcattggcaaagtgaatcccgatatgtctatcaaggtatggaatgccatggatctaggcaataacgttgattttcaagttgcgcagagcgtcgtcgaggtcactcaccagtacaaggacctcttcatctttccttctgacacaaaaatgaactgacggttcgtacgcggacgcgtgtctttgggttggtcggctagcttaggaccgtcgtcaacactggaatctggagcacaacctcaatctcaaccacagcatggccgtaacgtcccagttcgaccgcctactgtatactcttttacggactcagatgagctgctcagctcatcaatctcatcatcatcatcgctaaacaatgagctatcacgacttgtgattgctgatgattctccctcctcaccttggatcggcggccagccccgatctcggcccccatctgctgcgagtatccaggcattttcggactcggactcggatgtcgtactcagttcttcatcttcgtcctcgtcttcactcgatggcgagctatcacggttagtgatcgatgacgagctcgttccatcatcgcgtctcgtcctggctcaaacctcgcaagagtctcgattcagttcccagcaaacccagcaactatctcaagaaacccaaacaacgcaacagacccagtataccgactcgacgacccaaactacgcccccgcgtcaaccttctgtagcctcacagatgtcatccccgaactcgtatatcaattccgaaaatcaataccccccagccactctaattcagtcctcaacgcagtccactccgcgaacagggcgcttatatcggcggcgatctggtacgttggtaagtgctgctgagctccgggaactaagaagatgggaacaagaattgctggctgccgttctggctggcattcggatgggaaaagatgagcgctcgatacccctgagcacggatagaatagggcggtggaggatcaactcaatttctgaaccgggccccacgatagatgatgtagacgtggagatgtagatggtcctttacgagacgaatgaattaatgaaaagttttctaaggacacgcttttgctttgtgatataaatgcctggtgtagtcctaaaggcaatacgtttaatacgtttaggatttcatgagaaataagattcaattaaatcgcg

SEQ ID NO: 31516 - DNA, 1092 bp, Muscodor strobelii
  misc_feature: SGI cDNA ID NO. 570852
  misc_feature: Reduced expression when VOC is produced
  misc_feature: Encodes the peptide sequence at SEQ ID NO 31517
atggatgcaacatcaaattatctccactatgatattgaagaagagggggatgaggactttggcgtctttggaaccgaagatacccaaagtcatggccagttcccacagacactggaagcggccgcgtacgacgaacccttctcgttgcattcaccagctctctcttcaaacaatcttccaagacacaacacgtcgtttacatttattccaagaggccctgtagcctcacaaaacaatcaacactcttcaacggcagcattcccggtcccgactaaatttgaatctccaggactgtccagtgggtcgtcgtcaacgcccgaaaacaacgagccccatcctcttgtgacgcccaatacaatatcctccttcagacacttggcaggtgaaacgcgaagcgtcctcagcgggttcgccggtggttccatggctgcaccgcagatgaatcgtcaaagaacaggtaaaaataaagcaacagaaccatttggcctggacccagaggaagtcaagcgaagacagtttctccttagaaaccgagttgcggccatgaaatgccgcaagaagagaaaggaatgggtgacggatctagaggagacgaagctgggcctcgagagccaaaatagtcacctacatctggagctggacggactgatggacgaagcgagtcggatccgggcgcagctcatgactcacgcaaactgtaacgactccaacattgacaaatggatcgagaacgaggccaagaggtttgtgattgggacaagtgaaagatacgaccaaatcctggccacttttggccccacatccgggctgggaggccgacatgacagtagttcttcggcgtccgatcatcacctagccggcggcccgtctttaaccagtcccatgcagacgccgtcgcagaattaccgcgtgccgactccacatagatcccattctcatctccccccttccccatctttctacgacccgaacacaggcatgcatgcaactgggtcccatggaatgccagcccaagcgtcaccgtttccccctgacgacggaaccgactacgacgggatgcccatgacattctacgacccgtctacccgttga

SEQ ID NO: 31517 - protein, 363 aa, Muscodor strobelii
  misc_feature: SGI Peptide ID NO. 570852
  misc_feature (165)..(228): Pfam Id: PF00170 Pfam Desc: bZIP transcription factor
  misc_feature (162)..(219): Pfam Id: PF07716 Pfam Desc: Basic region leucine zipper
  misc_feature (164)..(257): NCBI GI: 256728021 Blast Desc: NECHADRAFT_83404 [Nectria haematococca mpVI 77-13-4]
  misc_feature (163)..(270): NCBI GI: 171692713 Blast Desc: protein product [Podospora anserina] gi|170946305|emb|CAP73106.1| protein product [Podospora anserina]
  misc_feature (120)..(265): NCBI GI: 85075939 Blast Desc: NCU01459 [Neurospora crassa OR74A] gi|28916869|gb|EAA26611.1| [Neurospora crassa OR74A] gi|28950324|emb|CAD70949.1| related to cyclic-amp-dependent atf-2
  misc_feature (151)..(269): NCBI GI: 39943996 Blast Desc: MGG_04009 [Magnaporthe grisea 70-15] gi|145014731|gb|EDJ99299.1| MGG_04009 [Magnaporthe grisea 70-15]
  misc_feature (119)..(256): NCBI GI: 39967613 Blast Desc: MGG_02006 [Magnaporthe grisea 70-15] gi|145012874|gb|EDJ97515.1| MGG_02006 [Magnaporthe grisea 70-15]
  misc_feature (154)..(256): NCBI GI: 213404398 Blast Desc: transcription factor atf21 [Schizosaccharomyces japonicus yFS275] gi|212001018|gb|EEB06678.1| transcription factor atf21 [Schizosaccharomyces japonicus yFS275]
  misc_feature (164)..(240): NCBI GI: 94482843 Blast Desc: activating transcription factor 2 [Takifugu rubripes]
  misc_feature (164)..(240): NCBI GI: 62866367 Blast Desc: activating transcription factor 2 splice variant ATF2-var6 [Homo sapiens] gi|62866373|gb|AAY17211.1| activating transcription factor 2 splice variant ATF2-var9 [Homo sapiens]
  misc_feature (164)..(240): NCBI GI: 201820 Blast Desc: T-cell receptor alpha chain [Mus musculus]
  misc_feature (164)..(240): NCBI GI: 1039381 Blast Desc: CRE-BP1 family member; cyclic AMP response element DNA-binding protein isoform 1 family [Homo sapiens]
  misc_feature: Useful for introducing or modulating the production of volatile compounds
MDATSNYLHYDIEEEGDEDFGVFGTEDTQSHGQFPQTLEAAAYDEPFSLHSPALSSNNLPRHNTSFTFIPRGPVASQNNQHSSTAAFPVPTKFESPGLSSGSSSTPENNEPHPLVTPNTISSFRHLAGETRSVLSGFAGGSMAAPQMNRQRTGKNKATEPFGLDPEEVKRRQFLLRNRVAAMKCRKKRKEWVTDLEETKLGLESQNSHLHLELDGLMDEASRIRAQLMTHANCNDSNIDKWIENEAKRFVIGTSERYDQILATFGPTSGLGGRHDSSSSASDHHLAGGPSLTSPMQTPSQNYRVPTPHRSHSHLPPSPSFYDPNTGMHATGSHGMPAQASPFPPDDGTDYDGMPMTFYDPSTR

SEQ ID NO: 31518 - DNA, 3825 bp, Muscodor strobelii
  misc_feature: SGI EST ID NO. CUFF.74626.1
  misc_feature: Variant of the nucleotide sequence at SEQ ID NO 31516
ggaagcgcgagagtgcagataggtaagctcgaaaggctcgataggtaggatgtggcttaacttgccaccatcgcactcgcaacatgaacaactcctttgcaggtctcggcagcaactacccaactaagaacagcatgtcatcagataatatggcgtcttcaagtgtggctcattatatcaagccgcctttgtggcgaatttaggtgttgagcagttgggatggaacagttgtaccaccttgcatggcgcagagcattcatctttggcccaggaacgagccatggagcaatcggcaccactccgattagtagagtatgtgaagatctttcactgaatcgtacaccctcatcgaattgcgccgccgactatatctcgattgacccgaccctttcctcttatagccccatgcagctcatccatcttttggccaccgcgcagcacttaaccatgtcgatcaccatagggccgccaatcacaactcaccttcagacctctctcgcaaaagctcctctcacgtttgactttccggccaaactctctagatagagttcgaacgcgctctcggcgcgcttgacggagtcttctatgcattgctgcaattgaaacaggggcatacttcgtccagtactttgcatcacttgatatggtcaatgctagtcagtgggtctttacccggctgcacaagccttctctgtgtaaccacgcgctccatgtccgccatgcctttccgttcatggttcgtctttactagcaagatcgaagtgcgaatcccgtagatgtccgatcagcgtccggcctcgctgccgtacttctgcatcggcgtcggcatccccatcagggcattacataacgtgactctcaacataggagataggtggacgtacgccttggctacaatggcagtgttcgtcgatcatcaacagcgccattgacagacgcatctacgttcacggggctagagtcttcacgttacttcgaccaatctagtgccaatctagtctaccaatccggataatattggagagttgacacaaggctgaattagtttggaagtcagccagactttcgacatcgtatatcggcgaaccctaatgatatcctcgcccaatcaacttgcacttatttggcaactttaaacggcttttgacttggtctgcctatagtcaagagcgcgaagtctgaaaatccaatcgcacagaagcagcggactggagcctttgcttgcttttgctttgcatctcgtacctgaagctcacagcttctcattggcacagaaacctagagctctcatcttatgtcggttacaggtcaagggttggatcttgaccaattgaagcacagccttccctcaactgaagcttcgtcccatttttgacagttgtcatctgatgtgttcccgagtaggccaggcctctgggagaacacggcagcaaagccccagccgtcaagcccggttggattgcgagatgtggcgagtgtgaattatcccgtaggccatctacggttctagaagtcgttcgttcaagggcatacattctccactctggttggtagatatcaccatcttgagatcccgtagctctctctacgtggatgtgttgcactgatctcttgcgtcgcaacatgttgtccctatccttgagccgctttggctgtttttcgaggaataactgagcaagaggcactatacttgaatagtcaattagcagtacagcacatacctgatcaatttgtaccccttgggcactcttattaccgcggttctcgtcagcgctgttctggtacccgggtcctaagccactcgagctgctgcttacccctgactccaattatcacagtcagtgaaccagacgcttttcagtcatctgcatccaggccatttaccctatcttcgaaccggttgcatgcaagctaacggcaccgtccttttggatatagtcttgatgccatcgagcagcaagacagaggggaagatttgaggggttgagcaaagagagtttcgctctgagcttgacgtggcgagtgtctctccctattggtcctgccacagttgaataacaaattccacccctgcgccgtgcagaacggtctaagtaaagaaaccttggaccgggacgggtaggtaagcgccaattttttcgtacgtggcagccatcttctaagagagtagcttcaccgatgggtgaagccagtgggacctgcatctcctcgcagcgtagcacaggagccttatctcgcttggaactcgcccaataacctcaactcgtcgttcccaagcacactcgcctgcttgtccgtgtactatcggataatacagccggatcggcgtgcatcacaatagtcactatggatgcaacatcaaattatctccactatgatattgaagaagagggggatgaggactttggcgtctttggaaccgaagatacccaaagtcatggccagttcccacagacactggaagcggccgcgtacgacgaacccttctcgttgcattcaccagctctctcttcaaacaatcttccaagacacaacacgtcgtttacatttattccaagaggccctgtagcctcacaaaacaatcaacactcttcaacggcagcattcccggtcccgactaaatttgaatctccaggactgtccagtgggtcgtcgtcaacgcccgaaaacaacgagccccatcctcttgtgacgcccaatacaatatcctccttcagacacttggcaggtgaaacgcgaagcgtcctcagcgggttcgccggtggttccatggctgcaccgcagatgaatcgtcaaagaacaggtaaaaataaagcaacagaaccatttggcctggacccagaggaagtcaagcgaagacagtttctccttagaaaccgagttgcggccatgaaatgccgcaagaagagaaaggaatgggtgacggatctagaggagacgaagctgggcctcgagagccaaaatagtcacctacatctggagctggacggactgatggacgaagcgagtcggatccgggcgcagctcatgactcacgcaaactgtaacgactccaacattgacaaatggatcgagaacgaggccaagaggtttgtgattgggacaagtgaaagatacgaccaaatcctggccacttttggccccacatccgggctgggaggccgacatgacagtagttcttcggcgtccgatcatcacctagccggcggcccgtctttaaccagtcccatgcagacgccgtcgcagaattaccgcgtgccgactccacatagatcccattctcatctccccccttccccatctttctacgacccgaacacaggcatgcatgcaactgggtcccatggaatgccagcccaagcgtcaccgtttccccctgacgacggaaccgactacgacgggatgcccatgacattctacgacccgtctacccgttgagtcgtcactcgacgacatggatggccacaacaaaggtggacgctgaccaagatgttgcggggggaagttgataatggaggagtggtgcgaatgattgattactttcgtttcttactggttcactaggccagtccgctttataccctatagcaatccatttttgttgtcttcgatgcttgatgtcggtggttggagttgggtggtgaaggcgaggacaggttccggtctttatatcgagggagacgacgctccatgacactacgtgatatgaatgaaacttggattcgttatttcccgaacgcatgtatctaattgggatatgagtatataggtagcacccgctcacagcagcagggtggcgacaatgtgatgatgtttatatcatga

SEQ ID NO: 31519 - DNA, 1419 bp, Muscodor strobelii
  misc_feature: SGI cDNA ID NO. 570853
  misc_feature: Reduced expression when VOC is produced
  misc_feature: Encodes the peptide sequence at SEQ ID NO 31520
atgtcgggctgtcagagggccgtcgttgcccggccttgggtgcactccttgcggcaatacgcctcgcctagtctcacccgctccttttcacagtcgatatccagacaagatgaaatccccccgactactgccacatcctcgacctcagcctcgacatcaccaccaccgccctcaccccccaatgctgtctcctcgtctcttggccagctcgaggcggcatcggcccagcagcgtatggccgaaagactgatggaccccaacaccaccaccgctcactgggccgaacgcaagctcatgcgcatgggctctgctcccgtcggttcccgtcgtcgccgtgctgccgtccgcacttccgagaacgtccccttcgaccagctgccctaccagtgtttccaggaggcccgcaagattctccaggaggaccgcaacgagaaggtcgccgccatcgccaaggagctcgccaagatcaagcgcctcgaggccacccccgccgaccaggtccccggcggccagaggaagaaggacctgcgcctcaagagcctgcgcaagtatgtcgaggagctcaagatcctcgccgacatcaacgaccccatggtcaagcgcaagtttgaagatggtctgggcgatatgaccaagcccatctaccgccatctggccgagaagaagtggcgcggcatgcccttccgcgtcatcaagcagcgtatagaccagctgcacatcgtgcccgatgtcttccccaagttcgagcccgttgccgacgtccagatgttcttccgcaggaaaaaggtcgagcccggcgagatcatcaactcgcttgtatccgaaaactcgccgcgtctcaaggtccaggtcttcaatgccggtgagcgcctcgtcaccgtcgccgtcgtcgatctagacgtgcccaacgccgagaccgactctttcgaccgacgctgccactaccttgcagccaacgtacccctcgcccccgatcagccgtccttgcctctgggtaaggtagacaaggacacccagcttgccgttccatggctccctgccttctcccaacagggcgccccctaccaccgcctggccgtctttgtgctcgaacagcccgacggagcctccttagacatcgccaagctgcgagagttgtacagcagccgcgatggcttcagcctgaagagcttccgcgacaagtttggcgtgcaacccgtcggcttcaacatcttccgcaccatctgggacgagaacacagccaccgtcatggagcgtgccggccagccgggcgccgacgtccaattcaagcacaagcgtgtctactccctcaagggccccaagaaggctcgtggctgggaggccaagcactctacccccaagtacaagcacctgtggaagtacagcaagagaatccacggcatgaacaagcgccgctaa

SEQ ID NO: 31520 - protein, 472 aa, Muscodor strobelii
  misc_feature: SGI Peptide ID NO. 570853
  misc_feature (246)..(415): Pfam Id: PF01161 Pfam Desc: Phosphatidylethanolamine-binding protein
  misc_feature (84)..(472): NCBI GI: 46130894 Blast Desc: FG09002.1 [Gibberella zeae PH-1]
  misc_feature (1)..(468): NCBI GI: 171692681 Blast Desc: protein product [Podospora anserina] gi|170946289|emb|CAP73090.1| protein product [Podospora anserina]
  misc_feature (42)..(469): NCBI GI: 261358984 Blast Desc: 54S ribosomal protein L35 [Verticillium albo-atrum VaMs.102]
  misc_feature (84)..(472): NCBI GI: 256727860 Blast Desc: [Nectria haematococca mpVI 77-13-4]
  misc_feature (8)..(469): NCBI GI: 116199349 Blast Desc: CHGG_07830 [Chaetomium globosum CBS 148.51] gi|88179109|gb|EAQ86577.1| CHGG_07830 [Chaetomium globosum CBS 148.51]
  misc_feature (1)..(465): NCBI GI: 39943992 Blast Desc: MGG_04007 [Magnaporthe grisea 70-15] gi|145014729|gb|EDJ99297.1| MGG_04007 [Magnaporthe grisea 70-15]
  misc_feature (1)..(465): NCBI GI: 164429350 Blast Desc: NCU01473 [Neurospora crassa OR74A] gi|157073446|gb|EAA27514.2| conserved [Neurospora crassa OR74A]
  misc_feature (101)..(465): NCBI GI: 38566839 Blast Desc: related to ribosomal protein YmL35 [Neurospora crassa]
  misc_feature (65)..(458): NCBI GI: 156058472 Blast Desc: SS1G_03248 [Sclerotinia sclerotiorum 1980] gi|154701035|gb|EDO00774.1| SS1G_03248 [Sclerotinia sclerotiorum 1980]
  misc_feature (65)..(458): NCBI GI: 154310646 Blast Desc: BC1G_06797 [Botryotinia fuckeliana B05.10] gi|150851337|gb|EDN26530.1| BC1G_06797 [Botryotinia fuckeliana B05.10]
  misc_feature: Useful for introducing or modulating the production of volatile compounds
MSGCQRAVVARPWVHSLRQYASPSLTRSFSQSISRQDEIPPTTATSSTSASTSPPPPSPPNAVSSSLGQLEAASAQQRMAERLMDPNTTTAHWAERKLMRMGSAPVGSRRRRAAVRTSENVPFDQLPYQCFQEARKILQEDRNEKVAAIAKELAKIKRLEATPADQVPGGQRKKDLRLKSLRKYVEELKILADINDPMVKRKFEDGLGDMTKPIYRHLAEKKWRGMPFRVIKQRIDQLHIVPDVFPKFEPVADVQMFFRRKKVEPGEIINSLVSENSPRLKVQVFNAGERLVTVAVVDLDVPNAETDSFDRRCHYLAANVPLAPDQPSLPLGKVDKDTQLAVPWLPAFSQQGAPYHRLAVFVLEQPDGASLDIAKLRELYSSRDGFSLKSFRDKFGVQPVGFNIFRTIWDENTATVMERAGQPGADVQFKHKRVYSLKGPKKARGWEAKHSTPKYKHLWKYSKRIHGMNKRR

SEQ ID NO: 31521 - DNA, 1861 bp, Muscodor strobelii
  misc_feature: SGI EST ID NO. CUFF.74694.1
  misc_feature: Variant of the nucleotide sequence at SEQ ID NO 31519
ggccgggacttgctcgacttgttcgagcatcgccaacttcacactccatcttcctctgtcgttgcctcaattgacgacaccaacatgtcgggctgtcagagggccgtcgttgcccggccttgggtgcactccttgcggcaatacgcctcgcctagtctcacccgctccttttcacagtcgatatccagacaagatgaaatccccccgactactgccacatcctcgacctcagcctcgacatcaccaccaccgccctcaccccccaatgctgtctcctcgtctcttggccagctcgaggcggcatcggcccagcagcgtatggccgaaagactgatggaccccaacaccaccaccgctcactgggccgaacgcaagctcatgcgcatgggctctgctcccgtcggttcccgtcgtcgccgtgctgccgtccgcacttccgagaacgtccccttcgaccagctgccctaccagtgtttccaggaggcccgcaagattctccaggaggaccgcaacgagaaggtcgccgccatcgccaaggagctcgccaagatcaagcgcctcgaggccacccccgccgaccaggtccccggcggccagaggaagaaggacctgcgcctcaagagcctgcgcaagtatgtcgaggagctcaagatcctcgccgacatcaacgaccccatggtcaagcgcaagtttgaagatggtctgggcgatatgaccaagcccatctaccgccatctggccgagaagaagtggcgcggcatgcccttccgcgtcatcaagcagcgtatagaccagctgcacatcgtgcccgatgtcttccccaagttcgagcccgttgccgacgtccagatgttcttccgcaggaaaaaggtcgagcccggcgagatcatcaactcgcttgtatccgaaaactcgccgcgtctcaaggtccaggtcttcaatgccggtgagcgcctcgtcaccgtcgccgtcgtcgatctagacgtgcccaacgccgagaccgactctttcgaccgacgctgccactaccttgcagccaacgtacccctcgcccccgatcagccgtccttgcctctgggtaaggtagacaaggacacccagcttgccgttccatggctccctgccttctcccaacagggcgccccctaccaccgcctggccgtctttgtgctcgaacagcccgacggagcctccttagacatcgccaagctgcgagagttgtacagcagccgcgatggcttcagcctgaagagcttccgcgacaagtttggcgtgcaacccgtcggcttcaacatcttccgcaccatctgggacgagaacacagccaccgtcatggagcgtgccggccagccgggcgccgacgtccaattcaagcacaagcgtgtctactccctcaagggccccaagaaggctcgtggctgggaggccaagcactctacccccaagtacaagcacctgtggaagtacagcaagagaatccacggcatgaacaagcgccgctaatggcccctctttggacgatactttattccaccatgttttcgactcgctgtatcaccacctgtataaagctgcaatgcagatatcatttgtgactacatacatatatgagcggtgtgatgtgtagagataggtgaaaggagctagattagacgggcttttggatgaagggaaaagcgtgtcagatattgtatcatagctaaacatacggcgacaatggccctcattttaatgcaaaacatcatttgcgtaccaagtgactatactgttttatctaagtctacgtgccaaagtctactaaagaaatgcgtaggatattaagcaagaaacgaagtaaaaagacggacgtgcgttaaaggcc

SEQ ID NO: 31522 - DNA, 1029 bp, Muscodor strobelii
  misc_feature: SGI cDNA ID NO. 570854
  misc_feature: Reduced expression when VOC is produced
  misc_feature: Encodes the peptide sequence at SEQ ID NO 31523
atggccgcccgaggcgcgagaggtgcgagagccctccacgacgccttcaagggactgaccatctcgccatcccgccgcacatgccccaatgcctcgctcacacgatccatggccaccgaggcctccgcacgcactccctacacaccagtcacccaagttccactcaccatcttcgacttcccctccttcgagccccagcgcctcgagtcctggtccgccaaacacctcaacctccccctgcggcgcgacatactgcacctggccgtcgtctacgagggcgacaacacccgccagggcaccgcccactccaagaacaggtgggaggtgcgcggctcccaccagaagatgcgcctgcagaagggcctcggccgctcccgcatgggcaccaagcagtcgcctctactacgcggtggtggtaagacgttcggcccccgccaccgcgacttcggcaccggcctgccccgcaagctctacgacctcgcctggcgcaccgccctgtcctaccgctaccgccgcggcgagctgctcgtctgccacgacggcatgcacctccccctgccccgcgagctcgacgccctgctggcccgcgacgccctctactacaccgccgccgagctcgagaccggcttcaagaccaagtgggtctcccagatgctcgacgccaacggctggggccgcgccgccggccgcagcaccttcatcaccgcagaccgccgcgacagcttcttcgacgccctcgacctcgtccccaacatgggccgcgctctccacgtcagcgatgtcgatgtcaaggatctgctcgagaccggccgcctcgtcatcggagagggacgcgctcatgcagctgatcgagagccatcagagcgatctcaccaaccatgtgtttattaccgaggctgcaaaggcaaggctgccgcgaagcggggatgtcgtggtagaatagccgacgcaatcaaatgtcgatatttattatcaatgcccgccaactcggagataaaggacattgaacaagtaagtctgaaggcataa

SEQ ID NO: 31523 - protein, 342 aa, Muscodor strobelii
  misc_feature: SGI Peptide ID NO. 570854
  misc_feature (68)..(286): Pfam Id: PF00573 Pfam Desc: Ribosomal protein L4/L1 family
  misc_feature (79)..(167): Pfam Id: PF00573 Pfam Desc: Ribosomal protein L4/L1 family
  misc_feature (6)..(274): NCBI GI: 171692683 Blast Desc: protein product [Podospora anserina] gi|170946290|emb|CAP73091.1| protein product [Podospora anserina]
  misc_feature (6)..(274): NCBI GI: 256728020 Blast Desc: [Nectria haematococca mpVI 77-13-4]
  misc_feature (7)..(274): NCBI GI: 116199351 Blast Desc: CHGG_07831 [Chaetomium globosum CBS 148.51] gi|88179110|gb|EAQ86578.1| CHGG_07831 [Chaetomium globosum CBS 148.51]
  misc_feature (6)..(274): NCBI GI: 46130896 Blast Desc: FG09003.1 [Gibberella zeae PH-1]
  misc_feature (7)..(274): NCBI GI: 85081598 Blast Desc: 60S ribosomal protein L4, mitochondrial precursor [Neurospora crassa OR74A] gi|28917827|gb|EAA27515.1| 60S ribosomal protein L4, mitochondrial precursor [Neurospora crassa
  misc_feature (1)..(292): NCBI GI: 261358985 Blast Desc: 54S ribosomal protein YmL6 [Verticillium albo-atrum VaMs.102]
  misc_feature (6)..(274): NCBI GI: 39943994 Blast Desc: MGG_04008 [Magnaporthe grisea 70-15] gi|145014730|gb|EDJ99298.1| MGG_04008 [Magnaporthe grisea 70-15]
  misc_feature (56)..(274): NCBI GI: 261189683 Blast Desc: 50S ribosomal protein L4 [Ajellomyces dermatitidis SLH14081] gi|239591488|gb|EEQ74069.1| 50S ribosomal protein L4 [Ajellomyces dermatitidis SLH14081] gi|239612983|gb|EEQ89970.1|
  misc_feature (26)..(274): NCBI GI: 240106887 Blast Desc: 54S ribosomal protein YmL6, mitochondrial precursor, [Coccidioides posadasii C735 delta SOWgp]
  misc_feature (7)..(274): NCBI GI: 121713920 Blast Desc: 50S ribosomal protein L4 [Aspergillus clavatus NRRL 1] gi|119402724|gb|EAW13145.1| 50S ribosomal protein L4 [Aspergillus clavatus NRRL 1]
  misc_feature: Useful for introducing or modulating the production of volatile compounds
MAARGARGARALHDAFKGLTISPSRRTCPNASLTRSMATEASARTPYTPVTQVPLTIFDFPSFEPQRLESWSAKHLNLPLRRDILHLAVVYEGDNTRQGTAHSKNRWEVRGSHQKMRLQKGLGRSRMGTKQSPLLRGGGKTFGPRHRDFGTGLPRKLYDLAWRTALSYRYRRGELLVCHDGMHLPLPRELDALLARDALYYTAAELETGFKTKWVSQMLDANGWGRAAGRSTFITADRRDSFFDALDLVPNMGRALHVSDVDVKDLLETGRLVIGEGRAHAADREPSERSHQPCVYYRGCKGKAAAKRGCRGRIADAIKCRYLLSMPANSEIKDIEQVSLKA

SEQ ID NO: 31524 - DNA, 1434 bp, Muscodor strobelii
  misc_feature: SGI EST ID NO. CUFF.74629.0
  misc_feature: Variant of the nucleotide sequence at SEQ ID NO 31522
gccggcctgagctctcccatttgataatgattattttcccgtcttcactggacttgcgggttgcggcgggacgacgacatcgaacctgaccgctccgactacgacggccgttgcttggattttcccctccgtctgttttctctatacatgccctccgaacctacgatctaaatcgagtctcccccgaactctgtccagccatggccgcccgaggcgcgagaggtgcgagagccctccacgacgccttcaagggactgaccatctcgccatcccgccgcacatgccccaatgcctcgctcacacgatccatggccaccgaggcctccgcacgcactccctacacaccagtcacccaagttccactcaccatcttcgacttcccctccttcgagccccagcgcctcgagtcctggtccgccaaacacctcaacctccccctgcggcgcgacatactgcacctggccgtcgtctacgagggcgacaacacccgccagggcaccgcccactccaagaacaggtgggaggtgcgcggctcccaccagaagatgcgcctgcagaagggcctcggccgctcccgcatgggcaccaagcagtcgcctctactacgcggtggtggtaagacgttcggcccccgccaccgcgacttcggcaccggcctgccccgcaagctctacgacctcgcctggcgcaccgccctgtcctaccgctaccgccgcggcgagctgctcgtctgccacgacggcatgcacctccccctgccccgcgagctcgacgccctgctggcccgcgacgccctctactacaccgccgccgagctcgagaccggcttcaagaccaagtgggtctcccagatgctcgacgccaacggctggggccgcgccgccggccgcagcaccttcatcaccgcagaccgccgcgacagcttcttcgacgccctcgacctcgtccccaacatgggccgcgctctccacgtcagcgatgtcgatgtcaaggatctgctcgagaccggccgcctcgtcatcggagagggacgcgctcatgcagctgatcgagagccatcagagcgatctcaccaaccatgtgtttattaccgaggctgcaaaggcaaggctgccgcgaagcggggatgtcgtggtagaatagccgacgcaatcaaatgtcgatatttattatgtacgtccggggaccagactgcgcctccattggtcttggtgatggctcaatcattgtacgttgcaaaagtgcaatgtatatacgacggcaaaaggcgtcacatgtacatatatgtatgattgtaaaaaataaggtgtagagcatgtaacaatacatacacagcagcagaattctgaaacctttctgctcacagcattgattaacagacctacatacgatgcctagcgagttaagagcagcttccgcgacgatgaatttaca

SEQ ID NO: 31525 - DNA, 618 bp, Muscodor strobelii
  misc_feature: SGI cDNA ID NO. 570855
  misc_feature: Encodes the peptide sequence at SEQ ID NO 31526
atgcatcgcaatatactcgtctcgcttctcttcgctattttgtcattttgtgatttcaccacagcgcttcccttcttccactggcgcagaactcctgctgcaaacgttggcgcgcacacatcttactcggttgttcctatccactcaactggaggcgtgactctgaccgtcaccgaggatcccaagaccactacggtggtcgaaagtccaccaccagtcactgatacggtgaccgtctctgtcatcgacattgagccgacgacagatatcatcaacgtcacggtgacagagagtagtacgccttacccgacaacttcagtgatcacctcctcaacctctgctctcccggcaacgacccggacttctttaacttcatggtccacgatatactcaacagcctcgcctatcagtactagcacagactcgagtcagtcgactgcctctgccactgcgagtacaagcgattatactacaacaagttgcgactcttccacaggcatcattacttcgtcacccacctccagttggacgacgagctcttacgacgatggattttggcacacgacttaccccgcgtggaatggtacacttgccaaccgattcaagagacgatcgtag

SEQ ID NO: 31526 - protein, 205 aa, Muscodor strobelii
  misc_feature: SGI Peptide ID NO. 570855
MHRNILVSLLFAILSFCDFTTALPFFHWRRTPAANVGAHTSYSVVPIHSTGGVTLTVTEDPKTTTVVESPPPVTDTVTVSVIDIEPTTDIINVTVTESSTPYPTTSVITSSTSALPATTRTSLTSWSTIYSTASPISTSTDSSQSTASATASTSDYTTTSCDSSTGIITSSPTSSWTTSSYDDGFWHTTYPAWNGTLANRFKRRS

SEQ ID NO: 31527 - DNA, 1157 bp, Muscodor strobelii
  misc_feature: SGI EST ID NO. CUFF.74633.0
  misc_feature: Variant of the nucleotide sequence at SEQ ID NO 31525
ccccaatcctcaaataggacgatgcgtttccctcagtggtaggtctcgtgtagttcttcccttctcttttcgcaaactgtcctgttgcgtgtgttcagactcatctgccgtacacattactgcctgtggcgagaagcagaagaggtacctagggagatagtaggtctgaagttgttgaagcgcgtctcacaagaggtcacgaagcaagatgcatcgcaatatactcgtctcgcttctcttcgctattttgtcattttgtgatttcaccacagcgcttcccttcttccactggcgcagaactcctgctgcaaacgttggcgcgcacacatcttactcggttgttcctatccactcaactggaggcgtgactctgaccgtcaccgaggatcccaagaccactacggtggtcgaaagtccaccaccagtcactgatacggtgaccgtctctgtcatcgacattgagccgacgacagatatcatcaacgtcacggtgacagagagtagtacgccttacccgacaacttcagtgatcacctcctcaacctctgctctcccggcaacgacccggacttctttaacttcatggtccacgatatactcaacagcctcgcctatcagtactagcacagactcgagtcagtcgactgcctctgccactgcgagtacaagcgattatactacaacaagttgcgactcttccacaggcatcattacttcgtcacccacctccagttggacgacgagctcttacgacgatggattttggcacacgacttaccccgcgtggaatggtacacttgccaaccgattcaagagacgatcgtagtcagtgcacagacagaaaggctctatctcgatacgtccaatattacaaatcttgagcctgtgctcgtctgacgaagaattgtacgatagccacattaagatggttcaagacagcatcactccacatgtatctcgaggatactataagaaaggaggatgcgtttaatactgtaatgcaggaaaatgtatataacgacatggagaaatttgacgcaacccaagagctggaccgcgtcgaaaagatactaattaataccgttgattcatataagactagattaccacttaagaatgcataaaacgtcaaacgagcttcatttatgtgggcgaga

SEQ ID NO: 31528 - DNA, 1401 bp, Muscodor strobelii
  misc_feature: SGI cDNA ID NO. 570856
  misc_feature: Reduced expression when VOC is produced
  misc_feature: Encodes the peptide sequence at SEQ ID NO 31529
atgtataatcaacagtaccctcccccgggccagggccaatatccgccaccccatcaaggcggatatcccccatcataccctcaacagccgccgcaacaaggacattatccaccttcacaaagccacagctcctatcctcctcagggaggatatccgccatacggcgcacaaccacccgctcaacacggctacggcgctcctcctccagctcccgctcccggccagtatccgcctccgcagagtcatagctcatatccttctcaaagccagggcccatatcctccatacggagctcaaccgccagctcagcacggatatggtgctcctcctcctcccggccaatacggcgcccacacgcctgctcctccacctcaacagtacggagcagcgcaatatgcacctcctccaggaggtggtggcggtccaccaaacccgcccagtttgggctatggccctccccaaagcatccactgggatgcaaatccagacgcaagagccgtgcgagatgctatgaagggactcggcgcaaacaagaaagagctcactcgagttctggcccgtttagatccactccaggttgaggcactaaagagtgcgtatgtccattcattccgtaagagcttggaggaggacatcaattcagaaacgacaatccgcggacattacgcccaggctttggtggccattgttcgagggccattgctgaacgatgttcacttattacacaaagcgattgccggcgcaggtacgaataggacgatgctcaatgatatcctgctggggcgaagtaacgcggacatgaatgccatcaagagaatgtatcagcaaacgttccacaagtcacttgaaagcgaagtcagtggcgaactgacattgaagacggagaaacacttcatgatagtagtaggcgcttgccgagctgaggacagtgccccggtcattccgcaagctatcgatcaagacgcccaggcgatttacaatgctacagagggaaagtatggcacagatcaggccgttgtgttttcaatcctctcaacccggaatgataatcagatccgcgccataaactatacctacgaacagaaattcaggtcaaaactcgacagtgttatcaagaaggagttctcgggacacatggaggatgcacttctttatcaactacgaaaggcgtccgataaatatatgcatgcggcggagttgtttgaggaggcaatgagaggggctggtactaaagacgatctgctcgtggcgagggtggttcgctaccattgggatcggcaaaccatggaaaacgtcaaaggcgccttcaaacagcgcttcgggaaaagccttgccagtcgcatccgttcagaaacaagctctgattacgagagcctaatggtcgcttgtgtcggagaatag

SEQ ID NO: 31529 - protein, 466 aa, Muscodor strobelii
  misc_feature: SGI Peptide ID NO. 570856
  misc_feature (320)..(386): Pfam Id: PF00191 Pfam Desc: Annexin
  misc_feature (236)..(301): Pfam Id: PF00191 Pfam Desc: Annexin
  misc_feature (162)..(229): Pfam Id: PF00191 Pfam Desc: Annexin
  misc_feature (396)..(463): Pfam Id: PF00191 Pfam Desc: Annexin
  misc_feature (236)..(291): Pfam Id: PF00191 Pfam Desc: Annexin
  misc_feature (429)..(463): Pfam Id: PF00191 Pfam Desc: Annexin
  misc_feature (53)..(466): NCBI GI: 171690938 Blast Desc: protein product [Podospora anserina] gi|170945417|emb|CAP71529.1| protein product [Podospora anserina]
  misc_feature (96)..(466): NCBI GI: 46108208 Blast Desc: FG00986.1 [Gibberella zeae PH-1]
  misc_feature (48)..(466): NCBI GI: 256734470 Blast Desc: NECHADRAFT_90059 [Nectria haematococca mpVI 77-13-4]
  misc_feature (125)..(466): NCBI GI: 39977925 Blast Desc: MGG_06847 [Magnaporthe grisea 70-15] gi|145013595|gb|EDJ98236.1| MGG_06847 [Magnaporthe grisea 70-15]
  misc_feature (115)..(466): NCBI GI: 164429430 Blast Desc: NCU04421 [Neurospora crassa OR74A] gi|40882198|emb|CAF06024.1| annexin XIV [Neurospora crassa] gi|157073475|gb|EAA28262.2| conserved [Neurospora crassa OR74A]
  misc_feature (115)..(466): NCBI GI: 3004934 Blast Desc: annexin XIV [Neurospora crassa]
  misc_feature (96)..(391): NCBI GI: 261357690 Blast Desc: annexin-B9 [Verticillium albo-atrum VaMs.102]
  misc_feature (19)..(464): NCBI GI: 154314941 Blast Desc: BC1G_04812 [Botryotinia fuckeliana B05.10] gi|150848350|gb|EDN23543.1| BC1G_04812 [Botryotinia fuckeliana B05.10]
  misc_feature (42)..(464): NCBI GI: 189192320 Blast Desc: annexin A7 [Pyrenophora tritici-repentis Pt-1C-BFP] gi|187974105|gb|EDU41604.1| annexin A7 [Pyrenophora tritici-repentis Pt-1C-BFP]
  misc_feature (26)..(464): NCBI GI: 145232421 Blast Desc: An02g05210 [Aspergillus niger] gi|134056573|emb|CAK37627.1| protein product [Aspergillus niger]
  misc_feature: Useful for introducing or modulating the production of volatile compounds
MYNQQYPPPGQGQYPPPHQGGYPPSYPQQPPQQGHYPPSQSHSSYPPQGGYPPYGAQPPAQHGYGAPPPAPAPGQYPPPQSHSSYPSQSQGPYPPYGAQPPAQHGYGAPPPPGQYGAHTPAPPPQQYGAAQYAPPPGGGGGPPNPPSLGYGPPQSIHWDANPDARAVRDAMKGLGANKKELTRVLARLDPLQVEALKSAYVHSFRKSLEEDINSETTIRGHYAQALVAIVRGPLLNDVHLLHKAIAGAGTNRTMLNDILLGRSNADMNAIKRMYQQTFHKSLESEVSGELTLKTEKHFMIVVGACRAEDSAPVIPQAIDQDAQAIYNATEGKYGTDQAVVFSILSTRNDNQIRAINYTYEQKFRSKLDSVIKKEFSGHMEDALLYQLRKASDKYMHAAELFEEAMRGAGTKDDLLVARVVRYHWDRQTMENVKGAFKQRFGKSLASRIRSETSSDYESLMVACVGE

SEQ ID NO: 31530 - DNA, 2254 bp, Muscodor strobelii
  misc_feature: SGI EST ID NO. CUFF.74647.0
  misc_feature: Variant of the nucleotide sequence at SEQ ID NO 31528
caacaagttattttggcgcgccacgaccataggcagctaagcatcaacggtcgttgattgcgaggcatgcgacgtagtgaggcaaagctgtgatagcgcatcgtcatctttcagctgctattgtcatcccctctttcgcttctttatctattcagtttccccttagctgctcacacctctctgcacttttgactttttgcctctttctaattatcaacctactcatattttgttcactacataatccgtttaatccacctaatccagctcactcttgatattttgtcaaggagataatcagctgttctagccgctgccagttccagagaaccgcactgcaaatcgtcattcccttcgctcataccctcagatgtataatcaacagtaccctcccccgggccagggccaatatccgccaccccatcaaggcggatatcccccatcataccctcaacagccgccgcaacaaggacattatccaccttcacaaagccacagctcctatcctcctcagggaggatatccgccatacggcgcacaaccacccgctcaacacggctacggcgctcctcctccagctcccgctcccggccagtatccgcctccgcagagtcatagctcatatccttctcaaagccagggcccatatcctccatacggagctcaaccgccagctcagcacggatatggtgctcctcctcctcccggccaatacggcgcccacacgcctgctcctccacctcaacagtacggagcagcgcaatatgcacctcctccaggaggtggtggcggtccaccaaacccgcccagtttgggctatggccctccccaaagcatccactgggatgcaaatccagacgcaagagccgtgcgagatgctatgaagggactcggcgcaaacaagaaagagctcactcgagttctggcccgtttagatccactccaggttgaggcactaaagagtgcgtatgtccattcattccgtaagagcttggaggaggacatcaattcagaaacgacaatccgcggacattacgcccaggctttggtggccattgttcgagggccattgctgaacgatgttcacttattacacaaagcgattgccggcgcaggtacgaataggacgatgctcaatgatatcctgctggggcgaagtaacgcggacatgaatgccatcaagagaatgtatcagcaaacgttccacaagtcacttgaaagcgaagtcagtggcgaactgacattgaagacggagaaacacttcatgatagtagtaggcgcttgccgagctgaggacagtgccccggtcattccgcaagctatcgatcaagacgcccaggcgatttacaatgctacagagggaaagtatggcacagatcaggccgttgtgttttcaatcctctcaacccggaatgataatcagatccgcgccataaactatacctacgaacagaaattcaggtcaaaactcgacagtgttatcaagaaggagttctcgggacacatggaggatgcacttctttatcaactacgaaaggcgtccgataaatatatgcatgcggcggagttgtttgaggaggcaatgagaggggctggtactaaagacgatctgctcgtggcgagggtggttcgctaccattgggatcggcaaaccatggaaaacgtcaaaggcgccttcaaacagcgcttcgggaaaagccttgccagtcgcatccgttcagaaacaagctctgattacgagagcctaatggtcgcttgtgtcggagaatagactttccccagataactctcctatatcgtgcttgttctattagttacggagtattggagttgtcaataatatggcggcgagtataccagaatggaggctcaagtggatcgttcaccgtgggggcgtacgtttgcgtcttatttgggaaacatgcgattgtagtttattgaccggtttgcttcatcgtccgcagagtgcgcttacgaaccttcaagtttcatgagtttaatagattgcccaataccgaaatacaagctcgccgaagactatcagacatcgctttagtaatcggattgctctctttctaagacttgcttggcgaggatggctgactattctttcctgttgcggggcagataatttcgaacgtcgaaggatactctgttgacaacggattgtctgacaatcgcttttgccaaatagtaccgcttcatttcctagcattgttcgttctcccacaaaagagagataagtagcctactg

SEQ ID NO: 31531 - DNA, 942 bp, Muscodor strobelii
  misc_feature: SGI cDNA ID NO. 570857
  misc_feature: Reduced expression when VOC is produced
  misc_feature: Encodes the peptide sequence at SEQ ID NO 31532
atggcatcccaaataatcacatccgtcaacctagcttcgttgcccctcgttgccaagggtaaggtgcgggaaatctacgaagcctacgacgacaagcttctcctcattacaactgatcgcatctctgcatacgatgtcattcttgaaaatggtgttcggaacaagggtgccgtcctgactttgatcaccaatcactggctcaacacagtcctcccgaaccaggtgccaggcctaagacaccatctcgtctctttaaatgtaccaccttcagttgacatcagttccgaggacaagcaacgcctgttcggccgttcaatgattgtcaagaaattccgcgtcttccccattgaagtaattgtccgcggttatatcaccggtagctcctgggcggaatacaaacataaaggaacagtacatggcatggttcaaccctctggactgcaacaatgccaagcgttccctggcggacctatctacacaccatctactaaggcgcctgtgggcgagaaggacgagaacatctcggttgagcaagcacgacacattgttggtgataagtatgccgatcgaatagaaggtcttgcgcttgccatatacaaggctgcgcatgcctatgctttggaaagagggatcatagtcgcagacaccaagttcgagtttggtcttgacgagacgacagacgaagttgtcttgattgatgaggtcctaacgccagatagcagccggttctggccagctgctgattacaatcctgggagagatcaaagcagcttcgataagcaatacttgcgcaactggctgacgtctcaaggtctcaagggcaaagaaggcgtctcaatgcccgaggatatcatgcagcagacgagcgccaaatatcttgaagcatttgagaaactggttggagcatcattggagacggcgctggcaaacttaggaaaatag

SEQ ID NO: 31532 - protein, 313 aa, Muscodor strobelii
  misc_feature: SGI Peptide ID NO. 570857
  misc_feature (13)..(284): Pfam Id: PF01259 Pfam Desc: SAICAR synthetase
  misc_feature (1)..(311): NCBI GI: 85113727 Blast Desc: phosphoribosylaminoimidazole-succinocarboxamide synthase [Neurospora crassa OR74A] gi|22164052|dbj|BAC07276.1| 5'-phosphoribosyl-5-aminoimidazole-4-N-succinoca rboxamide crassa
  misc_feature (1)..(302): NCBI GI: 212544818 Blast Desc: phosphoribosyl-aminoimidazole-succinocarboxamide synthase [Penicillium marneffei ATCC 18224] gi|210065532|gb|EEA19626.1| synthase [Penicillium marneffei ATCC
  misc_feature (1)..(303): NCBI GI: 121704752 Blast Desc: phosphoribosyl-aminoimidazole-succinocarboxamide synthase [Aspergillus clavatus NRRL 1] gi|119398785|gb|EAW09213.1| synthase [Aspergillus clavatus NRRL
  misc_feature (3)..(303): NCBI GI: 238505322 Blast Desc: phosphoribosyl-aminoimidazole-succinocarboxamide synthase [Aspergillus flavus NRRL3357] gi|37572664|dbj|BAC98505.1| ribotide synthetase [Aspergillus
  misc_feature (2)..(310): NCBI GI: 145609750 Blast Desc: MGG_12537 [Magnaporthe grisea 70-15] gi|145017146|gb|EDK01509.1| MGG_12537 [Magnaporthe grisea 70-15]
  misc_feature (1)..(303): NCBI GI: 169780514 Blast Desc: [Aspergillus oryzae RIB40] gi|83773461|dbj|BAE63588.1| protein product [Aspergillus oryzae]
  misc_feature (3)..(303): NCBI GI: 119493282 Blast Desc: phosphoribosyl-aminoimidazole-succinocarboxamide synthase [Neosartorya fischeri NRRL 181] gi|119411991|gb|EAW21934.1| synthase [Neosartorya fischeri NRRL
  misc_feature (3)..(305): NCBI GI: 225685277 Blast Desc: phosphoribosylaminoimidazole-succinocarboxamide synthase [Paracoccidioides brasiliensis Pb03] gi|226294613|gb|EEH50033.1| synthase [Paracoccidioides Pb18]
  misc_feature (1)..(304): NCBI GI: 255944991 Blast Desc: Pc20g07400 [Penicillium chrysogenum Wisconsin 54-1255] gi|211587998|emb|CAP86069.1| Pc20g07400 [Penicillium chrysogenum Wisconsin 54-1255]
  misc_feature (3)..(303): NCBI GI: 71000607 Blast Desc: phosphoribosyl-aminoimidazole-succinocarboxamide synthase [Aspergillus fumigatus Af293] gi|66852622|gb|EAL92947.1| phosphoribosyl-aminoimidazole-succinocarboxamide synthase Af293]
  misc_feature (6)..(305): SWISSPROT Homolog: EC 6.3.2.6 Phosphoribosylaminoimidazolesuccinocarboxamide synthase
  misc_feature: Useful for introducing or modulating the production of volatile compounds
MASQIITSVNLASLPLVAKGKVREIYEAYDDKLLLITTDRISAYDVILENGVRNKGAVLTLITNHWLNTVLPNQVPGLRHHLVSLNVPPSVDISSEDKQRLFGRSMIVKKFRVFPIEVIVRGYITGSSWAEYKHKGTVHGMVQPSGLQQCQAFPGGPIYTPSTKAPVGEKDENISVEQARHIVGDKYADRIEGLALAIYKAAHAYALERGIIVADTKFEFGLDETTDEVVLIDEVLTPDSSRFWPAADYNPGRDQSSFDKQYLRNWLTSQGLKGKEGVSMPEDIMQQTSAKYLEAFEKLVGASLETALANLGK

SEQ ID NO: 31533 - DNA, 1472 bp, Muscodor strobelii
  misc_feature: SGI EST ID NO. CUFF.74650.0
  misc_feature: Variant of the nucleotide sequence at SEQ ID NO 31531
ctccttccgaccgtacgccaaattttattcgaaacaaatattggctggactcaattgaatgctgcagtctgtcttacttattgctctgtaacagtgcagcctgaacaaatcgtcctgggttttttggcccaaaaaatagacaagaagcaccagtccagatcgactaattgagcagcccacagcatggcatcccaaataatcacatccgtcaacctagcttcgttgcccctcgttgccaagggtaaggtgcgggaaatctacgaagcctacgacgacaagcttctcctcattacaactgatcgcatctctgcatacgatgtcattcttgaaaatggtgttcggaacaagggtgccgtcctgactttgatcaccaatcactggctcaacacagtcctcccgaaccaggtgccaggcctaagacaccatctcgtctctttaaatgtaccaccttcagttgacatcagttccgaggacaagcaacgcctgttcggccgttcaatgattgtcaagaaattccgcgtcttccccattgaagtaattgtccgcggttatatcaccggtagctcctgggcggaatacaaacataaaggaacagtacatggcatggttcaaccctctggactgcaacaatgccaagcgttccctggcggacctatctacacaccatctactaaggcgcctgtgggcgagaaggacgagaacatctcggttgagcaagcacgacacattgttggtgataagtatgccgatcgaatagaaggtcttgcgcttgccatatacaaggctgcgcatgcctatgctttggaaagagggatcatagtcgcagacaccaagttcgagtttggtcttgacgagacgacagacgaagttgtcttgattgatgaggtcctaacgccagatagcagccggttctggccagctgctgattacaatcctgggagagatcaaagcagcttcgataagcaatacttgcgcaactggctgacgtctcaaggtctcaagggcaaagaaggcgtctcaatgcccgaggatatcatgcagcagacgagcgccaaatatcttgaagcatttgagaaactggttggagcatcattggagacggcgctggcaaacttaggaaaatagactggagagtgctccgttctgtattattagcattcatctactaggaaaacaacgtcatccaaagacgactgatgtttacctataggtactatcaatagacacgttatgttattaactcatagcttgcatgatgacaacagaataggtagcttagatgtggaatctgttcctatctatgagagtgctatattggctcgtgctaaacgacacacaagtctgtctgttctcgtgcgaattgacagccaggtgcttacattattttgctcggattggggtcgggagagaaaagaaaacgccggatgagaaatctgatatcttgcttcttgttattctatatgaaaaatatc

SEQ ID NO: 31534 - DNA, 4323 bp, Muscodor strobelii
  misc_feature: SGI cDNA ID NO. 570858
  misc_feature: Encodes the peptide sequence at SEQ ID NO 31535
atggaggtctcccttgctacctcaattgcccaggctaccgtagccggcctctgcacgtttatatatttggctcaaaaattacttcccaaaggtccgcagtgggctcggccttttgctgaggagactcactctactggtcatgtaaaaccgtggtctttttggacgcttctgctgttggtactatcctttctcggtctcgcagtatcttcctggacagctatatcgcctgcacccaatatttctcgaatcatcaatgtggcaccatgggctgctggtttattcatcacaatcttgggcctaccgaagaagacaccaaagacccttcttatcatctacgttaccatcttcgcctgtgggctcattgaactagccgcaacttactacgaagctcacagggtccacgttctgcatattatatcgcagactctggcactgctggcaatttttgcgattttggctatgcccatgcgggatccagccctcgacacaacggatatagcagaatcggataaaacccctacagctacactaaggagccctgaggacaatttgactttgtttcagtttatgactgtgtcctggttgtcacccttggtatcttacggatataataatcagttgaatgataaagatgtgtggctgttaccttttgaattccaacatcagcggttgcatttattgtttcgagatcttagaggctccatcataacacgtctcttgcttgcaaatggacttgatcttttcataatcaccatgctaggcatgatagagatggcgtcaaatctctcggcgccgcttctactacaaagactactggtgtcgattgaacgcgactctggtcgcttggacgagtcgatactgtgggccttagcaattctcttactccgacttgctgctgctcagtccggagtgttttcgatttggttttgtcggcgagcatatgaaaggtcccgcggagagatgatcacgactatatatgcgaagacactgacaaggaaatcttacggccaacgcgtcgaggaggaagaacatgttcagaggatcggaaatgcgcacgatgaggacccttctgaggacactcctctgctgaaacccgctctgacccgtggtcgattccatcgcttaatgcaatgggtgagaaaacatagacacaagtccttcaaagatgagcttccaacccaacagcctgcgacaatggggaagatcttaaacttgatgaagtcggacgtctacgaggtcgcacaacggttctgggagtttgctggtctcattacaaagcccctgcaactaatcatttcccttgctctagtgtggcaatttcttggatggtcttgccttcttggagttgcatgggtgattctgatgcaagtcgtcaacgcagctttcattcgccgcctaatagtcaatgaaagacttcgtcgagccgcatctgacgtcagaattcatgccacttctcaatttgtagaagcaatacgaccgctaagatggtacgactggcagtcaaaatggctaagcactatcttgggagatcgcgctcatgaactgcgcctgaggattagagtcgggctgtggtcaatactaatatctgctaccaacatatccgcgtccgcgttattccccgtattcgtgttttttgcgtatacatatatcgcgaagaagcaattgtcgatcgatgtagtttttcctgcccttcaacttttcgcaatgttggaaacaagtctgaaagaaattccgaacttggtgacggttcttctgaatgcttggattgcgatggggcgtattgaggcattcatggcagaacctgacaaggacgatgatgatctcagggcatcggacagtttagttgagtttcacgacgcgaccttcgaatggccaacaaaccatcgagctgttctgaatgatcttgatcttcaattcggttctggtctttccatcatttgtggaaaggttgggtctgggaagactgccctccttcaagcaatccttggcgacttagacaaggttcggggctcgtctgtgctaccaaataaccagatgataggttattgtgctcaatcgccatggcttcaaaacatgagcatccgggacaatattctctttaattttccatacgacgtgaccagatacaaaaaagtcgtagacgcatgtgcgctgactagagacttcgctaacttcgcacatggagatatgtccaacataggagagaacggaattggtctctctggcggccagaaggctcgcgtggctttggcgagggcggtttacagcgagtcacgcatcctcttactagacgaccccctcgccgcactggatcatggtacggcggagtcgattgtaaagaagcttttccaaggcccactgatgcagggtcgaactgtgattctcgtcactcaccgagccaatctttgtgctcatctcgcaagccagatcatcgaaattacgaatggatatgctcgtgttcttagagccgatgagatcgataaggagatcgatatattagctaaagagcacgctgcccaagctactcaagaaaatgacactcatactaccgccgatgatcaggatgatacagatgtggacgacaaatttatgacggacgagaaccgagcatccggcgctgttgtcgctagagtctattggatttacatcaaggctggaaagctcaaatggtgggcagcggttattgttcttttcctgcttttccgctttttccgtatctttagcacctggttcctgaaagcctggggtgaagcttacagtcctgttgaatccatcagtgcgcaggcgcagagcttgggtgaacaaatcttctctcaactcccacgtccgcaagacgacgtggcgccttggattgtgttatatgcaatgatcggtatagccactgcggtattcttcatactcacgcaatgcggcctgctctacatcttgtacgtggctgccaagagattgttcggagaagttttgcataaagtcagcagtgcgacgttccggttctacgatacgacgccagtagggcgactcatgaatcgattgacggctgacattggaatgttagatggaggcatgatcgcgccgctccaagacgtgacgttttggggcttaaattgggttaccagcatggctgtcattgctgccacgactcctacattcttcgtcttcgccattctaatgacaatctggtttatatacatcttcaaccgctttatgcccacttctcagagtcttaggaggctcgagatggtgtcactgagcccgttaatgtctaattttggtattctgttggagggtctggcaaccattagggcgtttaacgcgcagtcgcatttccaaaaccgcaacattgtcatcactgatgactttcaaaaaatggatcatttctattggagcctccaggcttggctgatgtatcgttttgatctgctctcggcggcttccacgtttgggttgacactactggcactttaccaaggcctgtcaccaggtctaacagcttttgtcttgacaacagcgtctcagttcgttgattctactcattatctgtgcaagagctatggtcaattgcagatggattttgtttctgtggaacgcgttgtcgaactgctcgatctcgaagaagaacctgtcggtcacctcgaggctcccaagcactggccgtcaggtagcgacaatatcaggttcgacaatgtgacacttaagtatgctccacacttagatccttctcttcgagatgtttccttcaccatccctggtggcgcaacctgtgctgtgcttggacgtacgggctctggcaagtcgactctggcgctggctctgttggctacgatgcatcccgagcatggtagcatccgtgtcggcagcatgaacatatcagaaattgatgtgcatgcatggcggcaacggatcagtttcgtggctcaagatccagtcctctttccaggcacgctccgggataatctcgaccctcttcaactgcatactgatgaagagtgcgaagccgctcttcatcgaattcttgggccgggctggcagttaacttcacgcatcgacgacggcggtaagaatttgagccagggtcaacggcaactgataggcatcggacgcgctgtcttacgacgaagtccgataattattcttgatgaggccaccgcttcgatcgacaaagaaactgcgcttgctattcaggatgtgctccgcgatgaactatccaaaagcacagtaatcacaatcgcacatcgactggaggctgtaagggacgcagattacttcattcgtcttgattctgggaaagtcgtcgaagctggtccaacatcttcaccaacatag

SEQ ID NO: 31535 - protein, 1440 aa, Muscodor strobelii
  misc_feature: SGI Peptide ID NO. 570858
  misc_feature (247)..(574): Pfam Id: PF00664 Pfam Desc: ABC transporter transmembrane region
  misc_feature (891)..(1177): Pfam Id: PF00664 Pfam Desc: ABC transporter transmembrane region
  misc_feature (1251)..(1428): Pfam Id: PF00005 Pfam Desc: ABC transporter
  misc_feature (641)..(816): Pfam Id: PF00005 Pfam Desc: ABC transporter
  misc_feature (400)..(574): Pfam Id: PF00664 Pfam Desc: ABC transporter transmembrane region
  misc_feature (891)..(1112): Pfam Id: PF00664 Pfam Desc: ABC transporter transmembrane region
  misc_feature (646)..(816): Pfam Id: PF00005 Pfam Desc: ABC transporter
  misc_feature (8)..(1390): NCBI GI: 261354404 Blast Desc: canalicular multispecific organic anion transporter 1 [Verticillium albo-atrum VaMs.102]
  misc_feature (30)..(1434): NCBI GI: 145235459 Blast Desc: An03g04970 [Aspergillus niger] gi|134058062|emb|CAK38289.1| protein product [Aspergillus niger]
  misc_feature (32)..(1434): NCBI GI: 255946816 Blast Desc: Pc22g01310 [Penicillium chrysogenum Wisconsin 54-1255] gi|211591192|emb|CAP97419.1| Pc22g01310 [Penicillium chrysogenum Wisconsin 54-1255]
  misc_feature (86)..(1434): NCBI GI: 115433354 Blast Desc: ATEG_08193 [Aspergillus terreus NIH2624] gi|114189666|gb|EAU31366.1| ATEG_08193 [Aspergillus terreus NIH2624]
  misc_feature (137)..(1434): NCBI GI: 119497905 Blast Desc: ABC transporter, [Neosartorya fischeri NRRL 181] gi|119413874|gb|EAW23813.1| ABC transporter, [Neosartorya fischeri NRRL 181]
  misc_feature (108)..(1434): NCBI GI: 70988867 Blast Desc: ABC bile acid transporter [Aspergillus fumigatus Af293] gi|66846917|gb|EAL87248.1| ABC bile acid transporter, [Aspergillus fumigatus Af293] gi|159128700|gb|EDP53814.1| ABC
  misc_feature (32)..(1434): NCBI GI: 212538535 Blast Desc: ABC bile acid transporter, [Penicillium marneffei ATCC 18224] gi|210069165|gb|EEA23256.1| ABC bile acid transporter, [Penicillium marneffei ATCC 18224]
  misc_feature (32)..(1438): NCBI GI: 242806468 Blast Desc: ABC bile acid transporter, [Talaromyces stipitatus ATCC 10500] gi|218715374|gb|EED14796.1| ABC bile acid transporter, [Talaromyces stipitatus ATCC 10500]
  misc_feature (22)..(1434): NCBI GI: 67901378 Blast Desc: AN7676.2 [Aspergillus nidulans FGSC A4] gi|40742672|gb|EAA61862.1| AN7676.2 [Aspergillus nidulans FGSC A4] gi|259484017|tpe|CBF79881.1| TPA: ABC bile acid transporter,
  misc_feature (32)..(1434): NCBI GI: 121710908 Blast Desc: ABC transporter, [Aspergillus clavatus NRRL 1] gi|119401220|gb|EAW11644.1| ABC transporter, [Aspergillus clavatus NRRL 1]
  misc_feature (384)..(1432): SWISSPROT Homolog: EC 3.6.3.44 Xenobiotic-transporting ATPase
MEVSLATSIAQATVAGLCTFIYLAQKLLPKGPQWARPFAEETHSTGHVKPWSFWTLLLLVLSFLGLAVSSWTAISPAPNISRIINVAPWAAGLFITILGLPKKTPKTLLIIYVTIFACGLIELAATYYEAHRVHVLHIISQTLALLAIFAILAMPMRDPALDTTDIAESDKTPTATLRSPEDNLTLFQFMTVSWLSPLVSYGYNNQLNDKDVWLLPFEFQHQRLHLLFRDLRGSIITRLLLANGLDLFIITMLGMIEMASNLSAPLLLQRLLVSIERDSGRLDESILWALAILLLRLAAAQSGVFSIWFCRRAYERSRGEMITTIYAKTLTRKSYGQRVEEEEHVQRIGNAHDEDPSEDTPLLKPALTRGRFHRLMQWVRKHRHKSFKDELPTQQPATMGKILNLMKSDVYEVAQRFWEFAGLITKPLQLIISLALVWQFLGWSCLLGVAWVILMQVVNAAFIRRLIVNERLRRAASDVRIHATSQFVEAIRPLRWYDWQSKWLSTILGDRAHELRLRIRVGLWSILISATNISASALFPVFVFFAYTYIAKKQLSIDVVFPALQLFAMLETSLKEIPNLVTVLLNAWIAMGRIEAFMAEPDKDDDDLRASDSLVEFHDATFEWPTNHRAVLNDLDLQFGSGLSIICGKVGSGKTALLQAILGDLDKVRGSSVLPNNQMIGYCAQSPWLQNMSIRDNILFNFPYDVTRYKKVVDACALTRDFANFAHGDMSNIGENGIGLSGGQKARVALARAVYSESRILLLDDPLAALDHGTAESIVKKLFQGPLMQGRTVILVTHRANLCAHLASQIIEITNGYARVLRADEIDKEIDILAKEHAAQATQENDTHTTADDQDDTDVDDKFMTDENRASGAVVARVYWIYIKAGKLKWWAAVIVLFLLFRFFRIFSTWFLKAWGEAYSPVESISAQAQSLGEQIFSQLPRPQDDVAPWIVLYAMIGIATAVFFILTQCGLLYILYVAAKRLFGEVLHKVSSATFRFYDTTPVGRLMNRLTADIGMLDGGMIAPLQDVTFWGLNWVTSMAVIAATTPTFFVFAILMTIWFIYIFNRFMPTSQSLRRLEMVSLSPLMSNFGILLEGLATIRAFNAQSHFQNRNIVITDDFQKMDHFYWSLQAWLMYRFDLLSAASTFGLTLLALYQGLSPGLTAFVLTTASQFVDSTHYLCKSYGQLQMDFVSVERVVELLDLEEEPVGHLEAPKHWPSGSDNIRFDNVTLKYAPHLDPSLRDVSFTIPGGATCAVLGRTGSGKSTLALALLATMHPEHGSIRVGSMNISEIDVHAWRQRISFVAQDPVLFPGTLRDNLDPLQLHTDEECEAALHRILGPGWQLTSRIDDGGKNLSQGQRQLIGIGRAVLRRSPIIILDEATASIDKETALAIQDVLRDELSKSTVITIAHRLEAVRDADYFIRLDSGKVVEAGPTSSPT

SEQ ID NO: 31536 - DNA, 1342 bp, Muscodor strobelii
  misc_feature: SGI EST ID NO. CUFF.74659.0
  misc_feature: Variant of the nucleotide sequence at SEQ ID NO 31534
cgcctgcacccaatatttctcgaatcatcaatgtggcaccatgggctgctggtttattcatcacaatcttgggcctaccgaagaagacaccaaagacccttcttatcatctacgttaccatcttcgcctgtgggctcattgaactagccgcaacttactacgaagctcacagggtccacgttctgcatattatatcgcagactctggcactgctggcaatttttgcgattttggctatgcccatgcgggatccagccctcgacacaacggatatagcagaatcggataaaacccctacagctacactaaggagccctgaggacaatttgactttgtttcagtttatgactgtgtcctggttgtcacccttggtatcttacggatataataatcagttgaatgataaagatgtgtggctgttaccttttgaattccaacatcagcggttgcatttattgtttcgagatcttagaggctccatcataacacgtctcttgcttgcaaatggacttgatcttttcataatcaccatgctaggcatgatagagatggcgtcaaatctctcggcgccgcttctactacaaagactactggtgtcgattgaacgcgactctggtcgcttggacgagtcgatactgtgggccttagcaattctcttactccgacttgctgctgctcagtccggagtgttttcgatttggttttgtcggcgagcatatgaaaggtcccgcggagagatgatcacgactatatatgcgaagacactgacaaggaaatcttacggccaacgcgtcgaggaggaagaacatgttcagaggatcggaaatgcgcacgatgaggacccttctgaggacactcctctgctgaaacccgctctgacccgtggtcgattccatcgcttaatgcaatgggtgagaaaacatagacacaagtccttcaaagatgagcttccaacccaacagcctgcgacaatggggaagatcttaaacttgatgaagtcggacgtctacgaggtcgcacaacggttctgggagtttgctggtctcattacaaagcccctgcaactaatcatttcccttgctctagtgtggcaatttcttggatggtcttgccttcttggagttgcatgggtgattctgatgcaagtcgtcaacgcagctttcattcgccgcctaatagtcaatgaaagacttcgtcgagccgcatctgacgtcagaattcatgccacttctcaatttgtagaagcaatacgaccgctaagatggtacgactggcagtcaaaatggctaagcactatcttgggagatcgcgctcatgaactgcgcctgaggattagagtcgg

SEQ ID NO: 31537 - DNA, 2841 bp, Muscodor strobelii
  misc_feature: SGI cDNA ID NO. 570859
  misc_feature: Elevated expression when VOC is produced
  misc_feature: Encodes the peptide sequence at SEQ ID NO 31538
atgaaattcggattgaactaccacaagcttgtcgtcccggagtggtcacagcattacattccctacgacgctctcaaatttcgcttgaaatatagaccagttcaaaatgaaacgacgctccagatcctcacaaggaccatcgataatttgtgcacgttccatgaccgtctctcagaatgtattgagcagagtgaagacaggcttcggagactatatgttgaacagtctgagcaagctcatattgttgaactagacttttaccataaagaaacacagttcttacttcgcgagctgacgaaactcaaatctttcataagggtgaacggagaagcggttgtcaaattactgggcagagctcagccatccgcattgagtgaagccgagaccatttcgttcattgaatctcgttgggagtcaatccgaaaggatcattacgttgtcgtaattaatctcgagcgcaagatcctcgagggtcatgcgctcgtctcgcgattgaaacaatctaggactctggaagcatacactttcagtaccgaagaagaaactaagcgtactttgtttcttaactctttggccaaggggatcccgaaccctggcctcctagaaggcatacccttggattccaacgattatttgtttctacttgctgctgtcattcaccaagatcattgtcgagatgggctagatgagcgaacgatagttgagacattcggatgccttctcgaatctcataaaatcatctctagaaatggccttcgtacactagatctcgcgggtcaaactctcttgcattacttcgccaagtataatcttcagaaattagtacgtaaagtactcgatataatgtctgaaacaacagaaacgtcatccgacctagatgcaatccttctcctcgaagactgttataatctaacgccattacatcatgccattatgaacgccaacacgggcattgtcgcgttattcgttgataggctcatagccagcgaggacgtatcgagagcgtctagctatttagaggtcatgatgagttgtcttcatttggctctctcatttgacaacgacgagatcgtgactcagattctaagagtcacgaatgatattgactacaaatttggtgacggaaaaaccgctctgcatattgccgttcagagcgggcagagcaagatcatagcctcattgttgcaagctggtgctaacgttaacgtcatcgatggtgcatgtggatggacaccgatattttatgcggcagtccatggcaacattgaatgcgccgcgttgcttatcaaggccggaatcaacactagtttggcggatctggctgggtggactgcaagagaacatgcaacttaccgtgggcatttagctgtggctgagatgctgccacgcctcgaagtccacgagggcaatattgagcatagcattgtacgttcttctcaggttcctctcaatgtgatgagccaggagtctagtaccagtacgatggttgttgtacatctcgggacaatgcaagtcggacgtaatactcctcctatcaagttcaaccaaccatcatcagagccattggaacacaatctgagtagccgagatgatgtatcagtcttgataatctcaggaggctctcaatcttatcaaatacgactccccatcttagacgaacaaacctctccactgatttttcatttccaagagaatagcgaattgcacttggttttcaaaatcctcaagtttgatatatccgcaaccgagaggcttgtctgtggtggtacggcaattctggaaagcaatagactacttttcggctcgaacagacaaagtttgattagagaacacactgtccctatcctggataacacaactttagagttgaccgggtcggtactgtttacttacgtgatagtgaagccaattccgtcgctcgatttaccgggctacgatctcaagagcaatggaagcaacgggttgatgctggtaggtcatcgaggcctcggccaaaacgtttcgagtcgagaacaccttcagatcggagagaataccgtcgagtcctttcttgctgcggctgccgcaggcgcttcgtttgttgaattcgacgtacaagtgacaaaagatctcgaacctgtcatttatcacgacttctcgctaagcgagtctgggaccgacattccaatatatgatatgaccgttgatcaatatagatatgccaacactttccaagggccgtcagaacactcaagaacacgctccagatcactcgagcaagttgacgagacaaatatactcaaactgcgcgatcgtctagagaatacggtcaacttcaaggcgaaaggtctcattgctaatactcgtggcggagatttcattcaccaccctttcgccaccctgaagagctcttcacaaagctaccgcagattctggagatggtccgccactttgcaggaaatcgaccgatcatgtgtctcgtcattcactccggaagtgtgtattctcctctcgcttaagcaaaaagtatacccagtattattcctcaccaacgccgggaaattgccaatgggtccaaatcgttcttctgtcgatttagaaaaacgggctactagtttgcaagtcgcgatcaaatttgccaaattctggggtctgactggtcttgttctgcactccgaggcttttcttctttgtccaagattgatcggattagtcaaaagtgcaggattggtatgtgcatcctacgggttgagaaacaatgtccctgaagacgtgaagttgcaagcatgtgctgggcttgatgtaatcatcgttgacaaggttaggctagtcgcgaagacactggagagctttgctcagtag

SEQ ID NO: 31538 - protein, 946 aa, Muscodor strobelii
  misc_feature: SGI Peptide ID NO. 570859
  misc_feature (374)..(406): Pfam Id: PF00023 Pfam Desc: Ankyrin repeat
  misc_feature (408)..(440): Pfam Id: PF00023 Pfam Desc: Ankyrin repeat
  misc_feature (660)..(936): Pfam Id: PF03009 Pfam Desc: Glycerophosphoryl diester phosphodiesterase family
  misc_feature (660)..(730): Pfam Id: PF03009 Pfam Desc: Glycerophosphoryl diester phosphodiesterase family
  misc_feature (819)..(936): Pfam Id: PF03009 Pfam Desc: Glycerophosphoryl diester phosphodiesterase family
  misc_feature (1)..(26): Pfam Id: PF03105 Pfam Desc: SPX domain
  misc_feature (1)..(943): NCBI GI: 240107577 Blast Desc: Glycerophosphoryl diester phosphodiesterase family protein [Coccidioides posadasii C735 delta SOWgp]
  misc_feature (221)..(946): NCBI GI: 238493779 Blast Desc: ankyrin repeat-containing protein, [Aspergillus flavus NRRL3357] gi|220696620|gb|EED52962.1| ankyrin repeat-containing protein, [Aspergillus flavus NRRL3357]
  misc_feature (1)..(943): NCBI GI: 119177747 Blast Desc: CIMG_07775 [Coccidioides immitis RS]
  misc_feature (252)..(941): NCBI GI: 255940538 Blast Desc: Pc16g07040 [Penicillium chrysogenum Wisconsin 54-1255] gi|211585661|emb|CAP93374.1| Pc16g07040 [Penicillium chrysogenum Wisconsin 54-1255]
  misc_feature (235)..(945): NCBI GI: 238844075 Blast Desc: glycerophosphodiesterase GDE1 [Microsporum canis CBS 113480]
  misc_feature (240)..(941): NCBI GI: 212529246 Blast Desc: glycerophosphocholine phosphodiesterase Gde1, [Penicillium marneffei ATCC 18224] gi|210074178|gb|EEA28265.1| glycerophosphocholine phosphodiesterase Gde1, [Penicillium ATCC
  misc_feature (249)..(941): NCBI GI: 145254846 Blast Desc: An18g03170 [Aspergillus niger] gi|134084361|emb|CAK48701.1| protein product [Aspergillus niger]
  misc_feature (240)..(941): NCBI GI: 242764002 Blast Desc: glycerophosphocholine phosphodiesterase Gde1, [Talaromyces stipitatus ATCC 10500] gi|218723882|gb|EED23299.1| glycerophosphocholine phosphodiesterase Gde1, [Talaromyces ATCC
  misc_feature (241)..(941): NCBI GI: 70997487 Blast Desc: glycerophosphocholine phosphodiesterase Gde1 [Aspergillus fumigatus Af293] gi|66851127|gb|EAL91453.1| glycerophosphocholine phosphodiesterase Gde1, [Aspergillus Af293]
  misc_feature (218)..(934): NCBI GI: 255953879 Blast Desc: Pc21g06470 [Penicillium chrysogenum Wisconsin 54-1255] gi|211589403|emb|CAP95544.1| Pc21g06470 [Penicillium chrysogenum Wisconsin 54-1255]
  misc_feature (229)..(941): SWISSPROT Homolog: EC 3.1.4.46 Glycerophosphodiester phosphodiesterase
  misc_feature: Useful for introducing or modulating the production of volatile compounds
MKFGLNYHKLVVPEWSQHYIPYDALKFRLKYRPVQNETTLQILTRTIDNLCTFHDRLSECIEQSEDRLRRLYVEQSEQAHIVELDFYHKETQFLLRELTKLKSFIRVNGEAVVKLLGRAQPSALSEAETISFIESRWESIRKDHYVVVINLERKILEGHALVSRLKQSRTLEAYTFSTEEETKRTLFLNSLAKGIPNPGLLEGIPLDSNDYLFLLAAVIHQDHCRDGLDERTIVETFGCLLESHKIISRNGLRTLDLAGQTLLHYFAKYNLQKLVRKVLDIMSETTETSSDLDAILLLEDCYNLTPLHHAIMNANTGIVALFVDRLIASEDVSRASSYLEVMMSCLHLALSFDNDEIVTQILRVTNDIDYKFGDGKTALHIAVQSGQSKIIASLLQAGANVNVIDGACGWTPIFYAAVHGNIECAALLIKAGINTSLADLAGWTAREHATYRGHLAVAEMLPRLEVHEGNIEHSIVRSSQVPLNVMSQESSTSTMVVVHLGTMQVGRNTPPIKFNQPSSEPLEHNLSSRDDVSVLIISGGSQSYQIRLPILDEQTSPLIFHFQENSELHLVFKILKFDISATERLVCGGTAILESNRLLFGSNRQSLIREHTVPILDNTTLELTGSVLFTYVIVKPIPSLDLPGYDLKSNGSNGLMLVGHRGLGQNVSSREHLQIGENTVESFLAAAAAGASFVEFDVQVTKDLEPVIYHDFSLSESGTDIPIYDMTVDQYRYANTFQGPSEHSRTRSRSLEQVDETNILKLRDRLENTVNFKAKGLIANTRGGDFIHHPFATLKSSSQSYRRFWRWSATLQEIDRSCVSSFTPEVCILLSLKQKVYPVLFLTNAGKLPMGPNRSSVDLEKRATSLQVAIKFAKFWGLTGLVLHSEAFLLCPRLIGLVKSAGLVCASYGLRNNVPEDVKLQACAGLDVIIVDKVRLVAKTLESFAQ

SEQ ID NO: 31539 - DNA, 4573 bp, Muscodor strobelii
  misc_feature: SGI EST ID NO. CUFF.74686.0
  misc_feature: Variant of the nucleotide sequence at SEQ ID NO 31537
ttttggtattctgttggagggtctggcaaccattagggcgtttaacgcgcagtcgcatttccaaaaccgcaacattgtcatcactgatgactttcaaaaaatggatcatttctattggagcctccaggcttggctgatgtatcgttttgatctgctctcggcggcttccacgtttgggttgacactactggcactttaccaaggcctgtcaccaggtctaacagcttttgtcttgacaacagcgtctcagttcgttgattctactcattatctgtgcaagagctatggtcaattgcagatggattttgtttctgtggaacgcgttgtcgaactgctcgatctcgaagaagaacctgtcggtcacctcgaggctcccaagcactggccgtcaggtagcgacaatatcaggttcgacaatgtgacacttaagtatgctccacacttagatccttctcttcgagatgtttccttcaccatccctggtggcgcaacctgtgctgtgcttggacgtacgggctctggcaagtcgactctggcgctggctctgttggctacgatgcatcccgagcatggtagcatccgtgtcggcagcatgaacatatcagaaattgatgtgcatgcatggcggcaacggatcagtttcgtggctcaagatccagtcctctttccaggcacgctccgggataatctcgaccctcttcaactgcatactgatgaagagtgcgaagccgctcttcatcgaattcttgggccgggctggcagttaacttcacgcatcgacgacggcggtaagaatttgagccagggtcaacggcaactgataggcatcggacgcgctgtcttacgacgaagtccgataattattcttgatgaggccaccgcttcgatcgacaaagaaactgcgcttgctattcaggatgtgctccgcgatgaactatccaaaagcacagtaatcacaatcgcacatcgactggaggctgtaagggacgcagattacttcattcgtcttgattctgggaaagtcgtcgaagctggtccaacatcttcaccaacatagcgatacaaatcaaattctctatacgagatacgatgtataagttttgaaacgagatagattaagtatacaagtttcggaagctgctacagcagttattacatataggcgcccgccattcaccatggaaatggttcatcgtttgcccatttcaagctatttgagagaacaagtgttctaatcttggataatataagcaacaacgcccgaatggaagtacaaagatagcggcattggccaataatttgcgaattttctggttcgaaaggtttagtaagacttgcttcactcaaacaacgagaccaagacgttgttgactgaatgttcgttatggccatatgtgtggaatgtgccacgccacaataatgacaagttcatggcgaccatctcatcaccatcggtgtctaggctaaaaatcaatgattactcttaacggtatgtctgtagctggttagggacaagggagccagggcgaagcacctgcctattgatgtttctgcggatgcgaatttttctctcactcagagatatatatatgtaaggtactcaatcatgtggccttggaggatgggcagagcttctcaatcaattgagtgacgaggttgtgcggtgtggcttgtaaggacgactgaaatgtcgaatctaggtgcggctggaaccccctcccccaagtcctccacatttaaactatatgtatggggaagaatagaacatgacttcattccaatcaagactccttcgaattgaatcgttggtactaaacacgtggggtacctataagctacagacctgcagcttatgtgctagaatcggtacttgttcaattgtacctccacaggtgtcggctgcccggatctaagtagtacgatgtgcgaatttccaaaaatacctaaggtaggtacccttagtaacctacacgatagccaccccgacaaccacgcattctagtatctaggctgtggaatggaaatgaaagtgcgctttactctcatcttcttccgttgtagttttgcctttcgaaacccgtccgccgctactgggtgaaagtggcattgtcaatatgaaattcggattgaactaccacaagcttgtcgtcccggagtggtcacagcattacattccctacgacgctctcaaatttcgcttgaaatatagaccagttcaaaatgaaacgacgctccagatcctcacaaggaccatcgataatttgtgcacgttccatgaccgtctctcagaatgtattgagcagagtgaagacaggcttcggagactatatgttgaacagtctgagcaagctcatattgttgaactagacttttaccataaagaaacacagttcttacttcgcgagctgacgaaactcaaatctttcataagggtgaacggagaagcggttgtcaaattactgggcagagctcagccatccgcattgagtgaagccgagaccatttcgttcattgaatctcgttgggagtcaatccgaaaggatcattacgttgtcgtaattaatctcgagcgcaagatcctcgagggtcatgcgctcgtctcgcgattgaaacaatctaggactctggaagcatacactttcagtaccgaagaagaaactaagcgtactttgtttcttaactctttggccaaggggatcccgaaccctggcctcctagaaggcatacccttggattccaacgattatttgtttctacttgctgctgtcattcaccaagatcattgtcgagatgggctagatgagcgaacgatagttgagacattcggatgccttctcgaatctcataaaatcatctctagaaatggccttcgtacactagatctcgcgggtcaaactctcttgcattacttcgccaagtataatcttcagaaattagtacgtaaagtactcgatataatgtctgaaacaacagaaacgtcatccgacctagatgcaatccttctcctcgaagactgttataatctaacgccattacatcatgccattatgaacgccaacacgggcattgtcgcgttattcgttgataggctcatagccagcgaggacgtatcgagagcgtctagctatttagaggtcatgatgagttgtcttcatttggctctctcatttgacaacgacgagatcgtgactcagattctaagagtcacgaatgatattgactacaaatttggtgacggaaaaaccgctctgcatattgccgttcagagcgggcagagcaagatcatagcctcattgttgcaagctggtgctaacgttaacgtcatcgatggtgcatgtggatggacaccgatattttatgcggcagtccatggcaacattgaatgcgccgcgttgcttatcaaggccggaatcaacactagtttggcggatctggctgggtggactgcaagagaacatgcaacttaccgtgggcatttagctgtggctgagatgctgccacgcctcgaagtccacgagggcaatattgagcatagcattgtacgttcttctcaggttcctctcaatgtgatgagccaggagtctagtaccagtacgatggttgttgtacatctcgggacaatgcaagtcggacgtaatactcctcctatcaagttcaaccaaccatcatcagagccattggaacacaatctgagtagccgagatgatgtatcagtcttgataatctcaggaggctctcaatcttatcaaatacgactccccatcttagacgaacaaacctctccactgatttttcatttccaagagaatagcgaattgcacttggttttcaaaatcctcaagtttgatatatccgcaaccgagaggcttgtctgtggtggtacggcaattctggaaagcaatagactacttttcggctcgaacagacaaagtttgattagagaacacactgtccctatcctggataacacaactttagagttgaccgggtcggtactgtttacttacgtgatagtgaagccaattccgtcgctcgatttaccgggctacgatctcaagagcaatggaagcaacgggttgatgctggtaggtcatcgaggtaggtaacgaaatatttgtagttggtgcaatgactgataggcgagaaggcctcggccaaaacgtttcgagtcgagaacaccttcagatcggagagaataccgtcgagtcctttcttgctgcggctgccgcaggcgcttcgtttgttgaattcgacgtacaagtgacaaaagatctcgaacctgtcatttatcacgacttctcgctaagcgagtctgggaccgacattccaatatatgatatgaccgttgatcaatatagatatgccaacactttccaagggccgtcagaacactcaagaacacgctccagatcactcgagcaagttgacgagacaaatatactcaaactgcgcgatcgtctagagaatacggtcaacttcaaggcgaaaggtctcattgctaatactcgtggcggagatttcattcaccaccctttcgccaccctgaagagctcttcacaaagctaccgcagag

SEQ ID NO: 31540 - DNA, 2448 bp, Muscodor strobelii
  misc_feature: SGI cDNA ID NO. 570860
  misc_feature: Encodes the peptide sequence at SEQ ID NO 31541
atgaaattcggattgaactaccacaagcttgtcgtcccggagtggtcacagcattacattccctacgacgctctcaaatttcgcttgaaatatagaccagttcaaaatgaaacgacgctccagatcctcacaaggaccatcgataatttgtgcacgttccatgaccgtctctcagaatgtattgagcagagtgaagacaggcttcggagactatatgttgaacagtctgagcaagctcatattgttgaactagacttttaccataaagaaacacagttcttacttcgcgagctgacgaaactcaaatctttcataagggtgaacggagaagcggttgtcaaattactgggcagagctcagccatccgcattgagtgaagccgagaccatttcgttcattgaatctcgttgggagtcaatccgaaaggatcattacgttgtcgtaattaatctcgagcgcaagatcctcgagggtcatgcgctcgtctcgcgattgaaacaatctaggactctggaagcatacactttcagtaccgaagaagaaactaagcgtactttgtttcttaactctttggccaaggggatcccgaaccctggcctcctagaaggcatacccttggattccaacgattatttgtttctacttgctgctgtcattcaccaagatcattgtcgagatgggctagatgagcgaacgatagttgagacattcggatgccttctcgaatctcataaaatcatctctagaaatggccttcgtacactagatctcgcgggtcaaactctcttgcattacttcgccaagtataatcttcagaaattagtacgtaaagtactcgatataatgtctgaaacaacagaaacgtcatccgacctagatgcaatccttctcctcgaagactgttataatctaacgccattacatcatgccattatgaacgccaacacgggcattgtcgcgttattcgttgataggctcatagccagcgaggacgtatcgagagcgtctagctatttagaggtcatgatgagttgtcttcatttggctctctcatttgacaacgacgagatcgtgactcagattctaagagtcacgaatgatattgactacaaatttggtgacggaaaaaccgctctgcatattgccgttcagagcgggcagagcaagatcatagcctcattgttgcaagctggtgctaacgttaacgtcatcgatggtgcatgtggatggacaccgatattttatgcggcagtccatggcaacattgaatgcgccgcgttgcttatcaaggccggaatcaacactagtttggcggatctggctgggtggactgcaagagaacatgcaacttaccgtgggcatttagctgtggctgagatgctgccacgcctcgaagtccacgagggcaatattgagcatagcattgtacgttcttctcaggttcctctcaatgtgatgagccaggagtctagtaccagtacgatggttgttgtacatctcgggacaatgcaagtcggacgtaatactcctcctatcaagttcaaccaaccatcatcagagccattggaacacaatctgatgaagccaattccgtcgctcgatttaccgggctacgatctcaagagcaatggaagcaacgggttgatgctgtcctttcttgctgcggctgccgcaggcgcttcgtttgttgaattcgacgtacaagtgacaaaagatctcgaacctgtcatttatcacgacttctcgctaagcgagtctgggaccgacattccaatatatgatatgaccgttgatcaatatagatatgccaacactttccaagggccgtcagaacactcaagaacacgctccagatcactcgagcaagttgacgagacaaatatactcaaactgcgcgatcgtctagagaatacggtcaacttcaaggcgaaaggtctcattgctaatactcgtggcggagatttcattcaccaccctttcgccaccctgaagagctcttcacaaagctaccgcagattctggagatggtccgccactttgcaggaaatcgaccgatcatgtgtctcgtcattcactccggaagtgtgtattctcctctcgcttaagcaaaaagtatacccagtattattcctcaccaacgccgggaaattgccaatgggtccaaatcgttcttctgtcgatttagaaaaacgggctactagtttgcaagtcgcgatcaaatttgccaaattctggggtctgactggtcttgttctgcactccgaggcttttcttctttgtccaagattgatcggattagtcaaaagtgcaggattggtatgtgcatcctacgggttgagaaacaatgtccctgaagacgtgaagttgcaagcatgtgctgggcttgatgtaatcatcgttgacaaggttaggctagtcgcgaagacactggagagctttgctcagtag

SEQ ID NO: 31541 - protein, 815 aa, Muscodor strobelii
  misc_feature: SGI Peptide ID NO. 570860
  misc_feature (374)..(406): Pfam Id: PF00023 Pfam Desc: Ankyrin repeat
  misc_feature (408)..(440): Pfam Id: PF00023 Pfam Desc: Ankyrin repeat
  misc_feature (543)..(805): Pfam Id: PF03009 Pfam Desc: Glycerophosphoryl diester phosphodiesterase family
  misc_feature (549)..(599): Pfam Id: PF03009 Pfam Desc: Glycerophosphoryl diester phosphodiesterase family
  misc_feature (688)..(805): Pfam Id: PF03009 Pfam Desc: Glycerophosphoryl diester phosphodiesterase family
  misc_feature (1)..(26): Pfam Id: PF03105 Pfam Desc: SPX domain
  misc_feature (551)..(815): NCBI GI: 238493779 Blast Desc: ankyrin repeat-containing protein, [Aspergillus flavus NRRL3357] gi|220696620|gb|EED52962.1| ankyrin repeat-containing protein, [Aspergillus flavus NRRL3357]
  misc_feature (468)..(814): NCBI GI: 238844075 Blast Desc: glycerophosphodiesterase GDE1 [Microsporum canis CBS 113480]
  misc_feature (469)..(810): NCBI GI: 255940538 Blast Desc: Pc16g07040 [Penicillium chrysogenum Wisconsin 54-1255] gi|211585661|emb|CAP93374.1| Pc16g07040 [Penicillium chrysogenum Wisconsin 54-1255]
  misc_feature (551)..(812): NCBI GI: 240107577 Blast Desc: Glycerophosphoryl diester phosphodiesterase family protein [Coccidioides posadasii C735 delta SOWgp]
  misc_feature (566)..(812): NCBI GI: 119177747 Blast Desc: CIMG_07775 [Coccidioides immitis RS]
  misc_feature (551)..(810): NCBI GI: 212529246 Blast Desc: glycerophosphocholine phosphodiesterase Gde1, [Penicillium marneffei ATCC 18224] gi|210074178|gb|EEA28265.1| glycerophosphocholine phosphodiesterase Gde1, [Penicillium ATCC
  misc_feature (551)..(810): NCBI GI: 67515711 Blast Desc: AN0137.2 [Aspergillus nidulans FGSC A4] gi|40746159|gb|EAA65315.1| AN0137.2 [Aspergillus nidulans FGSC A4] gi|259489667|tpe|CBF90127.1| TPA: glycerophosphocholine Gde1,
  misc_feature (562)..(795): NCBI GI: 258576857 Blast Desc: [Uncinocarpus reesii 1704] gi|237902876|gb|EEP77277.1| [Uncinocarpus reesii 1704]
  misc_feature (551)..(810): NCBI GI: 242764002 Blast Desc: glycerophosphocholine phosphodiesterase Gde1, [Talaromyces stipitatus ATCC 10500] gi|218723882|gb|EED23299.1| glycerophosphocholine phosphodiesterase Gde1, [Talaromyces ATCC
  misc_feature (544)..(810): NCBI GI: 119479013 Blast Desc: cyclin dependent kinase (Pho85), [Neosartorya fischeri NRRL 181] gi|119407689|gb|EAW17638.1| cyclin dependent kinase (Pho85), [Neosartorya fischeri NRRL 181]
MKFGLNYHKLVVPEWSQHYIPYDALKFRLKYRPVQNETTLQILTRTIDNLCTFHDRLSECIEQSEDRLRRLYVEQSEQAHIVELDFYHKETQFLLRELTKLKSFIRVNGEAVVKLLGRAQPSALSEAETISFIESRWESIRKDHYVVVINLERKILEGHALVSRLKQSRTLEAYTFSTEEETKRTLFLNSLAKGIPNPGLLEGIPLDSNDYLFLLAAVIHQDHCRDGLDERTIVETFGCLLESHKIISRNGLRTLDLAGQTLLHYFAKYNLQKLVRKVLDIMSETTETSSDLDAILLLEDCYNLTPLHHAIMNANTGIVALFVDRLIASEDVSRASSYLEVMMSCLHLALSFDNDEIVTQILRVTNDIDYKFGDGKTALHIAVQSGQSKIIASLLQAGANVNVIDGACGWTPIFYAAVHGNIECAALLIKAGINTSLADLAGWTAREHATYRGHLAVAEMLPRLEVHEGNIEHSIVRSSQVPLNVMSQESSTSTMVVVHLGTMQVGRNTPPIKFNQPSSEPLEHNLMKPIPSLDLPGYDLKSNGSNGLMLSFLAAAAAGASFVEFDVQVTKDLEPVIYHDFSLSESGTDIPIYDMTVDQYRYANTFQGPSEHSRTRSRSLEQVDETNILKLRDRLENTVNFKAKGLIANTRGGDFIHHPFATLKSSSQSYRRFWRWSATLQEIDRSCVSSFTPEVCILLSLKQKVYPVLFLTNAGKLPMGPNRSSVDLEKRATSLQVAIKFAKFWGLTGLVLHSEAFLLCPRLIGLVKSAGLVCASYGLRNNVPEDVKLQACAGLDVIIVDKVRLVAKTLESFAQ

SEQ ID NO: 31542 - DNA, 4573 bp, Muscodor strobelii; identical to SEQ ID NO: 31539
  misc_feature: SGI EST ID NO. CUFF.74686.0
  misc_feature: Variant of the nucleotide sequence at SEQ ID NO 31540

SEQ ID NO: 31543 - DNA, 2076 bp, Muscodor strobelii
  misc_feature: SGI cDNA ID NO. 570861
  misc_feature: Reduced expression when VOC is produced
  misc_feature: Encodes the peptide sequence at SEQ ID NO 31544
atgatggagatcgacagtacgactggagcaaaaccagccagcccagccgatgaaatggctgaagctacggatcaagatgattcacccgtggcttcttcggctgcaaatggtatacacttgaacgggaatggtgtggataagtcgacgactccagaaacagtgatatcacgaccgcattcgtcacacgcagctaaagagcaggatcgcccagcatccgctgtaccttctatggaccttgctgcgcttgctgcaaaatcgatggcattacccgctccttctgcttctagtcctactcctcggctttcattccagagcccccaacagccgtcaaagcaaatttatcaagggcgcaacaatacacctgcacaacggtttgcatctcctgagattgatcactccattcatactccgagatttgatcgagacttcgcccttctctcagatgacatacgacagtgttgccccgaagccatacgaagaatcgttagagacaattgggagaaatgcgtcatgggcagtgaatttcactctgcctttcttctgaatgcggtcatacaccacgcttctggtaatatcacgcggcgtgcggtgagagattttgggcgcaacctggtaaaagatgctcgaagtgaaattgccaatcatttatcaaccgaagacatagacgagattggaaacacgctgctatcaaaatgcagcgaccagctactggataaggccatggagttgcgtctcaaaaccattgatgcccggtcgttgattaacgctcttgcccgggccgaacgacttggttacgaggcaaatgacatccttgatgatcagccaagggaaagagttattccaggttcttcgactatacctcagcatatagctcctcaaacggcacctccaaatcttgcaaccccaagtcagtcacagtacttcccacgacctgctccgagctctgcgcctattccagagctgcagtgtagactatgctggcgtaagttcgaccacccgaaaggctatgaatatcacgtgcaaaagtcactttgcagcaaacctccaccaacatctgcaggatacccctttgtgtgtaaattttgtggtgccggatttataacgaaagtcgggcagacttaccacaccgccaatgcagtatgtggtgtccatgagacggctcctgcaacaccaagagctgatgctgtgcatccgcttccttcacagcccactgcgcttcctcaccacccccatcagccaagtacccctcttcaatacaatagttcctatcagccaccatcatcaactatcgatactgatgatccttattcccatctgaatgctaagagaaaggccgaattgaatgaagaattgctgcaagctgagaagaactatgctcctcgtttcaaagaagccgaggcgattcctgatcttgcggaacgaaagctcaagattgccgggcttcaaaactcattcagcacgaagcaaagcattatcaggaaaaagtacggtgtgcgccttcgtaatcgccgcacaagagcagagatcggggaggaacgttcaaggatggggttgaaggaagctcattcaccaccctcgtccgcttacgagacaccggtagccaaacgacaaaggacagacctcaactatccgagcccacagtcgcatccgagcagctctgcgccgatacatccaccgctgactccgagcaaccacatgtctgtatcgcagatgggttctggccttgctagcacaaatgcaactgctgccatgaatgatcccaccttgccgccaccgccgccgccgcctcctgtttctacccttccgcaaactattcccagttccgtcccgtcacctcagctgccgacacagaacagtctctcgtcgcttcagcgaaaaggctaccgcgtctcatcacacgtcggtcaacaaagtggaccaaactctccgaattccatcccggcaggaacacccaatcctgatgtgcagcgaagtggctcagtaacggcaccggtcgtactcgacgactcatcagacgacgaagcgggatccgacgaagagatcccggcaacgcttccgccacggaagcctacttga

SEQ ID NO: 31544 - protein, 691 aa, Muscodor strobelii
  misc_feature: SGI Peptide ID NO. 570861
  misc_feature (125)..(517): NCBI GI: 145605812 Blast Desc: MGG_06848 [Magnaporthe grisea 70-15] gi|145013594|gb|EDJ98235.1| MGG_06848 [Magnaporthe grisea 70-15]
  misc_feature (125)..(592): NCBI GI: 85085398 Blast Desc: NCU04423 [Neurospora crassa OR74A] gi|28918592|gb|EAA28264.1| [Neurospora crassa OR74A] gi|40882197|emb|CAF06023.1| [Neurospora crassa]
  misc_feature (157)..(588): NCBI GI: 256734471 Blast Desc: NECHADRAFT_98785 [Nectria haematococca mpVI 77-13-4]
  misc_feature (181)..(537): NCBI GI: 171690934 Blast Desc: protein product [Podospora anserina] gi|170945415|emb|CAP71527.1| protein product [Podospora anserina]
  misc_feature (157)..(640): NCBI GI: 46108206 Blast Desc: FG00985.1 [Gibberella zeae PH-1]
  misc_feature (427)..(598): NCBI GI: 116195766 Blast Desc: CHGG_04481 [Chaetomium globosum CBS 148.51] gi|88180394|gb|EAQ87862.1| CHGG_04481 [Chaetomium globosum CBS 148.51]
  misc_feature (97)..(382): NCBI GI: 261357688 Blast Desc: conserved [Verticillium albo-atrum VaMs.102]
  misc_feature (138)..(517): NCBI GI: 154314939 Blast Desc: BC1G_04811 [Botryotinia fuckeliana B05.10] gi|150848349|gb|EDN23542.1| BC1G_04811 [Botryotinia fuckeliana B05.10]
  misc_feature (138)..(517): NCBI GI: 156052733 Blast Desc: SS1G_06533 [Sclerotinia sclerotiorum 1980] gi|154704312|gb|EDO04051.1| SS1G_06533 [Sclerotinia sclerotiorum 1980]
  misc_feature (118)..(186): NCBI GI: 171690936 Blast Desc: protein product [Podospora anserina] gi|170945416|emb|CAP71528.1| protein product [Podospora anserina]
  misc_feature: Useful for introducing or modulating the production of volatile compounds
MMEIDSTTGAKPASPADEMAEATDQDDSPVASSAANGIHLNGNGVDKSTTPETVISRPHSSHAAKEQDRPASAVPSMDLAALAAKSMALPAPSASSPTPRLSFQSPQQPSKQIYQGRNNTPAQRFASPEIDHSIHTPRFDRDFALLSDDIRQCCPEAIRRIVRDNWEKCVMGSEFHSAFLLNAVIHHASGNITRRAVRDFGRNLVKDARSEIANHLSTEDIDEIGNTLLSKCSDQLLDKAMELRLKTIDARSLINALARAERLGYEANDILDDQPRERVIPGSSTIPQHIAPQTAPPNLATPSQSQYFPRPAPSSAPIPELQCRLCWRKFDHPKGYEYHVQKSLCSKPPPTSAGYPFVCKFCGAGFITKVGQTYHTANAVCGVHETAPATPRADAVHPLPSQPTALPHHPHQPSTPLQYNSSYQPPSSTIDTDDPYSHLNAKRKAELNEELLQAEKNYAPRFKEAEAIPDLAERKLKIAGLQNSFSTKQSIIRKKYGVRLRNRRTRAEIGEERSRMGLKEAHSPPSSAYETPVAKRQRTDLNYPSPQSHPSSSAPIHPPLTPSNHMSVSQMGSGLASTNATAAMNDPTLPPPPPPPPVSTLPQTIPSSVPSPQLPTQNSLSSLQRKGYRVSSHVGQQSGPNSPNSIPAGTPNPDVQRSGSVTAPVVLDDSSDDEAGSDEEIPATLPPRKPT

SEQ ID NO: 31545 - DNA, 2969 bp, Muscodor strobelii
  misc_feature: SGI EST ID NO. CUFF.74690.0
  misc_feature: Variant of the nucleotide sequence at SEQ ID NO 31543
tacagttttactttaacagcaactgcatccctctctccatttgtgaccctgccctgtcgtccgcggcaactcctgctggctacagaaagatcttacgaatagtaatgagataggcgcattgcattgcgagtaattgcgcattcattcccaacttggctttgattaagttatcctacccaacacatggttgatgcgatcgtctttctagtccatgttttacctcgatacggaaaaattgccaccaacagactcgcagcacctatattctgatacgggggaaagcacttggtcattgtatggaatgagatagtgcctcacctaatctcgagatttgacttcgatcttttcctttcacctcaattggtcggtctgtagacaacaaaaggctgcagtcttcgtcattcggcgatctcgagcttcaatcgcacgccatccgcgcgtcagcatttaaatgcgacacgtacatctccatcaaccatgatggagatcgacagtacgactggagcaaaaccagccagcccagccgatgaaatggctgaagctacggatcaagatgattcacccgtggcttcttcggctgcaaatggtatacacttgaacgggaatggtgtggataagtcgacgactccagaaacagtgatatcacgaccgcattcgtcacacgcagctaaagagcaggatcgcccagcatccgctgtaccttctatggaccttgctgcgcttgctgcaaaatcgatggcattacccgctccttctgcttctagtcctactcctcggctttcattccagagcccccaacagccgtcaaagcaaatttatcaagggcgcaacaatacacctgcacaacggtttgcatctcctgagattgatcactccattcatactccgagatttgatcgagacttcgcccttctctcagatgacatacgacagtgttgccccgaagccatacgaagaatcgttagagacaattgggagaaatgcgtcatgggcagtgaatttcactctgcctttcttctgaatgcggtcatacaccacgcttctggtaatatcacgcggcgtgcggtgagagattttgggcgcaacctggtaaaagatgctcgaagtgaaattgccaatcatttatcaaccgaagacatagacgagattggaaacacgctgctatcaaaatgcagcgaccagctactggataaggccatggagttgcgtctcaaaaccattgatgcccggtcgttgattaacgctcttgcccgggccgaacgacttggttacgaggcaaatgacatccttgatgatcagccaagggaaagagttattccaggttcttcgactatacctcagcatatagctcctcaaacggcacctccaaatcttgcaaccccaagtcagtcacagtacttcccacgacctgctccgagctctgcgcctattccagagctgcagtgtagactatgctggcgtaagttcgaccacccgaaaggctatgaatatcacgtgcaaaagtcactttgcagcaaacctccaccaacatctgcaggatacccctttgtgtgtaaattttgtggtgccggatttataacgaaagtcgggcagacttaccacaccgccaatgcagtatgtggtgtccatgagacggctcctgcaacaccaagagctgatgctgtgcatccgcttccttcacagcccactgcgcttcctcaccacccccatcagccaagtacccctcttcaatacaatagttcctatcagccaccatcatcaactatcgatactgatgatccttattcccatctgaatgctaagagaaaggccgaattgaatgaagaattgctgcaagctgagaagaactatgctcctcgtttcaaagaagccgaggcgattcctgatcttgcggaacgaaagctcaagattgccgggcttcaaaactcattcagcacgaagcaaagcattatcaggaaaaagtacggtgtgcgccttcgtaatcgccgcacaagagcagagatcggggaggaacgttcaaggatggggttgaaggaagctcattcaccaccctcgtccgcttacgagacaccggtagccaaacgacaaaggacagacctcaactatccgagcccacagtcgcatccgagcagctctgcgccgatacatccaccgctgactccgagcaaccacatgtctgtatcgcagatgggttctggccttgctagcacaaatgcaactgctgccatgaatgatcccaccttgccgccaccgccgccgccgcctcctgtttctacccttccgcaaactattcccagttccgtcccgtcacctcagctgccgacacagaacagtctctcgtcgcttcagcgaaaaggctaccgcgtctcatcacacgtcggtcaacaaagtggaccaaactctccgaattccatcccggcaggaacacccaatcctgatgtgcagcgaagtggctcagtaacggcaccggtcgtactcgacgactcatcagacgacgaagcgggatccgacgaagagatcccggcaacgcttccgccacggaagcctacttgaattttcctgcccgaggaatattcgagtcgcgaaagcaaaagcggttctgcgatatcattgccttctgcgtaattacatgcatttgcttgaggcatttacttgcgctgcgttttcgaggtggtctttctggcttggccttactaagtagccacttccatgtattaaaattcgttgttttcaggggcattacgttctcattttgcgatgcgctttgctgtacatttacgtgcgaaaagggggcatttaagcacgggcgtaatgagaatcaggaaagtgcccttcagtggatgagatatcctacattcacagcttggctgctgataggcagatgctacgcaggctgcgcatactaaggcatgcatgatagtcattaattagctgtgccttttttttttttgagaaaagtaatgcatcag

SEQ ID NO: 31546 - DNA, 2151 bp, Muscodor strobelii
  misc_feature: SGI cDNA ID NO. 570862
  misc_feature: Reduced expression when VOC is produced
  misc_feature: Encodes the peptide sequence at SEQ ID NO 31547
atgtgggatcggctccgacagaaagacgggggaggcccgataaacaggaagaaactggaagcctggcagaaggcgcattcctcatcatcgacagtgtccggccggggcgtccagggcggcaatcactcctaccaatactcggtgagaggcggagcgagcagaggtccagcaccaaaacggccgccgagagaatacggaaaccaagacgaagcgccagaccacggctatctgacagcacagtcggcgcaagcacccgcgcccggccggtatcctcagcgcgactcgtcctacggtcgtccaacgtcgtcggtgtattcgcagccctcaccggaggctgccgtcttcgcggcccgtcaattgaggactgacctcgcgcccaacgaccccttggagatctcgcccccgagctctccagatgtggcctcgccaaagcatgcacctaatcctggcgacgtctccccgatcgacgaaaatccaggagccatgtctcaaccaccacagcagcaccaagacggcgcctcgaggacccagcctcgaagcaatataccgatgatgcgccgtgagcgccgaaagaactccaatgccgccctacaagagtccaggtcacgcgaacagctcaagcagccccggccgtatggccacgatgttcgctgggatccccgcaccggagagccgacgacagacgagaagaagggccgcccctctcaagtcaatccacaggaatatgtccaagggctgaagcatcgaactaccgagtccacctcgccgccgagagctgctcagccgaatccgcaatcctttcgcgatcgtctgcgtcccgtccgacaagccagcgccagcccacagcccgagccttctccggcgccacgacctgagtggcgaggggcgagcggccgacagaacttcgttgcgccagtcaaggacaacaaacatgtcccgcctctcaagatacccccaagaaatgcacagagagctagccgaacggccttgtcgccaatcgagtctaatggatccgaagccacttcgtcgccaatgaccatcaccaggagtccgccccctggaagtgctggtgtcagtgtagagaacatcgaccacacgatgagtcctcaggcagcgactcctgtgcaacagccatatgtgcccaacatggcgcccaacgtacagccacactatacccaggggggttatccgagccccccctcgtcaggaaatgttcctgccatgaatccagccgccggtgcatacgaccaccgtgatctagcaatgagacagccacccccattattggttccctccaactcaaaggcgatacgtaggaaacctgcaagaacgtcggaaggaacgccgacgacgcctctggattccgcccagcacacccctcaaagcgctcgagcccccgttccggctcccgctgatgatcagtgggtgcagccaccatcccgcttcagcgtcacgacctacgctacttcacatcatacttccaccccccgcgagagcgtcgacgaaagcgcaccgcctatgccaatgcccccgcagcccaacacacccacacccgctcccaaacccgggccggtaccgtccgtcctcacccgcggaaggcccacgatcccgggctatgaggactccccccgcgcatcgccgacagagccagtcaggatcgtgctcgactctcactattacgccgcatcccctacaaccaaatcacccgcaaccaaagcccgtcccgccgacagcaacaaccgttcccaaaccctgctcatccccaagatgaaccaatcccgactcagcatcgcatccatctcctccgtcgataaatccctaccccccgcgccccccgaggcctcagcaacagaccgcgtgacagagctcaacgccatgctgcagtctctcgcaaaccgccgcataaacatcagcaaggccatccgccagatgaccgagatgatgccgacggacaacatcctcgcctccgaagccgtccgccagaaacgcgaggacgagaagcgcaaagttgaggcgctacgcctagaacaagctgaagtcgagcggcaatcttacgagctcgggctgaagctacatcgcgcctacaagcgacttgatcgtgatgcggagtacgaacctactaccctctgggtccgtagagtcactgggtag

SEQ ID NO: 31547 - protein, 716 aa, Muscodor strobelii
  misc_feature: SGI Peptide ID NO. 570862
  misc_feature (149)..(715): NCBI GI: 171690932 Blast Desc: protein product [Podospora anserina] gi|170945414|emb|CAP71526.1| protein product [Podospora anserina]
  misc_feature (1)..(716): NCBI GI: 145605810 Blast Desc: MGG_06850 [Magnaporthe grisea 70-15] gi|145013592|gb|EDJ98233.1| MGG_06850 [Magnaporthe grisea 70-15]
  misc_feature (1)..(716): NCBI GI: 116195768 Blast Desc: CHGG_04482 [Chaetomium globosum CBS 148.51] gi|88180395|gb|EAQ87863.1| CHGG_04482 [Chaetomium globosum CBS 148.51]
  misc_feature (86)..(716): NCBI GI: 154314682 Blast Desc: BC1G_04050 [Botryotinia fuckeliana B05.10] gi|150848672|gb|EDN23865.1| BC1G_04050 [Botryotinia fuckeliana B05.10]
  misc_feature (99)..(716): NCBI GI: 85085407 Blast Desc: NCU04425 [Neurospora crassa OR74A] gi|28918594|gb|EAA28266.1| NCU04425 [Neurospora crassa OR74A] gi|40882195|emb|CAF06021.1| [Neurospora crassa]
  misc_feature (83)..(716): NCBI GI: 156053291 Blast Desc: SS1G_06813 [Sclerotinia sclerotiorum 1980] gi|154704591|gb|EDO04330.1| SS1G_06813 [Sclerotinia sclerotiorum 1980]
  misc_feature (130)..(715): NCBI GI: 256735182 Blast Desc: NECHADRAFT_74765 [Nectria haematococca mpVI 77-13-4]
  misc_feature (32)..(715): NCBI GI: 46108218 Blast Desc: FG00991.1 [Gibberella zeae PH-1]
  misc_feature (179)..(690): NCBI GI: 261357693 Blast Desc: conserved [Verticillium albo-atrum VaMs.102]
  misc_feature (605)..(715): NCBI GI: 240108315 Blast Desc: CPC735_006610 [Coccidioides posadasii C735 delta SOWgp]
  misc_feature: Useful for introducing or modulating the production of volatile compounds
MWDRLRQKDGGGPINRKKLEAWQKAHSSSSTVSGRGVQGGNHSYQYSVRGGASRGPAPKRPPREYGNQDEAPDHGYLTAQSAQAPAPGRYPQRDSSYGRPTSSVYSQPSPEAAVFAARQLRTDLAPNDPLEISPPSSPDVASPKHAPNPGDVSPIDENPGAMSQPPQQHQDGASRTQPRSNIPMMRRERRKNSNAALQESRSREQLKQPRPYGHDVRWDPRTGEPTTDEKKGRPSQVNPQEYVQGLKHRTTESTSPPRAAQPNPQSFRDRLRPVRQASASPQPEPSPAPRPEWRGASGRQNFVAPVKDNKHVPPLKIPPRNAQRASRTALSPIESNGSEATSSPMTITRSPPPGSAGVSVENIDHTMSPQAATPVQQPYVPNMAPNVQPHYTQGGYPSPPSSGNVPAMNPAAGAYDHRDLAMRQPPPLLVPSNSKAIRRKPARTSEGTPTTPLDSAQHTPQSARAPVPAPADDQWVQPPSRFSVTTYATSHHTSTPRESVDESAPPMPMPPQPNTPTPAPKPGPVPSVLTRGRPTIPGYEDSPRASPTEPVRIVLDSHYYAASPTTKSPATKARPADSNNRSQTLLIPKMNQSRLSIASISSVDKSLPPAPPEASATDRVTELNAMLQSLANRRINISKAIRQMTEMMPTDNILASEAVRQKREDEKRKVEALRLEQAEVERQSYELGLKLHRAYKRLDRDAEYEPTTLWVRRVTG

SEQ ID NO: 31548 - DNA, 3954 bp, Muscodor strobelii
  misc_feature: SGI EST ID NO. CUFF.74789.2
  misc_feature: Variant of the nucleotide sequence at SEQ ID NO 31546
accataccagagcacctgtcagaagctcccatcacagatgatttgcgactcactcgctgcggaactataggcatccatcgcgtcttctagtacgtagaatgtaatattctgcttagcagttccctcatcgaaatacattcattgaagatcccgcttcgacctcagactattactggtttctatctacttgttttcagccaagccccatcgtgtcagaagcgcatctatattgctcctgggttaacgctgctgcatgatggaagatctgtcggcgacacactgactgatacttgtcgagtgacacgatttcctatgctcggatactgggatctgcctgacaacgtgaaacagctatgcgcttgaaatctacagtacaggactcttctgccggttgttcggagaggtaatgtgctccttccaatttacagtagctcataccaagtagtttgatgctccatccaacctgtatccgcttgtacgtcaggtaccaactagaaccggttcatgggctttccatttggtgggggcgcggcatgtaaatgaaagggggcaacgtgccaaattcaagtgcttgtacagttagatgtacaatagcttctctgacggattgctcggtagaataagtatgggacgatgcctagaattgatgaatagctgtcatattcccttggtttctttctttgcgacgggctgcggtgtgaatctgcttgcgactgaatcccttgccacgctctacacattgaacgcaccccggccaaagcggatgcgaccaaacgacttacacaatccagtcaatctacaaaagagacctgaaccgcgaccgccagtagagaaggcgatttgggctgttcaagggctctccagttctttgttggcgcgcattggtagccaatcactgcggacagaacagctccaaatttcttgttgattgttgattctcgcgcgaaggccatccaatgatccagctagcacagaggcgagcagataataaagagatggtgacctccaattgctcaagggccacgaaggatcaatacaaaaagcgaaggtaacacggcgcagcttgccaccgcaacgatcatataggaattgcgaacagcgcgcattcgatttcacttctttcgcaactcgatacacggaagcccaggttattgcgcacccccagagctaggacattaaacgcacaagtcagtatctcgaggtcaacgcctactatttcacgtaccaacgactatgctgtacgaagctggtcgacgccccaaaaccgccaggtactcacgaatctatacagcacataatttgccaatacgaaacccacgtttattattggtgataattcctaaggacaattgaagcaagtgctgtgcacgatctatcacattcgagggagagctagcgccgtgaagaagggaggacacaaccgataactgttgattagctagtgggctgcttcatcaccatcatgtgggatcggctccgacagaaagacgggggaggcccgataaacaggaagaaactggaagcctggcagaaggcgcattcctcatcatcgacagtgtccggccggggcgtccagggcggcaatcactcctaccaatactcggtgagaggcggagcgagcagaggtccagcaccaaaacggccgccgagagaatacggaaaccaagacgaagcgccagaccacggctatctgacagcacagtcggcgcaagcacccgcgcccggccggtatcctcagcgcgactcgtcctacggtcgtccaacgtcgtcggtgtattcgcagccctcaccggaggctgccgtcttcgcggcccgtcaattgaggactgacctcgcgcccaacgaccccttggagatctcgcccccgagctctccagatgtggcctcgccaaagcatgcacctaatcctggcgacgtctccccgatcgacgaaaatccaggagccatgtctcaaccaccacagcagcaccaagacggcgcctcgaggacccagcctcgaagcaatataccgatgatgcgccgtgagcgccgaaagaactccaatgccgccctacaagagtccaggtcacgcgaacagctcaagcagccccggccgtatggccacgatgttcgctgggatccccgcaccggagagccgacgacagacgagaagaagggccgcccctctcaagtcaatccacaggaatatgtccaagggctgaagcatcgaactaccgagtccacctcgccgccgagagctgctcagccgaatccgcaatcctttcgcgatcgtctgcgtcccgtccgacaagccagcgccagcccacagcccgagccttctccggcgccacgacctgagtggcgaggggcgagcggccgacagaacttcgttgcgccagtcaaggacaacaaacatgtcccgcctctcaagatacccccaagaaatgcacagagagctagccgaacggccttgtcgccaatcgagtctaatggatccgaagccacttcgtcgccaatgaccatcaccaggagtccgccccctggaagtgctggtgtcagtgtagagaacatcgaccacacgatgagtcctcaggcagcgactcctgtgcaacagccatatgtgcccaacatggcgcccaacgtacagccacactatacccaggggggttatccgagccccccctcgtcaggaaatgttcctgccatgaatccagccgccggtgcatacgaccaccgtgatctagcaatgagacagccacccccattattggttccctccaactcaaaggcgatacgtaggaaacctgcaagaacgtcggaaggaacgccgacgacgcctctggattccgcccagcacacccctcaaagcgctcgagcccccgttccggctcccgctgatgatcagtgggtgcagccaccatcccgcttcagcgtcacgacctacgctacttcacatcatacttccaccccccgcgagagcgtcgacgaaagcgcaccgcctatgccaatgcccccgcagcccaacacacccacacccgctcccaaacccgggccggtaccgtccgtcctcacccgcggaaggcccacgatcccgggctatgaggactccccccgcgcatcgccgacagagccagtcaggatcgtgctcgactctcactattacgccgcatcccctacaaccaaatcacccgcaaccaaagcccgtcccgccgacagcaacaaccgttcccaaaccctgctcatccccaagatgaaccaatcccgactcagcatcgcatccatctcctccgtcgataaatccctaccccccgcgccccccgaggcctcagcaacagaccgcgtgacagagctcaacgccatgctgcagtctctcgcaaaccgccgcataaacatcagcaaggccatccgccagatgaccgagatgatgccgacggacaacatcctcgcctccgaagccgtccgccagaaacgcgaggacgagaagcgcaaagttgaggcgctacgcctagaacaagctgaagtcgagcggcaatcttacgagctcgggctgaagctacatcgcgcctacaagcgacttgatcgtgatgcggagtacgaacctactaccctctgggtccgtagagtcactgggtaggctggatctgaagaatgatgcttgcgggggttatattcacagcttctcgccgctttggttggctcaccaacgtacctagatcaagcatttgccacctttttccttttccttttctatcattgcagcattgcggacgagctggcgtttccccgtgttgaaaaggttagaatgttgcatcataccttcagaggtattctatgcaaaacccgagagtcctcgatcgaggcatgtattgttagtagtagtagtattagtattgtagtagtctgttcttactaaatgatacctccacgcggatttctttgcggagcttattatacttctctatcacgtatttgatc

SEQ ID NO: 31549 - DNA, 1311 bp, Muscodor strobelii
  misc_feature: SGI cDNA ID NO. 570863
  misc_feature: Reduced expression when VOC is produced
  misc_feature: Encodes the peptide sequence at SEQ ID NO 31550
atggcggccccccaccagccccagctcgtcttcgtcgacggcaccttcgaggagctggcccaggagatggccgagttcctcagtgttggcgacgacgtcaaggccctgatcgagaagaagcagaaggacgaggtgctcaagaagctcatcatcgcctctcccgccctgcactccatccccgagaaggacatcgccggcgcctacaacctgctcgtctacctcaccctccagtccgacaatgccgacaagttcctcccacgcatatgcgacaatctcaggaagcccatcacgtcttcgcccgtcaacggtcccggcctggccctcaacgtcctcactaccatcttcaacatgctgaagcccaacgacgacctccgtttcaacgtcttcaagaccatcctaagctttctcaaggcccacaacatgttcgagaccctcaagccatacctcaagcccctcgacgactggatggacgactgggaggtcgactcggaggatcagcgcgaggtctacgagatcattgccgatgtcgcccgcgacgctggagacgcatatgtcgcataccagtacacgctcaaggcgcttcgcacattcgaggaggacgaagtcaagtcagaggacgctcagcagatcgccctccgcgccctcaagaccgcccttatcacacccgcacaattcgatttccaagacctcctaaacgtatcctgcatacagaacctttccgagtcgcatcctgtctacttcgagctgttgaccatcttcgccgagaaggacttggaggactatacccagtttttggaagagcacgaggattttgtcgaaaaggaacacatggactccgagaagctgcagaccaagatgcgattgttgaccttcgcttctctggctgcccggacgcaaagccgtgagatcccctacgccgatatcgccaaggcacttcagatctccgacgccgaggtagaattatggacgatcgacgtcatccgtgctcagctggtcgagggcagaatgtcgcaacagaagaaggtcttccttgtccataggacgacatatagagtatttggggagaagcagtggcgccagctaggagatctggtcgacacgtggagggatactcttaccaaggtggcttctacgctccgaaaggaacaggccaaccttgaggctcagaggaaacgcgatttggaggaggccgagcggaaactggccaacataggcctgtctggaataggagagagacggcgaggtggtggtgaccgcggcgatagaagtgaacgagggccccgcaaggagcgaactgacgacgatgactga

SEQ ID NO: 31550 - protein, 436 aa, Muscodor strobelii
  misc_feature: SGI Peptide ID NO. 570863
  misc_feature (244)..(347): Pfam Id: PF01399 Pfam Desc: PCI domain
  misc_feature (8)..(414): NCBI GI: 156036404 Blast Desc: SS1G_12891 [Sclerotinia sclerotiorum 1980] gi|154698296|gb|EDN98034.1| SS1G_12891 [Sclerotinia sclerotiorum 1980]
  misc_feature (7)..(436): NCBI GI: 85113117 Blast Desc: NCU02813 [Neurospora crassa OR74A] gi|74618209|sp|Q7SEK1.1|EIF3M_NEUCR RecName: Full=Eukaryotic translation initiation factor 3 subunit M; Short=eIF3m conserved
  misc_feature (6)..(414): NCBI GI: 46125489 Blast Desc: FG07122.1 [Gibberella zeae PH-1]
  misc_feature (1)..(436): NCBI GI: 116181664 Blast Desc: CHGG_01460 [Chaetomium globosum CBS 148.51] gi|88185757|gb|EAQ93225.1| CHGG_01460 [Chaetomium globosum CBS 148.51]
  misc_feature (1)..(436): NCBI GI: 224495939 Blast Desc: CHGG_01460 [Chaetomium globosum CBS 148.51] gi|88185757|gb|EAQ93225.1| CHGG_01460 [Chaetomium globosum CBS 148.51]
  misc_feature (1)..(436): NCBI GI: 256732636 Blast Desc: [Nectria haematococca mpVI 77-13-4]
  misc_feature (7)..(436): NCBI GI: 171696170 Blast Desc: protein product [Podospora anserina] gi|170948327|emb|CAP60491.1| protein product [Podospora anserina]
  misc_feature (1)..(436): NCBI GI: 39951905 Blast Desc: MGG_01595 [Magnaporthe grisea 70-15] gi|224495067|sp|A4RK68.1|EIF3M_MAGGR RecName: Full=Eukaryotic translation initiation factor 3 subunit M; Short=eIF3m MGG_01595
  misc_feature (8)..(402): NCBI GI: 154308544 Blast Desc: BC1G_08332 [Botryotinia fuckeliana B05.10] gi|150852873|gb|EDN28065.1| BC1G_08332 [Botryotinia fuckeliana B05.10]
  misc_feature (4)..(400): NCBI GI: 189205445 Blast Desc: eukaryotic translation initiation factor 3 subunit M [Pyrenophora tritici-repentis Pt-1C-BFP] gi|187975150|gb|EDU41776.1| eukaryotic translation initiation 3 M
  misc_feature: Useful for introducing or modulating the production of volatile compounds
MAAPHQPQLVFVDGTFEELAQEMAEFLSVGDDVKALIEKKQKDEVLKKLIIASPALHSIPEKDIAGAYNLLVYLTLQSDNADKFLPRICDNLRKPITSSPVNGPGLALNVLTTIFNMLKPNDDLRFNVFKTILSFLKAHNMFETLKPYLKPLDDWMDDWEVDSEDQREVYEIIADVARDAGDAYVAYQYTLKALRTFEEDEVKSEDAQQIALRALKTALITPAQFDFQDLLNVSCIQNLSESHPVYFELLTIFAEKDLEDYTQFLEEHEDFVEKEHMDSEKLQTKMRLLTFASLAARTQSREIPYADIAKALQISDAEVELWTIDVIRAQLVEGRMSQQKKVFLVHRTTYRVFGEKQWRQLGDLVDTWRDTLTKVASTLRKEQANLEAQRKRDLEEAERKLANIGLSGIGERRRGGGDRGDRSERGPRKERTDDDD

SEQ ID NO: 31551 - DNA, 3197 bp, Muscodor strobelii
  misc_feature: SGI EST ID NO. CUFF.74881.0
  misc_feature: Variant of the nucleotide sequence at SEQ ID NO 31549
cgaaaagagggcgggcacgtcgacagagcgcccgcctagagattctcaaaatctgccccaaaattgcccctcctggtccgtgcgtcgagaggcctgtagtcacaaatttcgcaggcttcatcaaattccagcttggttggacggatctggaaaccgactgctttcgccgacgctccgccctgctcgatctcacttgcgccttcccaagcagcggctgcaatcgtgaccattccatctcgacccgtcaccacccacggacccctcgatcgagcgtaacgatccgtgtcgacggcccacgcaacatggcggccccccaccagccccagctcgtcttcgtcgacggcaccttcgaggagctggcccaggagatggccgagttcctcagtgttggcgacgacgtcaaggccctgatcgagaagaagcagaaggacgaggtgctcaagaagctcatcatcgcctctcccgccctgcactccatccccgagaaggacatcgccggcgcctacaacctgctcgtctacctcaccctccagtccgacaatgccgacaagttcctcccacgcatatgcgacaatctcaggaagcccatcacgtcttcgcccgtcaacggtcccggcctggccctcaacgtcctcactaccatcttcaacatgctgaagcccaacgacgacctccgtttcaacgtcttcaagaccatcctaagctttctcaaggcccacaacatgttcgagaccctcaagccatacctcaagcccctcgacgactggatggacgactgggaggtcgactcggaggatcagcgcgaggtctacgagatcattgccgatgtcgcccgcgacgctggagacgcatatgtcgcataccagtacacgctcaaggcgcttcgcacattcgaggaggacgaagtcaagtcagaggacgctcagcagatcgccctccgcgccctcaagaccgcccttatcacacccgcacaattcgatttccaagacctcctaaacgtatcctgcatacagaacctttccgagtcgcatcctgtctacttcgagctgttgaccatcttcgccgagaaggacttggaggactatacccagtttttggaagagcacgaggattttgtcgaaaaggaacacatggactccgagaagctgcagaccaagatgcgattgttgaccttcgcttctctggctgcccggacgcaaagccgtgagatcccctacgccgatatcgccaaggcacttcagatctccgacgccgaggtagaattatggacgatcgacgtcatccgtgctcagctggtcgagggcagaatgtcgcaacagaagaaggtcttccttgtccataggacgacatatagagtatttggggagaagcagtggcgccagctaggagatctggtcgacacgtggagggatactcttaccaaggtggcttctacgctccgaaaggaacaggccaaccttgaggctcagaggaaacgcgatttggaggaggccgagcggaaactggccaacataggcctgtctggaataggagagagacggcgaggtggtggtgaccgcggcgatagaagtgaacgagggccccgcaaggagcgaactgacgacgatgactgattgaaatatgtctgatctatcagccttgttttcggattccgattatcagcttttcagtcgtctgcatagggaaggtcactcggcgtacggcatggcgaaccgaaaaaaggctttgttgtaatgaattatcatgagttttgcaccagggcaaacacggctttcgggggataccggaaagatagatatccccattatgttggacggcagggccaggcgagtctcgtttgagcaagtgtagagtgtagagccgccagcgccgccccatctcatcagccgtttcctgaatccataggtagcatagactacggatatggtcccacgaggacaagaaatagcagtaccgttacgaacaatgacgatgacatgggatcttgtgataatgtctattcgatctaggtgctaggcaatagataatctgtcgaaagaagagaacttgcgttatttctaatagtagtatttatgtatgcctctgaacactctgcctctgcattctgcttcctctcctctatgacaagctcccgctttctcaaacaatgccaacaacgccgccagctcccgctcagtatctaaaatccagaggtaatctagaacttatcaccgagcctcttcgtaatctccgcctgcgtagcctcgaacacctcatcgggaccaacattagcgatgatcctcgcgaccttatcttgtttctcgtagtactcaacgaccggcatgctcgtctcgacgaaagtgcggaaccgcttcctgatgctctcagcattatcgtcggatctaccgctcgtcttcccgcgctcgagcagtcgtcgctccatctcttcttccggacagtcgtagaagaggacgaacttggcctcgcagacggcctcttcgaatttcgtggcttggtcgaatttccgcgggaagccgtcgatgaggaatttaccggtgtgggaggacccccatggaggagcgcatggcgttttcgaggagggcgatggttacttccatgggcactatgtcgccgttttttatgtagtctttgattagggacccgtattgggaaccgggacggtcttgctcggcgcggagcagatcgccggctgagaggtgcgtgaaggagtgcgctgagactaggcgtgcgcattgcgtgcctttgccggctcctgggccgccgagcacgaagaggacggttacgtcttgcgaggagaagacgggggaggtgcgcgacttgaggtcgtcgattgctggcattttggcggtttggggtctttggggtctaggtggatgggtatatgtttgtaggaatcaggtgtgttctgtgcgggttctgaaatctaccttgatcgattcgttgcgggcaaaagagctcttcgaagcggtgacgatttcacgacaaggaggggtgttctgggtttttggtatgctcgaagttgagtaggatgagagcagggacaaacagtgacgagcaagtcaatcagactgtttacaggttcaatctatagctggatattgaatttgctcaaggatttgaatagtatgtcaataagaagagttggtcaaatgagctttgttaatttcgcatgcgtctcgacttgtcccgcattcaac

SEQ ID NO: 31552 - DNA, 570 bp, Muscodor strobelii
  misc_feature: SGI cDNA ID NO. 570864
  misc_feature: Encodes the peptide sequence at SEQ ID NO 31553
atgccagcaatcgacgacctcaagtcgcgcacctcccccgtcttctcctcgcaagacgtaaccgtcctcttcgtgctcggcggcccaggagccggcaaaggcacgcaatgcgcacgcctagtctcagcgcactccttcacgcacctctcagccggcgatctgctccgcgccgagcaagaccgtcccggttcccaatacgggtccctaatcaaagactacataaaaaacggcgacatagtgcccatggaagtaaccatcgccctcctcgaaaacgccatgcgctcctccatgggggccgtctgcgaggccaagttcgtcctcttctacgactgtccggaagaagagatggagcgacgactgctcgagcgcgggaagacgagcggtagatccgacgataatgctgagagcatcaggaagcggttccgcactttcgtcgagacgagcatgccggtcgttgagtactacgagaaacaagataaggtcgcgaggatcatcgctaatgttggtcccgatgaggtgttcgaggctacgcaggcggagattacgaagaggctcggtgataagttctag

SEQ ID NO: 31553 - protein, 189 aa, Muscodor strobelii
  misc_feature: SGI Peptide ID NO. 570864
  misc_feature (25)..(160): Pfam Id: PF00406 Pfam Desc: Adenylate kinase
  misc_feature (25)..(94): Pfam Id: PF00406 Pfam Desc: Adenylate kinase
  misc_feature (99)..(160): Pfam Id: PF00406 Pfam Desc: Adenylate kinase
  misc_feature (10)..(189): NCBI GI: 116181662 Blast Desc: conserved [Chaetomium globosum CBS 148.51] gi|88185756|gb|EAQ93224.1| conserved [Chaetomium globosum CBS 148.51]
  misc_feature (9)..(189): NCBI GI: 256733087 Blast Desc: NECHADRAFT_60116 [Nectria haematococca mpVI 77-13-4]
  misc_feature (15)..(189): NCBI GI: 85113113 Blast Desc: uridylate kinase [Neurospora crassa OR74A] gi|28926251|gb|EAA35232.1| uridylate kinase [Neurospora crassa OR74A]
  misc_feature (9)..(189): NCBI GI: 145613494 Blast Desc: MGG_01594 [Magnaporthe grisea 70-15] gi|145020561|gb|EDK04690.1| MGG_01594 [Magnaporthe grisea 70-15]
  misc_feature (9)..(189): NCBI GI: 171696188 Blast Desc: protein product [Podospora anserina] gi|170948336|emb|CAP60500.1| protein product [Podospora anserina]
  misc_feature (10)..(189): NCBI GI: 46125493 Blast Desc: FG07124.1 [Gibberella zeae PH-1]
  misc_feature (2)..(189): NCBI GI: 156036402 Blast Desc: SS1G_12890 [Sclerotinia sclerotiorum 1980] gi|154698295|gb|EDN98033.1| SS1G_12890 [Sclerotinia sclerotiorum 1980]
  misc_feature (10)..(189): NCBI GI: 154308542 Blast Desc: BC1G_08331 [Botryotinia fuckeliana B05.10] gi|150852872|gb|EDN28064.1| BC1G_08331 [Botryotinia fuckeliana B05.10]
  misc_feature (10)..(184): NCBI GI: 189205443 Blast Desc: adenylate kinase isoenzyme 1 [Pyrenophora tritici-repentis Pt-1C-BFP] gi|187975149|gb|EDU41775.1| adenylate kinase isoenzyme 1 [Pyrenophora tritici-repentis Pt-1C-BFP]
  misc_feature (1)..(184): NCBI GI: 169601310 Blast Desc: SNOG_03519 [Phaeosphaeria nodorum SN15] gi|160705905|gb|EAT88724.2| SNOG_03519 [Phaeosphaeria nodorum SN15]
  misc_feature (21)..(175): SWISSPROT Homolog: EC 2.7.4.14 Cytidylate kinase
MPAIDDLKSRTSPVFSSQDVTVLFVLGGPGAGKGTQCARLVSAHSFTHLSAGDLLRAEQDRPGSQYGSLIKDYIKNGDIVPMEVTIALLENAMRSSMGAVCEAKFVLFYDCPEEEMERRLLERGKTSGRSDDNAESIRKRFRTFVETSMPVVEYYEKQDKVARIIANVGPDEVFEATQAEITKRLGDKF

SEQ ID NO: 31554 - DNA, 1500 bp, Muscodor strobelii
  misc_feature: SGI cDNA ID NO. 570865
  misc_feature: Encodes the peptide sequence at SEQ ID NO 31555
atggcgccacaggacgacaggaggaggccacaggcccttaacttgacgccgtcacgatcttcatcttcagatggatcttccacaagcacatcttcattaaaacctccaaggacaccgagattcgccgaggccacgacaatacatagtcccatcgaaccacagaatcagccctttggaggccgtgatgggaactcgcaggttgcacaagctcaacctgcagatgttgggtttggatatatcaacaacgacacgactgaacacgtggtcaacatgccgatgacaccaaaatctccactgaagagtgccatgagggtacctggaacgcccgcaagaaaattcgagaatcccctgagcccgacttttagagaagaggatattctcgagagcaaagagcgggacaccgaagctgcacagaaaaaggatgtgggcctcaaatacaaggtcaggctggccaagttcgcgcttcgtggtatcagcttcagctgtagcttgattattctggctcttctcggcacatcgttcacgatcttccgggcaactgcctcactcccagcgcaaagctctctgccagcttgggctcaaggcacccagacatggcctcagtacacagttctcgcagtcgctgctgttaacttattgctgtgtatcttcatctttatcggttacatgcgtggtggccaccaccgagcttccaaggtcaacgtttactacacgctgtttgccgttggttggttcattgcttcgtcaatcttgtgggcagcagccgccggcattttacagttcacacgtaacaatagcaacaacaaggacatgtggggttgggcttgtgttgagaatcaccgagccacgctctttggagacaaagtcgactatgctctagtttgtcggcttcaaaactggtctctcatttgcgctctcattgagatcgtactcgacgtcttcacaattacgctctacagcgtcgtcttctaccgatatgtcactaagcgcaagctcactaagtccatggatatgcgcgatcgtgctcgctcagatctctatctcgcccaactgcgttcgcagtcggcccccaacacaccaggtttcggccccaagtcaccttccttctcacagtacgcaatgtcaccaaggttcccaccgtcggcctataagtctttctcagacatcgccgaggagccttgcttcacaccgggtggtcggatgcctgagccggcctcttcattcgcagcccaagctcgtgctcctgctgctgccagccaacccgcagcgaagcctttcaagctgcaggcaccgcccagcaaagccccttcagctacccccaagctcgggcagggcgcattcaattcaccaacgacgtctagcccgcctccaaatgagttcagtgctgttgcacctggcgagcaacaatacgatgctgtgccaattcctggcgcatacgcagatcaagcaataaagagcccgccaccggcacagactagcttcggagggtactacaaatga

SEQ ID NO: 31555 - protein, 499 aa, Muscodor strobelii
  misc_feature: SGI Peptide ID NO. 570865
  misc_feature (1)..(494): NCBI GI: 39951901 Blast Desc: MGG_01593 [Magnaporthe grisea 70-15] gi|145020562|gb|EDK04691.1| MGG_01593 [Magnaporthe grisea 70-15]
  misc_feature (5)..(494): NCBI GI: 116181660 Blast Desc: CHGG_01458 [Chaetomium globosum CBS 148.51] gi|88185755|gb|EAQ93223.1| CHGG_01458 [Chaetomium globosum CBS 148.51]
  misc_feature (5)..(494): NCBI GI: 171696186 Blast Desc: protein product [Podospora anserina] gi|170948335|emb|CAP60499.1| protein product [Podospora anserina]
  misc_feature (1)..(498): NCBI GI: 46124929 Blast Desc: FG06842.1 [Gibberella zeae PH-1]
  misc_feature (1)..(494): NCBI GI: 85113108 Blast Desc: NCU02811 [Neurospora crassa OR74A] gi|28926250|gb|EAA35231.1| conserved [Neurospora crassa OR74A]
  misc_feature (15)..(481): NCBI GI: 156036368 Blast Desc: SS1G_12873 [Sclerotinia sclerotiorum 1980] gi|154698278|gb|EDN98016.1| SS1G_12873 [Sclerotinia sclerotiorum 1980]
  misc_feature (67)..(479): NCBI GI: 154308562 Blast Desc: BC1G_08341 [Botryotinia fuckeliana B05.10] gi|150852882|gb|EDN28074.1| BC1G_08341 [Botryotinia fuckeliana B05.10]
  misc_feature (93)..(495): NCBI GI: 256733103 Blast Desc: NECHADRAFT_60144 [Nectria haematococca mpVI 77-13-4]
  misc_feature (33)..(480): NCBI GI: 212532469 Blast Desc: conserved [Penicillium marneffei ATCC 18224] gi|210071755|gb|EEA25844.1| conserved [Penicillium marneffei ATCC 18224]
  misc_feature (13)..(479): NCBI GI: 169601388 Blast Desc: SNOG_03558 [Phaeosphaeria nodorum SN15] gi|111067643|gb|EAT88763.1| SNOG_03558 [Phaeosphaeria nodorum SN15]
MAPQDDRRRPQALNLTPSRSSSSDGSSTSTSSLKPPRTPRFAEATTIHSPIEPQNQPFGGRDGNSQVAQAQPADVGFGYINNDTTEHVVNMPMTPKSPLKSAMRVPGTPARKFENPLSPTFREEDILESKERDTEAAQKKDVGLKYKVRLAKFALRGISFSCSLIILALLGTSFTIFRATASLPAQSSLPAWAQGTQTWPQYTVLAVAAVNLLLCIFIFIGYMRGGHHRASKVNVYYTLFAVGWFIASSILWAAAAGILQFTRNNSNNKDMWGWACVENHRATLFGDKVDYALVCRLQNWSLICALIEIVLDVFTITLYSVVFYRYVTKRKLTKSMDMRDRARSDLYLAQLRSQSAPNTPGFGPKSPSFSQYAMSPRFPPSAYKSFSDIAEEPCFTPGGRMPEPASSFAAQARAPAAASQPAAKPFKLQAPPSKAPSATPKLGQGAFNSPTTSSPPPNEFSAVAPGEQQYDAVPIPGAYADQAIKSPPPAQTSFGGYYK

SEQ ID NO: 31556 - DNA, 2543 bp, Muscodor strobelii
  misc_feature: SGI EST ID NO. CUFF.76533.0
  misc_feature: Variant of the nucleotide sequence at SEQ ID NO 31554
cttttccctgctttcttgatccgttcttgtgacttgctgcacgaattgtcggcgcttgaggtgatacgctgatctggggatttcgacacggttgaagctagtgtccggcggcatcctattacctacggcgtctatccacatcttgagcgcccactcgagattggtgcttcctctggctgccctatcagggtttgtgctcccagtgaagccaaggaccctggccactcgtaaccattcccattgcatactgcccgtgggatccccactgaccgtccttgcagaagctcttcaagaaagtcgaatgggattgtagaacgcatgagggcgcttattcaaaacctaatacctccctctactgcccagaccatacatctctttcttcgatagctggtctcttcaattcatcattctcaaatcgcttcacttttttttatatgcttccactttgaaccatcttatacaaagtatacacatagagtagttggatcgtgtatcacttatacaaagagagtgccacgttcgctcagaggagcattgagattcaaatggcgccacaggacgacaggaggaggccacaggcccttaacttgacgccgtcacgatcttcatcttcagatggatcttccacaagcacatcttcattaaaacctccaaggacaccgagattcgccgaggccacgacaatacatagtcccatcgaaccacagaatcagccctttggaggccgtgatgggaactcgcaggttgcacaagctcaacctgcagatgttgggtttggatatatcaacaacgacacgactgaacacgtggtcaacatgccgatgacaccaaaatctccactgaagagtgccatgagggtacctggaacgcccgcaagaaaattcgagaatcccctgagcccgacttttagagaagaggatattctcgagagcaaagagcgggacaccgaagctgcacagaaaaaggatgtgggcctcaaatacaaggtcaggctggccaagttcgcgcttcgtggtatcagcttcagctgtagcttgattattctggctcttctcggcacatcgttcacgatcttccgggcaactgcctcactcccagcgcaaagctctctgccagcttgggctcaaggcacccagacatggcctcagtacacagttctcgcagtcgctgctgttaacttattgctgtgtatcttcatctttatcggttacatgcgtggtggccaccaccgagcttccaaggtcaacgtttactacacgctgtttgccgttggttggttcattgcttcgtcaatcttgtgggcagcagccgccggcattttacagttcacacgtaacaatagcaacaacaaggacatgtggggttgggcttgtgttgagaatcaccgagccacgctctttggagacaaagtcgactatgctctagtttgtcggcttcaaaactggtctctcatttgcgctctcattgagatcgtactcgacgtcttcacaattacgctctacagcgtcgtcttctaccgatatgtcactaagcgcaagctcactaagtccatggatatgcgcgatcgtgctcgctcagatctctatctcgcccaactgcgttcgcagtcggcccccaacacaccaggtttcggccccaagtcaccttccttctcacagtacgcaatgtcaccaaggttcccaccgtcggcctataagtctttctcagacatcgccgaggagccttgcttcacaccgggtggtcggatgcctgagccggcctcttcattcgcagcccaagctcgtgctcctgctgctgccagccaacccgcagcgaagcctttcaagctgcaggcaccgcccagcaaagccccttcagctacccccaagctcgggcagggcgcattcaattcaccaacgacgtctagcccgcctccaaatgagttcagtgctgttgcacctggcgagcaacaatacgatgctgtgccaattcctggcgcatacgcagatcaagcaataaagagcccgccaccggcacagactagcttcggagggtactacaaatgaacgaacccaaaaagggataaaaataatacgggatgggtgatctagcggatgcgatgtacgaaaagacgcgttgaccggagtcggatgagaacgcgaaacgaaaccaattttcctttgtgtgctgctatagcggctaagatacctgtggaatttcccaccacgcccggcgtttaatggaggcgtgttgaaactttttggagatgcagcggagtgaatcggataccactcatccatttgggggccttgaaagcctcgccgagtgagctcccgcatatactttacttatacataatttgtcgatcagatctacatctttcgatatcatttcgtcaggaatgaaaatatacctcttgtgaagcgaacagactttgatgattgcgtgagactttgggtgcacgttcgaaatgacagttgtctttgctcccgtgactagatgcatcccctattgtctctcggtacagctgagcattcagttgcatctggtgtcatctcgcttcg

SEQ ID NO: 31557 - DNA, 1155 bp, Muscodor strobelii
  misc_feature: SGI cDNA ID NO. 570866
  misc_feature: Encodes the peptide sequence at SEQ ID NO 31558
atgcgtcatttcgttattgctgcccttgtaacgggcgtgctgtcgtgcactaacccagattcagacgcttgcgcaagttttatgacttaccaagctgctactgcttcagcattctgtgcaacttttactaagtcggctgtaactgcaaccgcgggtctacctgcgtgggccaccgtgtgctcgagcaagccgagtgctttgtcaaaagtgagatggctcagtattatgaccacgagcacgaagacaactaccggcagtggtggaggcagcaccggatcttgtggctcgcccaagttaactcttgagggctacggcgcgggcacaaccggcggaggttctggaagtggcacgactgttacttcatgttcagctctatcttctgcagctgctaacggcggtgtgattacgatttcgggtgttctcaatggctgtggtatcatcgatctggttgggggtactacagtgcttggatcaggatccaagtctgggttgaccagcggtggcttccgcgtcaaggggcagtcgaatgtcatccttagaaacctgtatttccacgatccgccagagagcaaagatcttgttgaaatccagtcctcgaccaaggtctgggtcgaccattgtgatttctcgaccgagggcctcactggagacaaagattactatgatggcttgctggatataactcacggaagtgacttcatcaccgtttcctacaacgttttccacgaccactggaagggatctctcgttggccacagcgacagcaacgagtctgaagacagcggcaagctgcacgtcacataccaccataactactggtacaacgtcaactcgcgtcttccttccatccgtttcggcactggccatatctacagctcgtgtttcgagaacaacccaacatctggaattaatagccgcatgggtgctcaagttcttgttgagcagaactatttctctagcactaagctcgctattgtaacggatctcgattctgacgaggatggttacgctgtggataaaaacaatgtcttcgttgacagcacaactgagatcacccaggttggatctttcactccaccttacagctataccttggaccctgcgagctgcatctgctcgtttgtcaagtcttacgctgggttgggtaagatttag

SEQ ID NO: 31558 - protein, 384 aa, Muscodor strobelii
  misc_feature: SGI Peptide ID NO. 570866
  misc_feature (136)..(318): Pfam Id: PF00544 Pfam Desc: Pectate lyase
  misc_feature (153)..(318): Pfam Id: PF00544 Pfam Desc: Pectate lyase
  misc_feature (1)..(384): NCBI GI: 256729296 Blast Desc: NECHADRAFT_122787 [Nectria haematococca mpVI 77-13-4]
  misc_feature (1)..(384): NCBI GI: 46117176 Blast Desc: FG04430.1 [Gibberella zeae PH-1]
  misc_feature (122)..(384): NCBI GI: 261353894 Blast Desc: pectate lyase B [Verticillium albo-atrum VaMs.102]
  misc_feature (117)..(384): NCBI GI: 261359866 Blast Desc: pectate lyase B [Verticillium albo-atrum VaMs.102]
  misc_feature (119)..(384): NCBI GI: 169621402 Blast Desc: SNOG_13910 [Phaeosphaeria nodorum SN15] gi|160704246|gb|EAT78535.2| SNOG_13910 [Phaeosphaeria nodorum SN15]
  misc_feature (92)..(384): NCBI GI: 282861947 Blast Desc: Pectate lyase/Amb allergen [Streptomyces sp. ACTE] gi|282562972|gb|EFB68511.1| Pectate lyase/Amb allergen [Streptomyces sp. ACTE]
  misc_feature (118)..(384): NCBI GI: 260652064 Blast Desc: secreted pectate lyase [Streptomyces scabiei 87.22]
  misc_feature (134)..(384): NCBI GI: 256779639 Blast Desc: pectate lyase, Polysaccharide Lyase Family 1 [Streptomyces hygroscopicus ATCC 53653]
  misc_feature (118)..(384): NCBI GI: 254407084 Blast Desc: pectate lyase [Streptomyces sviceus ATCC 29083] gi|197716509|gb|EDY60543.1| pectate lyase [Streptomyces sviceus ATCC 29083]
  misc_feature (118)..(384): NCBI GI: 256800009 Blast Desc: Pectate lyase/Amb allergen [Streptomyces viridochromogenes DSM 40736]
  misc_feature (171)..(380): SWISSPROT Homolog: EC 4.2.2.2 Pectate lyase
MRHFVIAALVTGVLSCTNPDSDACASFMTYQAATASAFCATFTKSAVTATAGLPAWATVCSSKPSALSKVRWLSIMTTSTKTTTGSGGGSTGSCGSPKLTLEGYGAGTTGGGSGSGTTVTSCSALSSAAANGGVITISGVLNGCGIIDLVGGTTVLGSGSKSGLTSGGFRVKGQSNVILRNLYFHDPPESKDLVEIQSSTKVWVDHCDFSTEGLTGDKDYYDGLLDITHGSDFITVSYNVFHDHWKGSLVGHSDSNESEDSGKLHVTYHHNYWYNVNSRLPSIRFGTGHIYSSCFENNPTSGINSRMGAQVLVEQNYFSSTKLAIVTDLDSDEDGYAVDKNNVFVDSTTEITQVGSFTPPYSYTLDPASCICSFVKSYAGLGKI

SEQ ID NO: 31559 - DNA, 700 bp, Muscodor strobelii
  misc_feature: SGI EST ID NO. CUFF.74716.1
  misc_feature: Variant of the nucleotide sequence at SEQ ID NO 31557
ctctcgttggccacagcgacagcaacgagtctgaagacagcggcaagctgcacgtcacataccaccataactactggtacaacgtcaactcgcgtcttccttccatccgtttcggcactggccatatctacagctcgtaagtacctttctggagtcattttcttcttgtttgggtggtgattctactgatgcaagctcccgagtcaccccagtgagagaaactttggctgaaaggagtcattactaactcccaatgcgtaggtgtttcgagaacaacccaacatctggaattaatagccgcatgggtgctcaagttcttgttgagcagaactatttctctagcactaagctcgctattgtaacggatctcgattctgacgaggatggttacgctgtggataaaaacaatgtcttcgttgacagcacaactgagatcacccaggttggatctttcactccaccttacagctataccttggaccctgcgagctgcatctgctcgtttgtcaagtcttacgctgggttgggtaagatttagattggcgggtaggagaaatagtcttcggctcccatatgatataccaaatcattgacaatatgattaatgatggcgttgatctatctcttctcgatcgcattggtcaaactcatagaaattgcgatagttccagctgcaaatacacggtatcgaaacggcggc

SEQ ID NO: 31560 - DNA, 489 bp, Muscodor strobelii
  misc_feature: SGI cDNA ID NO. 570867
  misc_feature: Reduced expression when VOC is produced
  misc_feature: Encodes the peptide sequence at SEQ ID NO 31561
atggcggtgaatatgcgctacgtcgagctggcgaagcagctgcacccgcgactgacccgtttcttcgccaaatatcctccaaaccagatcctcccgacgtcgacgcgcaccaacaccatagcagacggtgccactccgaatcccttcctcccgcacaaacacccggtcaccggaaagtggcacgacccagagttctcactgagacggcaggcggagctggtcaagctcgcccgtgaacatggcgtcgaggagctactgcccttcaccaacaagggcaccgaagagcgcgtgaggcacagggtcgagcatggtcttcgtgtccgtggtactggcgtgggacagcgtgtcaagggtcacttacacgaaagaatgctggctgcaaagatggagaagaggagaacagccatgttgggcatgccgagactcgtacgggaatggagaaagacagggaagagcaagtggacaaagtatccaaaatcagcgacataa

SEQ ID NO: 31561 - protein, 162 aa, Muscodor strobelii
  misc_feature: SGI Peptide ID NO. 570867
  misc_feature (7)..(159): NCBI GI: 171696190 Blast Desc: protein product [Podospora anserina] gi|170948337|emb|CAP60501.1| protein product [Podospora anserina]
  misc_feature (2)..(159): NCBI GI: 85113079 Blast Desc: NCU02804 [Neurospora crassa OR74A] gi|28926243|gb|EAA35224.1| conserved [Neurospora crassa OR74A]
  misc_feature (1)..(162): NCBI GI: 261356380 Blast Desc: conserved [Verticillium albo-atrum VaMs.102]
  misc_feature (6)..(159): NCBI GI: 156057347 Blast Desc: SS1G_04404 [Sclerotinia sclerotiorum 1980] gi|154702190|gb|EDO01929.1| SS1G_04404 [Sclerotinia sclerotiorum 1980]
  misc_feature (1)..(152): NCBI GI: 256733106 Blast Desc: NECHADRAFT_100084 [Nectria haematococca mpVI 77-13-4]
  misc_feature (7)..(148): NCBI GI: 39951889 Blast Desc: MGG_01587 [Magnaporthe grisea 70-15] gi|145020568|gb|EDK04697.1| MGG_01587 [Magnaporthe grisea 70-15]
  misc_feature (1)..(152): NCBI GI: 46124941 Blast Desc: FG06848.1 [Gibberella zeae PH-1]
  misc_feature (2)..(139): NCBI GI: 116181634 Blast Desc: CHGG_01445 [Chaetomium globosum CBS 148.51] gi|88185742|gb|EAQ93210.1| CHGG_01445 [Chaetomium globosum CBS 148.51]
  misc_feature (8)..(158): NCBI GI: 189205425 Blast Desc: conserved [Pyrenophora tritici-repentis Pt-1C-BFP] gi|187975140|gb|EDU41766.1| conserved [Pyrenophora tritici-repentis Pt-1C-BFP]
  misc_feature (1)..(159): NCBI GI: 240110075 Blast Desc: CPC735_061070 [Coccidioides posadasii C735 delta SOWgp]
  misc_feature: Useful for introducing or modulating the production of volatile compounds
MAVNMRYVELAKQLHPRLTRFFAKYPPNQILPTSTRTNTIADGATPNPFLPHKHPVTGKWHDPEFSLRRQAELVKLAREHGVEELLPFTNKGTEERVRHRVEHGLRVRGTGVGQRVKGHLHERMLAAKMEKRRTAMLGMPRLVREWRKTGKSKWTKYPKSAT

SEQ ID NO: 31562 - DNA, 4845 bp, Muscodor strobelii
  misc_feature: SGI EST ID NO. CUFF.74990.0
  misc_feature: Variant of the nucleotide sequence at SEQ ID NO 31560
atcgactctcaagagtcactaactccggcccgtcggcagctgacagcccggcgtcgcatcgacaaccagacccctacccaatttgtagcaaagctatcccaacgctgtcgcattctcgaaattggcttcctcgaaattgagatcacatctgtccatcgaccatctattgtgttccaccactttcgccactagctattgtttcgaataccttaccaagatcgcaaccatggcggtgaatatgcgctacgtcgagctggcgaagcagctgcacccgcgactgacccgtttcttcgccaaatatcctccaaaccagatcctcccgacgtcgacgcgcaccaacaccatagcagacggtgccactccgaatcccttcctcccgcacaaacacccggtcaccggaaagtggcacgacccagagttctcactgagacggcaggcggagctggtcaagctcgcccgtgaacatggcgtcgaggagctactgcccttcaccaacaagggcaccgaagagcgcgtgaggcacagggtcgagcatggtcttcgtgtccgtggtactggcgtgggacagcgtgtcaagggtcacttacacgaaagaatgctggctgcaaagatggagaagaggagaacagccatgttgggcatgccgagactcgtacgggaatggagaaagacagggaagagcaagtggacaaagtatccaaaatcagcgacataattacaggtttccgttgcatgttgttgatctggtccaatgtacgaaatcgtgtattaatctgtacaaaaatgtgttggaatataccaaaagcactctgcatatccaaggtcacaattcgagacactttacacttagttccctggcggagtgattgacgatccctgggcgagcccgataagtctatgtctgatctcttgaaatggagaaccattgaattgaaatacagttgtagtacgcaactcatttcgggaatttaggttgatgcgatatatcgttctggcacaagccaaagcctatcccattagttcacgtgacccacccgccgccgcatcttgacttaccttacctcaggacaccaaaaaaaccggttttcaccactcatgacctcgggagggaatgatctcaacttacaagcacatacatcccaaacactcaccttcaataacacaatcttcatttccacttttaccccaaaaccaccgtcactcaccagaacctcatcaatcgccaaatttctcaaaagatggcgcccgcaatatcgcggacctcagccgagccaacgctctacgagatcctctcactcccacccaagaatctcgaaggacaagcctcatcagcacagcagaaaaccgtcaagcacgcataccacaaggctctcttaaagcaccacccagacaaaaaccaaacccaggactcatcatcatcatccccaccaccaccatccaagaccacaaagtcaaaatcaaaatccacatcaattcccaaatcccaactcacatacacagtcgaccagattcaacacgcctacaacgtactctcagacgcaacccagcgtcgagaatacgaccggaacctactcctaacctcaaccacccacttctccacctcatcccacaccagcacacacatatcatcctcttcctctagcaacgggaactacacaacctcccaaaaacactctctatcaacgcgtttccacacaggcatcgagaccgtcgacctagacgacttaggattcgacgagtccacagggatctactacggctcctgccgctgcggcaacgagcggggcttccaattcaccgaggcccagctagaagagtacgaggaagaccgcgtcctcatggtgcaatgtctagactgcagtctctggatgcgcgtcctcttcgacacggccgtcgacccgcaagaggagagtacccaagtccagcagcagccacagaattcttcacccaagagtgagaagaaacaaaagaagaaggctcccgatgcagatgtgagcgtaaggaacaacaagaatgaagcggcggaccgaagaggaagcggtagcggcagtggcagcggaaagggttggaagttcaacttcagtttcggcttttcgctaggtggaggtgcaacggcaaatgcgagtgccaaaactgggacatagtatcatgtgcttatagcgtcaagggagataccgaatttaattgtcagtccgaaagcataataattagatgattgtctaagaacgtgatatcatccattctcttactcagtaattaacactacttacgtaaattaaatatgcttacaggtattgtatatggaggaggctcgaatgcgcacgcatttcgaatgagggaccaagacgccctgatcacgtgaacacccaccttgatatacacacactagattgcaaggattcaaggactgcatgggtaggttctgaatacgaacatcagctttttttcttttctcatgagtatctgaatggtgaacaatagtattgtccagacaagtttcttattagactctaagaaggcatggcttgtcgatgggggcggcaccccagaacagatctttacctctttgcctttagaaaggagatccctccaatgtctttatctgtgtactgtcacgcgcaaaaacgagaaacatgccggaactgatttgggcaggttgcaaaagcaagaaacactcctgacaccagattccacccggaagaccccacagccagcccctggaaacatcgcgatagtggcaaggtaagtaaactgtttactcggcggctttgggctcctcggcgggcgcctcgggagccttctccgtctcgggagcgggagcagcggcggtctcagcagcgggctcggcctcagaagacgtccagagggtcttaatagctggtcagtactcgtttcatacgataaggctatgttcaggatcataccaagttgtcgcggagaagctgcatgatgagggtcgagtccttgtagctctcctcgcttagggtgtcgagctctgcgaacagatatcagtacaatcgttcctagtgttttcttattgagacacaaactgaccagcaatggcgtcatcaaatgcctgcttggcgagatggcaagcctggtcgggagcgttcaagatctcgtagtagaagacggagaagttcagagcgagacccagacggatggggtgagtaggaggaagctcggtctgagcaacctcagtggcagccttgtaagcatcaagggacttgtcggccgattccttgcgacgatcgccaatggcgaactcggcaaggtaacggtggtagtcacccttcctgtgataggggtcagtcacacgcacagcatcgagaaagcgtgagcacgtacatcttgtggtagaagaccttagactcgccagacttggccgaggggatgaggtgctggtcgaggacatcgagaatgtcatcgcagatcttggcaagctcggcctcgatcttctggcggtactccttaatgaggccaacttgagatgagttgcccttagactcttccttctgctcaatggaggtgacgattctccaggaggcacggcgggcgccaatgacattcttgtaagcgacggagaggaggttacgctcctcgacggtgaggtcgcggtcttcggaagcgatgatcttcatgttctcaaccatctctggccagagagcgtcagtggtgcaatggtgatcgacggactctatttggtccaaaacataccctcgtagcgctcagcctgctcggccagcttggcgagatacacggcatcctcgtgacccatcttgtcgactggattgctcagtaaattcggtactgcaacgacacggtagtcagtaagaggggagtttggattattgaagatagaagtcaggggacaaagatttggcgatagtcaaaggggaatagatggaacaaatgcgcatttgacggtgggaagttcaggaaagaagcagtgtggtgcaggaaaaagggccgggcgacgttaaataagaagtgtttcaaaacactgtcacagtgggaaggagcgaaggtgagtgatgcgtggctgtcaagatacgcgacgacgtggaaaatcgaggtgaacaacagcagagatgcggccccccgcactcggtggggtttgcgcctaccgttaggattgcacaacgcgtagataagaggcggtggcggggcactgttgacggtcgcgagtcacaattggagacaacgacgagacgcggggagttgagttgagggcggtgatggcagatgtagatgttgacgacagggagaggatggcgacaacaacaatggcagcagacgaggcggacgtgggcgtgggcgtgtgggcgatgacgacaagtgcggaagcggcaaccaggcgggagattgggaatttcagggttgcagacccggcagagacagggaaggggggacggagggcagcaggcaggtggcagatatggcagtgggcagcgggctggatgggatgagggcgagtgcaagaggggggccatagatcacgatagcgtcaacaaagacggcaggacagcagagcaacttacctgagtggtgtttggggtacggtggtttgtggttgcagggagaaagaaacgctcgtacggtcgtgatgcacgaggaaaacgaggaagcgcaaaaaaaattggaggagggaggagagggagagagggaaggagaatgcaggtggacgaggtgacttgctctagatgcaggtggatgaggtgttgttgttctagcaggcctggccggtgcaggtgatgtggtgcctcactgctttttagggggagatggccacgcagaatccgcggccaaggtccacgggttcaggcggcctgaggtgctggggcg

SEQ ID NO: 31563 - DNA, 906 bp, Muscodor strobelii
  misc_feature: SGI cDNA ID NO. 570868
  misc_feature: Reduced expression when VOC is produced
  misc_feature: Encodes the peptide sequence at SEQ ID NO 31564
atggcgcccgcaatatcgcggacctcagccgagccaacgctctacgagatcctctcactcccacccaagaatctcgaaggacaagcctcatcagcacagcagaaaaccgtcaagcacgcataccacaaggctctcttaaagcaccacccagacaaaaaccaaacccaggactcatcatcatcatccccaccaccaccatccaagaccacaaagtcaaaatcaaaatccacatcaattcccaaatcccaactcacatacacagtcgaccagattcaacacgcctacaacgtactctcagacgcaacccagcgtcgagaatacgaccggaacctactcctaacctcaaccacccacttctccacctcatcccacaccagcacacacatatcatcctcttcctctagcaacgggaactacacaacctcccaaaaacactctctatcaacgcgtttccacacaggcatcgagaccgtcgacctagacgacttaggattcgacgagtccacagggatctactacggctcctgccgctgcggcaacgagcggggcttccaattcaccgaggcccagctagaagagtacgaggaagaccgcgtcctcatggtgcaatgtctagactgcagtctctggatgcgcgtcctcttcgacacggccgtcgacccgcaagaggagagtacccaagtccagcagcagccacagaattcttcacccaagagtgagaagaaacaaaagaagaaggctcccgatgcagatgtgagcgtaaggaacaacaagaatgaagcggcggaccgaagaggaagcggtagcggcagtggcagcggaaagggttggaagttcaacttcagtttcggcttttcgctaggtggaggtgcaacggcaaatgcgagtgccaaaactgggacatag

SEQ ID NO: 31564 - protein, 301 aa, Muscodor strobelii
  misc_feature: SGI Peptide ID NO. 570868
  misc_feature (13)..(108): Pfam Id: PF00226 Pfam Desc: DnaJ domain
  misc_feature (156)..(216): Pfam Id: PF05207 Pfam Desc: CSL zinc finger
  misc_feature (5)..(220): NCBI GI: 255942849 Blast Desc: Pc18g03550 [Penicillium chrysogenum Wisconsin 54-1255] gi|211586926|emb|CAP94579.1| Pc18g03550 [Penicillium chrysogenum Wisconsin 54-1255]
  misc_feature (15)..(220): NCBI GI: 115397781 Blast Desc: conserved [Aspergillus terreus NIH2624] gi|114192673|gb|EAU34373.1| conserved [Aspergillus terreus NIH2624]
  misc_feature (1)..(223): NCBI GI: 119178820 Blast Desc: CIMG_08210 [Coccidioides immitis RS]
  misc_feature (13)..(229): NCBI GI: 258577523 Blast Desc: conserved [Uncinocarpus reesii 1704] gi|237903209|gb|EEP77610.1| conserved [Uncinocarpus reesii 1704]
  misc_feature (12)..(215): NCBI GI: 116181634 Blast Desc: CHGG_01445 [Chaetomium globosum CBS 148.51] gi|88185742|gb|EAQ93210.1| CHGG_01445 [Chaetomium globosum CBS 148.51]
  misc_feature (5)..(215): NCBI GI: 67522346 Blast Desc: AN1630.2 [Aspergillus nidulans FGSC A4] gi|40745594|gb|EAA64750.1| AN1630.2 [Aspergillus nidulans FGSC A4]
  misc_feature (5)..(215): NCBI GI: 84028911 Blast Desc: DPH4_EMENI RecName: Full=Diphthamide biosynthesis protein 4 gi|259486966|tpe|CBF85256.1| TPA: Diphthamide biosynthesis protein 4 [Source:UniProtKB/Swiss-Prot;Acc:P0C0V5]
  misc_feature (15)..(215): NCBI GI: 119500712 Blast Desc: DnaJ domain protein [Neosartorya fischeri NRRL 181] gi|119415278|gb|EAW25216.1| DnaJ domain protein [Neosartorya fischeri NRRL 181]
  misc_feature (15)..(215): NCBI GI: 145257536 Blast Desc: An04g04050 [Aspergillus niger] gi|134058686|emb|CAK38670.1| protein product [Aspergillus niger]
  misc_feature (13)..(227): NCBI GI: 84028912 Blast Desc: An04g04050 [Aspergillus niger] gi|134058686|emb|CAK38670.1| protein product [Aspergillus niger]
  misc_feature: Useful for introducing or modulating the production of volatile compounds
MAPAISRTSAEPTLYEILSLPPKNLEGQASSAQQKTVKHAYHKALLKHHPDKNQTQDSSSSSPPPPSKTTKSKSKSTSIPKSQLTYTVDQIQHAYNVLSDATQRREYDRNLLLTSTTHFSTSSHTSTHISSSSSSNGNYTTSQKHSLSTRFHTGIETVDLDDLGFDESTGIYYGSCRCGNERGFQFTEAQLEEYEEDRVLMVQCLDCSLWMRVLFDTAVDPQEESTQVQQQPQNSSPKSEKKQKKKAPDADVSVRNNKNEAADRRGSGSGSGSGKGWKFNFSFGFSLGGGATANASAKTGT

SEQ ID NO: 31565 - DNA, 4845 bp, Muscodor strobelii; identical to SEQ ID NO: 31562
  misc_feature: SGI EST ID NO. CUFF.74990.0
  misc_feature: Variant of the nucleotide sequence at SEQ ID NO 31563

SEQ ID NO: 31566 - DNA, 795 bp, Muscodor strobelii
  misc_feature: SGI cDNA ID NO. 570869
  misc_feature: Encodes the peptide sequence at SEQ ID NO 31567
atgggtcacgaggatgccgtgtatctcgccaagctggccgagcaggctgagcgctacgaggagatggttgagaacatgaagatcatcgcttccgaagaccgcgacctcaccgtcgaggagcgtaacctcctctccgtcgcttacaagaatgtcattggcgcccgccgtgcctcctggagaatcgtcacctccattgagcagaaggaagagtctaagggcaactcatctcaagttggcctcattaaggagtaccgccagaagatcgaggccgagcttgccaagatctgcgatgacattctcgatgtcctcgaccagcacctcatcccctcggccaagtctggcgagtctaaggtcttctaccacaagatgaagggtgactaccaccgttaccttgccgagttcgccattggcgatcgtcgcaaggaatcggccgacaagtcccttgatgcttacaaggctgccactgaggttgctcagaccgagcttcctcctactcaccccatccgtctgggtctcgctctgaacttctccgtcttctactacgagatcttgaacgctcccgaccaggcttgccatctcgccaagcaggcatttgatgacgccattgctgagctcgacaccctaagcgaggagagctacaaggactcgaccctcatcatgcagcttctccgcgacaacttgaccctctggacgtcttctgaggccgagcccgctgctgagaccgccgctgctcccgctcccgagacggagaaggctcccgaggcgcccgccgaggagcccaaagccgccgagtaa

SEQ ID NO: 31567 - protein, 264 aa, Muscodor strobelii
  misc_feature: SGI Peptide ID NO. 570869
  misc_feature (3)..(238): Pfam Id: PF00244 Pfam Desc: 14-3-3 protein
  misc_feature (1)..(247): NCBI GI: 88766383 Blast Desc: TH14-3-3 [Metarhizium anisopliae]
  misc_feature (1)..(248): NCBI GI: 12054274 Blast Desc: 14-3-3-like protein [Hypocrea jecorina]
  misc_feature (1)..(239): NCBI GI: 256732662 Blast Desc: [Nectria haematococca mpVI 77-13-4]
  misc_feature (1)..(247): NCBI GI: 116181636 Blast Desc: DNA damage checkpoint protein rad24 [Chaetomium globosum CBS 148.51] gi|88185743|gb|EAQ93211.1| DNA damage checkpoint protein rad24 [Chaetomium globosum CBS 148.51]
  misc_feature (1)..(262): NCBI GI: 85113087 Blast Desc: 14-3-3 protein 7 [Neurospora crassa OR74A] gi|28926245|gb|EAA35226.1| 14-3-3 protein 7 [Neurospora crassa OR74A]
  misc_feature (1)..(242): NCBI GI: 39951891 Blast Desc: DNA damage checkpoint protein rad24 [Magnaporthe grisea 70-15] gi|145020567|gb|EDK04696.1| DNA damage checkpoint protein rad24 [Magnaporthe grisea 70-15]
  misc_feature (1)..(238): NCBI GI: 261356373 Blast Desc: DNA damage checkpoint protein rad24 [Verticillium albo-atrum VaMs.102]
  misc_feature (1)..(245): NCBI GI: 46124939 Blast Desc: 1433_TRIHA 14-3-3 PROTEIN HOMOLOG (TH1433) [Gibberella zeae PH-1]
  misc_feature (1)..(239): NCBI GI: 2492491 Blast Desc: 1433_TRIHA RecName: Full=14-3-3 protein homolog; AltName: Full=Th1433 gi|806859|gb|AAB17101.1| 14.3.3. protein [Hypocrea lixii]
  misc_feature (1)..(260): NCBI GI: 121710474 Blast Desc: 14-3-3 family protein ArtA, [Aspergillus clavatus NRRL 1] gi|119401003|gb|EAW11427.1| 14-3-3 family protein ArtA, [Aspergillus clavatus NRRL 1]
MGHEDAVYLAKLAEQAERYEEMVENMKIIASEDRDLTVEERNLLSVAYKNVIGARRASWRIVTSIEQKEESKGNSSQVGLIKEYRQKIEAELAKICDDILDVLDQHLIPSAKSGESKVFYHKMKGDYHRYLAEFAIGDRRKESADKSLDAYKAATEVAQTELPPTHPIRLGLALNFSVFYYEILNAPDQACHLAKQAFDDAIAELDTLSEESYKDSTLIMQLLRDNLTLWTSSEAEPAAETAAAPAPETEKAPEAPAEEPKAAE

SEQ ID NO: 31568 - DNA, 3949 bp, Muscodor strobelii
  misc_feature: SGI EST ID NO. CUFF.74991.1
  misc_feature: Variant of the nucleotide sequence at SEQ ID NO 31566
cgctgcccactgccatatctgccacctgcctgctgccctccgtccccccttccctgtctctgccgggtctgcaaccctgaaattcccaatctcccgcctggttgccgcttccgcacttgtcgtcatcgcccacacgcccacgcccacgtccgcctcgtctgctgccattgttgttgtcgccatcctctccctgtcgtcaacatctacatctgccatcaccgccctcaactcaactccccgcgtctcgtcgttgtctccaattgtgactcgcgaccgtcaacagtgccccgccaccgcctcttatctacgcgttgtgcaatcctaacgtaccgaatttactgagcaatccagtcgacaagatgggtcacgaggatgccgtgtatctcgccaagctggccgagcaggctgagcgctacgaggagatggttgagaacatgaagatcatcgcttccgaagaccgcgacctcaccgtcgaggagcgtaacctcctctccgtcgcttacaagaatgtcattggcgcccgccgtgcctcctggagaatcgtcacctccattgagcagaaggaagagtctaagggcaactcatctcaagttggcctcattaaggagtaccgccagaagatcgaggccgagcttgccaagatctgcgatgacattctcgatgtcctcgaccagcacctcatcccctcggccaagtctggcgagtctaaggtcttctaccacaagatgaagggtgactaccaccgttaccttgccgagttcgccattggcgatcgtcgcaaggaatcggccgacaagtcccttgatgcttacaaggctgccactgaggttgctcagaccgagcttcctcctactcaccccatccgtctgggtctcgctctgaacttctccgtcttctactacgagatcttgaacgctcccgaccaggcttgccatctcgccaagcaggcatttgatgacgccattgctgagctcgacaccctaagcgaggagagctacaaggactcgaccctcatcatgcagcttctccgcgacaacttgaccctctggacgtcttctgaggccgagcccgctgctgagaccgccgctgctcccgctcccgagacggagaaggctcccgaggcgcccgccgaggagcccaaagccgccgagtaaacagtttacttaccttgccactatcgcgatgtttccaggggctggctgtggggtcttccgggtggaatctggtgtcaggagtgtttcttgcttttgcaacctgcccaaatcagttccggcatgtttctcgtttttgcgcgtgacagtacacagataaagacattggagggatctcctttctaaaggcaaagaggtaaagatctgttctggggtgccgcccccatcgacaagccatgccttcttagagtctaataagaaacttgtctggacaatactattgttcaccattcagatactcatgagaaaagaaaaaaagctgatgttcgtattcagaacctacccatgcagtccttgaatccttgcaatctagtgtgtgtatatcaaggtgggtgttcacgtgatcagggcgtcttggtccctcattcgaaatgcgtgcgcattcgagcctcctccatatacaatacctgtaagcatatttaatttacgtaagtagtgttaattactgagtaagagaatggatgatatcacgttcttagacaatcatctaattattatgctttcggactgacaattaaattcggtatctcccttgacgctataagcacatgatactatgtcccagttttggcactcgcatttgccgttgcacctccacctagcgaaaagccgaaactgaagttgaacttccaaccctttccgctgccactgccgctaccgcttcctcttcggtccgccgcttcattcttgttgttccttacgctcacatctgcatcgggagccttcttcttttgtttcttctcactcttgggtgaagaattctgtggctgctgctggacttgggtactctcctcttgcgggtcgacggccgtgtcgaagaggacgcgcatccagagactgcagtctagacattgcaccatgaggacgcggtcttcctcgtactcttctagctgggcctcggtgaattggaagccccgctcgttgccgcagcggcaggagccgtagtagatccctgtggactcgtcgaatcctaagtcgtctaggtcgacggtctcgatgcctgtgtggaaacgcgttgatagagagtgtttttgggaggttgtgtagttcccgttgctagaggaagaggatgatatgtgtgtgctggtgtgggatgaggtggagaagtgggtggttgaggttaggagtaggttccggtcgtattctcgacgctgggttgcgtctgagagtacgttgtaggcgtgttgaatctggtcgactgtgtatgtgagttgggatttgggaattgatgtggattttgattttgactttgtggtcttggatggtggtggtggggatgatgatgatgagtcctgggtttggtttttgtctgggtggtgctttaagagagccttgtggtatgcgtgcttgacggttttctgctgtgctgatgaggcttgtccttcgagattcttgggtgggagtgagaggatctcgtagagcgttggctcggctgaggtccgcgatattgcgggcgccatcttttgagaaatttggcgattgatgaggttctggtgagtgacggtggttttggggtaaaagtggaaatgaagattgtgttattgaaggtgagtgtttgggatgtatgtgcttgtaagttgagatcattccctcccgaggtcatgagtggtgaaaaccggtttttttggtgtcctgaggtaaggtaagtcaagatgcggcggcgggtgggtcacgtgaactaatgggataggctttggcttgtgccagaacgatatatcgcatcaacctaaattcccgaaatgagttgcgtactacaactgtatttcaattcaatggttctccatttcaagagatcagacatagacttatcgggctcgcccagggatcgtcaatcactccgccagggaactaagtgtaaagtgtctcgaattgtgaccttggatatgcagagtgcttttggtatattccaacacatttttgtacagattaatacacgatttcgtacattggaccagatcaacaacatgcaacggaaacctgtaattatgtcgctgattttggatactttgtccacttgctcttccctgtctgcaagcctttgtcagtaatcggagctggggaataggtctcggaacaacgtacctttctccattcccgtacgagtctcggcatgcccaacatggctgttctcctcttctccatcctattccaattgttagcatatggctaattagcgtagagccatggcgccagatatctgcaaagaatcttcgtaaccacgaaatatcgacgtactttgcagccagcattctttcgtgtaagtgacccttgacacgctgtcccacgccagtaccacggacacgaagaccatgctcgaccctgtgcctcacgcgctcttcggtgcccttgttggtgaagggcagtagctcctcgacgccatgttcacgggcgagcttgaccagctccgcctgccgtctcagtgagaactctgggtcgtgccactttccggtgaccgggtgtttgtgcgggaggaagggattcggagtggcaccgtctgctatggtgttggtgcgcgtcgacgtcgggaggatctggtttggaggatatttggcgaagaaacgggtcagtcgcgggtgcagctgcttcgccagctcgacgtagcgcatattcaccgccatggttgcgatcttggtaaggtattcgaaacaatagctagtggcgaaagtggtggaacacaatagatggtcgatggacagatgtgatctcaatttcgaggaagccaatttcgagaatgcgac

SEQ ID NO: 31569 - DNA, 300 bp, Muscodor strobelii
  misc_feature: SGI cDNA ID NO. 570870
  misc_feature: Reduced expression when VOC is produced
  misc_feature: Encodes the peptide sequence at SEQ ID NO 31570
atgcgtcaagcactcaccaagaccacccgcttcatcgcgacccccatcacccgccgcaccttctcgacgaccctcagagccatggcagccggcgacactggtgcacccccgaagacgggcggcaccggcgacgccttccacaagcgcgagaaggccaacgaggactacgagattcgtcagcgcgagatggccaagctcaaggagctcaaaaggaagctgggcgagcagcaggagcacctcaagaagctgtccgaccacatcgatgagctcaccaagagccagggcggcgagcacaactaa

SEQ ID NO: 31570 - protein, 99 aa, Muscodor strobelii
  misc_feature: SGI Peptide ID NO. 570870
  misc_feature (6)..(99): NCBI GI: 261356374 Blast Desc: VDBG_04911 [Verticillium albo-atrum VaMs.102]
  misc_feature (5)..(99): NCBI GI: 256733105 Blast Desc: NECHADRAFT_102558 [Nectria haematococca mpVI 77-13-4]
  misc_feature (1)..(88): NCBI GI: 171696176 Blast Desc: protein product [Podospora anserina] gi|170948330|emb|CAP60494.1| protein product [Podospora anserina]
  misc_feature (5)..(99): NCBI GI: 164427699 Blast Desc: NCU02807 [Neurospora crassa OR74A] gi|157071849|gb|EAA35227.2| NCU02807 [Neurospora crassa OR74A]
  misc_feature (1)..(99): NCBI GI: 145613498 Blast Desc: MGG_01589 [Magnaporthe grisea 70-15] gi|145020566|gb|EDK04695.1| MGG_01589 [Magnaporthe grisea 70-15]
  misc_feature (19)..(99): NCBI GI: 154296246 Blast Desc: [Botryotinia fuckeliana B05.10] gi|150843514|gb|EDN18707.1| [Botryotinia fuckeliana B05.10]
  misc_feature (15)..(99): NCBI GI: 46124937 Blast Desc: FG06846.1 [Gibberella zeae PH-1]
  misc_feature (2)..(99): NCBI GI: 242801569 Blast Desc: ATPase inhibitor, mitochondrial precursor, [Talaromyces stipitatus ATCC 10500] gi|218717139|gb|EED16560.1| ATPase inhibitor, mitochondrial precursor, [Talaromyces ATCC
  misc_feature (1)..(99): NCBI GI: 115442752 Blast Desc: conserved [Aspergillus terreus NIH2624] gi|114188052|gb|EAU29752.1| conserved [Aspergillus terreus NIH2624]
  misc_feature (1)..(99): NCBI GI: 145238412 Blast Desc: An07g07780 [Aspergillus niger] gi|134076338|emb|CAK39594.1| protein product [Aspergillus niger]
  misc_feature: Useful for introducing or modulating the production of volatile compounds
MRQALTKTTRFIATPITRRTFSTTLRAMAAGDTGAPPKTGGTGDAFHKREKANEDYEIRQREMAKLKELKRKLGEQQEHLKKLSDHIDELTKSQGGEHN

SEQ ID NO: 31571 - DNA, 3650 bp, Muscodor strobelii
  misc_feature: SGI EST ID NO. CUFF.75055.1
  misc_feature: Variant of the nucleotide sequence at SEQ ID NO 31569
gataagtacctcaaatcttccaaccagctccagctgcgtcataccacatcacattccaaccacaccacaccacacctctcctcgcgtccgcaacaaacacaccactctaaaggtatgtaagaaggacaagatcctatcccatatccccctatatcatcgacctcggaccaatcaacgtctccccctccacaccaacacacaaacgccatccacctcaaacaagagcaaagcttatatcaactcacctcaatccactgaccacggtatccaacctctccagctccaaaaatgcgtcaagcactcaccaagaccacccgcttcatcgcgacccccatcacccgccgcaccttctcgacgaccctcagagccatggcagccggcgacactggtgcacccccgaagacgggcggcaccggcgacgccttccacaagcgcgagaaggccaacgaggactacgagattcgtcagcgcgagatggccaagctcaaggagctcaaaaggaagctgggcgagcagcaggagcacctcaagaagctgtccgaccacatcgatgagctcaccaagagccagggcggcgagcacaactaaatatcaggatagcttttagtcatcgcggtatggaaatctacatctcaaacggaatcatgacgagcggatggagcaagagctgtgattacgatccattctcttgtgtgcccatccaaggtcttttatgttaaggcatagtgtacacatacaattgctgcacctatcgtgcattgtactccgaaatcttaagcaacccaagtcttctctcagctttcagttcttacgctttccgtgacctgcctcgctctcgcaatcttgccttgcaaaacgtgctggtaacagcttgatatacacaacatgctatgccgataccgggtttctccgcactgcctactactcaatatgtatcaggtcgcaatgcatttctccctcggcatgtgtgagtgaaatatctccggaatgtacaaagttgttttctctagcgtcgtaaacccattatctccttcccatgtaggaccgatagaagctgtccacattgtcctgctccgggccaccgtactggttgccgatctgactgcttgccttctgcgcggctgcgaccttagcttgcagggctgcggcattggtatcgatccattggagctgtgtaaggtgtccattaaggacacgcacaatttggctcaactaggatggacttgtcagtaaaagcttgaggacggtgcatttagtatagttaggtaaacataccgggtcgtcgggtttgctgcccttgctcacagatcccgaaatgtcgttgatatccttgatcatggtcgtcaggtctctgcccatgacatcgaggcgctccgtgatcttctcagccatgcggtaggtccgctcgcgctcctggtcagggccacccagctgttcgccgggtccaatctgtttggaaaatagagcatctacttcgacctcgtacttatctagccatgactccaattcttcctgctggctctctacggtcacgagatggcgctctacctcacgactagccttctcggcttcgaaggtattgagatacagcttctggatcttctcgccattgtccacaagaagtcggtcccaagcagccacctgagcagcttgctccttgaagtctttttggtacttgctcagatcacccgcccaacggttcaggatctcatccatagtcttattcttcagacgtgccatggacgaagtggggccagtggtggatgcacccagactggtgttctgggctggtgcagcttttggtgcagctgggtccgatgcagcagcaggtttggacgcagcagcgccaaaaagcgagcctgccgccgcaggtgcactagatgtagtggcagtcgctgtagctactgtgctcggggcggctgccgtggtggaagcaggggtcgcagatgatgctggagttgtagcgccgaacaggctaccggctggtttagcaggttcggcgggagcactggttgttgcagattgtcccaaaccagagaataacgagcttggctgcgccttgggagcttcagaggtagttgtagctggcttgttcaggttactaaacatcgaaggggtacctgtgcttgcagctggagtagctgccgaactactcgccgccggagccgtgctggtttgtgtgagtggtgaggcgctgctggtcgttgaaggcgtggcctgcgcctgagcgccaccgaaaagagaagtggttggctttgctgcctcggccggcttggatgccgtctgtccaaacagagatgtggtagctgagttagacatggtatttgtgggcttgacagcctcagctggcttagcaccgaagagagacggggatgaaacggctggagaatctgcaggcttcgcaccaaagagatttcccatcggtttggcggtctggccagcggcgccaaagagcgagggcgtcgatgatcctgacactgcgggctgggttgaaatagtgggagtcttttgcgcactggccgtgtttccaaacaggccgccagtagcctgcccgtctttcttctcgcctgactgagccgatggaaatagggaagccccgctctgcgcgctggtgttgccaaagagattcgagccacccgcaggctttggtgcttccgacggaggagcgccggccggcgttgtcgagttcaggaacatgggcttagctggggtagtcgaaggattattggcaccgccgaatagcgaaggaccagtagtagcgctgcttccgccgaagagccctccgggtttggtcgccggggcttgagtagaagcgggagttgtcttgttgttctgagaggcgaagagaccaccgcctgtgaaacttgtgttcggggttgtgctgggcgtagtggagggctgtgtagaggcgggattgccgaacaagctgccgccagtagatgccggtttgctcgcggctccgaacatattggagctagcagatggctgagacgcgccaccgaaaagaccgccgccggcgccagctgtgggagtcgcggtggacgaagccgaggcggtggtagcggctgcgccaaagagtggcttctggtcggcgggcttggacgcagtgttaccgaagagggcagcggatggagcagtggaggtgggcgtgctagcgctgttggcaccgccgaaagagaatgaaggggtgccgctggactgggcgccgaagaggttggaggaggaggagggcgtggtggtcgagccaaacaggccgccggcagcaggggcgctcgaggtggtggcattggtggtggcctgccccgagctcggggttccgaacagagacatgatggcgatctgtttgtgtgtcgctgccgggctggggctggaatgagcgaggtcgcgtctgcgcctgggtcggtggaatgtgatgtggtgctgcaggccgtcggcagggcagcaacgacagcggcgacgggagctgcgctcttgtcccaattcgtcgcggattgggtcgttggtgttcttctccttattgaaaagcacctagagaagctgccgagatgctagggatggtagagtcaatagccttgccgcgatgttgcaaaaagaaacaagctgttcgctggcccgacacctccttggccttgtagatctataaggacatc

SEQ ID NO: 31572 - DNA, 2244 bp, Muscodor strobelii
  misc_feature: SGI cDNA ID NO. 570871
  misc_feature: Reduced expression when VOC is produced
  misc_feature: Encodes the peptide sequence at SEQ ID NO 31573
atgtctctgttcggaaccccgagctcggggcaggccaccaccaatgccaccacctcgagcgcccctgctgccggcggcctgtttggctcgaccaccacgccctcctcctcctccaacctcttcggcgcccagtccagcggcaccccttcattctctttcggcggtgccaacagcgctagcacgcccacctccactgctccatccgctgccctcttcggtaacactgcgtccaagcccgccgaccagaagccactctttggcgcagccgctaccaccgcctcggcttcgtccaccgcgactcccacagctggcgccggcggcggtcttttcggtggcgcgtctcagccatctgctagctccaatatgttcggagccgcgagcaaaccggcatctactggcggcagcttgttcggcaatcccgcctctacacagccctccactacgcccagcacaaccccgaacacaagtttcacaggcggtggtctcttcgcctctcagaacaacaagacaactcccgcttctactcaagccccggcgaccaaacccggagggctcttcggcggaagcagcgctactactggtccttcgctattcggcggtgccaataatccttcgactaccccagctaagcccatgttcctgaactcgacaacgccggccggcgctcctccgtcggaagcaccaaagcctgcgggtggctcgaatctctttggcaacaccagcgcgcagagcggggcttccctatttccatcggctcagtcaggcgagaagaaagacgggcaggctactggcggcctgtttggaaacacggccagtgcgcaaaagactcccactatttcaacccagcccgcagtgtcaggatcatcgacgccctcgctctttggcgccgctggccagaccgccaaaccgatgggaaatctctttggtgcgaagcctgcagattctccagccgtttcatccccgtctctcttcggtgctaagccagctgaggctgtcaagcccacaaataccatgtctaactcagctaccacatctctgtttggacagacggcatccaagccggccgaggcagcaaagccaaccacttctcttttcggtggcgctcaggcgcaggccacgccttcaacgaccagcagcgcctcaccactcacacaaaccagcacggctccggcggcgagtagttcggcagctactccagctgcaagcacaggtaccccttcgatgtttagtaacctgaacaagccagctacaactacctctgaagctcccaaggcgcagccaagctcgttattctctggtttgggacaatctgcaacaaccagtgctcccgccgaacctgctaaaccagccggtagcctgttcggcgctacaactccagcatcatctgcgacccctgcttccaccacggcagccgccccgagcacagtagctacagcgactgccactacatctagtgcacctgcggcggcaggctcgctttttggcgctgctgcgtccaaacctgctgctgcatcggacccagctgcaccaaaagctgcaccagcccagaacaccagtctgggtgcatccaccactggccccacttcgtccatggcacgtctgaagaataagactatggatgagatcctgaaccgttgggcgggtgatctgagcaagtaccaaaaagacttcaaggagcaagctgctcaggtggctgcttgggaccgacttcttgtggacaatggcgagaagatccagaagctgtatctcaataccttcgaagccgagaaggctagtcgtgaggtagagcgccatctcgtgaccgtagagagccagcaggaagaattggagtcatggctagataagtacgaggtcgaagtagatgctctattttccaaacagattggacccggcgaacagctgggtggccctgaccaggagcgcgagcggacctaccgcatggctgagaagatcacggagcgcctcgatgtcatgggcagagacctgacgaccatgatcaaggatatcaacgacatttcgggatctgtgagcaagggcagcaaacccgacgacccgttgagccaaattgtgcgtgtccttaatggacaccttacacagctccaatggatcgataccaatgccgcagccctgcaagctaaggtcgcagccgcgcagaaggcaagcagtcagatcggcaaccagtacggtggcccggagcaggacaatgtggacagcttctatcggtcctacatgggaaggagataa

SEQ ID NO: 31573 - protein, 747 aa, Muscodor strobelii
  misc_feature: SGI Peptide ID NO. 570871
  misc_feature (513)..(638): Pfam Id: PF05064 Pfam Desc: Nsp1-like C-terminal region
  misc_feature (513)..(627): Pfam Id: PF05064 Pfam Desc: Nsp1-like C-terminal region
  misc_feature (4)..(747): NCBI GI: 223974787 Blast Desc: [Zea mays]
  misc_feature (4)..(747): NCBI GI: 46124935 Blast Desc: FG06845.1 [Gibberella zeae PH-1]
  misc_feature (15)..(747): NCBI GI: 256732661 Blast Desc: NECHADRAFT_79074 [Nectria haematococca mpVI 77-13-4]
  misc_feature (72)..(747): NCBI GI: 67534149 Blast Desc: AN4499.2 [Aspergillus nidulans FGSC A4] gi|40741652|gb|EAA60842.1| AN4499.2 [Aspergillus nidulans FGSC A4] gi|259482677|tpe|CBF77383.1| TPA: Nuclear pore complex FGSC
  misc_feature (495)..(747): NCBI GI: 39951895 Blast Desc: MGG_01590 [Magnaporthe grisea 70-15] gi|145020565|gb|EDK04694.1| MGG_01590 [Magnaporthe grisea 70-15]
  misc_feature (519)..(747): NCBI GI: 261356375 Blast Desc: nuclear pore glycoprotein p62 [Verticillium albo-atrum VaMs.102]
  misc_feature (86)..(704): NCBI GI: 116181652 Blast Desc: CHGG_01454 [Chaetomium globosum CBS 148.51] gi|88185751|gb|EAQ93219.1| CHGG_01454 [Chaetomium globosum CBS 148.51]
  misc_feature (101)..(747): NCBI GI: 115442750 Blast Desc: [Aspergillus terreus NIH2624] gi|114188051|gb|EAU29751.1| [Aspergillus terreus NIH2624]
  misc_feature (493)..(745): NCBI GI: 171696178 Blast Desc: protein product [Podospora anserina] gi|170948331|emb|CAP60495.1| protein product [Podospora anserina]
  misc_feature (86)..(747): NCBI GI: 255942917 Blast Desc: Pc18g03910 [Penicillium chrysogenum Wisconsin 54-1255] gi|211586960|emb|CAP94615.1| Pc18g03910 [Penicillium chrysogenum Wisconsin 54-1255]
  misc_feature: Useful for introducing or modulating the production of volatile compounds
MSLFGTPSSGQATTNATTSSAPAAGGLFGSTTTPSSSSNLFGAQSSGTPSFSFGGANSASTPTSTAPSAALFGNTASKPADQKPLFGAAATTASASSTATPTAGAGGGLFGGASQPSASSNMFGAASKPASTGGSLFGNPASTQPSTTPSTTPNTSFTGGGLFASQNNKTTPASTQAPATKPGGLFGGSSATTGPSLFGGANNPSTTPAKPMFLNSTTPAGAPPSEAPKPAGGSNLFGNTSAQSGASLFPSAQSGEKKDGQATGGLFGNTASAQKTPTISTQPAVSGSSTPSLFGAAGQTAKPMGNLFGAKPADSPAVSSPSLFGAKPAEAVKPTNTMSNSATTSLFGQTASKPAEAAKPTTSLFGGAQAQATPSTTSSASPLTQTSTAPAASSSAATPAASTGTPSMFSNLNKPATTTSEAPKAQPSSLFSGLGQSATTSAPAEPAKPAGSLFGATTPASSATPASTTAAAPSTVATATATTSSAPAAAGSLFGAAASKPAAASDPAAPKAAPAQNTSLGASTTGPTSSMARLKNKTMDEILNRWAGDLSKYQKDFKEQAAQVAAWDRLLVDNGEKIQKLYLNTFEAEKASREVERHLVTVESQQEELESWLDKYEVEVDALFSKQIGPGEQLGGPDQERERTYRMAEKITERLDVMGRDLTTMIKDINDISGSVSKGSKPDDPLSQIVRVLNGHLTQLQWIDTNAAALQAKVAAAQKASSQIGNQYGGPEQDNVDSFYRSYMGRR

SEQ ID NO: 31574 - DNA, 3628 bp, Muscodor strobelii
  misc_feature: SGI EST ID NO. CUFF.75056.2
  misc_feature: Variant of the nucleotide sequence at SEQ ID NO 31572
ggccaaggaggtgtcgggccagcgaacagcttgtttctttttgcaacatcgcggcaaggctattgactctaccatccctagcatctcggcagcttctctaggtgcttttcaataaggagaagaacaccaacgacccaatccgcgacgaattgggacaagagcgcagctcccgtcgccgctgtcgttgctgccctgccgacggcctgcagcaccacatcacattccaccgacccaggcgcagacgcgacctcgctcattccagccccagcccggcagcgacacacaaacagatcgccatcatgtctctgttcggaaccccgagctcggggcaggccaccaccaatgccaccacctcgagcgcccctgctgccggcggcctgtttggctcgaccaccacgccctcctcctcctccaacctcttcggcgcccagtccagcggcaccccttcattctctttcggcggtgccaacagcgctagcacgcccacctccactgctccatccgctgccctcttcggtaacactgcgtccaagcccgccgaccagaagccactctttggcgcagccgctaccaccgcctcggcttcgtccaccgcgactcccacagctggcgccggcggcggtcttttcggtggcgcgtctcagccatctgctagctccaatatgttcggagccgcgagcaaaccggcatctactggcggcagcttgttcggcaatcccgcctctacacagccctccactacgcccagcacaaccccgaacacaagtttcacaggcggtggtctcttcgcctctcagaacaacaagacaactcccgcttctactcaagccccggcgaccaaacccggagggctcttcggcggaagcagcgctactactggtccttcgctattcggcggtgccaataatccttcgactaccccagctaagcccatgttcctgaactcgacaacgccggccggcgctcctccgtcggaagcaccaaagcctgcgggtggctcgaatctctttggcaacaccagcgcgcagagcggggcttccctatttccatcggctcagtcaggcgagaagaaagacgggcaggctactggcggcctgtttggaaacacggccagtgcgcaaaagactcccactatttcaacccagcccgcagtgtcaggatcatcgacgccctcgctctttggcgccgctggccagaccgccaaaccgatgggaaatctctttggtgcgaagcctgcagattctccagccgtttcatccccgtctctcttcggtgctaagccagctgaggctgtcaagcccacaaataccatgtctaactcagctaccacatctctgtttggacagacggcatccaagccggccgaggcagcaaagccaaccacttctcttttcggtggcgctcaggcgcaggccacgccttcaacgaccagcagcgcctcaccactcacacaaaccagcacggctccggcggcgagtagttcggcagctactccagctgcaagcacaggtaccccttcgatgtttagtaacctgaacaagccagctacaactacctctgaagctcccaaggcgcagccaagctcgttattctctggtttgggacaatctgcaacaaccagtgctcccgccgaacctgctaaaccagccggtagcctgttcggcgctacaactccagcatcatctgcgacccctgcttccaccacggcagccgccccgagcacagtagctacagcgactgccactacatctagtgcacctgcggcggcaggctcgctttttggcgctgctgcgtccaaacctgctgctgcatcggacccagctgcaccaaaagctgcaccagcccagaacaccagtctgggtgcatccaccactggccccacttcgtccatggcacgtctgaagaataagactatggatgagatcctgaaccgttgggcgggtgatctgagcaagtaccaaaaagacttcaaggagcaagctgctcaggtggctgcttgggaccgacttcttgtggacaatggcgagaagatccagaagctgtatctcaataccttcgaagccgagaaggctagtcgtgaggtagagcgccatctcgtgaccgtagagagccagcaggaagaattggagtcatggctagataagtacgaggtcgaagtagatgctctattttccaaacagattggacccggcgaacagctgggtggccctgaccaggagcgcgagcggacctaccgcatggctgagaagatcacggagcgcctcgatgtcatgggcagagacctgacgaccatgatcaaggatatcaacgacatttcgggatctgtgagcaagggcagcaaacccgacgacccgttgagccaaattgtgcgtgtccttaatggacaccttacacagctccaatggatcgataccaatgccgcagccctgcaagctaaggtcgcagccgcgcagaaggcaagcagtcagatcggcaaccagtacggtggcccggagcaggacaatgtggacagcttctatcggtcctacatgggaaggagataatgggtttacgacgctagagaaaacaactttgtacattccggagatatttcactcacacatgccgagggagaaatgcattgcgacctgatacatattgagtagtaggcagtgcggagaaacccggtatcggcatagcatgttgtgtatatcaagctgttaccagcacgttttgcaaggcaagattgcgagagcgaggcaggtcacggaaagcgtaagaactgaaagctgagagaagacttgggttgcttaagatttcggagtacaatgcacgataggtgcagcaattgtatgtgtacactatgccttaacataaaagaccttggatgggcacacaagagaatggatcgtaatcacagctcttgctccatccgctcgtcatgattccgtttgagatgtagatttccataccgcgatgactaaaagctatcctgatatttagttgtgctcgccgccctggctcttggtgagctcatcgctacgggagaatagtggttagtttcttggtttacctcagctgcgtttcgaggggaggcttacatgtggtcggacagcttcttgaggtgctcctgctgctcgcccagcttccttttgagctccttgagcttggccatctcgcgctgacgaatctcgtagtcctcgttggccttctcgcgcttgtggaaggcgtcgccggtgccgcccgtcttcgggggtgcaccagtgtcgccggctgccatggctctgagggtcgtcgagaaggtgcggcgggtgatgggggtcgcgatgaagcgggtggtcttggtgagtgcttgacgcatttttggagctggagaggttggataccgtggtcagtggattgaggtgagttgatataagctttgctcttgtttgaggtggatggcgtttgtgtgttggtgtggagggggagacgttgattggtccgaggtcgatgatatagggggatatgggataggatcttgtccttcttacatacctttagagtggtgtgtttgttgcggacgcgaggagaggtgtggtgtggtgtggttggaatgtgatgtggtatgacgcagctggagctggttggaagatttgaggtacttatc

SEQ ID NO: 31575 - DNA, 1554 bp, Muscodor strobelii
  misc_feature: SGI cDNA ID NO. 570872
  misc_feature: Encodes the peptide sequence at SEQ ID NO 31576
atggcaggcgaacgacggtcatctaccgccagtctggaggctccagcgaggacaggcgtcgaagatcccggtgcccatgaactggagtcctctgattccgatgatcatttctccgatgcccagtcaggtcccgaaaccagccaaagagctacttctccaattcctcggacccgagtcgagaaggtagacgacgagccatcgtatggcgaagtcccggggactcaggcatatgataagaggacccaggatgctgcgcccgacgagatcgctatccaggagggccaccggagcagatctgcatcgactgcgtctgcatcacccataacccacattcccaagacggtcgtggacgagaccgaggacgtgcctggatcctcgacccacaactttcacgcccatctccacgaggccgatgctacacctgacatgattcgaaagccagatggcaccgccgaagccaacgccatcccctctccgccagatcccgccgcgcaaaacaccgatgatgcggctgtagatcaggtctcacagtcctcatcgacagacagtcctagggaattttcacaggcgatcccacctataaaagttgacgacgaggacatgattgacgatgatgacgaaaacggcgaggatgccgactttggtgatgactttgacgacttcgaggagggcgacgaagatgcggattttggcgattttgacgatgggtttcagcaggccgatgcgcctccaaccgttcactcgctagcaaaccagtctcaagtttcagtaccttcatttgtgtgttcagtgcccttcttagatagtccaagttccagaatgctgaccttcatgtgctcaaagccaatactagatctggacggtctagacgccgaagacattctatctgcctcagaaccctacttagatgctttatacccacccgaaatcctagaaattccacctctacctgctccgcccaacgacaaccccattttcttcaacccaaggagtgcgtcattatggtcacaattggccgctccgcctcctctccagccccctgactggattcggtctcgtatcagaagacttttcctcgtatcgcttggtgtacctgtcgacttggacgaaatcttgcctgcttcaaagcaaaagaaactcgtgcttccatccctgaaccgcgtcacatccaacggttccttgcgtacgtcaacagactcgcgttccgtttctcggctacgaaagcaagacgtaaacggctcgaccgtgtcccttgattctcaggggaaggagaaacccagctcaaactcgaaaaaacgcaagaacccctcacaaatcccagagttcgacttagtcgctgcaaaacagctgtgtgcaactacagacgaagcattgaaaggcatgactgatatagagcttcaacaacacgtaaaaaagctgaaggagatggaggttgtggcaaatgaggtccacgagttctggaagaaacgaactgacgagaaaatcggcgaccgggaggcttttgaaggtgttatagaaaaccttgtgaaacacgctcggaaaacgagaaaatga

SEQ ID NO: 31576 - protein, 517 aa, Muscodor strobelii
  misc_feature: SGI Peptide ID NO. 570872
  misc_feature (277)..(517): NCBI GI: 39951897 Blast Desc: MGG_01591 [Magnaporthe grisea 70-15] gi|145020564|gb|EDK04693.1| MGG_01591 [Magnaporthe grisea 70-15]
  misc_feature (12)..(517): NCBI GI: 226280765 Blast Desc: conserved [Paracoccidioides brasiliensis Pb01]
  misc_feature (15)..(516): NCBI GI: 258576089 Blast Desc: [Uncinocarpus reesii 1704] gi|237902492|gb|EEP76893.1| [Uncinocarpus reesii 1704]
  misc_feature (236)..(517): NCBI GI: 261356376 Blast Desc: conserved [Verticillium albo-atrum VaMs.102]
  misc_feature (12)..(517): NCBI GI: 238499657 Blast Desc: conserved [Aspergillus flavus NRRL3357] gi|220692816|gb|EED49162.1| conserved [Aspergillus flavus NRRL3357]
  misc_feature (12)..(517): NCBI GI: 240279531 Blast Desc: conserved [Ajellomyces capsulatus H143]
  misc_feature (8)..(517): NCBI GI: 255942915 Blast Desc: Pc18g03900 [Penicillium chrysogenum Wisconsin 54-1255] gi|211586959|emb|CAP94614.1| Pc18g03900 [Penicillium chrysogenum Wisconsin 54-1255]
  misc_feature (282)..(517): NCBI GI: 46124933 Blast Desc: FG06844.1 [Gibberella zeae PH-1]
  misc_feature (4)..(514): NCBI GI: 239609649 Blast Desc: conserved [Ajellomyces dermatitidis ER-3]
  misc_feature (12)..(517): NCBI GI: 225562720 Blast Desc: conserved [Ajellomyces capsulatus G186AR]
MAGERRSSTASLEAPARTGVEDPGAHELESSDSDDHFSDAQSGPETSQRATSPIPRTRVEKVDDEPSYGEVPGTQAYDKRTQDAAPDEIAIQEGHRSRSASTASASPITHIPKTVVDETEDVPGSSTHNFHAHLHEADATPDMIRKPDGTAEANAIPSPPDPAAQNTDDAAVDQVSQSSSTDSPREFSQAIPPIKVDDEDMIDDDDENGEDADFGDDFDDFEEGDEDADFGDFDDGFQQADAPPTVHSLANQSQVSVPSFVCSVPFLDSPSSRMLTFMCSKPILDLDGLDAEDILSASEPYLDALYPPEILEIPPLPAPPNDNPIFFNPRSASLWSQLAAPPPLQPPDWIRSRIRRLFLVSLGVPVDLDEILPASKQKKLVLPSLNRVTSNGSLRTSTDSRSVSRLRKQDVNGSTVSLDSQGKEKPSSNSKKRKNPSQIPEFDLVAAKQLCATTDEALKGMTDIELQQHVKKLKEMEVVANEVHEFWKKRTDEKIGDREAFEGVIENLVKHARKTRK

SEQ ID NO: 31577 - DNA, 1980 bp, Muscodor strobelii
  misc_feature: SGI EST ID NO. CUFF.74740.0
  misc_feature: Variant of the nucleotide sequence at SEQ ID NO 31575
gtccgatcccctaaccatactttcgattcccatcttcaaagaccaagcctcaagggagcagagcggccgcctcttttgacttttttcaagattgctactccgtatattccttctaatctcttcatctggccttgcccaacgcacttctaggtgcctgaccgagatcatctagcacgtatattctaccgatatatctctactgcctgctcggtcttgaccccggtgaatctacggcaacgtgccattccgaacttcactcgtttccaagtccagacacgaaaatggcaggcgaacgacggtcatctaccgccagtctggaggctccagcgaggacaggcgtcgaagatcccggtgcccatgaactggagtcctctgattccgatgatcatttctccgatgcccagtcaggtcccgaaaccagccaaagagctacttctccaattcctcggacccgagtcgagaaggtagacgacgagccatcgtatggcgaagtcccggggactcaggcatatgataagaggacccaggatgctgcgcccgacgagatcgctatccaggagggccaccggagcagatctgcatcgactgcgtctgcatcacccataacccacattcccaagacggtcgtggacgagaccgaggacgtgcctggatcctcgacccacaactttcacgcccatctccacgaggccgatgctacacctgacatgattcgaaagccagatggcaccgccgaagccaacgccatcccctctccgccagatcccgccgcgcaaaacaccggtacgacagccaagcccttctagatccgcaatgcgattgaccgtgcctcgtagatgatgcggctgtagatcaggtctcacagtcctcatcgacagacagtcctagggaattttcacaggcgatcccacctataaaagttgacgacgaggacatgattgacgatgatgacgaaaacggcgaggatgccgactttggtgatgactttgacgacttcgaggagggcgacgaagatgcggattttggcgattttgacgatgggtttcagcaggccgatgcgcctccaaccgttcactcgctagcaaaccagtctcaagtttcagtaccttcatttgtgtgttcagtgcccttcttagatagtccaagttccagaatgctgaccttcatgtgctcaaagccaatactagatctggacggtctagacgccgaagacattctatctgcctcagaaccctacttagatgctttatacccacccgaaatcctagaaattccacctctacctgctccgcccaacgacaaccccattttcttcaacccaaggagtgcgtcattatggtcacaattggccgctccgcctcctctccagccccctgactggattcggtctcgtatcagaagacttttcctcgtatcgcttggtgtacctgtcgacttggacgaaatcttgcctgcttcaaagcaaaagaaactcgtgcttccatccctgaaccgcgtcacatccaacggttccttgcgtacgtcaacagactcgcgttccgtttctcggctacgaaagcaagacgtaaacggctcgaccgtgtcccttgattctcaggggaaggagaaacccagctcaaactcgaaaaaacgcaagaacccctcacaaatcccagagttcgacttagtcgctgcaaaacagctgtgtgcaactacagacgaagcattgaaaggcatgactgatatagagcttcaacaacacgtaaaaaagctgaaggagatggaggttgtggcaaatgaggtccacgagttctggaagaaacgaactgacgagaaaatcggcgaccgggaggcttttgaaggtgttatagaaaaccttgtgaaacacgctcggaaaacgagaaaatgaggtgcacgtcccaaacacttaatcaaaaatattatgatagtctctgctacgtacctaatgacaatataataatacctgagaaaagaagccat

SEQ ID NO: 31578 - DNA, 1491 bp, Muscodor strobelii
  misc_feature: SGI cDNA ID NO. 570873
  misc_feature: Encodes the peptide sequence at SEQ ID NO 31579
atggcaggcgaacgacggtcatctaccgccagtctggaggctccagcgaggacaggcgtcgaagatcccggtgcccatgaactggagtcctctgattccgatgatcatttctccgatgcccagtcaggtcccgaaaccagccaaagagctacttctccaattcctcggacccgagtcgagaaggtagacgacgagccatcgtatggcgaagtcccggggactcaggcatatgataagaggacccaggatgctgcgcccgacgagatcgctatccaggagggccaccggagcagatctgcatcgactgcgtctgcatcacccataacccacattcccaagacggtcgtggacgagaccgaggacgtgcctggatcctcgacccacaactttcacgcccatctccacgaggccgatgctacacctgacatgattcgaaagccagatggcaccgccgaagccaacgccatcccctctccgccagatcccgccgcgcaaaacaccgatgatgcggctgtagatcaggtctcacagtcctcatcgacagacagtcctagggaattttcacaggcgatcccacctataaaagttgacgacgaggacatgattgacgatgatgacgaaaacggcgaggatgccgactttggtgatgactttgacgacttcgaggagggcgacgaagatgcggattttggcgattttgacgatgggtttcagcaggccgatgcgcctccaaccgttcactcgctagcaaaccagtctcaagtttcagtaccttcatttccaatactagatctggacggtctagacgccgaagacattctatctgcctcagaaccctacttagatgctttatacccacccgaaatcctagaaattccacctctacctgctccgcccaacgacaaccccattttcttcaacccaaggagtgcgtcattatggtcacaattggccgctccgcctcctctccagccccctgactggattcggtctcgtatcagaagacttttcctcgtatcgcttggtgtacctgtcgacttggacgaaatcttgcctgcttcaaagcaaaagaaactcgtgcttccatccctgaaccgcgtcacatccaacggttccttgcgtacgtcaacagactcgcgttccgtttctcggctacgaaagcaagacgtaaacggctcgaccgtgtcccttgattctcaggggaaggagaaacccagctcaaactcgaaaaaacgcaagaacccctcacaaatcccagagttcgacttagtcgctgcaaaacagctgtgtgcaactacagacgaagcattgaaaggcatgactgatatagagcttcaacaacacgtaaaaaagctgaaggagatggaggttgtggcaaatgaggtccacgagttctggaagaaacgaactgacgagaaaatcggcgaccgggaggcttttgaaggtgttatagaaaaccttgtgaaacacgctcggaaaacgagaaaatga

SEQ ID NO: 31579 - protein, 496 aa, Muscodor strobelii
  misc_feature: SGI Peptide ID NO. 570873
  misc_feature (259)..(496): NCBI GI: 39951897 Blast Desc: MGG_01591 [Magnaporthe grisea 70-15] gi|145020564|gb|EDK04693.1| MGG_01591 [Magnaporthe grisea 70-15]
  misc_feature (12)..(496): NCBI GI: 226280765 Blast Desc: conserved [Paracoccidioides brasiliensis Pb01]
  misc_feature (236)..(496): NCBI GI: 261356376 Blast Desc: conserved [Verticillium albo-atrum VaMs.102]
  misc_feature (15)..(495): NCBI GI: 258576089 Blast Desc: [Uncinocarpus reesii 1704] gi|237902492|gb|EEP76893.1| [Uncinocarpus reesii 1704]
  misc_feature (8)..(496): NCBI GI: 255942915 Blast Desc: Pc18g03900 [Penicillium chrysogenum Wisconsin 54-1255] gi|211586959|emb|CAP94614.1| Pc18g03900 [Penicillium chrysogenum Wisconsin 54-1255]
  misc_feature (12)..(496): NCBI GI: 238499657 Blast Desc: conserved [Aspergillus flavus NRRL3357] gi|220692816|gb|EED49162.1| conserved [Aspergillus flavus NRRL3357]
  misc_feature (12)..(496): NCBI GI: 240279531 Blast Desc: conserved [Ajellomyces capsulatus H143]
  misc_feature (12)..(496): NCBI GI: 225562720 Blast Desc: conserved [Ajellomyces capsulatus G186AR]
  misc_feature (254)..(496): NCBI GI: 46124933 Blast Desc: FG06844.1 [Gibberella zeae PH-1]
  misc_feature (259)..(496): NCBI GI: 171696182 Blast Desc: protein product [Podospora anserina] gi|170948333|emb|CAP60497.1| protein product [Podospora anserina]
MAGERRSSTASLEAPARTGVEDPGAHELESSDSDDHFSDAQSGPETSQRATSPIPRTRVEKVDDEPSYGEVPGTQAYDKRTQDAAPDEIAIQEGHRSRSASTASASPITHIPKTVVDETEDVPGSSTHNFHAHLHEADATPDMIRKPDGTAEANAIPSPPDPAAQNTDDAAVDQVSQSSSTDSPREFSQAIPPIKVDDEDMIDDDDENGEDADFGDDFDDFEEGDEDADFGDFDDGFQQADAPPTVHSLANQSQVSVPSFPILDLDGLDAEDILSASEPYLDALYPPEILEIPPLPAPPNDNPIFFNPRSASLWSQLAAPPPLQPPDWIRSRIRRLFLVSLGVPVDLDEILPASKQKKLVLPSLNRVTSNGSLRTSTDSRSVSRLRKQDVNGSTVSLDSQGKEKPSSNSKKRKNPSQIPEFDLVAAKQLCATTDEALKGMTDIELQQHVKKLKEMEVVANEVHEFWKKRTDEKIGDREAFEGVIENLVKHARKTRK

SEQ ID NO: 31580 - DNA, 1980 bp, Muscodor strobelii; identical to SEQ ID NO: 31577
  misc_feature: SGI EST ID NO. CUFF.74740.0
  misc_feature: Variant of the nucleotide sequence at SEQ ID NO 31578

SEQ ID NO: 31581 - DNA, 1920 bp, Muscodor strobelii
  misc_feature: SGI cDNA ID NO. 570874
  misc_feature: Reduced expression when VOC is produced
  misc_feature: Encodes the peptide sequence at SEQ ID NO 31582
atgcccgggccacgagttgtcaacggctttgtaccgaagttcattcccaaggccgaacgggaacgactagccagagaaaaagagagacaggaggagaagcgcagccagacagctacagctacggcacggaaaagaaacacccccgccaccgtcgcctccactacgaagcgcaagacaccctaccaagatgtcgaccccgagctacgagcccgctatatgggcccagagctgaaccagtcaaagttttccgcgaaaaagaaggcacggcgccacagagataaattcaactttgactgggacgcaaaggacgacaccacacaagaggaggaacaatacgagagctatgcgcctgtcatcgacgatggcggactcttggcgagataccacgatcgcgtcgaccccgaagacatgaagatcgccaggggtatcatcgctggcgataaagaccccgtcagtgggaaggagcgggctcgagacttccttgaaggcagggtgcgggcgaagcagagagctgaccgagacaccttcgggaagcactggtctgagaaggagctcggcgagatgcgcgaacgcgactggcgtatcttcaaggaggactttgccatcaccaccaaaggcggtctcctgccgaaccccatgcgaaactggaaagaatcaggcttacctcgccgcctgctcgacatcgtcgccaaggtcggctacgacaaaccccatcctgtccagcaagctgcgattcccattgccctccagaacagagatcttattggcgtcgctgtcactggttcgggcaaaactgccgcgttcttgttgccgctattagtctacatctcagaactgccgccgttggatgagtttaccaagaacgatggcccgtattctctaatcattgcccccacccgtgaactggtacaacagatcgaaacggaggccaagaagtttgcagagccgctgggtttcacagtcgtcagcattgtcggtggtcacgcgatagaggaacaagcctaccagctcagaaacggtgccgagatcatagtcgccactcctggccgtctggtcgattgtatcgaaagacgtgtccttgtcctgtctcagtgctgctatatcatcatggacgaagctgaccggatgattgacatgggtttcgaagagcctgtcaacaaaattctcgatgcccttccggtgacgaacgaaaagcctgatacagatgccgcggaaaacgcgcagctcatgagccgacacctaggtgggaaggatcgctacaggcagacgatgatgtacacagctacgatgcctccagctgttgagaaaattgcgaagaagtacctgagaagaccggcaactgtcaccatcggcaatgctggcgaggccgtcgagacggttgagcagcgggtcgagtttgtctctggcgaagatcgccgcaagaaacgcctgcaggatatcctcacatcgggagagtttgccgcgcctatcatagtgttcgtcaacatcaagaacaactgtgatgctgtcgctcgcgagatcaagagaatgggcttctcaaccgccacactgcacggtagcaaaacgcaggagcagcgtgaagcatcacttaagtccgtgctcaacggacaaaccgaagtcctcgttgctaccgatctagcaggtcgtggtattgatgtaccggatgtttctctagtcgtcaattttaacatggcacccagcatcgagagctacacccatcgtatcggtcgtacaggtcgtgcgggaaagagcggtgttgccatcaccttccttggtaatgaagatacggctgtaatgtatgatcttcggcaaatgctgtccaagagcaagatctcgaaagtgcccgaagaattgcgtgcacacgaagcctcacaacagaagtataacaagggtataatgggcaagaagatagagacttaa

SEQ ID NO: 31582 - protein, 639 aa, Muscodor strobelii
  misc_feature: SGI Peptide ID NO. 570874
  misc_feature (238)..(437): Pfam Id: PF00270 Pfam Desc: DEAD/DEAH box helicase
  misc_feature (506)..(582): Pfam Id: PF00271 Pfam Desc: Helicase conserved C-terminal domain
  misc_feature (12)..(638): NCBI GI: 156057349 Blast Desc: SS1G_04405 [Sclerotinia sclerotiorum 1980] gi|160419160|sp|A7EGG4.1|PRP28_SCLS1 RecName: Full=Pre-mRNA-splicing ATP-dependent RNA helicase prp28 1980]
  misc_feature (67)..(638): NCBI GI: 116181632 Blast Desc: CHGG_01444 [Chaetomium globosum CBS 148.51] gi|118597484|sp|Q2HEB0.1|PRP28_CHAGB RecName: Full=Pre-mRNA-splicing ATP-dependent RNA helicase PRP28 globosum
  misc_feature (67)..(638): NCBI GI: 85113073 Blast Desc: NCU02803 [Neurospora crassa OR74A] gi|74654326|sp|Q7SEL0.1|PRP28_NEUCR RecName: Full=Pre-mRNA-splicing ATP-dependent RNA helicase prp-28 NCU02803
  misc_feature (67)..(638): NCBI GI: 171696192 Blast Desc: protein product [Podospora anserina] gi|170948338|emb|CAP60502.1| protein product [Podospora anserina]
  misc_feature (68)..(631): NCBI GI: 46124943 Blast Desc: FG06849.1 [Gibberella zeae PH-1] gi|91207408|sp|Q4I7F9.1|PRP28_GIBZE RecName: Full=Pre-mRNA-splicing ATP-dependent RNA helicase PRP28
  misc_feature (12)..(634): NCBI GI: 256732663 Blast Desc: [Nectria haematococca mpVI 77-13-4]
  misc_feature (12)..(638): NCBI GI: 240282011 Blast Desc: pre-mRNA-splicing ATP-dependent RNA helicase PRP28 [Ajellomyces capsulatus H143]
  misc_feature (56)..(638): NCBI GI: 225559088 Blast Desc: pre-mRNA-splicing ATP-dependent RNA helicase PRP28 [Ajellomyces capsulatus G186AR]
  misc_feature (49)..(614): NCBI GI: 154324248 Blast Desc: BC1G_00523 [Botryotinia fuckeliana B05.10] gi|160419159|sp|A6RJA2.1|PRP28_BOTFB RecName: Full=Pre-mRNA-splicing ATP-dependent RNA helicase prp28 B05.10]
  misc_feature (48)..(638): NCBI GI: 226286149 Blast Desc: pre-mRNA-splicing ATP-dependent RNA helicase PRP28 [Paracoccidioides brasiliensis Pb01]
  misc_feature: Useful for introducing or modulating the production of volatile compounds
MPGPRVVNGFVPKFIPKAERERLAREKERQEEKRSQTATATARKRNTPATVASTTKRKTPYQDVDPELRARYMGPELNQSKFSAKKKARRHRDKFNFDWDAKDDTTQEEEQYESYAPVIDDGGLLARYHDRVDPEDMKIARGIIAGDKDPVSGKERARDFLEGRVRAKQRADRDTFGKHWSEKELGEMRERDWRIFKEDFAITTKGGLLPNPMRNWKESGLPRRLLDIVAKVGYDKPHPVQQAAIPIALQNRDLIGVAVTGSGKTAAFLLPLLVYISELPPLDEFTKNDGPYSLIIAPTRELVQQIETEAKKFAEPLGFTVVSIVGGHAIEEQAYQLRNGAEIIVATPGRLVDCIERRVLVLSQCCYIIMDEADRMIDMGFEEPVNKILDALPVTNEKPDTDAAENAQLMSRHLGGKDRYRQTMMYTATMPPAVEKIAKKYLRRPATVTIGNAGEAVETVEQRVEFVSGEDRRKKRLQDILTSGEFAAPIIVFVNIKNNCDAVAREIKRMGFSTATLHGSKTQEQREASLKSVLNGQTEVLVATDLAGRGIDVPDVSLVVNFNMAPSIESYTHRIGRTGRAGKSGVAITFLGNEDTAVMYDLRQMLSKSKISKVPEELRAHEASQQKYNKGIMGKKIET

SEQ ID NO: 31583 - DNA, 2667 bp, Muscodor strobelii
  misc_feature: SGI cDNA ID NO. 570875
  misc_feature: Encodes the peptide sequence at SEQ ID NO 31584
atgtgcagacttgctggtgaatcagagcatttcggcggtgccagcccggaccctaaccagggacgggagttgctgcctactaacgtcatccccaaacattacgatgtcactctcgagcccgatttcaagaaattcaccttcgatggcaaggtcttaatcgactttgatgttcaagaggaaacacgatctatctctcttcacactatcgagatcgacattcacagcgctcacatcaagtcgggagatgctattgtcacctcgtcttctgccgtcacctacgatgaatctacccaagtttccaagattgagctcaagaatgccattcccaagggaaaggctcaactcgaggtcaaatacacgggtcagctgaacgactccatggctggtttctaccgatccacatacaagaagcccgatggttcagaaggcattcttgccaccacccagatggaggccaatgactgccgcagagctttcccgtgttttgatgagcctctacacaaagcgaaatttactgtaacgctcatcgccgacaagcacctcacatgcttgagcaacatggatgtggcttccgagactgatgttcattctgagatgagcggaacaactaaaaaggcagtgaaattcaaccctactccgctcatgtctacgtaccttgtcgccttcatcattggtgagctcgagtacattgagaccaagaagttccgtgtaccaatccgagtttacgctcccgccagctcagacatcgaacatggccgcttctccctggagctcgcagcccggactttagaatactacgagaagatcttcggggaggatttccctttgccgaagatggacatggttgctattccggattttgctgcgggcgccatggaaaactggggtctaatcacgtatcgtgtcgtagatcttatgctggacgaaaaggccagtggtgcggcgatgaaagagcgagtcgccgaggtagtacaacacgagcttgcacatcagtggttcggaaatctggtcactatggattggtgggaaggtttgtggttgaacgaaggcttcgctactcttatgagctggcttagctgcaatcacttctaccctgagtggaaagtctgggagaactatgttgcggataatctccaaagcgcactcggacttgactcgctgcgaagcagtcatcccattgaagtacctgtcaaacgtgcgagcgaagtagatcagatctttgacgcaatttcttactcgaaagggtcttgtgtattgcgcatgatctcaacttacttgggcgaagacgttttccttgagggtgtccgacggtacattcaaaagcacaaatatggcaacactcagaccaacgatctctgggccgcgctcgaggatgcaagcggaaaacctgttcgggagattatgtcgatatggacgaagaacgtcggcttcccggtagtccaggtcaccgaagatgccagcaacagctctattcatgtcaagcaaaatcgattcctgagaaccggcgacacgaaacctgacgaggacaaggttctataccctgtcttcctaggcctccgaacggagagcggaattgacgagactgtgacattgtcagaaagaaagggcaactttaaggtgcccagcttggacttcttcaagctcaacgcaaaccacacaagcatataccgaacctcgtatacccctgagcgtcttgctaaactaggccaatctgctaaagaaggaaagctaacggtcgaggatcgtgccggtatgattgctgatgctggcgcacttgcaacttcaggataccagaagacatccggagtgcttaatctcttgaaaggtttcgatacggaggagtctttcgtcgtctggagtgaaatcatcgctagagtcgctacagtccagtcggcttggatatttgaggacaaggcagtcaaggatggtctcgaggcctttgtcaaggaattgataagcgagagagctcataagcttggctggaagttttcggacagtgacggacatgttgagcaacaattcaaggccatgctattcggagctgccggtatggcaggtgacaaagaaatcatcgctgccgctaaagacatgtttgcaaactacaagggtggtgacaaatccgctgtgcatcccaatattcgaggcagcgtctttagtatggctcttaaatatggcggaaaggaagagtacaacgctatcctagaaatcttccgagagtccacaaacagcgacgagcgcaacactgcattgcgctgtatcggccgggctaaagatcccgaactaattcagcaaacccttgacatgattctcagcactgaggtcaagagtcaagatctatatctcccagcaagcggtctccgtagccacgctgaaggcgtcgaagctttgttcgcttggctgacgagcaactggaccgagatctacaagcgcctcagcggcaacccccctatcttgggctcaatggttaccatctgcacatcaagcttcgcgaaaccagaacagcttgagaaagtagagaatttcttcaaggacatcgataccaaagcattcgatcaatcattggctcaaagtaaggatgctattcgcagtaagattgcttggctccagcgggatcgcgatgacgtcgcaaactgggtgaaggagaatgtgtccaaggccaacttataa

SEQ ID NO: 31584 - protein, 888 aa, Muscodor strobelii
  misc_feature: SGI Peptide ID NO. 570875
  misc_feature (25)..(415): Pfam Id: PF01433 Pfam Desc: Peptidase family M1
  misc_feature (1)..(882): NCBI GI: 212540596 Blast Desc: aminopeptidase [Penicillium marneffei ATCC 18224] gi|210067752|gb|EEA21844.1| aminopeptidase [Penicillium marneffei ATCC 18224]
  misc_feature (12)..(882): NCBI GI: 115397799 Blast Desc: aminopeptidase 2 [Aspergillus terreus NIH2624] gi|114192682|gb|EAU34382.1| aminopeptidase 2 [Aspergillus terreus NIH2624]
  misc_feature (21)..(880): NCBI GI: 67522362 Blast Desc: AN1638.2 [Aspergillus nidulans FGSC A4] gi|40745602|gb|EAA64758.1| AN1638.2 [Aspergillus nidulans FGSC A4] gi|259486974|tpe|CBF85271.1| TPA: similar to aminopeptidase
  misc_feature (1)..(882): NCBI GI: 242801323 Blast Desc: aminopeptidase [Talaromyces stipitatus ATCC 10500] gi|218717085|gb|EED16506.1| aminopeptidase [Talaromyces stipitatus ATCC 10500]
  misc_feature (20)..(882): NCBI GI: 255942833 Blast Desc: Pc18g03470 [Penicillium chrysogenum Wisconsin 54-1255] gi|211586918|emb|CAP94571.1| Pc18g03470 [Penicillium chrysogenum Wisconsin 54-1255]
  misc_feature (21)..(882): NCBI GI: 239614346 Blast Desc: aminopeptidase [Ajellomyces dermatitidis ER-3]
  misc_feature (21)..(882): NCBI GI: 261204205 Blast Desc: aminopeptidase 2 [Ajellomyces dermatitidis SLH14081] gi|239587101|gb|EEQ69744.1| aminopeptidase 2 [Ajellomyces dermatitidis SLH14081]
  misc_feature (21)..(888): NCBI GI: 14018320 Blast Desc: aminopeptidase [Aspergillus niger]
  misc_feature (1)..(882): NCBI GI: 225559087 Blast Desc: aminopeptidase [Ajellomyces capsulatus G186AR]
  misc_feature (1)..(882): NCBI GI: 240104738 Blast Desc: aminopeptidase, [Coccidioides posadasii C735 delta SOWgp]
  misc_feature (25)..(878): SWISSPROT Homolog: EC 3.4.11.7 Glutamyl aminopeptidase
MCRLAGESEHFGGASPDPNQGRELLPTNVIPKHYDVTLEPDFKKFTFDGKVLIDFDVQEETRSISLHTIEIDIHSAHIKSGDAIVTSSSAVTYDESTQVSKIELKNAIPKGKAQLEVKYTGQLNDSMAGFYRSTYKKPDGSEGILATTQMEANDCRRAFPCFDEPLHKAKFTVTLIADKHLTCLSNMDVASETDVHSEMSGTTKKAVKFNPTPLMSTYLVAFIIGELEYIETKKFRVPIRVYAPASSDIEHGRFSLELAARTLEYYEKIFGEDFPLPKMDMVAIPDFAAGAMENWGLITYRVVDLMLDEKASGAAMKERVAEVVQHELAHQWFGNLVTMDWWEGLWLNEGFATLMSWLSCNHFYPEWKVWENYVADNLQSALGLDSLRSSHPIEVPVKRASEVDQIFDAISYSKGSCVLRMISTYLGEDVFLEGVRRYIQKHKYGNTQTNDLWAALEDASGKPVREIMSIWTKNVGFPVVQVTEDASNSSIHVKQNRFLRTGDTKPDEDKVLYPVFLGLRTESGIDETVTLSERKGNFKVPSLDFFKLNANHTSIYRTSYTPERLAKLGQSAKEGKLTVEDRAGMIADAGALATSGYQKTSGVLNLLKGFDTEESFVVWSEIIARVATVQSAWIFEDKAVKDGLEAFVKELISERAHKLGWKFSDSDGHVEQQFKAMLFGAAGMAGDKEIIAAAKDMFANYKGGDKSAVHPNIRGSVFSMALKYGGKEEYNAILEIFRESTNSDERNTALRCIGRAKDPELIQQTLDMILSTEVKSQDLYLPASGLRSHAEGVEALFAWLTSNWTEIYKRLSGNPPILGSMVTICTSSFAKPEQLEKVENFFKDIDTKAFDQSLAQSKDAIRSKIAWLQRDRDDVANWVKENVSKANL

SEQ ID NO: 31585 - DNA, 3645 bp, Muscodor strobelii
  misc_feature: SGI EST ID NO. CUFF.74767.0
  misc_feature: Variant of the nucleotide sequence at SEQ ID NO 31583
ctagactcgaccgggttggcggatccagattggcgtccattcaaaatctctgcggtctggcgatctgaaaaaccgctgtaaacacgacatgaatttgcaagacaatccgaacggaatctacctctcgtgctacccgcgctgaatccgtcccccgaagtaatacgccgcccctccctcatccccatcccatcctaatccgtacctagtagcgtattggacctgtcatccacagctcatgcatccttttatgacgaattagcttccgtctcgaactgcccctcattgctacccctctattgtgtacctaccctaactgtaatattgtgtacattgttcttgccgttcccgtagcgagcatcgtgcatccctacctcagtcgtgtattattagctccgtgtatatccttctccttcctcaagtgtacatatgttgcttcggtgccttccccgtctcgagtgtgttcctcggacgtctagattcaccaacagagttcgcttgcgacagagcagtccgagacatcgttgtctggatctccaccctccatcaccatctcgtctgttctgctcgagtctgaatcccgcggcgcagtctgtctcatcgacccctagctcgaatcccatttctcgacagacgttccccatctcctcgcctacgtctctacgaaccatctctaccgattcattcctcaggtctgatcggttgcctgtctccctccccaccacttccgtccgacattgttcctataggagacacaacatgtgcagacttgctggtgaatcagagcatttcggcggtgccagcccggaccctaaccagggacgggagttgctgcctactaacgtcatccccaaacattacgatgtcactctcgagcccgatttcaagaaattcaccttcgatggcaaggtcttaatcgactttgatgttcaagaggaaacacgatctatctctcttcacactatcgagatcgacattcacagcgctcacatcaagtcgggagatgctattgtcacctcgtcttctgccgtcacctacgatgaatctacccaagtttccaagattgagctcaagaatgccattcccaagggaaaggctcaactcgaggtcaaatacacgggtcagctgaacgactccatggctggtttctaccgatccacatacaagaagcccgatggttcagaaggcattcttgccaccacccagatggaggccaatgactgccgcagagctttcccgtgttttgatgagcctctacacaaagcgaaatttactgtaacgctcatcgccgacaagcacctcacatgcttgagcaacatggatgtggcttccgagactgatgttcattctgagatgagcggaacaactaaaaaggcagtgaaattcaaccctactccgctcatgtctacgtaccttgtcgccttcatcattggtgagctcgagtacattgagaccaagaagttccgtgtaccaatccgagtttacgctcccgccagctcagacatcgaacatggccgcttctccctggagctcgcagcccggactttagaatactacgagaagatcttcggggaggatttccctttgccgaagatggacatggttgctattccggattttgctgcgggcgccatggaaaactggggtctaatcacgtatcgtgtcgtagatcttatgctggacgaaaaggccagtggtgcggcgatgaaagagcgagtcgccgaggtagtacaacacgagcttgcacatcagtggttcggaaatctggtcactatggattggtgggaaggtttgtggttgaacgaaggcttcgctactcttatgagctggcttagctgcaatcacttctaccctgagtggaaagtctgggagaactatgttgcggataatctccaaagcgcactcggacttgactcgctgcgaagcagtcatcccattgaagtacctgtcaaacgtgcgagcgaagtagatcagatctttgacgcaatttcttactcgaaagggtcttgtgtattgcgcatgatctcaacttacttgggcgaagacgttttccttgagggtgtccgacggtacattcaaaagcacaaatatggcaacactcagaccaacgatctctgggccgcgctcgaggatgcaagcggaaaacctgttcgggagattatgtcgatatggacgaagaacgtcggcttcccggtagtccaggtcaccgaagatgccagcaacagctctattcatgtcaagcaaaatcgattcctgagaaccggcgacacgaaacctgacgaggacaaggttctataccctgtcttcctaggcctccgaacggagagcggaattgacgagactgtgacattgtcagaaagaaagggcaactttaaggtgcccagcttggacttcttcaagctcaacgcaaaccacacaagcatataccgaacctcgtatacccctgagcgtcttgctaaactaggccaatctgctaaagaaggaaagctaacggtcgaggatcgtgccggtatgattgctgatgctggcgcacttgcaacttcaggataccagaagacatccggagtgcttaatctcttgaaaggtttcgatacggaggagtctttcgtcgtctggagtgaaatcatcgctagagtcgctacagtccagtcggcttggatatttgaggacaaggcagtcaaggatggtctcgaggcctttgtcaaggaattgataagcgagagagctcataagcttggctggaagttttcggacagtgacggacatgttgagcaacaattcaaggccatgctattcggagctgccggtatggcaggtgacaaagaaatcatcgctgccgctaaagacatgtttgcaaactacaagggtggtgacaaatccgctgtgcatcccaatattcgaggcagcgtctttagtatggctcttaaatatggcggaaaggaagagtacaacgctatcctagaaatcttccgagagtccacaaacagcgacgagcgcaacactgcattgcgctgtatcggccgggctaaagatcccgaactaattcagcaaacccttgacatgattctcagcactgaggtcaagagtcaagatctatatctcccagcaagcggtctccgtagccacgctgaaggcgtcgaagctttgttcgcttggctgacgagcaactggaccgagatctacaagcgcctcagcggcaacccccctatcttgggctcaatggttaccatctgcacatcaagcttcgcgaaaccagaacagcttgagaaagtagagaatttcttcaaggacatcgataccaaagcattcgatcaatcattggctcaaagtaaggatgctattcgcagtaagattgcttggctccagcgggatcgcgatgacgtcgcaaactgggtgaaggagaatgtgtccaaggccaacttataacctggcttttcgatgcagtgatgtgttagaagctagaggactatggcggaaatgaatgggttacattaaccctgcccgtatctacagctgtatgcaaaatcgcccctctaagcaacaactcataggtgatgagcaagtatataacgaaatggcttgtcctttatgacactccagaccattccatagccaataataaacagaaaaagttctggaaatattcgc

SEQ ID NO: 31586 - DNA, 1395 bp, Muscodor strobelii
  misc_feature: SGI cDNA ID NO. 570876
  misc_feature: Encodes the peptide sequence at SEQ ID NO 31587
atggtcggggtccccgggcgttccaagggctgttcaacctgccgccggaggaaaaagggttgcgaccgggcgcgtcctgtctgtggccaatgctctactgcgggggttgaatgtggcggttacgagcgagagagaatcttcctcaatcacaatcaaggcacagagtcaagctccgctctgatatcctatcgcaaaacctcaagctcaccaccactcgtccagtccgagactcttctgaagtctgcctatgtcgaattatgtatctccacttttctcaataagtatttacctgcctacggccacgtgtcagtacggtcaagttcaacagctgcccatgattttgttgaaattgctcatcaactacatacatcagacaagggaattcagcaagggttgctgagtttgagcttatgtgcccaagggcagaaaaataacgggttccaagcctatggtcgcgctctcagtagattaaacgcgacactgtgtagtcccggtcgtgcgcagagcgattcggctctcattctatgcaaattgctcagtctcttcgagatatactttgggagcctggtccctgacagtttatcacaatcaaaaaattgggagggccacttgcacggccagctcgcaattcttcagacacgttctccatatgattaccaaaccggccagagccatgcgctcttcgcagacggtcgctacccatttctgcttgcagccataaaatctaggacgcgctgtccgctaaacacgcctgaatggaggacgataccctgggagaaaaccccgaaaccaaatatgcacaagcttttagacatccttgcagacctctcagagatactcgcagatatagatgagatgcggatagatgattccaccgacactccagagaggaaggaggagactatgggcgcctgctgggatatcgacctacagcttcgggcttggtacgaagaagccaagccgctgaaagtcttccgtgatgataatgacgtgttgtacccgccgtgcggtaaagacgatgttgctttatcccatatgaccatcacctactggacaacatatggagttttgtatacgacaatatactctcttcttgacggcccgccggttgattaccccgactgcatcaatcctagaggataccttcgcaagatcgctttggctgtaccttacttttggagtccaggcatcggtacaagcggcggacacatggcagcattctcgctcggtttcgggctccacgtaatctacacatccgtgcatctctttcacgaagaacgcgagctcttccaagccactattatgcggccggacgtcgaaggcatactcgactttctcaacagtctccaaaagacgacaggaacacctgatctcgcagacgtatgtaattcatag

SEQ ID NO: 31587 - protein, 464 aa, Muscodor strobelii
  misc_feature: SGI Peptide ID NO. 570876
  misc_feature (9)..(48): Pfam Id: PF00172 Pfam Desc: Fungal Zn(2)-Cys(6) binuclear cluster domain
  misc_feature (9)..(43): Pfam Id: PF00172 Pfam Desc: Fungal Zn(2)-Cys(6) binuclear cluster domain
  misc_feature (1)..(451): NCBI GI: 225562385 Blast Desc: conserved [Ajellomyces capsulatus G186AR]
  misc_feature (1)..(432): NCBI GI: 239611599 Blast Desc: conserved [Ajellomyces dermatitidis ER-3]
  misc_feature (1)..(432): NCBI GI: 261204896 Blast Desc: conserved [Ajellomyces dermatitidis SLH14081] gi|239592244|gb|EEQ74825.1| conserved [Ajellomyces dermatitidis SLH14081]
  misc_feature (16)..(448): NCBI GI: 169598278 Blast Desc: SNOG_01940 [Phaeosphaeria nodorum SN15] gi|111069032|gb|EAT90152.1| SNOG_01940 [Phaeosphaeria nodorum SN15]
  misc_feature (1)..(455): NCBI GI: 46115332 Blast Desc: FG03508.1 [Gibberella zeae PH-1]
  misc_feature (76)..(453): NCBI GI: 189208901 Blast Desc: conserved [Pyrenophora tritici-repentis Pt-1C-BFP] gi|187976876|gb|EDU43502.1| conserved [Pyrenophora tritici-repentis Pt-1C-BFP]
  misc_feature (1)..(322): NCBI GI: 116182346 Blast Desc: [Chaetomium globosum CBS 148.51] gi|88186098|gb|EAQ93566.1| [Chaetomium globosum CBS 148.51]
  misc_feature (21)..(451): NCBI GI: 240281232 Blast Desc: conserved [Ajellomyces capsulatus H143]
  misc_feature (21)..(450): NCBI GI: 171685360 Blast Desc: protein product [Podospora anserina] gi|170942641|emb|CAP68293.1| protein product [Podospora anserina]
  misc_feature (4)..(364): NCBI GI: 119194707 Blast Desc: [Coccidioides immitis RS]
MVGVPGRSKGCSTCRRRKKGCDRARPVCGQCSTAGVECGGYERERIFLNHNQGTESSSALISYRKTSSSPPLVQSETLLKSAYVELCISTFLNKYLPAYGHVSVRSSSTAAHDFVEIAHQLHTSDKGIQQGLLSLSLCAQGQKNNGFQAYGRALSRLNATLCSPGRAQSDSALILCKLLSLFEIYFGSLVPDSLSQSKNWEGHLHGQLAILQTRSPYDYQTGQSHALFADGRYPFLLAAIKSRTRCPLNTPEWRTIPWEKTPKPNMHKLLDILADLSEILADIDEMRIDDSTDTPERKEETMGACWDIDLQLRAWYEEAKPLKVFRDDNDVLYPPCGKDDVALSHMTITYWTTYGVLYTTIYSLLDGPPVDYPDCINPRGYLRKIALAVPYFWSPGIGTSGGHMAAFSLGFGLHVIYTSVHLFHEERELFQATIMRPDVEGILDFLNSLQKTTGTPDLADVCNS

SEQ ID NO: 31588 - DNA, 1730 bp, Muscodor strobelii
  misc_feature: SGI EST ID NO. CUFF.74747.0
  misc_feature: Variant of the nucleotide sequence at SEQ ID NO 31586
cggttacgagcgagagagaatcttcctcaatcacaatcaaggcacagagtcaagctccgctctgatatcctatcgcaaaacctcaagctcaccaccactcgtccagtccgagactcttctgaagtctgcctatgtcgaattatgtatctccacttttctcaataagtatttacctgcctacggccacgtgtcagtacggtcaagttcaacagctgcccatgattttgttgaaattgctcatcaactacatacatcagacaagggaattcagcaagggttgctgagtttgagcttatgtgcccaagggcagaaaaataacgggttccaagcctatggtcgcgctctcagtagattaaacgcgacactgtgtagtcccggtcgtgcgcagagcgattcggctctcattctatgcaaattgctcagtctcttcgagatatactttgggagcctggtccctgacagtttatcacaatcaaaaaattgggagggccacttgcacggccagctcgcaattcttcagacacgttctccatatgattaccaaaccggccagagccatgcgctcttcgcagacggtcgctacccatttctgcttgcagccataaaatctaggacgcgctgtccgctaaacacgcctgaatggaggacgataccctgggagaaaaccccgaaaccaaatatgcacaagcttttagacatccttgcagacctctcagagatactcgcagatatagatgagatgcggatagatgattccaccgacactccagagaggaaggaggagactatgggcgcctgctgggatatcgacctacagcttcgggcttggtacgaagaagccaagccgctgaaagtcttccgtgatgataatgacgtgttgtacccgccgtgcggtaaagacgatgttgctttatcccatatgaccatcacctactggacaacatatggagttttgtatacgacaatatactctcttcttgacggcccgccggttgattaccccgactgcatcaatcctagaggataccttcgcaagatcgctttggctgtaccttacttttggagtccaggcatcggtacaagcggcggacacatggcagcattctcgctcggtttcgggctccacgtaatctacacatccgtgcatctctttcacgaagaacgcgagctcttccaagccactattatgcggccggacgtcgaaggcatactcgactttctcaacagtctccaaaagacgacaggaacacctgatctcgcagacgtatgtaattcatagtcaaatcctgtgtttcgagcacacatgaaccatccaaaacttcgcaatgaggaaaactaacaagccaccagatagacggtgaagagggccgagccctcagagcacaaagctggctatccagtagaaagaccttgccattcagaactccttgagggggttaaacccagagataacctgacgctagtaaatggcgcctgtatagaaggatgaagaatacttgacaaccacacacctcgcatttacatcaatcaattcactgtagttagaaagggacatgccagactatgtctagcccccagagaggtctactgaaatgaatataggaagcacgcccctcccctttttgtgcacgcccctcccctttttgaacgatatttgcatacgtatccaagttttaactgtgtaaatattctttgttgcaattaatgtatagtcaactactgtatgcgag

SEQ ID NO: 31589 - DNA, 1095 bp, Muscodor strobelii
  misc_feature: SGI cDNA ID NO. 570877
  misc_feature: Encodes the peptide sequence at SEQ ID NO 31590
atgtctccgactactcgcccgcatcgaaacgggttcgtggccttcgccaggaagatatacaatcccattgggttccaaaaaggctacaactttgttctctgtatcatattcctcggggctttctttggcttcaccatatctcggactgtcttttatgacttccgcggcaccttttgcgccccaaactcgacgtcaatcctcaaacatgccgcacccggagagtgcttctattggactcagcgatactactctatcgctatgaaaattcatctacacgccatcctttgggcttcttggatggtgggcatccagttcattccagtcattagatacaaagccatgataattcaccgcttggttggctatgtcatcctcttgctctgcacggcgtctatgatgggtgtgttcatgctcttgccgcgaagctttggcggtggtatggatatcatatcggcaggcgggacccttgctgctgcttttcttgtagcgctagtattagcttacgtcaacattaaacgtctgcaaatcgatcagcaccgcgcgtggatgctacgagcgtgggtctgggcgggatgtataatcacaactagactaattttgttcgcatctgtatacattccgacatccttaacacggtattatgctatgccttgcgataagatccactggatgctagggagcacgaacgcaacactcgcgctttaccctcaatgcgaatccttcttcacgggcaaaaacttgcaccagaacgcaattacactagcaacgctcgtcaagccatcctctgtcgtcgaggttgcggcagctctagatctcagagtcggtatggccttatggctggccttcgcaattcatgctgcaggtatcgagatatacctgcacttgacatcggctgagacagagcgattgcggcgtatctcatacgagcgtcagttagccgcagggatgaagcaccctggttctgcaggcttgacatccgacagatttggcgacgtagagaagtggcggccaccgcaacccagtggtgtagacattcgaggatatcaactatcgcctgagaactctaaagaaacagtggtggtgcagatagtatga

SEQ ID NO: 31590 - protein, 364 aa, Muscodor strobelii
  misc_feature: SGI Peptide ID NO. 570877
  misc_feature (1)..(341): NCBI GI: 256723217 Blast Desc: NECHADRAFT_97190 [Nectria haematococca mpVI 77-13-4]
  misc_feature (1)..(344): NCBI GI: 46115334 Blast Desc: FG03509.1 [Gibberella zeae PH-1]
  misc_feature (1)..(337): NCBI GI: 39970837 Blast Desc: MGG_02885 [Magnaporthe grisea 70-15] gi|145017292|gb|EDK01655.1| MGG_02885 [Magnaporthe grisea 70-15]
  misc_feature (1)..(357): NCBI GI: 258576531 Blast Desc: conserved [Uncinocarpus reesii 1704] gi|237902713|gb|EEP77114.1| conserved [Uncinocarpus reesii 1704]
  misc_feature (1)..(356): NCBI GI: 261204894 Blast Desc: conserved [Ajellomyces dermatitidis SLH14081] gi|239592243|gb|EEQ74824.1| conserved [Ajellomyces dermatitidis SLH14081] gi|239611600|gb|EEQ88587.1| conserved [Ajellomyces
  misc_feature (1)..(339): NCBI GI: 169598280 Blast Desc: SNOG_01941 [Phaeosphaeria nodorum SN15] gi|160704367|gb|EAT90153.2| SNOG_01941 [Phaeosphaeria nodorum SN15]
  misc_feature (1)..(335): NCBI GI: 145236120 Blast Desc: protein product [Aspergillus niger] gi|134075159|emb|CAK96472.1| protein product [Aspergillus niger]
  misc_feature (14)..(341): NCBI GI: 189208899 Blast Desc: conserved [Pyrenophora tritici-repentis Pt-1C-BFP] gi|187976875|gb|EDU43501.1| conserved [Pyrenophora tritici-repentis Pt-1C-BFP]
  misc_feature (16)..(355): NCBI GI: 171685362 Blast Desc: protein product [Podospora anserina] gi|170942642|emb|CAP68294.1| protein product [Podospora anserina]
  misc_feature (4)..(337): NCBI GI: 116191143 Blast Desc: CHGG_05289 [Chaetomium globosum CBS 148.51] gi|88181202|gb|EAQ88670.1| CHGG_05289 [Chaetomium globosum CBS 148.51]
MSPTTRPHRNGFVAFARKIYNPIGFQKGYNFVLCIIFLGAFFGFTISRTVFYDFRGTFCAPNSTSILKHAAPGECFYWTQRYYSIAMKIHLHAILWASWMVGIQFIPVIRYKAMIIHRLVGYVILLLCTASMMGVFMLLPRSFGGGMDIISAGGTLAAAFLVALVLAYVNIKRLQIDQHRAWMLRAWVWAGCIITTRLILFASVYIPTSLTRYYAMPCDKIHWMLGSTNATLALYPQCESFFTGKNLHQNAITLATLVKPSSVVEVAAALDLRVGMALWLAFAIHAAGIEIYLHLTSAETERLRRISYERQLAAGMKHPGSAGLTSDRFGDVEKWRPPQPSGVDIRGYQLSPENSKETVVVQIV

SEQ ID NO: 31591 - DNA, 1656 bp, Muscodor strobelii
  misc_feature: SGI cDNA ID NO. 570878
  misc_feature: Reduced expression when VOC is produced
  misc_feature: Encodes the peptide sequence at SEQ ID NO 31592
atggactcgtcttcgccgttggcggctgtgcgccccatggctcctccagcctggggccgcccttcatacaatcccttcgccactgggcggccgaatattcgtgagcagctgcagagaaccaagccagattattttaacatgaagtctgttcgaggctcttctccctccgccagccttgccgccgatctctcccagaatttctctatagacagcgagatcagcccgcgattccccacccctcgtcgggcgttgttcacatctaatatgatggctccatctatggtcaacgaagagtacataaccactccaccgcttccggcctcgtcctctccaggcacgatgaacgacgccatggatatctcgccgatcccacaaaaggaagctttctgcacctcgattgagataacatctccttcgcctcttcaatctcccgatgatgatataatgatggagtctcctatccaaatgatgcggcagccttctgcactgcttgatattccccgatctgtcactgatagtcgcaagaggcttggtttacgacgaccgtctctgactcggactaagggtcactctgccaacgctgtgatgacccgtctgcaccccgagaaccaggtatctgcattccgatttggcggcgagactcgtttcagtgctggtccttctgggttgtcacctggagaatgtttccaggactctccgcctcaggaacggcgaccacagacagcaaatagtccttcggccaatggccctggatcattccgacctaagccgcaatttgccagtcttactgggactcgggacattcgcagcaatggatccccagcggccggacattctcgccggctgtccaatccctttaacaggccccgccgagtataccgaagatctctaagcatgttcgagaaccctgccgacgtaatgaagaaagacgagtctactacctgcagcactctgcattctgtcatggatgtcgaagaggcacccgaagaaccacttttgccgcatttctttcatgatgacagcgactgcattccaagaatctctggtgagacatttgtcgatgtcctggagggaaagttcaacgactctttcactcagaagattgtcgttgactgtcgttttgaatacgagtacgagggtggccacattgatggagcagtcaactacaacgacaaggaactgctggctcgacaccttttcgagacgcccatggaagggaagaccgtcttgatcttccactgcgaatactcggtccaccgtgctcctctcatggcaaagcacatccggagtcaagatcgtgaggccaatacggagttctaccctcggctgacttacccggaagtgtatattcttgacggaggttacagcgggttcttcaaagaacatcgaatccggtgctacccacaagcatatgtcgagatgaatgctgtagagcacaagaatacttgtgaccgggaaatgggcaagttgcagcagaaacgaaagggcctaggtcgcgccaagacttttgccttcggccaccgtgagcccatggttgacgactctcctacagcccctggacgaactattgagcacgcatccccttgcatgatgattggcaattcccctattctgggaaactaccggtctcctaaccggcgcatggcgtcatactaa

SEQ ID NO: 31592 - protein, 551 aa, Muscodor strobelii
  misc_feature: SGI Peptide ID NO. 570878
  misc_feature (356)..(461): Pfam Id: PF00581 Pfam Desc: Rhodanese-like domain
  misc_feature (1)..(551): NCBI GI: 256735221 Blast Desc: NECHADRAFT_74837 [Nectria haematococca mpVI 77-13-4]
  misc_feature (1)..(551): NCBI GI: 39972879 Blast Desc: MGG_07734 [Magnaporthe grisea 70-15] gi|145012501|gb|EDJ97155.1| MGG_07734 [Magnaporthe grisea 70-15]
  misc_feature (1)..(506): NCBI GI: 46107364 Blast Desc: FG00565.1 [Gibberella zeae PH-1]
  misc_feature (99)..(551): NCBI GI: 261356494 Blast Desc: M-phase inducer phosphatase [Verticillium albo-atrum VaMs.102]
  misc_feature (74)..(551): NCBI GI: 171695486 Blast Desc: protein product [Podospora anserina] gi|170947985|emb|CAP60149.1| protein product [Podospora anserina]
  misc_feature (24)..(522): NCBI GI: 156045417 Blast Desc: SS1G_09897 [Sclerotinia sclerotiorum 1980] gi|154694292|gb|EDN94030.1| SS1G_09897 [Sclerotinia sclerotiorum 1980]
  misc_feature (90)..(551): NCBI GI: 116181032 Blast Desc: CHGG_01144 [Chaetomium globosum CBS 148.51] gi|88185441|gb|EAQ92909.1| CHGG_01144 [Chaetomium globosum CBS 148.51]
  misc_feature (1)..(551): NCBI GI: 85116612 Blast Desc: NCU02496 [Neurospora crassa OR74A] gi|28926892|gb|EAA35854.1| [Neurospora crassa OR74A] gi|38567093|emb|CAE76389.1| related to [Neurospora crassa]
  misc_feature (4)..(551): NCBI GI: 154318756 Blast Desc: BC1G_02767 [Botryotinia fuckeliana B05.10] gi|150857897|gb|EDN33089.1| BC1G_02767 [Botryotinia fuckeliana B05.10]
  misc_feature (1)..(551): NCBI GI: 169600101 Blast Desc: SNOG_02880 [Phaeosphaeria nodorum SN15] gi|111068491|gb|EAT89611.1| SNOG_02880 [Phaeosphaeria nodorum SN15]
  misc_feature (1)..(551): SWISSPROT Homolog: EC 3.1.3.48 Protein-tyrosine-phosphatase
  misc_feature: Useful for introducing or modulating the production of volatile compounds
MDSSSPLAAVRPMAPPAWGRPSYNPFATGRPNIREQLQRTKPDYFNMKSVRGSSPSASLAADLSQNFSIDSEISPRFPTPRRALFTSNMMAPSMVNEEYITTPPLPASSSPGTMNDAMDISPIPQKEAFCTSIEITSPSPLQSPDDDIMMESPIQMMRQPSALLDIPRSVTDSRKRLGLRRPSLTRTKGHSANAVMTRLHPENQVSAFRFGGETRFSAGPSGLSPGECFQDSPPQERRPQTANSPSANGPGSFRPKPQFASLTGTRDIRSNGSPAAGHSRRLSNPFNRPRRVYRRSLSMFENPADVMKKDESTTCSTLHSVMDVEEAPEEPLLPHFFHDDSDCIPRISGETFVDVLEGKFNDSFTQKIVVDCRFEYEYEGGHIDGAVNYNDKELLARHLFETPMEGKTVLIFHCEYSVHRAPLMAKHIRSQDREANTEFYPRLTYPEVYILDGGYSGFFKEHRIRCYPQAYVEMNAVEHKNTCDREMGKLQQKRKGLGRAKTFAFGHREPMVDDSPTAPGRTIEHASPCMMIGNSPILGNYRSPNRRMASY

SEQ ID NO: 31593 - DNA, 3890 bp, Muscodor strobelii
  misc_feature: SGI EST ID NO. CUFF.74839.1
  misc_feature: Variant of the nucleotide sequence at SEQ ID NO 31591
tgtgctgtaagcctgtcaagcctggctttgtccccctacgccgagtgctctactgaccgtcgccgtgctggaagtgacctggacaaggtgaaactccaccgggcctcgccgaagcaacaaaacccatccacacccctctgctttcttttgtgtctccttctcttctgcagccgacctgtgaagaatgccgtcttcacaacaggtgcaacccggtgccacttctcacgacaattcacaacacgcagacatctagtgggatagatgtgtgtgtccaatatacagaagtgtgtctccgaatcccaaggtctgtggcatttgaaaagaaatagacattgacagcagagtgctctctctcgctcgagttcaattccttcacgactgcctgtccgcgacccaattggccttgaatgatccattggagagcgagacttacacgacctgctcctaattattccctacttagtcaccaaaccctattctataaatccatatcggtcgaaagcgcatgcccgggcaacctacacatcctctccttagtcgaaccttattaaccaccaagctccaattgcaacccatggaaagttgaccgtccaatgcaccggcaccaactttgactatatctgccacggcactgcccattaaaatagtgctcgtccaacattgactacatctctcggccgaccgcattggcttacagacaacatatcgtccccggagatcgcgaagagactcggcccggaaagccattcgattcgaagtcaccggttgcaagagcctggatctcgtctcgttacatcattcgggatcgtgggaggaagcattcattaattgtggcgtcaacttccattcgttagaaacacaattggtcgattgtattccaaacagccattgaggagtagggttattatcatacatcctctggtccggattcacctttgtctcacaccatggactcgtcttcgccgttggcggctgtgcgccccatggctcctccagcctggggccgcccttcatacaatcccttcgccactgggcggccgaatattcgtgagcagctgcagagaaccaagccagattattttaacatgaagtctgttcgaggctcttctccctccgccagccttgccgccgatctctcccagaatttctctatagacagcgagatcagcccgcgattccccacccctcgtcgggcgttgttcacatctaatatgatggctccatctatggtcaacgaaggtatgctatactaggcacgggcagagcatatttgccttcaagtcttgctgacgacgtggtatcagagtacataaccactccaccgcttccggcctcgtcctctccaggcacgatgaacgacgccatggatatctcgccgatcccacaaaaggaagctttctgcacctcgattgagataacatctccttcgcctcttcaatctcccgatgatgatataatgatggagtctcctatccaaatgatgcggcagccttctgcactgcttgatattccccgatctgtcactgatagtcgcaagaggcttggtttacgacgaccgtctctgactcggactaagggtcactctgccaacgctgtgatgacccgtctgcaccccgagaaccaggtatctgcattccgatttggcggcgagactcgtttcagtgctggtccttctgggttgtcacctggagaatgtttccaggactctccgcctcaggaacggcgaccacagacagcaaatagtccttcggccaatggccctggatcattccgacctaagccgcaatttgccagtcttactgggactcgggacattcgcagcaatggatccccagcggccggacattctcgccggctgtccaatccctttaacaggccccgccgagtataccgaagatctctaagcatgttcgagaaccctgccgacgtaatgaagaaagacgagtctactacctgcagcactctgcattctgtcatggatgtcgaagaggcacccgaagaaccacttttgccgcatttctttcatgatgacagcgactgcattccaagaatctctggtgagacatttgtcgatgtcctggagggaaagttcaacgactctttcactcagaagattgtcgttgactgtcgttttgaatacgagtacgagggtggccacattgatggagcagtcaactacaacgacaaggaactgctggctcgacaccttttcgagacgcccatggaagggaagaccgtcttgatcttccactgcgaatactcggtccaccgtgctcctctcatggcaaagcacatccggagtcaagatcgtgaggccaatacggagttctaccctcggctgacttacccggaagtgtatattcttgacggaggttacagcgggttcttcaaagaacatcgaatccggtgctacccacaagcatatgtcgagatgaatgctgtagagcacaagaatacttgtgaccgggaaatgggcaagttgcagcagaaacgaaagggcctaggtcgcgccaagacttttgccttcggccaccgtgagcccatggttgacgactctcctacagcccctggacgaactattgagcacgcatccccttgcatgatgattggcaattcccctattctgggaaactaccggtctcctaaccggcgcatggcgtcatactaaacagcattgccttttgtgaaaaaaaatttcatgcgaccaagacgacggaagtctaatgattaatactcaagtctctttcatcgtccgactgccaaatatcatcaaatgcttaaatgctaacgaggcattttacactcgaaaggaaacacataatcaataattcaagtcttccgcaatgtcctaccaaacacaaccacacactaccgctaagctctgggcatatccatgcccttcgcgctcaacttctcattgtcttctattatacccccttctctccacatgagacaggcattggcatagcatttcggtctgttgcattgccctgagcttatgttggatccggcatctgactcgctcagtacatcggcctttgcagttttttcagagcatggcgtatggatttgtgactgcatttttgttttctttgtttttgcaattttcctatcagtatgacaggcggtctccgaggagcaatcctcttactctcttcgaaaattcgacttttggatttttgaattggtttggagcctcctggaactcattgtttcagcatgcgggcaaatcagaagttacttccacttgagagcctggactataccacgcggtaccttgaaaacatcaacgtgcctgtacatgatcgccgcccatcgcaattcacacaacactactaaacacacgactttccttgtatgagaacgaccacaaccccattgacacacgcgaagatgtgaatatcttcttctttacagcctggtgaaaaggctatcgaccgaacttgttggcatcatggacgaacatgcacgaccaaaccgatggtcaacccgtatcaatgcagacgaaccgtggaaaaaatcagattgactgccagttatggaagaagctgctagggtggagaaaggagcccatgtcattgtgactggagcggaggtgatgctcaagcttctacttcccctacagttttaacttccattacttttgtcttcagcacagaagtcatttatttgatcattctgctgcttctttgtacattagtttcctgtgctatctctgagtttttggttcgttgtctctgcatgcgacgggcgcagcatggacaagagcatatcaggattgaggaattgatgggccagattctcactggctctcttcctctcctgtggctactggcaaattagggatacctagacagctagttagcaattttgaaattgctcaaatcatc

SEQ ID NO: 31594 - DNA, 798 bp, Muscodor strobelii
  misc_feature: SGI cDNA ID NO. 570879
  misc_feature: Encodes the peptide sequence at SEQ ID NO 31595
atgacgtcaataggcacgggttacgatctagccaactccatcttctcccccgacggccgcaacttccaggttgaatacgccgtcaaggctgttgagaatggtggcacatcagtcggtatccgatgcaaagacggcgttgtcctcgccgtcgagaaagtgattacctccaaactgctaaagcctggcgccaacaagagaatcgcgaccgtagacaagcacctcggagtcgtctactccggcatggtccccgacggccaccacttcgtcgacagagcccgtgatgaagcccgttcgtggcgcgagaccttcaagacccccatctccacatcagacctcgccagccgcatgggtggttacctgcaagcctacacactgtaccagtccgtccgccccttcggcatcaccgccatcgtcggcggattcgattccgagctcgaggcccccgtcgacggtgagcccagtggcatgtactggggttactacggtgccgccaccggcaagggtcgccaggccgccaaggccgaattggagaagctgaatcttgccgaaggaaagctcgacttgaagcaagccgtcaaggaggcagcaagaatcatctacgttgcacagcaggataacaaggacaaggagtttgagctggagatgagctggatcagcagcgcaaacggccccaccaaaggtcggcatatggaggtacccaaggagctcctcgaggaagccgagcggttagcgaagaaggctatttcggaggacgacgatgaggaggaaggagatgatgacaagatggacgaggaatga

SEQ ID NO: 31595 - protein, 265 aa, Muscodor strobelii
  misc_feature: SGI Peptide ID NO. 570879
  misc_feature (31)..(218): Pfam Id: PF00227 Pfam Desc: Proteasome A-type and B-type
  misc_feature (1)..(248): NCBI GI: 39972865 Blast Desc: proteasome subunit alpha type 3 [Magnaporthe grisea 70-15] gi|145012494|gb|EDJ97148.1| proteasome subunit alpha type 3 [Magnaporthe grisea 70-15]
  misc_feature (1)..(245): NCBI GI: 256735222 Blast Desc: [Nectria haematococca mpVI 77-13-4]
  misc_feature (1)..(248): NCBI GI: 171695490 Blast Desc: protein product [Podospora anserina] gi|170947987|emb|CAP60151.1| protein product [Podospora anserina]
  misc_feature (1)..(264): NCBI GI: 156036266 Blast Desc: SS1G_12821 [Sclerotinia sclerotiorum 1980] gi|154698227|gb|EDN97965.1| SS1G_12821 [Sclerotinia sclerotiorum 1980]
  misc_feature (1)..(248): NCBI GI: 154308422 Blast Desc: BC1G_08271 [Botryotinia fuckeliana B05.10] gi|150852812|gb|EDN28004.1| BC1G_08271 [Botryotinia fuckeliana B05.10]
  misc_feature (1)..(251): NCBI GI: 85116600 Blast Desc: proteasome component C1 [Neurospora crassa OR74A] gi|28926889|gb|EAA35851.1| proteasome component C1 [Neurospora crassa OR74A] gi|38567096|emb|CAE76392.1| 20S proteasome subunit
  misc_feature (1)..(264): NCBI GI: 145255887 Blast Desc: An18g06800 [Aspergillus niger] gi|134084730|emb|CAK43387.1| protein product [Aspergillus niger]
  misc_feature (1)..(248): NCBI GI: 67539246 Blast Desc: AN5793.2 [Aspergillus nidulans FGSC A4] gi|40743696|gb|EAA62886.1| AN5793.2 [Aspergillus nidulans FGSC A4] gi|259484718|tpe|CBF81179.1| TPA: proteasome subunit alpha 3,
  misc_feature (1)..(243): NCBI GI: 46107362 Blast Desc: FG00564.1 [Gibberella zeae PH-1]
  misc_feature (1)..(248): NCBI GI: 261201274 Blast Desc: proteasome component C1 [Ajellomyces dermatitidis SLH14081] gi|239592096|gb|EEQ74677.1| proteasome component C1 [Ajellomyces dermatitidis SLH14081] gi|239611741|gb|EEQ88728.1|
  misc_feature (1)..(229): SWISSPROT Homolog: EC 3.4.25.1 Proteasome endopeptidase complex
MTSIGTGYDLANSIFSPDGRNFQVEYAVKAVENGGTSVGIRCKDGVVLAVEKVITSKLLKPGANKRIATVDKHLGVVYSGMVPDGHHFVDRARDEARSWRETFKTPISTSDLASRMGGYLQAYTLYQSVRPFGITAIVGGFDSELEAPVDGEPSGMYWGYYGAATGKGRQAAKAELEKLNLAEGKLDLKQAVKEAARIIYVAQQDNKDKEFELEMSWISSANGPTKGRHMEVPKELLEEAERLAKKAISEDDDEEEGDDDKMDEE

SEQ ID NO: 31596 - DNA, 1694 bp, Muscodor strobelii
  misc_feature: SGI EST ID NO. CUFF.74793.0
  misc_feature: Variant of the nucleotide sequence at SEQ ID NO 31594
tccagccacaatcgatagctacaacgctggggtaaggtaccgcaacaactgatgcaactgcgacacgcagctcgggctgcctgaagtgaagctcaacctcacctgcgctcagcgtccctccacacacatcacgaccccccctccagcttccaccttcagcgccacccaccctgtttgcacctgcgacgacctctcagcctgaccgaacgatcagtcaaccactcaatcagatacgcatctacacattcacatcattacctgcaaagggcgatcaccatgacgtcaataggcacgggttacgatctagccaactccatcttctcccccgacggccgcaacttccaggttgaatacgccgtcaaggctgttgagaatggtggcacatcagtcggtatccgatgcaaagacggcgttgtcctcgccgtcgagaaagtgattacctccaaactgctaaagcctggcgccaacaagagaatcgcgaccgtagacaagcacctcggagtcgtctactccggcatggtccccgacggccaccacttcgtcgacagagcccgtgatgaagcccgttcgtggcgcgagaccttcaagacccccatctccacatcagacctcgccagccgcatgggtggttacctgcaagcctacacactgtaccagtccgtccgccccttcggcatcaccgccatcgtcggcggattcgattccgagctcgaggcccccgtcgacggtgaggtcggctctggcccctccgttggcgccggtggcaaggtggagggcacacacggcggtcccggtctctaacatgatcgagcccagtggcatgtactggggttactacggtgccgccaccggcaagggtcgccaggccgccaaggccgaattggagaagctgaatcttgccgaaggaaagctcgacttgaagcaagccgtcaaggaggcagcaagaatcatctacgttgcacagcaggataacaaggacaaggagtttgagctggagatgagctggatcagcagcgcaaacggccccaccaaaggtcggcatatggaggtacccaaggagctcctcgaggaagccgagcggttagcgaagaaggctatttcggaggacgacgatgaggaggaaggagatgatgacaagatggacgaggaatgagacgcattgcttgacaagcactcagcggcataagactctgtatttgtacaacggcgcagcgctcaccatcatgagatcacgggtagactaaattacatcttgagaagcacgtccggttggaaaaaccacagagctccggtgaggatgaaatgatagacccaggttggtcagaagataaggatggtttagatttcttgtctcatctcggctaccaccctgtattctccaatgtttggagagccagatatcgatttaactccagacaatgcatcggccgagtcgaccgagtagaccgagtaaaggtggcaactctttggggcctagtcaaatcaatgtagtatcaaagaactcgacaaatactgttctgatgaggcttgagaggcacgctctggtccatgaggagacatttttgttctggttctcctttttccgccttgtaacataattgctcccacgagaacatctgacaatttggacgaggtcagaatttgactcccgtcacccctttctcacggtgactgctaatacgcagcttcaagac

SEQ ID NO: 31597 - DNA, 1710 bp, Muscodor strobelii
  misc_feature: SGI cDNA ID NO. 570880
  misc_feature: Encodes the peptide sequence at SEQ ID NO 31598
atggaccgtaaagggcccaaaagacgtcggatcgagattcctctgccctcgaagcctcgaccttatagacctggagatggccctccgctggcacctatccgcctcactctcgacaatgactcgaccgccttcatcgtcgagaagcgtgtcattcccagcctagcccccaacggcgaattgaagctcgacatgtgctatgacgttggctggtccgacttgcccgccgcacgtgtcgccattctcgccaccaagatacttgattatgtctccccgcgcacactcgaggactgggagtacaagcgcctggtggaacaggaggccgagcgggaaaagcaagaggcagcggagagaaaacgggctgataaactcgcccaggctgctacaccaaccgcaggcacgccgctctcagccacaaccagccaaaagaaacgagggcggcccagcaaggctgagatggtggccaagaagatcgcgaagcaagctggctttgcaccagacgagcttgcgagcgtcccggtctccactccaagcataatggcaccgtcattgtccactccacagaagacagcacctctgcaagccacaacggataccgaggaattggaggaaaatccaaacgaagcaatcgctaagcagtcatatggcaccgttagtgacacggacagcaatagtggtagtgactctcaggatcctgatgaccttggcaatctagacatagccgccgggctgggtccaagtccatctatgcccggtccttcatcacgagggtatggaactgatttccccgtctccatgccaccttttgccccgtttgatgaccttgattcacccgtcccgatttccttgcgtgcccagtcatcggcgccgaagctcaccactcctgtgccagttccgttgcttcctgaagctacaaaacggagggccgttactgctgtgcctgtgccatcctacgatctctcgaaacagagacccaaagaaactccagtcccggtgcctgccaatgcgttgcgcgactcgctgaaatcatatcacggaaagacatttactcctattcccgtcccgtccttgcccaaattctctacagccgcgcagtcaggagctaaggaatcaggaaacgttggcttcactcccgctgctcccaactctcaaaagaagagccggcaagagcaaattacgccaagtgttggcgaaaatcaaagcacagcttcttttattaaaaagcccaaaagttctcataagaagaagcctgctaagaaggacgataatgcgtgggaagtcaagcgcttggaaggcgacaaactcgtagacttcgatggcgaatacaagcagtactacaaagtccgttgggagggtgaatggccgcccagtgagaatccgacatgggaaccagaggccaacatttcgaagcctctgatcgacgagtactggcggaagaaggcaaagaagaccggtcagagcagcccagagcgacctaagcccattctgaagagaaagtggtcgagtgttgccgaagcatttgaaggtgatatagaggatgcattattgcataacgctgccgcagaagacgactctaacggagcagaagagcgtttggacgtcacggagcgaaagagtgggacgagttcgcccgctcgtaagaccaaggttgaatcatcgctgcttaatgatctgtggtcttcattccgcggtagccgagcttttgggtcttga

SEQ ID NO: 31598 - protein, 569 aa, Muscodor strobelii
  misc_feature: SGI Peptide ID NO. 570880
  misc_feature (424)..(478): Pfam Id: PF00385 Pfam Desc: 'chromo' (CHRromatin Organisation MOdifier) domain
  misc_feature (6)..(533): NCBI GI: 171695812 Blast Desc: protein product [Podospora anserina] gi|170948148|emb|CAP60312.1| protein product [Podospora anserina]
  misc_feature (7)..(263): NCBI GI: 116181082 Blast Desc: CHGG_01169 [Chaetomium globosum CBS 148.51] gi|88185466|gb|EAQ92934.1| CHGG_01169 [Chaetomium globosum CBS 148.51]
  misc_feature (412)..(569): NCBI GI: 261356527 Blast Desc: [Verticillium albo-atrum VaMs.102]
  misc_feature (347)..(535): NCBI GI: 85112697 Blast Desc: NCU00738 [Neurospora crassa OR74A] gi|28926171|gb|EAA35155.1| [Neurospora crassa OR74A]
  misc_feature (11)..(266): NCBI GI: 85112697 Blast Desc: NCU00738 [Neurospora crassa OR74A] gi|28926171|gb|EAA35155.1| [Neurospora crassa OR74A]
  misc_feature (419)..(514): NCBI GI: 256727346 Blast Desc: NECHADRAFT_32524 [Nectria haematococca mpVI 77-13-4]
  misc_feature (424)..(514): NCBI GI: 46121303 Blast Desc: FG05030.1 [Gibberella zeae PH-1]
  misc_feature (422)..(542): NCBI GI: 116181082 Blast Desc: CHGG_01169 [Chaetomium globosum CBS 148.51] gi|88185466|gb|EAQ92934.1| CHGG_01169 [Chaetomium globosum CBS 148.51]
  misc_feature (422)..(491): NCBI GI: 145615406 Blast Desc: [Magnaporthe grisea 70-15] gi|145022238|gb|EDK06258.1| [Magnaporthe grisea 70-15]
  misc_feature (22)..(212): NCBI GI: 156036138 Blast Desc: [Sclerotinia sclerotiorum 1980] gi|154698163|gb|EDN97901.1| [Sclerotinia sclerotiorum 1980]
MDRKGPKRRRIEIPLPSKPRPYRPGDGPPLAPIRLTLDNDSTAFIVEKRVIPSLAPNGELKLDMCYDVGWSDLPAARVAILATKILDYVSPRTLEDWEYKRLVEQEAEREKQEAAERKRADKLAQAATPTAGTPLSATTSQKKRGRPSKAEMVAKKIAKQAGFAPDELASVPVSTPSIMAPSLSTPQKTAPLQATTDTEELEENPNEAIAKQSYGTVSDTDSNSGSDSQDPDDLGNLDIAAGLGPSPSMPGPSSRGYGTDFPVSMPPFAPFDDLDSPVPISLRAQSSAPKLTTPVPVPLLPEATKRRAVTAVPVPSYDLSKQRPKETPVPVPANALRDSLKSYHGKTFTPIPVPSLPKFSTAAQSGAKESGNVGFTPAAPNSQKKSRQEQITPSVGENQSTASFIKKPKSSHKKKPAKKDDNAWEVKRLEGDKLVDFDGEYKQYYKVRWEGEWPPSENPTWEPEANISKPLIDEYWRKKAKKTGQSSPERPKPILKRKWSSVAEAFEGDIEDALLHNAAAEDDSNGAEERLDVTERKSGTSSPARKTKVESSLLNDLWSSFRGSRAFGS

SEQ ID NO: 31599 - DNA, 2864 bp, Muscodor strobelii
  misc_feature: SGI EST ID NO. CUFF.74798.0
  misc_feature: Variant of the nucleotide sequence at SEQ ID NO 31597
cttgccaataacttttggggaatttcgaaatccctcaacgacattcttccgcgtatgagagcatcttcgtattcttctggccaatgttgcaaccactgttgtcaattgatcatatcttagaactcataagcctggcgtcatgctctacccgtccaacaaagtacccacaccctaaattgccagcgatgagaggaccttgatgcaacacacaacgcgtgccgcgctctgcattcgactctttgacttctcgttggtaccacgagccatagacaactcgcggttgtggttgttcctgctcttaccttctagtgatttgcatcttcgtctcggcccattgtgactctttactgcatatcatcccagagaccgtattccttacccgtcgagatcgaagattgcgccgtcatcccgccgcaaatgtgtatcgcagccgctttctaggccgcctcggtgcatgcccgctctcacggctcaattctgcgcaaccagtctgctgtgagcgtcgtaatcaatcgtcctgaccactgtcgatcctcgtcgccgattccattgtctcagccaggttctcttgtggtcgggcatggggcatgtagcaatatcctcgcctcgaagaccgcgctgggattgaggccatggaccgtaaagggcccaaaagacgtcggatcgagattcctctgccctcgaagcctcgaccttatagacctggagatggccctccgctggcacctatccgcctcactctcgacaatgactcgaccgccttcatcgtcgagaagcgtgtcattcccagcctagcccccaacggcgaattgaagctcgacatgtgctatgacgttggctggtccgacttgcccgccgcacgtgtcgccattctcgccaccaagatacttgattatgtctccccgcgcacactcgaggactgggagtacaagcgcctggtggaacaggaggccgagcgggaaaagcaagaggcagcggagagaaaacgggctgataaactcgcccaggctgctacaccaaccgcaggcacgccgctctcagccacaaccagccaaaagaaacgagggcggcccagcaaggctgagatggtggccaagaagatcgcgaagcaagctggctttgcaccagacgagcttgcgagcgtcccggtctccactccaagcataatggcaccgtcattgtccactccacagaagacagcacctctgcaagccacaacggataccgaggaattggaggaaaatccaaacgaagcaatcgctaagcagtcatatggcaccgttagtgacacggacagcaatagtggtagtgactctcaggatcctgatgaccttggcaatctagacatagccgccgggctgggtccaagtccatctatgcccggtccttcatcacgagggtatggaactgatttccccgtctccatgccaccttttgccccgtttgatgaccttgattcacccgtcccgatttccttgcgtgcccagtcatcggcgccgaagctcaccactcctgtgccagttccgttgcttcctgaagctacaaaacggagggccgttactgctgtgcctgtgccatcctacgatctctcgaaacagagacccaaagaaactccagtcccggtgcctgccaatgcgttgcgcgactcgctgaaatcatatcacggaaagacatttactcctattcccgtcccgtccttgcccaaattctctacagccgcgcagtcaggagctaaggaatcaggaaacgttggcttcactcccgctgctcccaactctcaaaagaagagccggcaagagcaaattacgccaagtgttggcgaaaatcaaagcacagcttcttttattaaaaagcccaaaagttctcataagaagaagcctgctaagaaggacgataatgcgtgggaagtcaagcgcttggaaggcgacaaactcgtagacttcgatggcgaatacaagcagtactacaaagtccgttgggagggtgaatggccgcccagtgagaatccgacatgggaaccagaggccaacatttcgaagcctctgatcgacgagtactggcggaagaaggcaaagaagaccggtcagagcagcccagagcgacctaagcccattctgaagagaaagtggtcgagtgttgccgaagcatttgaaggtgatatagaggatgcattattgcataacgctgccgcagaagacgactctaacggagcagaagagcgtttggacgtcacggagcgaaagagtgggacgagttcgcccgctcgtaagaccaaggttgaatcatcgctgcttaatgatctgtggtcttcattccgcggtagccgagcttttgggtcttgaactgggtatggcatgacgatcacgagaaatgctaagctcacgattacagcacggtggtcatttgcttatataagaaatggtctatgtcaccaacattggtgatgtgctttgaagttctctgataccttaagcaacatgctgcggtaatcaagcagtggtctcgccgcgcctgaacattgctgggtctattttgcatggagacgatggttcgtattactacagcattaaagtcttcacagactagtaaataaacactcataaaaccagacttgaagctcacttgaagctcactctttactcgtcttgtatccagccgtactgctcctcactaccttccacagtatggaaataacatccaactacccgccatatcacgtgaagattgcattcgtagcaaccactgcctccatagtcgcaaaacttgtgaaaacgagataaccagaggggatgatgggctgctaaggtcgtagtgtttcgcatttgttagatacaggagaagattgtgcctgaatttcgtacccg

SEQ ID NO: 31600 - DNA, 1041 bp, Muscodor strobelii
  misc_feature: SGI cDNA ID NO. 570881
  misc_feature: Encodes the peptide sequence at SEQ ID NO 31601
atgaggcataatatatcggcagctttgatcggcattgttgcttttgcatcgagcgccaatagtcaaggccctccttgggcatctggcggctgggggcagagtggaagcggcaatggaaacggtggcagtagtagcaacccatatgggacgagcggcgatggctcatcgacatctaccttcgggttgggcatcaacggctccaatgccaacttcgatatctcagcagcgatgcgatatcgcagcatccacggcatattagcggcggttgccttcgcatttctcttcccactcggttcgatcgtgatgcgtgtgatacctggcagattcacttggatcgcacacggacttatccaactcatggcctacatcctgtatatcgcagctgcggctctaggcctgttactagtgagcatggtacggattccgcccgaaggcactggcctgctgagcacggctcggacgaacgcgcacccaattacaggcatcgtcctgctcattctattattcttccaaccatttctggggatcatacatcatagacgattcaagaaagtcggtcgacgaacttgggtatcacacgcccatctctggataggacggcttggtatcacgctcgggatcatcaacggtggtctgggtttgcaactcgccgacgcaactggtggtccggtccttgcatatgccatcgccgccggtgtcatgtggattatttgggtgcttgccgctattttcggcagggtcaggcgttcgcggaaatcgaccaaggtcgaggaggacaactacgcaagaaatgtagctgctgcgatgccggcgtatcatggtgcttccaacgcctacccgaatcactcgctggctgcggtggctccatcatcggatctgagcagtgatatgccaagtccgccgtatacgcctggtcctcattacgagaggcatgttgccagtggccaggcacatgagatgcgtaatatgaaggatgtgatgaacagagccgacacggtgtcttcatactcctcacatgagatgggtagagggcaagtataa

SEQ ID NO: 31601 - protein, 346 aa, Muscodor strobelii
  misc_feature: SGI Peptide ID NO. 570881
  misc_feature (83)..(258): NCBI GI: 189208780 Blast Desc: integral membrane protein [Pyrenophora tritici-repentis Pt-1C-BFP] gi|187976816|gb|EDU43442.1| integral membrane protein [Pyrenophora tritici-repentis Pt-1C-BFP]
  misc_feature (63)..(246): NCBI GI: 169598880 Blast Desc: SNOG_02248 [Phaeosphaeria nodorum SN15] gi|160704489|gb|EAT90460.2| SNOG_02248 [Phaeosphaeria nodorum SN15]
  misc_feature (43)..(258): NCBI GI: 116195524 Blast Desc: [Chaetomium globosum CBS 148.51] gi|88180273|gb|EAQ87741.1| [Chaetomium globosum CBS 148.51]
  misc_feature (83)..(250): NCBI GI: 169623130 Blast Desc: SNOG_14795 [Phaeosphaeria nodorum SN15] gi|160704920|gb|EAT77987.2| SNOG_14795 [Phaeosphaeria nodorum SN15]
  misc_feature (69)..(264): NCBI GI: 261361472 Blast Desc: conserved [Verticillium albo-atrum VaMs.102]
  misc_feature (48)..(258): NCBI GI: 170940225 Blast Desc: protein product [Podospora anserina]
  misc_feature (92)..(251): NCBI GI: 171681758 Blast Desc: protein product [Podospora anserina] gi|170940838|emb|CAP66487.1| protein product [Podospora anserina]
  misc_feature (38)..(258): NCBI GI: 189188350 Blast Desc: integral membrane protein [Pyrenophora tritici-repentis Pt-1C-BFP] gi|187972120|gb|EDU39619.1| integral membrane protein [Pyrenophora tritici-repentis Pt-1C-BFP]
  misc_feature (40)..(248): NCBI GI: 154298960 Blast Desc: BC1G_11727 [Botryotinia fuckeliana B05.10] gi|150857632|gb|EDN32824.1| BC1G_11727 [Botryotinia fuckeliana B05.10]
  misc_feature (72)..(228): NCBI GI: 67517147 Blast Desc: AN0852.2 [Aspergillus nidulans FGSC A4] gi|40746526|gb|EAA65682.1| AN0852.2 [Aspergillus nidulans FGSC A4] gi|259488863|tpe|CBF88657.1| TPA: [Aspergillus nidulans FGSC
MRHNISAALIGIVAFASSANSQGPPWASGGWGQSGSGNGNGGSSSNPYGTSGDGSSTSTFGLGINGSNANFDISAAMRYRSIHGILAAVAFAFLFPLGSIVMRVIPGRFTWIAHGLIQLMAYILYIAAAALGLLLVSMVRIPPEGTGLLSTARTNAHPITGIVLLILLFFQPFLGIIHHRRFKKVGRRTWVSHAHLWIGRLGITLGIINGGLGLQLADATGGPVLAYAIAAGVMWIIWVLAAIFGRVRRSRKSTKVEEDNYARNVAAAMPAYHGASNAYPNHSLAAVAPSSDLSSDMPSPPYTPGPHYERHVASGQAHEMRNMKDVMNRADTVSSYSSHEMGRGQV

SEQ ID NO: 31602 - DNA, 1296 bp, Muscodor strobelii
  misc_feature: SGI cDNA ID NO. 570882
  misc_feature: Reduced expression when VOC is produced
  misc_feature: Encodes the peptide sequence at SEQ ID NO 31603
atggagggattcaatccttacaatggccagccgccctcgaacggctcaggctctcagggtgactccggctcgcaaggagttcccggcgttcaggccggtggtcttccaatggcccccaccaacggccaggctggcggcgaactgggacagaacttccagaacgattctgctcgtcagaccctgtggatgggcgaactagttggatggatggacgagaatttcattcgtcagctttaccagtctgccttgaacgagactgttcaggtcaagatcatccgagaccgtcattccggcagcgccggctactgcttcgtggagtttaccactcctgaggctgctcagaaggcactccagctcaacggaactcccatcccaaacaccgacagggtcttccgccttaactgggcttctggtggcggtctcattgatcgccgtgatgaccgcagtccggagttttctatcttcgtcggagatctgggtcacgaagtcaatgaatttgttctcgtggctctgtttcaatctcgctttccatcttgtaagtctgccaagatcatgacagatcaacagaccggacagtctcgcggttatggtttcgtccgattttccagcgaagacgagcagcaacgtgccttgaacgagatgcagggtgtctactgtggtaaccggcccatgcgtgtatcgcctgccactcctaagaaccgcggtcaccaagggaactcgttcagccagtatggaggcggtcagcctatgatgccacccccgcaggcccctcagcacggaggcatggctggtgctccttggatgcatcctcagcagcagcagcagccgaactactatcagcagcagccccagggtacattcaaccccatgacgatgaaccagttcactgacccgaataataccaccgtgtttgtgggcggtctttctggttacgtcactgaagacgaactccgttcgttctttcagggcttcggcgagatcacttacgtcaagattcctccaggaaagggttgcggcttcgtccagtttgtccaccgtcatgccgcagaaatggcaatcaaccagatgcagggatatcctatcggcaactcacgtgttcgtctttcctggggtagatcgcaaaacaactctggtgtcggcaccccataccgtcctgctccaccccctcctcattacttccctcctggtcctcctggccctcagggccctcctggtcctggcccctttggcggtcctggtcctgcgttcggaggtagcggtcatcagggtccccctggcggacttggccctcagtaa

SEQ ID NO: 31603 - protein, 431 aa, Muscodor strobelii
  misc_feature: SGI Peptide ID NO. 570882
  misc_feature (154)..(226): Pfam Id: PF00076 Pfam Desc: RNA recognition motif. (a.k.a. RRM, RBD, or RNP domain)
  misc_feature (303)..(368): Pfam Id: PF00076 Pfam Desc: RNA recognition motif. (a.k.a. RRM, RBD, or RNP domain)
  misc_feature (61)..(131): Pfam Id: PF00076 Pfam Desc: RNA recognition motif. (a.k.a. RRM, RBD, or RNP domain)
  misc_feature (87)..(126): Pfam Id: PF00076 Pfam Desc: RNA recognition motif. (a.k.a. RRM, RBD, or RNP domain)
  misc_feature (20)..(381): NCBI GI: 85115744 Blast Desc: NCU00768 [Neurospora crassa OR74A] gi|28926722|gb|EAA35688.1| conserved [Neurospora crassa OR74A] gi|38636412|emb|CAE81949.1| related to polyadenylate-binding
  misc_feature (57)..(393): NCBI GI: 171695760 Blast Desc: protein product [Podospora anserina] gi|170948122|emb|CAP60286.1| protein product [Podospora anserina]
  misc_feature (44)..(381): NCBI GI: 145601259 Blast Desc: MGG_08741 [Magnaporthe grisea 70-15] gi|145009284|gb|EDJ93995.1| MGG_08741 [Magnaporthe grisea 70-15]
  misc_feature (16)..(408): NCBI GI: 46122719 Blast Desc: FG05737.1 [Gibberella zeae PH-1]
  misc_feature (58)..(403): NCBI GI: 256726752 Blast Desc: NECHADRAFT_66100 [Nectria haematococca mpVI 77-13-4]
  misc_feature (1)..(381): NCBI GI: 261353869 Blast Desc: RNA-binding post-transcriptional regulator csx1 [Verticillium albo-atrum VaMs.102]
  misc_feature (53)..(378): NCBI GI: 70982362 Blast Desc: mRNA binding post-transcriptional regulator (Csx1) [Aspergillus fumigatus Af293] gi|66844333|gb|EAL84671.1| mRNA binding post-transcriptional regulator (Csx1), [Aspergillus mRNA
  misc_feature (38)..(378): NCBI GI: 261199113 Blast Desc: mRNA binding post-transcriptional regulator [Ajellomyces dermatitidis SLH14081] gi|239595110|gb|EEQ77691.1| mRNA binding post-transcriptional regulator [Ajellomyces
  misc_feature (58)..(378): NCBI GI: 169782070 Blast Desc: [Aspergillus oryzae RIB40] gi|83774240|dbj|BAE64365.1| protein product [Aspergillus oryzae]
  misc_feature (38)..(378): NCBI GI: 226292803 Blast Desc: mRNA binding post-transcriptional regulator (Csx1) [Paracoccidioides brasiliensis Pb18]
  misc_feature: Useful for introducing or modulating the production of volatile compounds
MEGFNPYNGQPPSNGSGSQGDSGSQGVPGVQAGGLPMAPTNGQAGGELGQNFQNDSARQTLWMGELVGWMDENFIRQLYQSALNETVQVKIIRDRHSGSAGYCFVEFTTPEAAQKALQLNGTPIPNTDRVFRLNWASGGGLIDRRDDRSPEFSIFVGDLGHEVNEFVLVALFQSRFPSCKSAKIMTDQQTGQSRGYGFVRFSSEDEQQRALNEMQGVYCGNRPMRVSPATPKNRGHQGNSFSQYGGGQPMMPPPQAPQHGGMAGAPWMHPQQQQQPNYYQQQPQGTFNPMTMNQFTDPNNTTVFVGGLSGYVTEDELRSFFQGFGEITYVKIPPGKGCGFVQFVHRHAAEMAINQMQGYPIGNSRVRLSWGRSQNNSGVGTPYRPAPPPPHYFPPGPPGPQGPPGPGPFGGPGPAFGGSGHQGPPGGLGPQ

SEQ ID NO: 31604 - DNA, 2475 bp, Muscodor strobelii
  misc_feature: SGI EST ID NO. CUFF.75013.0
  misc_feature: Variant of the nucleotide sequence at SEQ ID NO 31602
ggcattgattttctggagttcaaacctccaaacatttccaccctccacaactttctacccaagaagtcttcgagagtctgcagtccccgctccagtttctatcttcgtagaaaccttcggtacgctcttcgcttgctcatgccagctcgtttccaaccccctcgcacattcttccccggcccaattaacaaattcttcctcacctgactgggtccaagcgtccagcagctctgatctatcactgccgaaagctcggttacctacagctctcagggcattttctagtcacgagcaagcatccttcctcccatcttgatctatccaacaaacactattaagcctgagtccgggttgcggtacacatcaaagctggttccgaccagtacgagaccactactcaactcgctctcctattctattcgtgccattctctacttcgccgtggccgcctcgctttcctcatacgttcacggtggcatcagcaataagctaatgtgcgcgcgacagcatacattgatctcccctttggttccttctcttctgcactagttcatcatggagggattcaatccttacaatggccagccgccctcgaacggctcaggctctcagggtgactccggctcgcaaggagttcccggcgttcaggccggtggtcttccaatggcccccaccaacggccaggctggcggcgaactgggacagaacttccagaacgattctgctcgtcagaccctgtggatgggcgaactagttggatggatggacgagaatttcattcgtcagctttaccagtctgccttgaacgagactgttcaggtcaagatcatccgagaccgtcattccggcagcgccggctactgcttcgtggagtttaccactcctgaggctgctcagaaggcactccagctcaacggaactcccatcccaaacaccgacagggtcttccgccttaactgggcttctggtggcggtctcattgatcgccgtgatgaccgcagtccggagttttctatcttcgtcggagatctgggtcacgaagtcaatgaatttgttctcgtggctctgtttcaatctcgctttccatcttgtaagtctgccaagatcatgacagatcaacagaccggacagtctcgcggttatggtttcgtccgattttccagcgaagacgagcagcaacgtgccttgaacgagatgcagggtgtctactgtggtaaccggcccatgcgtgtatcgcctgccactcctaagaaccgcggtcaccaagggaactcgttcagccagtatggaggcggtcagcctatgatgccacccccgcaggcccctcagcacggaggcatggctggtgctccttggatgcatcctcagcagcagcagcagccgaactactatcagcagcagccccagggtacattcaaccccatgacgatgaaccagttcactgacccgaataataccaccgtgtttgtgggcggtctttctggttacgtcactgaagacgaactccgttcgttctttcagggcttcggcgagatcacttacgtcaagattcctccaggaaagggttgcggcttcgtccagtttgtccaccgtcatgccgcagaaatggcaatcaaccagatgcagggatatcctatcggcaactcacgtgttcgtctttcctggggtagatcgcaaaacaactctggtgtcggcaccccataccgtcctgctccaccccctcctcattacttccctcctggtcctcctggccctcagggccctcctggtcctggcccctttggcggtcctggtcctgcgttcggaggtagcggtcatcagggtccccctggcggacttggccctcagtaattcgtcgatttgcctctcggtgtcttagtggtacggcgttgacggtcaattctctttgcactgatacttggatgccttcacgaactgcccggcattatgaggcgtcccgaaatttccgcacttgattccgcactgccttctttcttctacgtcattcggaccgaaaagctggcgctctggttgaaacgatgcaatggttttttctgacctctaaaacgacgacgacttgacgttatgatttcatatttccaatcgactccccaccaacctgaccgccctatgtttccatcttgcagcacatggttttcaatgacttcaagctgatggaactccactgctgactacgaaagtcttcagagttatgcgcttgcttgcagctatcatatcgcgcgtctgctatcatcattcgtccgcctctattctgttccctgcaatatacccagtctcgcaatgttcgcgtacatggttggaggttcttttgcaacccggggttcaagtaagcatggatcaaggagtactctgaggcgctcggatgggctatggtgaagtgattcagagcctagttagcacatttatgctagttcagctcaatttcctatactgaataaacaaacttgactatac

SEQ ID NO: 31605 - DNA, 5352 bp, Muscodor strobelii
  misc_feature: SGI cDNA ID NO. 570883
  misc_feature: Encodes the peptide sequence at SEQ ID NO 31606
atgctgcaagtagccgccatctctctgtacttgaagactactactcactctttctcgcaggcttttcaagctttcattagtgtcaataactttgtcaagcccacaggtgtgacgttgcccgtttcagcgctcataaaacagtacaaacaaacggggtcaaatatggtgaagcaggtagacctaagcttgattaagcaaggaattttgcgacttgatcaatcaaagcgtcgcgaactgttgccagtggctttgagcaatatatcaaaagaacccacgccagccagcggtgctggcttcttcaacatattccttcgcctcttgcttgagataaaggcaccaggaagaggtagcacagaggatcagtcgtttcgcgacactgttggctttcagaacgcatcggacgcccaatatgttgcgacttggctcggcaaattgttcttattgaaacaagatcttgctctcgctgccgatgatgatgtcccgaataaactgtctgttgttccctcaggcgtcaccaaggaagatgtttcatttttgcgaagtaataacccccagctatggaatccagaagcacccaataatatgagtctaccggaatgcaaaaaaaaggctgtcgattttctagccagtggtgcgttcaacgacgatgaacgttacttgcctgtcatctgtgcttctggatcaccagactctcggatcgccctagtagccgacgatgtcataaagcgagctaacgtggatcttgaaagcgagaacttggtacgatcgttgtatgcggctcatgatattctaccagttgcccacaggatacaaattctcaaacttctatcaaaatcaggaattgcctgtgcattgaagaagcaggtcgtcgaagctgtgaaaatggatttctctttgaccgccggcgataaccctcccataggtggcctggaggccctacgtctacacaaagcccttctggctttcctagcctgggtttcaagaaatacctacgattctaacctcggagatacggagatgggaccagccttgataattatcttgaaagactacattctccaacagggttggccaacaccaaatgtccttgccaataaagacgaacagcggctgcgtgccaacgcatatgaggtcattggcacattagcaagatcaagccaactcgaagaaaaggtcaaggactctattctcaagtggcttttcgactctctggtatctgacccgagcacggagattgtggttcacattgagagcgcgctatcttccatgatgagcctcttcaagtccaacaacgcttctcaacaccgagatttagaagttctgctcttagagtacatggtattgcctgagagagaaggcgttagaacagcacggcatgttgccacgaggttcgcaaatcattgtctgccttttagtaatgtgaaggcacgctggatcagtgtattggctgttgctggcggctcgtctgaacgccgtgatgttttagaagagggtcaacgaggacttgatccatggtgggccacaaagtctcaactcgatgagacggctctaaagcttcccaactggacagagttatcggcatactttttcgattcgacgcctcgtcaaatcagcgaacatgagatgtctatcgaccagacctcgaagtataatttgtttcccgataatcgcatttcagccttccccgtgtctattcgacttgtcaaaaacatgctcctgcttactgccctcggaatcaatactttcgagattgactgggagagccgtttagatacacagctccaaaatgacctcggcgctcgtcgtagtatcagagaatatttcaaagatgtggactcggcatcaatcatcaagatcctacacgccgcatttgatggattaagagatcatcctgagattggtgctgaagaatgcctaagctgtatagccgacattctgtccttttctccattgtcgatcctcacaagcactatccgtaatagagcgcctgaactactaaccttgaccaagtcaaacaattataaggtcagacaactcgtcgccaaaacattcgggacactggcgccttggcatgatcaagccgcagactacgttactcagttgcgaacttttgtcgagtcttgtgacattcgtgctgctgctatgtcggcgcagtaccaatgttcactcagttgtcttgcgagttaccatgcttcgtcagcaatgtatggtagattgtcttcgcatcaaatttcaaatgatgttcactccgtctatcaatgctgcgttgcaaatatcgagaacagcgacacagctatccaaaacacatcattagattcacttgcgcaactatggactctaagcattggtttgccgcgagacgaagctgagtgggacactttgatgacttctctcacgaacttagcacccaagggccatgagaaatcaatctacgcacttggacgccttgcattgtcgacccgtagaactacaacagcaaacgaagatgctcatctaaacaagatcttggaaaatctattggctctaatagatttaaagagaacggaagtccattttgtcattggcgaggctatttcagcggctattgcttgctgggactccgagtcggtacaactcagtgtcgatgtggaactctccgaatctactgataacatcgatattccacggaaacgacctgaacatatttccgctactcttgataagctcatcgaggggtctaaagcaacgaagccgtcactcatcaaggcctctgggatctggctgttctgcattattcaattctgttccaatttgaaggagattcagtcacgacttcgcgagtgccagatagcatttatgcgattgttaacggctcgagatgagcttgtacaagaaactgcatctcgaggtttggcgttagtttacgagaagggcgacgattcgttgaaaggcgatcttgtgagagacctggtggctagtttcactggtaccaaaacgcaactcaaagtcgacgaggaaacagagcttttcgacgctggagccttgcccactggcgaaggaaaatccattacatcttacaaggatatcatcaatctagcaaatgaggttggagaccaacgcctcatttacaaatttatggcactcgcaaccaacgctgcgacatggacagcgcgatcggcattcggacgctttggattgagtaatatcctctcggatgccgacttggaccctaaaatattcccaaagctttatcgttataggttcgacccgaaccccaacgtaagaaggtcaatggacgatatctggaaagctgttgccaaagaccagacggccataatcgaccaacatttcgacgcaatcatgattgatttactcaaaagcattgttgatgggcgcgagtggcgtgtcagagaagctagttgcgcagccattgctgatctgatctacggacagccctttccgaagtacgaaaagtactacgttgacatctggaaagtcacgctcaaggttctcgacgatcagaaaggctctgtaagggaagcagcacttaaactctgtttgggactctcaaaaactctggtcgcgcagttgcaagagaacaacaattcctcgtcggcccaagcgatgatgaatcaagttttcccatttcttctttccgacaaaggcatcgagaactcagtggaggacgtcaagatcatggcaatcaagaccgttttagatgtagtcaagagcggtggcgaagctatgaaacctttcattcctacaatcatcacccattttctcggacttctaagtacgattgaaccctcgcagattaattattattatcaaagggttagcgaggaagatcgtgaggggctcgacaagttaaggagtagtgcagccacacggtcacctatgtttgagtgtattgtcaactgtcttccattcgttgacaatgatgtcatgtcaaagcttgctcctcagctggtctcgacgatcaaatctgctctcggtatgcagacaaaaatcggctgcagtgagctgctcagcacattagctttacggcacagtctcctcctgtcaccgtacaaggcgaccttcttgaagagcctacaaacccaaatctttgaccgcaacaacgaagttagcaaagcttacgcaaggagcgctgcgtatttgctcaggtcttcgtcgcctaaaactcgagaaagttatagcacttgccttgtagaagcatacttcaaacctgttgacgatgatacgccaaggcaaaaggtagcagatgcagttctagctatcgccaagatctcgcctgacgcattcggcgacttagagtcacggcttctaccgttcgcttattacgccaaacacgatactgatagctacgtctcggaagagttcgatgctgtctggaatcagcacgctggtggaacccatacggtgaagcgctatattgacgagattgtaggcttcatctcagaagggctaagtatctcgaaatggcctctacagcacggtgccgcattcactgtcgcttctatgatcaaggcactgagtagtgccatcaatgaaaccgaccagtttaacgaatccagcattcagcgtatctggcccgtgttggatcgcgcattgtcgctcaagacattcaaaggcaaagaaaagctaatcgccacgtatcccctcttcatcaagcacagcaaagccttttggacagctgattcaacagtctctgtgcaaacaaaaaagatcgccattcgagaagctaaacggaataatgatgaatacaggccatcctcatttgaagcgctagccgactttgctgctgtcagagatgacctggacatgtacgccgaagtcgtatcgattgtatccgactacttgagaccagaaggcgagatccatagccttagcgacctaaagcgtaagaccagcgaatcgtcgctggtggcagtcatgactgcttatagccgccctaaattgctatcttcgcctctggctatactcaacgagatagccaccaccgtagagagcgcggcagaagcaacaactttgaacaaagacacatttttcacttgcaccttacggctcatgaagaagacgtcggagtctgaagttctttcagtgaacgacgatgcttctttggccaccagatggtttaagcttttactccggaacgaaaccgaggtcgtgcttgaatcgcacagagcatctcgagcaaaatcccttgaggcatttgcgagaacctggcgagccggcattttctgtactcaagagaagcgagtggcgctgaatgaagaaatggtgcagaaaatgagaagtatgatcgatatagagagatcattagatgtacagaggctcctcacagaagctctcacagcattgcaagaatag

SEQ ID NO: 31606 - protein, 1783 aa, Muscodor strobelii
  misc_feature: SGI Peptide ID NO. 570883
  misc_feature (19)..(1673): NCBI GI: 85115752 Blast Desc: NCU00770 [Neurospora crassa OR74A] gi|28926724|gb|EAA35690.1| conserved [Neurospora crassa OR74A] gi|38636410|emb|CAE81947.1| related to ECM29 protein [Neurospora
  misc_feature (20)..(1781): NCBI GI: 256727315 Blast Desc: NECHADRAFT_90729 [Nectria haematococca mpVI 77-13-4]
  misc_feature (25)..(1782): NCBI GI: 46122717 Blast Desc: FG05736.1 [Gibberella zeae PH-1]
  misc_feature (27)..(1781): NCBI GI: 171695756 Blast Desc: protein product [Podospora anserina] gi|170948120|emb|CAP60284.1| protein product [Podospora anserina]
  misc_feature (127)..(1782): NCBI GI: 116181158 Blast Desc: CHGG_01207 [Chaetomium globosum CBS 148.51] gi|88185504|gb|EAQ92972.1| CHGG_01207 [Chaetomium globosum CBS 148.51]
  misc_feature (2)..(1741): NCBI GI: 145601263 Blast Desc: MGG_08744 [Magnaporthe grisea 70-15] gi|145009286|gb|EDJ93997.1| MGG_08744 [Magnaporthe grisea 70-15]
  misc_feature (21)..(1774): NCBI GI: 156036462 Blast Desc: SS1G_12920 [Sclerotinia sclerotiorum 1980] gi|154698325|gb|EDN98063.1| SS1G_12920 [Sclerotinia sclerotiorum 1980]
  misc_feature (37)..(1783): NCBI GI: 154308466 Blast Desc: BC1G_08293 [Botryotinia fuckeliana B05.10] gi|150852834|gb|EDN28026.1| BC1G_08293 [Botryotinia fuckeliana B05.10]
  misc_feature (27)..(1534): NCBI GI: 261353868 Blast Desc: proteasome component ECM29 [Verticillium albo-atrum VaMs.102]
  misc_feature (1)..(1778): NCBI GI: 261201346 Blast Desc: proteasome component [Ajellomyces dermatitidis SLH14081] gi|239592132|gb|EEQ74713.1| proteasome component [Ajellomyces dermatitidis SLH14081]
MLQVAAISLYLKTTTHSFSQAFQAFISVNNFVKPTGVTLPVSALIKQYKQTGSNMVKQVDLSLIKQGILRLDQSKRRELLPVALSNISKEPTPASGAGFFNIFLRLLLEIKAPGRGSTEDQSFRDTVGFQNASDAQYVATWLGKLFLLKQDLALAADDDVPNKLSVVPSGVTKEDVSFLRSNNPQLWNPEAPNNMSLPECKKKAVDFLASGAFNDDERYLPVICASGSPDSRIALVADDVIKRANVDLESENLVRSLYAAHDILPVAHRIQILKLLSKSGIACALKKQVVEAVKMDFSLTAGDNPPIGGLEALRLHKALLAFLAWVSRNTYDSNLGDTEMGPALIIILKDYILQQGWPTPNVLANKDEQRLRANAYEVIGTLARSSQLEEKVKDSILKWLFDSLVSDPSTEIVVHIESALSSMMSLFKSNNASQHRDLEVLLLEYMVLPEREGVRTARHVATRFANHCLPFSNVKARWISVLAVAGGSSERRDVLEEGQRGLDPWWATKSQLDETALKLPNWTELSAYFFDSTPRQISEHEMSIDQTSKYNLFPDNRISAFPVSIRLVKNMLLLTALGINTFEIDWESRLDTQLQNDLGARRSIREYFKDVDSASIIKILHAAFDGLRDHPEIGAEECLSCIADILSFSPLSILTSTIRNRAPELLTLTKSNNYKVRQLVAKTFGTLAPWHDQAADYVTQLRTFVESCDIRAAAMSAQYQCSLSCLASYHASSAMYGRLSSHQISNDVHSVYQCCVANIENSDTAIQNTSLDSLAQLWTLSIGLPRDEAEWDTLMTSLTNLAPKGHEKSIYALGRLALSTRRTTTANEDAHLNKILENLLALIDLKRTEVHFVIGEAISAAIACWDSESVQLSVDVELSESTDNIDIPRKRPEHISATLDKLIEGSKATKPSLIKASGIWLFCIIQFCSNLKEIQSRLRECQIAFMRLLTARDELVQETASRGLALVYEKGDDSLKGDLVRDLVASFTGTKTQLKVDEETELFDAGALPTGEGKSITSYKDIINLANEVGDQRLIYKFMALATNAATWTARSAFGRFGLSNILSDADLDPKIFPKLYRYRFDPNPNVRRSMDDIWKAVAKDQTAIIDQHFDAIMIDLLKSIVDGREWRVREASCAAIADLIYGQPFPKYEKYYVDIWKVTLKVLDDQKGSVREAALKLCLGLSKTLVAQLQENNNSSSAQAMMNQVFPFLLSDKGIENSVEDVKIMAIKTVLDVVKSGGEAMKPFIPTIITHFLGLLSTIEPSQINYYYQRVSEEDREGLDKLRSSAATRSPMFECIVNCLPFVDNDVMSKLAPQLVSTIKSALGMQTKIGCSELLSTLALRHSLLLSPYKATFLKSLQTQIFDRNNEVSKAYARSAAYLLRSSSPKTRESYSTCLVEAYFKPVDDDTPRQKVADAVLAIAKISPDAFGDLESRLLPFAYYAKHDTDSYVSEEFDAVWNQHAGGTHTVKRYIDEIVGFISEGLSISKWPLQHGAAFTVASMIKALSSAINETDQFNESSIQRIWPVLDRALSLKTFKGKEKLIATYPLFIKHSKAFWTADSTVSVQTKKIAIREAKRNNDEYRPSSFEALADFAAVRDDLDMYAEVVSIVSDYLRPEGEIHSLSDLKRKTSESSLVAVMTAYSRPKLLSSPLAILNEIATTVESAAEATTLNKDTFFTCTLRLMKKTSESEVLSVNDDASLATRWFKLLLRNETEVVLESHRASRAKSLEAFARTWRAGIFCTQEKRVALNEEMVQKMRSMIDIERSLDVQRLLTEALTALQE

SEQ ID NO: 31607 - DNA, 5940 bp, Muscodor strobelii
  misc_feature: SGI EST ID NO. CUFF.74835.1
  misc_feature: Variant of the nucleotide sequence at SEQ ID NO 31605
agatgatcctacaaattgtccagcagcggtcaagaaaacagttctctaggtctatgaccgtgttgtatttgcgacttcgaattttaggctcgtgttgacgctatgaaaggcctctatttcgggcacccctcagcgcacatgacttgatctcttaggtacacatccacggtctgtgtcgttgactgcagtggcctacacctcgttgacctttctgtcgtaatcaaccgcctagtttcgtcagatagacctttgaatgccggtatcgagtggtggtaccagagagtgtcgaagtgattgcaagatttttctcaacgaggcaaaacaaattcccactgcgacctcgaacaaagctaccaccctcgggtgctatcaactggctcatgtcgtcttcaaatgagggcacagagctgaagctcatttcatcgattcgttacaaatttgccggggtgtctagcgatgagaagaagttgagccaagccctccaatcccatctcaccagcttactggagaaggctggcagcgagcacaaggctgttcgggatgctgcaagtagccgccatctctctgtacttgaagactactactcactctttctcgcaggcttttcaagctttcattagtgtcaataactttgtcaagcccacaggtgtgacgttgcccgtttcagcgctcataaaacagtacaaacaaacggggtcaaatatggtgaagcaggtagacctaagcttgattaagcaaggaattttgcgacttgatcaatcaaagcgtcgcgaactgttgccagtggctttgagcaatatatcaaaagaacccacgccagccagcggtgctggcttcttcaacatattccttcgcctcttgcttgagataaaggcaccaggaagaggtagcacagaggatcagtcgtttcgcgacactgttggctttcagaacgcatcggacgcccaatatgttgcgacttggctcggcaaattgttcttattgaaacaagatcttgctctcgctgccgatgatgatgtcccgaataaactgtctgttgttccctcaggcgtcaccaaggaagatgtttcatttttgcgaagtaataacccccagctatggaatccagaagcacccaataatatgagtctaccggaatgcaaaaaaaaggctgtcgattttctagccagtggtgcgttcaacgacgatgaacgttacttgcctgtcatctgtgcttctggatcaccagactctcggatcgccctagtagccgacgatgtcataaagcgagctaacgtggatcttgaaagcgagaacttggtacgatcgttgtatgcggctcatgatattctaccagttgcccacaggatacaaattctcaaacttctatcaaaatcaggaattgcctgtgcattgaagaagcaggtcgtcgaagctgtgaaaatggatttctctttgaccgccggcgataaccctcccataggtggcctggaggccctacgtctacacaaagcccttctggctttcctagcctgggtttcaagaaatacctacgattctaacctcggagatacggagatgggaccagccttgataattatcttgaaagactacattctccaacagggttggccaacaccaaatgtccttgccaataaagacgaacagcggctgcgtgccaacgcatatgaggtcattggcacattagcaagatcaagccaactcgaagaaaaggtcaaggactctattctcaagtggcttttcgactctctggtatctgacccgagcacggagattgtggttcacattgagagcgcgctatcttccatgatgagcctcttcaagtccaacaacgcttctcaacaccgagatttagaagttctgctcttagagtacatggtattgcctgagagagaaggcgttagaacagcacggcatgttgccacgaggttcgcaaatcattgtctgccttttagtaatgtgaaggcacgctggatcagtgtattggctgttgctggcggctcgtctgaacgccgtgatgttttagaagagggtcaacgaggacttgatccatggtgggccacaaagtctcaactcgatgagacggctctaaagcttcccaactggacagagttatcggcatactttttcgattcgacgcctcgtcaaatcagcgaacatgagatgtctatcgaccagacctcgaagtataatttgtttcccgataatcgcatttcagccttccccgtgtctattcgacttgtcaaaaacatgctcctgcttactgccctcggaatcaatactttcgagattgactgggagagccgtttagatacacagctccaaaatgacctcggcgctcgtcgtagtatcagagaatatttcaaagatgtggactcggcatcaatcatcaagatcctacacgccgcatttgatggattaagagatcatcctgagattggtgctgaagaatgcctaagctgtatagccgacattctgtccttttctccattgtcgatcctcacaagcactatccgtaatagagcgcctgaactactaaccttgaccaagtcaaacaattataaggtcagacaactcgtcgccaaaacattcgggacactggcgccttggcatgatcaagccgcagactacgttactcagttgcgaacttttgtcgagtcttgtgacattcgtgctgctgctatgtcggcgcagtaccaatgttcactcagttgtcttgcgagttaccatgcttcgtcagcaatgtatggtagattgtcttcgcatcaaatttcaaatgatgttcactccgtctatcaatgctgcgttgcaaatatcgagaacagcgacacagctatccaaaacacatcattagattcacttgcgcaactatggactctaagcattggtttgccgcgagacgaagctgagtgggacactttgatgacttctctcacgaacttagcacccaagggccatgagaaatcaatctacgcacttggacgccttgcattgtcgacccgtagaactacaacagcaaacgaagatgctcatctaaacaagatcttggaaaatctattggctctaatagatttaaagagaacggaagtccattttgtcattggcgaggctatttcagcggctattgcttgctgggactccgagtcggtacaactcagtgtcgatgtggaactctccgaatctactgataacatcgatattccacggaaacgacctgaacatatttccgctactcttgataagctcatcgaggggtctaaagcaacgaagccgtcactcatcaaggcctctgggatctggctgttctgcattattcaattctgttccaatttgaaggagattcagtcacgacttcgcgagtgccagatagcatttatgcgattgttaacggctcgagatgagcttgtacaagaaactgcatctcgaggtttggcgttagtttacgagaagggcgacgattcgttgaaaggcgatcttgtgagagacctggtggctagtttcactggtaccaaaacgcaactcaaagtcgacgaggaaacagagcttttcgacgctggagccttgcccactggcgaaggaaaatccattacatcttacaaggatatcatcaatctagcaaatgaggttggagaccaacgcctcatttacaaatttatggcactcgcaaccaacgctgcgacatggacagcgcgatcggcattcggacgctttggattgagtaatatcctctcggatgccgacttggaccctaaaatattcccaaagctttatcgttataggttcgacccgaaccccaacgtaagaaggtcaatggacgatatctggaaagctgttgccaaagaccagacggccataatcgaccaacatttcgacgcaatcatgattgatttactcaaaagcattgttgatgggcgcgagtggcgtgtcagagaagctagttgcgcagccattgctgatctgatctacggacagccctttccgaagtacgaaaagtactacgttgacatctggaaagtcacgctcaaggttctcgacgatcagaaaggctctgtaagggaagcagcacttaaactctgtttgggactctcaaaaactctggtcgcgcagttgcaagagaacaacaattcctcgtcggcccaagcgatgatgaatcaagttttcccatttcttctttccgacaaaggcatcgagaactcagtggaggacgtcaagatcatggcaatcaagaccgttttagatgtagtcaagagcggtggcgaagctatgaaacctttcattcctacaatcatcacccattttctcggacttctaagtacgattgaaccctcgcagattaattattattatcaaagggttagcgaggaagatcgtgaggggctcgacaagttaaggagtagtgcagccacacggtcacctatgtttgagtgtattgtcaactgtcttccattcgttgacaatgatgtcatgtcaaagcttgctcctcagctggtctcgacgatcaaatctgctctcggtatgcagacaaaaatcggctgcagtgagctgctcagcacattagctttacggcacagtctcctcctgtcaccgtacaaggcgaccttcttgaagagcctacaaacccaaatctttgaccgcaacaacgaagttagcaaagcttacgcaaggagcgctgcgtatttgctcaggtcttcgtcgcctaaaactcgagaaagttatagcacttgccttgtagaagcatacttcaaacctgttgacgatgatacgccaaggcaaaaggtagcagatgcagttctagctatcgccaagatctcgcctgacgcattcggcgacttagagtcacggcttctaccgttcgcttattacgccaaacacgatactgatagctacgtctcggaagagttcgatgctgtctggaatcagcacgctggtggaacccatacggtgaagcgctatattgacgagattgtaggcttcatctcagaagggctaagtatctcgaaatggcctctacagcacggtgccgcattcactgtcgcttctatgatcaaggcactgagtagtgccatcaatgaaaccgaccagtttaacgaatccagcattcagcgtatctggcccgtgttggatcgcgcattgtcgctcaagacattcaaaggcaaagaaaagctaatcgccacgtatcccctcttcatcaagcacagcaaagccttttggacagctgattcaacagtctctgtgcaaacaaaaaagatcgccattcgagaagctaaacggaataatgatgaatacaggccatcctcatttgaagcgctagccgactttgctgctgtcagagatgacctggacatgtacgccgaagtcgtatcgattgtatccgactacttgagaccagaaggcgagatccatagccttagcgacctaaagcgtaagaccagcgaatcgtcgctggtggcagtcatgactgcttatagccgccctaaattgctatcttcgcctctggctatactcaacgagatagccaccaccgtagagagcgcggcagaagcaacaactttgaacaaagacacatttttcacttgcaccttacggctcatgaagaagacgtcggagtctgaagttctttcagtgaacgacgatgcttctttggccaccagatggtttaagcttttactccggaacgaaaccgaggtcgtgcttgaatcgcacagagcatctcgagcaaaatcccttgaggcatttgcgagaacctggcgagccggcattttctgtactcaagagaagcgagtggcgctgaatgaagaaatggtgcagaaaatgagaagtatgatcgatatagagagatcattagatgtacagaggctcctcacagaagctctcacagcattgcaagaatagagattgggccataagcgttcaatttaatagattatagattctcagagg

SEQ ID NO: 31608 - DNA, 5457 bp, Muscodor strobelii
  misc_feature: SGI cDNA ID NO. 570884
  misc_feature: Encodes the peptide sequence at SEQ ID NO 31609
atgtcgtcttcaaatgagggcacagagctgaagctcatttcatcgattcgttacaaatttgccggggtgtctagcgatgagaagaagttgagccaagccctccaatcccatctcaccagcttactggagaaggctggcagcgagcacaaggctgttcgggatgctgcttttcaagctttcattagtgtcaataactttgtcaagcccacaggtgtgacgttgcccgtttcagcgctcataaaacagtacaaacaaacggggtcaaatatggtgaagcaggtagacctaagcttgattaagcaaggaattttgcgacttgatcaatcaaagcgtcgcgaactgttgccagtggctttgagcaatatatcaaaagaacccacgccagccagcggtgctggcttcttcaacatattccttcgcctcttgcttgagataaaggcaccaggaagaggtagcacagaggatcagtcgtttcgcgacactgttggctttcagaacgcatcggacgcccaatatgttgcgacttggctcggcaaattgttcttattgaaacaagatcttgctctcgctgccgatgatgatgtcccgaataaactgtctgttgttccctcaggcgtcaccaaggaagatgtttcatttttgcgaagtaataacccccagctatggaatccagaagcacccaataatatgagtctaccggaatgcaaaaaaaaggctgtcgattttctagccagtggtgcgttcaacgacgatgaacgttacttgcctgtcatctgtgcttctggatcaccagactctcggatcgccctagtagccgacgatgtcataaagcgagctaacgtggatcttgaaagcgagaacttggtacgatcgttgtatgcggctcatgatattctaccagttgcccacaggatacaaattctcaaacttctatcaaaatcaggaattgcctgtgcattgaagaagcaggtcgtcgaagctgtgaaaatggatttctctttgaccgccggcgataaccctcccataggtggcctggaggccctacgtctacacaaagcccttctggctttcctagcctgggtttcaagaaatacctacgattctaacctcggagatacggagatgggaccagccttgataattatcttgaaagactacattctccaacagggttggccaacaccaaatgtccttgccaataaagacgaacagcggctgcgtgccaacgcatatgaggtcattggcacattagcaagatcaagccaactcgaagaaaaggtcaaggactctattctcaagtggcttttcgactctctggtatctgacccgagcacggagattgtggttcacattgagagcgcgctatcttccatgatgagcctcttcaagtccaacaacgcttctcaacaccgagatttagaagttctgctcttagagtacatggtattgcctgagagagaaggcgttagaacagcacggcatgttgccacgaggttcgcaaatcattgtctgccttttagtaatgtgaaggcacgctggatcagtgtattggctgttgctggcggctcgtctgaacgccgtgatgttttagaagagggtcaacgaggacttgatccatggtgggccacaaagtctcaactcgatgagacggctctaaagcttcccaactggacagagttatcggcatactttttcgattcgacgcctcgtcaaatcagcgaacatgagatgtctatcgaccagacctcgaagtataatttgtttcccgataatcgcatttcagccttccccgtgtctattcgacttgtcaaaaacatgctcctgcttactgccctcggaatcaatactttcgagattgactgggagagccgtttagatacacagctccaaaatgacctcggcgctcgtcgtagtatcagagaatatttcaaagatgtggactcggcatcaatcatcaagatcctacacgccgcatttgatggattaagagatcatcctgagattggtgctgaagaatgcctaagctgtatagccgacattctgtccttttctccattgtcgatcctcacaagcactatccgtaatagagcgcctgaactactaaccttgaccaagtcaaacaattataaggtcagacaactcgtcgccaaaacattcgggacactggcgccttggcatgatcaagccgcagactacgttactcagttgcgaacttttgtcgagtcttgtgacattcgtgctgctgctatgtcggcgcagtaccaatgttcactcagttgtcttgcgagttaccatgcttcgtcagcaatgtatggtagattgtcttcgcatcaaatttcaaatgatgttcactccgtctatcaatgctgcgttgcaaatatcgagaacagcgacacagctatccaaaacacatcattagattcacttgcgcaactatggactctaagcattggtttgccgcgagacgaagctgagtgggacactttgatgacttctctcacgaacttagcacccaagggccatgagaaatcaatctacgcacttggacgccttgcattgtcgacccgtagaactacaacagcaaacgaagatgctcatctaaacaagatcttggaaaatctattggctctaatagatttaaagagaacggaagtccattttgtcattggcgaggctatttcagcggctattgcttgctgggactccgagtcggtacaactcagtgtcgatgtggaactctccgaatctactgataacatcgatattccacggaaacgacctgaacatatttccgctactcttgataagctcatcgaggggtctaaagcaacgaagccgtcactcatcaaggcctctgggatctggctgttctgcattattcaattctgttccaatttgaaggagattcagtcacgacttcgcgagtgccagatagcatttatgcgattgttaacggctcgagatgagcttgtacaagaaactgcatctcgaggtttggcgttagtttacgagaagggcgacgattcgttgaaaggcgatcttgtgagagacctggtggctagtttcactggtaccaaaacgcaactcaaagtcgacgaggaaacagagcttttcgacgctggagccttgcccactggcgaaggaaaatccattacatcttacaaggatatcatcaatctagcaaatgaggttggagaccaacgcctcatttacaaatttatggcactcgcaaccaacgctgcgacatggacagcgcgatcggcattcggacgctttggattgagtaatatcctctcggatgccgacttggaccctaaaatattcccaaagctttatcgttataggttcgacccgaaccccaacgtaagaaggtcaatggacgatatctggaaagctgttgccaaagaccagacggccataatcgaccaacatttcgacgcaatcatgattgatttactcaaaagcattgttgatgggcgcgagtggcgtgtcagagaagctagttgcgcagccattgctgatctgatctacggacagccctttccgaagtacgaaaagtactacgttgacatctggaaagtcacgctcaaggttctcgacgatcagaaaggctctgtaagggaagcagcacttaaactctgtttgggactctcaaaaactctggtcgcgcagttgcaagagaacaacaattcctcgtcggcccaagcgatgatgaatcaagttttcccatttcttctttccgacaaaggcatcgagaactcagtggaggacgtcaagatcatggcaatcaagaccgttttagatgtagtcaagagcggtggcgaagctatgaaacctttcattcctacaatcatcacccattttctcggacttctaagtacgattgaaccctcgcagattaattattattatcaaagggttagcgaggaagatcgtgaggggctcgacaagttaaggagtagtgcagccacacggtcacctatgtttgagtgtattgtcaactgtcttccattcgttgacaatgatgtcatgtcaaagcttgctcctcagctggtctcgacgatcaaatctgctctcggtatgcagacaaaaatcggctgcagtgagctgctcagcacattagctttacggcacagtctcctcctgtcaccgtacaaggcgaccttcttgaagagcctacaaacccaaatctttgaccgcaacaacgaagttagcaaagcttacgcaaggagcgctgcgtatttgctcaggtcttcgtcgcctaaaactcgagaaagttatagcacttgccttgtagaagcatacttcaaacctgttgacgatgatacgccaaggcaaaaggtagcagatgcagttctagctatcgccaagatctcgcctgacgcattcggcgacttagagtcacggcttctaccgttcgcttattacgccaaacacgatactgatagctacgtctcggaagagttcgatgctgtctggaatcagcacgctggtggaacccatacggtgaagcgctatattgacgagattgtaggcttcatctcagaagggctaagtatctcgaaatggcctctacagcacggtgccgcattcactgtcgcttctatgatcaaggcactgagtagtgccatcaatgaaaccgaccagtttaacgaatccagcattcagcgtatctggcccgtgttggatcgcgcattgtcgctcaagacattcaaaggcaaagaaaagctaatcgccacgtatcccctcttcatcaagcacagcaaagccttttggacagctgattcaacagtctctgtgcaaacaaaaaagatcgccattcgagaagctaaacggaataatgatgaatacaggccatcctcatttgaagcgctagccgactttgctgctgtcagagatgacctggacatgtacgccgaagtcgtatcgattgtatccgactacttgagaccagaaggcgagatccatagccttagcgacctaaagcgtaagaccagcgaatcgtcgctggtggcagtcatgactgcttatagccgccctaaattgctatcttcgcctctggctatactcaacgagatagccaccaccgtagagagcgcggcagaagcaacaactttgaacaaagacacatttttcacttgcaccttacggctcatgaagaagacgtcggagtctgaagttctttcagtgaacgacgatgcttctttggccaccagatggtttaagcttttactccggaacgaaaccgaggtcgtgcttgaatcgcacagagcatctcgagcaaaatcccttgaggcatttgcgagaacctggcgagccggcattttctgtactcaagagaagcgagtggcgctgaatgaagaaatggtgcagaaaatgagaagtatgatcgatatagagagatcattagatgtacagaggctcctcacagaagctctcacagcattgcaagaatag

SEQ ID NO: 31609 - protein, 1818 aa, Muscodor strobelii
  misc_feature: SGI Peptide ID NO. 570884
  misc_feature (2)..(1708): NCBI GI: 85115752 Blast Desc: NCU00770 [Neurospora crassa OR74A] gi|28926724|gb|EAA35690.1| conserved [Neurospora crassa OR74A] gi|38636410|emb|CAE81947.1| related to ECM29 protein [Neurospora
  misc_feature (4)..(1816): NCBI GI: 256727315 Blast Desc: NECHADRAFT_90729 [Nectria haematococca mpVI 77-13-4]
  misc_feature (2)..(1817): NCBI GI: 46122717 Blast Desc: FG05736.1 [Gibberella zeae PH-1]
  misc_feature (2)..(1816): NCBI GI: 171695756 Blast Desc: protein product [Podospora anserina] gi|170948120|emb|CAP60284.1| protein product [Podospora anserina]
  misc_feature (3)..(1776): NCBI GI: 145601263 Blast Desc: MGG_08744 [Magnaporthe grisea 70-15] gi|145009286|gb|EDJ93997.1| MGG_08744 [Magnaporthe grisea 70-15]
  misc_feature (162)..(1817): NCBI GI: 116181158 Blast Desc: CHGG_01207 [Chaetomium globosum CBS 148.51] gi|88185504|gb|EAQ92972.1| CHGG_01207 [Chaetomium globosum CBS 148.51]
  misc_feature (1)..(1809): NCBI GI: 156036462 Blast Desc: SS1G_12920 [Sclerotinia sclerotiorum 1980] gi|154698325|gb|EDN98063.1| SS1G_12920 [Sclerotinia sclerotiorum 1980]
  misc_feature (1)..(1818): NCBI GI: 154308466 Blast Desc: BC1G_08293 [Botryotinia fuckeliana B05.10] gi|150852834|gb|EDN28026.1| BC1G_08293 [Botryotinia fuckeliana B05.10]
  misc_feature (2)..(1569): NCBI GI: 261353868 Blast Desc: proteasome component ECM29 [Verticillium albo-atrum VaMs.102]
  misc_feature (1)..(1813): NCBI GI: 261201346 Blast Desc: proteasome component [Ajellomyces dermatitidis SLH14081] gi|239592132|gb|EEQ74713.1| proteasome component [Ajellomyces dermatitidis SLH14081]
MSSSNEGTELKLISSIRYKFAGVSSDEKKLSQALQSHLTSLLEKAGSEHKAVRDAAFQAFISVNNFVKPTGVTLPVSALIKQYKQTGSNMVKQVDLSLIKQGILRLDQSKRRELLPVALSNISKEPTPASGAGFFNIFLRLLLEIKAPGRGSTEDQSFRDTVGFQNASDAQYVATWLGKLFLLKQDLALAADDDVPNKLSVVPSGVTKEDVSFLRSNNPQLWNPEAPNNMSLPECKKKAVDFLASGAFNDDERYLPVICASGSPDSRIALVADDVIKRANVDLESENLVRSLYAAHDILPVAHRIQILKLLSKSGIACALKKQVVEAVKMDFSLTAGDNPPIGGLEALRLHKALLAFLAWVSRNTYDSNLGDTEMGPALIIILKDYILQQGWPTPNVLANKDEQRLRANAYEVIGTLARSSQLEEKVKDSILKWLFDSLVSDPSTEIVVHIESALSSMMSLFKSNNASQHRDLEVLLLEYMVLPEREGVRTARHVATRFANHCLPFSNVKARWISVLAVAGGSSERRDVLEEGQRGLDPWWATKSQLDETALKLPNWTELSAYFFDSTPRQISEHEMSIDQTSKYNLFPDNRISAFPVSIRLVKNMLLLTALGINTFEIDWESRLDTQLQNDLGARRSIREYFKDVDSASIIKILHAAFDGLRDHPEIGAEECLSCIADILSFSPLSILTSTIRNRAPELLTLTKSNNYKVRQLVAKTFGTLAPWHDQAADYVTQLRTFVESCDIRAAAMSAQYQCSLSCLASYHASSAMYGRLSSHQISNDVHSVYQCCVANIENSDTAIQNTSLDSLAQLWTLSIGLPRDEAEWDTLMTSLTNLAPKGHEKSIYALGRLALSTRRTTTANEDAHLNKILENLLALIDLKRTEVHFVIGEAISAAIACWDSESVQLSVDVELSESTDNIDIPRKRPEHISATLDKLIEGSKATKPSLIKASGIWLFCIIQFCSNLKEIQSRLRECQIAFMRLLTARDELVQETASRGLALVYEKGDDSLKGDLVRDLVASFTGTKTQLKVDEETELFDAGALPTGEGKSITSYKDIINLANEVGDQRLIYKFMALATNAATWTARSAFGRFGLSNILSDADLDPKIFPKLYRYRFDPNPNVRRSMDDIWKAVAKDQTAIIDQHFDAIMIDLLKSIVDGREWRVREASCAAIADLIYGQPFPKYEKYYVDIWKVTLKVLDDQKGSVREAALKLCLGLSKTLVAQLQENNNSSSAQAMMNQVFPFLLSDKGIENSVEDVKIMAIKTVLDVVKSGGEAMKPFIPTIITHFLGLLSTIEPSQINYYYQRVSEEDREGLDKLRSSAATRSPMFECIVNCLPFVDNDVMSKLAPQLVSTIKSALGMQTKIGCSELLSTLALRHSLLLSPYKATFLKSLQTQIFDRNNEVSKAYARSAAYLLRSSSPKTRESYSTCLVEAYFKPVDDDTPRQKVADAVLAIAKISPDAFGDLESRLLPFAYYAKHDTDSYVSEEFDAVWNQHAGGTHTVKRYIDEIVGFISEGLSISKWPLQHGAAFTVASMIKALSSAINETDQFNESSIQRIWPVLDRALSLKTFKGKEKLIATYPLFIKHSKAFWTADSTVSVQTKKIAIREAKRNNDEYRPSSFEALADFAAVRDDLDMYAEVVSIVSDYLRPEGEIHSLSDLKRKTSESSLVAVMTAYSRPKLLSSPLAILNEIATTVESAAEATTLNKDTFFTCTLRLMKKTSESEVLSVNDDASLATRWFKLLLRNETEVVLESHRASRAKSLEAFARTWRAGIFCTQEKRVALNEEMVQKMRSMIDIERSLDVQRLLTEALTALQE

SEQ ID NO: 31610 - DNA, 5940 bp, Muscodor strobelii; identical to SEQ ID NO: 31607
  misc_feature: SGI EST ID NO. CUFF.74835.1
  misc_feature: Variant of the nucleotide sequence at SEQ ID NO 31608

SEQ ID NO: 31611 - DNA, 852 bp, Muscodor strobelii
  misc_feature: SGI cDNA ID NO. 570885
  misc_feature: Encodes the peptide sequence at SEQ ID NO 31612
atgatcaaggcactgagtagtgccatcaatgaaaccgaccagtttaacgaatccagcattcagcgtatctggcccgtgttggatcgcgcattgtcgctcaagacattcaaaggcaaagaaaagctaatcgccacgtatcccctcttcatcaagcacagcaaagccttttggacagctgattcaacagtctctgtgcaaacaaaaaagatcgccattcgagaagctaaacggaataatgatgaatacaggccatcctcatttgaagcgctagccgactttgctgctgtcagagatgacctggacatgtacgccgaagtcgtatcgattgtatccgactacttgagaccagaaggcgagatccatagccttagcgacctaaagcgtaagaccagcgaatcgtcgctggtggcagtcatgactgcttatagccgccctaaattgctatcttcgcctctggctatactcaacgagatagccaccaccgtagagagcgcggcagaagcaacaactttgaacaaagacacatttttcacttgcaccttacggctcatgaagaagacgtcggagtctgaagttctttcagtgaacgacgatgcttctttggccaccagatggtttaagcttttactccggaacgaaaccgaggtcgtgcttgaatcgcacagagcatctcgagcaaaatcccttgaggcatttgcgagaacctggcgagccggcattttctgtactcaagagaagcgagtggcgctgaatgaagaaatggtgcagaaaatgagaagtatgatcgatatagagagatcattagatgtacagaggctcctcacagaagctctcacagcattgcaagaatag

SEQ ID NO: 31612 - protein, 283 aa, Muscodor strobelii
  misc_feature: SGI Peptide ID NO. 570885
  misc_feature (1)..(281): NCBI GI: 256727315 Blast Desc: NECHADRAFT_90729 [Nectria haematococca mpVI 77-13-4]
  misc_feature (1)..(282): NCBI GI: 46122717 Blast Desc: FG05736.1 [Gibberella zeae PH-1]
  misc_feature (2)..(173): NCBI GI: 85115752 Blast Desc: NCU00770 [Neurospora crassa OR74A] gi|28926724|gb|EAA35690.1| conserved [Neurospora crassa OR74A] gi|38636410|emb|CAE81947.1| related to ECM29 protein [Neurospora
  misc_feature (3)..(281): NCBI GI: 171695756 Blast Desc: protein product [Podospora anserina] gi|170948120|emb|CAP60284.1| protein product [Podospora anserina]
  misc_feature (23)..(274): NCBI GI: 156036462 Blast Desc: SS1G_12920 [Sclerotinia sclerotiorum 1980] gi|154698325|gb|EDN98063.1| SS1G_12920 [Sclerotinia sclerotiorum 1980]
  misc_feature (23)..(283): NCBI GI: 154308466 Blast Desc: BC1G_08293 [Botryotinia fuckeliana B05.10] gi|150852834|gb|EDN28026.1| BC1G_08293 [Botryotinia fuckeliana B05.10]
  misc_feature (1)..(241): NCBI GI: 145601263 Blast Desc: MGG_08744 [Magnaporthe grisea 70-15] gi|145009286|gb|EDJ93997.1| MGG_08744 [Magnaporthe grisea 70-15]
  misc_feature (23)..(281): NCBI GI: 242786462 Blast Desc: proteasome component (Ecm29), [Talaromyces stipitatus ATCC 10500] gi|218720957|gb|EED20376.1| proteasome component (Ecm29), [Talaromyces stipitatus ATCC 10500]
  misc_feature (15)..(281): NCBI GI: 212543373 Blast Desc: proteasome component (Ecm29), [Penicillium marneffei ATCC 18224] gi|210066748|gb|EEA20841.1| proteasome component (Ecm29), [Penicillium marneffei ATCC 18224]
  misc_feature (23)..(280): NCBI GI: 121709906 Blast Desc: proteasome component (Ecm29), [Aspergillus clavatus NRRL 1] gi|119400719|gb|EAW11143.1| proteasome component (Ecm29), [Aspergillus clavatus NRRL 1]
MIKALSSAINETDQFNESSIQRIWPVLDRALSLKTFKGKEKLIATYPLFIKHSKAFWTADSTVSVQTKKIAIREAKRNNDEYRPSSFEALADFAAVRDDLDMYAEVVSIVSDYLRPEGEIHSLSDLKRKTSESSLVAVMTAYSRPKLLSSPLAILNEIATTVESAAEATTLNKDTFFTCTLRLMKKTSESEVLSVNDDASLATRWFKLLLRNETEVVLESHRASRAKSLEAFARTWRAGIFCTQEKRVALNEEMVQKMRSMIDIERSLDVQRLLTEALTALQE

SEQ ID NO: 31613 - DNA, 5940 bp, Muscodor strobelii; identical to SEQ ID NO: 31607
  misc_feature: SGI EST ID NO. CUFF.74835.1
  misc_feature: Variant of the nucleotide sequence at SEQ ID NO 31611

SEQ ID NO: 31614 - DNA, 1026 bp, Muscodor strobelii
  misc_feature: SGI cDNA ID NO. 570886
  misc_feature: Reduced expression when VOC is produced
  misc_feature: Encodes the peptide sequence at SEQ ID NO 31615
atgcctcgttctcttccttggaagcgtcgcgagcaagaggcactcaagggaacgaattcattgtctgcgaaacgaattaagagggagccaaagtcgccttcggaaggtgatactagtgacaaccgcgatgtcaaaataaccccgaaactacactctagccaacaccggcgagtcgcatcatcatcgccccctccagcactggaacctttacaggagagtttcatgatagacggtcttgatgaagatgaccgctatcgaatggtggaggacgaattcctagctactgctcaactttatacctcacatctacacgctgccgaatataagcgcttaagaaacgcggcccgggcacagaattatcaaacgataaaggatatctcgcgaccagtagtgggtcgaagaacagatatagtcagaatgaagcaagaaaggaaagaactccagaaacaacagcagatcgcgtttcgaaaggttcgatcggatgagaaaatggccagcaagaatggaagtgacggatcccatgacggtagcgattcagtggaggacaaaaatcttcaagaccttatgaaagccccaggaaaacgaaatacagctgtacggctagatggtctcgttacgactaatcccgccacacgcgcagcggcaggttacacgagacactccgcttctaagccaaacatacctccaaagcggcctaattcgccagacggcgatgatggtttagatacgccaagagaatccaatatgggagttttaagacaggatgcccgaaaatttcacgagctgaaacaaacaagccgcgaagtagcaactgcggacgagagagggtacagcaagcggccgcgaactcatgactcggagatcactccaaacgcacaacgcaacaaaagcaactctgtacaggacaaacattcacaagccgcagatgacgatgggtctgatttcatggccagatggaagcagaagcaagcgaagcacaagcgaaacagagaggagcggaagtcaggcggaataagtcacagttga

SEQ ID NO: 31615 - protein, 341 aa, Muscodor strobelii
  misc_feature: SGI Peptide ID NO. 570886
  misc_feature (3)..(332): NCBI GI: 156059296 Blast Desc: SS1G_03660 [Sclerotinia sclerotiorum 1980] gi|154701447|gb|EDO01186.1| SS1G_03660 [Sclerotinia sclerotiorum 1980]
  misc_feature (74)..(195): NCBI GI: 39976539 Blast Desc: MGG_05807 [Magnaporthe grisea 70-15] gi|145011958|gb|EDJ96614.1| MGG_05807 [Magnaporthe grisea 70-15]
  misc_feature (53)..(239): NCBI GI: 171676928 Blast Desc: protein product [Podospora anserina] gi|170936531|emb|CAP61191.1| protein product [Podospora anserina]
  misc_feature (74)..(199): NCBI GI: 85090087 Blast Desc: NCU04984 [Neurospora crassa OR74A] gi|28919592|gb|EAA29015.1| [Neurospora crassa OR74A]
  misc_feature (1)..(219): NCBI GI: 255953139 Blast Desc: Pc21g02580 [Penicillium chrysogenum Wisconsin 54-1255] gi|211589033|emb|CAP95155.1| Pc21g02580 [Penicillium chrysogenum Wisconsin 54-1255]
  misc_feature (68)..(226): NCBI GI: 116196688 Blast Desc: CHGG_04942 [Chaetomium globosum CBS 148.51] gi|88180855|gb|EAQ88323.1| CHGG_04942 [Chaetomium globosum CBS 148.51]
  misc_feature (1)..(219): NCBI GI: 225558531 Blast Desc: conserved [Ajellomyces capsulatus G186AR]
  misc_feature (1)..(219): NCBI GI: 240274966 Blast Desc: conserved [Ajellomyces capsulatus H143]
  misc_feature (87)..(330): NCBI GI: 261359832 Blast Desc: conserved [Verticillium albo-atrum VaMs.102]
  misc_feature (74)..(221): NCBI GI: 67523453 Blast Desc: AN2182.2 [Aspergillus nidulans FGSC A4] gi|40745070|gb|EAA64226.1| AN2182.2 [Aspergillus nidulans FGSC A4] gi|259487566|tpe|CBF86338.1| TPA: conserved [Aspergillus FGSC
  misc_feature: Useful for introducing or modulating the production of volatile compounds
MPRSLPWKRREQEALKGTNSLSAKRIKREPKSPSEGDTSDNRDVKITPKLHSSQHRRVASSSPPPALEPLQESFMIDGLDEDDRYRMVEDEFLATAQLYTSHLHAAEYKRLRNAARAQNYQTIKDISRPVVGRRTDIVRMKQERKELQKQQQIAFRKVRSDEKMASKNGSDGSHDGSDSVEDKNLQDLMKAPGKRNTAVRLDGLVTTNPATRAAAGYTRHSASKPNIPPKRPNSPDGDDGLDTPRESNMGVLRQDARKFHELKQTSREVATADERGYSKRPRTHDSEITPNAQRNKSNSVQDKHSQAADDDGSDFMARWKQKQAKHKRNREERKSGGISHS

SEQ ID NO: 31616 - DNA, 3394 bp, Muscodor strobelii
  misc_feature: SGI EST ID NO. CUFF.74847.0
  misc_feature: Variant of the nucleotide sequence at SEQ ID NO 31614
gctgaacgggttttttttacccctctagaattgctaccagcattatgctctgaaaagcactggctccgcgtataaaatggtccgtacgatgcagaggtttaccagcaatctcttgagcagtaaatgtcctatagaattcatgactcctgggcatcaacttgaaggcctgatatctatgggcccacttttatgttctctgaaagacacggttactgcaacctacccactaaatcgcaaagcctaaaggcactctgttatcatccatattcaattgcgtttttaaccaagcccaggattttcatctcacagaaacctgttgactgagtgtgtgtgttggtctatcacttggtcagagacgtgagcgttgagtaaaatgcctcgttctcttccttggaagcgtcgcgagcaagaggcactcaagggaacgaattcattgtctgcgaaacgaattaagagggagccaaagtcgccttcggaaggtgatactagtgacaaccgcgatgtcaaaataaccccgaaactacactctagccaacaccggcgagtcgcatcatcatcgccccctccagcactggaacctttacaggagaggtacgagtcaacttcaaagctatgagagactcttcttattgattgcaaacagtttcatgatagacggtcttgatgaagatgaccgctatcgaatggtggaggacgaattcctagctactgctcaactttatacctcacatctacacgctgccgaatataagcgcttaagaaacgcggcccgggcacagaattatcaaacgataaaggatatctcgcgaccagtagtgggtcgaagaacagatatagtcagaatgaagcaagaaaggaaagaactccagaaacaacagcagatcgcgtttcgaaaggttcgatcggatgagaaaatggccagcaagaatggaagtgacggatcccatgacggtagcgattcagtggaggacaaaaatcttcaagaccttatgaaagccccaggaaaacgaaatacagctgtacggctagatggtctcgttacgactaatcccgccacacgcgcagcggcaggttacacgagacactccgcttctaagccaaacatacctccaaagcggcctaattcgccagacggcgatgatggtttagatacgccaagagaatccaatatgggagttttaagacaggatgcccgaaaatttcacgagctgaaacaaacaagccgcgaagtagcaactgcggacgagagagggtacagcaagcggccgcgaactcatgactcggagatcactccaaacgcacaacgcaacaaaagcaactctgtacaggacaaacattcacaagccgcagatgacgatgggtctgatttcatggccagatggaagcagaagcaagcgaagcacaagcgaaacagagaggagcggaagtcaggcggaataagtcacagttgatatcgtacgactcctactcaactagctactagctagcggactggtatggcgtctcgtatggcctctctgcttgtggtgtgatacgagctagatggcgacgctgaccattatgccaatcgatcaatgctgagtgctgcgttacgcggttgtcccaaacaacgactgtgccctcctcccacttgactcgtgcctggaaatcggcaccgaagccgatgtggtcgtacaaaaacttaagaatcgcgtcggattcctccttctttagtccgacaatatcgcgtgtaactgagggaattgattagagttttcattactccactatctaggaatactcacattgagggttgacataaagcgctttctctccagttacggggtgggttcggatgatgggatgagtgttgacaacaggttcccgacgtttgactgcgaggtaaaatgtcagagacgtaagtaaccttcacgcgagccccagaagagtattcgccctcggcgagatggaaaagcgatatgacttagagcgttacttactgcttcctctagccgctgccactgcgacttgttcgattccagaatgcgttgcctgtagaccgtgtagtctttcttgaaataaggggctcaaccgattgtaggcttcaacagcgttgcagaaaagcgtatcaccaccagtttctggcttatccaagatatagaggaaagtggttcctggtggctgttgttcgtagctaacatcggagtgccatgcgactgaactagttcggttcctgaagtatcgatcggctgtgttgtctccagcgccacggtgcacaaggtgaacctcgggatatccttcgggagagccagaggttggatgaatgtgatgccgtccaaagtagccgccaaatttgagagcgtctgcaattggaagatctgcgaaatcttggcctctaaaggcaacgaccttcctctccgccacaaagcgagccagctggtctttaccggcgtcactgagactggacagctgaataccacggacctcggtgccaatggttggcgtaagatgagttacttgggtccctgatggtagaagttcagggaatgaagcatcggcatctttcccgtgatccttttctctcggggttagtcactaccacctggctagatatctgtatatttctaaatgaaatctaagagcttgggggtatgccctaaggcagtctcgcgttcaatactctgagaaatctaaaacagaaacgcttacatagtgctgaaacggctcaagaggagggtacttctgttcaggattccaagtgggtagataatgaggatacttcgctgcttcgtgtcctgtcttcccctcttcgacctctttagagaactggaagccggcaaattccttgtattggccaaaatacttgggcgtctgcaaggtcgttggctgctgcacctcctcggtgacggtcgtcgtagctgatggggccattgtgaagatctctggtaattaagctgacttgaattggactggacggatcaaagaaaagctgcaaaaatagaggcgaccagatcttttgtattaattgatagatatcgttaccgatgtcgagatagtgatgtgcgagcaactcacaattgcgcaaaacattaatcgtccaattggcacacaaggaatcgtatttctttgagtataccgtaccctccctctcattcttatcatttattaaccattagtccgatattcgcctctcaattctcccctatcattggcgaccccgctgagcacgatgatgcgcatgcgtgtggatgttgctatcgtggagttggatcacgcgatttggccacccattgcaacttcgtgtgacgttctccatcgcgttgtctcgtggccctcacctccttcacgactaccccgccatgtcaggattaattaaaccaaagtgcttaccaacatggatatacggaaataaatc

SEQ ID NO: 31617 - DNA, 1140 bp, Muscodor strobelii
  misc_feature: SGI cDNA ID NO. 570887
  misc_feature: Encodes the peptide sequence at SEQ ID NO 31618
atggccccatcagctacgacgaccgtcaccgaggaggtgcagcagccaacgaccttgcagacgcccaagtattttggccaatacaaggaatttgccggcttccagttctctaaagaggtcgaagaggggaagacaggacacgaagcagcgaagtatcctcattatctacccacttggaatcctgaacagaagtaccctcctcttgagccgtttcagcactatgatcacgggaaagatgccgatgcttcattccctgaacttctaccatcagggacccaagtaactcatcttacgccaaccattggcaccgaggtccgtggtattcagctgtccagtctcagtgacgccggtaaagaccagctggctcgctttgtggcggagaggaaggtcgttgcctttagaggccaagatttcgcagatcttccaattgcagacgctctcaaatttggcggctactttggacggcatcacattcatccaacctctggctctcccgaaggatatcccgaggttcaccttgtgcaccgtggcgctggagacaacacagccgatcgatacttcaggaaccgaactagttcagtcgcatggcactccgatgttagctacgaacaacagccaccaggaaccactttcctctatatcttggataagccagaaactggtggtgatacgcttttctgcaacgctgttgaagcctacaatcggttgagccccttatttcaagaaagactacacggtctacaggcaacgcattctggaatcgaacaagtcgcagtggcagcggctagaggaagcatcaaacgtcgggaacctgttgtcaacactcatcccatcatccgaacccaccccgtaactggagagaaagcgctttatgtcaaccctcaatttacacgcgatattgtcggactaaagaaggaggaatccgacgcgattcttaagtttttgtacgaccacatcggcttcggtgccgatttccaggcacgagtcaagtgggaggagggcacagtcgttgtttgggacaaccgcgtaacgcagcactcagcattgatcgattggcataatggtcagcgtcgccatctagctcgtatcacaccacaagcagagaggccatacgagacgccataccagtccgctagctag

SEQ ID NO: 31618 - protein, 379 aa, Muscodor strobelii
  misc_feature: SGI Peptide ID NO. 570887
  misc_feature (93)..(372): Pfam Id: PF02668 Pfam Desc: Taurine catabolism dioxygenase TauD, TfdA family
  misc_feature (1)..(376): NCBI GI: 171676930 Blast Desc: protein product [Podospora anserina] gi|170936532|emb|CAP61192.1| protein product [Podospora anserina]
  misc_feature (1)..(377): NCBI GI: 261360723 Blast Desc: alpha-ketoglutarate-dependent sulfonate dioxygenase [Verticillium albo-atrum VaMs.102]
  misc_feature (1)..(377): NCBI GI: 46109558 Blast Desc: FG01661.1 [Gibberella zeae PH-1]
  misc_feature (1)..(376): NCBI GI: 256730733 Blast Desc: [Nectria haematococca mpVI 77-13-4]
  misc_feature (9)..(375): NCBI GI: 145234643 Blast Desc: An03g00660 [Aspergillus niger] gi|134057642|emb|CAK38041.1| protein product [Aspergillus niger]
  misc_feature (1)..(378): NCBI GI: 154317302 Blast Desc: BC1G_03553 [Botryotinia fuckeliana B05.10] gi|150844970|gb|EDN20163.1| BC1G_03553 [Botryotinia fuckeliana B05.10]
  misc_feature (1)..(378): NCBI GI: 115385004 Blast Desc: conserved [Aspergillus terreus NIH2624] gi|114196741|gb|EAU38441.1| conserved [Aspergillus terreus NIH2624]
  misc_feature (1)..(376): NCBI GI: 189198856 Blast Desc: alpha-ketoglutarate-dependent taurine dioxygenase [Pyrenophora tritici-repentis Pt-1C-BFP] gi|187982864|gb|EDU48352.1| alpha-ketoglutarate-dependent taurine
  misc_feature (1)..(376): NCBI GI: 146323351 Blast Desc: alpha-ketoglutarate-dependent taurine dioxygenase [Aspergillus fumigatus Af293] gi|129558333|gb|EAL92780.2| alpha-ketoglutarate-dependent taurine dioxygenase [Aspergillus
  misc_feature (1)..(377): NCBI GI: 242804654 Blast Desc: alpha-ketoglutarate-dependent taurine dioxygenase [Talaromyces stipitatus ATCC 10500] gi|218717763|gb|EED17184.1| alpha-ketoglutarate-dependent taurine dioxygenase [Talaromyces
  misc_feature (94)..(371): SWISSPROT Homolog: EC 1.14.11.17 Taurine dioxygenase
MAPSATTTVTEEVQQPTTLQTPKYFGQYKEFAGFQFSKEVEEGKTGHEAAKYPHYLPTWNPEQKYPPLEPFQHYDHGKDADASFPELLPSGTQVTHLTPTIGTEVRGIQLSSLSDAGKDQLARFVAERKVVAFRGQDFADLPIADALKFGGYFGRHHIHPTSGSPEGYPEVHLVHRGAGDNTADRYFRNRTSSVAWHSDVSYEQQPPGTTFLYILDKPETGGDTLFCNAVEAYNRLSPLFQERLHGLQATHSGIEQVAVAAARGSIKRREPVVNTHPIIRTHPVTGEKALYVNPQFTRDIVGLKKEESDAILKFLYDHIGFGADFQARVKWEEGTVVVWDNRVTQHSALIDWHNGQRRHLARITPQAERPYETPYQSAS

SEQ ID NO: 31619 - DNA, 3261 bp, Muscodor strobelii
  misc_feature: SGI EST ID NO. CUFF.74848.1
  misc_feature: Variant of the nucleotide sequence at SEQ ID NO 31617
gatttatttccgtatatccatgttggtaagcactttggtttaattaatcctgacatggcggggtagtcgtgaaggaggtgagggccacgagacaacgcgatggagaacgtcacacgaagttgcaatgggtggccaaatcgcgtgatccaactccacgatagcaacatccacacgcatgcgcatcatcgtgctcagcggggtcgccaatgataggggagaattgagaggcgaatatcggactaatggttaataaatgataagaatgagagggagggtacggtatactcaaagaaatacgattccttgtgtgccaattggacgattaatgttttgcgcaattgtgagttgctcgcacatcactatctcgacatcggtaacgatatctatcaattaatacaaaagatctggtcgcctctatttttgcagcttttctttgatccgtccagtccaattcaagtcagcttaattaccagagatcttcacaatggccccatcagctacgacgaccgtcaccgaggaggtgcagcagccaacgaccttgcagacgcccaagtattttggccaatacaaggaatttgccggcttccagttctctaaagaggtcgaagaggggaagacaggacacgaagcagcgaagtatcctcattatctacccacttggaatcctgaacagaagtaccctcctcttgagccgtttcagcactatgatcacgggaaagatgccgatgcttcattccctgaacttctaccatcagggacccaagtaactcatcttacgccaaccattggcaccgaggtccgtggtattcagctgtccagtctcagtgacgccggtaaagaccagctggctcgctttgtggcggagaggaaggtcgttgcctttagaggccaagatttcgcagatcttccaattgcagacgctctcaaatttggcggctactttggacggcatcacattcatccaacctctggctctcccgaaggatatcccgaggttcaccttgtgcaccgtggcgctggagacaacacagccgatcgatacttcaggaaccgaactagttcagtcgcatggcactccgatgttagctacgaacaacagccaccaggaaccactttcctctatatcttggataagccagaaactggtggtgatacgcttttctgcaacgctgttgaagcctacaatcggttgagccccttatttcaagaaagactacacggtctacaggcaacgcattctggaatcgaacaagtcgcagtggcagcggctagaggaagcagtaagtaacgctctaagtcatatcgcttttccatctcgccgagggcgaatactcttctggggctcgcgtgaaggttacttacgtctctgacattttacctcgcagtcaaacgtcgggaacctgttgtcaacactcatcccatcatccgaacccaccccgtaactggagagaaagcgctttatgtcaaccctcaatttacacgcgatattgtcggactaaagaaggaggaatccgacgcgattcttaagtttttgtacgaccacatcggcttcggtgccgatttccaggcacgagtcaagtgggaggagggcacagtcgttgtttgggacaaccgcgtaacgcagcactcagcattgatcgattggcataatggtcagcgtcgccatctagctcgtatcacaccacaagcagagaggccatacgagacgccataccagtccgctagctagtagctagttgagtaggagtcgtacgatatcaactgtgacttattccgcctgacttccgctcctctctgtttcgcttgtgcttcgcttgcttctgcttccatctggccatgaaatcagacccatcgtcatctgcggcttgtgaatgtttgtcctgtacagagttgcttttgttgcgttgtgcgtttggagtgatctccgagtcatgagttcgcggccgcttgctgtaccctctctcgtccgcagttgctacttcgcggcttgtttgtttcagctcgtgaaattttcgggcatcctgtcttaaaactcccatattggattctcttggcgtatctaaaccatcatcgccgtctggcgaattaggccgctttggaggtatgtttggcttagaagcggagtgtctcgtgtaacctgccgctgcgcgtgtggcgggattagtcgtaacgagaccatctagccgtacagctgtatttcgttttcctggggctttcataaggtcttgaagatttttgtcctccactgaatcgctaccgtcatgggatccgtcacttccattcttgctggccattttctcatccgatcgaacctttcgaaacgcgatctgctgttgtttctggagttctttcctttcttgcttcattctgactatatctgttcttcgacccactactggtcgcgagatatcctttatcgtttgataattctgtgcccgggccgcgtttcttaagcgcttatattcggcagcgtgtagatgtgaggtataaagttgagcagtagctaggaattcgtcctccaccattcgatagcggtcatcttcatcaagaccgtctatcatgaaactgtttgcaatcaataagaagagtctctcatagctttgaagttgactcgtacctctcctgtaaaggttccagtgctggagggggcgatgatgatgcgactcgccctgttaaatcattgagcacaaatacagctccgtcggacgggaaatatacctacggtgttggctagagtgtagtttcggggttattttgacatcgcggttgtcactagtatcaccttccgaaggcgactttggctccctcttaattcgtttcgcagacaatgaattcgttcccttgagtgcctcttgctcgcgacgcttccaaggaagagaacgaggcattttactcaacgctcacgtctctgaccaagtgatagaccaacacacacactcagtcaacaggtttctgtgagatgaaaatcctgggcttggttaaaaacgcaattgaatatggatgataacagagtgcctttaggctttgcgatttagtgggtaggttgcagtaaccgtgtctttcagagaacataaaagtgggcccatagatatcaggccttcaagttgatgcccaggagtcatgaattctataggacatttactgctcaagagattgctggtaaacctctgcatcgtacggaccattttatacgcggagccagtgcttttcagagcataatgctggtagcaattctagaggggtaaaaaaaacccgttcagc

SEQ ID NO: 31620 - DNA, 1551 bp, Muscodor strobelii
  misc_feature: SGI cDNA ID NO. 570888
  misc_feature: Reduced expression when VOC is produced
  misc_feature: Encodes the peptide sequence at SEQ ID NO 31621
atgtcgatggacatagacacgccgatgcccatcgcggctccggccgagtcttcgggcgtcactgcgaccatactgtgtgccgactgtggtgctcccatcgacggcatgaccgctatcgacgccaagtgctacgactgcttcaaactcaccaaagacatctcccagggcatccagcgcgaggccaccctgcacttctgccgagactgcgatcgctggctcatgcctcccaccacctgggtcaccgcccagcccgaatctcgcgagctcctcgccctatgcctaaagaaactcagcttgaacaagaccagaatcatcgacgccagcttcatatggaccgagccccactcgcggcgagtcaaagtgaagcttgtggtccagcaagccgttgccgacgatcgtgtcatgcagcagggcctcgaggtcacctatgtcgtcgcatatcagcagtgcccagagtgcgccaaaagttacacagccaacgtctggagggcgagcgtacaggtgcgccagaaggtcttacataaacgcacattcctatacctcgagcagttgatcctcaaacaccaagcgcatagagatacaatcaatatcaaggaggccaaggacggtatcgatttcttctactccgccagaaaccaggcggagaagtttgtcgatttcctgaactcggttgtcccggtgcgcgtcaagaagtcttcagaactcatctcgcaagactcacataccgccaaaaagtcattcaaattcacattctccgtcgagttgatccccatctgcaaagacgaccttgtagcgctgccgatatctgtcgctaaacagtgcggcaacatatcaccaatcgtgctgtgcaaccgcataggcacttcagtctacttgttagaccccaacacactccaaacggcagacatcagtgcgccggtgtactggagagcaccgttcacctcgctattagaagctcgggacttggtcgagttcatcgtgatggactcggagcccatgggtcccacgaaagggaaatactccttagcagaggtccaggttgctcgggccgccgatctcggtgtcaacgacaagacatacttcgcacgcacacatatgggtggcctgttgcatgcgggcgactcggtgatgggatacatgctgtccgggacgatattcaacaacccacaattcgaggcgatcgagcaatccaacacatactcgtcacggatacccgacgtagtactggtcaggaaacactacgcgaaccgcaagaagaatcgcaagagacagtggaaggtcaagcgtatggccaaggacgaaggcgagttgttgcccaagaagtctgaccaagaacgcatggaccgcgagtttgagcagtttctgcaggagattgaggaagatgaggagttcagatctggtgtcgcattgtacaaagaccagaagaggaggacgcagccggacgagatgtccatggcgacggatgacgatggaggtgatgatgcgccacaagtcaacatggatgagttgctggatgatttcgatgagctcaatatggatgataatgaatag

SEQ ID NO: 31621 - protein, 516 aa, Muscodor strobelii
  misc_feature: SGI Peptide ID NO. 570888
  misc_feature (26)..(255): Pfam Id: PF04981 Pfam Desc: NMD3 family
  misc_feature (1)..(514): NCBI GI: 46136489 Blast Desc: FG09760.1 [Gibberella zeae PH-1]
  misc_feature (1)..(516): NCBI GI: 256727509 Blast Desc: [Nectria haematococca mpVI 77-13-4]
  misc_feature (2)..(516): NCBI GI: 154317304 Blast Desc: BC1G_03554 [Botryotinia fuckeliana B05.10] gi|150844971|gb|EDN20164.1| BC1G_03554 [Botryotinia fuckeliana B05.10]
  misc_feature (2)..(516): NCBI GI: 156059292 Blast Desc: SS1G_03658 [Sclerotinia sclerotiorum 1980] gi|154701445|gb|EDO01184.1| SS1G_03658 [Sclerotinia sclerotiorum 1980]
  misc_feature (1)..(514): NCBI GI: 39976519 Blast Desc: MGG_05817 [Magnaporthe grisea 70-15] gi|145011948|gb|EDJ96604.1| MGG_05817 [Magnaporthe grisea 70-15]
  misc_feature (3)..(514): NCBI GI: 171676746 Blast Desc: protein product [Podospora anserina] gi|170936440|emb|CAP61097.1| protein product [Podospora anserina]
  misc_feature (3)..(516): NCBI GI: 85105436 Blast Desc: NCU08663 [Neurospora crassa OR74A] gi|28923552|gb|EAA32728.1| NCU08663 [Neurospora crassa OR74A]
  misc_feature (1)..(516): NCBI GI: 71002662 Blast Desc: nonsense-mediated mRNA decay protein 3 [Aspergillus fumigatus Af293] gi|66853650|gb|EAL93974.1| nonsense-mediated mRNA decay protein 3 [Aspergillus fumigatus Af293]
  misc_feature (22)..(510): NCBI GI: 261359856 Blast Desc: nonsense-mediated mRNA decay protein [Verticillium albo-atrum VaMs.102]
  misc_feature (1)..(516): NCBI GI: 159130065 Blast Desc: nonsense-mediated mRNA decay protein 3 [Aspergillus fumigatus A1163]
  misc_feature: Useful for introducing or modulating the production of volatile compounds
MSMDIDTPMPIAAPAESSGVTATILCADCGAPIDGMTAIDAKCYDCFKLTKDISQGIQREATLHFCRDCDRWLMPPTTWVTAQPESRELLALCLKKLSLNKTRIIDASFIWTEPHSRRVKVKLVVQQAVADDRVMQQGLEVTYVVAYQQCPECAKSYTANVWRASVQVRQKVLHKRTFLYLEQLILKHQAHRDTINIKEAKDGIDFFYSARNQAEKFVDFLNSVVPVRVKKSSELISQDSHTAKKSFKFTFSVELIPICKDDLVALPISVAKQCGNISPIVLCNRIGTSVYLLDPNTLQTADISAPVYWRAPFTSLLEARDLVEFIVMDSEPMGPTKGKYSLAEVQVARAADLGVNDKTYFARTHMGGLLHAGDSVMGYMLSGTIFNNPQFEAIEQSNTYSSRIPDVVLVRKHYANRKKNRKRQWKVKRMAKDEGELLPKKSDQERMDREFEQFLQEIEEDEEFRSGVALYKDQKRRTQPDEMSMATDDDGGDDAPQVNMDELLDDFDELNMDDNE

SEQ ID NO: 31622 - DNA, 3160 bp, Muscodor strobelii
  misc_feature: SGI EST ID NO. CUFF.75033.0
  misc_feature: Variant of the nucleotide sequence at SEQ ID NO 31620
tttgcccctccatgaaatttattgcgatccaaaacccccaccatcgccgtctgtgactgtcattcctcatctgccacatccactgcccggctcaacgacattagcattcttctcccatctccgtaacgcaacccccgcaacaactcctcgtcttgtcttctggcactagtatcgaccaaaagcacaagagcccaccatgtcgatggacatagacacgccgatgcccatcgcggctccggccgagtcttcgggcgtcactgcgaccatactgtgtgccgactgtggtgctcccatcgacggcatgaccgctatcgacgccaagtgctacgactgcttcaaactcaccaaagacatctcccagggcatccagcgcgaggccaccctgcacttctgccgagactgcgatcgctggctcatgcctcccaccacctgggtcaccgcccagcccgaatctcgcgagctcctcgccctatgcctaaagaaactcagcttgaacaagaccagaatcatcgacgccagcttcatatggaccgagccccactcgcggcgagtcaaagtgaagcttgtggtccagcaagccgttgccgacgatcgtgtcatgcagcagggcctcgaggtcacctatgtcgtcgcatatcagcagtgcccagagtgcgccaaaagttacacagccaacgtctggagggcgagcgtacaggtgcgccagaaggtcttacataaacgcacattcctatacctcgagcagttgatcctcaaacaccaagcgcatagagatacaatcaatatcaaggaggccaaggacggtatcgatttcttctactccgccagaaaccaggcggagaagtttgtcgatttcctgaactcggttgtcccggtgcgcgtcaagaagtcttcagaactcatctcgcaagactcacataccgccaaaaagtcattcaaattcacattctccgtcgagttgatccccatctgcaaagacgaccttgtagcgctgccgatatctgtcgctaaacagtgcggcaacatatcaccaatcgtgctgtgcaaccgcataggcacttcagtctacttgttagaccccaacacactccaaacggcagacatcagtgcgccggtgtactggagagcaccgttcacctcgctattagaagctcgggacttggtcgagttcatcgtgatggactcggagcccatgggtcccacgaaagggaaatactccttagcagaggtccaggttgctcgggccgccgatctcggtgtcaacgacaagacatacttcgcacgcacacatatgggtggcctgttgcatgcgggcgactcggtgatgggatacatgctgtccgggacgatattcaacaacccacaattcgaggcgatcgagcaatccaacacatactcgtcacggatacccgacgtagtactggtcaggaaacactacgcgaaccgcaagaagaatcgcaagagacagtggaaggtcaagcgtatggccaaggacgaaggcgagttgttgcccaagaagtctgaccaagaacgcatggaccgcgagtttgagcagtttctgcaggagattgaggaagatgaggagttcagatctggtgtcgcattgtacaaagaccagaagaggaggacgcagccggacgagatgtccatggcgacggatgacgatggaggtgatgatgcgccacaagtcaacatggatgagttgctggatgatttcgatgagctcaatatggatgataatgaatagtgtgctgagatacaccggattcatagcaaatggcgtactgttgcctccatactattattctttgcccctgcagtgcaagttcttcgtcgattgctacaattaagttccatctttttgctgtacttgaaaacaacagaaggattctatcgtagatcatctcgaagttgggtatcactaactctgaaaacactagaacaactgactaagcacccgcttcgccgcctcaggggctttgccagaatccttcttgccgacagcggactgcgtaaacctcctgaggctcttctcttcccgcggctccgcatccttatcctctacctttgcccttttcgccttagctttagtctgaataccctccaactccttcgccttctgtatattcctcacaaactccttattctccctcgtggctttgctgatctcggcgcgcatgcgggtctggcgctcggcgttctcggccgagatctgctcggtgaggttatgccacttgaagcccttgaggtagcgtagagaccagatgtcgtcgcggtagtagctgcccttcttcgcgacgccgatggcggctagggtcgtgccgttgagcgcgtcgacggcggctttcgcgtcggcttttttgaggaactctagccagccttcgctgaagttcttcttccggttttgcccctgttttatgcgccgggcgcggacggctgggtcttcgactgcgaggtagacgcggttgattttgccgaagcgctcgaatattgttcggacggcggttggtttcactgggatgcctgttagtggtttggtgcttttgtgcgcgttgctcgtggtgaggtcgctgctagcggatggttggtgtcttactgaagggtggtatgcgagaaacatatactactccgcttcgcttgacggccttttctgtcgctacgaggttcttcttggtcaaaggccgtgagatgtcttgcaacgatgtttctgcggcgtcttcgtcttcgtcttcgtcgtcctcatcttttttatctttttcagcgggcgcattctttattatgtcttcgatttgttcgtcgccgatgaagtcagcctcttcgtcagaatcggctgcgtggcgatcaagcttggggcgtttagaactgcctttcctgagctggtcgacttcagaatcgtagccttggctgccgtcgtcatcgctctcgtccgcgtcgaggaaatggttcctcttctcggcgggcattttgaaggagcgtcaaggacaagaagagacttcactagagaaatgtagtttgtatttgtggtgagtagccccttggccttctgtctcgtcgtgtttcgtcgtttcctcgtgtctggtgaatgtgtaaaaagacagtattaaagagcgaattgccgataagaaaagattatatagtgctgataacagatagactatgc

SEQ ID NO: 31623 - DNA, 945 bp, Muscodor strobelii
  misc_feature: SGI cDNA ID NO. 570889
  misc_feature: Reduced expression when VOC is produced
  misc_feature: Encodes the peptide sequence at SEQ ID NO 31624
atgcccgccgagaagaggaaccatttcctcgacgcggacgagagcgatgacgacggcagccaaggctacgattctgaagtcgaccagctcaggaaaggcagttctaaacgccccaagcttgatcgccacgcagccgattctgacgaagaggctgacttcatcggcgacgaacaaatcgaagacataataaagaatgcgcccgctgaaaaagataaaaaagatgaggacgacgaagacgaagacgaagacgccgcagaaacatcgttgcaagacatctcacggcctttgaccaagaagaacctcgtagcgacagaaaaggccgtcaagcgaagcggagtagtatatgtttctcgcataccacccttcatgaaaccaaccgccgtccgaacaatattcgagcgcttcggcaaaatcaaccgcgtctacctcgcagtcgaagacccagccgtccgcgcccggcgcataaaacaggggcaaaaccggaagaagaacttcagcgaaggctggctagagttcctcaaaaaagccgacgcgaaagccgccgtcgacgcgctcaacggcacgaccctagccgccatcggcgtcgcgaagaagggcagctactaccgcgacgacatctggtctctacgctacctcaagggcttcaagtggcataacctcaccgagcagatctcggccgagaacgccgagcgccagacccgcatgcgcgccgagatcagcaaagccacgagggagaataaggagtttgtgaggaatatacagaaggcgaaggagttggagggtattcagactaaagctaaggcgaaaagggcaaaggtagaggataaggatgcggagccgcgggaagagaagagcctcaggaggtttacgcagtccgctgtcggcaagaaggattctggcaaagcccctgaggcggcgaagcgggtgcttagtcagttgttctag

SEQ ID NO: 31624 - protein, 314 aa, Muscodor strobelii
  misc_feature: SGI Peptide ID NO. 570889
  misc_feature (1)..(314): NCBI GI: 46136491 Blast Desc: FG09761.1 [Gibberella zeae PH-1] gi|121938798|sp|Q4HZ47.1|ESF2_GIBZE RecName: Full=Pre-rRNA-processing protein ESF2; AltName: Full=18S rRNA 2
  misc_feature (1)..(314): NCBI GI: 146286154 Blast Desc: FG09761.1 [Gibberella zeae PH-1] gi|121938798|sp|Q4HZ47.1|ESF2_GIBZE RecName: Full=Pre-rRNA-processing protein ESF2; AltName: Full=18S rRNA 2
  misc_feature (1)..(314): NCBI GI: 156031381 Blast Desc: SS1G_14112 [Sclerotinia sclerotiorum 1980] gi|154699514|gb|EDN99252.1| SS1G_14112 [Sclerotinia sclerotiorum 1980]
  misc_feature (1)..(314): NCBI GI: 39976523 Blast Desc: MGG_05815 [Magnaporthe grisea 70-15] gi|145011950|gb|EDJ96606.1| MGG_05815 [Magnaporthe grisea 70-15]
  misc_feature (6)..(314): NCBI GI: 256727510 Blast Desc: NECHADRAFT_17606 [Nectria haematococca mpVI 77-13-4]
  misc_feature (87)..(314): NCBI GI: 85105689 Blast Desc: NCU08668 [Neurospora crassa OR74A] gi|74696513|sp|Q7S8W7.1|ESF2_NEUCR RecName: Full=Pre-rRNA-processing protein esf-2; AltName: Full=18S rRNA 2
  misc_feature (3)..(314): NCBI GI: 171676750 Blast Desc: protein product [Podospora anserina] gi|170936442|emb|CAP61099.1| protein product [Podospora anserina]
  misc_feature (60)..(314): NCBI GI: 154289825 Blast Desc: BC1G_15942 [Botryotinia fuckeliana B05.10] gi|150848760|gb|EDN23953.1| BC1G_15942 [Botryotinia fuckeliana B05.10]
  misc_feature (1)..(314): NCBI GI: 261359855 Blast Desc: pre-rRNA-processing protein ESF2 [Verticillium albo-atrum VaMs.102]
  misc_feature (1)..(217): NCBI GI: 116196788 Blast Desc: CHGG_04992 [Chaetomium globosum CBS 148.51] gi|88180905|gb|EAQ88373.1| CHGG_04992 [Chaetomium globosum CBS 148.51]
  misc_feature: Useful for introducing or modulating the production of volatile compounds
MPAEKRNHFLDADESDDDGSQGYDSEVDQLRKGSSKRPKLDRHAADSDEEADFIGDEQIEDIIKNAPAEKDKKDEDDEDEDEDAAETSLQDISRPLTKKNLVATEKAVKRSGVVYVSRIPPFMKPTAVRTIFERFGKINRVYLAVEDPAVRARRIKQGQNRKKNFSEGWLEFLKKADAKAAVDALNGTTLAAIGVAKKGSYYRDDIWSLRYLKGFKWHNLTEQISAENAERQTRMRAEISKATRENKEFVRNIQKAKELEGIQTKAKAKRAKVEDKDAEPREEKSLRRFTQSAVGKKDSGKAPEAAKRVLSQLF

SEQ ID NO: 31625 - DNA, 3208 bp, Muscodor strobelii
  misc_feature: SGI EST ID NO. CUFF.75034.1
  misc_feature: Variant of the nucleotide sequence at SEQ ID NO 31623
gcatagtctatctgttatcagcactatataatcttttcttatcggcaattcgctctttaatactgtctttttacacattcaccagacacgaggaaacgacgaaacacgacgagacagaaggccaaggggctactcaccacaaatacaaactacatttctctagtgaagtctcttcttgtccttgacgctccttcaaaatgcccgccgagaagaggaaccatttcctcgacgcggacgagagcgatgacgacggcagccaaggctacgattctgaagtcgaccagctcaggaaaggcagttctaaacgccccaagcttgatcgccacgcagccgattctgacgaagaggctgacttcatcggcgacgaacaaatcgaagacataataaagaatgcgcccgctgaaaaagataaaaaagatgaggacgacgaagacgaagacgaagacgccgcagaaacatcgttgcaagacatctcacggcctttgaccaagaagaacctcgtagcgacagaaaaggccgtcaagcgaagcggagtagtatatgtttctcgcataccacccttcatgaaaccaaccgccgtccgaacaatattcgagcgcttcggcaaaatcaaccgcgtctacctcgcagtcgaagacccagccgtccgcgcccggcgcataaaacaggggcaaaaccggaagaagaacttcagcgaaggctggctagagttcctcaaaaaagccgacgcgaaagccgccgtcgacgcgctcaacggcacgaccctagccgccatcggcgtcgcgaagaagggcagctactaccgcgacgacatctggtctctacgctacctcaagggcttcaagtggcataacctcaccgagcagatctcggccgagaacgccgagcgccagacccgcatgcgcgccgagatcagcaaagccacgagggagaataaggagtttgtgaggaatatacagaaggcgaaggagttggagggtattcagactaaagctaaggcgaaaagggcaaaggtagaggataaggatgcggagccgcgggaagagaagagcctcaggaggtttacgcagtccgctgtcggcaagaaggattctggcaaagcccctgaggcggcgaagcgggtgcttagtcagttgttctagtgttttcagagttagtgatacccaacttcgagatgatctacgatagaatccttctgttgttttcaagtacagcaaaaagatggaacttaattgtagcaatcgacgaagaacttgcactgcaggggcaaagaataatagtatggaggcaacagtacgccatttgctatgaatccggtgtatctcagcacactattcattatcatccatattgagctcatcgaaatcatccagcaactcatccatgttgacttgtggcgcatcatcacctccatcgtcatccgtcgccatggacatctcgtccggctgcgtcctcctcttctggtctttgtacaatgcgacaccagatctgaactcctcatcttcctcaatctcctgcagaaactgctcaaactcgcggtccatgcgttcttggtcagacttcttgggcaacaactcgccttcgtccttggccatacgcttgaccttccactgtctcttgcgattcttcttgcggttcgcgtagtgtttcctgaccagtactacgtcgggtatccgtgacgagtatgtgttggattgctcgatcgcctcgaattgtgggttgttgaatatcgtcccggacagcatgtatcccatcaccgagtcgcccgcatgcaacaggccacccatatgtgtgcgtgcgaagtatgtcttgtcgttgacaccgagatcggcggcccgagcaacctggacctctgctaaggagtatttccctttcgtgggacccatgggctccgagtccatcacgatgaactcgaccaagtcccgagcttctaatagcgaggtgaacggtgctctccagtacaccggcgcactgatgtctgccgtttggagtgtgttggggtctaacaagtagactgaagtgcctatgcggttgcacagcacgattggtgatatgttgccgcactgtttagcgacagatatcggcagcgctacaaggtcgtctttgcagatggggatcaactcgacggagaatgtgaatttgaatgactttttggcggtatgtgagtcttgcgagatgagttctgaagacttcttgacgcgcaccgggacaaccgagttcaggaaatcgacaaacttctccgcctggtttctggcggagtagaagaaatcgataccgtccttggcctccttgatattgattgtatctctatgcgcttggtgtttgaggatcaactgctcgaggtataggaatgtgcgtttctacatggaaaataggagtcagcacccagtttgcaggatgaaggtcggtcagagagcaggtaaacgcttacatgtaagaccttctggcgcacctgtacgctcgccctccagacgttggctgtgtaacttttggcgcactctgggcactgctgatatgcgacgacataggtgacctcgaggccctgctgcatgacacgatcgtcggcaacggcttgctggaccacaagcttcactttgactcgccgcgagtggggctcggtccatatgaagctggcgtcgatgattctggtcttgttcaagctgagtttctttaggcatagggcgaggagctcgcgagattcgggctgggcggtgacccaggtggtgggaggcatgagccagcgatcgcagtctcggcagaagtgcagggtggcctcgcgctggatgccctgggagatgtctttggtgagtttgaagcagtcgtagcacttggcgtcgatagcggtcatgccgtcgatgggagcaccacagtcggcacacagtatgctagcaacacacggtcagcaaggcgaagcacgagacggcgcatcgggagagaggcgtacgtcgcagtgacgcccgaagactcggccggagccgcgatgggcatcggcgtgtctatgtccatcgacatggtgggctcttgtgcttttggtcgatactagtgccagaagacaagacgaggagttgttgcgggggttgcgttacggagatgggagaagaatgctaatgtcgttgagccgggcagtggatgtggcagatgaggaatgacagtcacagacggcgatggtgggggttttggatcgcaataaatttcatggaggggcaaa

SEQ ID NO: 31626 - DNA, 1404 bp, Muscodor strobelii
  misc_feature: SGI cDNA ID NO. 570890
  misc_feature: Encodes the peptide sequence at SEQ ID NO 31627
atgtcggtggaaactattaccacgatatcaccaactacaaacgagcccatcttgacgcgccatggggccagcgccgaggagctccaggagcttcccaagattgctgataatgcatttgagagctggcgacagacttcactgactgatcgtataattattgtcaagaaagctatgaagcttctcgaggctcagaaagaccaactggccgaggagctcacagttcagatgggacgccccattgcttacacaggtgttgaggtgaccaccgctatcaagcgtgttaactaccttctgaaaattgctgaagagaccttgaaagacacagagggcgaggccgagaaaggcttcaagcgcttcattcgcaaagtccccgtcggtcctgtcttagtcatcttcgcatggaattatccttatcttatcctggtcaactcactcgttcctgctctcttagcaggcaacactgtcatcctgaagccttcgcctcagactcccaccattgttgagcatatgtctcaaatcttcaccgaagctggcctgcctgcaggtgttctgcagtacttccattgtggttccccgttgatgatggagtccatagtacgggaccccaagatctctctcgtctgcttcacaggctccgtcgcaggtggtttagccgttcagaaggctgcttcagatcgtatcgtcaacgttggtttggagcttggtggcaaagaccccgcctatatcagagacgatgtcgatttggattgggcagctgccgagattgtcgatggctctatcttcaactctggccagagctgctgtgctctggagagaatctatgtgaacgagaaggtctatactcctttcatcgaggcagcacagaaagttctcaaggattatcgtgtcggcgatcctctcgataaggaaacgcagattggcccagtcgtctcgaggcgatccaaagagaccatcgaggctcacattaaagatgctctagacaaaggcgcaaaggatgctacaccggaaaattccacgttcgatactctgcccgcaaagggaaacttcgtcaagccaacactcctgattgacacggaccatagcatgaccgtcatgacagaagagactttcggtcctgtcatctcagtgatgaaggtgaaggacgatgccgaggccatcaagttgatgaatgatagtgagtttggcttgactgccagcatctggacgaaggatacggacaagggatatgagctcgcacagcaagtcgaagctggaaccgtgtttgttaaccgtgccgacttccctagccctgatctcgcttggactggatggaagaactctggcaaaggtgtcaccctcagcaaattcgggttcgaccaattcatcaagctgaagagctaccatctcaaggactaccccaaatga

SEQ ID NO: 31627 - protein, 467 aa, Muscodor strobelii
  misc_feature: SGI Peptide ID NO. 570890
  misc_feature (4)..(460): Pfam Id: PF00171 Pfam Desc: Aldehyde dehydrogenase family
  misc_feature (1)..(466): NCBI GI: 46136493 Blast Desc: FG09762.1 [Gibberella zeae PH-1]
  misc_feature (1)..(467): NCBI GI: 85105693 Blast Desc: NCU08669 [Neurospora crassa OR74A] gi|28923610|gb|EAA32782.1| conserved [Neurospora crassa OR74A]
  misc_feature (1)..(467): NCBI GI: 116196786 Blast Desc: conserved [Chaetomium globosum CBS 148.51] gi|88180904|gb|EAQ88372.1| conserved [Chaetomium globosum CBS 148.51]
  misc_feature (1)..(467): NCBI GI: 256726942 Blast Desc: [Nectria haematococca mpVI 77-13-4]
  misc_feature (1)..(467): NCBI GI: 261359854 Blast Desc: aldehyde dehydrogenase [Verticillium albo-atrum VaMs.102]
  misc_feature (1)..(467): NCBI GI: 171676752 Blast Desc: protein product [Podospora anserina] gi|170936443|emb|CAP61100.1| protein product [Podospora anserina]
  misc_feature (2)..(467): NCBI GI: 39976525 Blast Desc: MGG_05814 [Magnaporthe grisea 70-15] gi|145011951|gb|EDJ96607.1| MGG_05814 [Magnaporthe grisea 70-15]
  misc_feature (1)..(467): NCBI GI: 169611264 Blast Desc: SNOG_08742 [Phaeosphaeria nodorum SN15] gi|111062790|gb|EAT83910.1| SNOG_08742 [Phaeosphaeria nodorum SN15]
  misc_feature (1)..(467): NCBI GI: 189205631 Blast Desc: betaine aldehyde dehydrogenase 2 [Pyrenophora tritici-repentis Pt-1C-BFP] gi|187975243|gb|EDU41869.1| betaine aldehyde dehydrogenase 2 [Pyrenophora tritici-repentis Pt-1C-BFP]
  misc_feature (1)..(430): NCBI GI: 156031379 Blast Desc: SS1G_14111 [Sclerotinia sclerotiorum 1980] gi|154699513|gb|EDN99251.1| SS1G_14111 [Sclerotinia sclerotiorum 1980]
  misc_feature (1)..(463): SWISSPROT Homolog: EC 1.2.1.3 Aldehyde dehydrogenase (NAD(+))
  misc_feature: Useful for introducing or modulating the production of volatile compounds
  misc_feature: Useful for fungicidal and/or biocontrol applications
MSVETITTISPTTNEPILTRHGASAEELQELPKIADNAFESWRQTSLTDRIIIVKKAMKLLEAQKDQLAEELTVQMGRPIAYTGVEVTTAIKRVNYLLKIAEETLKDTEGEAEKGFKRFIRKVPVGPVLVIFAWNYPYLILVNSLVPALLAGNTVILKPSPQTPTIVEHMSQIFTEAGLPAGVLQYFHCGSPLMMESIVRDPKISLVCFTGSVAGGLAVQKAASDRIVNVGLELGGKDPAYIRDDVDLDWAAAEIVDGSIFNSGQSCCALERIYVNEKVYTPFIEAAQKVLKDYRVGDPLDKETQIGPVVSRRSKETIEAHIKDALDKGAKDATPENSTFDTLPAKGNFVKPTLLIDTDHSMTVMTEETFGPVISVMKVKDDAEAIKLMNDSEFGLTASIWTKDTDKGYELAQQVEAGTVFVNRADFPSPDLAWTGWKNSGKGVTLSKFGFDQFIKLKSYHLKDYPK

SEQ ID NO: 31628 - DNA, 1779 bp, Muscodor strobelii
  misc_feature: SGI EST ID NO. CUFF.74851.0
  misc_feature: Variant of the nucleotide sequence at SEQ ID NO 31626
ctccaacctcgtgtcggaccgtgacgtattattcggactcccgttatcgcatgactttattatttcaacatattccagccgagacctttttcactggtgttgttgagctaaggaaccgttttagatccgtgaaacttccttctttcgacctcggacaagtagttcacacataaagatgtcggtggaaactattaccacgatatcaccaactacaaacgagcccatcttgacgcgccatggggccagcgccgaggagctccaggagcttcccaagattgctgataatgcatttgagagctggcgacagacttcactgactgatcgtataattattgtcaagaaagctatgaagcttctcgaggctcagaaagaccaactggccgaggagctcacagttcagatgggacgccccattgcttacacaggtgttgaggtgaccaccgctatcaagcgtgttaactaccttctgaaaattgctgaagagaccttgaaagacacagagggcgaggccgagaaaggcttcaagcgcttcattcgcaaagtccccgtcggtcctgtcttagtcatcttcgcatggaattatccttatcttatcctggtcaactcactcgttcctgctctcttagcaggcaacactgtcatcctgaagccttcgcctcagactcccaccattgttgagcatatgtctcaaatcttcaccgaagctggcctgcctgcaggtgttctgcagtacttccattgtggttccccgttgatgatggagtccatagtacgggaccccaagatctctctcgtctgcttcacaggctccgtcgcaggtggtttagccgttcagaaggctgcttcagatcgtatcgtcaacgttggtttggagcttggtggcaaagaccccgcctatatcagagacgatgtcgatttggattgggcagctgccgagattgtcgatggctctatcttcaactctggccagagctgctgtgctctggagagaatctatgtgaacgagaaggtctatactcctttcatcgaggcagcacagaaagttctcaaggattatcgtgtcggcgatcctctcgataaggaaacgcagattggcccagtcgtctcgaggcgatccaaagagaccatcgaggctcacattaaagatgctctagacaaaggcgcaaaggatgctacaccggaaaattccacgttcgatactctgcccgcaaagggaaacttcgtcaagccaacactcctgattgacacggaccatagcatgaccgtcatgacagaagagactttcggtcctgtcatctcagtgatgaaggtgaaggacgatgccgaggccatcaagttgatgaatgatagtgagtttggcttgactgccagcatctggacgaaggatacggacaagggatatgagctcgcacagcaagtcgaagctggaaccgtgtttgttaaccgtgccgacttccctagccctgatctcgcttggactggatggaagaactctggcaaaggtgtcaccctcagcaaattcgggttcgaccaattcatcaagctgaagagctaccatctcaaggactaccccaaatgattaaagactttgaactgagactttacatctgattgtgatgatcgcacgagttatcgtaagagtaatcggagttaaaaagatggctacacatgtattaaatatccttcctgtagatgaaatcaagaattatcttcatccgtcgacttattactcacgtgaccaccgtgctaagctcaatgctcacagttcacagaagcatc

SEQ ID NO: 31629 - DNA, 360 bp, Muscodor strobelii
  misc_feature: SGI cDNA ID NO. 570891
  misc_feature: Encodes the peptide sequence at SEQ ID NO 31630
atgtctctcgtctacatggctctcgtcttcctgggttgctgcgacggctgcaacgatgacctcgactccgtcatcaccaaggaggagggtattagcggccctttcaatctcaagaagaagaagattgacttctcgcacaagaagcccctcaagatcaccaacctcacccctggtgagcgcgacgccgtgatcaagtacaacattcccgtcgctgccgacgagatggttccgctcccgcccgcccctcgcatcgtctccgtcgatgctccctacatctctttcctcgaccttgatgctgtcaatgccgagatggacacttgcggcctcggcatctggtgcgatcatcgcgcttccatctag

SEQ ID NO: 31630 - protein, 119 aa, Muscodor strobelii
  misc_feature: SGI Peptide ID NO. 570891
MSLVYMALVFLGCCDGCNDDLDSVITKEEGISGPFNLKKKKIDFSHKKPLKITNLTPGERDAVIKYNIPVAADEMVPLPPAPRIVSVDAPYISFLDLDAVNAEMDTCGLGIWCDHRASI

SEQ ID NO: 31631 - DNA, 1287 bp, Muscodor strobelii
  misc_feature: SGI cDNA ID NO. 570892
  misc_feature: Encodes the peptide sequence at SEQ ID NO 31632
atgcatcccaactttacgctcatcttgagcttctttggagcttattttttcctctaccaatatttccgatcatcatgctacagagatccgacatcgagattcttccaacccgaacgcgcaagtgctccgacttattccactcttcgaatacatcaggcgatcgaatatgccgattccgcaggcctaaacctcgccgaagcgcagcgaaacccaaaagttgatagtacaaatccacctgatctatgtattggcatcccttccgtacatagagagggaatgggatatctcaagccaacactaggctcgcttcaacaaggattgactccggaagaacgatcgcgtctccatttcgtcgtgttcctcgcacacgtcgatcaaaagcaacatgaagattataaccaaccttggctcttgagcatggccgatacgctctctacgtatcccaacccagatgtcgcagagctcatggtcaatcaaaatcacggaacgaaatccaagttcgactactccctcgttatggacgagtgcgagagaacgggtgctccatatatcatgatgctggaggatgatgttgtattcgtggaaggctggtggtctcgagtttccaaagcgttagaaactgccacttcgaaaacttggacagcaggatataaagacttcttatacttacgcctgttttactatgagggacttcagggatgggactcggtatattggcgaacttatgtagcctggtcgacctttgttatcatcgccgtcgcaagcctatcgctatacgcgcggcggcgtgttcccgcgtcacggcgatacctgacatactcggggatattcctcatcgtcgccgtctttacgcccatgttgattgcgctttacttcatcgcggggcggaactgtgtcaacccgcgacctgccggtgtcaatctcatgcccgatcacgcatgctgcggacaaggatttgtgtttcctcgtgataaggtcacgaacgaacttctgccctcattccgcagacatcgatggtcgaccataccgaccgatagcttcatcgaaagacatgcggacaacacgggagccctgcgctgggccctgacgcctgtcgtgatgcaacatattggcggttggagcagtcataatgtgaacagaggtggtggtgtcactccggctcgcctctggaattttggatttgagcaatatgatgcatcacgcttggccagacagcacaaactggtggctcgcgataattcgacattgtggtcgagagaactaagcgacgatacctggataccatga

SEQ ID NO: 31632 - protein, 428 aa, Muscodor strobelii
  misc_feature: SGI Peptide ID NO. 570892
  misc_feature (7)..(409): NCBI GI: 255941602 Blast Desc: Pc16g12710 [Penicillium chrysogenum Wisconsin 54-1255] gi|211586193|emb|CAP93941.1| Pc16g12710 [Penicillium chrysogenum Wisconsin 54-1255]
  misc_feature (3)..(411): NCBI GI: 258565009 Blast Desc: [Uncinocarpus reesii 1704] gi|237906950|gb|EEP81351.1| [Uncinocarpus reesii 1704]
  misc_feature (6)..(399): NCBI GI: 67538488 Blast Desc: AN5414.2 [Aspergillus nidulans FGSC A4] gi|40743384|gb|EAA62574.1| AN5414.2 [Aspergillus nidulans FGSC A4] gi|259485141|tpe|CBF81950.1| TPA: conserved [Aspergillus FGSC
  misc_feature (23)..(409): NCBI GI: 255950414 Blast Desc: Pc22g20740 [Penicillium chrysogenum Wisconsin 54-1255] gi|211592991|emb|CAP99362.1| Pc22g20740 [Penicillium chrysogenum Wisconsin 54-1255]
  misc_feature (20)..(416): NCBI GI: 238845283 Blast Desc: integral membrane protein [Microsporum canis CBS 113480]
  misc_feature (8)..(372): NCBI GI: 115396886 Blast Desc: conserved [Aspergillus terreus NIH2624] gi|114193651|gb|EAU35351.1| conserved [Aspergillus terreus NIH2624]
  misc_feature (23)..(356): NCBI GI: 145256134 Blast Desc: An10g00410 [Aspergillus niger CBS 513.88] gi|134078603|emb|CAK49131.1| protein product [Aspergillus niger]
  misc_feature (7)..(414): NCBI GI: 189192312 Blast Desc: integral membrane protein [Pyrenophora tritici-repentis Pt-1C-BFP] gi|187974101|gb|EDU41600.1| integral membrane protein [Pyrenophora tritici-repentis Pt-1C-BFP]
  misc_feature (81)..(406): NCBI GI: 238488367 Blast Desc: integral membrane protein [Aspergillus flavus NRRL3357] gi|220697809|gb|EED54149.1| integral membrane protein [Aspergillus flavus NRRL3357]
  misc_feature (29)..(416): NCBI GI: 169600185 Blast Desc: SNOG_02922 [Phaeosphaeria nodorum SN15] gi|111068533|gb|EAT89653.1| SNOG_02922 [Phaeosphaeria nodorum SN15]
MHPNFTLILSFFGAYFFLYQYFRSSCYRDPTSRFFQPERASAPTYSTLRIHQAIEYADSAGLNLAEAQRNPKVDSTNPPDLCIGIPSVHREGMGYLKPTLGSLQQGLTPEERSRLHFVVFLAHVDQKQHEDYNQPWLLSMADTLSTYPNPDVAELMVNQNHGTKSKFDYSLVMDECERTGAPYIMMLEDDVVFVEGWWSRVSKALETATSKTWTAGYKDFLYLRLFYYEGLQGWDSVYWRTYVAWSTFVIIAVASLSLYARRRVPASRRYLTYSGIFLIVAVFTPMLIALYFIAGRNCVNPRPAGVNLMPDHACCGQGFVFPRDKVTNELLPSFRRHRWSTIPTDSFIERHADNTGALRWALTPVVMQHIGGWSSHNVNRGGGVTPARLWNFGFEQYDASRLARQHKLVARDNSTLWSRELSDDTWIP

SEQ ID NO: 31633 - DNA, 2600 bp, Muscodor strobelii
  misc_feature: SGI EST ID NO. CUFF.74860.0
  misc_feature: Variant of the nucleotide sequence at SEQ ID NO 31631
cgctacttaccatgatgcggcggcgcgattgggaatggtcatcgcatcaggcttttcctcccaattaattttgctctcgagttgtggacgacaaccaacagactttcactcgctttgtctgaaataatcgtaccgtggcttgttgcttaatttttgggttcccgaagtatccggattgaatggtggctctctgcaattctcgttggaaagcgtctgatcttgggatgcgagtctaatatgcatcccaactttacgctcatcttgagcttctttggagcttattttttcctctaccaatatttccgatcatcatgctacagagatccgacatcgagattcttccaacccgaacgcgcaagtgctccgacttattccactcttcgaatacatcaggcgatcgaatatgccgattccgcaggcctaaacctcgccgaagcgcagcgaaacccaaaagttgatagtacaaatccacctgatctatgtattggcatcccttccgtacatagagagggaatgggatatctcaagccaacactaggctcgcttcaacaaggattgactccggaagaacgatcgcgtctccatttcgtcgtgttcctcgcacacgtcgatcaaaagcaacatgaagattataaccaaccttggctcttgagcatggccgatacgctctctacgtatcccaacccagatgtcgcagagctcatggtcaatcaaaatcacggaacgaaatccaagttcgactactccctcgttatggacgagtgcgagagaacgggtgctccatatatcatgatgctggaggatgatgttgtattcgtggaaggctggtggtctcgagtttccaaagcgttagaaactgccacttcgaaaacttggacagcaggatataaagacttcttatacttacgcctgttttactatgagggacttcagggatgggactcggtatattggcgaacttatgtagcctggtcgacctttgttatcatcgccgtcgcaagcctatcgctatacgcgcggcggcgtgttcccgcgtcacggcgatacctgacatactcggggatattcctcatcgtcgccgtctttacgcccatgttgattgcgctttacttcatcgcggggcggaactgtgtcaacccgcgacctgccggtgtcaatctcatgcccgatcacgcatgctgcggacaaggatttgtgtttcctcgtgataaggtcacgaacgaacttctgccctcattccgcagacatcgatggtcgaccataccgaccgatagcttcatcgaaagacatgcggacaacacgggagccctgcgctgggccctgacgcctgtcgtgatgcaacatattggcggttggagcagtcataatgtgaacagaggtggtggtgtcactccggctcgcctctggaattttggatttgagcaatatgatgcatcacgcttggccagacagcacaaactggtggctcgcgataattcgacattgtggtcgagagaactaagcgacgatacctggataccatgaactgaacgatagtaataatcagaatagacgaactcttaccacaagatcttgaagtttacaaagctctcacattgccactttaccgccatcattgataccgggatttaaggagactattccagtttttcggactcttctctctgtcccacctccttttgtcagttatgaagacggtaagaagggtccattggttgatcagacatatttcagggaccttgtagcactttggagtcacaggacacaacatctaataatcggatcattccgtgcatattgtcttcgccgctgcttatcggcttcacgtggacatcgatgatcccatgtgcgccggtaaactctagcacattgcggaaacagcctaatccatcggcctgctccctgtggatgatgatggctagcatctccgcgcacaaggccgtgacgggctttgaaatgaccccgctcgcatgaacgacgacgcacatcgaaacgtcaactgcgagtaggagcgcctacactctactatgccatcagacgacgagagatcaaaattggagtgtgtctctaactctcgaggtcagaatgaagagtgaaataattcagtgctatcccgacagagtgtcacaggtgtcgacggtttcggggatggatagtctccctagggctcggtggacagtggatcagaaagaactcagtgatattcaaccaatcacgccaatttcaagcgtatataagtggtaaatcgtatctactatggcgtgtagagttataaagggattgggtgtatcgttccgacagaggtagaaaatgatttcgcgaagcaagtactgagcctcatttatcatcgaggggcacagttattgagggctctattatacctgattcttacctctccctaaccactccctatgcgatcacatacttcaaacacatcaagtgggaggcaacgttttatattatcaagttataatcattttaggaacatcttctctagtcaagatagctacgtggtgggatcatatcttgaccactcagagtctaaaagtctgtgtggcttaactttagatgggttgctcatatccgaggtctccacgtag

SEQ ID NO: 31634 - DNA, 921 bp, Muscodor strobelii
  misc_feature: SGI cDNA ID NO. 570893
  misc_feature: Encodes the peptide sequence at SEQ ID NO 31635
atgttactcccacgtttcgtgggccttattgcctccatcctggttgcttccatcttccctatagctcttgcggctcctgtcacgactactaacgtcgatatctcatccattggcaacactgccctagaatttagtcgcaatgctgccgcagtatccaagcgcatcgtactctgggactggaccctaacccagcaagtcaacgccaacccaggtatccagtccagcgccgcctcccttgccaactcgcctgtagccaagacagttatcaactgggagacctggcgtcctaccgagcttccacccgctcttcgcttccaaccaacagtccgcacgcgagactatctctccggagacaactggaagaacatccagaacctcgtcaacggcggcggcgtaacagtccacttctacaacgagcccgagcgtcagagtatcacggctgcccaagccgtagccgactggcgcaacagcatgatcccgctccgcaagcaacacggcgccaagctcgtttcacctgcctgcgcctcggacgcagcgggaacggcatggatgaacgacttcatgggccgtctctccgccgacgagaagcccgatttcgtaggattgcactattacagtaatcaaggcaataatgcagcaaagtctatcaacgcggcaaagacgtacttaaagaacagacataagaagtttggccttccggtcgtgatccgcgagatggctagcacgagtcgtgactacggcgtcgtgaaagccttcacgatgcagatgagtggctggatggatgcacaggcatgggtgaattcgtacgggttcttcggctgctcgcttgtgcctaaggatgggtttgttagtccacaggcgcagcttatgaccacggatggacactggaccgagctaggtcatttcatgttcagtgtttaa

SEQ ID NO: 31635 - protein, 306 aa, Muscodor strobelii
  misc_feature: SGI Peptide ID NO. 570893
  misc_feature (90)..(301): NCBI GI: 154313149 Blast Desc: BC1G_05576 [Botryotinia fuckeliana B05.10] gi|150849661|gb|EDN24854.1| BC1G_05576 [Botryotinia fuckeliana B05.10]
  misc_feature (138)..(300): NCBI GI: 170092653 Blast Desc: [Laccaria bicolor S238N-H82] gi|164647407|gb|EDR11651.1| [Laccaria bicolor S238N-H82]
  misc_feature (119)..(300): NCBI GI: 58260658 Blast Desc: [Cryptococcus neoformans var. neoformans JEC21] gi|134117213|ref|XP_772833.1| CNBK2040 [Cryptococcus neoformans var. neoformans B-3501A] gi|50255451|gb|EAL18186.1| CNBK2040 var.
  misc_feature (67)..(272): NCBI GI: 189203719 Blast Desc: conserved [Pyrenophora tritici-repentis Pt-1C-BFP] gi|187985294|gb|EDU50782.1| conserved [Pyrenophora tritici-repentis Pt-1C-BFP]
  misc_feature (138)..(301): NCBI GI: 170091106 Blast Desc: [Laccaria bicolor S238N-H82] gi|164648268|gb|EDR12511.1| [Laccaria bicolor S238N-H82]
  misc_feature (131)..(306): NCBI GI: 213410337 Blast Desc: conserved [Schizosaccharomyces japonicus yFS275] gi|212003985|gb|EEB09645.1| conserved [Schizosaccharomyces japonicus yFS275]
  misc_feature (136)..(305): NCBI GI: 58263022 Blast Desc: [Cryptococcus neoformans var. neoformans JEC21] gi|58263024|ref|XP_568922.1| [Cryptococcus neoformans var. neoformans JEC21] gi|58263028|ref|XP_568924.1| [Cryptococcus var.
  misc_feature (136)..(305): NCBI GI: 58263026 Blast Desc: [Cryptococcus neoformans var. neoformans JEC21] gi|57223573|gb|AAW41616.1| conserved [Cryptococcus neoformans var. neoformans JEC21]
  misc_feature (138)..(301): NCBI GI: 169863281 Blast Desc: CC1G_04706 [Coprinopsis cinerea okayama7#130] gi|116500555|gb|EAU83450.1| CC1G_04706 [Coprinopsis cinerea okayama7#130]
  misc_feature (137)..(301): NCBI GI: 256675264 Blast Desc: RNA polymerase, sigma-24 subunit, ECF subfamily protein [Streptomyces sp. SPB78]
MLLPRFVGLIASILVASIFPIALAAPVTTTNVDISSIGNTALEFSRNAAAVSKRIVLWDWTLTQQVNANPGIQSSAASLANSPVAKTVINWETWRPTELPPALRFQPTVRTRDYLSGDNWKNIQNLVNGGGVTVHFYNEPERQSITAAQAVADWRNSMIPLRKQHGAKLVSPACASDAAGTAWMNDFMGRLSADEKPDFVGLHYYSNQGNNAAKSINAAKTYLKNRHKKFGLPVVIREMASTSRDYGVVKAFTMQMSGWMDAQAWVNSYGFFGCSLVPKDGFVSPQAQLMTTDGHWTELGHFMFSV

SEQ ID NO: 31636 - DNA, 306 bp, Muscodor strobelii
  misc_feature: SGI EST ID NO. CUFF.74869.0
  misc_feature: Variant of the nucleotide sequence at SEQ ID NO 31634
gtaacagtccacttctacaacgagcccgagcgtcagagtatcacggctgcccaagccgtagccgactggcgcaacagcatgatcccgctccgcaagcaacacggcgccaagctcgtttcacctgcctgcgcctcggacgcagcgggaacggcatggatgaacgacttcatgggccgtctctccgccgacgagaagcccgatttcgtaggattgcactattacagtaatcaaggcaataatgcagcaaagtctatcaacgcggcaaagacgtacttaaagaacagacataagaagtttggccttccg

SEQ ID NO: 31637 - DNA, 1329 bp, Muscodor strobelii
  misc_feature: SGI cDNA ID NO. 570894
  misc_feature: Encodes the peptide sequence at SEQ ID NO 31638
atgccgggtacaaccgccgtctccgcgccgggcaaggtgctccttgccggtggctacttggccctcgacaaggagtattgcgccttggttttcggcctaagcgcacggatcaatgtcgttgcccaagagatcaaaactagccagggagttcagctgagcgagatagtcgtcgatagccctcagtttcttgaggctcaatggagatatggctatcggctcgcgcctgaggacggtggtatcaaagttactcagctgcaaagcggctcaaatatcggttcaaacccattcgtggagataactctaagctacgcgctcacttacatcactgcggctgcaaagcacccatcgtcgcacacctttgagccagctcagttcaccattctcgcggacaatgactactactcgcagccgcactccatgagcggtgcagagaagagctcatcacgattcgccaagttcccaaccacactcaaggacgccaataaaaccggtctcggctcatccgcggccctagttacgtctttgaccgctgcgctactctcttactatttgccgcattcgttatttgacatcacctcagaagagggcaagcgtacacttcataacctcgcccaagcagcacactgcgctgcccagggtaaggtcggctctggatttgatgttgcagccgctgtctacggtagctgccggtactggcgattttcgccgtccatcctcaagagcatgccagaagccggcgggtcaggattcgcacccgctctcgccgccttgatggactccaaatgggacacagaaactaccaaagatggcgtcagtattggccagggattggttctgcgtatgtgtgatgtcgactgcggtagtcagactgtcagcatggtaaaaaaggtattggcgtggagggaggccgatccaactggttctaagaagctctgggacgacttgcaagctcgaaacctcaagcttggcaaaattttaagcgaaggcaaattagacgagatcaagggtgctgtcgcagacgtccgtgagctcgttcgtgctatgggcactgaaagcggtgttcctatcgagcccgagagtcaaacaagcctcctagacgctttgtcagaagtcgagggagtgtacaatggcgttgttcccggagccggtggattcgacgccgtcgttcttatcatgaaagacgatgaagccaccgcgaagcgcgttgaagagttttgtgccaattggagcaaggagaagggtgggcaagtcagattgcttgatgtcaagggcgagtacgaaggagcgagaatggagagcattcagcaatatcagggctggatttcgtaa

SEQ ID NO: 31638 - protein, 442 aa, Muscodor strobelii
  misc_feature: SGI Peptide ID NO. 570894
  misc_feature (153)..(228): Pfam Id: PF00288 Pfam Desc: GHMP kinases N terminal domain
  misc_feature (311)..(411): Pfam Id: PF08544 Pfam Desc: GHMP kinases C terminal
  misc_feature (164)..(228): Pfam Id: PF00288 Pfam Desc: GHMP kinases N terminal domain
  misc_feature (4)..(441): NCBI GI: 39976529 Blast Desc: MGG_05812 [Magnaporthe grisea 70-15] gi|145011953|gb|EDJ96609.1| MGG_05812 [Magnaporthe grisea 70-15]
  misc_feature (4)..(441): NCBI GI: 46136497 Blast Desc: FG09764.1 [Gibberella zeae PH-1]
  misc_feature (4)..(441): NCBI GI: 256727511 Blast Desc: [Nectria haematococca mpVI 77-13-4]
  misc_feature (6)..(441): NCBI GI: 164426378 Blast Desc: NCU08671 [Neurospora crassa OR74A] gi|157071312|gb|EAA32784.2| conserved [Neurospora crassa OR74A]
  misc_feature (6)..(421): NCBI GI: 206597123 Blast Desc: phosphomevalonate kinase [Neurospora crassa]
  misc_feature (2)..(440): NCBI GI: 116196782 Blast Desc: CHGG_04989 [Chaetomium globosum CBS 148.51] gi|88180902|gb|EAQ88370.1| CHGG_04989 [Chaetomium globosum CBS 148.51]
  misc_feature (1)..(441): NCBI GI: 261359852 Blast Desc: phosphomevalonate kinase [Verticillium albo-atrum VaMs.102]
  misc_feature (5)..(432): NCBI GI: 154309193 Blast Desc: BC1G_07491 [Botryotinia fuckeliana B05.10] gi|150852534|gb|EDN27726.1| BC1G_07491 [Botryotinia fuckeliana B05.10]
  misc_feature (4)..(432): NCBI GI: 156049859 Blast Desc: SS1G_08637 [Sclerotinia sclerotiorum 1980] gi|154693035|gb|EDN92773.1| SS1G_08637 [Sclerotinia sclerotiorum 1980]
  misc_feature (4)..(433): NCBI GI: 171676756 Blast Desc: protein product [Podospora anserina] gi|170936445|emb|CAP61102.1| protein product [Podospora anserina]
  misc_feature (1)..(432): SWISSPROT Homolog: EC 2.7.4.2 Phosphomevalonate kinase
  misc_feature: Useful for fungicidal and/or biocontrol applications
MPGTTAVSAPGKVLLAGGYLALDKEYCALVFGLSARINVVAQEIKTSQGVQLSEIVVDSPQFLEAQWRYGYRLAPEDGGIKVTQLQSGSNIGSNPFVEITLSYALTYITAAAKHPSSHTFEPAQFTILADNDYYSQPHSMSGAEKSSSRFAKFPTTLKDANKTGLGSSAALVTSLTAALLSYYLPHSLFDITSEEGKRTLHNLAQAAHCAAQGKVGSGFDVAAAVYGSCRYWRFSPSILKSMPEAGGSGFAPALAALMDSKWDTETTKDGVSIGQGLVLRMCDVDCGSQTVSMVKKVLAWREADPTGSKKLWDDLQARNLKLGKILSEGKLDEIKGAVADVRELVRAMGTESGVPIEPESQTSLLDALSEVEGVYNGVVPGAGGFDAVVLIMKDDEATAKRVEEFCANWSKEKGGQVRLLDVKGEYEGARMESIQQYQGWIS

SEQ ID NO: 31639 - DNA, 2127 bp, Muscodor strobelii
  misc_feature: SGI EST ID NO. CUFF.74873.0
  misc_feature: Variant of the nucleotide sequence at SEQ ID NO 31637
ttcgactattcaatcttctaataggaagcacgcattgcaggtcgacagcaaaaaatgacaaatttggcatcctaagatttgtcaaattgcggtttactgttgcgactcctgaatcccaaaggcgctcctctgtcttattcttatcggcagggaacctccgctggcactaataataacatcgcaaggcattgcagcttccccgcagccgtcagaaagtcatcagaaagacgttgttggactgtaagaaattcttacacattatcccttgagaactccacaagcaattcagaatactcaattgcatactataaagtcgtttcacattacatcattttgatacattgcgccaccattcttatctctcagcaccactgcccagcaccactgccccgcctgttcgaactcgactatattcaccatcctaagttcgtgtcccgagtgagcgcacatccggactgtgccgatcaaccatcgcttcagcccaattgcgtgctatcatacgtgcccaggtttcgggtattttctcccacctttccgattttcgacccaatcgttgatcgttgaattcttattcatcactgaagatcccgttataatgccgggtacaaccgccgtctccgcgccgggcaaggtgctccttgccggtggctacttggccctcgacaaggagtattgcgccttggttttcggcctaagcgcacggatcaatgtcgttgcccaagagatcaaaactagccagggagttcagctgagcgagatagtcgtcgatagccctcagtttcttgaggctcaatggagatatggctatcggctcgcgcctgaggacggtggtatcaaagttactcagctgcaaagcggctcaaatatcggttcaaacccattcgtggagataactctaagctacgcgctcacttacatcactgcggctgcaaagcacccatcgtcgcacacctttgagccagctcagttcaccattctcgcggacaatgactactactcgcagccgcactccatgagcggtgcagagaagagctcatcacgattcgccaagttcccaaccacactcaaggacgccaataaaaccggtctcggctcatccgcggccctagttacgtctttgaccgctgcgctactctcttactatttgccgcattcgttatttgacatcacctcagaagagggcaagcgtacacttcataacctcgcccaagcagcacactgcgctgcccagggtaaggtcggctctggatttgatgttgcagccgctgtctacggtagctgccggtactggcgattttcgccgtccatcctcaagagcatgccagaagccggcgggtcaggattcgcacccgctctcgccgccttgatggactccaaatgggacacagaaactaccaaagatggcgtcagtattggccagggattggttctgcgtatgtgtgatgtcgactgcggtagtcagactgtcagcatggtaaaaaaggtattggcgtggagggaggccgatccaactggttctaagaagctctgggacgacttgcaagctcgaaacctcaagcttggcaaaattttaagcgaaggcaaattagacgagatcaagggtgctgtcgcagacgtccgtgagctcgttcgtgctatgggcactgaaagcggtgttcctatcgagcccgagagtcaaacaagcctcctagacgctttgtcagaagtcgagggagtgtacaatggcgttgttcccggagccggtggattcgacgccgtcgttcttatcatgaaagacgatgaagccaccgcgaagcgcgttgaagagttttgtgccaattggagcaaggagaagggtgggcaagtcagattgcttgatgtcaagggcgagtacgaaggagcgagaatggagagcattcagcaatatcagggctggatttcgtaacgtggagccgttgtttggtattgtatatcccggaattggcttctctaccctatcaattgagcaaaaaatgagacgactatctactttaccagccatcctgcaatatcagtgaagcaacctaactccaattccccaaacctaaccacttaaacactgaacatgaaatgacctagctcggtccagtgtccatccgtggtcataag

SEQ ID NO: 31640 - DNA, 1062 bp, Muscodor strobelii
  misc_feature: SGI cDNA ID NO. 570895
  misc_feature: Encodes the peptide sequence at SEQ ID NO 31641
atggcctcaagctgctcaacgccacgcacgacgcgcgagaccatcccctcctcgccgatcaagatacttcagaccgtcgacgccgtgcgcagatggcgcaaaccccacgtgctcgaccaccgaatcgtcggcctcgtgcccaccatgggcgccttgcacgaaggccatctgtccctcatccgcgcggctgctcgcgaagcccaccacgtcgtcgtcagcgtctatgtgaacccggcccagttcggcatcaaggaagatctcgcctcctatcctgtcacctgggaccaagactgcaagatactcgcccaattggaccgcgaacttgcagacgacggcggtaacctcggccgcatcagcgccgtcttcgccccgaccactcccgacatgtatccctcgggcttcccaggccaagagcccagctcgaagggcagcttcgttgtcatgacgcccattagtgagctgctcgagggtggcacccgtccgaccttctttcgcggtgtggccactgtctgcatgaagctgttcaacattgtacaacctgagaaggtatattttggtcagaaggatgttcaacagactgtcgtgatccggaagatggtcaaggacttcatgctcccaatagacgttgtcgtcggccagacgagcagagaaccagacggtcttgctttgagttcccgcaatgtatatctgggcaagcgtcggcgcaaggtcgccgttgtcctcaaccgcgcgctcaaagctgccgaagagcaatataagaatggctcactagatagggacagtatcctaggtgcggcgaatgcaatcgctgcagacacgctaaacgagcaaatgagcatgagccccgaagatcgcgtcatattcgaagttgactacatttctctcgccgacccttccaccatggaagaagtgactcaagttgatcctacggttggcggtattcttagtggcgcggtgaagatgttaccggtggagtctgcacagtcaggagaggatctgggccatagcaacggccctgctgttcggttgatagacaacattgtgttaaaaccatctgcatga

SEQ ID NO: 31641 - protein, 353 aa, Muscodor strobelii
  misc_feature: SGI Peptide ID NO. 570895
  misc_feature (20)..(349): Pfam Id: PF02569 Pfam Desc: Pantoate-beta-alanine ligase
  misc_feature (20)..(313): Pfam Id: PF02569 Pfam Desc: Pantoate-beta-alanine ligase
  misc_feature (2)..(351): NCBI GI: 14595008 Blast Desc: fusarium oxysporum panthotenate synthetase [Fusarium oxysporum]
  misc_feature (1)..(351): NCBI GI: 46116690 Blast Desc: FG04187.1 [Gibberella zeae PH-1]
  misc_feature (13)..(353): NCBI GI: 171688284 Blast Desc: protein product [Podospora anserina] gi|170944104|emb|CAP70214.1| protein product [Podospora anserina]
  misc_feature (1)..(351): NCBI GI: 256725604 Blast Desc: NECHADRAFT_100842 [Nectria haematococca mpVI 77-13-4]
  misc_feature (13)..(351): NCBI GI: 85105428 Blast Desc: pantoate-beta-alanine ligase [Neurospora crassa OR74A] gi|28923550|gb|EAA32726.1| pantoate-beta-alanine ligase [Neurospora crassa OR74A]
  misc_feature (9)..(351): NCBI GI: 154317703 Blast Desc: BC1G_03203 [Botryotinia fuckeliana B05.10] gi|150844377|gb|EDN19570.1| BC1G_03203 [Botryotinia fuckeliana B05.10]
  misc_feature (20)..(353): NCBI GI: 169775369 Blast Desc: [Aspergillus oryzae RIB40] gi|83770015|dbj|BAE60150.1| protein product [Aspergillus oryzae]
  misc_feature (20)..(353): NCBI GI: 238495985 Blast Desc: pantoate--beta-alanine ligase [Aspergillus flavus NRRL3357] gi|220694108|gb|EED50452.1| pantoate--beta-alanine ligase [Aspergillus flavus NRRL3357]
  misc_feature (16)..(353): NCBI GI: 261359835 Blast Desc: pantothenate synthetase [Verticillium albo-atrum VaMs.102]
  misc_feature (13)..(353): NCBI GI: 115401458 Blast Desc: pantoate--beta-alanine ligase [Aspergillus terreus NIH2624] gi|114190258|gb|EAU31958.1| pantoate--beta-alanine ligase [Aspergillus terreus NIH2624]
  misc_feature (20)..(350): SWISSPROT Homolog: EC 6.3.2.1 Pantoate--beta-alanine ligase
MASSCSTPRTTRETIPSSPIKILQTVDAVRRWRKPHVLDHRIVGLVPTMGALHEGHLSLIRAAAREAHHVVVSVYVNPAQFGIKEDLASYPVTWDQDCKILAQLDRELADDGGNLGRISAVFAPTTPDMYPSGFPGQEPSSKGSFVVMTPISELLEGGTRPTFFRGVATVCMKLFNIVQPEKVYFGQKDVQQTVVIRKMVKDFMLPIDVVVGQTSREPDGLALSSRNVYLGKRRRKVAVVLNRALKAAEEQYKNGSLDRDSILGAANAIAADTLNEQMSMSPEDRVIFEVDYISLADPSTMEEVTQVDPTVGGILSGAVKMLPVESAQSGEDLGHSNGPAVRLIDNIVLKPSA

SEQ ID NO: 31642 - DNA, 1758 bp, Muscodor strobelii
  misc_feature: SGI EST ID NO. CUFF.74875.0
  misc_feature: Variant of the nucleotide sequence at SEQ ID NO 31640
ccttgccttcatgattttatccactttcacaccgcgacaacatgaacactcatagccagcattcaagataggcaaaatgggacgtcggcaagtaggcggacactagtagcaaggtacatgatgatcaggtccctgaaaaatgacgtcgcgccagtgggatggtgggctgtagcttacccccggccaagagcgagcccatgtgcctgagcttagcgtggagaagggtttctggagccgaacggtgcatcccagaatattcgcagcagaaaacatcatgcttattgcttcaaacctgccaattggctctctacgatggctcaaaacaagtcactaggtgtttcgaactcttttatcattattctcaactacttttgaacattttgaagtcatggttggcttcgcgatgcgcggcctcactcggtcgcgtgcctgtgcctggagcccgtcacagctccggaccatggcctcaagctgctcaacgccacgcacgacgcgcgagaccatcccctcctcgccgatcaagatacttcagaccgtcgacgccgtgcgcagatggcgcaaaccccacgtgctcgaccaccgaatcgtcggcctcgtgcccaccatgggcgccttgcacgaaggccatctgtccctcatccgcgcggctgctcgcgaagcccaccacgtcgtcgtcagcgtctatgtgaacccggcccagttcggcatcaaggaagatctcgcctcctatcctgtcacctgggaccaagactgcaagatactcgcccaattggaccgcgaacttgcagacgacggcggtaacctcggccgcatcagcgccgtcttcgccccgaccactcccgacatgtatccctcgggcttcccaggccaagagcccagctcgaagggcagcttcgttgtcatgacgcccattagtgagctgctcgagggtggcacccgtccgaccttctttcgcggtgtggccactgtctgcatgaagctgttcaacattgtacaacctgagaaggtatattttggtcagaaggatgttcaacagactgtcgtgatccggaagatggtcaaggacttcatgctcccaatagacgttgtcgtcggccagacgagcagagaaccagacggtcttgctttgagttcccgcaatgtatatctgggcaagcgtcggcgcaaggtcgccgttgtcctcaaccgcgcgctcaaagctgccgaagagcaatataagaatggctcactagatagggacagtatcctaggtgcggcgaatgcaatcgctgcagacacgctaaacgagcaaatgagcatgagccccgaagatcgcgtcatattcgaagttgactacatttctctcgccgacccttccaccatggaagaagtgactcaagttgatcctacggttggcggtattcttagtggcgcggtgaagatgttaccggtggagtctgcacagtcaggagaggatctgggccatagcaacggccctgctgttcggttgatagacaacattgtgttaaaaccatctgcatgaagatatcctcgcctagtcagtctgggctagttcgctgaacaacgagctccatgctcccagattcagaaatagagtacgtaacatctccatagatatttagattccaactggactttatcgtgcattatccccagatattactacatcttgcagcactataagggaaatgaccgagaaatcaagtacgatatcgtcctcggaagcaaaatagaagctaatgtttacgctacgcagtg

SEQ ID NO: 31643 - DNA, 1644 bp, Muscodor strobelii
  misc_feature: SGI cDNA ID NO. 570896
  misc_feature: Encodes the peptide sequence at SEQ ID NO 31644
atgccgaagccttcgctaggcgctgcgctctcgctggccgccttgctacccgcctgttgtatcgccggcagtcacaaccgatacgcccaggaacagatccccctcaatgatgacttcgactataaggaagcatgcccagactatacccactactcggccttctcgcaccctcctcttagcgaaggatccttagaactgcctttccagagaccgcacgctaagtgccgcacattcaactccgatgccattgaggaggtcattgagaatgtggtcgttcgcatgaaggaccctgatctcgctaggttatttgagaatgcatttccttccacgacagataccactgtcaagttccacaccagcggctcggacaaaaaggcgagcaaagtacagctcgacttaggcgaaggcgcatgggaagggccacattctttcatcattacaggagacatcattgctgaatggcttcgggactctaccaatcagctggctccatatcaacctctggccaaaaaagaccccgatattcacactttgattcttggtgccatcaatactcagtctgaatatgtcatcgagtcgccatactgcaatgctttccaacctccgcctatcagcaacttgcctgtctcttataatggccaggatgacgtggtacaccccacatacgagcctacatctgtatttgagtgcaagtatgagctagactcgcttgcccatttcctcgctttgggcaacgatttctacaaacataccggttccaaggagttcctgacaccacgttggcattcagcaatgagaactgtcttggaggtgctgaaggagcagtcacaaccgacttttgatccggagactggccgctaccgtcgaaatcagtacactttcaaccgtaacacgaatacaggtacagagaccctcaatcttcagggcgttgggaacccactgaattacggtaccggcctggtccgatccgcctttcgtccaagtgatgatgctaccatactgggtttcttcatccctgccaatgcccaaatggccacggagctgaagcggacagccaaagtgctcaaggatgccggcgaggctgaactggcgcaggaggtagatgaatggagcaagacaatcactaaaggcatatgggaacatggcgttgtccagcatcgtgagtatggacaagtttttgcttatgaagtcgatggctacggctcggtcatcttgatggatgacgcgaattatccgtcgttgctcgcgctccctttgatgggctttgtagacgtggacgacgcaacctatcagaacacgcgcaaaatgttgcttgcgaaatcctcaaatccttactaccttaagggtagagaattccatggtattgggggccctcacatcggcctttcgaatgcatggcccatgagtctgctaatccaagcacaaacgtcgagcaatgataccgagataacagaatgtctcgatctcgttttgcgatctagcaagctgggtcttatacacgaaagtgtcgatgtcaacatgatgactagctacacaaggagttggttcgcgtgggctaacggcgtctttgcctcgactatactgggtcttgccaaacgtaaacctcacttgatattcaatgatccgactccctatgaaatttga

SEQ ID NO: 31644 - protein, 547 aa, Muscodor strobelii
  misc_feature: SGI Peptide ID NO. 570896
  misc_feature (96)..(529): Pfam Id: PF06824 Pfam Desc: Domain of function (DUF1237)
  misc_feature (17)..(547): NCBI GI: 171690918 Blast Desc: protein product [Podospora anserina] gi|170945407|emb|CAP71519.1| protein product [Podospora anserina]
  misc_feature (31)..(547): NCBI GI: 46116826 Blast Desc: FG04255.1 [Gibberella zeae PH-1]
  misc_feature (32)..(547): NCBI GI: 256725965 Blast Desc: [Nectria haematococca mpVI 77-13-4]
  misc_feature (32)..(547): NCBI GI: 145607279 Blast Desc: MGG_04128 [Magnaporthe grisea 70-15] gi|145014863|gb|EDJ99431.1| MGG_04128 [Magnaporthe grisea 70-15]
  misc_feature (32)..(530): NCBI GI: 116195942 Blast Desc: CHGG_04569 [Chaetomium globosum CBS 148.51] gi|88180482|gb|EAQ87950.1| CHGG_04569 [Chaetomium globosum CBS 148.51]
  misc_feature (15)..(513): NCBI GI: 85112949 Blast Desc: NCU09737 [Neurospora crassa OR74A] gi|28926221|gb|EAA35203.1| NCU09737 [Neurospora crassa OR74A]
  misc_feature (30)..(547): NCBI GI: 156049177 Blast Desc: SS1G_08295 [Sclerotinia sclerotiorum 1980] gi|154692694|gb|EDN92432.1| SS1G_08295 [Sclerotinia sclerotiorum 1980]
  misc_feature (32)..(547): NCBI GI: 154299734 Blast Desc: BC1G_11493 [Botryotinia fuckeliana B05.10] gi|150857183|gb|EDN32375.1| BC1G_11493 [Botryotinia fuckeliana B05.10]
  misc_feature (9)..(547): NCBI GI: 240107031 Blast Desc: CPC735_018220 [Coccidioides posadasii C735 delta SOWgp]
  misc_feature (9)..(547): NCBI GI: 119175090 Blast Desc: CIMG_09452 [Coccidioides immitis RS]
MPKPSLGAALSLAALLPACCIAGSHNRYAQEQIPLNDDFDYKEACPDYTHYSAFSHPPLSEGSLELPFQRPHAKCRTFNSDAIEEVIENVVVRMKDPDLARLFENAFPSTTDTTVKFHTSGSDKKASKVQLDLGEGAWEGPHSFIITGDIIAEWLRDSTNQLAPYQPLAKKDPDIHTLILGAINTQSEYVIESPYCNAFQPPPISNLPVSYNGQDDVVHPTYEPTSVFECKYELDSLAHFLALGNDFYKHTGSKEFLTPRWHSAMRTVLEVLKEQSQPTFDPETGRYRRNQYTFNRNTNTGTETLNLQGVGNPLNYGTGLVRSAFRPSDDATILGFFIPANAQMATELKRTAKVLKDAGEAELAQEVDEWSKTITKGIWEHGVVQHREYGQVFAYEVDGYGSVILMDDANYPSLLALPLMGFVDVDDATYQNTRKMLLAKSSNPYYLKGREFHGIGGPHIGLSNAWPMSLLIQAQTSSNDTEITECLDLVLRSSKLGLIHESVDVNMMTSYTRSWFAWANGVFASTILGLAKRKPHLIFNDPTPYEI

SEQ ID NO: 31645 - DNA, 2102 bp, Muscodor strobelii
  misc_feature: SGI EST ID NO. CUFF.74878.1
  misc_feature: Variant of the nucleotide sequence at SEQ ID NO 31643
gttgaaacgtgacgacggcacggattagatatcgtgagtttcctgagccaacgtgtatttgtctcccttgcgtctttctatatagtagtaacatgtggcgcataaattgaaccgcatgattaactgtggttgatttccagcgaatttgtacataacgagagagccgcgacaaacgacagtccacgagctctaccttgacctcgagagcacagccatgtattccgtgtcgacaacgccttgctcgtaacctctccgctctcgctattgcaaaccaccttctgcctctccaacctttgaaagacgatacgccatgccgaagccttcgctaggcgctgcgctctcgctggccgccttgctacccgcctgttgtatcgccggcagtcacaaccgatacgcccaggaacagatccccctcaatgatgacttcgactataaggaagcatgcccagactatacccactactcggccttctcgcaccctcctcttagcgaaggatccttagaactgcctttccagagaccgcacgctaagtgccgcacattcaactccgatgccattgaggaggtcattgagaatgtggtcgttcgcatgaaggaccctgatctcgctaggttatttgagaatgcatttccttccacgacagataccactgtcaagttccacaccagcggctcggacaaaaaggcgagcaaagtacagctcgacttaggcgaaggcgcatgggaagggccacattctttcatcattacaggagacatcattgctgaatggcttcgggactctaccaatcagctggctccatatcaacctctggccaaaaaagaccccgatattcacactttgattcttggtgccatcaatactcagtctgaatatgtcatcgagtcgccatactgcaatgctttccaacctccgcctatcagcaacttgcctgtctcttataatggccaggatgacgtggtacaccccacatacgagcctacatctgtatttgagtgcaagtatgagctagactcgcttgcccatttcctcgctttgggcaacgatttctacaaacataccggttccaaggagttcctgacaccacgttggcattcagcaatgagaactgtcttggaggtgctgaaggagcagtcacaaccgacttttgatccggagactggccgctaccgtcgaaatcagtacactttcaaccgtaacacgaatacaggtacagagaccctcaatcttcagggcgttgggaacccactgaattacggtaccggcctggtccgatccgcctttcgtccaagtgatgatgctaccatactgggtttcttcatccctgccaatgcccaaatggccacggagctgaagcggacagccaaagtgctcaaggatgccggcgaggctgaactggcgcaggaggtagatgaatggagcaagacaatcactaaaggcatatgggaacatggcgttgtccagcatcgtgagtatggacaagtttttgcttatgaagtcgatggctacggctcggtcatcttgatggatgacgcgaattatccgtcgttgctcgcgctccctttgatgggctttgtagacgtggacgacgcaacctatcagaacacgcgcaaaatgttgcttgcgaaatcctcaaatccttactaccttaagggtagagaattccatggtattgggggccctcacatcggcctttcgaatgcatggcccatgagtctgctaatccaagcacaaacgtcgagcaatgataccgagataacagaatgtctcgatctcgttttgcgatctagcaagctgggtcttatacacgaaagtgtcgatgtcaacatgatgactagctacacaaggagttggttcgcgtgggctaacggcgtctttgcctcgactatactgggtcttgccaaacgtaaacctcacttgatattcaatgatccgactccctatgaaatttgaagcatttgggcagagacatggcgaagcgaacattggatgattcggaaccacgatcttcacaggcattacagatcctagttctcatagtgtgatgatacccacctacatgaataaaagtcagtgtttaggacagtattgcgactggacg

SEQ ID NO: 31646 - DNA, 1482 bp, Muscodor strobelii
  misc_feature: SGI cDNA ID NO. 570897
  misc_feature: Encodes the peptide sequence at SEQ ID NO 31647
atggcagcagcatcagcgtcgtcgtacgaaggctcaggaagacagaagaccatcaacctcctgcgcggctggcccgcgactactctattaccagctgatgcactccgcaccgcatcgcagactgcgctgtcggagccgaagatctggaacccaggcttggaatatggaccggattcggggtatcagccgctgagggaggagttggctgggtggctagaccggttttataacgcgcctcatcatgatttatcggagaggagaggggcagcagcgaaagcgggtgcgcagaacttcaccatcacgggcggtgcttcgcagagcgtcgcttgtctgctacagtcttttaccgacccaggggagacgctggcgatttggatggtggcgccttgttacttcctcgcctgtcagatcttcgccgatgcgggatttgcgggccggttgaaagcagtgggtgaggatgaggagggcgttgacctggtggctcttgagcgctcgattatagatctggaagctaaggcacgcagcgaagagagcaaggttgatgagaaaaggtataagaaagtcggtccgcataggaagatctacaaacatatcatatactgcgtgccgtccttttctaaccccagtggtcggaccatgactctaagtcgacgaaagggcctcgttgacctcgcgaggaagtacgacgcgctcgtcatctgcgacgatgtgtacgatatgctacaatggcacacaacaccctccacagcatccgtggactctgctctgttacctcgactagcagatatagatatctccctaggtccctcaacgcacgagccagaggggaaacacttcggccacgcagtgtccaacggctcgttctcgaaactagtcggtccgggtgtcagaacaggatggacatattccacaccagacttcgcattcggcgtatcgcaaaccggatccacgaaatcaggcggtgcgccatcccaactcacagcaaccatcgtctgcgagctcctaagagactccgagggcggtctagatgcacatatccgccagactcttcgccccgcatacggccggcgacagagtctacttatgaacaccattctcaaagaactcgttccgctagggattaaggtagtagagcacagtctgcaagaacaaaaggatttcttcggggggtacttcgtctggatgactctccctacaagcgcgaatgggaaaccgtggccaacagctaagcagatcgcagaacgatgtcgcgctacggaggatttgatgattggcaacggggagctatttgcggttcacggcgatgaagccgctgcgccatttcatcatgcgattagattatgtttcgcatgggaagacgaagaggatctcgtgcgtggtgttgagagactaggaagagtgatacggcagatgctggacgaggaacctgaaagttggggtgagagcgggatgcaagagcgtaacattgatgaagataaatga

SEQ ID NO: 31647 - protein, 493 aa, Muscodor strobelii
  misc_feature: SGI Peptide ID NO. 570897
  misc_feature (13)..(481): NCBI GI: 164429197 Blast Desc: NCU11146 [Neurospora crassa OR74A] gi|157072979|gb|EDO65426.1| [Neurospora crassa OR74A]
  misc_feature (15)..(481): NCBI GI: 256725964 Blast Desc: NECHADRAFT_43834 [Nectria haematococca mpVI 77-13-4]
  misc_feature (1)..(493): NCBI GI: 39944246 Blast Desc: MGG_04134 [Magnaporthe grisea 70-15] gi|145014868|gb|EDJ99436.1| MGG_04134 [Magnaporthe grisea 70-15]
  misc_feature (12)..(474): NCBI GI: 171683597 Blast Desc: protein product [Podospora anserina] gi|170941758|emb|CAP67412.1| protein product [Podospora anserina]
  misc_feature (3)..(483): NCBI GI: 46116828 Blast Desc: FG04256.1 [Gibberella zeae PH-1]
  misc_feature (18)..(474): NCBI GI: 242773572 Blast Desc: aminotransferase, [Talaromyces stipitatus ATCC 10500] gi|218721886|gb|EED21304.1| aminotransferase, [Talaromyces stipitatus ATCC 10500]
  misc_feature (15)..(472): NCBI GI: 154294493 Blast Desc: BC1G_13849 [Botryotinia fuckeliana B05.10] gi|150844689|gb|EDN19882.1| BC1G_13849 [Botryotinia fuckeliana B05.10]
  misc_feature (6)..(473): NCBI GI: 156032930 Blast Desc: SS1G_13871 [Sclerotinia sclerotiorum 1980] gi|154699273|gb|EDN99011.1| SS1G_13871 [Sclerotinia sclerotiorum 1980]
  misc_feature (18)..(472): NCBI GI: 212531639 Blast Desc: aminotransferase, [Penicillium marneffei ATCC 18224] gi|210071340|gb|EEA25429.1| aminotransferase, [Penicillium marneffei ATCC 18224]
  misc_feature (18)..(472): NCBI GI: 169783094 Blast Desc: [Aspergillus oryzae RIB40] gi|238492839|ref|XP_002377656.1| aminotransferase, [Aspergillus flavus NRRL3357] gi|83774753|dbj|BAE64876.1| protein product
  misc_feature (14)..(472): SWISSPROT Homolog: EC 2.6.1.39 2-aminoadipate transaminase
MAAASASSYEGSGRQKTINLLRGWPATTLLPADALRTASQTALSEPKIWNPGLEYGPDSGYQPLREELAGWLDRFYNAPHHDLSERRGAAAKAGAQNFTITGGASQSVACLLQSFTDPGETLAIWMVAPCYFLACQIFADAGFAGRLKAVGEDEEGVDLVALERSIIDLEAKARSEESKVDEKRYKKVGPHRKIYKHIIYCVPSFSNPSGRTMTLSRRKGLVDLARKYDALVICDDVYDMLQWHTTPSTASVDSALLPRLADIDISLGPSTHEPEGKHFGHAVSNGSFSKLVGPGVRTGWTYSTPDFAFGVSQTGSTKSGGAPSQLTATIVCELLRDSEGGLDAHIRQTLRPAYGRRQSLLMNTILKELVPLGIKVVEHSLQEQKDFFGGYFVWMTLPTSANGKPWPTAKQIAERCRATEDLMIGNGELFAVHGDEAAAPFHHAIRLCFAWEDEEDLVRGVERLGRVIRQMLDEEPESWGESGMQERNIDEDK

SEQ ID NO: 31648 - DNA, 1494 bp, Muscodor strobelii
  misc_feature: SGI cDNA ID NO. 570898
  misc_feature: Encodes the peptide sequence at SEQ ID NO 31649
atggctcacggtactccggccggagacgctactgtcgggtccgatggaccgcgacaaaaaagcaaggcgaccatcgacaccttgcgcgtgggctgcattgcgatggtcgagaaagaagggaaagcccgtcgcgccgaaatcctaagcatccgagatattaaaagcggtcgccaattctactgcaacttcgacaatttcaacaagcgtctcgacgagtgggtacccgcaaaacgcattgacttcgaccaagatgttgagtggccaaaccccgacaaggacaagcagaaagacggaaagaccaagaccgccaccgcaccgccaaagaagaaggcaccccccagcaaagcccagaaacggccaggcaaaagagaacagtctgttatttctgaggccgtcacgccgacgccctggtctgaatctggcgatacccaagctcgctcgcaagcaccgtcgacgccagcagatatagatgacaaagctggagagactcctgccgctgcaggcgatgaaatggatgttgacgacgatgataacaccccggaggtcaagaaagaagaatcgttcagcagagaagctgagatcgagaagctgaggactggcggatcgatgacacaaaacccgaccgaactcgcacgcatacgtaacatatccaaagtccagttcggcgagttcgatctcttcccatggtacttttcaccttaccccgagtctttcacccaggaggatgtgatattcatatgtgaattctgtctgagctactatggcgacaagaagtcttttggcagacatcgtcagaaatgtaccctgcaacaccctcctgggaacgagctgtatcgagatgactatgtgtcattcttcgagatagacggtcgtcgacagcgcacctggtgtcgcaatctctgtcttctctccaagatgtttctggatcataaaactctttactacgacgtcgatccattcttattctacgtgatgacgcagaagagcgagaagggccaccatcttgtcgggtatttctctaaggaaaaagagagtgctgatggctataatgtcgcttgtattcttacgcttcctcaataccaaagaaaagggttcggacgtttgcttatccagttctcatatgagttatcaaagatcgagggtaaactgggatctcccgagaaaccgctttctgatttgggtcttctcagttaccggcagtactggtctgaaaacatcatagacttgttactggaacagaatgagcgtgacgagaagtcgagtatcgaagcgatttccaccgcgctcgctatgacgacacaggatgtggagcataccttgcaggctttgaagatgcaggtatatcacaaaggagagcacaagatcgtcgttccagaatccatgattcagcagcgagaaaaatccaagctgaaacaaaaacggtacattgtgccagagtccatacagtggaagccacctgtgttcacagcctctacgcgtacttggggttggtag

SEQ ID NO: 31649 - protein, 497 aa, Muscodor strobelii
  misc_feature: SGI Peptide ID NO. 570898
  misc_feature (269)..(458): Pfam Id: PF01853 Pfam Desc: MOZ/SAS family
  misc_feature (6)..(497): NCBI GI: 85106596 Blast Desc: histone acetyltransferase ESA1 [Neurospora crassa OR74A] gi|74616852|sp|Q7S9B6.1|ESA1_NEUCR RecName: Full=Histone acetyltransferase esa-1; AltName: Full=Histone acetyltransferase
  misc_feature (1)..(497): NCBI GI: 46116824 Blast Desc: FG04254.1 [Gibberella zeae PH-1] gi|84028937|sp|Q4IEV4.1|ESA1_GIBZE RecName: Full=Histone acetyltransferase ESA1
  misc_feature (11)..(497): NCBI GI: 261359795 Blast Desc: histone acetyltransferase ESA1 [Verticillium albo-atrum VaMs.102]
  misc_feature (1)..(497): NCBI GI: 256725966 Blast Desc: histone acetyltransferase [Nectria haematococca mpVI 77-13-4]
  misc_feature (3)..(497): NCBI GI: 39944244 Blast Desc: MGG_04133 [Magnaporthe grisea 70-15] gi|145014867|gb|EDJ99435.1| MGG_04133 [Magnaporthe grisea 70-15]
  misc_feature (9)..(497): NCBI GI: 156032906 Blast Desc: SS1G_13859 [Sclerotinia sclerotiorum 1980] gi|154699261|gb|EDN98999.1| SS1G_13859 [Sclerotinia sclerotiorum 1980]
  misc_feature (30)..(497): NCBI GI: 171683581 Blast Desc: protein product [Podospora anserina] gi|170941750|emb|CAP67404.1| protein product [Podospora anserina]
  misc_feature (9)..(497): NCBI GI: 154294521 Blast Desc: BC1G_13863 [Botryotinia fuckeliana B05.10] gi|150844703|gb|EDN19896.1| BC1G_13863 [Botryotinia fuckeliana B05.10]
  misc_feature (5)..(497): NCBI GI: 116194408 Blast Desc: CHGG_03802 [Chaetomium globosum CBS 148.51] gi|88179715|gb|EAQ87183.1| CHGG_03802 [Chaetomium globosum CBS 148.51]
  misc_feature (13)..(497): NCBI GI: 189206307 Blast Desc: histone acetyltransferase ESA1 [Pyrenophora tritici-repentis Pt-1C-BFP] gi|187975581|gb|EDU42207.1| histone acetyltransferase ESA1 [Pyrenophora tritici-repentis Pt-1C-BFP]
  misc_feature (1)..(497): SWISSPROT Homolog: EC 2.3.1.48 Histone acetyltransferase
MAHGTPAGDATVGSDGPRQKSKATIDTLRVGCIAMVEKEGKARRAEILSIRDIKSGRQFYCNFDNFNKRLDEWVPAKRIDFDQDVEWPNPDKDKQKDGKTKTATAPPKKKAPPSKAQKRPGKREQSVISEAVTPTPWSESGDTQARSQAPSTPADIDDKAGETPAAAGDEMDVDDDDNTPEVKKEESFSREAEIEKLRTGGSMTQNPTELARIRNISKVQFGEFDLFPWYFSPYPESFTQEDVIFICEFCLSYYGDKKSFGRHRQKCTLQHPPGNELYRDDYVSFFEIDGRRQRTWCRNLCLLSKMFLDHKTLYYDVDPFLFYVMTQKSEKGHHLVGYFSKEKESADGYNVACILTLPQYQRKGFGRLLIQFSYELSKIEGKLGSPEKPLSDLGLLSYRQYWSENIIDLLLEQNERDEKSSIEAISTALAMTTQDVEHTLQALKMQVYHKGEHKIVVPESMIQQREKSKLKQKRYIVPESIQWKPPVFTASTRTWGW

SEQ ID NO: 31650 - DNA, 5782 bp, Muscodor strobelii
  misc_feature: SGI EST ID NO. CUFF.74909.0
  misc_feature: Variant of the nucleotide sequence at SEQ ID NO 31648
gggcagttggcgtagtatcatgtattactattctgctgtacacaggtatgtatcgacacaaaggaagaaatgcttgaccacaagagcaacaagacctctgagtactaatgctgggaaggtatatctgtgtcttttgcacacaacaagaaaggaacatgtccctcaccgtatcccggccgttactacgaatatgggtctttcccgcgactgggcccaaactatcatgcatcggcagctacacttagcttgatgtgagtgcggtgtcccgcctcgccacgaagaaggaaacgccccgagcgcatttgcattcgagagccctaccaaggagcctcgcgttggacattatagacatggattctgcacgggattagataacccggctgcaagttccgttggaggactgcatatcgtggggagagggcgatgcggttgtcctgagacaggtgtcggaatcgcggatccagacagtatcgtgtcgtcaccagtctcattagaacctctcatggtggggcaagaccactttggcgaattctacgagttttctttttctcgaataggttgttccttgtcctaatgagttactgattgcacaccgtattctttacaggacagtaccgtgacgtcaagatacctaagtggcagcttgcacattgtctcaggattgaggctctgatttgatagtaccacacccagctacttaatctacccttcgttgtgtaactagaagaaacggtcgagatatcgccaacaacccctcatctttctattatgatcctatttcttcatctacaacacgacaaacattgggatgcatgagttacacttgagagtccctgggcttgagcacggccatcacagtagcacggatgtaacattgacttggaggatgaaagagctcctcgcttcatggccagggtatttgcgacaacccttgaccgttttacaggctccgatgaacactggtccctgggtgggtctagggacatttggtgatctatcatttaacccatcctacatgtttctataagtcacaaacaacttacacagatagcttgttagatgaaccgtggttacggagagtcacgattcggagactgaaatatcctatcattcgagcatggagttaggacgacaatgtgaaaagtaggtaaagaggtaatgcagctacatagctgtatagccctagagaaagactacaaaaagcggggcgcaaataacgtgacctctcaatagagatcaattaaacacgccaatctattttacagcaatgagacgcgtcttactcggtatgagccgatattcttaacctcaacactttcctctctgcaaagttcgccatgtcaccaccactattcacagtagactcgaacgagtcaagtcacaagtcgaacgcagcagtcaacctactgccgtgccggatacagtatgatggagatgtcaaatcctccgacacattctggaatcccagtccaggtccaaatggcgagaaggtcgcctacctcagaggtagaaagctccatggaaagtctataaaaatgcctaaaggttattgcggatcagttgttcagaaagcagatcccaagcccgcacttagcaatgaggaggcaaatgaggacgtctccgtcatagaaaacccggaggaccagctagagataggggcaatggaaggcaaaggtggtttcgatgagatcattgtctggagtcatgagtcgacgattgagtcgactaccgatccctatatccgaggaatggaagagtggattgcattctcagaagaggtctgtcagacgacgcatttgcaaagcgtcggcgtagtacatgcgctgattttcttatacagatacattcgtatgacaccgaatcaaacaccacagcctaagagtcaatttgcttcgtcatggtggtaaacaagcccaatgatggacaatgcttgttttccgccttctattcggcctgcatggtgtcacggagtcttgtttgtagtcaatttctggagttcaaaaagcaacaatccctacagttcaaacaaattgcgactcataaaagtgacacagattatgaatttcttattaagatggcctcagggtgcacagtcagaatctgcacagtcgtgctccaattttgacacggtacacatggtccctttatctaatctcatcggcataggcccatgcgacgcgccgcgatttgcccctccaaaccggttcgaaggtgtcccaagctacctagacgctaaaccgtcgctgtaaactagaggcctgttgacccaacattttgttgtcgcaattccatcaaccaccaaccttcgatcatcaaaacaactaccgccgcatcgcttttccatcatggctcacggtactccggccggagacgctactgtcgggtccgatggaccgcgacaaaaaagcaaggcgaccatcgacaccttgcgcgtgggctgcattgcgatggtcgagaaagaagggaaagcccgtcgcgccgaaatcctaagcatccgagatattaaaagcggtcgccaattctactgcaacttcgacaatttcaacaagcgtctcgacgagtgggtacccgcaaaacgcattgacttcgaccaagatgttgagtggccaaaccccgacaaggacaagcagaaagacggaaagaccaagaccgccaccgcaccgccaaagaagaaggcaccccccagcaaagcccagaaacggccaggcaaaagagaacagtctgttatttctgaggccgtcacgccgacgccctggtctgaatctggcgatacccaagctcgctcgcaagcaccgtcgacgccagcagatatagatgacaaagctggagagactcctgccgctgcaggcgatgaaatggatgttgacgacgatgataacaccccggaggtcaagaaagaagaatcgttcagcagagaagctgagatcgagaagctgaggactggcggatcgatgacacaaaacccgaccgaactcgcacgcatacgtaacatatccaaagtccagttcggcgagttcgatctcttcccatggtacttttcaccttaccccgagtctttcacccaggaggatgtgatattcatatgtgaattctgtctgagctactatggcgacaagaagtcttttggcagacatcgtcagaaatgtaccctgcaacaccctcctgggaacgagctgtatcgagatgactatgtgtcattcttcgagatagacggtcgtcgacagcgcacctggtgtcgcaatctctgtcttctctccaagatgtttctggatcataaaactctttactacgacgtcgatccattcttattctacgtgatgacgcagaagagcgagaagggccaccatcttgtcgggtatttctctaaggaaaaagagagtgctgatggctataatgtcgcttgtattcttacgcttcctcaataccaaagaaaagggttcggacgtttgcttatccagttctcatatgagttatcaaagatcgagggtaaactgggatctcccgagaaaccgctttctgatttgggtcttctcagttaccggcagtactggtctgaaaacatcatagacttgttactggaacagaatgagcgtgacgagaagtcgagtatcgaagcgatttccaccgcgctcgctatgacgacacaggatgtggagcataccttgcaggctttgaagatgcaggtatatcacaaaggagagcacaagatcgtcgttccagaatccatgattcagcagcgagaaaaatccaagctgaaacaaaaacggtacattgtgccagagtccatacagtggaagccacctgtgttcacagcctctacgcgtacttggggttggtagtctgaaactaggctcgtgggctagatgggtaggaagatggaaaatgtactattagcatgcaagcaagcgattgtacatatcagtttgacgtaatgatacccccgagatgatttttgaaatttcttctagtaaaatcacgaagtgaccgtgttatcgtaaatcttttcaactacccatttaggccgttctggaatatcttgtcttcatttatcttcatcaatgttacgctcttgcatcccgctctcaccccaactttcaggttcctcgtccagcatctgccgtatcactcttcctagtctctcaacaccacgcacgagatcctcttcgtcttcccatgcgaaacataatctaatcgcatgatgaaatggcgcagcggcttcatcgccgtgaaccgcaaatagctccccgttgccaatcatcaaatcctccgtagcgcgacatcgttctgcgatctgcttagctgttggccacggtttcccattcgcgcttgtagggagagtcatccagacgaagtaccccccgaagaaatccttttgttcttgcagactgtgctctactaccttaatccctagcggaacgagttctttgagaatggtgttcataagtagactctgtcgccggccgtatgcggggcgaagagtctggcggatatgtgcatctagaccgccctcggagtctcttaggagctcgcagacgatggttgctgtgagttgggatggcgcaccgcctgatttcgtggatccggtttgcgatacgccgaatgcgaagtctggtgtggaatatgtccatcctgttctgacacccggaccgactagtttcgagaacgagccgttggacactgcgtggccgaagtgtttcccctctggctcgtgcgttgagggacctagggagatatctatatctgctagtcgaggtaacagagcagagtccacggatgctgtggagggtgttgtgtgccattgtagcatatcgtacacatcgtcgcagatgacgagcgcgtcgtacttcctcgcgaggtcaacgaggccctttcgtcgacttagagtcatggtccgaccactggggttagaaaaggacggcacgcagtatatgatatgtttgtagatcttcctatgcggaccgactttcttataccttttctcatcaaccttgctctcttcgctgcgtgccttagcttccagatctataatcgagcgctcaagagccaccaggtcaacgccctcctcatcctcacccactgctttcaaccggcccgcaaatcccgcatcggcgaagatctgacaggcgaggaagtaacaaggcgccaccatccaaatcgccagcgtctcccctgggtcggtaaaagactgtagcagacaagcgacgctctgcgaagcaccgcccgtgatggtgaagttctgcgcacccgctttcgctgctgcccctctcctctccgataaatcatgatgaggcgcgttataaaaccggtctagccacccagccaactcctccctcagcggctgataccccgaatccggtccatattccaagcctgggttccagatcttcggctccgacagcgcagtctgcgatgcggtgcggagtgcatcagctggtaatagagtagtcgcgggccagccgcgcaggaggttgatggtcttctgtcttcctgagccttcgtacgacgacgctgatgctgctgccattctgccgaggcttgcggccgatgtgtagtggcttacttggtggaatcgccttggtgtgagacgtgtcattctatatcgaaaggatctgtcggttccggtttgcgtcgaaacactaatgcacgttgaccggttggaatgaacgatgttacaatatcagacttggaaatatgtcgaatgtcgatgatgacgggacgtgagttcccaatgatggagtgtgaggtgtggggtattatgtgattgaacacgggcaaccctggt

SEQ ID NO: 31651 - DNA, 570 bp, Muscodor strobelii
  misc_feature: SGI cDNA ID NO. 570899
  misc_feature: Encodes the peptide sequence at SEQ ID NO 31652
atgtcaccaccactattcacagtagactcgaacgagtcaagtcacaagtcgaacgcagcagtcaacctactgccgtgccggatacagtatgatggagatgtcaaatcctccgacacattctggaatcccagtccaggtccaaatggcgagaaggtcgcctacctcagaggtagaaagctccatggaaagtctataaaaatgcctaaaggttattgcggatcagttgttcagaaagcagatcccaagcccgcacttagcaatgaggaggcaaatgaggacgtctccgtcatagaaaacccggaggaccagctagagataggggcaatggaaggcaaaggtggtttcgatgagatcattgtctggagtcatgagtcgacgattgagtcgactaccgatccctatatccgaggaatggaagagtggattgcattctcagaagaggtctgtcagacgacgcatttgcaaagcgtcggcgtagtacatgcgctgattttcttatacagatacattcgtatgacaccgaatcaaacaccacagcctaagagtcaatttgcttcgtcatggtggtaa

SEQ ID NO: 31652 - protein, 189 aa, Muscodor strobelii
  misc_feature: SGI Peptide ID NO. 570899
  misc_feature (20)..(148): Pfam Id: PF08615 Pfam Desc: Ribonuclease H1/H2 small subunit
  misc_feature (1)..(147): NCBI GI: 145607281 Blast Desc: MGG_12157 [Magnaporthe grisea 70-15] gi|145014864|gb|EDJ99432.1| MGG_12157 [Magnaporthe grisea 70-15]
  misc_feature (1)..(148): NCBI GI: 116194392 Blast Desc: CHGG_03794 [Chaetomium globosum CBS 148.51] gi|88179707|gb|EAQ87175.1| CHGG_03794 [Chaetomium globosum CBS 148.51]
  misc_feature (1)..(150): NCBI GI: 261359798 Blast Desc: conserved [Verticillium albo-atrum VaMs.102]
  misc_feature (22)..(148): NCBI GI: 85106579 Blast Desc: NCU05214 [Neurospora crassa OR74A] gi|28923812|gb|EAA32977.1| [Neurospora crassa OR74A]
  misc_feature (1)..(148): NCBI GI: 46116820 Blast Desc: FG04252.1 [Gibberella zeae PH-1]
  misc_feature (1)..(148): NCBI GI: 256725566 Blast Desc: NECHADRAFT_43895 [Nectria haematococca mpVI 77-13-4]
  misc_feature (2)..(148): NCBI GI: 171683577 Blast Desc: protein product [Podospora anserina] gi|170941748|emb|CAP67402.1| protein product [Podospora anserina]
  misc_feature (14)..(146): NCBI GI: 189206233 Blast Desc: conserved [Pyrenophora tritici-repentis Pt-1C-BFP] gi|187975544|gb|EDU42170.1| conserved [Pyrenophora tritici-repentis Pt-1C-BFP]
  misc_feature (10)..(155): NCBI GI: 115400665 Blast Desc: RNA exonuclease 4 [Aspergillus terreus NIH2624] gi|114191587|gb|EAU33287.1| RNA exonuclease 4 [Aspergillus terreus NIH2624]
  misc_feature (22)..(148): NCBI GI: 255948232 Blast Desc: Pc22g08710 [Penicillium chrysogenum Wisconsin 54-1255] gi|211591900|emb|CAP98159.1| Pc22g08710 [Penicillium chrysogenum Wisconsin 54-1255]
MSPPLFTVDSNESSHKSNAAVNLLPCRIQYDGDVKSSDTFWNPSPGPNGEKVAYLRGRKLHGKSIKMPKGYCGSVVQKADPKPALSNEEANEDVSVIENPEDQLEIGAMEGKGGFDEIIVWSHESTIESTTDPYIRGMEEWIAFSEEVCQTTHLQSVGVVHALIFLYRYIRMTPNQTPQPKSQFASSWW

SEQ ID NO: 31653 - DNA, 5782 bp, Muscodor strobelii; identical to SEQ ID NO: 31650
  misc_feature: SGI EST ID NO. CUFF.74909.0
  misc_feature: Variant of the nucleotide sequence at SEQ ID NO 31651

SEQ ID NO: 31654 - DNA, 480 bp, Muscodor strobelii
  misc_feature: SGI cDNA ID NO. 570900
  misc_feature: Encodes the peptide sequence at SEQ ID NO 31655
atgtcaccaccactattcacagtagactcgaacgagtcaagtcacaagtcgaacgcagcagtcaacctactgccgtgccggatacagtatgatggagatgtcaaatcctccgacacattctggaatcccagtccaggtccaaatggcgagaaggtcgcctacctcagaggtagaaagctccatggaaagtctataaaaatgcctaaaggttattgcggatcagttgttcagaaagcagatcccaagcccgcacttagcaatgaggaggcaaatgaggacgtctccgtcatagaaaacccggaggaccagctagagataggggcaatggaaggcaaaggtggtttcgatgagatcattgtctggagtcatgagtcgacgattgagtcgactaccgatccctatatccgaggaatggaagagtggattgcattctcagaagagatacattcgtatgacaccgaatcaaacaccacagcctaa

SEQ ID NO: 31655 - protein, 159 aa, Muscodor strobelii
  misc_feature: SGI Peptide ID NO. 570900
  misc_feature (20)..(148): Pfam Id: PF08615 Pfam Desc: Ribonuclease H1/H2 small subunit
  misc_feature (1)..(147): NCBI GI: 145607281 Blast Desc: MGG_12157 [Magnaporthe grisea 70-15] gi|145014864|gb|EDJ99432.1| MGG_12157 [Magnaporthe grisea 70-15]
  misc_feature (1)..(154): NCBI GI: 116194392 Blast Desc: CHGG_03794 [Chaetomium globosum CBS 148.51] gi|88179707|gb|EAQ87175.1| CHGG_03794 [Chaetomium globosum CBS 148.51]
  misc_feature (1)..(152): NCBI GI: 261359798 Blast Desc: conserved [Verticillium albo-atrum VaMs.102]
  misc_feature (22)..(151): NCBI GI: 85106579 Blast Desc: NCU05214 [Neurospora crassa OR74A] gi|28923812|gb|EAA32977.1| [Neurospora crassa OR74A]
  misc_feature (1)..(151): NCBI GI: 46116820 Blast Desc: FG04252.1 [Gibberella zeae PH-1]
  misc_feature (1)..(151): NCBI GI: 256725566 Blast Desc: NECHADRAFT_43895 [Nectria haematococca mpVI 77-13-4]
  misc_feature (2)..(152): NCBI GI: 171683577 Blast Desc: protein product [Podospora anserina] gi|170941748|emb|CAP67402.1| protein product [Podospora anserina]
  misc_feature (10)..(152): NCBI GI: 189206233 Blast Desc: conserved [Pyrenophora tritici-repentis Pt-1C-BFP] gi|187975544|gb|EDU42170.1| conserved [Pyrenophora tritici-repentis Pt-1C-BFP]
  misc_feature (10)..(149): NCBI GI: 115400665 Blast Desc: RNA exonuclease 4 [Aspergillus terreus NIH2624] gi|114191587|gb|EAU33287.1| RNA exonuclease 4 [Aspergillus terreus NIH2624]
  misc_feature (22)..(148): NCBI GI: 255948232 Blast Desc: Pc22g08710 [Penicillium chrysogenum Wisconsin 54-1255] gi|211591900|emb|CAP98159.1| Pc22g08710 [Penicillium chrysogenum Wisconsin 54-1255]
MSPPLFTVDSNESSHKSNAAVNLLPCRIQYDGDVKSSDTFWNPSPGPNGEKVAYLRGRKLHGKSIKMPKGYCGSVVQKADPKPALSNEEANEDVSVIENPEDQLEIGAMEGKGGFDEIIVWSHESTIESTTDPYIRGMEEWIAFSEEIHSYDTESNTTA

SEQ ID NO: 31656 - DNA, 5782 bp, Muscodor strobelii; identical to SEQ ID NO: 31650
  misc_feature: SGI EST ID NO. CUFF.74909.0
  misc_feature: Variant of the nucleotide sequence at SEQ ID NO 31654

SEQ ID NO: 31657 - DNA, 1431 bp, Muscodor strobelii
  misc_feature: SGI cDNA ID NO. 570901
  misc_feature: Encodes the peptide sequence at SEQ ID NO 31658
atggctccctcgatcccatctttcttagtccgtccacttgctcagcaagccgacaatattcggagcacgctcgggagcctcacctggaaaccggcattggcaatcgccaagccggccattctctccgtgttttcacagatagaaaccggcacattactactcaatgacgagaccacgggacagaggctgttctacggacagaaacttgattcaaaatccacagattttccacatggacagctcccagcgcgaagggctgacgcggtcccgcgagttgagattgtcgtcaaggatgaagcattctggatgagatgtttcctattcgcggacatgggctttgctgaaagctatatgcttggtgaattcgaatgcgccgacctgactgctttcttcaagcttttcattctcaaccgtgatcgaatgagcaacggaacgactttagtatcttctctgtctggcgctattactagcattgccaagaacacaaacaccctctcgaattcgctacttaatatttcggctcattatgacattagcaatgccatgtttgcggtaccattcttgtccgttgacatgacgtattcgtgtccgatctggcagcttaagggccctggaggcatggagtcagatgaatcacttgaagaggctcaattgacaaaactcagacgttttatcgatggctgccatatcaaatccacagatcacgtacttgagattgggactggatggggttcatttgcgattgaggctgttaaaaagaccggatgcctggtcacgagtctgactttatcccaagagcagaagcagcttgctgagcagcgtatcagagatgccggattttctgggagaataagagtgcttcttatggattatcgaagtttggaaaccaaaaaacctttcgacaagattgtctctatagaaatgttagaggcggttgggcaggagttcttgagtacttactttgcttgtattaataagttactgaagaaagacggaggagtcgccatgttccagtgcatcactatgcctgaggggcgtcatgatggttactcacgaagagaagatttcattaacaaatatatctttcccggtggtcacctacccacaaccacacaacttctcaatcacatctccaaagaatcagacggtaccttgatcttggagcgcgtagagaacattggcggccattacgcgaagacgttacgtttgtggaaggaaaactttgtggcgaacttcgacacgaacatcaagctcgcactgaaactccagcacccgcatatgaaagcggaggaaatctcggtattcaaacgtaaatgggagtattacttcacatactgcgaggcgggattcttaacaaagaccctgggcgatgtcataatcaccgttggacgagagggcgctacggagttgatggaaggtatcccactatga

SEQ ID NO: 31658 - protein, 476 aa, Muscodor strobelii
  misc_feature: SGI Peptide ID NO. 570901
  misc_feature (163)..(464): Pfam Id: PF02353 Pfam Desc: Cyclopropane-fatty-acyl-phospholipid synthase
  misc_feature (163)..(411): Pfam Id: PF02353 Pfam Desc: Cyclopropane-fatty-acyl-phospholipid synthase
  misc_feature (237)..(336): Pfam Id: PF08241 Pfam Desc: Methyltransferase domain
  misc_feature (3)..(476): NCBI GI: 256725967 Blast Desc: NECHADRAFT_42914 [Nectria haematococca mpVI 77-13-4]
  misc_feature (3)..(476): NCBI GI: 261359797 Blast Desc: cyclopropane-fatty-acyl-phospholipid synthase [Verticillium albo-atrum VaMs.102]
  misc_feature (1)..(476): NCBI GI: 156032902 Blast Desc: SS1G_13857 [Sclerotinia sclerotiorum 1980] gi|154699259|gb|EDN98997.1| SS1G_13857 [Sclerotinia sclerotiorum 1980]
  misc_feature (19)..(476): NCBI GI: 164429195 Blast Desc: NCU05216 [Neurospora crassa OR74A] gi|157072978|gb|EAA32979.2| conserved [Neurospora crassa OR74A]
  misc_feature (5)..(355): NCBI GI: 145607283 Blast Desc: MGG_04131 [Magnaporthe grisea 70-15] gi|145014865|gb|EDJ99433.1| MGG_04131 [Magnaporthe grisea 70-15]
  misc_feature (9)..(476): NCBI GI: 169621468 Blast Desc: SNOG_13944 [Phaeosphaeria nodorum SN15] gi|111057449|gb|EAT78569.1| SNOG_13944 [Phaeosphaeria nodorum SN15]
  misc_feature (112)..(476): NCBI GI: 189206235 Blast Desc: methoxy mycolic acid synthase 1 [Pyrenophora tritici-repentis Pt-1C-BFP] gi|187975545|gb|EDU42171.1| methoxy mycolic acid synthase 1 [Pyrenophora tritici-repentis Pt-1C-BFP]
  misc_feature (1)..(476): NCBI GI: 154294525 Blast Desc: BC1G_13865 [Botryotinia fuckeliana B05.10] gi|150844705|gb|EDN19898.1| BC1G_13865 [Botryotinia fuckeliana B05.10]
  misc_feature (24)..(476): NCBI GI: 156062724 Blast Desc: SS1G_01478 [Sclerotinia sclerotiorum 1980] gi|154696814|gb|EDN96552.1| SS1G_01478 [Sclerotinia sclerotiorum 1980]
  misc_feature (93)..(456): NCBI GI: 170088905 Blast Desc: cyclopropane-fatty-acyl-phospholipid synthase [Laccaria bicolor S238N-H82] gi|164648935|gb|EDR13177.1| cyclopropane-fatty-acyl-phospholipid synthase [Laccaria bicolor
  misc_feature (92)..(467): SWISSPROT Homolog: EC 2.1.1.79 Cyclopropane-fatty-acyl-phospholipid synthase
MAPSIPSFLVRPLAQQADNIRSTLGSLTWKPALAIAKPAILSVFSQIETGTLLLNDETTGQRLFYGQKLDSKSTDFPHGQLPARRADAVPRVEIVVKDEAFWMRCFLFADMGFAESYMLGEFECADLTAFFKLFILNRDRMSNGTTLVSSLSGAITSIAKNTNTLSNSLLNISAHYDISNAMFAVPFLSVDMTYSCPIWQLKGPGGMESDESLEEAQLTKLRRFIDGCHIKSTDHVLEIGTGWGSFAIEAVKKTGCLVTSLTLSQEQKQLAEQRIRDAGFSGRIRVLLMDYRSLETKKPFDKIVSIEMLEAVGQEFLSTYFACINKLLKKDGGVAMFQCITMPEGRHDGYSRREDFINKYIFPGGHLPTTTQLLNHISKESDGTLILERVENIGGHYAKTLRLWKENFVANFDTNIKLALKLQHPHMKAEEISVFKRKWEYYFTYCEAGFLTKTLGDVIITVGREGATELMEGIPL

SEQ ID NO: 31659 - DNA, 528 bp, Muscodor strobelii
  misc_feature: SGI EST ID NO. CUFF.74884.0
  misc_feature: Variant of the nucleotide sequence at SEQ ID NO 31657
cttgaagaggctcaattgacaaaactcagacgttttatcgatggctgccatatcaaatccacagatcacgtacttgagattgggactggatggggttcatttgcgattgaggctgttaaaaagaccggatgcctggtcacgagtctgactttatcccaagagcagaagcagcttgctgagcagcgtatcagagatgccggattttctgggagaataagagtgcttcttatggattatcgaagtttggaaaccaaaaaacctttcgacaagattgtctctatagaaatgttagaggcggttgggcaggagttcttgagtacttactttgcttgtattaataagttactgaagaaagacggaggagtcgccatgttccagtgcatcactatgcctgaggggcgtcatgatggttactcacgaagagaagatttcattaacaaatatatctttcccggtggtcacctacccacaaccacacaacttctcaatcacatctccaaagaatcagacggtaccttgatcttggag

SEQ ID NO: 31660 - DNA, 1074 bp, Muscodor strobelii
  misc_feature: SGI cDNA ID NO. 570902
  misc_feature: Encodes the peptide sequence at SEQ ID NO 31661
atggcgccaacgcaagagctctcgtcaaattggaaaaaattgcaagccaagctcaaggctgaatctccctccacgcctaaagagcagaactcttccctcaccactagcaagaagcggaaacagcctgctataacctcaccagaatcaggatccaaaaggcataagccaaaagatcagtcaacgaagccggggcattcgaaattcagtacctcaaagaagcctcgaacggcatctcccttacatactagctcagccaaggccatgggcgtgacacagtcctctgccgtggttaaaggcacccatgcaacaataacgccatctttaagtctgtgggctgaggacaacgatatttcgccggaggatttggcagaagcatataatctaggtcccaagcctcccttcttccagcggaatcctcccgttgcaaagataaaacaggaaaagagccgggtcaacgaaggtctggcgcccggtattgaagttgggaaatacatagcgatagactgtgagatggtgggagttggagacgaaggccgggaagatcacctcgcccgtattagctgtgtcgatttccacggtgcacaggtctacgactcattcgtacaaccgcgagaccgtgtcacggactgccgcacacacatcacaggaattacagcgtccatgttacggggccccaaagcgaggccgtttgacgaggtacaggcgacgattgccgacttgctcaagggccgtattcttgtcggccactcattgaatagcgacctagcggttctaatgctaagccatcctaccccaaaaatacgtgacacggcccgacattcaagtttccgaaaatacggacacggtccgaaacctgcactaagaattctcgcgagagaagtgttgggcatcgaggattttcagacaggcgcgcattccagtgtagaggatgcccgggtggctatgttacttttccgggcgaagaaatcagagtttgatgtggaaaatgcaagtaaatatggtatacccggagacgagagaaacatgggtcctaaagcaaaaaagcaccaagggaagaaaaggggaaagagataa

SEQ ID NO: 31661 - protein, 357 aa, Muscodor strobelii
  misc_feature: SGI Peptide ID NO. 570902
  misc_feature (164)..(318): Pfam Id: PF00929 Pfam Desc: Exonuclease
  misc_feature (7)..(334): NCBI GI: 46116822 Blast Desc: FG04253.1 [Gibberella zeae PH-1] gi|83288434|sp|Q4IEV5.1|REXO4_GIBZE RecName: Full=RNA exonuclease 4
  misc_feature (1)..(333): NCBI GI: 39944242 Blast Desc: MGG_04132 [Magnaporthe grisea 70-15] gi|145014866|gb|EDJ99434.1| MGG_04132 [Magnaporthe grisea 70-15]
  misc_feature (7)..(315): NCBI GI: 116194396 Blast Desc: CHGG_03796 [Chaetomium globosum CBS 148.51] gi|88179709|gb|EAQ87177.1| CHGG_03796 [Chaetomium globosum CBS 148.51]
  misc_feature (7)..(355): NCBI GI: 256725565 Blast Desc: [Nectria haematococca mpVI 77-13-4]
  misc_feature (1)..(330): NCBI GI: 156032904 Blast Desc: SS1G_13858 [Sclerotinia sclerotiorum 1980] gi|154699260|gb|EDN98998.1| SS1G_13858 [Sclerotinia sclerotiorum 1980]
  misc_feature (1)..(353): NCBI GI: 171683579 Blast Desc: protein product [Podospora anserina] gi|170941749|emb|CAP67403.1| protein product [Podospora anserina]
  misc_feature (1)..(330): NCBI GI: 154294523 Blast Desc: BC1G_13864 [Botryotinia fuckeliana B05.10] gi|150844704|gb|EDN19897.1| BC1G_13864 [Botryotinia fuckeliana B05.10]
  misc_feature (161)..(333): NCBI GI: 85106592 Blast Desc: NCU05217 [Neurospora crassa OR74A] gi|74696524|sp|Q7S9B7.1|REXO4_NEUCR RecName: Full=RNA exonuclease 4 gi|28923815|gb|EAA32980.1| [Neurospora crassa OR74A]
  misc_feature (5)..(335): NCBI GI: 258574079 Blast Desc: RNA exonuclease 4 [Uncinocarpus reesii 1704] gi|237901487|gb|EEP75888.1| RNA exonuclease 4 [Uncinocarpus reesii 1704]
  misc_feature (5)..(333): NCBI GI: 119192762 Blast Desc: CIMG_00758 [Coccidioides immitis RS]
MAPTQELSSNWKKLQAKLKAESPSTPKEQNSSLTTSKKRKQPAITSPESGSKRHKPKDQSTKPGHSKFSTSKKPRTASPLHTSSAKAMGVTQSSAVVKGTHATITPSLSLWAEDNDISPEDLAEAYNLGPKPPFFQRNPPVAKIKQEKSRVNEGLAPGIEVGKYIAIDCEMVGVGDEGREDHLARISCVDFHGAQVYDSFVQPRDRVTDCRTHITGITASMLRGPKARPFDEVQATIADLLKGRILVGHSLNSDLAVLMLSHPTPKIRDTARHSSFRKYGHGPKPALRILAREVLGIEDFQTGAHSSVEDARVAMLLFRAKKSEFDVENASKYGIPGDERNMGPKAKKHQGKKRGKR

SEQ ID NO: 31662 - DNA, 1412 bp, Muscodor strobelii
  misc_feature: SGI EST ID NO. CUFF.74890.0
  misc_feature: Variant of the nucleotide sequence at SEQ ID NO 31660
tttcagtgcgcaaccgcttctcctcgacctaaataccgccagcgtctaggtctggaattgatcaatgagataatagtatttttgcttcggcagaaacatagagcaagaatacactgcaattgttatctcctagatcttgttgattaacatgatctggtgaactctgatttctgcctcaccatctcacttgatgtggcagcttgtatatcttaaggcaagatctacctacggttttcttcgcacaatggcgccaacgcaagagctctcgtcaaattggaaaaaattgcaagccaagctcaaggctgaatctccctccacgcctaaagagcagaactcttccctcaccactagcaagaagcggaaacagcctgctataacctcaccagaatcaggatccaaaaggcataagccaaaagatcagtcaacgaagccggggcattcgaaattcagtacctcaaagaagcctcgaacggcatctcccttacatactagctcagccaaggccatgggcgtgacacagtcctctgccgtggttaaaggcacccatgcaacaataacgccatctttaagtctgtgggctgaggacaacgatatttcgccggaggatttggcagaagcatataatctaggtcccaagcctcccttcttccagcggaatcctcccgttgcaaagataaaacaggaaaagagccgggtcaacgaaggtctggcgcccggtattgaagttgggaaatacatagcgatagactgtgagatggtgggagttggagacgaaggccgggaagatcacctcgcccgtattagctgtgtcgatttccacggtgcacaggtctacgactcattcgtacaaccgcgagaccgtgtcacggactgccgcacacacatcacaggaattacagcgtccatgttacggggccccaaagcgaggccgtttgacgaggtacaggcgacgattgccgacttgctcaagggccgtattcttgtcggccactcattgaatagcgacctagcggttctaatgctaagccatcctaccccaaaaatacgtgacacggcccgacattcaagtttccgaaaatacggacacggtccgaaacctgcactaagaattctcgcgagagaagtgttgggcatcgaggattttcagacaggcgcgcattccagtgtagaggatgcccgggtggctatgttacttttccgggcgaagaaatcagagtttgatgtggaaaatgcaagtaaatatggtatacccggagacgagagaaacatgggtcctaaagcaaaaaagcaccaagggaagaaaaggggaaagagataacaagtggtagttctcctcgactatacgcagcatctatgcataaaacactagacatattatcggttgtgttgtgatcaaaaatcaatgatgcgtt

SEQ ID NO: 31663 - DNA, 629 bp, Muscodor strobelii
  misc_feature: SGI cDNA ID NO. 570903
  misc_feature: Encodes the peptide sequence at SEQ ID NO 31664
atggcgacgccaagcgacacgggcgtcatgatgtctgatgccccttcgcaaggagccgcgaccacgccgaagcagagacaattccaacgaggctcgtcagcacggcctcgtgcgcctttgtcagagagtctcgcagcccccagcgacgacgagggagatggattcgccgacgaccagatcccaggccggacgcggagaggcaacgatccctccaccattccccgtgttgaagacaggatcggtatcacggtgcaggaccacttcgagaacttcatcgaagaatatatcgaggaccccgtagcatcgggccagcagcccgcatcaagcagaaccaccgataggttctacatcgcccagatccacaacatgcgagtgttccagttgtccacaatttacgtcaactacgaccatgtcgcctcattccagaatggcggtctcgccaatgctatcaacacacaatactatcgattcctgccctttctcactcatgctttacacaacatgatcgccaagtacgagccgcaatatttccgagaccaccggcaggccacaacctccagcaaccagacaacgtctggcgcaagcaatgccggatctggctctggctcccagtccgtggaacagggcag

SEQ ID NO: 31664 - protein, 209 aa, Muscodor strobelii
  misc_feature: SGI Peptide ID NO. 570903
  misc_feature (1)..(208): NCBI GI: 145607281 Blast Desc: MGG_12157 [Magnaporthe grisea 70-15] gi|145014864|gb|EDJ99432.1| MGG_12157 [Magnaporthe grisea 70-15]
  misc_feature (2)..(205): NCBI GI: 116194410 Blast Desc: CHGG_03803 [Chaetomium globosum CBS 148.51] gi|88179716|gb|EAQ87184.1| CHGG_03803 [Chaetomium globosum CBS 148.51]
  misc_feature (1)..(205): NCBI GI: 46111177 Blast Desc: FG02470.1 [Gibberella zeae PH-1]
  misc_feature (2)..(205): NCBI GI: 256726038 Blast Desc: NECHADRAFT_11060 [Nectria haematococca mpVI 77-13-4]
  misc_feature (1)..(205): NCBI GI: 40882272 Blast Desc: replication licensing factor [Neurospora crassa]
  misc_feature (1)..(205): NCBI GI: 164429178 Blast Desc: DNA replication licensing factor mcm6 [Neurospora crassa OR74A] gi|157072970|gb|EAA32957.2| DNA replication licensing factor mcm6 [Neurospora crassa OR74A]
  misc_feature (9)..(190): NCBI GI: 154294547 Blast Desc: BC1G_13876 [Botryotinia fuckeliana B05.10] gi|150844716|gb|EDN19909.1| BC1G_13876 [Botryotinia fuckeliana B05.10]
  misc_feature (9)..(190): NCBI GI: 156032896 Blast Desc: SS1G_13854 [Sclerotinia sclerotiorum 1980] gi|154699256|gb|EDN98994.1| SS1G_13854 [Sclerotinia sclerotiorum 1980]
  misc_feature (5)..(190): NCBI GI: 261359799 Blast Desc: DNA replication licensing factor mcm6 [Verticillium albo-atrum VaMs.102]
  misc_feature (1)..(205): NCBI GI: 171683583 Blast Desc: protein product [Podospora anserina] gi|170941751|emb|CAP67405.1| protein product [Podospora anserina]
MATPSDTGVMMSDAPSQGAATTPKQRQFQRGSSARPRAPLSESLAAPSDDEGDGFADDQIPGRTRRGNDPSTIPRVEDRIGITVQDHFENFIEEYIEDPVASGQQPASSRTTDRFYIAQIHNMRVFQLSTIYVNYDHVASFQNGGLANAINTQYYRFLPFLTHALHNMIAKYEPQYFRDHRQATTSSNQTTSGASNAGSGSGSQSVEQG

SEQ ID NO: 31665 - DNA, 819 bp, Muscodor strobelii
  misc_feature: SGI EST ID NO. CUFF.74893.0
  misc_feature: Variant of the nucleotide sequence at SEQ ID NO 31663
cccgcaatcccttttgcgcccgcaataccgtatgtagacgaaaattgtccattcacctgttattcctcgccaaataacgaatcttgagccttctgccaacttgcgacctcagttgtaatttcgtttcccttttcatttcccctgttccccctaatacccctctatctgtcgacgtaaattgctagaaaagatggcgacgccaagcgacacgggcgtcatgatgtctgatgccccttcgcaaggagccgcgaccacgccgaagcagagacaattccaacgaggctcgtcagcacggcctcgtgcgcctttgtcagagagtctcgcagcccccagcgacgacgagggagatggattcgccgacgaccagatcccaggccggacgcggagaggcaacgatccctccaccattccccgtgttgaagacaggatcggtatcacggtgcaggaccacttcgagaacttcatcgaagaatatatcgaggaccccgtagcatcgggccagcagcccgcatcaagcagaaccaccgataggttctacatcgcccagatccacaacatgcgagtgttccagttgtccacaatttacgtcaactacgaccatgtcgcctcattccagaatggcggtctcgccaatgctatcaacacacaatactatcgattcctgccctttctcactcatgctttacacaacatgatcgccaagtacgagccgcaatatttccgagaccaccggcaggccacaacctccagcaaccagacaacgtctggcgcaagcaatgccggatctggctctggctcccagtccgtggaacagggcag

SEQ ID NO: 31666 - DNA, 1008 bp, Muscodor strobelii
  misc_feature: SGI cDNA ID NO. 570904
  misc_feature: Encodes the peptide sequence at SEQ ID NO 31667
atgccttcctcaaagccgaaaccttccgaagtggcttctgaagcaaagaaacactatattccactcatccgacgtgagtacgcgaatgagtggccaacttgctcctacctctaccaaaagccgctggaacaaatccccctgcggccgcaaggcccggtacttatttcgcagccggaattctatgtgtgtgctggagatccggtcgacttcaccatcgactgggaagctcgggttcaagatcgtatacctttcatctgtgcggccaacgacaaacgggctgggggtgattgggagacgggcgttgttgggtatgaggagcgattatgtagacgcagcactctctccgcgactttgagtattccagcaccagattcaccagtcgactgcaactatcccatcccgtctgaaggaggcatctattcacaggccgtcgtagtcttccgtgggccccatgatcagtataagaaactagatcgatggtatgatttacccgttctttccatgcctgcgacgcggtggccgaagttgaatcagatgggggccaagtacgctttccccatcgaacgggatctggtcaagaacaaaattcgatcctcgcttcgcatctgctcgtattggaatcaccgatctgtcgtgataggagattttggtcttggcaatgggcaccgcaatccgcctcaggaactagctgagatctggagagaggtgtttctatatgatcccgatattcgaggtcggtttgatcacgttgcttttgttttcgaggatgtctatcagagcacggcaaagcttatcatggacgacatcaacaaaaagagcaagcatggtcactcgagcagctccaaaggaaaatcgaaatcatcaagcagttcgagcgcacattccgcgagcgatgcttcggtaccaagtgattacgagatattccagcacatcttcagcgcccccgagatccacaatatgatgaaccgtccagatccgcgctacgatatctccatgctcacgatctga

SEQ ID NO: 31667 - protein, 335 aa, Muscodor strobelii
  misc_feature: SGI Peptide ID NO. 570904
  misc_feature (10)..(333): NCBI GI: 116203611 Blast Desc: CHGG_09689 [Chaetomium globosum CBS 148.51] gi|88175817|gb|EAQ83285.1| CHGG_09689 [Chaetomium globosum CBS 148.51]
  misc_feature (10)..(335): NCBI GI: 171679501 Blast Desc: protein product [Podospora anserina] gi|170939376|emb|CAP64604.1| protein product [Podospora anserina]
  misc_feature (3)..(334): NCBI GI: 256729133 Blast Desc: [Nectria haematococca mpVI 77-13-4]
  misc_feature (3)..(334): NCBI GI: 46138567 Blast Desc: FG10798.1 [Gibberella zeae PH-1]
  misc_feature (10)..(333): NCBI GI: 164424683 Blast Desc: NCU06867 [Neurospora crassa OR74A] gi|157070617|gb|EAA28840.2| conserved [Neurospora crassa OR74A]
  misc_feature (1)..(333): NCBI GI: 261354911 Blast Desc: conserved [Verticillium albo-atrum VaMs.102]
  misc_feature (5)..(274): NCBI GI: 145608520 Blast Desc: MGG_06567 [Magnaporthe grisea 70-15] gi|145015991|gb|EDK00481.1| MGG_06567 [Magnaporthe grisea 70-15]
  misc_feature (1)..(255): NCBI GI: 154292329 Blast Desc: BC1G_14619 [Botryotinia fuckeliana B05.10] gi|150846195|gb|EDN21388.1| BC1G_14619 [Botryotinia fuckeliana B05.10]
  misc_feature (1)..(255): NCBI GI: 156042710 Blast Desc: SS1G_11154 [Sclerotinia sclerotiorum 1980] gi|154695539|gb|EDN95277.1| SS1G_11154 [Sclerotinia sclerotiorum 1980]
  misc_feature (1)..(261): NCBI GI: 169622589 Blast Desc: SNOG_14519 [Phaeosphaeria nodorum SN15] gi|111056939|gb|EAT78059.1| SNOG_14519 [Phaeosphaeria nodorum SN15]
MPSSKPKPSEVASEAKKHYIPLIRREYANEWPTCSYLYQKPLEQIPLRPQGPVLISQPEFYVCAGDPVDFTIDWEARVQDRIPFICAANDKRAGGDWETGVVGYEERLCRRSTLSATLSIPAPDSPVDCNYPIPSEGGIYSQAVVVFRGPHDQYKKLDRWYDLPVLSMPATRWPKLNQMGAKYAFPIERDLVKNKIRSSLRICSYWNHRSVVIGDFGLGNGHRNPPQELAEIWREVFLYDPDIRGRFDHVAFVFEDVYQSTAKLIMDDINKKSKHGHSSSSKGKSKSSSSSSAHSASDASVPSDYEIFQHIFSAPEIHNMMNRPDPRYDISMLTI

SEQ ID NO: 31668 - DNA, 645 bp, Muscodor strobelii
  misc_feature: SGI EST ID NO. CUFF.74900.0
  misc_feature: Variant of the nucleotide sequence at SEQ ID NO 31666
gttgtcccctgccactcttcacacttatgtggatatcgatcgtgcatccggtgggggatgcagtctatatagataagactttccgggggcttgtttttattactgtgttgagagtcttcgcgatgccttcctcaaagccgaaaccttccgaagtggcttctgaagcaaagaaacactatattccactcatccgacgtgagtacgcgaatgagtggccaacttgctcctacctctaccaaaagccgctggaacaaatccccctgcggccgcaaggcccggtacttatttcgcagccggaattctatgtgtgtgctggagatccggtcgacttcaccatcgactgggaagctcgggttcaagatcgtatacctttcatctgtgcggccaacgacaaacgggctgggggtgattgggagacgggcgttgttgggtatgaggagcgattatgtagacgcagcactctctccgcgactttgagtattccagcaccagattcaccagtcgactgcaactatcccatcccgtctgaaggaggcatctattcacaggccgtcgtagtcttccgtgggccccatgatcagtataagaaactagatcgatggtatgatttacccgttctttccatgcctgcgacgcggtggccga

SEQ ID NO: 31669 - DNA, 1497 bp, Muscodor strobelii
  misc_feature: SGI cDNA ID NO. 570905
  misc_feature: Reduced expression when VOC is produced
  misc_feature: Encodes the peptide sequence at SEQ ID NO 31670
atgaagccatatgcttcgtgcccagctctcttgcatgcatggattgccacgtcggccacaaatgtgtccagtctgctggattcgaaaccagatgtatctgtaagcgacgtcaggatagatggttatgtgagatcggttcgcgcacaaaagcgccatcacttcgtctctcttggcgatggctcttctcttgagtccttgcaggccgttgttcctgccgatcaggctgaaggcttgactattggagcagctgttcgacttgacggctcctgggttccgtctcagggacaccggcaaagtcatgagctgcaggtgacacaagccaccgtgttggggccctcggatgcaaagacattcccaatacaaaagaaataccaaacaccggagtttctgaggaccttgccccacctccgtccccggatcccattcaccacagctgtcttgcggttccgctctgaattcattgcatccttgacaaattttttcaatgcccgtcactatgtccaaactcatacaccgatattaacatcctcagactgtgagggcgctggtgaggtcttccatgttatgacgagcaacgaactacgcgctgccaccgcggacaaaatcaggccattcttccgtcgacaagtgtataccacagtctcagctcagctacatcttgaagcactagctcaagggctcggaaatgtgtggacgttgtcacccacctttcgcgcagaacagagtgacacgacgcggcacctaagcgagttttatatgttggaagcagaaatgagcttcgctgataacctggattctgtgatggaccttgttgaacaaatgctgaaaggcgttgtcgacgatcttgcttattcgaaagtcgtggctgagattctcagttcaacaagcgatcggtccattgacctaacccctgccgagcaggttcagcagcgttggagcggcttgacacaagagtcatggccacgcataacatataccgaggctatccaaatactagaagcggcagatgtttccttcgtacaccagccgtcatggggtgacgatctccacacggagcatgagaaatatatcgccacgagggttggtagaggaagcagccccgtttttgtcacgaattatccacgcactataaaagcattttatatgaaggcaagtagcgttgataccgtatcatcatcaccatcagatacggtcgagtgtttcgatcttcttgtgccagacttttgcgagattgctggaggctcaatgcgcgagcatcggtttgaacatctgaaagagtctatgcaaaggaacggaatcggcttcgccggtcaagtctcctccgaggcgaatctcgaaaacaatctcgattggtatcttgatcttcggcgatggggctgtccacctcacggtggtttcggcctaggctttgatcgtttgatgtgctatcttaccggtatacagacaatacatgacacaaccgcctttccacgctggtatggtcgttgtgattgctag

SEQ ID NO: 31670 - protein, 498 aa, Muscodor strobelii
  misc_feature: SGI Peptide ID NO. 570905
  misc_feature (37)..(110): Pfam Id: PF01336 Pfam Desc: OB-fold nucleic acid binding domain
  misc_feature (126)..(494): Pfam Id: PF00152 Pfam Desc: tRNA synthetases class II (D, K and N)
  misc_feature (21)..(498): NCBI GI: 164424687 Blast Desc: NCU06866 [Neurospora crassa OR74A] gi|157070619|gb|EAA28839.2| conserved [Neurospora crassa OR74A]
  misc_feature (22)..(498): NCBI GI: 171679499 Blast Desc: protein product [Podospora anserina] gi|170939375|emb|CAP64603.1| protein product [Podospora anserina]
  misc_feature (22)..(498): NCBI GI: 145608522 Blast Desc: MGG_06566 [Magnaporthe grisea 70-15] gi|145015992|gb|EDK00482.1| MGG_06566 [Magnaporthe grisea 70-15]
  misc_feature (30)..(498): NCBI GI: 256728935 Blast Desc: [Nectria haematococca mpVI 77-13-4]
  misc_feature (16)..(498): NCBI GI: 261354910 Blast Desc: asparaginyl-tRNA synthetase [Verticillium albo-atrum VaMs.102]
  misc_feature (22)..(498): NCBI GI: 46138565 Blast Desc: FG10797.1 [Gibberella zeae PH-1]
  misc_feature (36)..(498): NCBI GI: 240105047 Blast Desc: asparaginyl-tRNA synthetase, [Coccidioides posadasii C735 delta SOWgp]
  misc_feature (36)..(498): NCBI GI: 255934216 Blast Desc: Pc12g15910 [Penicillium chrysogenum Wisconsin 54-1255] gi|211583008|emb|CAP81218.1| Pc12g15910 [Penicillium chrysogenum Wisconsin 54-1255]
  misc_feature (36)..(498): NCBI GI: 119195055 Blast Desc: CIMG_01902 [Coccidioides immitis RS]
  misc_feature (36)..(498): NCBI GI: 119492003 Blast Desc: asparaginyl-tRNA synthetase Slm5, [Neosartorya fischeri NRRL 181] gi|119411656|gb|EAW21599.1| asparaginyl-tRNA synthetase Slm5, [Neosartorya fischeri NRRL 181]
  misc_feature (18)..(491): SWISSPROT Homolog: EC 6.1.1.22 Asparagine--tRNA ligase
  misc_feature: Useful for introducing or modulating the production of volatile compounds
MKPYASCPALLHAWIATSATNVSSLLDSKPDVSVSDVRIDGYVRSVRAQKRHHFVSLGDGSSLESLQAVVPADQAEGLTIGAAVRLDGSWVPSQGHRQSHELQVTQATVLGPSDAKTFPIQKKYQTPEFLRTLPHLRPRIPFTTAVLRFRSEFIASLTNFFNARHYVQTHTPILTSSDCEGAGEVFHVMTSNELRAATADKIRPFFRRQVYTTVSAQLHLEALAQGLGNVWTLSPTFRAEQSDTTRHLSEFYMLEAEMSFADNLDSVMDLVEQMLKGVVDDLAYSKVVAEILSSTSDRSIDLTPAEQVQQRWSGLTQESWPRITYTEAIQILEAADVSFVHQPSWGDDLHTEHEKYIATRVGRGSSPVFVTNYPRTIKAFYMKASSVDTVSSSPSDTVECFDLLVPDFCEIAGGSMREHRFEHLKESMQRNGIGFAGQVSSEANLENNLDWYLDLRRWGCPPHGGFGLGFDRLMCYLTGIQTIHDTTAFPRWYGRCDC

SEQ ID NO: 31671 - DNA, 3875 bp, Muscodor strobelii
  misc_feature: SGI EST ID NO. CUFF.74972.1
  misc_feature: Variant of the nucleotide sequence at SEQ ID NO 31669
cggttttcttgtgccaagtctcaaagatatctcatctagagagtcagaatctagaaacatctcattcttttgctagtaccatccatgctcgcctgatgctctgtccaccatgataatccgagcatgaaacttctgctaaagctctcgttttgattacattgagatgtctaccctactaccgcgcgtaaggctgtctgcgcggcaagcatatcgacgaccctcgatgaagccatatgcttcgtgcccagctctcttgcatgcatggattgccacgtcggccacaaatgtgtccagtctgctggattcgaaaccagatgtatctgtaagcgacgtcaggatagatggttatgtgagatcggttcgcgcacaaaagcgccatcacttcgtctctcttggcgatggctcttctcttgagtccttgcaggccgttgttcctgccgatcaggctgaaggcttgactattggagcagctgttcgacttgacggctcctgggttccgtctcagggacaccggcaaagtcatgagctgcaggtgacacaagccaccgtgttggggccctcggatgcaaagacattcccaatacaaaagaaataccaaacaccggagtttctgaggaccttgccccacctccgtccccggatcccattcaccacagctgtcttgcggttccgctctgaattcattgcatccttgacaaattttttcaatgcccgtcactatgtccaaactcatacaccgatattaacatcctcagactgtgagggcgctggtgaggtcttccatgttatgacgagcaacgaactacgcgctgccaccgcggacaaaatcaggccattcttccgtcgacaagtgtataccacagtctcagctcagctacatcttgaagcactagctcaagggctcggaaatgtgtggacgttgtcacccacctttcgcgcagaacagagtgacacgacgcggcacctaagcgagttttatatgttggaagcagaaatgagcttcgctgataacctggattctgtgatggaccttgttgaacaaatgctgaaaggcgttgtcgacgatcttgcttattcgaaagtcgtggctgagattctcagttcaacaagcgatcggtccattgacctaacccctgccgagcaggttcagcagcgttggagcggcttgacacaagagtcatggccacgcataacatataccgaggctatccaaatactagaagcggcagatgtttccttcgtacaccagccgtcatggggtgacgatctccacacggagcatgagaaatatatcgccacgagggttggtagaggaagcagccccgtttttgtcacgaattatccacgcactataaaagcattttatatgaaggcaagtagcgttgataccgtatcatcatcaccatcagatacggtcgagtgtttcgatcttcttgtgccagacttttgcgagattgctggaggctcaatgcgcgagcatcggtttgaacatctgaaagagtctatgcaaaggaacggaatcggcttcgccggtcaagtctcctccgaggcgaatctcgaaaacaatctcgattggtatcttgatcttcggcgatggggctgtccacctcacggtggtttcggcctaggctttgatcgtttgatgtgctatcttaccggtatacagacaatacatgacacaaccgcctttccacgctggtatggtcgttgtgattgctagacgcacaacactgccatgtttgcgaaaatcgttgagcatcactgatgggaattcaatgacttgtgcaactattcaaagatagacatcgcgatccctagtggccacaagcatggaattcgttttctgcaccacacagcgaatcaaagacactcggaggcccgtctttgtaccaaggcacagcacaccccaacaaataccaaccgaactaacaacttttgaacacctaccccggaacagggcctaatgtttccgaactctgaccggatgagtcgtggcccctttgcaaatattcacttggtctgtattttaatgtatcttaaatgtacaagtctgcaagatccgggtatcactcgtctgtctccagaggggatgagcaaacattaattcataccaaacattgtggaggatgcataggtactcataatccccatttacggcctcatctcggtgatactacgaatcatggggaaaagagaggggcaaggtgtgatagtgatggcttgctgcactgtatagggagcggcaacagatacggctgctacatgaaaggaggcatgtcactccgtacaacaacctcacaatcgtacaacggatatttccgatttgaatgtggctagaatctgacagcatatggacattgcatttgaatgcatcaaagtctctcctagtgaagtgaaggattgttggctcgctcacctccctgttattgacgtattcccgacctcccgggtccaatcgggtgcgacgagttggagattgacacacataccgaatggcttttttcattattgtgtaaaatagactgttccaacattgcttcagacgtttctgatgcttccaatccttgccgtagagtaccggagtaggtagggatgaagcgacaccagcggccgctttcatccaagaatacgcagtatgcgtatcaagacgggatgacatcgtaaatagtgcctgctgctgaaacaaagtcatatctggcaatggcgatcttgttgcgattaggcaagctcgcatcggtccacactttaaggtctggatgcgtgaacatgcagatgtacatgtagggcaattaaccttaatcgcctgaccctgttgccaagcactagtgcatcgtactccaacatcggatcaacaagtagatatgtgtacatggtatgacggagacaatgcaaaggcatctgtgatagccacctcgttggtccagtaggtagcattgtctgtcgtcaccattgtaatgtatgtacgtacacgctggtcccaaagctgcctccaaattaaggtccatcatgcaattgcgacattgctgaaatagactttaatgagcccttggcgacccatgagatattatacgccaacatggatatcgttcgtacctaatctgcatgtagttattgttctcggaagatgatgcatggtcgacctggttatgtcgatatcgaccgaaggacagggacaccgggaatacctttcatattgcagtacttatatcgtacacggacagggtcttagtttcaaagcgcaacccgtacaaattctccagagctaatcgaggtgtcatgttgcgatgtcattctcatggatacagtcagaactagttacatacatagagaaccccgaagaaggtcgtttcggactgttcctgggctagatacctctaggtgatttgatcgttggactgctgtttgtaagcgatagcgagattcgaatcatcgttctccctctttttcgaaccaatcaagctcgaagagaaggaccattgcattcgaaggctaagacggcacagtcaactcatctcgcaggttgctacaaacttgatgcggcccgcgggcgacgtggcatctgaccagtttgatgctgactctacctgtcgtattgcatttcttgtaactttccaatgtgttcagcatcgcaagaacgtcagcggtagatgtggttgttttgcattatgctgggtgtcgagatcatcgaactattttcgatttgaaaaggtcagctcgtgggcaaaaacggcaccactaatctcggagatgcttgcagcaaggattagatggcgttggaacgcgaggcgataccactctggcggtaccacttcctactcgcctgtgtcgtctcgcttctttttcgtaacgtcccttgtcgccgaaatcgttctcgg

SEQ ID NO: 31672 - DNA, 1248 bp, Muscodor strobelii
  misc_feature: SGI cDNA ID NO. 570906
  misc_feature: Encodes the peptide sequence at SEQ ID NO 31673
atggaaacttatcgcggctacgttcggacccctggagatgccatcaagcttttcgaggcttgtcgattaggactattacctcgtgttcagaggagattgtcggagaaggagaggcaatccatcaagtccggttccgtgtttgtatgggacgagcgagaagctggcatgaggcggtggacggatggtaaatcatggagcgccagccgagtatcaggaagctttctcacctacagagagatggaaggcaaacgcggcagtggctttggatcatcacggcggaccaacgggcgttcaccagacagcggtcgagttagtgacgaagaccaggacggtgaacccgaaggataccggtacaaggcggatggtcttatgaagcagtcattcagcatcacgacttcacaagggcagcatctacacttaatctcatactactctcggcctcagcctggatcaccagatctaaaccagccaagtactgatccccagctgcgacacatctcacctgtgaaggggatgtatcccgagtctagcttgcaagacggcaatccacctcccgcaacgactagaactcctatgcagccatacagcaatcccactgggccacacgacggaatgtgggcttctcatccaagctggatgggcaaccccggttataatcctggctggacgaatggtagaaccgaacctgatgtccgacctcatccccagacccagctccaatcgccagtcttttcgcaacctcatccgtcgtttccaactccgagacctcagccaccccaaattcactcacctggatacacgaagcaagcctcctactttgagcatgaacgattgcctccaccttcaacctacccaatcactagccaagctccaagcctttcgcctagatcgcaacaactccaggttcaagcagcccaagctgttctaattgacccgcatgcggcaacgagtgcgcgtaatcctcaagggcctttgcccacttttggctcgactggtcgaggccctacaccgcccagaaaccactctctatcaccgccgcgaacaataagctcagacgggtcaatggcgcagtcgtcaaataagccaagtctgtcgcttcttctacaccctacgccgaccaattcggagccaaacagtgcaaatcctggcagcgcaagtagctctccgcgcgcacttgccgcttctgcgcacgagatgtcgcacgacgtgaaggccatccggtctttggaccggaagttctgcatttaa

SEQ ID NO: 31673 - protein, 415 aa, Muscodor strobelii
  misc_feature: SGI Peptide ID NO. 570906
  misc_feature (1)..(415): NCBI GI: 256728936 Blast Desc: NECHADRAFT_60837 [Nectria haematococca mpVI 77-13-4]
  misc_feature (1)..(415): NCBI GI: 46138563 Blast Desc: FG10796.1 [Gibberella zeae PH-1]
  misc_feature (1)..(316): NCBI GI: 261354908 Blast Desc: cAMP-independent regulatory protein pac2 [Verticillium albo-atrum VaMs.102]
  misc_feature (1)..(193): NCBI GI: 39977323 Blast Desc: MGG_06564 [Magnaporthe grisea 70-15] gi|145015995|gb|EDK00485.1| MGG_06564 [Magnaporthe grisea 70-15]
  misc_feature (1)..(193): NCBI GI: 156042716 Blast Desc: SS1G_11157 [Sclerotinia sclerotiorum 1980] gi|154695542|gb|EDN95280.1| SS1G_11157 [Sclerotinia sclerotiorum 1980]
  misc_feature (1)..(192): NCBI GI: 226281961 Blast Desc: cAMP-independent regulatory protein pac2 [Paracoccidioides brasiliensis Pb01]
  misc_feature (1)..(413): NCBI GI: 242786023 Blast Desc: camp independent regulatory protein [Talaromyces stipitatus ATCC 10500] gi|218720866|gb|EED20285.1| camp independent regulatory protein [Talaromyces stipitatus ATCC
  misc_feature (1)..(192): NCBI GI: 212543227 Blast Desc: camp independent regulatory protein [Penicillium marneffei ATCC 18224] gi|210066675|gb|EEA20768.1| camp independent regulatory protein [Penicillium marneffei ATCC 18224]
  misc_feature (1)..(192): NCBI GI: 119195069 Blast Desc: CIMG_01909 [Coccidioides immitis RS]
  misc_feature (1)..(192): NCBI GI: 240105044 Blast Desc: CPC735_046070 [Coccidioides posadasii C735 delta SOWgp]
METYRGYVRTPGDAIKLFEACRLGLLPRVQRRLSEKERQSIKSGSVFVWDEREAGMRRWTDGKSWSASRVSGSFLTYREMEGKRGSGFGSSRRTNGRSPDSGRVSDEDQDGEPEGYRYKADGLMKQSFSITTSQGQHLHLISYYSRPQPGSPDLNQPSTDPQLRHISPVKGMYPESSLQDGNPPPATTRTPMQPYSNPTGPHDGMWASHPSWMGNPGYNPGWTNGRTEPDVRPHPQTQLQSPVFSQPHPSFPTPRPQPPQIHSPGYTKQASYFEHERLPPPSTYPITSQAPSLSPRSQQLQVQAAQAVLIDPHAATSARNPQGPLPTFGSTGRGPTPPRNHSLSPPRTISSDGSMAQSSNKPSLSLLLHPTPTNSEPNSANPGSASSSPRALAASAHEMSHDVKAIRSLDRKFCI

SEQ ID NO: 31674 - DNA, 2544 bp, Muscodor strobelii
  misc_feature: SGI EST ID NO. CUFF.74939.0
  misc_feature: Variant of the nucleotide sequence at SEQ ID NO 31672
aaacttcataaagtcgccgtcccaaccttgaagcttattttattatcaacaccacccgctcaccctcaactctctccaaaaatttggcaccttgttgtcgttttaaccttcaaccaagcccaaccctaactgcctctcgactcatttacctgtggctcacactacgactcaactcaactgaccacggcacaacgcagctagcactatcggtctcactcgcattaacggctggcgccaaacaccacccacctcactgtctcacctcacctgctctgggttcgcgccatctagccacaactctcaacatcaagtatattgcctcggtcacaagccataaaggtttctctggacgctggtcacttcctcacttccaccatccccacgcattcgtcgttgccgtggtctccgtctacacagggcatacctccagctatcgacaatttacacctgaatggtctgttcttgacgctccacaggaactgccaaggttggaaggggcacggttacgcgacagtcgctgcaccaaaacccccagcgccgaaataacagggcaatccagtcaatttcatccatgatagagcagtgactgtcttcaacatggaaacttatcgcggctacgttcggacccctggagatgccatcaagcttttcgaggcttgtcgattaggactattacctcgtgttcagaggagattgtcggagaaggagaggcaatccatcaagtccggttccgtgtttgtatgggacgagcgagaagctggcatgaggcggtggacggatggtaaatcatggagcgccagccgagtatcaggaagctttctcacctacagagagatggaaggcaaacgcggcagtggctttggatcatcacggcggaccaacgggcgttcaccagacagcggtcgagttagtgacgaagaccaggacggtgaacccgaaggataccggtacaaggcggatggtcttatgaagcagtcattcagcatcacgacttcacaagggcagcatctacacttaatctcatactactctcggcctcagcctggatcaccagatctaaaccagccaagtactgatccccagctgcgacacatctcacctgtgaaggggatgtatcccgagtctagcttgcaagacggcaatccacctcccgcaacgactagaactcctatgcagccatacagcaatcccactgggccacacgacggaatgtgggcttctcatccaagctggatgggcaaccccggttataatcctggctggacgaatggtagaaccgaacctgatgtccgacctcatccccagacccagctccaatcgccagtcttttcgcaacctcatccgtcgtttccaactccgagacctcagccaccccaaattcactcacctggatacacgaagcaagcctcctactttgagcatgaacgattgcctccaccttcaacctacccaatcactagccaagctccaagcctttcgcctagatcgcaacaactccaggttcaagcagcccaagctgttctaattgacccgcatgcggcaacgagtgcgcgtaatcctcaagggcctttgcccacttttggctcgactggtcgaggccctacaccgcccagaaaccactctctatcaccgccgcgaacaataagctcagacgggtcaatggcgcagtcgtcaaataagccaagtctgtcgcttcttctacaccctacgccgaccaattcggagccaaacagtgcaaatcctggcagcgcaagtagctctccgcgcgcacttgccgcttctgcgcacgagatgtcgcacgacgtgaaggccatccggtctttggaccggaagttctgcatttaatttgatattcctttttatagcatgattcaggcgttcatgggctctgttctaaaaggagtctgctcattcctggagtgatgggccacgggcaataggaagcggcatggtgctactgaaaaaaaaacagcgctctcttttcatcatggaacagatctcggccaggaataggaacgagacggagttatgggtttggagggttcacgatgcgctcacagcactttgggttgtacatattgttgcgcgaaggccaggcgaatgttttcaacccgagtttgggctagggaacttcacagtaatagtgaaatgacatttattacacaattctgcttccgtttctgtcaattcactgttccctaatttcctcttgcagtgatggtcaatccacttgtgtagaggaacaccattacggtccttgcctaattttcgtaaaatttgtgctaccgcgatgtccttgctttaccactgctcattatcatccaaccccatataactgcacgctactcccaatacattgtatgtcttttgtttgttacttggccccagcaattcgaaaactcgaaggtggcattcatcaaaactgcttgcttgctctagtcctataattactcttgatctgattgggcgatgatggcaaacaccgttgtccaaactaaatgaacaatcgtacaaagttcgtcagccatgtaatgagacaccagc

SEQ ID NO: 31675 - DNA, 648 bp, Muscodor strobelii
  misc_feature: SGI cDNA ID NO. 570907
  misc_feature: Reduced expression when VOC is produced
  misc_feature: Encodes the peptide sequence at SEQ ID NO 31676
atggctcccaagaaggcagacggcgccgctcccaaggctaagaccagcactcatgcatcataccaggacatgatcactgatgccatcattgcgctcaaggatcgtcaaggctctagccgccaatctctcaagaaatatgtcaaggccaacaacacaatcaacgctggcgatgccatgttcgatgtccagttcaacaaggctcttaagagtggtgtgactaagggtatctttgagcagcctaagggtccttctggaggcaccaagctttctaagaagaccaagcctgctgctaagcctgccgccaagaaggagggcgaagagaagcctaagaaggctgccccgaagaaggatgctgctaccaagaaggccgcacccaagaagaccgccaccaaaaaggaggctactgagaagaagcctgccgccaagaaagctgctgcgcccaaaaaagctgcacccaagaaggccgcggctaagaaggatgcccctgccgtcgtcgacaagccgactactctaaccaagacaaagtctgggagagtagccaagactgctgccaaacccgctgccaaaaaggccgcagcgccaaagaagcctgccgctaagaaagagaaaacaccgaagaaagaggccaaagcagaggcggcagcttaa

SEQ ID NO: 31676 - protein, 215 aa, Muscodor strobelii
  misc_feature: SGI Peptide ID NO. 570907
  misc_feature (17)..(91): Pfam Id: PF00538 Pfam Desc: linker histone H1 and H5 family
  misc_feature (17)..(93): NCBI GI: 171679491 Blast Desc: protein product [Podospora anserina] gi|170939371|emb|CAP64599.1| protein product [Podospora anserina]
  misc_feature (13)..(92): NCBI GI: 256729132 Blast Desc: NECHADRAFT_123152 [Nectria haematococca mpVI 77-13-4]
  misc_feature (16)..(92): NCBI GI: 46138571 Blast Desc: FG10800.1 [Gibberella zeae PH-1]
  misc_feature (1)..(92): NCBI GI: 240106157 Blast Desc: Histone H1, [Coccidioides posadasii C735 delta SOWgp]
  misc_feature (1)..(187): NCBI GI: 261193849 Blast Desc: conserved [Ajellomyces dermatitidis SLH14081] gi|239588935|gb|EEQ71578.1| conserved [Ajellomyces dermatitidis SLH14081]
  misc_feature (1)..(185): NCBI GI: 119192272 Blast Desc: [Coccidioides immitis RS]
  misc_feature (1)..(182): NCBI GI: 159128013 Blast Desc: histone H1 [Aspergillus fumigatus A1163]
  misc_feature (1)..(182): NCBI GI: 71000635 Blast Desc: histone H1 [Aspergillus fumigatus Af293] gi|66852636|gb|EAL92961.1| histone H1 [Aspergillus fumigatus Af293]
  misc_feature (17)..(92): NCBI GI: 258573691 Blast Desc: [Uncinocarpus reesii 1704] gi|237901293|gb|EEP75694.1| [Uncinocarpus reesii 1704]
  misc_feature (1)..(185): NCBI GI: 226294502 Blast Desc: PADG_06001 [Paracoccidioides brasiliensis Pb18]
  misc_feature: Useful for introducing or modulating the production of volatile compounds
MAPKKADGAAPKAKTSTHASYQDMITDAIIALKDRQGSSRQSLKKYVKANNTINAGDAMFDVQFNKALKSGVTKGIFEQPKGPSGGTKLSKKTKPAAKPAAKKEGEEKPKKAAPKKDAATKKAAPKKTATKKEATEKKPAAKKAAAPKKAAPKKAAAKKDAPAVVDKPTTLTKTKSGRVAKTAAKPAAKKAAAPKKPAAKKEKTPKKEAKAEAAA

SEQ ID NO: 31677 - DNA, 1539 bp, Muscodor strobelii
  misc_feature: SGI EST ID NO. CUFF.75325.0
  misc_feature: Variant of the nucleotide sequence at SEQ ID NO 31675
ccacttactataagagtcctctcaccttctcgccgccgcgcccccagccggcaccctccctctctcgttttccctcccatctctttcgtaacgatcgcgttaaaaagcattgtccgagtacatcatctcacgctcagctcatctgttatcctcgtcctcaattcaatcaacccaaccacgagttattccactccaatttcatcccgtcttcactgtcgcaatggctcccaagaaggcagacggcgccgctcccaaggctaagaccagcactcatgcatcataccaggacatgatcactgatgccatcattgcggtaattcatctctttccctagcttccggcgcattgagttccatatggtcatgtgtttgtcgggcgcgtgatgcatcgtcgggcactaccctttgagtcaacacacaacacgtgtgaccacacatcacttttcctccacgcccactcttgtctgcgcattgatgctgatttgattcttccaatcacagctcaaggatcgtcaaggctctagccgccaatctctcaagaaatatgtcaaggccaacaacacaatcaacgctggcgatgccatgttcgatgtccagttcaacaaggctcttaagagtggtgtgactaagggtatctttgagcagcctaagggtccttctggaggcaccaagctttctaagaagaccaagcctgctgctaagcctgccgccaagaaggagggcgaagagaagcctaagaaggctgccccgaagaaggatgctgctaccaagaaggccgcacccaagaagaccgccaccaaaaaggaggctactgagaagaagcctgccgccaagaaagctgctgcgcccaaaaaagctgcacccaagaaggccgcggctaagaaggatgcccctgccgtcgtcgacaagccgactactctaaccaagacaaagtctgggagagtagccaagactgctgccaaacccgctgccaaaaaggccgcagcgccaaagaagcctgccgctaagaaagagaaaacaccgaagaaagaggccaaagcagaggcggcagcttaagctgtgtgttttacatggttgttttcttcagggtgtctcttagttattggcgggaatcaatggcgttcaaggaaactgggtataaagagagcagcacgcgaacgtgcgatcgagtatcatgcaaggggttcgggtcatcaatgtgttttgtgtttttggggcggtgggaaagacaatctgctcgtgcaggtaatgaaatggcatgtagggatgcgatcatctcgggggcttgaaaggataccgtaacgacgagagtatgggtttcgatcgcattgtacggatttgcacatattccccagccacgacgtcttgctgaagcagggggttatgacgatatcacgacacgaggctacaattgtaattataccaatgatcaaaaggctattacactgttcattctaagaatgcgtcccgcgtcccatgaagtgtctatgcgtagcttgatgtgattagggctgctcaagcagaacgcgtcttcggcgaa

SEQ ID NO: 31678 - DNA, 1809 bp, Muscodor strobelii
  misc_feature: SGI cDNA ID NO. 570909
  misc_feature: Reduced expression when VOC is produced
  misc_feature: Encodes the peptide sequence at SEQ ID NO 31679
atgattcgccgcgccgtcaccagagcccctcgacggctcgtggcattgcacgctcgagctccaatccgcgcaacgatagcttcctctagattactgtcgacgacggcgaggcaaatgtcgcttcctacaatagaatatccactctcaacggcccttgcgagtgactcattccagcttctccccgaatctgagaaagccggagccgcagaagatgctctctacgaatcccagatcaaagatgttgaggcatggtgggcatcaccaagatttgagggcatcaagcgcccgtacaccgccgccgatgtggtgtcgaagcgtggttcgcaaatgcagagctacccaagctccgtcatggcccggaagctcttcaacctgatcaaagagagagaagcagcgggagaccctattcacacgatgggagccatcgaccccgtccagatgacccaacaagcaccgcaccaagaagtcctctacctctccggctgggcctgttctgccgtcctcacaacgaccaacgaagtatccccagacttcggcgactacccctacaacaccgtccccaaccaagtccagcgcatggccaaggcccaatccatgcacgaccgcaaacagtgggatctccgccggaagatgacgcccgaagagcgcaagaagacaccctacgtcgactacatgcggcccatcatcgccgacggcgacaccggccacggcggcctctccgccgtcctcaagctcgcgaagctcttcgctgaaaacggcgcagcagcagtccacttcgaagaccagctgcacgggggcaagaaatgcggtcacctcgccggaaaagtcctcgtaccaatcggggaccacatcaaccgactagtagccgcccgtttccaatgggacgtaatgggcaccgagaacctcatcctcgcacgcaccgactccgaatccggcaaactaatatcctccgcaatcgacgtgcgagaccacgaattcatcctcggcgtctccaccacctctgccgaacccctcgccgagaccctccaacaaatggaagcctcaggcgcaacaggcgcagaaatcgacctcttcgaagcaacctgggtgaaagaacaccgtctcacgaccttcgacgaagcagcagtcgaacaaatgcgttcccaaaacgtctctcaatcatccatcgacaaatacctcgcagccgtaaaactcgacataaaccaaggcataacccgccgtcgcgccctagccaacgaactcgtgtccacacccatacaatggtcttgggacgtcccacggactcgagaaggctactaccactaccgcgccggcatgccggccgccacaaaacgcgccctcgccttcgcgccctacgcagacctcctctgggtcgaaaccggcgaccccaacgtcgccgtagcgcgcgatctcggacgagcagtgcgcgcggaatacccagggaagggcctagtatacaacttatccccatccttcaactggatggctcacggattcacagacgaaacacttaaatccttcatctgggatattgcgcgagaaggctttgtcctgcaacttattagtttggcgggtcttcattccacggccactattacgaacgagttgagcagggagtataagaaagatggtatgctggcttatgtcaatctcgttcagagaagagagaaggaattaggctgtgatgtgttgacgcatcagaagtggagtggtgctagttatatcgatggcatattgggtgctatccagagtgggagttccgggagtaagagtatgggagagggaaacactgagggacagtttgactaa

SEQ ID NO: 31679 - protein, 602 aa, Muscodor strobelii
  misc_feature: SGI Peptide ID NO. 570909
  misc_feature (77)..(601): Pfam Id: PF00463 Pfam Desc: Isocitrate lyase family
  misc_feature (1)..(601): NCBI GI: 240280391 Blast Desc: isocitrate lyase [Ajellomyces capsulatus H143]
  misc_feature (1)..(601): NCBI GI: 229359371 Blast Desc: methylisocitrate lyase precursor [Aspergillus fumigatus]
  misc_feature (1)..(598): NCBI GI: 159122571 Blast Desc: isocitrate lyase [Aspergillus fumigatus A1163]
  misc_feature (1)..(601): NCBI GI: 225561051 Blast Desc: isocitrate lyase [Ajellomyces capsulatus G186AR]
  misc_feature (1)..(598): NCBI GI: 70984567 Blast Desc: isocitrate lyase [Aspergillus fumigatus Af293] gi|66845417|gb|EAL85752.1| isocitrate lyase [Aspergillus fumigatus Af293]
  misc_feature (1)..(601): NCBI GI: 121703954 Blast Desc: isocitrate lyase [Aspergillus clavatus NRRL 1] gi|119398385|gb|EAW08815.1| isocitrate lyase [Aspergillus clavatus NRRL 1]
  misc_feature (1)..(598): NCBI GI: 115386616 Blast Desc: mitochondrial 2-methylisocitrate lyase [Aspergillus terreus NIH2624] gi|114190847|gb|EAU32547.1| mitochondrial 2-methylisocitrate lyase [Aspergillus terreus NIH2624]
  misc_feature (38)..(598): NCBI GI: 238499509 Blast Desc: isocitrate lyase [Aspergillus flavus NRRL3357] gi|220692742|gb|EED49088.1| isocitrate lyase [Aspergillus flavus NRRL3357]
  misc_feature (38)..(600): NCBI GI: 169778923 Blast Desc: [Aspergillus oryzae RIB40] gi|83772665|dbj|BAE62793.1| protein product [Aspergillus oryzae]
  misc_feature (1)..(598): NCBI GI: 226277933 Blast Desc: mitochondrial 2-methylisocitrate lyase [Paracoccidioides brasiliensis Pb01]
  misc_feature (68)..(601): SWISSPROT Homolog: EC 4.1.3.1 Isocitrate lyase
  misc_feature: Useful for introducing or modulating the production of volatile compounds
MIRRAVTRAPRRLVALHARAPIRATIASSRLLSTTARQMSLPTIEYPLSTALASDSFQLLPESEKAGAAEDALYESQIKDVEAWWASPRFEGIKRPYTAADVVSKRGSQMQSYPSSVMARKLFNLIKEREAAGDPIHTMGAIDPVQMTQQAPHQEVLYLSGWACSAVLTTTNEVSPDFGDYPYNTVPNQVQRMAKAQSMHDRKQWDLRRKMTPEERKKTPYVDYMRPIIADGDTGHGGLSAVLKLAKLFAENGAAAVHFEDQLHGGKKCGHLAGKVLVPIGDHINRLVAARFQWDVMGTENLILARTDSESGKLISSAIDVRDHEFILGVSTTSAEPLAETLQQMEASGATGAEIDLFEATWVKEHRLTTFDEAAVEQMRSQNVSQSSIDKYLAAVKLDINQGITRRRALANELVSTPIQWSWDVPRTREGYYHYRAGMPAATKRALAFAPYADLLWVETGDPNVAVARDLGRAVRAEYPGKGLVYNLSPSFNWMAHGFTDETLKSFIWDIAREGFVLQLISLAGLHSTATITNELSREYKKDGMLAYVNLVQRREKELGCDVLTHQKWSGASYIDGILGAIQSGSSGSKSMGEGNTEGQFD

SEQ ID NO: 31680 - DNA, 4309 bp, Muscodor strobelii
  misc_feature: SGI EST ID NO. CUFF.75413.0
  misc_feature: Variant of the nucleotide sequence at SEQ ID NO 31678
ttttcggagaggtgccgattcccttgacatctccgcggtttgtgacgtttgttatccagcctttctcattcttttaattttgcggagaagacgcgaatacctaaacttaatgttcaacagactgtcattgttttgcgaagctatagaaagtcaatcgcagtcccttgagtcctggttcttcgacgtctagttatgattcgccgcgccgtcaccagagcccctcgacggctcgtggcattgcacgctcgagctccaatccgcgcaacgatagcttcctctagattactgtcgacgacggcgaggcaaatgtcgcttcctacaatagaatatccactctcaacggcccttgcgagtgactcattccagcttctccccgaatctgagaaagccggagccgcagaagatgctctctacgaatcccagatcaaagatgttgaggcatggtgggcatcaccaagatttgagggcatcaagcgcccgtacaccgccgccgatgtggtgtcgaagcgtggttcgcaaatgcagagctacccaagctccgtcatggcccggaagctcttcaacctgatcaaagagagagaagcagcgggagaccctattcacacgatgggagccatcgaccccgtccagatgacccaacaagcaccgcaccaagaagtcctctacctctccggctgggcctgttctgccgtcctcacaacgaccaacgaagtatccccagacttcggcgactacccctacaacaccgtccccaaccaagtccagcgcatggccaaggcccaatccatgcacgaccgcaaacagtgggatctccgccggaagatgacgcccgaagagcgcaagaagacaccctacgtcgactacatgcggcccatcatcgccgacggcgacaccggccacggcggcctctccgccgtcctcaagctcgcgaagctcttcgctgaaaacggcgcagcagcagtccacttcgaagaccagctgcacgggggcaagaaatgcggtcacctcgccggaaaagtcctcgtaccaatcggggaccacatcaaccgactagtagccgcccgtttccaatgggacgtaatgggcaccgagaacctcatcctcgcacgcaccgactccgaatccggcaaactaatatcctccgcaatcgacgtgcgagaccacgaattcatcctcggcgtctccaccacctctgccgaacccctcgccgagaccctccaacaaatggaagcctcaggcgcaacaggcgcagaaatcgacctcttcgaagcaacctgggtgaaagaacaccgtctcacgaccttcgacgaagcagcagtcgaacaaatgcgttcccaaaacgtctctcaatcatccatcgacaaatacctcgcagccgtaaaactcgacataaaccaaggcataacccgccgtcgcgccctagccaacgaactcgtgtccacacccatacaatggtcttgggacgtcccacggactcgagaaggctactaccactaccgcgccggcatgccggccgccacaaaacgcgccctcgccttcgcgccctacgcagacctcctctgggtcgaaaccggcgaccccaacgtcgccgtagcgcgcgatctcggacgagcagtgcgcgcggaatacccagggaagggcctagtatacaacttatccccatccttcaactggatggctcacggattcacagacgaaacacttaaatccttcatctgggatattgcgcgagaaggctttgtcctgcaacttattagtttggcgggtcttcattccacggccactattacgaacgagttgagcagggagtataagaaagatggtatgctggcttatgtcaatctcgttcagagaagagagaaggaattaggctgtgatgtgttgacgcatcagaagtggagtggtgctagttatatcgatggcatattgggtgctatccagagtgggagttccgggagtaagagtatgggagagggaaacactgagggacagtttgactaagttgtgtggtttgatttttgcatatagttcatttcgctatcacagcgatggagttgggggtattacaatatcatatcatttacagagaacttgtgtataggtccatgcatatcaaactagttgaaaatattcgtatgatttctccagtagtctctactcataaaatcgtaaagcgagtctacctcttgtgcaacctgtaccgtagctgccagtaaatgtcatcgaaaccggatgactccccaaaaacgctcgaagaatcagtcgtggtattgggcaccgcaagaagaaaaccatcagccgccaggaaagcctaaactcctgaccaaaaagaatcgccatagccatgccgttttccttgtttgttttgttgccaagttgattgaatcgatcaaagagagtcctttagagcattgttgactggcggaattggagccgagccctcgggtgtgacataagccttggtcataccgccatctacgaccatgtcgtggccattcacgaagctagcctcgtcgctggcaaggaagaggacagcctgtgcctgctcgatggcctcgccgaagcggcccatgggaaagtggatctctcgtcgcatgcgcttgggaatgtcgtcgccaagccagtcttgaagaagaggagtgtttaggggcgcagggcacaagctgttgaagcggaagccttcgcgtgcgtggaccatggacagttcgcgggtcagagcgagaacagcgcccttcgacgcggtgtatgcaagctgaggagtcgcagaaccaacgagagcaacgacagatgcggtgttgatgatgctgcccttagtcttcttgtgtttgcgcaaggacaatacagcgtgcttgcagccgtaccatacgcccttgacgttgatgtccatagtcaggttccagatcttctccggggttccgaccgcatcgtcatcctgcgcgtgcatgataccagcattgttgaagattacgtcaaggccaccccaagaatcgaccgactcgatcatagcttgcacctggtcctctttggaaacatcgcagatctatcgcgatgccattagcattggaggcgttgcgctttaatcattttggaaatcatacaatagtctcgattctaggaacacggggcaccagctggaggattttcgcctttgctttctcaagagcaggttcggagatgtcagacaggagtacgcaagcgccctctttggcgaataagatgcctgtctcaaggccaataccactgttgagcccgcgtcagtagttggtacgctagatgaagggttatgttggagacaccatcgcatagctagcagactattgatgggggcgagaggctcagacgcttgggaagaatgctttgcttacccagcacctccagtgataatggcattcttgccagccaaacgtcctctaggttccacagcgatcgatcccatatttccgttagaaagctaaaatgctcttgtctgtcacgtagtggttgcaaagcagggcaggcaatgagcaacccttggtacgagctccgagagtcggatatcaagaacacaaagacggtgaaagatcaaaggtaggaaacacaaagagctgggtatctggaaagttttgaagctcactgaattacttatcaagtaagaaaagaagtgggtgtcaagggaaaacgttggctcaagccaaagagtcaggacagatataaacggtgtaatagctgagcgcgtgatagcccacccaaaaagtaggggactggaccctggatagtccaacacagatcaatgaccctcttcatcatagataagaggttgctcgaggtagggaggggcatagtaacaagcgtttgttgctttgcattcttccgacaacggcggttcgaggcatgcggccctatcgtgcactgctgataagctagctctggtctgacaggaatggcaaactctagatacctgcccgtcaccctcttgacatgcccgaccggttcacaatcgagatcagtatcaaaactggcgttctcggccttgccatattttgatcgacttacatgggtcggccgtcaagtgagatgaagggactgactgatatgattcatgttcactccaaagttgcgtaattcaaatttcataaggtaccgcgtctcgcaccattttggagacagatacgagataggttctcagtctcacgagcaatgcaatgggttcggactggatttcggacacagacaccgaaacatgagatgtacttccaaattggaagaatccgtcgcactcacgtctccgtgatgctgtgcgatactaactttgttaagagtgcgcgagaaa

SEQ ID NO: 31681 - DNA, 864 bp, Muscodor strobelii
  misc_feature: SGI cDNA ID NO. 570910
  misc_feature: Reduced expression when VOC is produced
  misc_feature: Encodes the peptide sequence at SEQ ID NO 31682
atgggatcgatcgctgtggaacctagaggacgtttggctggcaagaatgccattatcactggaggtgctggtggtattggccttgagacaggcatcttattcgccaaagagggcgcttgcgtactcctgtctgacatctccgaacctgctcttgagaaagcaaaggcgaaaatcctccagctggtgccccgtgttcctagaatcgagactattatctgcgatgtttccaaagaggaccaggtgcaagctatgatcgagtcggtcgattcttggggtggccttgacgtaatcttcaacaatgctggtatcatgcacgcgcaggatgacgatgcggtcggaaccccggagaagatctggaacctgactatggacatcaacgtcaagggcgtatggtacggctgcaagcacgctgtattgtccttgcgcaaacacaagaagactaagggcagcatcatcaacaccgcatctgtcgttgctctcgttggttctgcgactcctcagcttgcatacaccgcgtcgaagggcgctgttctcgctctgacccgcgaactgtccatggtccacgcacgcgaaggcttccgcttcaacagcttgtgccctgcgcccctaaacactcctcttcttcaagactggcttggcgacgacattcccaagcgcatgcgacgagagatccactttcccatgggccgcttcggcgaggccatcgagcaggcacaggctgtcctcttccttgccagcgacgaggctagcttcgtgaatggccacgacatggtcgtagatggcggtatgaccaaggcttatgtcacacccgagggctcggctccaattccgccagtcaacaatgctctaaaggactctctttga

SEQ ID NO: 31682 - protein, 287 aa, Muscodor strobelii
  misc_feature: SGI Peptide ID NO. 570910
  misc_feature (15)..(189): Pfam Id: PF00106 Pfam Desc: short chain dehydrogenase
  misc_feature (10)..(287): NCBI GI: 85116548 Blast Desc: NCU02480 [Neurospora crassa OR74A] gi|28926876|gb|EAA35838.1| NCU02480 [Neurospora crassa OR74A] gi|38567109|emb|CAE76405.1| related to short-chain alcohol
  misc_feature (7)..(287): NCBI GI: 256731964 Blast Desc: [Nectria haematococca mpVI 77-13-4]
  misc_feature (8)..(287): NCBI GI: 46105098 Blast Desc: FG00177.1 [Gibberella zeae PH-1]
  misc_feature (10)..(287): NCBI GI: 223975161 Blast Desc: [Zea mays]
  misc_feature (10)..(287): NCBI GI: 170940279 Blast Desc: protein product [Podospora anserina]
  misc_feature (4)..(280): NCBI GI: 145250419 Blast Desc: An15g01840 [Aspergillus niger] gi|134082242|emb|CAL00997.1| protein product [Aspergillus niger]
  misc_feature (8)..(281): NCBI GI: 121703862 Blast Desc: short-chain dehydrogenase [Aspergillus clavatus NRRL 1] gi|119398339|gb|EAW08769.1| short-chain dehydrogenase [Aspergillus clavatus NRRL 1]
  misc_feature (10)..(282): NCBI GI: 239614678 Blast Desc: short-chain dehydrogenase/reductase [Ajellomyces dermatitidis ER-3]
  misc_feature (10)..(282): NCBI GI: 261189129 Blast Desc: short chain dehydrogenase [Ajellomyces dermatitidis SLH14081] gi|239591761|gb|EEQ74342.1| short chain dehydrogenase [Ajellomyces dermatitidis SLH14081]
  misc_feature (9)..(280): NCBI GI: 70984437 Blast Desc: short-chain dehydrogenase/reductase family protein [Aspergillus fumigatus Af293] gi|119467504|ref|XP_001257558.1| short-chain dehydrogenase [Neosartorya fischeri NRRL 181] family
  misc_feature (34)..(263): SWISSPROT Homolog: EC 1.1.1.100 3-oxoacyl-[acyl-carrier-protein] reductase
  misc_feature: Useful for introducing or modulating the production of volatile compounds
MGSIAVEPRGRLAGKNAIITGGAGGIGLETGILFAKEGACVLLSDISEPALEKAKAKILQLVPRVPRIETIICDVSKEDQVQAMIESVDSWGGLDVIFNNAGIMHAQDDDAVGTPEKIWNLTMDINVKGVWYGCKHAVLSLRKHKKTKGSIINTASVVALVGSATPQLAYTASKGAVLALTRELSMVHAREGFRFNSLCPAPLNTPLLQDWLGDDIPKRMRREIHFPMGRFGEAIEQAQAVLFLASDEASFVNGHDMVVDGGMTKAYVTPEGSAPIPPVNNALKDSL

SEQ ID NO: 31683 - DNA, 4200 bp, Muscodor strobelii
  misc_feature: SGI EST ID NO. CUFF.75414.1
  misc_feature: Variant of the nucleotide sequence at SEQ ID NO 31681
tttctcgcgcactcttaacaaagttagtatcgcacagcatcacggagacgtgagtgcgacggattcttccaatttggaagtacatctcatgtttcggtgtctgtgtccgaaatccagtccgaacccattgcattgctcgtgagactgagaacctatctcgtatctgtctccaaaatggtgcgagacgcggtaccttatgaaatttgaattacgcaactttggagtgaacatgaatcatatcagtcagtcccttcatctcacttgacggccgacccatgtaagtcgatcaaaatatggcaaggccgagaacgccagttttgatactgatctcgattgtgaaccggtcgggcatgtcaagagggtgacgggcaggtatctagagtttgccattcctgtcagaccagagctagcttatcagcagtgcacgatagggccgcatgcctcgaaccgccgttgtcggaagaatgcaaagcaacaaacgcttgttactatgcccctccctacctcgagcaacctcttatctatgatgaagagggtcattgatctgtgttggactatccagggtccagtcccctactttttgggtgggctatcacgcgctcagctattacaccgtttatatctgtcctgactctttggcttgagccaacgttttcccttgacacccacttcttttcttacttgataagtaattcagtgagcttcaaaactttccagatacccagctctttgtgtttcctacctttgatctttcaccgtctttgtgttcttgatatccgactctcggagctcgtaccaagggttgctcattgcctgccctgctttgcaaccactacgtgacagacaagagcattttagctttctaacggaaatatgggatcgatcgctgtggaacctagaggacgtttggctggcaagaatgccattatcactggaggtgctggtggtattggccttgagacaggcatcttattcgccaaagagggcgcttgcgtactcctgtctgacatctccgaacctgctcttgagaaagcaaaggcgaaaatcctccagctggtgccccgtgttcctagaatcgagactattatctgcgatgtttccaaagaggaccaggtgcaagctatgatcgagtcggtcgattcttggggtggccttgacgtaatcttcaacaatgctggtatcatgcacgcgcaggatgacgatgcggtcggaaccccggagaagatctggaacctgactatggacatcaacgtcaagggcgtatggtacggctgcaagcacgctgtattgtccttgcgcaaacacaagaagactaagggcagcatcatcaacaccgcatctgtcgttgctctcgttggttctgcgactcctcagcttgcatacaccgcgtcgaagggcgctgttctcgctctgacccgcgaactgtccatggtccacgcacgcgaaggcttccgcttcaacagcttgtgccctgcgcccctaaacactcctcttcttcaagactggcttggcgacgacattcccaagcgcatgcgacgagagatccactttcccatgggccgcttcggcgaggccatcgagcaggcacaggctgtcctcttccttgccagcgacgaggctagcttcgtgaatggccacgacatggtcgtagatggcggtatgaccaaggcttatgtcacacccgagggctcggctccaattccgccagtcaacaatgctctaaaggactctctttgatcgattcaatcaacttggcaacaaaacaaacaaggaaaacggcatggctatggcgattctttttggtcaggagtttaggctttcctggcggctgatggttttcttcttgcggtgcccaataccacgactgattcttcgagcgtttttggggagtcatccggtttcgatgacatttactggcagctacggtacaggttgcacaagaggtagactcgctttacgattttatgagtagagactactggagaaatcatacgaatattttcaactagtttgatatgcatggacctatacacaagttctctgtaaatgatatgatattgtaatacccccaactccatcgctgtgatagcgaaatgaactatatgcaaaaatcaaaccacacaacttagtcaaactgtccctcagtgtttccctctcccatactcttactcccggaactcccactctggatagcacccaatatgccatcgatataactagcaccactccacttctgatgcgtcaacacatcacagcctaattccttctctcttctctgaacgagattgacataagccagcataccatctttcttatactccctgctcaactcgttcgtaatagtggccgtggaatgaagacccgccaaactaataagttgcaggacaaagccttctcgcgcaatatcccagatgaaggatttaagtgtttcgtctgtgaatccgtgagccatccagttgaaggatggggataagttgtatactaggcccttccctgggtattccgcgcgcactgctcgtccgagatcgcgcgctacggcgacgttggggtcgccggtttcgacccagaggaggtctgcgtagggcgcgaaggcgagggcgcgttttgtggcggccggcatgccggcgcggtagtggtagtagccttctcgagtccgtgggacgtcccaagaccattgtatgggtgtggacacgagttcgttggctagggcgcgacggcgggttatgccttggtttatgtcgagttttacggctgcgaggtatttgtcgatggatgattgagagacgttttgggaacgcatttgttcgactgctgcttcgtcgaaggtcgtgagacggtgttctttcacccaggttgcttcgaagaggtcgatttctgcgcctgttgcgcctgaggcttccatttgttggagggtctcggcgaggggttcggcagaggtggtggagacgccgaggatgaattcgtggtctcgcacgtcgattgcggaggatattagtttgccggattcggagtcggtgcgtgcgaggatgaggttctcggtgcccattacgtcccattggaaacgggcggctactagtcggttgatgtggtccccgattggtacgaggacttttccggcgaggtgaccgcatttcttgcccccgtgcagctggtcttcgaagtggactgctgctgcgccgttttcagcgaagagcttcgcgagcttgaggacggcggagaggccgccgtggccggtgtcgccgtcggcgatgatgggccgcatgtagtcgacgtagggtgtcttcttgcgctcttcgggcgtcatcttccggcggagatcccactgtttgcggtcgtgcatggattgggccttggccatgcgctggacttggttggggacggtgttgtaggggtagtcgccgaagtctggggatacttcgttggtcgttgtgaggacggcagaacaggcccagccggagaggtagaggacttcttggtgcggtgcttgttgggtcatctggacggggtcgatggctcccactgttagagtcgacaatgttagctttgttcttcttcttgtgaaggttgagtttgctctgtatctctggacgcactcgtgtgaatagggtctcccgctgcttctctctctttgatcaggttgaagagcttccgggccatgacggagcttgggtagctctgcatttgcgaaccacgcttcgacaccacatcggcggcggtgtacgggcgcttgatgccctcaaatcttggtgatgcccaccatgcctcaacatctttgatctgggattcgtagagagcatcttctgcggctccggctttctcagattcggggagaagctggaatgagtcactcgcaagggccgttgagagtggatattctattgtaggaagcgacatttgcctcgccgtcgtcgacagtaatctagaggaagctatcgttgcgcggattggagctcgagcgtgcaatgccacgagccgtcgaggggctctggtgacggcgcggcgaatcataactagacgtcgaagaaccaggactcaagggactgcgattgactttctatagcttcgcaaaacaatgacagtctgttgaacattaagtttaggtattcgcgtcttctccgcaaaattaaaagaatgagaaaggctggataacaaacgtcacaaaccgcggagatgtcaagggaatcggcacctctccgaaaa

SEQ ID NO: 31684 - DNA, 513 bp, Muscodor strobelii
  misc_feature: SGI cDNA ID NO. 570911
  misc_feature: Reduced expression when VOC is produced
  misc_feature: Encodes the peptide sequence at SEQ ID NO 31685
atctggaacctgactatggacatcaacgtcaagggcgtatggtacggctgcaagcacgctgtattgtccttgcgcaaacacaagaagactaagggcagcatcatcaacaccgcatctgtcgttgctctcgttggttctgcgactcctcagcttgcatacaccgcgtcgaagggcgctgttctcgctctgacccgcgaactgtccatggtccacgcacgcgaaggcttccgcttcaacagcttgtgccctgcgcccctaaacactcctcttcttcaagactggcttggcgacgacattcccaagcgcatgcgacgagagatccactttcccatgggccgcttcggcgaggccatcgagcaggcacaggctgtcctcttccttgccagcgacgaggctagcttcgtgaatggccacgacatggtcgtagatggcggtatgaccaaggcttatgtcacacccgagggctcggctccaattccgccagtcaacaatgctctaaaggactctctttga

SEQ ID NO: 31685 - protein, 170 aa, Muscodor strobelii
  misc_feature: SGI Peptide ID NO. 570911
  misc_feature (1)..(170): NCBI GI: 85116548 Blast Desc: NCU02480 [Neurospora crassa OR74A] gi|28926876|gb|EAA35838.1| NCU02480 [Neurospora crassa OR74A] gi|38567109|emb|CAE76405.1| related to short-chain alcohol
  misc_feature (1)..(170): NCBI GI: 170940279 Blast Desc: protein product [Podospora anserina]
  misc_feature (1)..(170): NCBI GI: 39970291 Blast Desc: conserved [Magnaporthe grisea 70-15] gi|149209701|ref|XP_001522225.1| MGCH7_ch7g333 [Magnaporthe grisea 70-15] gi|86196288|gb|EAQ70926.1| MGCH7_ch7g333 grisea
  misc_feature (1)..(170): NCBI GI: 46105098 Blast Desc: FG00177.1 [Gibberella zeae PH-1]
  misc_feature (1)..(165): NCBI GI: 261189129 Blast Desc: short chain dehydrogenase [Ajellomyces dermatitidis SLH14081] gi|239591761|gb|EEQ74342.1| short chain dehydrogenase [Ajellomyces dermatitidis SLH14081]
  misc_feature (1)..(165): NCBI GI: 239614678 Blast Desc: short-chain dehydrogenase/reductase [Ajellomyces dermatitidis ER-3]
  misc_feature (1)..(170): NCBI GI: 256731964 Blast Desc: [Nectria haematococca mpVI 77-13-4]
  misc_feature (1)..(165): NCBI GI: 261353760 Blast Desc: cyclopentanol dehydrogenase [Verticillium albo-atrum VaMs.102]
  misc_feature (1)..(170): NCBI GI: 223975161 Blast Desc: [Zea mays]
  misc_feature (1)..(165): NCBI GI: 154277526 Blast Desc: conserved [Ajellomyces capsulatus NAm1] gi|150413189|gb|EDN08572.1| conserved [Ajellomyces capsulatus NAm1]
  misc_feature (2)..(147): SWISSPROT Homolog: EC 1.1.1.269 2-(S)-hydroxypropyl-CoM dehydrogenase
  misc_feature: Useful for introducing or modulating the production of volatile compounds
IWNLTMDINVKGVWYGCKHAVLSLRKHKKTKGSIINTASVVALVGSATPQLAYTASKGAVLALTRELSMVHAREGFRFNSLCPAPLNTPLLQDWLGDDIPKRMRREIHFPMGRFGEAIEQAQAVLFLASDEASFVNGHDMVVDGGMTKAYVTPEGSAPIPPVNNALKDSL

SEQ ID NO: 31686 - DNA, 4200 bp, Muscodor strobelii; identical to SEQ ID NO: 31683
  misc_feature: SGI EST ID NO. CUFF.75414.1
  misc_feature: Variant of the nucleotide sequence at SEQ ID NO 31684

SEQ ID NO: 31687 - DNA, 1434 bp, Muscodor strobelii
  misc_feature: SGI cDNA ID NO. 570912
  misc_feature: Reduced expression when VOC is produced
  misc_feature: Encodes the peptide sequence at SEQ ID NO 31688
atgactccccagtccgtcacggcggagaatatcgccgatgtcctttcacaggataacaaagtcaagttggctggcatcgatgtagatggcatgctacgcggcaaagtcgtgtccaagaagaagttcttgtccattgcgaaggagggattcggcttctgtagcgttatctttggctgggatatgcacgacatgctctacccacaagagctcaagattagcaacaaggagaacggttatcgtgatatgattgccatcccagatctgagcagctttcggcgcataccctgggaagacgatattcccttcgttctcgtgcacttttacgacccagactcgatggagcctatttgtgcagatcctcgcggccttctaaagactaccgttggcaagctccaagacaaaggctataatgctatggcaggagttgaattcgaattcttccaattcaaaacatccgagcccaatacttcagctgctgcctatatgaagagcaatgttgcgcatgacattcctgccttgaccgaaggcatgttcggctacagtatcacgcgcccaactctaaacaaagactactactacgatgtttacaactcctgcgagaaattcaagtgtgatattgaggggtggcacacagagagtggaccgggcgtatacgaggctgctttggagtttggccagatttctgagatggctgacagagcgaacctgttcaaatacaccgtcaggtccatagcaaacaattacgggatcacaccttgcttcatggccaagcccaagcaaggtttacctggctgcagcggtcacacacacgtgtccgtcgtcgacaaggacgggaagaacctgttcgttcgcgagaccaaggatgagaatgcgaaatatccagacattgcgactttgagcgatttaggtcggcatttccttgctggtcttcttgagggtctgccttatgtgatgcctatgctggctcccaacgtgaatagctacaagcgattggtggagaacttctgggcacctgtcacagtttcttggggtcttgagcatcgggctgcatctatccgaattattgcgccacctacgtcgaaaccaggtgctacacggttcgaggttcgcgttccaggagcggatatcaactctcactacgtcatggccgcaatcctagcgctcggatggcgaggagtcgagaagaaactcgagatacctgttccgccgctaggcaagggacaagatgtagggagtgctggtgacaagggcgagcgtctcgcgaagagcttgaaggaggccactgagaaattcatgagcaaagacagcatagcgcgcgaggtgtttggcgacgacttcgttgatcactttggcggttcaaggatgcatgaatgtcgtctctgggacgaggctgtcacggattgggagttgaagcgatatattgagacggtatag

SEQ ID NO: 31688 - protein, 477 aa, Muscodor strobelii
  misc_feature: SGI Peptide ID NO. 570912
  misc_feature (117)..(393): Pfam Id: PF00120 Pfam Desc: Glutamine synthetase, catalytic domain
  misc_feature (2)..(477): NCBI GI: 85116544 Blast Desc: NCU11239 [Neurospora crassa OR74A] gi|28926875|gb|EAA35837.1| NCU11239 [Neurospora crassa OR74A] gi|38567110|emb|CAE76406.1| glutamine synthetase [Neurospora
  misc_feature (2)..(477): NCBI GI: 261353759 Blast Desc: glutamine synthetase [Verticillium albo-atrum VaMs.102]
  misc_feature (1)..(477): NCBI GI: 256732375 Blast Desc: NECHADRAFT_104591 [Nectria haematococca mpVI 77-13-4]
  misc_feature (5)..(477): NCBI GI: 149209537 Blast Desc: MGCH7_ch7g251 [Magnaporthe grisea 70-15] gi|86196206|gb|EAQ70844.1| MGCH7_ch7g251 [Magnaporthe grisea 70-15]
  misc_feature (7)..(477): NCBI GI: 156055088 Blast Desc: SS1G_04895 [Sclerotinia sclerotiorum 1980] gi|154702680|gb|EDO02419.1| SS1G_04895 [Sclerotinia sclerotiorum 1980]
  misc_feature (6)..(477): NCBI GI: 116194015 Blast Desc: conserved [Chaetomium globosum CBS 148.51] gi|88182638|gb|EAQ90106.1| conserved [Chaetomium globosum CBS 148.51]
  misc_feature (4)..(477): NCBI GI: 169609496 Blast Desc: SNOG_07840 [Phaeosphaeria nodorum SN15] gi|111064186|gb|EAT85306.1| SNOG_07840 [Phaeosphaeria nodorum SN15]
  misc_feature (3)..(477): NCBI GI: 189198812 Blast Desc: glutamine synthetase [Pyrenophora tritici-repentis Pt-1C-BFP] gi|187982842|gb|EDU48330.1| glutamine synthetase [Pyrenophora tritici-repentis Pt-1C-BFP]
  misc_feature (2)..(475): NCBI GI: 46105100 Blast Desc: FG00178.1 [Gibberella zeae PH-1]
  misc_feature (6)..(477): NCBI GI: 170940280 Blast Desc: protein product [Podospora anserina]
  misc_feature (15)..(477): SWISSPROT Homolog: EC 6.3.1.2 Glutamate--ammonia ligase
  misc_feature: Useful for introducing or modulating the production of volatile compounds
MTPQSVTAENIADVLSQDNKVKLAGIDVDGMLRGKVVSKKKFLSIAKEGFGFCSVIFGWDMHDMLYPQELKISNKENGYRDMIAIPDLSSFRRIPWEDDIPFVLVHFYDPDSMEPICADPRGLLKTTVGKLQDKGYNAMAGVEFEFFQFKTSEPNTSAAAYMKSNVAHDIPALTEGMFGYSITRPTLNKDYYYDVYNSCEKFKCDIEGWHTESGPGVYEAALEFGQISEMADRANLFKYTVRSIANNYGITPCFMAKPKQGLPGCSGHTHVSVVDKDGKNLFVRETKDENAKYPDIATLSDLGRHFLAGLLEGLPYVMPMLAPNVNSYKRLVENFWAPVTVSWGLEHRAASIRIIAPPTSKPGATRFEVRVPGADINSHYVMAAILALGWRGVEKKLEIPVPPLGKGQDVGSAGDKGERLAKSLKEATEKFMSKDSIAREVFGDDFVDHFGGSRMHECRLWDEAVTDWELKRYIETV

SEQ ID NO: 31689 - DNA, 4658 bp, Muscodor strobelii
  misc_feature: SGI EST ID NO. CUFF.75081.1
  misc_feature: Variant of the nucleotide sequence at SEQ ID NO 31687
gatattttgttagcccatatgacgagaggcatcaaatggtttctatcacgagctgcagctcgtgtgttgctcaacctactctaactcttccgactcacgtcattcacttgtgttttcgtcaagccagggttcgagaatcctcccaacgcatcacagtaaagacagaaattacagaaaaggcgaggccgacaggtgacgggataataggcaatgaatcgcccccaagccattacctccggtcacatgctcggtcagcagcttgcatcgccgccggatttgtcctacatgttgacctatgctcaagcggtgaagtctcatcagagtatatgctagttcgcccgagtagtatgacggcgctgaaataatcttgtttgatagaaacacctccgtttgcgacgtaatgtgactgtaagatttatagtctggatcttccctagcgaccatcacagacaccgatgagtctcttcaacgcccatcatcacggcaataccggtgcgctggggtaaactcggggtgttacatcagcagctttacaacctcacttcatgtcgaacccggcgaaatcgctatcaaactagtgctcaccgagtatcacgagccttcctgctgagtaactctagaaccgttgaagcatgaagagcggtctgtgaaacctttaccgtttgcaacaacaatcgcggcggtcagtgtcagccgtaaatagacatcatgacgtcgtttgtgttccgccactctttatagaaagatgcatggctctagaagaggatttgatactacccatttacgcaggaaaatgcccgatagatacatgccgtgagacatgaccaggcatattcagagtcacgcggagcccgatattgtgagtcaagatgcctattgctggcatatgcatgagagacaagattacaatatcccatgaaaatgcagttatggtcgcgttaaaaggtgtgcctgattggattggagcgtgaccggtatgacgacgacgaggcaagtggcgggattctttccatttccatcttactcagtcgtgcagatgcgtaggagcccaatgggcggaaataagttgactatgcatagagaagaggagttaggaatcataggtatattcgtgggtattggtaacaatggttgagatgttgaaggtgacattggagcgaatcaggtctcttcagcctcgtggtatagataatttgccactcttgatgtatctttctatacagcttgaacggatgcaatccgctcggccgataccctgaagatggcaatgatggtacgtctgactgatgctcgcagcacacgccgttaataagctgcagacgtgtgcgcgggatgacaggaaccaggttgttgggtgctgtcagctcatggtatcagtgtctatctctatcttcaagcagcctattatcagcgaaccgtcagccgcgatgctgaatctcgcttgcgccctcgaaccgcctgagcagacatgctcgatagggcagataccttaggtaggcagggggagctaaggttagcctgaccccacgtgctggcggggctcttgtactttcctattcgacacacctcagcttcttttagcaccagcggtgcggttccaggtagctgtttcttggttttgcgaccagcccgcgaggtaatgacgcacgttcatcccgccttttgttacgcgcagcgggcttgtcccaccatcgctatcatgaaccaccagataatcaacctcgctcctttctgccgtcacagctatcgtatctgcactcgaccaatttaattctcaccgcaactgtgtcaatagcttggaagcgactgcaacgtttcgaccgcgagtaactttgatcttgactacatgtattaaagagttcgaggtctttatctttgtcgagccattgacccatcatccgctcagcttcgcaaatacttcgctagtgtctcgtcgtaagagctacttatccctcgtctcctcaagttagcgagcccgtcgtttttgcttccttaccagatccttctatcgtgaatagactgtgttatagagttctttgctttgtatagagcttacagtcaaactcaatctgaagctctcatatcctgccaacatgactccccagtccgtcacggcggagaatatcgccgatgtcctttcacaggataacaaagtcaagttggctggcatcgatgtagatggcatgctacgcggcaaagtcgtgtccaagaagaagttcttgtccattgcgaaggagggattcggcttctgtagcgttatctttggctgggatatgcacgacatgctctacccacaagagctcaagattagcaacaaggagaacggttatcgtgatatgattgccatcccagatctgagcagctttcggcgcataccctgggaagacgatattcccttcgttctcgtgcacttttacgacccagactcgatggagcctatttgtgcagatcctcgcggccttctaaagactaccgttggcaagctccaagacaaaggctataatgctatggcaggagttgaattcgaattcttccaattcaaaacatccgagcccaatacttcagctgctgcctatatgaagagcaatgttgcgcatgacattcctgccttgaccgaaggcatgttcggctacagtatcacgcgcccaactctaaacaaagactactactacgatgtttacaactcctgcgagaaattcaagtgtgatattgaggggtggcacacagagagtggaccgggcgtatacgaggctgctttggagtttggccagatttctgagatggctgacagagcgaacctgttcaaatacaccgtcaggtccatagcaaacaattacgggatcacaccttgcttcatggccaagcccaagcaaggtttacctggctgcagcggtcacacacacgtgtccgtcgtcgacaaggacgggaagaacctgttcgttcgcgagaccaaggatgagaatgcgaaatatccagacattgcgactttgagcgatttaggtcggcatttccttgctggtcttcttgagggtctgccttatgtgatgcctatgctggctcccaacgtgaatagctacaagcgattggtggagaacttctgggcacctgtcacagtttcttggggtcttgagcatcgggctgcatctatccgaattattgcgccacctacgtcgaaaccaggtgctacacggttcgaggttcgcgttccaggagcggatatcaactctcactacgtcatggccgcaatcctagcgctcggatggcgaggagtcgagaagaaactcgagatacctgttccgccgctaggcaagggacaagatgtagggagtgctggtgacaagggcgagcgtctcgcgaagagcttgaaggaggccactgagaaattcatgagcaaagacagcatagcgcgcgaggtgtttggcgacgacttcgttgatcactttggcggttcaaggatgcatgaatgtcgtctctgggacgaggctgtcacggattgggagttgaagcgatatattgagacggtatagatgatacaggataatgaggtttcacgaggacgatttctgaataggttcttagggggctttggagggccacgtgctacgtactacggtggtgtcgtgtctatatacccacacacgcgattatgtgagacgtttatcaaattcaaaattttctgtgaacaattcgcgatattgcgggtcgtgtgctaaccaactttctctgcttgaaactactctctaaaggctggcgttccgggtggcgatcagaacggaaccgctaacgcttgtcctcgtcttcgtgctatattttctcccgccgacatcagtgctaatgatcgttacgcattgcagtggtatcttaacttcacattcaatagcaattatttgccataggttgcaaaacctactcgaggttttcagaagagtgcgacgctgtcatcctcagactatctagacgtgtttgagcggccaggctctcaggatgagcaaatctttactaaggcaagtttgcagagcaacaaagtcattggataccgtcaaggagtagagaagctgggcagggtaaccggttccttataagatcgtgatgtacacgacagaactaaagaatgctacaagaatgacgggctctatctctttgagcatgacctttacgacagtttgagtattatgtccgcttgatatcaacttgatcttgaaacgaggatattggtctattaatatccatccttctcttgtgccacactactgcgttcttctatagtgaatatctaaagcccttattatctatctcagtttgatcgtgcatgcctgcagtaacagcagctttctcattaatcggtcctgcggcatcacgagccctgttcactgaccacatgtaggcgtatagtatcaagacacagaccaactttaccgaatatcctaccaacatggcgatgtatgcgctgtggtaatacgctgcgtgacagttagagtatttttcgtattcctaaaatcaaaaaggacagaatggcgagtggaataatgaagcagggagataatgtaacaggattccccgttgactttgaagggcacagatgaatacccgtggattaattcatggatggtacaggattgggcatctagagagggaactgagaggaacacaacattgag

SEQ ID NO: 31690 - DNA, 1518 bp, Muscodor strobelii
  misc_feature: SGI cDNA ID NO. 570913
  misc_feature: Reduced expression when VOC is produced
  misc_feature: Encodes the peptide sequence at SEQ ID NO 31691
atggctccgaccgacgcggtggacgttgagacggcgaatgcctaccgatcctccgacgatattaccgctgtttccgaacgggatttagacgacaactacgcagtctttaaggaaactgaggagcttgttgcgaccgacaccgaagtaaaaaaggtcatacgcaagatcgattatcgagttgtctctattcttttcgtgatatactttctgcaatacttagacaagaatgcaatcaactttgccaatacgttcggtctttccgatggcacgaatcttcatgggcaagacttctcatggctcagttccatcttttattttggctatctcggcagtcagtttccgtctgggtatttgatgcaaagattcccagtgggacgctttgtttctgttaccacaattatttggggcatcatcgtcttgaccacaccagcatgcagatcatttggcgggatcgctaccaaccgcttctttttgggtctgacggagggagtggttaatcccgcattcgtcctgattatgtcaatatggtatactactgatgagcaaccactacgtctcgaagcatactactgcactaatggtcttgccacaatgtttggtggtctaatcgggtatgccgttggtcatatcaacactggtttaccaaagtggcaatacgtcttcattatcttcggctctctcagtctggcttccggcattgtcagcctcatattcttaccggacgttccagccactgcgcggtttttgacaccgaaggaacgtactatagctacggatcgtgtaagtcgcaacaggtcgggagtgaagaaccaccacttcaagaaagaccaggcaattcaatgtatcaaggaccctaaaacatggatcctattcgttatggccgttggcgctcaggtccctaactcggctatcacgtctttcactagcttgatcatcaagagctttgggttcgatacccttggcacgcaatacttgcagatccctggtggtgctgtacagttcttctctcttatcctaggtggatggttgtgcaccaagtggccaaggggctctcggtgtccaactatgattgtggcaaacactatctgcatcattggcgctgcattgcttgtgaagctaccggatagcaacaagtggggtcgtcttgttgccctttggctctgcttcttccagggcctcgggttcagcatgtcgttgacgatggtctcgtcgaacattgctggctcgacgaagaagcaactgactgctgctatcctcttcacaggatattgtgttggaaatatcattggaccgcagactttcctcgacagggaaaagccgtattaccacagcgcatacatcgccatgttggtaggatattcggtaaagttggtctgtgtcttgatactatacgcctacatgtggtcagtgaacagggctcgtgatgccgcaggaccgattaatgagaaagctgctgttactgcaggcatgcacgatcaaactgagatagataataagggctttagatattcactatag

SEQ ID NO: 31691 - protein, 505 aa, Muscodor strobelii
  misc_feature: SGI Peptide ID NO. 570913
  misc_feature (64)..(431): Pfam Id: PF07690 Pfam Desc: Major Facilitator Superfamily
  misc_feature (5)..(505): NCBI GI: 154296608 Blast Desc: BC1G_12712 [Botryotinia fuckeliana B05.10] gi|150843295|gb|EDN18488.1| BC1G_12712 [Botryotinia fuckeliana B05.10]
  misc_feature (19)..(505): NCBI GI: 156058986 Blast Desc: SS1G_03505 [Sclerotinia sclerotiorum 1980] gi|154701292|gb|EDO01031.1| SS1G_03505 [Sclerotinia sclerotiorum 1980]
  misc_feature (8)..(505): NCBI GI: 169786341 Blast Desc: [Aspergillus oryzae RIB40] gi|83776379|dbj|BAE66498.1| protein product [Aspergillus oryzae]
  misc_feature (8)..(505): NCBI GI: 238507341 Blast Desc: MFS transporter, [Aspergillus flavus NRRL3357] gi|220689585|gb|EED45936.1| MFS transporter, [Aspergillus flavus NRRL3357]
  misc_feature (13)..(505): NCBI GI: 115401858 Blast Desc: [Aspergillus terreus NIH2624] gi|114190458|gb|EAU32158.1| [Aspergillus terreus NIH2624]
  misc_feature (29)..(505): NCBI GI: 169603678 Blast Desc: SNOG_04847 [Phaeosphaeria nodorum SN15] gi|111066118|gb|EAT87238.1| SNOG_04847 [Phaeosphaeria nodorum SN15]
  misc_feature (22)..(490): NCBI GI: 255953755 Blast Desc: Pc21g05850 [Penicillium chrysogenum Wisconsin 54-1255] gi|211589341|emb|CAP95482.1| Pc21g05850 [Penicillium chrysogenum Wisconsin 54-1255]
  misc_feature (1)..(475): NCBI GI: 159127107 Blast Desc: MFS transporter, [Aspergillus fumigatus A1163]
  misc_feature (1)..(448): NCBI GI: 119483484 Blast Desc: allantoate permease [Neosartorya fischeri NRRL 181] gi|119409801|gb|EAW19748.1| allantoate permease [Neosartorya fischeri NRRL 181]
  misc_feature (1)..(448): NCBI GI: 70998731 Blast Desc: MFS transporter [Aspergillus fumigatus Af293] gi|66851724|gb|EAL92049.1| MFS transporter, [Aspergillus fumigatus Af293]
  misc_feature: Useful for introducing or modulating the production of volatile compounds
MAPTDAVDVETANAYRSSDDITAVSERDLDDNYAVFKETEELVATDTEVKKVIRKIDYRVVSILFVIYFLQYLDKNAINFANTFGLSDGTNLHGQDFSWLSSIFYFGYLGSQFPSGYLMQRFPVGRFVSVTTIIWGIIVLTTPACRSFGGIATNRFFLGLTEGVVNPAFVLIMSIWYTTDEQPLRLEAYYCTNGLATMFGGLIGYAVGHINTGLPKWQYVFIIFGSLSLASGIVSLIFLPDVPATARFLTPKERTIATDRVSRNRSGVKNHHFKKDQAIQCIKDPKTWILFVMAVGAQVPNSAITSFTSLIIKSFGFDTLGTQYLQIPGGAVQFFSLILGGWLCTKWPRGSRCPTMIVANTICIIGAALLVKLPDSNKWGRLVALWLCFFQGLGFSMSLTMVSSNIAGSTKKQLTAAILFTGYCVGNIIGPQTFLDREKPYYHSAYIAMLVGYSVKLVCVLILYAYMWSVNRARDAAGPINEKAAVTAGMHDQTEIDNKGFRYSL

SEQ ID NO: 31692 - DNA, 6737 bp, Muscodor strobelii
  misc_feature: SGI EST ID NO. CUFF.75082.2
  misc_feature: Variant of the nucleotide sequence at SEQ ID NO 31690
ccaggatgtaggattctccaagcttctccaaatattggaataagagagttgcaataaagtctcaccagcgaatagaagacttccagtgttgaaagaactccaactatgccatgaaatccgtcatatcccccacaacaaatcctggttcccgcataccatcgcgtcgcttgctacctagttgctgattctctcgctacaccattatcctacccacgtgcgggactgatcacctcaacgtccctttcgatgatgccatttgcttctcctcatctctttggtcaaatttctatgttcgtacatcgatgacacccaatattgcagaattctctcggtctatctcatccgatcgggctactaccacgcgaggaacatggcctggcctcagtataaccaagttcatggagtcgactagctagctaggcacgatgatgtgctcaagctctctttcctcgcaaggagatccgctatgcactagaaacaattggtaccgagatgcggtaagcaacgtggtaaatatcaagtatagcgcagatgaaatttaatgttttgtgaactcctacttctcttgagcctcaaaacaacttgggtcaatcgtgtgattctacaatcgtttgttttcgacttcagctcgggattcgtgactattcgcgctagcgacaagatggctccgaccgacgcggtggacgttgagacggcgaatgcctaccgatcctccgacgatattaccgctgtttccgaacgggatttagacgacaactacgcagtctttaaggaaactgaggagcttgttgcgaccgacaccgaagtaaaaaaggtcatacgcaagatcgattatcgagttgtctctattcttttcgtgatatactttctgcaatacttagacaagaatgcaatcaactttgccaatacgttcggtctttccgatggcacgaatcttcatgggcaagacttctcatggctcagtatgtgaatggctatctgtaaccattcattaagctgaccatgactaggttccatcttttattttggctatctcggcagtcagtttccgtctgggtatttgatgcaaagattcccagtgggacgctttgtttctgttaccacaattatttggggcatcatcgtcttgaccacaccagcatgcagatcatttggcgggatcgctaccaaccgcttctttttgggtctgacggagggagtggttaatcccgcattcgtcctgattatgtcaatatggtatactactgatgagcaaccactacgtctcgaagcatactactgcactaatggtcttgccacaatgtttggtggtctaatcgggtatgccgttggtcatatcaacactggtttaccaaagtggcaatacgtcttcattatcttcggctctctcagtctggcttccggcattgtcagcctcatattcttaccggacgttccagccactgcgcggtttttgacaccgaaggaacgtactatagctacggatcgtgtaagtcgcaacaggtcgggagtgaagaaccaccacttcaagaaagaccaggcaattcaatgtatcaaggaccctaaaacatggatcctattcgttatggccgttggcgctcaggtccctaactcggctatcacgtctttcactagcttgatcatcaagagctttgggttcgatacccttggcacgcaatacttgcagatccctggtggtgctgtacagttcttctctcttatcctaggtggatggttgtgcaccaagtggccaaggggctctcggtgtccaactatgattgtggcaaacactatctgcatcattggcgctgcattgcttgtgaagctaccggatagcaacaaggtatgggtctacccctttcccgcgcgtttcgccactgcctccttgtcatcggcatgaaccgtaaatcctagcccatacgcaacgttactcggcatgaacacttcactgatactgtgttcatcatagtggggtcgtcttgttgccctttggctctgcttcttccagggcctcgggttcagcatgtcgttgacgatggtctcgtcgaacattgctggctcgacgaagaagcaactgactgctgctatcctcttcacaggatattgtgttggaaatatcattggaccgcagactttcctcgacagggaaaagccgtattaccacagcgcatacatcgccatgttggtaggatattcggtaaagttggtctgtgtcttgatactatacgcctacatgtggtcagtgaacagggctcgtgatgccgcaggaccgattaatgagaaagctgctgttactgcaggcatgcacgatcaaactgagatagataataagggctttagatattcactatagaagaacgcagtagtgtggcacaagagaaggatggatattaatagaccaatatcctcgtttcaagatcaagttgatatcaagcggacataatactcaaactgtcgtaaaggtcatgctcaaagagatagagcccgtcattcttgtagcattctttagttctgtcgtgtacatcacgatcttataaggaaccggttaccctgcccagcttctctactccttgacggtatccaatgactttgttgctctgcaaacttgccttagtaaagatttgctcatcctgagagcctggccgctcaaacacgtctagatagtctgaggatgacagcgtcgcactcttctgaaaacctcgagtaggttttgcaacctatggcaaataattgctattgaatgtgaagttaagataccactgcaatgcgtaacgatcattagcactgatgtcggcgggagaaaatatagcacgaagacgaggacaagcgttagcggttccgttctgatcgccacccggaacgccagcctttagagagtagtttcaagcagagaaagttggttagcacacgacccgcaatatcgcgaattgttcacagaaaattttgaatttgataaacgtctcacataatcgcgtgtgtgggtatatagacacgacaccaccgtagtacgtagcacgtggccctccaaagccccctaagaacctattcagaaatcgtcctcgtgaaacctcattatcctgtatcatctataccgtctcaatatatcgcttcaactcccaatccgtgacagcctcgtcccagagacgacattcatgcatccttgaaccgccaaagtgatcaacgaagtcgtcgccaaacacctcgcgcgctatgctgtctttgctcatgaatttctcagtggcctccttcaagctcttcgcgagacgctcgcccttgtcaccagcactccctacatcttgtcccttgcctagcggcggaacaggtatctcgagtttcttctcgactcctcgccatccgagcgctaggattgcggccatgacgtagtgagagttgatatccgctcctggaacgcgaacctcgaaccgtgtagcacctggtttcgacgtaggtggcgcaataattcggatagatgcagcccgatgctcaagaccccaagaaactgtgacaggtgcccagaagttctccaccaatcgcttgtagctattcacgttgggagccagcataggcatcacataaggcagaccctcaagaagaccagcaaggaaatgccgacctaaatcgctcaaagtcgcaatgtctggatatttcgcattctcatccttggtctcgcgaacgaacaggttcttcccgtccttgtcgacgacggacacgtgtgtgtgaccgctgcagccaggtaaaccttgcttgggcttggccatgaagcaaggtgtgatcccgtaattgtttgctatggacctgacggtgtatttgaacaggttcgctctgtcagccatctcagaaatctggccaaactccaaagcagcctcgtatacgcccggtccactctctgtgtgccacccctcaatatcacacttgaatttctcgcaggagttgtaaacatcgtagtagtagtctttgtttagagttgggcgcgtgatactgtagccgaacatgccttcggtcaaggcaggaatgtcatgcgcaacattgctcttcatataggcagcagctgaagtattgggctcggatgttttgaattggaagaattcgaattcaactgttaaagggagatagcgaattagcaccgggactctggtagtgcgcataaggaactgggccacatacctcctgccatagcattatagcctttgtcttggagcttgccaacggtagtctttagaaggccgcgaggatctgcacaaataggctccatcgagtctgggtcgtaaaagtgcacgagaacgaagggaatatcgtcttcccagggtatgcgccgaaagctgctcagatctgggatggcaatcatatcacgataaccgttctccttgttgctaatcttgagctcttgtgggtagagcatgtcgtgcatatcccagccaaagataacgctacagaagccgaatccctccttcgcaatggacaagaacttcttcttggacacgactttgccgcgtagcatgccatctacatcgatgccagccaacttgactttgttatcctgtgaaaggacatcggcgatattctccgccgtgacggactggggagtcatgttggcaggatatgagagcttcagattgagtttgactgtaagctctatacaaagcaaagaactctataacacagtctattcacgatagaaggatctggtaaggaagcaaaaacgacgggctcgctaacttgaggagacgagggataagtagctcttacgacgagacactagcgaagtatttgcgaagctgagcggatgatgggtcaatggctcgacaaagataaagacctcgaactctttaatacatgtagtcaagatcaaagttactcgcggtcgaaacgttgcagtcgcttccaagctattgacacagttgcggtgagaattaaattggtcgagtgcagatacgatagctgtgacggcagaaaggagcgaggttgattatctggtggttcatgatagcgatggtgggacaagcccgctgcgcgtaacaaaaggcgggatgaacgtgcgtcattacctcgcgggctggtcgcaaaaccaagaaacagctacctggaaccgcaccgctggtgctaaaagaagctgaggtgtgtcgaataggaaagtacaagagccccgccagcacgtggggtcaggctaaccttagctccccctgcctacctaaggtatctgccctatcgagcatgtctgctcaggcggttcgagggcgcaagcgagattcagcatcgcggctgacggttcgctgataataggctgcttgaagatagagatagacactgataccatgagctgacagcacccaacaacctggttcctgtcatcccgcgcacacgtctgcagcttattaacggcgtgtgctgcgagcatcagtcagacgtaccatcattgccatcttcagggtatcggccgagcggattgcatccgttcaagctgtatagaaagatacatcaagagtggcaaattatctataccacgaggctgaagagacctgattcgctccaatgtcaccttcaacatctcaaccattgttaccaatacccacgaatatacctatgattcctaactcctcttctctatgcatagtcaacttatttccgcccattgggctcctacgcatctgcacgactgagtaagatggaaatggaaagaatcccgccacttgcctcgtcgtcgtcataccggtcacgctccaatccaatcaggcacaccttttaacgcgaccataactgcattttcatgggatattgtaatcttgtctctcatgcatatgccagcaataggcatcttgactcacaatatcgggctccgcgtgactctgaatatgcctggtcatgtctcacggcatgtatctatcgggcattttcctgcgtaaatgggtagtatcaaatcctcttctagagccatgcatctttctataaagagtggcggaacacaaacgacgtcatgatgtctatttacggctgacactgaccgccgcgattgttgttgcaaacggtaaaggtttcacagaccgctcttcatgcttcaacggttctagagttactcagcaggaaggctcgtgatactcggtgagcactagtttgatagcgatttcgccgggttcgacatgaagtgaggttgtaaagctgctgatgtaacaccccgagtttaccccagcgcaccggtattgccgtgatgatgggcgttgaagagactcatcggtgtctgtgatggtcgctagggaagatccagactataaatcttacagtcacattacgtcgcaaacggaggtgtttctatcaaacaagattatttcagcgccgtcatactactcgggcgaactagcatatactctgatgagacttcaccgcttgagcataggtcaacatgtaggacactgtgattgagcgattagtgtcgaatcataatagacaatcagtgctggaaacgcacaatccggcggcgatgcaagctgctgaccgagcatgtgaccggaggtaatggcttgggggcgattcattgcctattatcccgtcacctgtcggcctcgccttttctgtaatttctgtctttactgtgatgcgttgggaggattctcgaaccctggcttgacgaaaacacaagtgaatgacgtgagtcggaagagttagagtaggttgagcaacacacgagctgcagctcgtgatagaaaccatttgatgcctctcgtcatatgggctaacaaaatatc

SEQ ID NO: 31693 - DNA, 537 bp, Muscodor strobelii
  misc_feature: SGI cDNA ID NO. 570914
  misc_feature: Encodes the peptide sequence at SEQ ID NO 31694
atggcaggaggatcgagttcccgacagggtagacgaattggaaagggacaaggctctatcaaacagatgattgagtcactacgaactcacagagtaaacactctcacagagctctgtcgtattgagcgagtcgcagcgagttgtgaagacgaagaagataccctggcttttcaagagccaatgacagcagcttgggagttctatgtcaacagcaaccagcttctgactgagctgaggggattaagtcgtaactacccagtatcaggagcactagtagaggaagcactgagtctcgtgcggtccgacccgaactcgaaccggagttggaacttggcatggttatgcttggtcaaaatccgcgacgagggtttgatctacacttgcgcgaggaacgaagcctggaaacaagaaatgtggggtggtagagatccatctcccgaagaagctgatcagctcgctcaatgcttccagtacgagtggtcgcaagccgtcgacaagatgctgcgtcattggccagcttctcctacatggtactag

SEQ ID NO: 31694 - protein, 178 aa, Muscodor strobelii
  misc_feature: SGI Peptide ID NO. 570914
  misc_feature (5)..(178): NCBI GI: 256732408 Blast Desc: NECHADRAFT_80940 [Nectria haematococca mpVI 77-13-4]
  misc_feature (6)..(178): NCBI GI: 170940391 Blast Desc: protein product [Podospora anserina]
  misc_feature (6)..(177): NCBI GI: 256721528 Blast Desc: NECHADRAFT_79784 [Nectria haematococca mpVI 77-13-4]
  misc_feature (6)..(176): NCBI GI: 154302328 Blast Desc: [Botryotinia fuckeliana B05.10] gi|150855436|gb|EDN30628.1| [Botryotinia fuckeliana B05.10]
  misc_feature (15)..(122): NCBI GI: 261353708 Blast Desc: conserved [Verticillium albo-atrum VaMs.102]
  misc_feature (17)..(175): NCBI GI: 240280411 Blast Desc: conserved [Ajellomyces capsulatus H143]
  misc_feature (17)..(175): NCBI GI: 154277595 Blast Desc: [Ajellomyces capsulatus NAm1] gi|150413222|gb|EDN08605.1| [Ajellomyces capsulatus NAm1]
  misc_feature (17)..(175): NCBI GI: 225561033 Blast Desc: conserved [Ajellomyces capsulatus G186AR]
  misc_feature (21)..(175): NCBI GI: 238840629 Blast Desc: conserved [Microsporum canis CBS 113480]
  misc_feature (17)..(175): NCBI GI: 239614637 Blast Desc: conserved [Ajellomyces dermatitidis ER-3]
MAGGSSSRQGRRIGKGQGSIKQMIESLRTHRVNTLTELCRIERVAASCEDEEDTLAFQEPMTAAWEFYVNSNQLLTELRGLSRNYPVSGALVEEALSLVRSDPNSNRSWNLAWLCLVKIRDEGLIYTCARNEAWKQEMWGGRDPSPEEADQLAQCFQYEWSQAVDKMLRHWPASPTWY

SEQ ID NO: 31695 - DNA, 2009 bp, Muscodor strobelii
  misc_feature: SGI EST ID NO. CUFF.75030.1
  misc_feature: Variant of the nucleotide sequence at SEQ ID NO 31693
cggctatgagtttcaaggataagtatccattatttctcggagtaggagtcatagtctagttcagttctagtctataacccggccgttcactgtcagcaccagccactaaacgtcgtcgaccaagatgacagatgagccatgccaattcagtagtgcacttaatcaaccaaaataacacaatactagcattcgtatcctctaccttgtgcagctgagccatgttctctgttatttgataaccacatgatgtccgtatactcacgggcctcgctacttgaactccgtgcgaataggactctcaaggcttctatcctgctggtgttattaatcatgggttcccttttctctctgagttgccacatctgggttgcatattgtatatcaacgttactactaagaagtcacagatgcatgcagtcgagttgtgtcataagtaaacccacacatcgcgttgctggcaagtttctactggcgatccagtgcttgaagtattctgagaattaccttatggcagatgactagaagctattcggagtcccctgtttatctttaggtcttccggatttcacatctcacctgtggcgttcatgcagactcggagtctccaaaagatatcatttcgaggcggtatataaaatcgtttcgtctttgcggccttgcaagagaatgtggcaaggaaggaaatatcattcaagtggattccgattctgtcgacagcgtttaaacacgggaacctactattcagtcactcggcagcggatagccaacatacgacagcgaaagtcgttcagcaacacttcggtggatcacatttatgtcaggaaacgggccagcatcacaaaataccgacaacatggcaggaggatcgagttcccgacagggtagacgaattggaaagggacaagtgagttttgttccgttttcgagggctttgatattaactcagattgccgcgaatttgccattttgacattgcgcaccgaaactaactagctatcaccagggctctatcaaacagatgattgagtcactacgaactcacagagtaaacactctcacagagctctgtcgtattgagcgagtcgcagcgagttgtgaagacgaagaagataccctggcttttcaagagccaatgacagcagcttgggagttctatgtcaacagcaaccagcttctgactgagctgaggggattaagtcgtaactacccagtatcaggagcactagtagaggaagcactgagtctcgtgcggtccgacccgaactcgaaccggagttggaacttggcatggttatgcttggtcaaaatccgcgacgagggtttgatctacacttgcgcgaggaacgaagcctggaaacaagaaatgtggggtggtagagatccatctcccgaagaagctgatcagctcgctcaatgcttccagtacgagtggtcgcaagccgtcgacaagatgctgcgtcattggccagcttctcctacatggtactagtcttggcattatgccatgcactatttctgagtccgaaactccatttagtgaccgaatatgtatataaggattgtggcgcaaggggggctgaaagattctttttcggcctttgaggtcggactttgacagacgaggatagatggcggaccgaccttcggcaacgcttcatggatttatgataagatatgggtgtttatcaaggcgattgtaattcatctgtttggatgaaaatgttagattggaaggcggcctggtatgcttgggtgtagcattacatgtatatcactgtagaaattctgctggaaaggatctcacatagaataactcaacttttattcgcccactagttgttttacggagtgacttcgaatgtaagagactcaagcagccgcacgtgaagtattttgggattgttgttgtagtgagtacgttgtcccccgtcagatggtgtgggagctgtttttggagtcacctggagcatcgcccatcaaaatgtatatcttaccattgcataacctcg

SEQ ID NO: 31696 - DNA, 1131 bp, Muscodor strobelii
  misc_feature: SGI cDNA ID NO. 570915
  misc_feature: Elevated expression when VOC is produced
  misc_feature: Encodes the peptide sequence at SEQ ID NO 31697
atgactaagaagaacaagaagaagaacagaaacaagaacggaaatgagggcgccgatgctcgtctccgctttggtgagatgagtccagtagcaaacaccaggcctgagccccgtaatgctgctgccgcgcacacctcctcccccatggcacagacaacagtgttgacacgcagcttccacgacacaaccccaaatcccttgagttttggtgacatgagccctgtgtcaacacacgacaacaacgattctgctgctgatcctgaggctgcatctccaagcatggctcctcgaggcaaagcccgcatcagcccgccggtcgcgatgacacccgagatcgcggctcgcatcgaggcaatgactgatctcttctcgcctgagcagtggcacctccttcccaacctcgatgatccgttcctcgtgcagaaaattctgcgccaccctgtcggccctgctggcagttgcagtgctgccttctcagctctcccgcagcatgatcccgagggcttcaccaccgacattggccaatttggtatcgtcctcattgagagcccccagaagcttgctattcgtatggagcactgtaccatgagtaagctcaactttgtccgacaggtctgggtttccaagtatctgactcccttccacccatgcactatcacgttcgacctgcctgacgctaccggattctgcaatgtcgtcatgcagaaagttaatcctcctcaatttgaccgcgagatacaagtcttagctggaaacatgaatggactgtcggtcgtcaccgaggaagatgagaacggcggaaaccctgccattcccgccaacaacacctccctgatcccgaaggccaataacgtcaacgacgatgagtttgtcgacaacaatgacgtgatgacttggccctgccgctccccggtccctgaggacgaggaagatgaagatgacgaagaccaggagtcggatggtgaggacgagtctgtcaaggctgtacgacgacgcgctggacgccgtcgcgccaattctcttcccaatgagaacgctctgggtggtatgcttgagagcgacatgtccaacgatgatcacgatgatgttgagacggacgccatgtctactgactatatgcaactgagatga

SEQ ID NO: 31697 - protein, 376 aa, Muscodor strobelii
  misc_feature: SGI Peptide ID NO. 570915
  misc_feature: Useful for introducing or modulating the production of volatile compounds
MTKKNKKKNRNKNGNEGADARLRFGEMSPVANTRPEPRNAAAAHTSSPMAQTTVLTRSFHDTTPNPLSFGDMSPVSTHDNNDSAADPEAASPSMAPRGKARISPPVAMTPEIAARIEAMTDLFSPEQWHLLPNLDDPFLVQKILRHPVGPAGSCSAAFSALPQHDPEGFTTDIGQFGIVLIESPQKLAIRMEHCTMSKLNFVRQVWVSKYLTPFHPCTITFDLPDATGFCNVVMQKVNPPQFDREIQVLAGNMNGLSVVTEEDENGGNPAIPANNTSLIPKANNVNDDEFVDNNDVMTWPCRSPVPEDEEDEDDEDQESDGEDESVKAVRRRAGRRRANSLPNENALGGMLESDMSNDDHDDVETDAMSTDYMQLR

SEQ ID NO: 31698 - DNA, 945 bp, Muscodor strobelii
  misc_feature: SGI cDNA ID NO. 570916
  misc_feature: Encodes the peptide sequence at SEQ ID NO 31699
atgccgaacaacagagaacaacccattcaccatggctcactcgagcatctccttccaccgagctggaaagcccagatcactgcatggctcgcggaggacacgccgtcttatgattacgccggttttgttgtaggtgatcatcaacgaaccgctacattatggggcaagagtgcaggcatcatagcaggcatccccttcttcactgagatcttcaagcagtgcggctgcactgttgagtggcacgctgccgaggggagctatattgagcggccgaaggatgggtcaggtaaattcaaggtcgccaccgtcacaggtcctgcacgtggtctgcttcttggcgagcgcgtgggtttgaacttactagcaaggtgttcgggtattgctacggttagtcggaacctggtactcagtttgcgcagcgcgggatatcgcgggatcctagctggcacgcggaagacgacgccgggcttccgcattatcgaaaagtacggaatgctcgttggtggcgccgacacacatcgtatggatttgagttccatgatcatgctcaaggacaatcacgtgtggagtcgtggcagtatcacggaggcagtacgcgcggcaaagatggttggtggattcgcactcaaggtcgaagtcgaggtgcaaaatgaggcggaggcagacgaagccattgaggctggcgctgatgtcatcatgcttgacaattttacgggcgacggtgtcaagattgcagctaagagtttacgagaaaagtggaaaggtaaacgagagttcttgctcgaagtgagcggggggttgcgcgaggataacgtgttcgactatgccaacaatgacatcgacatcatctcgacaagctccattcaccagggtactccccacgtggacttctccctgaagatcaatcttgcgccgaaaactgagggtgaggacacggcggtgtga

SEQ ID NO: 31699 - protein, 314 aa, Muscodor strobelii
  misc_feature: SGI Peptide ID NO. 570916
  misc_feature (127)..(300): Pfam Id: PF01729 Pfam Desc: Quinolinate phosphoribosyl transferase, C-terminal domain
  misc_feature (34)..(125): Pfam Id: PF02749 Pfam Desc: Quinolinate phosphoribosyl transferase, N-terminal domain
  misc_feature (8)..(313): NCBI GI: 171683913 Blast Desc: protein product [Podospora anserina] gi|170941917|emb|CAP67569.1| protein product [Podospora anserina]
  misc_feature (9)..(302): NCBI GI: 156056376 Blast Desc: SS1G_05542 [Sclerotinia sclerotiorum 1980] gi|154703324|gb|EDO03063.1| SS1G_05542 [Sclerotinia sclerotiorum 1980]
  misc_feature (6)..(307): NCBI GI: 16945374 Blast Desc: nicotinate-nucleotide pyrophosphorylase (carboxylating) [Neurospora crassa]
  misc_feature (9)..(307): NCBI GI: 164427560 Blast Desc: NCU02998 [Neurospora crassa OR74A] gi|157071794|gb|EAA36148.2| NCU02998 [Neurospora crassa OR74A]
  misc_feature (7)..(301): NCBI GI: 256727059 Blast Desc: [Nectria haematococca mpVI 77-13-4]
  misc_feature (13)..(301): NCBI GI: 46136067 Blast Desc: FG09549.1 [Gibberella zeae PH-1]
  misc_feature (6)..(303): NCBI GI: 116193009 Blast Desc: CHGG_06222 [Chaetomium globosum CBS 148.51] gi|88182135|gb|EAQ89603.1| CHGG_06222 [Chaetomium globosum CBS 148.51]
  misc_feature (9)..(302): NCBI GI: 154302740 Blast Desc: BC1G_09485 [Botryotinia fuckeliana B05.10] gi|150855232|gb|EDN30424.1| BC1G_09485 [Botryotinia fuckeliana B05.10]
  misc_feature (12)..(302): NCBI GI: 149210685 Blast Desc: MGCH7_ch7g815 [Magnaporthe grisea 70-15] gi|86196770|gb|EAQ71408.1| MGCH7_ch7g815 [Magnaporthe grisea 70-15]
  misc_feature (11)..(310): NCBI GI: 189194731 Blast Desc: nicotinate-nucleotide pyrophosphorylase [Pyrenophora tritici-repentis Pt-1C-BFP] gi|187979268|gb|EDU45894.1| nicotinate-nucleotide pyrophosphorylase [Pyrenophora Pt-1C-BFP]
  misc_feature (15)..(301): SWISSPROT Homolog: EC 2.4.2.19 Nicotinate-nucleotide diphosphorylase (carboxylating)
MPNNREQPIHHGSLEHLLPPSWKAQITAWLAEDTPSYDYAGFVVGDHQRTATLWGKSAGIIAGIPFFTEIFKQCGCTVEWHAAEGSYIERPKDGSGKFKVATVTGPARGLLLGERVGLNLLARCSGIATVSRNLVLSLRSAGYRGILAGTRKTTPGFRIIEKYGMLVGGADTHRMDLSSMIMLKDNHVWSRGSITEAVRAAKMVGGFALKVEVEVQNEAEADEAIEAGADVIMLDNFTGDGVKIAAKSLREKWKGKREFLLEVSGGLREDNVFDYANNDIDIISTSSIHQGTPHVDFSLKINLAPKTEGEDTAV

SEQ ID NO: 31700 - DNA, 3967 bp, Muscodor strobelii
  misc_feature: SGI EST ID NO. CUFF.75059.0
  misc_feature: Variant of the nucleotide sequence at SEQ ID NO 31698
gttttctccagcaaagcttgtagaattatgtagatatctaaagatcggatgtgttgctggtagaaacggcaaccacggttattgtccaacaacttagcgctcaataaatcagacgcgtcttgtgctcatgtgaacgctgcgatatgttgatagcaactcatgttcatccaagttcttcctgagaataaacttgtccattctacaaagtagtgatagctccttcctcctcacattgtcgccgtctcataacacatacatccttacaccttttgcacctccactgtcgccgcctcacaatcctcaagcctctttcctcacaacatcgccgtcttgcaacattgccaacttattggaccgccgatccacagcatcaatgcaagatgactaagaagaacaagaagaagaacagaaacaagaacggaaatgagggcgccgatgctcgtctccgctttggtgagatgagtccagtagcaaacaccaggcctgagccccgtaatgctgctgccgcgcacacctcctcccccatggcacagacaacagtgttgacacgcagcttccacgacacaaccccaaatcccttgagttttggtgacatgagccctgtgtcaacacacgacaacaacgattctgctgctgatcctgaggctgcatctccaagcatggctcctcgaggcaaagcccgcatcagcccgccggtcgcgatgacacccgagatcgcggctcgcatcgaggcaatgactgatctcttctcgcctgagcagtggcacctccttcccaacctcgatgatccgttcctcgtgcagaaaattctgcgccaccctgtcggccctgctggcagttgcagtgctgccttctcagctctcccgcagcatgatcccgagggcttcaccaccgacattggccaatttggtatcgtcctcattgagagcccccagaagcttgctattcgtatggagcactgtaccatgagtaagctcaactttgtccgacaggtctgggtttccaagtatctgactcccttccacccatgcactatcacgttcgacctgcctgacgctaccggattctgcaatgtcgtcatgcagaaagttaatcctcctcaatttgaccgcgagatacaagtcttagctggaaacatgaatggactgtcggtcgtcaccgaggaagatgagaacggcggaaaccctgccattcccgccaacaacacctccctgatcccgaaggccaataacgtcaacgacgatgagtttgtcgacaacaatgacgtgatgacttggccctgccgctccccggtccctgaggacgaggaagatgaagatgacgaagaccaggagtcggatggtgaggacgagtctgtcaaggctgtacgacgagtaagtgatctacacaatctaaaaccctgcgtttccggatattctaacaatatgtcagcgcgctggacgccgtcgcgccaattctcttcccaatgagaacgctctgggtggtatgcttgagagcgacatgtccaacgatgatcacgatgatgttgagacggacgccatgtctactgactatatgcaactgagatgagaaggccccacgagagatcgatagggcttatatttcgtctgcaaagtcaacgtacggtattaacgtacggtatttgactctctatgatgaaggggactgtatgatatccttttgtttttgttgtttggtgttcaatttcggctcagggttaaggtcaggtcaggtttgttcagattaggttacggaaatgcatccagggtttggcaacaggaaattgcatttagggattgcatggcacggttcacgattgatgagacgccacgagtaatgagcataatcagatgcagggagcagtctgtaacgagtctccagatgagaaaacgataaattctactgagttaggtaaagatgaggttctgtgatgacaaacgtagcgtgcgggtgtgatctatagtgattgttactgccgggtagcttctgcaagaccgtaggcttttcgtccccggtccatcggaactacccctcatgtacgtaccctctgcccctccatggcaatttcgacgcggtttgaaatcagatgcgggtgcaaacggctcaaatgccatatgtaataaagttctctgtgatatttcgccaggaaggtgcaagactccggcgtttgtaggaactagaccggagcttcgggattgcttgatctgtgtcattcattctgactcatgtaaacctgatttcagaggaagacatctacctctaaaacacgttgatatcaacgtctagtgaaacatctggttcatctgtgctcgcaatactccaatacccaagtgctgcggaaattttcatcttccgatcattcatcaaatcaaatgccgaacaacagagaacaacccattcaccatggctcactcgagcatctccttccaccgagctggaaagcccagatcactgcatggctcgcggaggacacgccgtcttatgattacgccggttttgttgtaggtgatcatcaacgaaccgctacattatggggcaagagtgcaggcatcatagcaggcatccccttcttcactgagatcttcaagcagtgcggctgcactgttgagtggcacgctgccgaggggagctatattgagcggccgaaggatgggtcaggtaaattcaaggtcgccaccgtcacaggtcctgcacgtggtctgcttcttggcgagcgcgtgggtttgaacttactagcaaggtgttcgggtattgctacggttagtcggaacctggtactcagtttgcgcagcgcgggatatcgcgggatcctagctggcacgcggaagacgacgccgggcttccgcattatcgaaaagtacggaatgctcgttggtggcgccgacacacatcgtatggatttgagttccatgatcatgctcaaggacaatcacgtgtggagtcgtggcagtatcacggaggcagtacgcgcggcaaagatggttggtggattcgcactcaaggtcgaagtcgaggtgcaaaatgaggcggaggcagacgaagccattgaggctggcgctgatgtcatcatgcttgacaattttacgggcgacggtgtcaagattgcagctaagagtttacgagaaaagtggaaaggtaaacgagagttcttgctcgaagtgagcggggggttgcgcgaggataacgtgttcgactatgccaacaatgacatcgacatcatctcgacaagctccattcaccagggtactccccacgtggacttctccctgaagatcaatcttgcgccgaaaactgagggtgaggacacggcggtgtgaagtagctgattagcaattttcggggtttagtaggttatgtctcggtgatgcaatgtacttttatcaagaatggtgcggattttgactgtgtatactcatcgtaatgggcggttacaacttacacgtttttgcccgtttagacgttcaacaacattgttacgctgagtaattggctgttgttaagttctttatcttgagtcatgttttgtggtatgtgttatggctggcgatcctccacgtctttctctggaaccgaatgtgacagcgggagcatgggtcggaggtgtccaagaatgtggagagtcgtctgactgcattcgtggtcctatcgctcgaaggtagaaaccaacaaagtacagcgactccgtattgtccgcaaaacgggccctgaagattggtacgttaagcgccgtaggattcggcttctgtccttcctccgcgcgtccttggtggcaccctatgtttcacgccgtaaagccgcatatcttcgccgactcggccttctgcataacttggcatttactgtgatctagccagatttgcgaacgattacctgaaagcgtaaaccggaaagcgccatagaaagcgtagcacgcatgatcacctcgtgcagttcttcaaggttgctgcatgatatagggccgatggaa

SEQ ID NO: 31701 - DNA, 900 bp, Muscodor strobelii
  misc_feature: SGI cDNA ID NO. 570917
  misc_feature: Encodes the peptide sequence at SEQ ID NO 31702
atgacccacgaacaaaagatagttcctgcgcgccgcgctactagtggctcagcccctgacgagccgggatatatagaagtttggggtcacaagtatcaccattcagggagaatattcgtccctttcgacgagatcgaacaatcccgaatggaagttcaccataaattattcagacattgtctctccggcgctttaacagctaccagaatccctctcaacgttgagtcgatcgtagatctcggcagcggaacaggtctatgggctctcgagatgggtgcgagatacccgcaggccaatatcctcggcatcgacatatcccgaatccagaagacaacagctatcccgcctaatgtccgcttcgtcatcgacaacgtcgagaatccctggccctgtgaacccaactcggtcgatctcatacacgtgcgaggccttgcaggcggcgtgaccgactggccgaacttccttcagcaagcttacgataagctgaaacctggaggtctttttgaatggaccgaaatatcaatacaaatttttgacttcgacggaaagtttggtgacgccgaactctgccctagcttcttgaatatgtggcgagatgccaacgtccagaataacatcacatttagtccatcggaacatggaccacaatggctcaatcaggccgggttcgagggtatctcccaacgaacagaaattttgcctattggagactgggcgcaagacgagaacctacgtgctcgacaatcacttatgaacgagatctcaacaaagcatttcataaatcattgtggcctcttgttcacgaatgcgggttggacgagacaaaaattcgatgctgtagcacctacattcttggcagaaattgctgctacatcggataaaccatataccacagcgtaa

SEQ ID NO: 31702 - protein, 299 aa, Muscodor strobelii
  misc_feature: SGI Peptide ID NO. 570917
  misc_feature (78)..(170): Pfam Id: PF08241 Pfam Desc: Methyltransferase domain
  misc_feature (78)..(168): Pfam Id: PF08242 Pfam Desc: Methyltransferase domain
  misc_feature (78)..(168): Pfam Id: PF08241 Pfam Desc: Methyltransferase domain
  misc_feature (25)..(280): NCBI GI: 256731963 Blast Desc: NECHADRAFT_61490 [Nectria haematococca mpVI 77-13-4]
  misc_feature (25)..(271): NCBI GI: 261353758 Blast Desc: methyltransferase [Verticillium albo-atrum VaMs.102]
  misc_feature (28)..(288): NCBI GI: 46105102 Blast Desc: FG00179.1 [Gibberella zeae PH-1]
  misc_feature (24)..(245): NCBI GI: 212539277 Blast Desc: conserved [Penicillium marneffei ATCC 18224] gi|210069536|gb|EEA23627.1| conserved [Penicillium marneffei ATCC 18224]
  misc_feature (29)..(245): NCBI GI: 256727929 Blast Desc: NECHADRAFT_62655 [Nectria haematococca mpVI 77-13-4]
  misc_feature (24)..(297): NCBI GI: 242795021 Blast Desc: phosphoethanolamine N-methyltransferase, [Talaromyces stipitatus ATCC 10500] gi|242795026|ref|XP_002482495.1| phosphoethanolamine N-methyltransferase, [Talaromyces stipitatus
  misc_feature (28)..(278): NCBI GI: 256723275 Blast Desc: NECHADRAFT_105613 [Nectria haematococca mpVI 77-13-4]
  misc_feature (29)..(278): NCBI GI: 46139735 Blast Desc: FG11382.1 [Gibberella zeae PH-1]
  misc_feature (29)..(245): NCBI GI: 119186115 Blast Desc: CIMG_03105 [Coccidioides immitis RS]
  misc_feature (29)..(245): NCBI GI: 238482447 Blast Desc: UMTA methyltransferase family protein [Aspergillus flavus NRRL3357] gi|220700512|gb|EED56850.1| UMTA methyltransferase family protein [Aspergillus flavus NRRL3357]
MTHEQKIVPARRATSGSAPDEPGYIEVWGHKYHHSGRIFVPFDEIEQSRMEVHHKLFRHCLSGALTATRIPLNVESIVDLGSGTGLWALEMGARYPQANILGIDISRIQKTTAIPPNVRFVIDNVENPWPCEPNSVDLIHVRGLAGGVTDWPNFLQQAYDKLKPGGLFEWTEISIQIFDFDGKFGDAELCPSFLNMWRDANVQNNITFSPSEHGPQWLNQAGFEGISQRTEILPIGDWAQDENLRARQSLMNEISTKHFINHCGLLFTNAGWTRQKFDAVAPTFLAEIAATSDKPYTTA

SEQ ID NO: 31703 - DNA, 7255 bp, Muscodor strobelii
  misc_feature: SGI EST ID NO. CUFF.75060.1
  misc_feature: Variant of the nucleotide sequence at SEQ ID NO 31701
ctcaaagctatcgcatagtcaatctatagcagtcgatcaagaattctgcatacatgtataccttagtcgtgtgctacaaactgtcgggggacgagtatacatagtaacaaggtccactgctatctccgcccagatgccggaacagtgcactaatctagcgccggcgcaaataacccgatacccggtttagcatggtatgtgacacgaccagttgatgcgacacatggtgctaaacattaggagtgtgtgactatctcgtgataatacgatcggcgttgaggtcaactagccttgggagtaattgttacttattcgacatttgtacaacgtctcctttaaaccgtcggcaatccgcccaaatcttgccaggatcttcctgtcacaacagaaatgcggcatctgtccagaccgcatttttgtgttttatttcgacttcaaaagtctccaatgccaagcggaaggagtgtgacgtcggatattcccgctaaaagttcgctagacccttaagtacccgcggatgggtttttatctctggaaaaaaaacacccgctgctctagggtcaccccattcctgaacttgcagaagtctggcgtgaggcgaaagtaaagcgaaagtggtaagttgcaaaaagggcagtcttataaatgggatccatagtacggaaagctatagaaagctattgtgagacttgctctagctcatttgctgatcagtcaataacgaacaagagcgggcaagttgctcggaatatcctagcctttttttcagccgaacggggtctgggatcaaattagaaggccaaacaatcaactcggcaagacttgaagaattctcgacgtcccgtcacagctcggacattacctataaccttgcccgcgtaacagtatatgcccgtccaaagatctcattcacaattccgcaaacgtgaaggatccgtggcctggccaggaaaagcaggcgaggagatgttggcgtaatccccgcgtgccactatcttcattttcaagggctttctgtggttcccacacgatgtacaagaacgcgaagcgttgagatgtctccgcaggccacgccaggcgaaacacaatcgatacctatggatcccgtctcagcaaaggctgcattaccgaatgtcaacctagttcatcaacacgtttttttgacactaccgtacctagctagaccttgcacactagatcatgctactatacaagtagtccaacgctgtattattgaaaacagaacggccaagttttctgtcgcgcacttccacagtctgaggagatatacatacatacacgagtacgcctttgcctttgtcttgcagaaatcgtacgcaggtcagatcttaccaagacgcagcggcaaaagtcggcgtcacatacctcgtctgcaccaccgttgaatgccacatcgatcttcccgcatcttctccgccctatacgcctcagtaccaaaatagccaatgcgtgtctcgatgatcctaacggaccatctgtggagattgaagggcgggtacagtgagtcgaagtcggtccttgtgcaacctgcttgagcactcggcaccggcgtaggggtttacgtttccttgctatagcatatctcttcgttacgcaagcggccgacttataaatatgccatcggagcatctccattagacgatagctctagggaaactcaagattcgacaacaaaagatgacccacgaacaaaagatagttcctgcgcgccgcgctactagtggctcagcccctgacgagccgggatatatagaagtttggggtcacaagtatcaccattcagggagaatattcgtccctttcgacgagatcgaacaatcccgaatggaagttcaccataaattattcagacattgtctctccggcgctttaacagctaccagaatccctctcaacgttgagtcgatcgtagatctcggcagcggaacaggtctatgggctctcgagatgggtgcgagatacccgcaggccaatatcctcggcatcgacatatcccgaatccagaagacaacagctatcccgcctaatgtccgcttcgtcatcgacaacgtcgagaatccctggccctgtgaacccaactcggtcgatctcatacacgtgcgaggccttgcaggcggcgtgaccgactggccgaacttccttcagcaagcttacgataagctgaaacctggaggtctttttgaatggaccgaaatatcaatacaaatttttgacttcgacggaaagtttggtgacgccgaactctgccctagcttcttgaatatgtggcgagatgccaacgtccagaataacatcacatttagtccatcggaacatggaccacaatggctcaatcaggccgggttcgagggtatctcccaacgaacagaaattttgcctattggagactgggcgcaagacgagaacctacgtgctcgacaatcacttatgaacgagatctcaacaaagcatttcataaatcattgtggcctcttgttcacgaatgcgggttggacgagacaaaaattcgatgctgtagcacctacattcttggcagaaattgctgctacatcggataaaccatataccacagctgtattcaccacagcgagaaaacctcgttttatccaggaagactgagtgttatgattctatcatcacttacactttttactcctgttgtggtctccatttcttcgacaataattcgtcgaatatgatatccggcggcacttaccttctatagaaccggaccaaggtgcattgggttactcgcgctctatattcatactacattgctttgtattttctgcttatgaagctgcgttagtagcgttgcattgctaaggcgtaggaggaggaaacatactatagatccgtgacttgatgtcgcgacacagaaactgtccaactttgacccaatggactgatatgatgttacgtaccttatgaggcgatgatcgttcgattcctagaccttgcttattcatcttacactatcactactgtcagcaatagttcctctcttagcattattatgttaggtcatgtcacagcggttaattttgtctccaactaaccctccttgcaagacttcagagagcactgaatcactgcgtcactatcatgttgtctggcgactatacacctctgtcgcactttgcaacgtgccaacaaggatggctccgttttctctgcatctatccttccaccgcctttccatcggccctatatcatgcagcaaccttgaagaactgcacgaggtgatcatgcgtgctacgctttctatggcgctttccggtttacgctttcaggtaatcgttcgcaaatctggctagatcacagtaaatgccaagttatgcagaaggccgagtcggcgaagatatgcggctttacggcgtgaaacatagggtgccaccaaggacgcgcggaggaaggacagaagccgaatcctacggcgcttaacgtaccaatcttcagggcccgttttgcggacaatacggagtcgctgtactttgttggtttctaccttcgagcgataggaccacgaatgcagtcagacgactctccacattcttggacacctccgacccatgctcccgctgtcacattcggttccagagaaagacgtggaggatcgccagccataacacataccacaaaacatgactcaagataaagaacttaacaacagccaattactcagcgtaacaatgttgttgaacgtctaaacgggcaaaaacgtgtaagttgtaaccgcccattacgatgagtatacacagtcaaaatccgcaccattcttgataaaagtacattgcatcaccgagacataacctactaaaccccgaaaattgctaatcagctacttcacaccgccgtgtcctcaccctcagttttcggcgcaagattgatcttcagggagaagtccacgtggggagtaccctggtgaatggagcttgtcgagatgatgtcgatgtctaggcgagtaaattcggtcagcgagacacaaaagactgaaacggaaactgtaacacgcaagtatactcaccattgttggcatagtcgaacacgttatcctcgcgcaaccccccgctcacttcgagcaagaactctcgtttacctttccacttttctcgtaaactcttagctgcaatcttgacaccgtcgcccgtaaaattgtcaagcatgatgacatcagcgccagcctcaatggcttcgtctgcctccgcctcattttgcacctcgacttcgaccttgagtgcgaatccaccaaccatctttgccgcgcgtactgcctccgtgatactgccacgactccacacgtgattgtccttgagcatgatcatggaactcaaatccatacgatgtgtgtcggcgccaccaacgagcattccgtacttttcgataatgcggaagcccggcgtcgtcttccgcgtgccagctaggatcccgcgatatcccgcgctgcgcaaactgagtaccaggttccgactaaccgtagcaatacccgaacaccttgctagtaagttcaaacccacgcgctcgccaagaagcagaccacgtgcaggacctgtgacggtggcgaccttgaatttacctgacccatccttcggccgctcaatatagctcccctcggcagcgtgccactcaacagtgcagccgcactgcttgaagatctcagtgaagaaggggatgcctgctatgatgcctgcactcttgccccataatgtagcggttcgttgatgatcacctacaacaaaaccggcgtaatcataagacggcgtgtcctccgcgagccatgcagtgatctgggctttccagctcggtggaaggagatgctcgagtgagccatggtgaatgggttgttctctgttgttcggcatttgatttgatgaatgatcggaagatgaaaatttccgcagcacttgggtattggagtattgcgagcacagatgaaccagatgtttcactagacgttgatatcaacgtgttttagaggtagatgtcttcctctgaaatcaggtttacatgagtcagaatgaatgacacagatcaagcaatcccgaagctccggtctagttcctacaaacgccggagtcttgcaccttcctggcgaaatatcacagagaactttattacatatggcatttgagccgtttgcacccgcatctgatttcaaaccgcgtcgaaattgccatggaggggcagagggtacgtacatgaggggtagttccgatggaccggggacgaaaagcctacggtcttgcagaagctacccggcagtaacaatcactatagatcacacccgcacgctacgtttgtcatcacagaacctcatctttacctaactcagtagaatttatcgttttctcatctggagactcgttacagactgctccctgcatctgattatgctcattactcgtggcgtctcatcaatcgtgaaccgtgccatgcaatccctaaatgcaatttcctgttgccaaaccctggatgcatttccgtaacctaatctgaacaaacctgacctgaccttaaccctgagccgaaattgaacaccaaacaacaaaaacaaaaggatatcatacagtccccttcatcatagagagtcaaataccgtacgttaataccgtacgttgactttgcagacgaaatataagccctatcgatctctcgtggggccttctcatctcagttgcatatagtcagtagacatggcgtccgtctcaacatcatcgtgatcatcgttggacatgtcgctctcaagcataccacccagagcgttctcattgggaagagaattggcgcgacggcgtccagcgcgctgacatattgttagaatatccggaaacgcagggttttagattgtgtagatcacttactcgtcgtacagccttgacagactcgtcctcaccatccgactcctggtcttcgtcatcttcatcttcctcgtcctcagggaccggggagcggcagggccaagtcatcacgtcattgttgtcgacaaactcatcgtcgttgacgttattggccttcgggatcagggaggtgttgttggcgggaatggcagggtttccgccgttctcatcttcctcggtgacgaccgacagtccattcatgtttccagctaagacttgtatctcgcggtcaaattgaggaggattaactttctgcatgacgacattgcagaatccggtagcgtcaggcaggtcgaacgtgatagtgcatgggtggaagggagtcagatacttggaaacccagacctgtcggacaaagttgagcttactcatggtacagtgctccatacgaatagcaagcttctgggggctctcaatgaggacgataccaaattggccaatgtcggtggtgaagccctcgggatcatgctgcgggagagctgagaaggcagcactgcaactgccagcagggccgacagggtggcgcagaattttctgcacgaggaacggatcatcgaggttgggaaggaggtgccactgctcaggcgagaagagatcagtcattgcctcgatgcgagccgcgatctcgggtgtcatcgcgaccggcgggctgatgcgggctttgcctcgaggagccatgcttggagatgcagcctcaggatcagcagcagaatcgttgttgtcgtgtgttgacacagggctcatgtcaccaaaactcaagggatttggggttgtgtcgtggaagctgcgtgtcaacactgttgtctgtgccatgggggaggaggtgtgcgcggcagcagcattacggggctcaggcctggtgtttgctactggactcatctcaccaaagcggagacgagcatcggcgccctcatttccgttcttgtttctgttcttcttcttgttcttcttagtcatcttgcattgatgctgtggatcggcggtccaataagttggcaatgttgcaagacggcgatgttgtgaggaaagaggcttgaggattgtgaggcggcgacagtggaggtgcaaaaggtgtaaggatgtatgtgttatgagacggcgacaatgtgaggaggaaggagctatcactactttgtagaatggacaagtttattctcaggaagaacttggatgaacatgagttgctatcaacatatcgcagcgttcacatgagcacaagacgcgtctgatttattgagcgctaagttgttggacaataaccgtggttgccgtttctaccagcaacacatccgatctttagatatctacataattctacaagctttgctggagaaaac

SEQ ID NO: 31704 - DNA, 1557 bp, Muscodor strobelii
  misc_feature: SGI cDNA ID NO. 570918
  misc_feature: Elevated expression when VOC is produced
  misc_feature: Encodes the peptide sequence at SEQ ID NO 31705
atggttgccgcggttcggaaacgtgttgtcattatcggtggaggtctcagtgggctgtgctcactgaaggaatgtctcgccgaagggtttgaggccgagcttctcgaatctcgcccagaaatcggtggtcaatggtcgtaccaagacgcagaaaacctagaaggggaggtggtttcatcagtctgtgacttcccattcgatcccgcgcgttacggggattacttcgggcatcgacaattcctagagtacattcgtgaatatgtggatcatttcaacctccacggccatatccggttacggaccaaggtcattggttgcgtgccgaatgctgatgagacttggacggtgaaaatccagcaggaaggccacgagcctatcgaaagcatttacgatgctgtctttgcggcgacgggttccaatacaatcccgtctataccggacttcaaagggagagagtcatttgaaggggagttcttgcatagccaagtctaccgcagaccgggccgtttcgaaaacaaaaaggtagcaattattggactgggatcagcggccgtagacattgcaagcgaacttaccccaggaagctctgaagttcatatgattacgcgcagaggcgggtggataatgcctcgatacgtgctcggcaaaccaatcgaggcttgggataaccgagcgacgcaagtctgggtgccgagcaagatttcacaagcgctccaaactgtgcttttgaacactgtgcaggggaagctccccaaggaactgcagcccgaacacgcaatcttagagcagaacccaacgataagaagtgaatttgtcgaacgcattcgtaatggctctatcaatattcaccgcacaaacatcgatagtttcacaccgactggcttgagacttgaaaatggtacacaactagatgtcgatgttataatatgctgtactggtttcagtcactctatgccttacttaccagctgatgtagtccgaaacggggacacaccgcccaacactgttgacctttacaagctaatgatacccgttcgctatcagaaccttttccttgtaggttttgttgaggttgccggccccgcgccgccaacagtcgaagctcaagctcgaatggcagtcggtgccctgacaggtcgagtaaagctcccgcaaggacaacatcttgagagcgaggtgaagaaatggcaggactggcaagccaagaacttcgttcgctcggagagacattcgattacaactgattacgttccatacattgatagtcttctggcacctcttggcgcaaatccgactgtcgggaagttgcttggccaaatcttcactggtgggagcccctggaaggcgctccaagccttgaatgccgttttcttcggaatcacaagcagtgcgcaatggagactttgtggttatggtagcgatacgaaatcggctcgcgagactgtgcttagaattgcgagcggcaaagacgaactcacaaccgaggaaaagaagcatctcggagaacgaaataaaatttacgcttcacaaaccgagtatgcagatcagcgactctaa

SEQ ID NO: 31705 - protein, 518 aa, Muscodor strobelii
  misc_feature: SGI Peptide ID NO. 570918
  misc_feature (6)..(512): Pfam Id: PF00743 Pfam Desc: Flavin-binding monooxygenase-like
  misc_feature (152)..(211): Pfam Id: PF00743 Pfam Desc: Flavin-binding monooxygenase-like
  misc_feature (304)..(431): Pfam Id: PF00743 Pfam Desc: Flavin-binding monooxygenase-like
  misc_feature (6)..(31): Pfam Id: PF00743 Pfam Desc: Flavin-binding monooxygenase-like
  misc_feature (7)..(488): NCBI GI: 225557996 Blast Desc: flavin-containing monooxygenase [Ajellomyces capsulatus G186AR]
  misc_feature (7)..(498): NCBI GI: 261198759 Blast Desc: Fmo5 protein [Ajellomyces dermatitidis SLH14081] gi|239594933|gb|EEQ77514.1| Fmo5 protein [Ajellomyces dermatitidis SLH14081]
  misc_feature (7)..(472): NCBI GI: 240273015 Blast Desc: flavin containing monooxygenase [Ajellomyces capsulatus H143]
  misc_feature (8)..(500): NCBI GI: 240108985 Blast Desc: Flavin-binding monooxygenase-like family protein [Coccidioides posadasii C735 delta SOWgp]
  misc_feature (7)..(498): NCBI GI: 239609945 Blast Desc: flavin-containing monooxygenase 3 [Ajellomyces dermatitidis ER-3]
  misc_feature (7)..(498): NCBI GI: 226280698 Blast Desc: dimethylaniline monooxygenase [Paracoccidioides brasiliensis Pb01]
  misc_feature (7)..(498): NCBI GI: 225683018 Blast Desc: dimethylaniline monooxygenase [Paracoccidioides brasiliensis Pb03]
  misc_feature (8)..(501): NCBI GI: 258572396 Blast Desc: conserved [Uncinocarpus reesii 1704] gi|237905230|gb|EEP79631.1| conserved [Uncinocarpus reesii 1704]
  misc_feature (7)..(498): NCBI GI: 226290470 Blast Desc: dimethylaniline monooxygenase [Paracoccidioides brasiliensis Pb18]
  misc_feature (8)..(500): NCBI GI: 119181549 Blast Desc: CIMG_05875 [Coccidioides immitis RS]
  misc_feature (7)..(485): SWISSPROT Homolog: EC 1.14.13.8 Flavin-containing monooxygenase
  misc_feature: Useful for introducing or modulating the production of volatile compounds
MVAAVRKRVVIIGGGLSGLCSLKECLAEGFEAELLESRPEIGGQWSYQDAENLEGEVVSSVCDFPFDPARYGDYFGHRQFLEYIREYVDHFNLHGHIRLRTKVIGCVPNADETWTVKIQQEGHEPIESIYDAVFAATGSNTIPSIPDFKGRESFEGEFLHSQVYRRPGRFENKKVAIIGLGSAAVDIASELTPGSSEVHMITRRGGWIMPRYVLGKPIEAWDNRATQVWVPSKISQALQTVLLNTVQGKLPKELQPEHAILEQNPTIRSEFVERIRNGSINIHRTNIDSFTPTGLRLENGTQLDVDVIICCTGFSHSMPYLPADVVRNGDTPPNTVDLYKLMIPVRYQNLFLVGFVEVAGPAPPTVEAQARMAVGALTGRVKLPQGQHLESEVKKWQDWQAKNFVRSERHSITTDYVPYIDSLLAPLGANPTVGKLLGQIFTGGSPWKALQALNAVFFGITSSAQWRLCGYGSDTKSARETVLRIASGKDELTTEEKKHLGERNKIYASQTEYADQRL

SEQ ID NO: 31706 - DNA, 1860 bp, Muscodor strobelii
  misc_feature: SGI EST ID NO. CUFF.75040.0
  misc_feature: Variant of the nucleotide sequence at SEQ ID NO 31704
cccagatctcgagacacatgtctcagaacctcgggtccttgcatggcaaaagcaggagaaagtgactgacgcggtatgaaaaccagatgatggagtgatccttaattcttgtcgtgatactacgagcttcagtgacttcccattcgatcccgcgcgttacggggattacttcgggcatcgacaattcctagagtacattcgtgaatatgtggatcatttcaacctccacggccatatccggttacggaccaaggtcattggttgcgtgccgaatgctgatgagacttggacggtgaaaatccagcaggaaggccacgagcctatcgaaagcatttacgatgctgtctttgcggcgacgggttccaatacaatcccgtctataccggacttcaaagggagagagtcatttgaaggggagttcttgcatagccaagtctaccgcagaccgggccgtttcgaaaacaaaaaggtagcaattattggactgggatcagcggccgtagacattgcaagcgaacttaccccaggaagctctgaagttcatatgattacgcgcagaggcgggtggataatgcctcgatacgtgctcggcaaaccaatcgaggcttgggataaccgagcgacgcaagtctgggtgccgagcaagatttcacaagcgctccaaactgtgcttttgaacactgtgcaggggaagctccccaaggaactgcagcccgaacacgcaatcttagagcagaacccaacgataagaagtgaatttgtcgaacgcattcgtaatggctctatcaatattcaccgcacaaacatcgatagtttcacaccgactggcttgagacttgaaaatggtacacaactagatgtcgatgttataatatgctgtactggtttcagtcactctatgccttacttaccagctgatgtagtccgaaacggggacacaccgcccaacactgttgacctttacaagctaatgatacccgttcgctatcagaaccttttccttgtaggttttgttgaggttgccggccccgcgccgccaacagtcgaagctcaagctcgaatggcagtcggtgccctgacaggtcgagtaaagctcccgcaaggacaacatcttgagagcgaggtgaagaaatggcaggactggcaagccaagaacttcgttcgctcggagagacattcgattacaactgattacgttccatacattgatagtcttctggcacctcttggcgcaaatccgactgtcgggaagttgcttggccaaatcttcactggtgggagcccctggaaggcgctccaagccttgaatgccgttttcttcggaatcacaagcagtgcgcaatggagactttgtggttatggtagcgatacgaaatcggctcgcgagactgtgcttagaattgcgagcggcaaagacgaactcacaaccgaggaaaagaagcatctcggagaacgaaataaaatttacgcttcacaaaccgagtatgcagatcagcgactctaacggcacgtctacttggcttgctagagggacacccctgcatttcctgttatctgtatctgccttctttacctactaacctgtaattctttaaaatcatgcgttgtcgcgctcccctacctattgtagttcactcatattcagcgctttttatttgtatttttacactggtaaattttgagattatctcggatcgtaacggcttgtttgtattgggcgaaaatgaagattaacacaattgtatataatttgtcttaatacgactagaaactagactaatgtcatgtatcataaaaatgcttgcaaaggatttggctatagaaacattctgtttctacggacagtgatacacattgaga

SEQ ID NO: 31707 - DNA, 447 bp, Muscodor strobelii
  misc_feature: SGI cDNA ID NO. 570919
  misc_feature: Encodes the peptide sequence at SEQ ID NO 31708
atgcaactcacgaagctcctcttctgggctttgcttgccattccacagctgacagtggcgctaccagagcccatcatggatgaaatggaaactcgcgatgtatactatccaatgcacaagcccgaatgctccaataagtatacgacccttatccttccttacacgcctgcttctcgatcattcgctcaagccacttctctagatgagaaagacgaaaaatgtcgtgataacggcaggaacaaagtctactgcaagaggtacaatggtgagaagtacgagagggacaacagggacaagaatcgtaataagaacggcaacaagaatgacaataagaacaaaaataaaaacgaaaacaagaatcagaattacaacaataacgaaaattacaacaacaatgtaaacgtaaataagaatggaaacaagaatggcaattacaacgacaattaa

SEQ ID NO: 31708 - protein, 148 aa, Muscodor strobelii
  misc_feature: SGI Peptide ID NO. 570919
MQLTKLLFWALLAIPQLTVALPEPIMDEMETRDVYYPMHKPECSNKYTTLILPYTPASRSFAQATSLDEKDEKCRDNGRNKVYCKRYNGEKYERDNRDKNRNKNGNKNDNKNKNKNENKNQNYNNNENYNNNVNVNKNGNKNGNYNDN

SEQ ID NO: 31709 - DNA, 909 bp, Muscodor strobelii
  misc_feature: SGI cDNA ID NO. 570920
  misc_feature: Encodes the peptide sequence at SEQ ID NO 31710
atgcctaccttcctagtaacaggcgcaacaagcggccaaggccttgaagtagtcaaagcccttctcacccatggctcaaaagtccacgccctaacccgagatcccaccaagccctcggccatcccactcgcacagcagggcgtgattttcttcaaaggctcgaatagcgactactccgtcttccatgaagccggcaaggggtgcgaaggactcttcatgaatctcctcgagatcccacgaaccatcaacctcggcgagcaagccactggcatcctatcagcttgcaaagcagcaggtatcaaacatgtcgttgtgtcaacgtcgggttacgcagcgaatagacagaaacgccttatgaacgaggcggatcctgcggatttcgcggcgagtgagatgagggttgagaatgctgtgaaggcctctgggatgaagtatacgatccttagaccgttttggtttcactcgaattatctcccgccgctggcgaatctgtattatcctgaggtgctggctaagggtgagctgcatcataagtggaaggcgggtgcggtgttcccgcatattaatgttggggatataggggggtttgctgcgatggctttgcttgatccgcagaggtttgggggggaggagattgaactcgcgtcggagaatcttacagttgagcagattgctgatgcgattgggaaggcggcgggaaagaagattgtagttagggagaggacggatgaggagttggaggaggagtatgggatgaagaggtgggaggggtgggtgaatttcgcggacttgacggtccctgttgaggagattgggaagtatgggtttaagtttacgacgcttgaggagtatcttgttaaggagcgggatacgctgctcaaggcgatgaacgaggcttctaagccatga

SEQ ID NO: 31710 - protein, 302 aa, Muscodor strobelii
  misc_feature: SGI Peptide ID NO. 570920
  misc_feature (4)..(215): Pfam Id: PF01370 Pfam Desc: NAD dependent epimerase/dehydratase family
  misc_feature (4)..(240): Pfam Id: PF05368 Pfam Desc: NmrA-like family
  misc_feature (132)..(235): Pfam Id: PF05368 Pfam Desc: NmrA-like family
  misc_feature (4)..(104): Pfam Id: PF05368 Pfam Desc: NmrA-like family
  misc_feature (1)..(296): NCBI GI: 261195006 Blast Desc: NmrA family protein [Ajellomyces dermatitidis SLH14081] gi|239587779|gb|EEQ70422.1| NmrA family protein [Ajellomyces dermatitidis SLH14081]
  misc_feature (1)..(296): NCBI GI: 239610726 Blast Desc: NmrA family protein [Ajellomyces dermatitidis ER-3]
  misc_feature (1)..(296): NCBI GI: 256730123 Blast Desc: NECHADRAFT_45232 [Nectria haematococca mpVI 77-13-4]
  misc_feature (3)..(290): NCBI GI: 169763854 Blast Desc: [Aspergillus oryzae RIB40] gi|238489829|ref|XP_002376152.1| NAD dependent epimerase/dehydratase, [Aspergillus flavus NRRL3357] protein NAD
  misc_feature (1)..(296): NCBI GI: 256721343 Blast Desc: NECHADRAFT_94852 [Nectria haematococca mpVI 77-13-4]
  misc_feature (2)..(249): NCBI GI: 67522725 Blast Desc: AN1819.2 [Aspergillus nidulans FGSC A4] gi|40745828|gb|EAA64984.1| AN1819.2 [Aspergillus nidulans FGSC A4] gi|259487166|tpe|CBF85622.1| TPA: conserved [Aspergillus FGSC
  misc_feature (41)..(296): NCBI GI: 212538911 Blast Desc: conserved [Penicillium marneffei ATCC 18224] gi|210069353|gb|EEA23444.1| conserved [Penicillium marneffei ATCC 18224]
  misc_feature (3)..(290): NCBI GI: 242810546 Blast Desc: NAD dependent epimerase/dehydratase, [Talaromyces stipitatus ATCC 10500] gi|218716227|gb|EED15649.1| NAD dependent epimerase/dehydratase, [Talaromyces stipitatus ATCC 10500]
  misc_feature (2)..(294): NCBI GI: 169775371 Blast Desc: [Aspergillus oryzae RIB40] gi|83770016|dbj|BAE60151.1| protein product [Aspergillus oryzae]
  misc_feature (2)..(294): NCBI GI: 238495981 Blast Desc: NAD dependent epimerase/dehydratase, [Aspergillus flavus NRRL3357] gi|220694106|gb|EED50450.1| NAD dependent epimerase/dehydratase, [Aspergillus flavus NRRL3357]
MPTFLVTGATSGQGLEVVKALLTHGSKVHALTRDPTKPSAIPLAQQGVIFFKGSNSDYSVFHEAGKGCEGLFMNLLEIPRTINLGEQATGILSACKAAGIKHVVVSTSGYAANRQKRLMNEADPADFAASEMRVENAVKASGMKYTILRPFWFHSNYLPPLANLYYPEVLAKGELHHKWKAGAVFPHINVGDIGGFAAMALLDPQRFGGEEIELASENLTVEQIADAIGKAAGKKIVVRERTDEELEEEYGMKRWEGWVNFADLTVPVEEIGKYGFKFTTLEEYLVKERDTLLKAMNEASKP

SEQ ID NO: 31711 - DNA, 897 bp, Muscodor strobelii
  misc_feature: SGI EST ID NO. CUFF.75052.0
  misc_feature: Variant of the nucleotide sequence at SEQ ID NO 31709
cggcgagcaagccactggcatcctatcagcttgcaaagcagcaggtatcaaacatgtcgttgtgtcaacgtcgggttacgcagcgaatagacagaaacgccttatgaacgaggcggatcctgcggatttcgcggcgagtgagatgagggttgagaatgctgtgaaggcctctgggatgaagtatacgatccttagaccgttttggtttcactcgaattatctcccgccgctggcgaatctgtattatcctgaggtgctggctaagggtgagctgcatcataagtggaaggcgggtgcggtgttcccgcatattaatgttggggatataggggggtttgctgcgatggctttgcttgatccgcagaggtttgggggggaggagattgaactcgcgtcggagaatcttacagttgagcagattgctgatgcgattgggaaggcggcgggaaagaagattgtagttagggagaggacggatgaggagttggaggaggagtatgggatgaagaggtgggaggggtgggtgaatttcgcggacttgacggtccctgttgaggagattgggaagtatgggtttaagtttacgacgcttgaggagtatcttgttaaggagcgggatacgctgctcaaggcgatgaacgaggcttctaagccatgattgagttggtgttattcgctatcgagcttggtcccaaaagcgcgatcgtgctgtctcgctcttcaggatcaccttgtatacctaacagaccttgccacacgttccagctatcaatctaacatcaacgcataccttcgttttgggtcaacacccgcagtctagtgcaacggatgtgcggcatctgtgtttgctaagctattgcgtccgaacctatcgcaatttgtgctggtatgctccga

SEQ ID NO: 31712 - DNA, 966 bp, Muscodor strobelii
  misc_feature: SGI cDNA ID NO. 570921
  misc_feature: Reduced expression when VOC is produced
  misc_feature: Encodes the peptide sequence at SEQ ID NO 31713
atgaagtcctggatatcacagcgaacgctcgccggacgcgtagagcgcctgatcgagcaccagttccgctcccagactccttccaccacaccctgctcatcaccattcccacacatccgcaaatcaccaacccgaacccagggcacaccccgccgccctttcacaaactctgcaccaagacctcaaagaccacaaccaggcgacgacccaaacttcacatccatcctcgataaccccccgaactcgtgcgcgccggccgccgtcacggacccgcgcctaggctggaaaaccgagctcatagctcgcttcgaagaccgactcgtccaacctcccctgcccctcccaccgcgcgtcgacccctccgcaatccacgactttgatttccgccgtgtcgtagcgcgtggtagataccgacatgatcaagagatgctcgtcggccctcgtatgcgagatggtgaggatggatatatggtcgttacacctctggagcgagatccggggggaactgatgggagggggtgtactacggtgcttgttaatcgggggtgggtgagcaagaaattgagacgacagaaagataggagggaggggttaccgagtggtgaggttgtggttgagggattgttgagggagccgtggaagaagaatatgtttacgcccgagaatagaccggataagggggagttttactttcccgatgttaaacagatggcggaattaagtgggagccaggctgtttgggttgagcagactatggagcccgacttgatgcaggctcttgagatggagagcaagggcatgccgatcggcagaccggctgaggttaacctgaggaataaccatgcccagtacatcttcacttggtacggtttggccatagcaacatcgataatgttctacatggtggtcaagaagcccccaacagatatctcccggcgcgtacggatgaacaaggagtggaagtaa

SEQ ID NO: 31713 - protein, 321 aa, Muscodor strobelii
  misc_feature: SGI Peptide ID NO. 570921
  misc_feature (1)..(308): Pfam Id: PF02104 Pfam Desc: SURF1 family
  misc_feature (92)..(165): Pfam Id: PF02104 Pfam Desc: SURF1 family
  misc_feature (176)..(308): Pfam Id: PF02104 Pfam Desc: SURF1 family
  misc_feature (16)..(320): NCBI GI: 171684861 Blast Desc: protein product [Podospora anserina] gi|170942391|emb|CAP68043.1| protein product [Podospora anserina]
  misc_feature (49)..(320): NCBI GI: 85113423 Blast Desc: NCU02162 [Neurospora crassa OR74A] gi|28926306|gb|EAA35285.1| NCU02162 [Neurospora crassa OR74A]
  misc_feature (44)..(318): NCBI GI: 46129350 Blast Desc: FG08860.1 [Gibberella zeae PH-1]
  misc_feature (50)..(318): NCBI GI: 256733702 Blast Desc: [Nectria haematococca mpVI 77-13-4]
  misc_feature (22)..(320): NCBI GI: 261353482 Blast Desc: surfeit locus protein [Verticillium albo-atrum VaMs.102]
  misc_feature (65)..(320): NCBI GI: 259482407 Blast Desc: TPA: COX1 assembly protein Shy1, (AFU_orthologue; AFUA_3G06340) [Aspergillus nidulans FGSC A4]
  misc_feature (65)..(320): NCBI GI: 121704780 Blast Desc: COX1 assembly protein Shy1, [Aspergillus clavatus NRRL 1] gi|119398799|gb|EAW09227.1| COX1 assembly protein Shy1, [Aspergillus clavatus NRRL 1]
  misc_feature (60)..(320): NCBI GI: 154091377 Blast Desc: [Mycosphaerella pini]
  misc_feature (65)..(320): NCBI GI: 119493223 Blast Desc: COX1 assembly protein Shy1, [Neosartorya fischeri NRRL 181] gi|119411978|gb|EAW21921.1| COX1 assembly protein Shy1, [Neosartorya fischeri NRRL 181]
  misc_feature (65)..(320): NCBI GI: 169780036 Blast Desc: [Aspergillus oryzae RIB40] gi|238505926|ref|XP_002384165.1| COX1 assembly protein Shy1, [Aspergillus flavus NRRL3357] gi|83773222|dbj|BAE63349.1| protein
  misc_feature: Useful for introducing or modulating the production of volatile compounds
MKSWISQRTLAGRVERLIEHQFRSQTPSTTPCSSPFPHIRKSPTRTQGTPRRPFTNSAPRPQRPQPGDDPNFTSILDNPPNSCAPAAVTDPRLGWKTELIARFEDRLVQPPLPLPPRVDPSAIHDFDFRRVVARGRYRHDQEMLVGPRMRDGEDGYMVVTPLERDPGGTDGRGCTTVLVNRGWVSKKLRRQKDRREGLPSGEVVVEGLLREPWKKNMFTPENRPDKGEFYFPDVKQMAELSGSQAVWVEQTMEPDLMQALEMESKGMPIGRPAEVNLRNNHAQYIFTWYGLAIATSIMFYMVVKKPPTDISRRVRMNKEWK

SEQ ID NO: 31714 - DNA, 2021 bp, Muscodor strobelii
  misc_feature: SGI EST ID NO. CUFF.75089.1
  misc_feature: Variant of the nucleotide sequence at SEQ ID NO 31712
ctcaagacacccagtatcggccggaaacgacatgcgccgggccaattccgccctaatcagcacccgcgcattcatcgcaacacaaccacaccaaccatgaagtcctggatatcacagcgaacgctcgccggacgcgtagagcgcctgatcgagcaccagttccgctcccagactccttccaccacaccctgctcatcaccattcccacacatccgcaaatcaccaacccgaacccagggcacaccccgccgccctttcacaaactctgcaccaagacctcaaagaccacaaccaggcgacgacccaaacttcacatccatcctcgataaccccccgaactcgtgcgcgccggccgccgtcacggacccggtctaataatcctcgccataatccccatcaccgccctcgcactcggaacatggcaagtccagcgcctaggctggaaaaccgagctcatagctcgcttcgaagaccgactcgtccaacctcccctgcccctcccaccgcgcgtcgacccctccgcaatccacgactttgatttccgccgtgtcgtagcgcgtggtagataccgacatgatcaagagatgctcgtcggccctcgtatgcgagatggtgaggatggatatatggtcgttacacctctggagcgagatccggggggaactgatgggagggggtgtactacggtgcttgttaatcgggggtgggtgagcaagaaattgagacgacagaaagataggagggaggggttaccgagtggtgaggttgtggttgagggattgttgagggagccgtggaagaagaatatgtttacgcccgagaatagaccggataagggggagttttactttcccgatgttaaacagatggcggaattaagtgggagccaggctgtttgggttgagcagactatggagcccgacttgatgcaggctcttgagatggagagcaagggcatgccgatcggcagaccggctgaggttaacctgaggaataaccatgcccagtacatcttcacttggtacggtttggccatagcaacatcgataatgttctacatggtggtcaagaagcccccaacagatatctcccggcgcgtacggatgaacaaggagtggaagtaaatcctccggttcgccctcgacttcgatcctaggcctcaattacatagccaatttgactatgtcgtgtaatctagtaagtgactgattgttggcgacaattcaagtcacttcttcctcaccctcaccctcaccctcagaccgcctcgccttctttcgcgagagcttcttagtaattggcaccggcatgcgcacctcctggagaagctctcggggcagatggcgttgggcgagagtaaacggcgtggttgagctattcgtctgcctttgtctgtatcatatgtcaacaacactgtactgtatatagaaaagcactgtagaacataccgtcgcatgagagtaatcatatcactctcattgatcgtgtttcggcccgcgtgtttcgcatatgctgataaatcgtctccgagttgctcaaagtaccagtctgttgcttgcatgatcgcgtcgagagtgtctggcgtgatcttgcttttgcttgatccggttgttcgtgcgaaggtcgttgctaggcgttttacgacgttggcgggtagagatgggtattctatgccatgtctagagaccttctttcccttctttcttttttggcctttgtgtgatgtgagacctgtctctatagtcctggtgagggtgttttcatcaccgccgccgatgttcggctcgaagtcggggagatcttccgcttcgttcatatcgtcattatcatcgtcgtcgtccatttcaaagagaggagcagccccatcatcttgaccgtcgtctgaatcttcgattgcatccagtcttgatggatctcgaacaggagatgagataggggccatcataaacgtagtttcgttgccggcatctgggatctcgatagctccgaagatgctgtcttgtcccatggtctgccgtctc

SEQ ID NO: 31715 - DNA, 1200 bp, Muscodor strobelii
  misc_feature: SGI cDNA ID NO. 570922
  misc_feature: Encodes the peptide sequence at SEQ ID NO 31716
atgcaaacggcgtcgaggcagtttctgcacgaagccccggcttcacaagtcgtcactacatcttcatctccagactcagctcctgaagatggtgactctactttacttcctctcgctgaggccgatgaggaggatgatgatgatttccccattgagcgtcctcgcttctcacttccgatgggacctgatgatgatgacgatgatgcggatttgaaaccaccccggcttagtggactggaggatgagaatcttaccgtgcagtcgattgaactacctcgcagagctatccaggacagaagcagcttgaacagtgtgagatttagcgactatattgggcctgaagtgcagagtgacgatgtgggtattgactctggtttcttcccgcctcctgcgctggatgagacagaggaggtgatgatggaagaaccgcctatcattgagcacttggacgccgatgagagacggcagaccatgggacaagacagcatcttcggagctatcgagatcccagatgccggcaacgaaactacgtttatgatggcccctatctcatctcctgttcgagatccatcaagactggatgcaatcgaagattcagacgacggtcaagatgatggggctgctcctctctttgaaatggacgacgacgatgataatgacgatatgaacgaagcggaagatctccccgacttcgagccgaacatcggcggcggtgatgaaaacaccctcaccaggactatagagacaggtctcacatcacacaaaggccaaaaaagaaagaagggaaagaaggtctctagacatggcatagaatacccatctctacccgccaacgtcgtaaaacgcctagcaacgaccttcgcacgaacaaccggatcaagcaaaagcaagatcacgccagacactctcgacgcgatcatgcaagcaacagactggtactttgagcaactcggagacgatttatcagcatatgcgaaacacgcgggccgaaacacgatcaatgagagtgatatgattactctcatgcgacgacaaaggcagacgaatagctcaaccacgccgtttactctcgcccaacgccatctgccccgagagcttctccaggaggtgcgcatgccggtgccaattactaagaagctctcgcgaaagaaggcgaggcggtctgagggtgagggtgagggtgaggaagaagtgacttga

SEQ ID NO: 31716 - protein, 399 aa, Muscodor strobelii
  misc_feature: SGI Peptide ID NO. 570922
  misc_feature (12)..(383): NCBI GI: 116193451 Blast Desc: CHGG_06443 [Chaetomium globosum CBS 148.51] gi|88182356|gb|EAQ89824.1| CHGG_06443 [Chaetomium globosum CBS 148.51]
  misc_feature (17)..(399): NCBI GI: 171684859 Blast Desc: protein product [Podospora anserina] gi|170942390|emb|CAP68042.1| protein product [Podospora anserina]
  misc_feature (12)..(383): NCBI GI: 39970531 Blast Desc: MGG_02732 [Magnaporthe grisea 70-15] gi|149209997|ref|XP_001522373.1| MGCH7_ch7g480 [Magnaporthe grisea 70-15] gi|86196435|gb|EAQ71073.1| MGCH7_ch7g480 grisea
  misc_feature (49)..(344): NCBI GI: 256734197 Blast Desc: NECHADRAFT_35224 [Nectria haematococca mpVI 77-13-4]
  misc_feature (52)..(375): NCBI GI: 212544750 Blast Desc: conserved [Penicillium marneffei ATCC 18224] gi|210065498|gb|EEA19592.1| conserved [Penicillium marneffei ATCC 18224]
  misc_feature (52)..(344): NCBI GI: 85113419 Blast Desc: NCU02161 [Neurospora crassa OR74A] gi|28926305|gb|EAA35284.1| [Neurospora crassa OR74A]
  misc_feature (49)..(344): NCBI GI: 46129348 Blast Desc: FG08859.1 [Gibberella zeae PH-1]
  misc_feature (255)..(373): NCBI GI: 240275175 Blast Desc: conserved [Ajellomyces capsulatus H143]
  misc_feature (255)..(373): NCBI GI: 154286690 Blast Desc: [Ajellomyces capsulatus NAm1] gi|150407781|gb|EDN03322.1| [Ajellomyces capsulatus NAm1]
  misc_feature (258)..(375): NCBI GI: 242813366 Blast Desc: conserved [Talaromyces stipitatus ATCC 10500] gi|218714491|gb|EED13914.1| conserved [Talaromyces stipitatus ATCC 10500]
MQTASRQFLHEAPASQVVTTSSSPDSAPEDGDSTLLPLAEADEEDDDDFPIERPRFSLPMGPDDDDDDADLKPPRLSGLEDENLTVQSIELPRRAIQDRSSLNSVRFSDYIGPEVQSDDVGIDSGFFPPPALDETEEVMMEEPPIIEHLDADERRQTMGQDSIFGAIEIPDAGNETTFMMAPISSPVRDPSRLDAIEDSDDGQDDGAAPLFEMDDDDDNDDMNEAEDLPDFEPNIGGGDENTLTRTIETGLTSHKGQKRKKGKKVSRHGIEYPSLPANVVKRLATTFARTTGSSKSKITPDTLDAIMQATDWYFEQLGDDLSAYAKHAGRNTINESDMITLMRRQRQTNSSTTPFTLAQRHLPRELLQEVRMPVPITKKLSRKKARRSEGEGEGEEEVT

SEQ ID NO: 31717 - DNA, 2942 bp, Muscodor strobelii
  misc_feature: SGI EST ID NO. CUFF.75090.2
  misc_feature: Variant of the nucleotide sequence at SEQ ID NO 31715
tagggtatcaacggttttagatgccactttggcgacaaattgtgatcaatggtggatgccatgacataggcgtgatcgatctttaaaaattgatatgtgatgtcggacaacaactcggggtcagccccccctcggccggcgctcactcctaaccacaccacgtgcctttgcaacaccaagccgaaatgcaaacggcgtcgaggcagtttctgcacgaaggtcagagctacgacgacacaatgtgggcgcaacacctcatgcgcgtgcggctagacggactattgatcagagacgcacagcaatcttcacaccaggtcgagctcggcggcgaagtctacgcgaacaacgggctacgccgcgcgacgctcttaggaatctgagtcggctattagccccggcttcacaagtcgtcactacatcttcatctccagactcagctcctgaagatggtgactctactttacttcctctcgctgaggccgatgaggaggatgatgatgatttccccattgagcgtcctcgcttctcacttccgatgggacctgatgatgatgacgatgatgcggatttgaaaccaccccggcttagtggactggaggatgagaatcttaccgtgcagtcgattgaactacctcgcagagctatccaggacagaagcagcttgaacagtgtgagatttagcgactatattgggcctgaagtgcagagtgacgatgtgggtattgactctggtttcttcccgcctcctgcgctggatgagacagaggaggtgatgatggaagaaccgcctatcattgagcacttggacgccgatgagagacggcagaccatgggacaagacagcatcttcggagctatcgagatcccagatgccggcaacgaaactacgtttatgatggcccctatctcatctcctgttcgagatccatcaagactggatgcaatcgaagattcagacgacggtcaagatgatggggctgctcctctctttgaaatggacgacgacgatgataatgacgatatgaacgaagcggaagatctccccgacttcgagccgaacatcggcggcggtgatgaaaacaccctcaccaggactatagagacaggtctcacatcacacaaaggccaaaaaagaaagaagggaaagaaggtctctagacatggcatagaatacccatctctacccgccaacgtcgtaaaacgcctagcaacgaccttcgcacgaacaaccggatcaagcaaaagcaagatcacgccagacactctcgacgcgatcatgcaagcaacagactggtactttgagcaactcggagacgatttatcagcatatgcgaaacacgcgggccgaaacacgatcaatgagagtgatatgattactctcatgcgacgacaaaggcagacgaatagctcaaccacgccgtttactctcgcccaacgccatctgccccgagagcttctccaggaggtgcgcatgccggtgccaattactaagaagctctcgcgaaagaaggcgaggcggtctgagggtgagggtgagggtgaggaagaagtgacttgaattgtcgccaacaatcagtcacttactagattacacgacatagtcaaattggctatgtaattgaggcctaggatcgaagtcgagggcgaaccggaggatttacttccactccttgttcatccgtacgcgccgggagatatctgttgggggcttcttgaccaccatgtagaacattatcgatgttgctatggccaaaccgtacctagagcgcgtcagtacagtggacagggcaaaacagcaagcaagaggaaaaggctcaccaagtgaagatgtactgggcatggttattcctcaggttaacctcagccggtctgccgatcggcatgcccttgctctccatctcaagagcctgcatcaagtcgggctctgcaacaaagctcggttagcagatacgtccatagatcccatccataaccaatggaccaaacaaattcaatcaagtcaatatgaacacagtgaagaaacatacccatagtctgctcaacccaaacagcctggctcccacttaattccgccatctgtttaacatcgggaaagtaaaactcccccttatccggtctattctcgggcgtaaacatattcttcttccacggctccctcaacaatccctcaaccacaacctcaccactcggtaacccctccctcctatctttctgtcgtctcaatttcttgctcacccacccccgattaacaagcaccgtagtacaccccctcccatcagttccccccggatctcgctccagaggtgtaacgaccatatatccatcctcaccatctcgcatacgagggccgacgagcatctcttgatcatgtcggtatctaccacgcgctacgacacggcggaaatcaaagtcgtggattgcggaggggtcgacgcgcggtgggaggggcaggggaggttggacgagtcggtcttcgaagcgagctatgagctcggttttccagcctaggcgctggacttgccatgttccgagtgcgagggcggtgatggggattatggcgaggattattagaccgggtccgtgacggcggccggcgcgcacgagttcggggggttatcgaggatggatgtgaagtttgggtcgtcgcctggttgtggtctttgaggtcttggtgcagagtttgtgaaagggcggcggggtgtgccctgggttcgggttggtgatttgcggatgtgtgggaatggtgatgagcagggtgtggtggaaggagtctgggagcggaactggtgctcgatcaggcgctctacgcgtccggcgagcgttcgctgtgatatccaggacttcatggttggtgtggttgtgttgcgatgaatgcgcgggtgctgattagggcggaattggcccggcgcatgtcgtttccggccgatactgggtgtcttgag

SEQ ID NO: 31718 - DNA, 603 bp, Muscodor strobelii
  misc_feature: SGI cDNA ID NO. 570923
  misc_feature: Encodes the peptide sequence at SEQ ID NO 31719
atggcagctcccggcgttcaatctctcaagtgcgtcgtcactggtgatggtgctgtcggaaagacatgtctcctgatctcatacacaacaaatgctttccctggcgaatacatccccaccgtctttgataattactctgccagtgttatggtcgatggcaagcctatcagtcttggattatgggacacggctggacaagaagattacgaccgcttgcgacctctgtcttacccccagaccgatgtcttcctcatctgcttcagcattgtctccccaccatcgttcgacaacgtcaaggccaagtggtttcccgaaatcgaccaccacgcccctaatatccccatcatcctggtcggcaccaagctcgatcttcgtgaggatcctgctacgctagagagcctccggtctaagagaatggagcccgtctcttacgaccaggctctcgtctgcgctaaggagatccgagcccacaagtacctggagtgttcagcgcttacgcagcgcaacctgaagagcgtctttgacgaggctatccgtgccgtattgaatccacgacccattgccagcaaaggcggcaagaagtccaagtgcagcatcctctag

SEQ ID NO: 31719 - protein, 200 aa, Muscodor strobelii
  misc_feature: SGI Peptide ID NO. 570923
  misc_feature (10)..(123): Pfam Id: PF08477 Pfam Desc: Miro-like protein
  misc_feature (10)..(183): Pfam Id: PF00071 Pfam Desc: Ras family
  misc_feature (1)..(200): NCBI GI: 39970529 Blast Desc: MGG_02731 [Magnaporthe grisea 70-15] gi|149209995|ref|XP_001522372.1| MGCH7_ch7g479 [Magnaporthe grisea 70-15] gi|86196434|gb|EAQ71072.1| MGCH7_ch7g479 grisea
  misc_feature (1)..(200): NCBI GI: 32892148 Blast Desc: RAC1 [Colletotrichum trifolii]
  misc_feature (1)..(200): NCBI GI: 164562252 Blast Desc: RAC1 [Colletotrichum gloeosporioides f. sp. aeschynomenes] gi|165881893|gb|ABY71214.1| RAC1 [Colletotrichum gloeosporioides f. sp. aeschynomenes]
  misc_feature (1)..(200): NCBI GI: 46129344 Blast Desc: FG08857.1 [Gibberella zeae PH-1]
  misc_feature (1)..(200): NCBI GI: 256733703 Blast Desc: [Nectria haematococca mpVI 77-13-4]
  misc_feature (1)..(200): NCBI GI: 117413990 Blast Desc: RacA [Epichloe festucae] gi|156765907|dbj|BAF79591.1| small GTPase [Epichloe festucae]
  misc_feature (2)..(200): NCBI GI: 154286684 Blast Desc: protein rho2 [Ajellomyces capsulatus NAm1] gi|150407778|gb|EDN03319.1| protein rho2 [Ajellomyces capsulatus NAm1] gi|225558778|gb|EEH07062.1| conserved [Ajellomyces G186AR]
  misc_feature (2)..(200): NCBI GI: 261193639 Blast Desc: ras family protein [Ajellomyces dermatitidis SLH14081] gi|239588830|gb|EEQ71473.1| ras family protein [Ajellomyces dermatitidis SLH14081]
  misc_feature (2)..(200): NCBI GI: 71000586 Blast Desc: Rho GTPase Rac [Aspergillus fumigatus Af293] gi|119493231|ref|XP_001263822.1| Rho GTPase Rac, [Neosartorya fischeri NRRL 181] gi|66852613|gb|EAL92938.1| Rho GTPase Rac, Rho
  misc_feature (1)..(185): NCBI GI: 164511883 Blast Desc: Rho-GTPase [Claviceps purpurea]
  misc_feature (9)..(190): SWISSPROT Homolog: EC 2.7.11.1 Non-specific serine/threonine protein kinase
MAAPGVQSLKCVVTGDGAVGKTCLLISYTTNAFPGEYIPTVFDNYSASVMVDGKPISLGLWDTAGQEDYDRLRPLSYPQTDVFLICFSIVSPPSFDNVKAKWFPEIDHHAPNIPIILVGTKLDLREDPATLESLRSKRMEPVSYDQALVCAKEIRAHKYLECSALTQRNLKSVFDEAIRAVLNPRPIASKGGKKSKCSIL

SEQ ID NO: 31720 - DNA, 4763 bp, Muscodor strobelii
  misc_feature: SGI EST ID NO. CUFF.75359.0
  misc_feature: Variant of the nucleotide sequence at SEQ ID NO 31718
acttgatattgcaatatgacttctaacctaacccattggctaccaaaccctggtgaggggaatcttacgcgctaaactgagtgccgcagtgcatcaggattcgaaatactcaacactaacctggattgatattcagtctgctgtgcgttttgctactcttaatcaggaatgtccatcgacttccattgcacagatccaatcagatttgagggcaactgcgaactggaattcgagatggagctgcccaggcaagagacggagctatcatgaccccgcgccattacagcggccacagagcactatcgctaccatgtgggcaataggaggttgtccatatcgcctgtagaccacgctagccgacgcttggactagctgtatctcacatgagtccctgaaactattcgatgctttgtacagggacaaacagttgcgagccaaaaagctccttgatccctgtttgcgatggcaacaagcctacaatgaaccgagagaatggcgtctagatggatagtcaaagtacatgtacatcaatcataattccacgaattctcaagacctaaactgttccatctgattgaatggatggactcgaagggaaagaaggaggtgcactgtaatccgtagaagtggttcattggaggatcctgaggtcgaccgccattctggcttgggcatctttggcgagcttgacttgcttttctatcgggcttgacgtcttttttgagtactatattcttctttttgtactcaccatcggcatatacatcgtcacaaccttgaatgcacgattgcctatccgtagctaagctgtgcgcaacacggcatcacgaccttgcatccacacccgagtcgatagatccctgactgctccatccgccgtcaccactaccacaattcacatatccacaccaacaattcccgacctctttgtcccgcgttgatctttctggccttgtcccgtctgcctttccgctgccttgatgatacattcttcgtagccctgaacacatctatccgccagtctttggattgatctaatctttcacacccggccgtccagcagtgctgtcagaaccttaaactcaccttattctgtaagttaatcgtcctcgtacacccttgcgaaggtgcgtgcctgtgccgttgccggcctctgctctttcaacattcaaggtcaacatccccagcctcttcttgcctgactcgccactctgcgatactgtcgagactgggcaatcacgacccatgagcatgggctgggtccagtctccaggcaagagaggctatcacacctgccatcaccgccctggacttcacttccagaccgaatcacctctcgcttctccctttgtgtatgcatgtgcctcaaactctcagactctcggactttacataaactacccgctcctaccacagccgactgcgcgagaggaagtgcatcatattgcattcgacaagtcgacgctgcaggacgcttgcaccacccaccccccagcatctcaaccatcccagacttcagagcatacctacctggtcgagacaaggtcccacctctagcaaagagctctttgggaagtcggggtacaacaccgtcttagccatttccatcccatcctatcgccaatccttgcaatcgcacggtcgtgtgctgcccaacctctgcaatctgcgatctgcaatttgcaacctcgacgactccaggaagtctttcggcttttctaggaacgctgtgctgactgttatacaagcttttgtcacccattaggactcgacccgactgtccttgacctctaattcctcctgcaacccctgcctgcagcctcctgattcggaacaaacaggctcgacacccgacaagagcggcagactgatcctcgattcctttgttcttctgctacacagcattgtactcgcttaatccacattctcgcgaaacatggcagctcccggcgttcaatctctcaagtgcgtcgtcactggtgatggtgctgtcggaaagacatgtctcctgatctcatacacaacaaatgctttccctggcgaatacatccccaccgtctttgataattactctgccagtgttatggtcgatggcaagcctatcagtcttggattatgggacacggctggacaagaagattacgaccgcttgcgacctctgtcttacccccagaccgatgtcttcctcatctgcttcagcattgtctccccaccatcgttcgacaacgtcaaggccaagtggtttcccgaaatcgaccaccacgcccctaatatccccatcatcctggtcggcaccaagctcgatcttcgtgaggatcctgctacgctagagagcctccggtctaagagaatggagcccgtctcttacgaccaggctctcgtctgcgctaaggagatccgagcccacaagtacctggagtgttcagcgcttacgcagcgcaacctgaagagcgtctttgacgaggctatccgtgccgtattgaatccacgacccattgccagcaaaggcggcaagaagtccaagtgcagcatcctctagatacccgccctcgatccgatccgcatataatatttggccaaattgggaatatcttggcgagcaataccggcgttttggggctatataggaaagacaagctctttctggggggatcgacatgtcgaggctgtcagctgcaccggccatctacatggattcccgcgtccactcctttttacgaaacatcacatcgcacatacccgattatctagtagcccgcattcgcagggcacaaaatgatcatcaaattcacctcgagacaggcgagagacgaactacagaagcatgacgacacgtgagagtgacgtgacacagaagacaggaggtcgagtgatttgtcgagcattggtattttttttcgctgcgcatcgcaagggcttgattccttttttccgttcagaatactcgatacccgggctcctctggtcggctgctgtccacttgtcctccagagatcttggttctagccaagttggagagaattcgcagtcgccggtagctaataggaatgctcgtctccaactaattctgatcacacaccccctagactctctcaatagaaaccgcaaagctttacggcgctacatggacacggatgcttacgtctctttcgcgaaacgaatcgatgcacttctgtagatagtaggcaaggctacaagaaaggaaatgaaaatttattcaagaaacacaacgactggcaaaatggactcttttgacttttgtgaccgtagttaattaacgtaacctgacattgaatttattgcttcgccgaactcttgtatgatgctaatactcactgcattactgtgcgtgtgagattgtttggcacttcgggtatcattccatctcaccgttgttcactcaacttcttttttttcctgtatcccctttttctcttcaccccgctcatcacataacgccgtctagccacatgcccccaacaccaacgccagcgtccgatctcaatctacctaatccttcaccacaagtttcctacgactgggatggaccgcatcttctatccctcctccgttcttttcttcttcgtcgccattactggtaccggtggctttgtcacgggctttcttgtcctttaggcgctgctcttcttgagcccggcgcgcgcgttcttcgtttagctttgtgtttttatcggcgatgcgttgacggcggtaggttgtgtttccgccgcctcctgctgttagttctacgtttatctttcgttcttccattggtccgtccattcctccctctgcgccattcccgccctttcctgcgccgaacttgttgcctcgtccacctttgttgtttttcattggcacgttggcgcctgttgcggctttggggaccttgaagatggagtggtggtatagtttgagagccgtcttcatgtggtcgtaccgagagaactcgacgaatgctatgcctcgtgattttgtggggttgttcttttcgtgcagcagacggacggaggtcgggtgtacggaggagaagtgtgtggagatttgggtggttgttgcgctgtaggggaggttgcctacgaagactatgaagcgctgtttggctgtgttggctgtagtggtaccggcgtcggcgatttgctcgtcagcgggcgcactgggggtggaggcggtgggagtgtcgatgtccattgagtctttgggtttggttgacttggttgacttggtggaagttgtggccttggtatcggtctcggtggaggcgttgggagtgtctttcttggatttcttcttcttgtcctttttgctcttcttcgtgggtttgggttcttccttgtcgtcttctaggggtatgaagtcggtcataggctcattcttcgtctcagacacttgctcttgttcctctgttgcgtgcgcctcgatcttagatttagacttcttatccttcttcttgccactttgtccttcttcgacttcttgcgctcgatatttgcgccgtcgtcatcggctgtgctagtgcgtctgcgcttcttagacagatctacgagggtcattgtggtgaggtcctcggcctcgacgtcgcgcgacttgcgcttcttggttgaggaggacatggtgtcgcgggaccttggtagggtcagatgtagagttgtaagtggattgggtgatgtcgctagtaagtaatggcaccttggagatctgaaaaggagtagagatcagagaaacgggtcgagaagggatgttgtagtgggggagaagtgagg

SEQ ID NO: 31721 - DNA, 1047 bp, Muscodor strobelii
  misc_feature: SGI cDNA ID NO. 570924
  misc_feature: Reduced expression when VOC is produced
  misc_feature: Encodes the peptide sequence at SEQ ID NO 31722
atgtcctcctcaaccaagaagcgcaagtcgcgcgacgtcgaggccgaggacctcaccacaatgaccctcgtagatctgtctaagaagcgcagacgcactagcacagccgatgacgacggcgcaaatatcgagcgcaagaagtcgaagaaggacaaagaacaagagcaagtgtctgagacgaagaatgagcctatgaccgacttcatacccctagaagacgacaaggaagaacccaaacccacgaagaagagcaaaaaggacaagaagaagaaatccaagaaagacactcccaacgcctccaccgagaccgataccaaggccacaacttccaccaagtcaaccaagtcaaccaaacccaaagactcaatggacatcgacactcccaccgcctccacccccagtgcgcccgctgacgagcaaatcgccgacgccggtaccactacagccaacacagccaaacagcgcttcatagtcttcgtaggcaacctcccctacagcgcaacaaccacccaaatctccacacacttctcctccgtacacccgacctccgtccgtctgctgcacgaaaagaacaaccccacaaaatcacgaggcatagcattcgtcgagttctctcggtacgaccacatgaagacggctctcaaactataccaccactccatcttcaaggtccccaaagccgcaacaggcgccaacgtgccaatgaaaaacaacaaaggtggacgaggcaacaagttcggcgcaggaaagggcgggaatggcgcagagggaggaatggacggaccaatggaagaacgaaagataaacgtagaactaacagcaggaggcggcggaaacacaacctaccgccgtcaacgcatcgccgataaaaacacaaagctaaacgaagaacgcgcgcgccgggctcaagaagagcagcgcctaaaggacaagaaagcccgtgacaaagccaccggtaccagtaatggcgacgaagaagaaaagaacggaggagggatagaagatgcggtccatcccagtcgtaggaaacttgtggtgaaggattag

SEQ ID NO: 31722 - protein, 348 aa, Muscodor strobelii
  misc_feature: SGI Peptide ID NO. 570924
  misc_feature (158)..(229): Pfam Id: PF00076 Pfam Desc: RNA recognition motif. (a.k.a. RRM, RBD, or RNP domain)
  misc_feature (158)..(223): Pfam Id: PF00076 Pfam Desc: RNA recognition motif. (a.k.a. RRM, RBD, or RNP domain)
  misc_feature (143)..(345): NCBI GI: 116193455 Blast Desc: CHGG_06445 [Chaetomium globosum CBS 148.51] gi|88182358|gb|EAQ89826.1| CHGG_06445 [Chaetomium globosum CBS 148.51]
  misc_feature (142)..(342): NCBI GI: 39970527 Blast Desc: MGG_02730 [Magnaporthe grisea 70-15] gi|145017460|gb|EDK01823.1| MGG_02730 [Magnaporthe grisea 70-15]
  misc_feature (42)..(345): NCBI GI: 154290578 Blast Desc: BC1G_15633 [Botryotinia fuckeliana B05.10] gi|150847528|gb|EDN22721.1| BC1G_15633 [Botryotinia fuckeliana B05.10]
  misc_feature (142)..(342): NCBI GI: 149209993 Blast Desc: MGCH7_ch7g478 [Magnaporthe grisea 70-15] gi|86196433|gb|EAQ71071.1| MGCH7_ch7g478 [Magnaporthe grisea 70-15]
  misc_feature (126)..(342): NCBI GI: 159127989 Blast Desc: RNA binding protein [Aspergillus fumigatus A1163]
  misc_feature (126)..(342): NCBI GI: 71000583 Blast Desc: RNA binding protein [Aspergillus fumigatus Af293] gi|66852612|gb|EAL92937.1| RNA binding protein [Aspergillus fumigatus Af293]
  misc_feature (147)..(348): NCBI GI: 85113411 Blast Desc: NCU02159 [Neurospora crassa OR74A] gi|28926303|gb|EAA35282.1| [Neurospora crassa OR74A]
  misc_feature (126)..(342): NCBI GI: 119493229 Blast Desc: RNA binding protein [Neosartorya fischeri NRRL 181] gi|119411981|gb|EAW21924.1| RNA binding protein [Neosartorya fischeri NRRL 181]
  misc_feature (145)..(345): NCBI GI: 156035955 Blast Desc: SS1G_13182 [Sclerotinia sclerotiorum 1980] gi|154698586|gb|EDN98324.1| SS1G_13182 [Sclerotinia sclerotiorum 1980]
  misc_feature (142)..(342): NCBI GI: 67537156 Blast Desc: AN4748.2 [Aspergillus nidulans FGSC A4] gi|40741600|gb|EAA60790.1| AN4748.2 [Aspergillus nidulans FGSC A4] gi|259482412|tpe|CBF76872.1| TPA: RNA binding protein FGSC
  misc_feature: Useful for introducing or modulating the production of volatile compounds
MSSSTKKRKSRDVEAEDLTTMTLVDLSKKRRRTSTADDDGANIERKKSKKDKEQEQVSETKNEPMTDFIPLEDDKEEPKPTKKSKKDKKKKSKKDTPNASTETDTKATTSTKSTKSTKPKDSMDIDTPTASTPSAPADEQIADAGTTTANTAKQRFIVFVGNLPYSATTTQISTHFSSVHPTSVRLLHEKNNPTKSRGIAFVEFSRYDHMKTALKLYHHSIFKVPKAATGANVPMKNNKGGRGNKFGAGKGGNGAEGGMDGPMEERKINVELTAGGGGNTTYRRQRIADKNTKLNEERARRAQEEQRLKDKKARDKATGTSNGDEEEKNGGGIEDAVHPSRRKLVVKD

SEQ ID NO: 31723 - DNA, 1740 bp, Muscodor strobelii
  misc_feature: SGI cDNA ID NO. 570925
  misc_feature: Reduced expression when VOC is produced
  misc_feature: Encodes the peptide sequence at SEQ ID NO 31724
atgtctgaaccacccgccgaacctcaagcagcaggcgctgctgccccgcagccagcagagggtgaagctcccgcccagtcaaagaagggagcaaagaaggctgaagcaaaagctaagaaggaagctgagaaggcacgaaaggctgccgaaagagaagctgctgcagctgctcagaaagctgctgggggtggtaatgaggatcttgcgaaggacaactatggcgacgttaagccttctacgaaagtggatgccgaacgggtacagctcaagaaattgggcgacgaacacttggagaagacgatcaagctacgcgcctggattcagaatgctcgtatgcagggagccaaaatggctttcatcgagttacgagaggagcgcaactggactattcagggtgttattgcagccagcgccgaaggtacccccgtgagcaaacagatggtcaaatgggtgggcgcattgcgacttgaaagttttgtcctagttgaggccaaggttacgaagcctttagagcctgtcaagagctgtaaggtcagcgactacgagctgcacatcacgaagtgctactgcattgccgccggacctgaagtcttgggcttgagtctcaatgcctctaacaaggctgttggtagcttcgatgatgaggacccatctcaacaagctgctactgctgctgtcaccgaaggtgtcgaaaacttgtccttgggcgactctgctcctctcgcctctctatctacacatctcaacaaccccgtcatgcacaaacgtgccccgatccaacaagccatcgccgatgtacgaatgatgaccaggaagctgtttggcgagtacctcgaggcgcgcgacttcgtccagttcgagcccccgtgtcttattggtgccgcttctgaaggcggcgcaaacgtctttgctatgccatacttcgacaaaaaggcctatcttgcccaatcaccacaattttacaagcaattcgagattgccggtggaagaaaacgcgtatactgcattggacccgttttcagagcggagaactccaacaccccgagacacatgactgagttcaccggtctcgatatggagatggagatcgaggaccactatcatgaagtccgcgacatgatcgagggtctcatgatgcacatctttcgaggaatcgagtcgaaatgcaaagatcaaatcgatttcatccgaactatctacccgtctgaggatttcttgctccccgagcctggcaaggaggtcagacttacattcgccgaggggcagaagcttctgcgagaggaggggcccgaggagtaccgaaacgtcagtgatgacgaggacatgagcacaccggtgcaggagaaggcgctgggagctttgatacgcaagaagttcaacactgacttctatgttctggacaagttccctgagggcgctcgtcccttctacacgatcgaggaccccgagaatcccaaagtgtgcaatgcatatgattttttcatgagggggcaggaaatcttgtccggtggacagcgtattcatcttcccgaagtgctggaagctcgactaaggaggaagggtatcgacccgactagccccggtattaaggagtatgtggacgtgtttaagtcggctggtgttcctccgcatggtggcggcggtattggtcttgacagagttgttgcttggtacttgaacttgcccagtgttcacttgacgagttattaccctagaactcctaagagacttcttccttag

SEQ ID NO: 31724 - protein, 579 aa, Muscodor strobelii
  misc_feature: SGI Peptide ID NO. 570925
  misc_feature (101)..(191): Pfam Id: PF01336 Pfam Desc: OB-fold nucleic acid binding domain
  misc_feature (243)..(575): Pfam Id: PF00152 Pfam Desc: tRNA synthetases class II (D, K and N)
  misc_feature (63)..(579): NCBI GI: 256733586 Blast Desc: NECHADRAFT_91963 [Nectria haematococca mpVI 77-13-4]
  misc_feature (66)..(579): NCBI GI: 261353210 Blast Desc: aspartyl-tRNA synthetase [Verticillium albo-atrum VaMs.102]
  misc_feature (63)..(579): NCBI GI: 85114715 Blast Desc: aspartyl-tRNA synthetase [Neurospora crassa OR74A] gi|28926534|gb|EAA35505.1| aspartyl-tRNA synthetase [Neurospora crassa OR74A] gi|38636451|emb|CAE81986.1| related to ligase
  misc_feature (67)..(579): NCBI GI: 156046677 Blast Desc: aspartate-tRNA ligase [Sclerotinia sclerotiorum 1980] gi|154693834|gb|EDN93572.1| aspartate-tRNA ligase [Sclerotinia sclerotiorum 1980]
  misc_feature (66)..(579): NCBI GI: 171683941 Blast Desc: protein product [Podospora anserina] gi|170941931|emb|CAP67583.1| protein product [Podospora anserina]
  misc_feature (66)..(577): NCBI GI: 145609922 Blast Desc: MGG_12574 [Magnaporthe grisea 70-15] gi|145017307|gb|EDK01670.1| MGG_12574 [Magnaporthe grisea 70-15]
  misc_feature (66)..(577): NCBI GI: 149210307 Blast Desc: MGCH7_ch7g631 [Magnaporthe grisea 70-15] gi|86196586|gb|EAQ71224.1| MGCH7_ch7g631 [Magnaporthe grisea 70-15]
  misc_feature (65)..(532): NCBI GI: 116193069 Blast Desc: CHGG_06252 [Chaetomium globosum CBS 148.51] gi|88182165|gb|EAQ89633.1| CHGG_06252 [Chaetomium globosum CBS 148.51]
  misc_feature (117)..(579): NCBI GI: 154322360 Blast Desc: BC1G_01327 [Botryotinia fuckeliana B05.10] gi|150850574|gb|EDN25767.1| BC1G_01327 [Botryotinia fuckeliana B05.10]
  misc_feature (1)..(579): NCBI GI: 46117424 Blast Desc: FG04554.1 [Gibberella zeae PH-1]
  misc_feature (66)..(579): SWISSPROT Homolog: EC 6.1.1.12 Aspartate--tRNA ligase
  misc_feature: Useful for introducing or modulating the production of volatile compounds
MSEPPAEPQAAGAAAPQPAEGEAPAQSKKGAKKAEAKAKKEAEKARKAAEREAAAAAQKAAGGGNEDLAKDNYGDVKPSTKVDAERVQLKKLGDEHLEKTIKLRAWIQNARMQGAKMAFIELREERNWTIQGVIAASAEGTPVSKQMVKWVGALRLESFVLVEAKVTKPLEPVKSCKVSDYELHITKCYCIAAGPEVLGLSLNASNKAVGSFDDEDPSQQAATAAVTEGVENLSLGDSAPLASLSTHLNNPVMHKRAPIQQAIADVRMMTRKLFGEYLEARDFVQFEPPCLIGAASEGGANVFAMPYFDKKAYLAQSPQFYKQFEIAGGRKRVYCIGPVFRAENSNTPRHMTEFTGLDMEMEIEDHYHEVRDMIEGLMMHIFRGIESKCKDQIDFIRTIYPSEDFLLPEPGKEVRLTFAEGQKLLREEGPEEYRNVSDDEDMSTPVQEKALGALIRKKFNTDFYVLDKFPEGARPFYTIEDPENPKVCNAYDFFMRGQEILSGGQRIHLPEVLEARLRRKGIDPTSPGIKEYVDVFKSAGVPPHGGGGIGLDRVVAWYLNLPSVHLTSYYPRTPKRLLP

SEQ ID NO: 31725 - DNA, 2232 bp, Muscodor strobelii
  misc_feature: SGI EST ID NO. CUFF.75430.1
  misc_feature: Variant of the nucleotide sequence at SEQ ID NO 31723
cagaaggtcaataaatctttcgatctcggaacggcaacttgactcattcccctattatcttctacttaaacccacaatcaatccaccgttccgtcagattcgttcttttacagcccagtgtacaaacatgtctgaaccacccgccgaacctcaagcagcaggcgctgctgccccgcagccagcagagggtgaagctcccgcccagtcaaagaagggagcaaagaaggctgaagcaaaagctaagaaggaagctgagaaggcacgaaaggctgccgaaagagaagctgctgcagctgctcagaaagctgctgggggtggtaatgaggatcttgcgaaggacaactatggcgacgttaagccttctacgaaagtggatgccgaacgggtacagctcaagaaattgggcgacgaacacttggagaagacgatcaagctacgcgcctggattcagaatgctcgtatgcagggagccaaaatggctttcatcgagttacgagaggagcgcaactggactattcagggtgttattgcagccagcgccgaaggtacccccgtgagcaaacagatggtcaaatgggtgggcgcattgcgacttgaaagttttgtcctagttgaggccaaggttacgaagcctttagagcctgtcaagagctgtaaggtcagcgactacgagctgcacatcacgaagtgctactgcattgccgccggacctgaagtcttgggcttgagtctcaatgcctctaacaaggctgttggtagcttcgatgatgaggacccatctcaacaagctgctactgctgctgtcaccgaaggtgtcgaaaacttgtccttgggcgactctgctcctctcgcctctctatctacacatctcaacaaccccgtcatgcacaaacgtgccccgatccaacaagccatcgccgatgtacgaatgatgaccaggaagctgtttggcgagtacctcgaggcgcgcgacttcgtccagttcgagcccccgtgtcttattggtgccgcttctgaaggcggcgcaaacgtctttgctatgccatacttcgacaaaaaggcctatcttgcccaatcaccacaattttacaagcaattcgagattgccggtggaagaaaacgcgtatactgcattggacccgttttcagagcggagaactccaacaccccgagacacatgactgagttcaccggtctcgatatggagatggagatcgaggaccactatcatgaagtccgcgacatgatcgagggtctcatgatgcacatctttcgaggaatcgagtcgaaatgcaaagatcaaatcgatttcatccgaactatctacccgtctgaggatttcttgctccccgagcctggcaaggaggtcagacttacattcgccgaggggcagaagcttctgcgagaggaggggcccgaggagtaccgaaacgtcagtgatgacgaggacatgagcacaccgtaagtcgcgcttgtttcgatcgaggaacctggcaacgcccgggagttctagaacatgacaacgccattccaggccctcacgaataggaagaaggactaacatattttgatacactaggcaggagaaggcgctgggagctttgatacgcaagaagttcaacactgacttctatgttctggacaagttccctgagggcgctcgtcccttctacacgatcgaggaccccgagaatcccaaagtgtgcaatgcatatgattttttcatgagggggcaggaaatcttgtccggtggacagcgtattcatcttcccgaagtgctggaagctcgactaaggaggaagggtatcgacccgactagccccggtattaaggagtatgtggacgtgtttaagtcggctggtgttcctccgcatggtggcggcggtattggtcttgacagagttgttgcttggtacttgaacttgcccagtgttcacttgacgagttattaccctagaactcctaagagacttcttccttaggaactgcgggctgctccagatagagactagacaggatgagagatgagatatcgtgtacagcaaaaaggatggacgagccagaagagatgtacaaggcaaatgagatggccaaagcagaagagacaaaactgatcgttggaaatcataccaacatctgtaatggaacctgaatccaaagtgaatattgaatgtcagacggcggacctggtgagtactccgtagcacagagacgcaccaatgctaatgccgc

SEQ ID NO: 31726 - DNA, 834 bp, Muscodor strobelii
  misc_feature: SGI cDNA ID NO. 570926
  misc_feature: Encodes the peptide sequence at SEQ ID NO 31727
atgtcaggagaccgccctgtcaaaaagggagatagtctcgtcaaagcagaagagtactacagcaaaacagccacagcccggccaactgccaaagccaaatcaaagaagcgagcccatgaagacgatggcacagctcaaaagaaacaaaaacggagaaaagcagcatacgaacaagaagacttagatctcgaccttgaagcggggttaaataagaagatcgcttctctagacagtatgttactagcagatcacattgcgcagaaaacgagaagattcggcactgagttgaagcctgttgagttatccgctttggatatctcaccaaacgcaatcaaagactcaagttcattctctgagtcaagagacctggagcatctccctgcgttcttggagtttcatgcagagagccccgagaaacttggcgaggcttcgaaggagaagggttctccgcatacgcttattgtcaccggcgcggggctgagagctgcggatattgtgagagctgttaggaaataccagactaagaaggttactgttgcgaagctgttcgcaaaacatatcaaaattgaggaaagcaaacagttcctggagaagcatcgtacaggtattgccgtggggacgccggtgagattgactgatctcttggagagcggagctctgaagttagacaagctcgagagaatggtagtagacgcatcacacatcgaccaaaagaaacgaggaataatggacatgaaagacactatgcttcccctcgcccgctggctctccagaccagagttcaaagagcgatacgtggaccctgagaaaccgttacagctcttgttctattga

SEQ ID NO: 31727 - protein, 277 aa, Muscodor strobelii
  misc_feature: SGI Peptide ID NO. 570926
  misc_feature (31)..(277): NCBI GI: 261353474 Blast Desc: conserved [Verticillium albo-atrum VaMs.102]
  misc_feature (31)..(277): NCBI GI: 171684847 Blast Desc: protein product [Podospora anserina] gi|170942384|emb|CAP68036.1| protein product [Podospora anserina]
  misc_feature (46)..(277): NCBI GI: 145610078 Blast Desc: MGG_12603 [Magnaporthe grisea 70-15] gi|145017463|gb|EDK01826.1| MGG_12603 [Magnaporthe grisea 70-15]
  misc_feature (34)..(277): NCBI GI: 85113454 Blast Desc: NCU02169 [Neurospora crassa OR74A] gi|28926313|gb|EAA35292.1| conserved [Neurospora crassa OR74A]
  misc_feature (32)..(277): NCBI GI: 46129328 Blast Desc: FG08849.1 [Gibberella zeae PH-1]
  misc_feature (34)..(277): NCBI GI: 256734200 Blast Desc: [Nectria haematococca mpVI 77-13-4]
  misc_feature (29)..(277): NCBI GI: 156035949 Blast Desc: SS1G_13179 [Sclerotinia sclerotiorum 1980] gi|154698583|gb|EDN98321.1| SS1G_13179 [Sclerotinia sclerotiorum 1980]
  misc_feature (29)..(277): NCBI GI: 154290572 Blast Desc: BC1G_15630 [Botryotinia fuckeliana B05.10] gi|150847525|gb|EDN22718.1| BC1G_15630 [Botryotinia fuckeliana B05.10]
  misc_feature (67)..(277): NCBI GI: 121704776 Blast Desc: conserved [Aspergillus clavatus NRRL 1] gi|119398797|gb|EAW09225.1| conserved [Aspergillus clavatus NRRL 1]
  misc_feature (67)..(277): NCBI GI: 145245383 Blast Desc: An11g10000 [Aspergillus niger] gi|134079659|emb|CAK97085.1| protein product [Aspergillus niger]
MSGDRPVKKGDSLVKAEEYYSKTATARPTAKAKSKKRAHEDDGTAQKKQKRRKAAYEQEDLDLDLEAGLNKKIASLDSMLLADHIAQKTRRFGTELKPVELSALDISPNAIKDSSSFSESRDLEHLPAFLEFHAESPEKLGEASKEKGSPHTLIVTGAGLRAADIVRAVRKYQTKKVTVAKLFAKHIKIEESKQFLEKHRTGIAVGTPVRLTDLLESGALKLDKLERMVVDASHIDQKKRGIMDMKDTMLPLARWLSRPEFKERYVDPEKPLQLLFY

SEQ ID NO: 31728 - DNA, 1810 bp, Muscodor strobelii
  misc_feature: SGI EST ID NO. CUFF.75451.0
  misc_feature: Variant of the nucleotide sequence at SEQ ID NO 31726
cgtttatccaaccttgattttcaccatctagtctttttataccacactcacaatacacctctcactctgcatcgtgaagcccacgtcctggtcttctgcgaataatcttcacgatgtcaggagaccgccctgtcaaaaagggagatagtctcgtcaaagcagaagagtactacagcaaaacagccacagcccggccaactgccaaagccaaatcaaagaagcgagcccatgaagacgatggcacagctcaaaagaaacaaaaacggagaaaagcagcatacgaacaagaagacttagatctcgaccttgaagcggggttaaataagaagatcgcttctctagacagtatgttactagcagatcacattgcgcagaaaacgagaagattcggcactgagttgaagcctgttgagttatccgctttggatatctcaccaaacgcaatcaaagactcaagttcattctctgagtcaagagacctggagcatctccctgcgttcttggagtttcatgcagagagccccgagaaacttggcgaggcttcgaaggagaagggttctccgcatacgcttattgtcaccggcgcggggctgagagctgcggatattgtgagagctgttaggaaataccagactaagaaggttactgttgcgaagctggtgggtcctgttttattaagatgttgagtgtggtgggctaatagtgtctagttcgcaaaacatatcaaaattgaggaaagcaaacagttcctggagaagcatcgtacaggtattgccgtggggacgccggtgagattgactgatctcttggagagcggagctctgaagttagacaagctcgagagaatggtagtagacgcatcacacatcgaccaaaagaaacgaggaataatggacatgaaagacactatgcttcccctcgcccgctggctctccagaccagagttcaaagagcgatacgtggaccctgagaaaccgttacagctcttgttctattgatgtatctctctcctcaaagttgtccagcgacatcttcccctagctatgatacgatcgccacacctatgatacccagaaccatgcgatcctcgatagcaataaaaattggtcgtcattaccaggattatgtaacagatagtgaaaccgagaacgcaaccccataacattacagatgtatgttcaagcccttaacctggctgttcatgtctatgtctatgtgccctctgtttctcttttcgtttgtagtcgtttttctttcccttgtgattagcatgtaggttaggtaggtgtggatacatgccggaaacgagtgttcgtcgaggaatgtatgatctagtatccgttgatccagtagtcttgtagcaagacgattgcgagccataccacgagcccgatatacgaagcttcggctcgggaggccgtggattgcgtgatgacccaaggtcgactgagattggaactgtcggtcgttgagctctcgtcgctgctaccgtcgccaccgaagaagggtgttggggtaggggctagcgtgatggtgaacgttacgtggtctgtgaaggtcgtcatcaccgtggtcacggggaaggtttgcggggcgctctctatccgtaagggcatgccggggacttctgggagctggcgtccggcgagatagtctgcctcgcgggctcgaagtagttcatcgcttatgggtcctggcgctaccatgtagatttcggctcctgattccatgcaggttgtgattgtgctgcttaaggctttgccgtaggtgagggagtcgcattgggagtacaggcattggaatagggact

SEQ ID NO: 31729 - DNA, 606 bp, Muscodor strobelii
  misc_feature: SGI cDNA ID NO. 570927
  misc_feature: Encodes the peptide sequence at SEQ ID NO 31730
atgctgaagttagacgtggggacggatcctgatcttccaagctgtgcttctcactgcatgcttgatagcatgtttgtcacacagtgtcttgacatgaactgtctgtgtcatcaacaggagtatcagaggtccctattccaatgcctgtactcccaatgcgactccctcacctacggcaaagccttaagcagcacaatcacaacctgcatggaatcaggagccgaaatctacatggtagcgccaggacccataagcgatgaactacttcgagcccgcgaggcagactatctcgccggacgccagctcccagaagtccccggcatgcccttacggatagagagcgccccgcaaaccttccccgtgaccacggtgatgacgaccttcacagaccacgtaacgttcaccatcacgctagcccctaccccaacacccttcttcggtggcgacggtagcagcgacgagagctcaacgaccgacagttccaatctcagtcgaccttgggtcatcacgcaatccacggcctcccgagccgaagcttcgtatatcgggctcgtggtatggctcgcaatcgtcttgctacaagactactggatcaacggatactag

SEQ ID NO: 31730 - protein, 201 aa, Muscodor strobelii
  misc_feature: SGI Peptide ID NO. 570927
MLKLDVGTDPDLPSCASHCMLDSMFVTQCLDMNCLCHQQEYQRSLFQCLYSQCDSLTYGKALSSTITTCMESGAEIYMVAPGPISDELLRAREADYLAGRQLPEVPGMPLRIESAPQTFPVTTVMTTFTDHVTFTITLAPTPTPFFGGDGSSDESSTTDSSNLSRPWVITQSTASRAEASYIGLVVWLAIVLLQDYWINGY

SEQ ID NO: 31731 - DNA, 1531 bp, Muscodor strobelii
  misc_feature: SGI EST ID NO. CUFF.75452.2
  misc_feature: Variant of the nucleotide sequence at SEQ ID NO 31729
cggatcctgatcttccaagctgtgcttctcactgcatgcttgatagcatgtttgtcacacagtgtcttgacatgaactgtctgtgtcatcaacaggagtatcagaggtccctattccaatgcctgtactcccaatgcgactccctcacctacggcaaagccttaagcagcacaatcacaacctgcatggaatcaggagccgaaatctacatggtagcgccaggacccataagcgatgaactacttcgagcccgcgaggcagactatctcgccggacgccagctcccagaagtccccggcatgcccttacggatagagagcgccccgcaaaccttccccgtgaccacggtgatgacgaccttcacagaccacgtaacgttcaccatcacgctagcccctaccccaacacccttcttcggtggcgacggtagcagcgacgagagctcaacgaccgacagttccaatctcagtcgaccttgggtcatcacgcaatccacggcctcccgagccgaagcttcgtatatcgggctcgtggtatggctcgcaatcgtcttgctacaagactactggatcaacggatactagatcatacattcctcgacgaacactcgtttccggcatgtatccacacctacctaacctacatgctaatcacaagggaaagaaaaacgactacaaacgaaaagagaaacagagggcacatagacatagacatgaacagccaggttaagggcttgaacatacatctgtaatgttatggggttgcgttctcggtttcactatctgttacataatcctggtaatgacgaccaatttttattgctatcgaggatcgcatggttctgggtatcataggtgtggcgatcgtatcatagctaggggaagatgtcgctggacaactttgaggagagagatacatcaatagaacaagagctgtaacggtttctcagggtccacgtatcgctctttgaactctggtctggagagccagcgggcgaggggaagcatagtgtctttcatgtccattattcctcgtttcttttggtcgatgtgtgatgcgtctactaccattctctcgagcttgtctaacttcagagctcctatagtagcatgtcagattctgagacttattggatctagagttgtgaacttaccgctctccaagagatcagtcaatctcaccggcgtccccacggcaatacctgtacgatgcttctccaggaactgtttgctttcctcaattttgatatgttttgcgaactagacactattagcccaccacactcaacatcttaataaaacaggacccaccagcttcgcaacagtaaccttcttagtctggtatttcctaacagctctcacaatatccgcagctctcagccccgcgccggtgacaataagcgtatgcggagaacccttctccttcgaagcctcgccaagtttctcggggctctctgcatgaaactccaagaacgcagggagatgctccaggtctcttgactcagagaatgaacttgagtctttgattgcgt

SEQ ID NO: 31732 - DNA, 3147 bp, Muscodor strobelii
  misc_feature: SGI cDNA ID NO. 570928
  misc_feature: Encodes the peptide sequence at SEQ ID NO 31733
atggatcctttcacggcactaggagtagcagctgcagcacttcagttcttcgaatttacgcgcaagatctttactgaggttcacgggaggcaacccggtggtcaggcgcttacgattgaggttttcgagagcacgactcgagatctgatgatttatatgaagcttctgcagagtcaagcagagactcccactacagactatgccagtatcactctacaagaggtggctctacgatcacttgcggcggaaggagcaaaaatctctgagcgacttatcgaagtcacggagaagcttgcaccaagggcaaagcaaggtaaatggagcagttacagacaggctatcaaaacggtttggaaagcggaggaaataaacgatttgaatcggcaattagaacagtaccgaagtgaaattgtcgtacgatctttagcttgtctgaatgagaagaccaatgtgctcctcaagaattctgaaagctcaacagaccttctccttcggaatcatcaagaagtcattggagttcttgcttacaatcaccaagaaatgcgtgaagctatactgaccttacgaaatggtcaaacacaaacaatctcgcgttctacagatggcatgacattcggacgtcctccgacatataagagacatcaagaatccctgcgttccgtcctttctctccaggcagcagatgagttcggccatccacaagcagaaattggcgacttcggtcgggtaaaaaccatggttttagaatgtctacattttcgtcaaattatcgatcgtttcgagacaatcgatgaagctcacgaaaaaactttccaatgggttttcgacgatcctaaagagcatggcaaaacatggtccaacttcgcccagtggttagagacacaaagtggttgctactggatccaaggtaaaccaggttcggggaagtctactctcatgaagaccataatacgcgacgcgcggaccgtgccgcatctgagaagatgggctggtgattgtccaatcctagtctcctctttctttttctggtacttgggaacaccactccaaaaatcgcaggaaggactgctacgggcgttgctatatagcatcctttgtgaacttcctgccctgataggagaagtcatgccagaaatctgcactgaagccactaaactcggcacttccgaccgactggaggcgcccaatttggatgagctcacgcgctggttcggaaatctagtgaacgcctttaaacgtgatgggtcctatcgtgtatgcatttttgtcgatgggctggatgaatacgtcggagaccacgctgatctggcaaaatttttcgtcgacttatctcaatccaccacttccatgaaatttgtattatcaagccgccccatcacagcatgtgttgatgctttctcgcagcatcccagcctacgtctacaagatcttacaatcgacgacatgcgtatatttgcaaaagaccagttggacaataaatgtcggtttctgaatcatacggagacagagaatttcatcgaagagacagtcgtaaagtcaagtggtgtgtttctatgggtatcacttgtgatcaagtccctacttgagggcatgagagagggtgacacctttgaggagctgcaagcccgcctaacagcaattccatcgggaatgtcggagctttacactcacatgttgaaccgaatacctgagaaacacaaactacaagcggcggaaatactccaaatagcaactgcgcagttttgtggtcttcctggtgtacatccttcaggatttcattttcccttcacttcattgcagctttcgtttgccttgcagaaaccagaggaggctttagccaaccattctcgggttctttcacgcgatgaaatggttaaaagggccgagcatatcgaagttcgcattagaagtagatgcatgggatttctcgagctccgtaccccaccgtcaggggagctacctgaagagtcaagatctctggcatgtgtagttcgattcattcatcgtacagcaatcgagttcctcagcgaaggcgggatatcccaggccctcgtagggctagcatgcgggacagacttcaatccatatcttcaattatttacttcagccatttggatgattcgatactatcgagacgacgaacatggtctctcaccctggagagcatatcttaggcctgcaatgattgtggcgaatagtgctgaaatagctggtacgccatttaggaacgagtacttagattcgctggacgaatcgtaccagagttatttctttgctacccagcaagccaaccatctcgagagcccagaatctgaacagcattggtttgagcggcttctgtgtaccacgagtgctccaagccccccaaaacagcttgcgactcattcgcaggacgccaacgataaccaaatcaacgagaatggtctcaactcaactctaagatctggcgcagtaccatttctatacataaatgacgaaattagtcaaaaggtcctgaccagaactagcagactgggcttcttgtttgccgccatctcttggtcattgccctcctatgtcgttgacttcctcgccaatgaccgccaaaggaagactcttaaagctggcgatacgacggctttgctagattttatggttcacgcgatatggtttatacaattcaatcgacgtagactccccggagtctcaagcgacttaagtgcttggacttctgtctttaagagcctttttcagaatggggcagatcctaactattcttcttacgacagctattcgatatgggcactattcctctgctcatctatgcttgccgtgcatcagtctaataagtctaagggcaaccgcctcggtcacgataagctaggtgttattggttatctagacacgattatcaagtcgtttgttgaccatggcgccaatccgaagacaagatttgtcttcggctcacagaccctgcgaccaggggacgctatactagacataagtaaagaactcacgggcgcacaatcagaaagcttgagagagcttgcctacgttctcggacagaagaagtcacacaaagtggtcaatctaccagcgagtaatattatgaagtggcgtacgtttcctaagagactatttctctcacaaaagtctagagctctttaa

SEQ ID NO: 31733 - protein, 1048 aa, Muscodor strobelii
  misc_feature: SGI Peptide ID NO. 570928
  misc_feature (239)..(982): NCBI GI: 164425886 Blast Desc: NCU08565 [Neurospora crassa OR74A] gi|157071107|gb|EAA33591.2| [Neurospora crassa OR74A]
  misc_feature (1)..(722): NCBI GI: 225684243 Blast Desc: conserved [Paracoccidioides brasiliensis Pb03]
  misc_feature (1)..(722): NCBI GI: 226293863 Blast Desc: conserved [Paracoccidioides brasiliensis Pb18]
  misc_feature (1)..(722): NCBI GI: 261190024 Blast Desc: conserved [Ajellomyces dermatitidis SLH14081] gi|239591250|gb|EEQ73831.1| conserved [Ajellomyces dermatitidis SLH14081]
  misc_feature (1)..(750): NCBI GI: 154293653 Blast Desc: BC1G_14084 [Botryotinia fuckeliana B05.10] gi|150845240|gb|EDN20433.1| BC1G_14084 [Botryotinia fuckeliana B05.10]
  misc_feature (1)..(837): NCBI GI: 256726514 Blast Desc: NECHADRAFT_79534 [Nectria haematococca mpVI 77-13-4]
  misc_feature (1)..(553): NCBI GI: 226284602 Blast Desc: conserved [Paracoccidioides brasiliensis Pb01]
  misc_feature (1)..(675): NCBI GI: 169768460 Blast Desc: [Aspergillus oryzae RIB40] gi|238497764|ref|XP_002380117.1| conserved [Aspergillus flavus NRRL3357] gi|83766558|dbj|BAE56698.1| protein product oryzae]
  misc_feature (244)..(717): NCBI GI: 116205553 Blast Desc: CHGG_10660 [Chaetomium globosum CBS 148.51] gi|88176788|gb|EAQ84256.1| CHGG_10660 [Chaetomium globosum CBS 148.51]
  misc_feature (247)..(675): NCBI GI: 256721455 Blast Desc: NECHADRAFT_55084 [Nectria haematococca mpVI 77-13-4]
MDPFTALGVAAAALQFFEFTRKIFTEVHGRQPGGQALTIEVFESTTRDLMIYMKLLQSQAETPTTDYASITLQEVALRSLAAEGAKISERLIEVTEKLAPRAKQGKWSSYRQAIKTVWKAEEINDLNRQLEQYRSEIVVRSLACLNEKTNVLLKNSESSTDLLLRNHQEVIGVLAYNHQEMREAILTLRNGQTQTISRSTDGMTFGRPPTYKRHQESLRSVLSLQAADEFGHPQAEIGDFGRVKTMVLECLHFRQIIDRFETIDEAHEKTFQWVFDDPKEHGKTWSNFAQWLETQSGCYWIQGKPGSGKSTLMKTIIRDARTVPHLRRWAGDCPILVSSFFFWYLGTPLQKSQEGLLRALLYSILCELPALIGEVMPEICTEATKLGTSDRLEAPNLDELTRWFGNLVNAFKRDGSYRVCIFVDGLDEYVGDHADLAKFFVDLSQSTTSMKFVLSSRPITACVDAFSQHPSLRLQDLTIDDMRIFAKDQLDNKCRFLNHTETENFIEETVVKSSGVFLWVSLVIKSLLEGMREGDTFEELQARLTAIPSGMSELYTHMLNRIPEKHKLQAAEILQIATAQFCGLPGVHPSGFHFPFTSLQLSFALQKPEEALANHSRVLSRDEMVKRAEHIEVRIRSRCMGFLELRTPPSGELPEESRSLACVVRFIHRTAIEFLSEGGISQALVGLACGTDFNPYLQLFTSAIWMIRYYRDDEHGLSPWRAYLRPAMIVANSAEIAGTPFRNEYLDSLDESYQSYFFATQQANHLESPESEQHWFERLLCTTSAPSPPKQLATHSQDANDNQINENGLNSTLRSGAVPFLYINDEISQKVLTRTSRLGFLFAAISWSLPSYVVDFLANDRQRKTLKAGDTTALLDFMVHAIWFIQFNRRRLPGVSSDLSAWTSVFKSLFQNGADPNYSSYDSYSIWALFLCSSMLAVHQSNKSKGNRLGHDKLGVIGYLDTIIKSFVDHGANPKTRFVFGSQTLRPGDAILDISKELTGAQSESLRELAYVLGQKKSHKVVNLPASNIMKWRTFPKRLFLSQKSRAL

SEQ ID NO: 31734 - DNA, 4912 bp, Muscodor strobelii
  misc_feature: SGI EST ID NO. CUFF.75067.0
  misc_feature: Variant of the nucleotide sequence at SEQ ID NO 31732
ggcgaattttttctgcttcatattcgtccaaatgcagagtcttgagcttgggaaaagaatttgccttagcagctatggatcctttcacggcactaggagtagcagctgcagcacttcagttcttcgaatttacgcgcaagatctttactgaggttcacgggaggcaacccggtggtcaggcgcttacgattgaggttttcgagagcacgactcgagatctgatgatttatatgaagcttctgcagagtcaagcagagactcccactacagactatgccagtatcactctacaagaggtggctctacgatcacttgcggcggaaggagcaaaaatctctgagcgacttatcgaagtcacggagaagcttgcaccaagggcaaagcaaggtaaatggagcagttacagacaggctatcaaaacggtttggaaagcggaggaaataaacgatttgaatcggcaattagaacagtaccgaagtgaaattgtcgtacgatctttagcttgtctgaatgagaagaccaatgtgctcctcaagaattctgaaagctcaacagaccttctccttcggaatcatcaagaagtcattggagttcttgcttacaatcaccaagaaatgcgtgaagctatactgaccttacgaaatggtcaaacacaaacaatctcgcgttctacagatggcatgacattcggacgtcctccgacatataagagacatcaagaatccctgcgttccgtcctttctctccaggcagcagatgagttcggccatccacaagcagaaattggcgacttcggtcgggtaaaaaccatggttttagaatgtctacattttcgtcaaattatcgatcgtttcgagacaatcgatgaagctcacgaaaaaactttccaatgggttttcgacgatcctaaagagcatggcaaaacatggtccaacttcgcccagtggttagagacacaaagtggttgctactggatccaaggtaaaccaggttcggggaagtctactctcatgaagaccataatacgcgacgcgcggaccgtgccgcatctgagaagatgggctggtgattgtccaatcctagtctcctctttctttttctggtacttgggaacaccactccaaaaatcgcaggaaggactgctacgggcgttgctatatagcatcctttgtgaacttcctgccctgataggagaagtcatgccagaaatctgcactgaagccactaaactcggcacttccgaccgactggaggcgcccaatttggatgagctcacgcgctggttcggaaatctagtgaacgcctttaaacgtgatgggtcctatcgtgtatgcatttttgtcgatgggctggatgaatacgtcggagaccacgctgatctggcaaaatttttcgtcgacttatctcaatccaccacttccatgaaatttgtattatcaagccgccccatcacagcatgtgttgatgctttctcgcagcatcccagcctacgtctacaagatcttacaatcgacgacatgcgtatatttgcaaaagaccagttggacaataaatgtcggtttctgaatcatacggagacagagaatttcatcgaagagacagtcgtaaagtcaagtggtgtgtttctatgggtatcacttgtgatcaagtccctacttgagggcatgagagagggtgacacctttgaggagctgcaagcccgcctaacagcaattccatcgggaatgtcggagctttacactcacatgttgaaccgaatacctgagaaacacaaactacaagcggcggaaatactccaaatagcaactgcgcagttttgtggtcttcctggtgtacatccttcaggatttcattttcccttcacttcattgcagctttcgtttgccttgcagaaaccagaggaggctttagccaaccattctcgggttctttcacgcgatgaaatggttaaaagggccgagcatatcgaagttcgcattagaagtagatgcatgggatttctcgagctccgtaccccaccgtcaggggagctacctgaagagtcaagatctctggcatgtgtagttcgattcattcatcgtacagcaatcgagttcctcagcgaaggcgggatatcccaggccctcgtagggctagcatgcgggacagacttcaatccatatcttcaattatttacttcagccatttggatgattcgatactatcgagacgacgaacatggtctctcaccctggagagcatatcttaggcctgcaatgattgtggcgaatagtgctgaaatagctggtacgccatttaggaacgagtacttagattcgctggacgaatcgtaccagagttatttctttgctacccagcaagccaaccatctcgagagcccagaatctgaacagcattggtttgagcggcttctgtgtaccacgagtgctccaagccccccaaaacagcttgcgactcattcgcaggacgccaacgataaccaaatcaacgagaatggtctcaactcaactctaagatctggcgcagtaccatttctatacataaatgacgaaattagtcaaaaggtcctgaccagaactagcagactgggcttcttgtttgccgccatctcttggtcattgccctcctatgtcgttgacttcctcgccaatgaccgccaaaggaagactcttaaagctggcgatacgacggctttgctagattttatggttcacgcgatatggtttatacaattcaatcgacgtagactccccggagtctcaagcgacttaagtgcttggacttctgtctttaagagcctttttcagaatggggcagatcctaactattcttcttacgacagctattcgatatgggcactattcctctgctcatctatgcttgccgtgcatcagtctaataagtctaagggcaaccgcctcggtcacgataagctaggtgttattggttatctagacacgattatcaagtcgtttgttgaccatggcgccaatccgaagacaagatttgtcttcggctcacagaccctgcgaccaggggacgctatactagacataagtaaagaactcacgggcgcacaatcagaaagcttgagagagcttgcctacgttctcggacagaagaagtcacacaaagtggtcaatctaccagcgagtaatattatgaagtggcgtacgtttcctaagagactatttctctcacaaaagtctagagctctttaacaagtacatagtctttctcagatgcaaatcaatacccttacgttatatcacgagttgacagtgcatacgagggcgacaaaacgagaatacgtatgatccacgttccgcaagaccgatacaagtacaaattcagcacattccaaatgaagcaacaggctggcccccaccgtcaaatactacgtttttacaaatgacgcatgcggcagcttcacctaactcatatcttcctcgacaagcgggctctgaatcagcagagttgcgtgttcctgtatatttcttcggggcactccacggctataccacaccactttgagagataggagtcatacatgtaaaataggaaaatcagtggatgtccaagaaacacccttcgccacactgtataaacaactaccgtatatgagaggaaggtcgaatgggctcgcacttcgaacaaggaattacacaccatgaaatcatctttcgccacgaagttattacaaacgcagaattatattacagagcagatcgagcacttgataacactggagatgtattcaatctattccctaggaattatttatcagacaatttgacggtccgaatcatctctgtatattcttatcccaatctccccttccgtctttccggccatacagtgttcatacatctctaaagttataagaggctccatcacataacgactggcctctacatgttgtcatagaagttatccaagaaattgtcaagcacttcatcctcatgaccgtcatcgacagactcgtgtccactcgactgttcacgtgctgtttcaccgatcttcagtgccacgtccctggcatttatcgttggaccatagatcaaatccagggacgagatgaagttcttcagatcctggaaatcgatcctcccgtcaagatgttcctgacgcaacattcttgcctcacgtggcgcgtgagtctcgagagccctgataagatggcagactgttatcaagttagttagtatctgttcttctatcgaccaaagtgacgagtgaaagttggggaggagggagatggattttataagacttactcataaagctcttggtgaagcggagattccagtgcttagcacattgctctcgcaattcctgacatgctcgcaggaattctttaccggagccgaagtcggcacgtttgattgtgaggaacttgttgagtgcgttgcgatcgcctaagacgtttgtttcgaatgcagagaccgtccaggcgctgtcttttggtacaggatgagattgggcaacaacgggagtccgaggacgaaggctaggctggatcgaagcaacctctggcgatacaagcctcgtttccgattgttgcataggtgatgaagtacgttgttgtgtagacgtgggaagacctgtccgcttatatggagaacgatattgcgaacctgtatcaataggtgaccaagatataggagcggtttgtttcgcacgtggtgaagtaggtcggagtacactccaaggatgtgaggctgattcaaaatccggaaaaggaggtggtaaagatgtaggtccgagagttggattaccagatggattgaaatttagagaataagggtcgtggaatttatgagtatgtggaatagcgatatccatgtgactacgcaggggacgtcctggaagtcccggctcacatccagacggaagctgtggcttcgctggt

SEQ ID NO: 31735 - DNA, 1014 bp, Muscodor strobelii
  misc_feature: SGI cDNA ID NO. 570929
  misc_feature: Encodes the peptide sequence at SEQ ID NO 31736
atgaccaagaagacgacaactgcatcgaccacaagtaagccaactacaaccaaaacaacaactacgagcaaaacaaccacaacaagtaagactacaagcactactctgaagacgagtgccacaacgtccaaggccacttcatcatctaagacaacgtcaggcgcgaccacatccggaacttcgacgacctcaaagaccgcaactacgagccagtcgacgtcttcatcaactcgttctacttcaagcccgacgccaactccaacgcaaggcgccggtgtacgaggtctttcttttaatgaccctgcgcttacggagcccttcgtgaactctagtgggatcacatgggccatgaactgggcttccgatgtgtattatcctggtggatggacgccagattcgttcaatacggatctcacatacgtacccatgttatggagcgcagcagatgaccttaccagcatctggaacaccaatgtcaacaacgctctcaaggtgtacgggacagactcgctactcgccttcaatgagcccgatggttgctgctggtcatgtggaaacagctgcatgaacgtctcctctgctgtcacggcgtatcaacagtggatgcagccttttgcgggaaaagtccagcttgggtcaccagccgttaccaatggtctgggagaaggcgtcggactgagctatttgtcgtacttcatgggcaactgcactggctgtactgtggacttcattcctcttcacttctacggaagtgttcttgatcctggcgcactccagtcatatgtcgagtctgcttggaagcaattcggactgccgatttggttgacagagttcggcaccaccagtggcaccgaggtgcaagttctttcatggcttcaggctgttttgccttggttggatgctcagccctatgtcaagcgctacgcctacttcatggataacaatcatggagccccttatctattgaactctgacaacacaaagacgtcaattggcgtatattatagcagctga

SEQ ID NO: 31736 - protein, 337 aa, Muscodor strobelii
  misc_feature: SGI Peptide ID NO. 570929
  misc_feature (85)..(311): NCBI GI: 119472310 Blast Desc: NFIA_057630 [Neosartorya fischeri NRRL 181] gi|119406462|gb|EAW16413.1| conserved [Neosartorya fischeri NRRL 181]
  misc_feature (79)..(312): NCBI GI: 169594778 Blast Desc: SNOG_00118 [Phaeosphaeria nodorum SN15] gi|111070493|gb|EAT91613.1| SNOG_00118 [Phaeosphaeria nodorum SN15]
  misc_feature (85)..(311): NCBI GI: 70992453 Blast Desc: conserved [Aspergillus fumigatus Af293] gi|66848708|gb|EAL89037.1| conserved [Aspergillus fumigatus Af293]
  misc_feature (94)..(312): NCBI GI: 154313149 Blast Desc: BC1G_05576 [Botryotinia fuckeliana B05.10] gi|150849661|gb|EDN24854.1| BC1G_05576 [Botryotinia fuckeliana B05.10]
  misc_feature (85)..(311): NCBI GI: 159124645 Blast Desc: conserved [Aspergillus fumigatus A1163]
  misc_feature (94)..(314): NCBI GI: 156062292 Blast Desc: SS1G_01262 [Sclerotinia sclerotiorum 1980] gi|154696598|gb|EDN96336.1| SS1G_01262 [Sclerotinia sclerotiorum 1980]
  misc_feature (85)..(311): NCBI GI: 67901768 Blast Desc: AN7871.2 [Aspergillus nidulans FGSC A4] gi|40739726|gb|EAA58916.1| AN7871.2 [Aspergillus nidulans FGSC A4] gi|259480616|tpe|CBF73424.1| TPA: conserved [Aspergillus FGSC
  misc_feature (92)..(311): NCBI GI: 225681100 Blast Desc: conserved [Paracoccidioides brasiliensis Pb03] gi|226292199|gb|EEH47619.1| conserved [Paracoccidioides brasiliensis Pb18]
  misc_feature (92)..(311): NCBI GI: 226282643 Blast Desc: conserved [Paracoccidioides brasiliensis Pb01]
  misc_feature (84)..(312): NCBI GI: 189203719 Blast Desc: conserved [Pyrenophora tritici-repentis Pt-1C-BFP] gi|187985294|gb|EDU50782.1| conserved [Pyrenophora tritici-repentis Pt-1C-BFP]
MTKKTTTASTTSKPTTTKTTTTSKTTTTSKTTSTTLKTSATTSKATSSSKTTSGATTSGTSTTSKTATTSQSTSSSTRSTSSPTPTPTQGAGVRGLSFNDPALTEPFVNSSGITWAMNWASDVYYPGGWTPDSFNTDLTYVPMLWSAADDLTSIWNTNVNNALKVYGTDSLLAFNEPDGCCWSCGNSCMNVSSAVTAYQQWMQPFAGKVQLGSPAVTNGLGEGVGLSYLSYFMGNCTGCTVDFIPLHFYGSVLDPGALQSYVESAWKQFGLPIWLTEFGTTSGTEVQVLSWLQAVLPWLDAQPYVKRYAYFMDNNHGAPYLLNSDNTKTSIGVYYSS

SEQ ID NO: 31737 - DNA, 2340 bp, Muscodor strobelii
  misc_feature: SGI EST ID NO. CUFF.75069.1
  misc_feature: Variant of the nucleotide sequence at SEQ ID NO 31735
cactgaagcagggtggcggggcatccctgtatttcctggaaatgcccctgtcacaacaagaaggcactgctagagtcacgtgggtatcgaggaccccggtttcctaccatgtagttctcattgccccattagtcgacaaatctgagagcaaaacgcatacaaattgatagtcgcgagaatcaaacgctcgtcagcggcaagttagagccataatatcaagctacacggccgttagatcgatttgatcgcctctagatctgaaccgattattataccgacgcgggcgtgactcagtctgcgcaggaccatctgcttgccagcggtgcgcgattcgtctgcattctccagagtcgtctcgatcaagaaatcccgcgagatatgtcacatcgttaaagttggataggaaagatggttgttttcctgaaaatctggagcgaaggaacctagacaccataaatgttagccagagtggatcacaacgcttggccagcggcctagtgagccacgttctcggtgccgcgagcgagatctagaacacgaccaaatctcgctagtttttactaacgggcaatggtcccatcttcgattgtccagccgggccagctgtacacaaattgaccttgtgcgcgtctagcccgagtgctgttttgagctgagttgatgtctaagacgtccagataggtctcatgctaaccaatttaagcaatgtctccgggcgccatgtttttgaatgtgtcgtttctatggcagaagtattgtacctgcatggtggcgctattgtgttggatttgtattaaaggagagatacccataggctgagtcgttcatgatggattcttgtgctgtattttcttgagttacttgacttgcgtgatacctgattttcttggggaaattgtttgtgctgtgaaagttcaaagcaacgacaggacaagtcatgcggtcttctgaagctatcatagcaggatgcatcctgatgcaaatggtcgcgggagcgactacaactacgactagcaaaaaaattacatcgacaagcaccaagaagtcgactactactaaagctgcgacgaccttgaagacaacgacaaaggcttcaacaacaagagcgaccaccacagcgaaaaccacaagtaccaaaaagtcttcaactacaaaaaaggcgacgactactaccaccaagctcattacaactacaaagaagactaccacaacgacaagcaaaccgatcaccaccatgaccaagaagacgacaactgcatcgaccacaagtaagccaactacaaccaaaacaacaactacgagcaaaacaaccacaacaagtaagactacaagcactactctgaagacgagtgccacaacgtccaaggccacttcatcatctaagacaacgtcaggcgcgaccacatccggaacttcgacgacctcaaagaccgcaactacgagccagtcgacgtcttcatcaactcgttctacttcaagcccgacgccaactccaacgcaaggcgccggtgtacgaggtctttcttttaatgaccctgcgcttacggagcccttcgtgaactctagtgggatcacatgggccatgaactgggcttccgatgtgtattatcctggtggatggacgccagattcgttcaatacggatctcacatacgtacccatgttatggagcgcagcagatgaccttaccagcatctggaacaccaatgtcaacaacgctctcaaggtgtacgggacagactcgctactcgccttcaatgagcccgatggttgctgctggtcatgtggaaacagctgcatgaacgtctcctctgctgtcacggcgtatcaacagtggatgcagccttttgcgggaaaagtccagcttgggtcaccagccgttaccaatggtctgggagaaggcgtcggactgagctatttgtcgtacttcatgggcaactgcactggctgtactgtggacttcattcctcttcacttctacggaagtgttcttgatcctggcgcactccagtcatatgtcgagtctgcttggaagcaattcggactgccgatttggttgacagagttcggcaccaccagtggcaccgaggtgcaagttctttcatggcttcaggctgttttgccttggttggatgctcagccctatgtcaagcgctacgcctacttcatggataacaatcatggagccccttatctattgaactctgacaacacaaagacgtcaattggcgtatattatagcagctgagaagtcccattttctcttatatcatgataccccggagtcctcttgtttatcatagagtagatacttgtaacatatatgagactacatagtat

SEQ ID NO: 31738 - DNA, 1080 bp, Muscodor strobelii
  misc_feature: SGI cDNA ID NO. 570930
  misc_feature: Encodes the peptide sequence at SEQ ID NO 31739
atggcaccgccaagcagttctaagtcttctcatcagcccttagacttcaattccagaaatgaacacgacgaaaaagacatcctagagtggtacaggctgaattcgcattgcctagataaagttgcccgagacaattccagaagctatgtcgtatttgtctacgaatggggggacagcgacgaggcacgatgggcggtcagctatacaaaactgcccaaagcaccggaagccgcctttgagcggcgaaagcccttgattgaccagaatgatacgaagcttgcgcaggcgattcacggtgatctagtcgccgacatgaagctgcgcggaaccttcttcgaccctgctttttctaagcatccattctccatctacaaaacggagtatcgatctggtttcaagcgctatagcgaagtcgctccgagacatatcaatctgagtagtgccgataaagaccgtcatatgaggtttatcgacggtctcgcaaaatatttcggaaattgtctcagacatcgcagagagcttgacgatatcgccctcgactcataccgcgacagtataaaggggaagctgcacattctacaaagaaacatctcaaagtatccatatctcagagacgttgtacctaagatccatcaccatcttggccaactgcttgcaacaacatggccgcaagtcgccactcatggagaccttacgcaacgtaacattctagtgaacggagcgtctcatatgattgagggtattctagactggtctgtggtttctcatgcaccattcggattggacttaactatcttgcgtgccagtctcggcacaatgactgccaccggctggcaggaatatgactgtcgccatgagctggagaataggttctgggccgatgtttggcactcggcaaggatcgaagatgggatggataaacagcagttcaaatccttagccagcgttgctgcgcagttaggcgcaattctacagttcgccttcgagagagatgcggcgggcttcatgacagacaccctcgtcacagagccttctccttttctgttggcatgggtagaggctaatagcaagagtccgtag

SEQ ID NO: 31739 - protein, 359 aa, Muscodor strobelii
  misc_feature: SGI Peptide ID NO. 570930
  misc_feature (78)..(342): NCBI GI: 46117388 Blast Desc: FG04536.1 [Gibberella zeae PH-1]
  misc_feature (78)..(354): NCBI GI: 261188586 Blast Desc: conserved [Ajellomyces dermatitidis SLH14081] gi|239593065|gb|EEQ75646.1| conserved [Ajellomyces dermatitidis SLH14081]
  misc_feature (65)..(359): NCBI GI: 256734193 Blast Desc: NECHADRAFT_35375 [Nectria haematococca mpVI 77-13-4]
  misc_feature (163)..(342): NCBI GI: 225554416 Blast Desc: conserved [Ajellomyces capsulatus G186AR]
  misc_feature (152)..(356): NCBI GI: 240273453 Blast Desc: conserved [Ajellomyces capsulatus H143]
  misc_feature (217)..(351): NCBI GI: 156060181 Blast Desc: SS1G_02229 [Sclerotinia sclerotiorum 1980] gi|154699637|gb|EDN99375.1| SS1G_02229 [Sclerotinia sclerotiorum 1980]
  misc_feature (67)..(328): NCBI GI: 238845106 Blast Desc: conserved [Microsporum canis CBS 113480]
  misc_feature (79)..(344): NCBI GI: 240282092 Blast Desc: conserved [Ajellomyces capsulatus H143]
  misc_feature (201)..(328): NCBI GI: 115389944 Blast Desc: [Aspergillus terreus NIH2624] gi|114194873|gb|EAU36573.1| [Aspergillus terreus NIH2624]
  misc_feature (72)..(328): NCBI GI: 238842526 Blast Desc: conserved [Microsporum canis CBS 113480]
MAPPSSSKSSHQPLDFNSRNEHDEKDILEWYRLNSHCLDKVARDNSRSYVVFVYEWGDSDEARWAVSYTKLPKAPEAAFERRKPLIDQNDTKLAQAIHGDLVADMKLRGTFFDPAFSKHPFSIYKTEYRSGFKRYSEVAPRHINLSSADKDRHMRFIDGLAKYFGNCLRHRRELDDIALDSYRDSIKGKLHILQRNISKYPYLRDVVPKIHHHLGQLLATTWPQVATHGDLTQRNILVNGASHMIEGILDWSVVSHAPFGLDLTILRASLGTMTATGWQEYDCRHELENRFWADVWHSARIEDGMDKQQFKSLASVAAQLGAILQFAFERDAAGFMTDTLVTEPSPFLLAWVEANSKSP

SEQ ID NO: 31740 - DNA, 241 bp, Muscodor strobelii
  misc_feature: SGI EST ID NO. CUFF.75072.0
  misc_feature: Variant of the nucleotide sequence at SEQ ID NO 31738
cgacgaggcacgatgggcggtcagctatacaaaactgcccaaagcaccggaagccgcctttgagcggcgaaagcccttgattgaccagaatgatacgaagcttgcgcaggcgattcacggtgatctagtcgccgacatgaagctgcgcggaaccttcttcgaccctgctttttctaagcatccattctccatctacaaaacggagtatcgatctggtttcaagcgctatagcgaagtcgct

SEQ ID NO: 31741 - DNA, 1806 bp, Muscodor strobelii
  misc_feature: SGI cDNA ID NO. 570931
  misc_feature: Encodes the peptide sequence at SEQ ID NO 31742
atgtcgcgacttttctccttagcggcactgttcgcaacgggcattgctacagcctcgaaaggcgtgcatgttcacgatgaatcattcacaccagatatcgtcttaagcgtgacgagacagaatatcagtcttggaggtatcgacaggtattcaacgctggtcaatggaacgcttcctggcccggctctacggttacctgcgaacaagattatatggattcgagtgcacaatgacatgacagacgcgaatctcactatgcattggcatggattaacccaagctgcgtatccattcagtgatggcacacctctcggaagtcaatggccgattcctacacaacacttcttcgattacgaattgaacacaacttcgtatggtgggacgtacttttaccacgcgcacgtaggattccaagcggtctctgcagctggatcgctgatcatcgaggaccctgagtctccttaccaatatgatgatgagcggacgattttacttcaggaattattcaattcgacagatacagaatgggaggacggcatcacggctgcgaagttctcctggaaaggcgagatcaactcgtggcttatcaacggagagggaatctctaattatggaattgtcgacccatctacagcaacgctgcatgagatatccgtgaagccgagcacgacatatagatttcgatttgtagctggcagtgctctgtcgttagcgatattcggcttcgagaaccataccgacttcaagatcatcgcagcagatgctacctataccaaacccgcaccagttgacttattccagatgggtagtggacaacgttatgatgctctagtcactaccaaatcttgcgatgaactgaagaagcttggaaagatggattactatatgcaacttgaaagccgcgatcgaaaatatgtagtgacgaactatgcagtgctgcgctactcggattgcagtggatatcctacaaatagcactcgtgtgtctttgactgaaaatcccacgacgccgccgattagcctaccgcccacggtcggcggctggctggactacgttttggaacctatcaagcccaatggcttcccaacgactgaggaggtcacccgtcgcattgtcatcaatgcccagcaggttgccaacatctcgtacatctggcaagacgccggcgtggcatggacagaggacaactcggacatgctgaacgtaacatcgccgcgtaagccatacctcgtggcgctctaccagaatgacacaacctacattccggactacgaggccgccattgcaaacggcggccttgacccgaagacaaagacatatcccggcaagctcggcgaagttcttgaaatcgttattcagaacgtcggatccgtcacttacgacggcacaacaggcggcggtctggatactcacccatggcacatgcatggaaaacattactacgacattggtgccggacaaggccgattcaacgccgacgaggcctacgcgaagctcgagggcaccagcccagttgagagagataccaccatcttgtaccgatacaacgcaacgaccagccccaatcaaatcgtttcatggagagcctggcgcgttcgtgttgaagatgctggagtctggatgatgcactgccattggttacaacatatgattatgggtatgcagactgttttcgtttttggagatactcaggatatcgtgaaggcggatattcctgaggtttctgaatatttggaatatggtggcgatgtgtatggcaatagtacacatgcccctaaagtcattcattttgacgaatatcagtag

SEQ ID NO: 31742 - protein, 601 aa, Muscodor strobelii
  misc_feature: SGI Peptide ID NO. 570931
  misc_feature (159)..(318): Pfam Id: PF00394 Pfam Desc: Multicopper oxidase
  misc_feature (420)..(564): Pfam Id: PF07731 Pfam Desc: Multicopper oxidase
  misc_feature (36)..(153): Pfam Id: PF07732 Pfam Desc: Multicopper oxidase
  misc_feature (423)..(564): Pfam Id: PF07731 Pfam Desc: Multicopper oxidase
  misc_feature (14)..(597): NCBI GI: 238500552 Blast Desc: laccase, [Aspergillus flavus NRRL3357] gi|220691747|gb|EED48094.1| laccase, [Aspergillus flavus NRRL3357]
  misc_feature (4)..(597): NCBI GI: 255955891 Blast Desc: Pc21g16980 [Penicillium chrysogenum Wisconsin 54-1255] gi|211590409|emb|CAP96595.1| Pc21g16980 [Penicillium chrysogenum Wisconsin 54-1255]
  misc_feature (25)..(598): NCBI GI: 67900804 Blast Desc: AN7389.2 [Aspergillus nidulans FGSC A4] gi|40742570|gb|EAA61760.1| AN7389.2 [Aspergillus nidulans FGSC A4] gi|259483250|tpe|CBF78480.1| TPA: conserved [Aspergillus FGSC
  misc_feature (1)..(596): NCBI GI: 115386908 Blast Desc: conserved [Aspergillus terreus NIH2624] gi|114190993|gb|EAU32693.1| conserved [Aspergillus terreus NIH2624]
  misc_feature (1)..(553): NCBI GI: 2780359 Blast Desc: ascorbate oxidase [Acremonium sp. HI-25]
  misc_feature (25)..(599): NCBI GI: 212531115 Blast Desc: multi-copper oxidase, [Penicillium marneffei ATCC 18224] gi|210071078|gb|EEA25167.1| multi-copper oxidase, [Penicillium marneffei ATCC 18224]
  misc_feature (1)..(593): NCBI GI: 67903188 Blast Desc: AN8581.2 [Aspergillus nidulans FGSC A4] gi|40741425|gb|EAA60615.1| AN8581.2 [Aspergillus nidulans FGSC A4] gi|259483208|tpe|CBF78399.1| TPA: conserved [Aspergillus FGSC
  misc_feature (6)..(600): NCBI GI: 116201793 Blast Desc: CHGG_08781 [Chaetomium globosum CBS 148.51] gi|88177299|gb|EAQ84767.1| CHGG_08781 [Chaetomium globosum CBS 148.51]
  misc_feature (76)..(596): NCBI GI: 169615360 Blast Desc: SNOG_10837 [Phaeosphaeria nodorum SN15] gi|160702943|gb|EAT82231.2| SNOG_10837 [Phaeosphaeria nodorum SN15]
  misc_feature (1)..(599): NCBI GI: 256721255 Blast Desc: NECHADRAFT_70605 [Nectria haematococca mpVI 77-13-4]
  misc_feature (7)..(561): SWISSPROT Homolog: EC 1.10.3.3 L-ascorbate oxidase
MSRLFSLAALFATGIATASKGVHVHDESFTPDIVLSVTRQNISLGGIDRYSTLVNGTLPGPALRLPANKIIWIRVHNDMTDANLTMHWHGLTQAAYPFSDGTPLGSQWPIPTQHFFDYELNTTSYGGTYFYHAHVGFQAVSAAGSLIIEDPESPYQYDDERTILLQELFNSTDTEWEDGITAAKFSWKGEINSWLINGEGISNYGIVDPSTATLHEISVKPSTTYRFRFVAGSALSLAIFGFENHTDFKIIAADATYTKPAPVDLFQMGSGQRYDALVTTKSCDELKKLGKMDYYMQLESRDRKYVVTNYAVLRYSDCSGYPTNSTRVSLTENPTTPPISLPPTVGGWLDYVLEPIKPNGFPTTEEVTRRIVINAQQVANISYIWQDAGVAWTEDNSDMLNVTSPRKPYLVALYQNDTTYIPDYEAAIANGGLDPKTKTYPGKLGEVLEIVIQNVGSVTYDGTTGGGLDTHPWHMHGKHYYDIGAGQGRFNADEAYAKLEGTSPVERDTTILYRYNATTSPNQIVSWRAWRVRVEDAGVWMMHCHWLQHMIMGMQTVFVFGDTQDIVKADIPEVSEYLEYGGDVYGNSTHAPKVIHFDEYQ

SEQ ID NO: 31743 - DNA, 4460 bp, Muscodor strobelii
  misc_feature: SGI EST ID NO. CUFF.75085.0
  misc_feature: Variant of the nucleotide sequence at SEQ ID NO 31741
ccaccatgatgtcgcgacttttctccttagcggcactgttcgcaacgggcattgctacagcctcgaaaggcgtgcatgttcacgatgaatcattcacaccagatatcgtcttaagcgtgacgagacagaatatcagtcttggaggtatcgacaggtattcaacgctggtcaatggaacgcttcctggcccggctctacggttacctgcgaacaagattatatggattcgagtgcacaatgacatgacagacgcgaatctcactatgcattggcatggattaacccaagctgcgtatccattcagtgatggcacacctctcggaagtcaatggccgattcctacacaacacttcttcgattacgaattgaacacaacttcgtatggtgggacgtacttttaccacgcgcacgtaggattccaagcggtctctgcagctggatcgctgatcatcgaggaccctgagtctccttaccaatatgatgatgagcggacgattttacttcaggaattattcaattcgacagatacagaatgggaggacggcatcacggctgcgaagttctcctggaaaggcgagatcaactcgtggcttatcaacggagagggaatctctaattatggaattgtcgacccatctacagcaacgctgcatgagatatccgtgaagccgagcacgacatatagatttcgatttgtagctggcagtgctctgtcgttagcgatattcggcttcgagaaccataccgacttcaagatcatcgcagcagatgctacctataccaaacccgcaccagttgacttattccagatgggtagtggacaacgttatgatgctctagtcactaccaaatcttgcgatgaactgaagaagcttggaaagatggattactatatgcaacttgaaagccgcgatcgaaaatatgtagtgacgaactatgcagtgctgcgctactcggattgcagtggatatcctacaaatagcactcgtgtgtctttgactgaaaatcccacgacgccgccgattagcctaccgcccacggtcggcggctggctggactacgttttggaacctatcaagcccaatggcttcccaacgactgaggaggtcacccgtcgcattgtcatcaatgcccagcaggttgccaacatctcgtacatctggcaagacgccggcgtggcatggacagaggacaactcggacatgctgaacgtaacatcgccgcgtaagccatacctcgtggcgctctaccagaatgacacaacctacattccggactacgaggccgccattgcaaacggcggccttgacccgaagacaaagacatatcccggcaagctcggcgaagttcttgaaatcgttattcagaacgtcggatccgtcacttacgacggcacaacaggcggcggtctggatactcacccatggcacatgcatggaaaacattactacgacattggtgccggacaaggccgattcaacgccgacgaggcctacgcgaagctcgagggcaccagcccagttgagagagataccaccatcttgtaccgatacaacgcaacgaccagccccaatcaaatcgtttcatggagagcctggcgcgttcgtgttgaagatgctggagtctggatgatgcactgccattggttacaacatatgattatgggtatgcagactgttttcgtttttggagatactcaggatatcgtgaaggcggatattcctgaggtttctgaatatttggaatatggtggcgatgtgtatggcaatagtacacatgcccctaaagtcattcattttgacgaatatcagtagactacataagcatttgtgtatatcaatgtagggaaatatagatttagataaaagtggacgggattatgggcctataagggcttgcattcgtaaagattaatgattatttgttgcgagcaatcattccgtacgccttacttttattcacgattcacgatcggtatcactctttgccgtggagacctttatctttgcaatagtttctaaatgcagttctctataaggcaaacgtagtcataccataaacggccgtcatgctaggtatatcttggcgagctctgcatgatgagttttggtgctccataacgccctttcagggagaacagaggttatgaggaaggtaacttcatcaagatgacacacgcagaagaatgactcgtcactcgtcaaatctttttatgccactgagtgtaagagcgttagcctaatgatttggagaaatgtgctcaagacaaagtgctaacatacctgtaacagatgcgtcacctttttaggctgtgaagattgtatggtgtttgtaggatcagagacgacctcagcttcaactcaaatgctagtattgatgagtctggtgagaaatgggtcccaacactgcattcaagcgccacgacctttctgctggccatgtctctccctcggcggatcagggactacgaccaatcccttcacacctttgagacccattttgccgacagtgctctttgccaacgaaggaacttcaggggcccctaggccttccaatgcaaacttgtttccttcctgaactaatcttgctttgtcccatttcattggcttgatcctactagcgtaaaatccgagccagctttggtatatcttcgcatggttgtccaatgcagtggcaattttgaggacatcgtcgtgagcagaaagatccgggctagcttcattgaaagaaacttccttaagtgtccacttcgaaaagtaggtatcgtattcggtaatgatgaaagtacctctaccctctgctccagcgcgaccagtgcgacccaatcgatgaatgaatgactccttatcagaaggaactccgacttgaaagacgttggtaacagcggggaagtccatgcctcgggccacaacgtcagtggctacgagtataccgttctgagcctgacggtagtcgtcggtcgtcttggttcgtttggattgtgacatacgggcatgaagcgcatagatctgtggaaaccctaatgatttttcgagaagctcagcgtagaagtctgctagaccagcagtcggagcaaaaacgattgctttgaaagtatcaatccctcccagcgaaatttcctgtcgaatggaaccaagcgtagcagcagcaaggtcagaaaagtcaggcacgaccacgagctgttgtggaacgcgttgatgagtgcctatctcgcctttgggaatggtattgatgaatttgtaaccgtcggatagagcaaggtgagcaacttcacgaacgcgctctgggactgtagccgaaaacagcatgccttgcctactgcttgttttcttgtcgggaagatacctgataatctttcgcagagagtcaatgaagcccatatccaataatcgatctgcctcgtcgaggaccagtgtattaaggctttgcagcatctcagcgacttcgccgtcctcgtcttcaagatggtctaaaaggcgccctggtgtagcaattagaatgtcacatgcttttcttatgcgttttccctcgctgtttttgttggtcccgccaatggcaatgcaaaccttgaactcgggtagacgttgcaatagggcttcggcttcctgagcaatctgcatggctaattctcgtgtaggtgagatgacgagcaatgagatgcttttaggcggcatactaggcttgcgatggattaagtgctgaatggctggaaggagaaaggcgatagtcttccccgtgccagtctttgcttgagcaagcacgtcggcgtgctctacaaggagaggatataatgtcgcagcctgaaccggtgtcatgtgattgaatttgaagtcctctgcgagcgtcttgagcaatgtaggatgaatgatgccattcttgcccaaatctgcgaaggttgacgtatcggcaggtatctcgatagtgagaggcacgccagaaccagtcttgacatcatcaaactcagattttactggtgtaatggcgcctgtgctctcatgacgatgagatgttttggatttcttgtttgagcgacgatggctgttctgaggtgtatccgccggtgggtatgaggacgaagtagctgcagtggactggcggccacggcgagatcctctgggagctctcttcttgcctttgccttcaaatgcatcgattgcatctgatgcgcccggcagatatcgatccgttggttcagtcatcgtgattgtcctatgattggtgttgtattctgacgagataatgtttctcggaacccatgaaaacttgacagttgggtggaattttaaataaacggagctagattcaggcgcgctaagaacttgtcgtggttgccgtagttgccttactcaatgcagcgttgcctcgcccgattctatgtacaatagaggccactttaattgttgacaacgaaaacaatgaaacgagtgaatgggacaataacggactggggccaagctagg

SEQ ID NO: 31744 - DNA, 1788 bp, Muscodor strobelii
  misc_feature: SGI cDNA ID NO. 570932
  misc_feature: Encodes the peptide sequence at SEQ ID NO 31745
atgactgaaccaacggatcgatatctgccgggcgcatcagatgcaatcgatgcatttgaaggcaaaggcaagaagagagctcccagaggatctcgccgtggccgccagtccactgcagctacttcgtcctcatacccaccggcggatacacctcagaacagccatcgtcgctcaaacaagaaatccaaaacatctcatcgtcatgagagcacaggcgccattacaccagtaaaatctgagtttgatgatgtcaagactggttctggcgtgcctctcactatcgagatacctgccgatacgtcaaccttcgcagatttgggcaagaatggcatcattcatcctacattgctcaagacgctcgcagaggacttcaaattcaatcacatgacaccggttcaggctgcgacattatatcctctccttgtagagcacgccgacgtgcttgctcaagcaaagactggcacggggaagactatcgcctttctccttccagccattcagcacttaatccatcgcaagcctagtatgccgcctaaaagcatctcattgctcgtcatctcacctacacgagaattagccatgcagattgctcaggaagccgaagccctattgcaacgtctacccgagttcaaggtttgcattgccattggcgggaccaacaaaaacagcgagggaaaacgcataagaaaagcatgtgacattctaattgctacaccagggcgccttttagaccatcttgaagacgaggacggcgaagtcgctgagatgctgcaaagccttaatacactggtcctcgacgaggcagatcgattattggatatgggcttcattgactctctgcgaaagattatcaggtatcttcccgacaagaaaacaagcagtaggcaaggcatgctgttttcggctacagtcccagagcgcgttcgtgaagttgctcaccttgctctatccgacggttacaaattcatcaataccattcccaaaggcgagataggcactcatcaacgcgttccacaacagctcgtggtcgtgcctgacttttctgaccttgctgctgctacgcttggttccattcgacaggaaatttcgctgggagggattgatactttcaaagcaatcgtttttgctccgactgctggtctagcagacttctacgctgagcttctcgaaaaatcattagggtttccacagatctatgcgcttcatgcccgtatgtcacaatccaaacgaaccaagacgaccgacgactaccgtcaggctcagaacggtatactcgtagccactgacgttgtggcccgaggcatggacttccccgctgttaccaacgtctttcaagtcggagttccttctgataaggagtcattcattcatcgattgggtcgcactggtcgcgctggagcagagggtagaggtactttcatcattaccgaatacgatacctacttttcgaagtggacacttaaggaagtttctttcaatgaagctagcccggatctttctgctcacgacgatgtcctcaaaattgccactgcattggacaaccatgcgaagatataccaaagctggctcggattttacgctagtaggatcaagccaatgaaatgggacaaagcaagattagttcaggaaggaaacaagtttgcattggaaggcctaggggcccctgaagttccttcgttggcaaagagcactgtcggcaaaatgggtctcaaaggtgtgaagggattggtcgtagtccctgatccgccgagggagagacatggccagcagaaaggtcgtggcgcttga

SEQ ID NO: 31745 - protein, 595 aa, Muscodor strobelii
  misc_feature: SGI Peptide ID NO. 570932
  misc_feature (130)..(311): Pfam Id: PF00270 Pfam Desc: DEAD/DEAH box helicase
  misc_feature (392)..(466): Pfam Id: PF00271 Pfam Desc: Helicase conserved C-terminal domain
  misc_feature (26)..(581): NCBI GI: 156048134 Blast Desc: SS1G_08798 [Sclerotinia sclerotiorum 1980] gi|154693195|gb|EDN92933.1| SS1G_08798 [Sclerotinia sclerotiorum 1980]
  misc_feature (96)..(591): NCBI GI: 39969403 Blast Desc: MGG_10312 [Magnaporthe grisea 70-15] gi|149211249|ref|XP_001522999.1| MGCH7_ch7g1085 [Magnaporthe grisea 70-15] gi|86197040|gb|EAQ71678.1| MGCH7_ch7g1085 grisea
  misc_feature (91)..(585): NCBI GI: 261360068 Blast Desc: ATP-dependent RNA helicase MSS116 [Verticillium albo-atrum VaMs.102]
  misc_feature (96)..(595): NCBI GI: 256723293 Blast Desc: NECHADRAFT_51970 [Nectria haematococca mpVI 77-13-4]
  misc_feature (100)..(594): NCBI GI: 46115318 Blast Desc: FG03501.1 [Gibberella zeae PH-1]
  misc_feature (26)..(364): NCBI GI: 154300726 Blast Desc: BC1G_10951 [Botryotinia fuckeliana B05.10] gi|150856558|gb|EDN31750.1| BC1G_10951 [Botryotinia fuckeliana B05.10]
  misc_feature (100)..(579): NCBI GI: 168051595 Blast Desc: [Physcomitrella patens subsp. patens] gi|162670336|gb|EDQ56906.1| [Physcomitrella patens subsp. patens]
  misc_feature (110)..(595): NCBI GI: 255941752 Blast Desc: Pc16g13460 [Penicillium chrysogenum Wisconsin 54-1255] gi|211586268|emb|CAP94016.1| Pc16g13460 [Penicillium chrysogenum Wisconsin 54-1255]
  misc_feature (98)..(583): NCBI GI: 226461596 Blast Desc: [Micromonas pusilla CCMP1545]
  misc_feature (126)..(576): NCBI GI: 115398680 Blast Desc: conserved [Aspergillus terreus NIH2624] gi|114191812|gb|EAU33512.1| conserved [Aspergillus terreus NIH2624]
MTEPTDRYLPGASDAIDAFEGKGKKRAPRGSRRGRQSTAATSSSYPPADTPQNSHRRSNKKSKTSHRHESTGAITPVKSEFDDVKTGSGVPLTIEIPADTSTFADLGKNGIIHPTLLKTLAEDFKFNHMTPVQAATLYPLLVEHADVLAQAKTGTGKTIAFLLPAIQHLIHRKPSMPPKSISLLVISPTRELAMQIAQEAEALLQRLPEFKVCIAIGGTNKNSEGKRIRKACDILIATPGRLLDHLEDEDGEVAEMLQSLNTLVLDEADRLLDMGFIDSLRKIIRYLPDKKTSSRQGMLFSATVPERVREVAHLALSDGYKFINTIPKGEIGTHQRVPQQLVVVPDFSDLAAATLGSIRQEISLGGIDTFKAIVFAPTAGLADFYAELLEKSLGFPQIYALHARMSQSKRTKTTDDYRQAQNGILVATDVVARGMDFPAVTNVFQVGVPSDKESFIHRLGRTGRAGAEGRGTFIITEYDTYFSKWTLKEVSFNEASPDLSAHDDVLKIATALDNHAKIYQSWLGFYASRIKPMKWDKARLVQEGNKFALEGLGAPEVPSLAKSTVGKMGLKGVKGLVVVPDPPRERHGQQKGRGA

SEQ ID NO: 31746 - DNA, 4455 bp, Muscodor strobelii
  misc_feature: SGI EST ID NO. CUFF.75086.1
  misc_feature: Variant of the nucleotide sequence at SEQ ID NO 31744
cctagcttggccccagtccgttattgtcccattcactcgtttcattgttttcgttgtcaacaattaaagtggcctctattgtacatagaatcgggcgaggcaacgctgcattgagtaaggcaactacggcaaccacgacaagttcttagcgcgcctgaatctagctccgtttatttaaaattccacccaactgtcaagttttcatgggttccgagaaacattatctcgtcagaatacaacaccaatcataggacaatcacgatgactgaaccaacggatcgatatctgccgggcgcatcagatgcaatcgatgcatttgaaggcaaaggcaagaagagagctcccagaggatctcgccgtggccgccagtccactgcagctacttcgtcctcatacccaccggcggatacacctcagaacagccatcgtcgctcaaacaagaaatccaaaacatctcatcgtcatgagagcacaggcgccattacaccagtaaaatctgagtttgatgatgtcaagactggttctggcgtgcctctcactatcgagatacctgccgatacgtcaaccttcgcagatttgggcaagaatggcatcattcatcctacattgctcaagacgctcgcagaggacttcaaattcaatcacatgacaccggttcaggctgcgacattatatcctctccttgtagagcacgccgacgtgcttgctcaagcaaagactggcacggggaagactatcgcctttctccttccagccattcagcacttaatccatcgcaagcctagtatgccgcctaaaagcatctcattgctcgtcatctcacctacacgagaattagccatgcagattgctcaggaagccgaagccctattgcaacgtctacccgagttcaaggtttgcattgccattggcgggaccaacaaaaacagcgagggaaaacgcataagaaaagcatgtgacattctaattgctacaccagggcgccttttagaccatcttgaagacgaggacggcgaagtcgctgagatgctgcaaagccttaatacactggtcctcgacgaggcagatcgattattggatatgggcttcattgactctctgcgaaagattatcaggtatcttcccgacaagaaaacaagcagtaggcaaggcatgctgttttcggctacagtcccagagcgcgttcgtgaagttgctcaccttgctctatccgacggttacaaattcatcaataccattcccaaaggcgagataggcactcatcaacgcgttccacaacagctcgtggtcgtgcctgacttttctgaccttgctgctgctacgcttggttccattcgacaggaaatttcgctgggagggattgatactttcaaagcaatcgtttttgctccgactgctggtctagcagacttctacgctgagcttctcgaaaaatcattagggtttccacagatctatgcgcttcatgcccgtatgtcacaatccaaacgaaccaagacgaccgacgactaccgtcaggctcagaacggtatactcgtagccactgacgttgtggcccgaggcatggacttccccgctgttaccaacgtctttcaagtcggagttccttctgataaggagtcattcattcatcgattgggtcgcactggtcgcgctggagcagagggtagaggtactttcatcattaccgaatacgatacctacttttcgaagtggacacttaaggaagtttctttcaatgaagctagcccggatctttctgctcacgacgatgtcctcaaaattgccactgcattggacaaccatgcgaagatataccaaagctggctcggattttacgctagtaggatcaagccaatgaaatgggacaaagcaagattagttcaggaaggaaacaagtttgcattggaaggcctaggggcccctgaagttccttcgttggcaaagagcactgtcggcaaaatgggtctcaaaggtgtgaagggattggtcgtagtccctgatccgccgagggagagacatggccagcagaaaggtcgtggcgcttgaatgcagtgttgggacccatttctcaccagactcatcaatactagcatttgagttgaagctgaggtcgtctctgatcctacaaacaccatacaatcttcacagcctaaaaaggtgacgcatctgttacagtggcataaaaagatttgacgagtgacgagtcattcttctgcgtgtgtcatcttgatgaagttaccttcctcataacctctgttctccctgaaagggcgttatggagcaccaaaactcatcatgcagagctcgccaagatatacctagcatgacggccgtttatggtatgactacgtttgccttatagagaactgcatttagaaactattgcaaagataaaggtctccacggcaaagagtgataccgatcgtgaatcgtgaataaaagtaaggcgtacggaatgattgctcgcaacaaataatcattaatctttacgaatgcaagcccttataggcccataatcccgtccacttttatctaaatctatatttccctacattgatatacacaaatgcttatgtagtctactgatattcgtcaaaatgaatgactttaggggcatgtgtactattgccatacacatcgccaccatattccaaatattcagaaacctcaggaatatccgccttcacgatatcctgagtatctccaaaaacgaaaacagtctgcatacccataatcatatgttgtaaccaatggcagtgcatcatccagactccagcatcttcaacacgaacgcgccaggctctccatgaaacgatttgattggggctggtcgttgcgttgtatcggtacaagatggtggtatctctctcaactgggctggtgccctcgagcttcgcgtaggcctcgtcggcgttgaatcggccttgtccggcaccaatgtcgtagtaatgttttccatgcatgtgccatgggtgagtatccagaccgccgcctgttgtgccgtcgtaagtgacggatccgacgttctgaataacgatttcaagaacttcgccgagcttgccgggatatgtctttgtcttcgggtcaaggccgccgtttgcaatggcggcctcgtagtccggaatgtaggttgtgtcattctggtagagcgccacgaggtatggcttacgcggcgatgttacgttcagcatgtccgagttgtcctctgtccatgccacgccggcgtcttgccagatgtacgagatgttggcaacctgctgggcattgatgacaatgcgacgggtgacctcctcagtcgttgggaagccattgggcttgataggttccaaaacgtagtccagccagccgccgaccgtgggcggtaggctaatcggcggcgtcgtgggattttcagtcaaagacacacgagtgctatttgtaggatatccactgcaatccgagtagcgcagcactgcatagttcgtcactacatattttcgatcgcggctttcaagttgcatatagtaatccatctttccaagcttcttcagttcatcgcaagatttggtagtgactagagcatcataacgttgtccactacccatctggaataagtcaactggtgcgggtttggtataggtagcatctgctgcgatgatcttgaagtcggtatggttctcgaagccgaatatcgctaacgacagagcactgccagctacaaatcgaaatctatatgtcgtgctcggcttcacggatatctcatgcagcgttgctgtagatgggtcgacaattccataattagagattccctctccgttgataagccacgagttgatctcgcctttccaggagaacttcgcagccgtgatgccgtcctcccattctgtatctgtcgaattgaataattcctgaagtaaaatcgtccgctcatcatcatattggtaaggagactcagggtcctcgatgatcagcgatccagctgcagagaccgcttggaatcctacgtgcgcgtggtaaaagtacgtcccaccatacgaagttgtgttcaattcgtaatcgaagaagtgttgtgtaggaatcggccattgacttccgagaggtgtgccatcactgaatggatacgcagcttgggttaatccatgccaatgctaataatatctgtcagcgtgcggtttcaggttattgtcagcaatccatcaacacctaccatagtgagattcgcgtctgtcatgtcattgtgcactcgaatccatataatcttgttcgcaggtaaccgtagagccgggccaggaagcgttccattgaccagcgttgaatacctgtcgatacctccaagactgatattctgtctcgtcacgcttaagacgatatctggtgtgaatgattcatcgtgaacatgcacgcctttcgaggctgtagcaatgcccgttgcgaacagtgccgctaaggagaaaagtcgcgacatcatggtgg

SEQ ID NO: 31747 - DNA, 4605 bp, Muscodor strobelii
  misc_feature: SGI cDNA ID NO. 570933
  misc_feature: Elevated expression when VOC is produced
  misc_feature: Encodes the peptide sequence at SEQ ID NO 31748
atgaacacatcgaccagccacaaaaggcgattgtatgacggaagtgatggaagctcgacgccagctgcttcatccaagcgacaaaaatggggacctatcgacgatcatttgagaattacgcacaagagcgagcgatttggtctcacagcatccgactatgatgttggttggctttgtgcccttcccctcgagctagcggcgagccgcgcgatgctagatgtaatacatgacagcttgcctcaagggcaagaggataccaacacatatactctcggcagcataggaagaaagaatatagtcattacgtgcttgccggccgaaggaatgggacttaataatgctgcaattgtagcgagccatatgcgtcgcacattccctgcgcttcatattttcttgatggttggaattggcggcggcgcaccatccatggaaaacgatattcgtcttggcgacgttgttgtttcaactaatgttgtgcagtgggattttggcaaaattgtttatgatggtcagacacaatcgacatcattccctcgtcagccttcacaagcactcatgagcgccgtatcgactttgcgagcacgtcatgagactgaatcctcgcgaattcaaacattcctcgccgaaatgttggaacggtaccctacaatggcaaagtatgcagacaggtcagaactgaaggatattctattcgactgcgcctacgaacacgatgccactttgcgacactgtgatgattgtgaccagtctaggttgataaagcgtgcggttagagacagcgccgagccggttgtccattttggcgtgattgcgtcaggaaatcgtgttatcaaacatggaacctcaagagatcggctagcacgggagttcaatgcgatttgcttcgagatggaagcggctgctctgatggacaccctacgatgcctggtgatacgtggaatttgtgactattccgacagccataagaacaaaaagtggcagccatacgcagccgcagttgcggcagcgtacgcaaaagagttggttctcattatgccagctgctatctcacagtcgacggatttgatagctcaagatggagcgcctcaatatctggaccgaaagtggctgacagattcgttatcgtttgagagcatcgaagcgcgccagacaagtataagacctgcgctcaagaaaacgtgcagatggcttttgaatcatcccgaacttctacgttggttggacccagcgtgctacactgagcaccatggctttctgtggatctatggaaagcccggtgcaggaaaatcgacaatcatgaagttcattcatgcaagatactctgaaatcaagacgagtattaccatatcattcttcttccacgcccggggtagcgaactggagaagtctaccgaaggaatgtatcgatctttgctgtctcagttactccagaaagtaccagacctcgacaaaatattcgacagtcccgtacttttgcgtcaaactcggcgcgaatgcgacgtaatctgggatatgggacttcttagagaacttttttctcgtgcgataggtagccttgctgaccgacaagtgatgtgcttcgttgatgcactagatgagtgcagcgagtcccaagttcgagacatgatcagcttctttgaagatctcggagactctgcaattgaatcaagcgcgaaattttacatttgtttctctagccggcactatccaactatcaacattaagaacagcagaacgctggtgctggaagatcaatcaggccataaacaagatcttgagcaatatgtgaaaaccaaactcaaggccggaaagaagtctcttgaggtggagaatctgattcttgaaaagtcagcaggcgttttcctatgggttgttttggtaattgaaatcctgaacaaggaattcgaacgtggtagactctttgcagtgaaaaggcggctcaatgagatgcctgccgaactaagtaagctcttcaaggacatattattacgagatacagaaaatatgtctgatcttctgttatgcatccaatggatactgtttgcaaaaagaccactgaggccggaggaattctacttcgccgtggtgtccggcctggaccacgatccagaagtattgtcagaatggaatcccgatcaaatggacgctatagtacgatttgtgtcgagttcttcgaaggggctcgccgaaaccacgaagccaccacatcgaactgttcagttcatacatgaatctgtacgagattttctactgaaggatgacggcttggatcagctatggtctgacctggggaacgactttcagaatttgagccacgatcagttgaagcgatgctgctataattatttccaggctaccatccctcacaatcaggcagtcgatatgcagctccctaaagcacattctaccgaagccaagataatacgggaaaacgtggcagggcatttcccgtttttagagtatgcgacccagcacgtcctctatcatgcagacatagcttcagtcactcgatgccaagaagaattcatatggacattcgagctaaagtcatggataaaagctgataacgtctttggcaagcacgatacatctcgacacacagaatacgctactctcttgtacatattagcagagaaaggttttgctgggctcatcaaaatgttgctcgctggtggagtcagcccgcttcctgcgattgcagagcgatatcagtttcctctgcaggcagcgatggcgaaaggtcaaaaagatgctattttagcaatcttgcaacatagccatgctacattgcccggcataaatgcgcgattcaagcataattcacaaaggatgataacaccgattgcttgggcggtagaatacgaatccggagacatcgtcaagctcttaatcgatcacggagcaatgactcacgagattgaaccgcacaaacgccttcatttatcgactgccatcagacgtcgttcaacggatgtcgtcgaagctctgctcgatggaggaatagacattaacaaatcaatgaccatgcacctattggaagccatacgtggagggtcccccgaagtcgtgagccttctgcttgacaaaggagctgatgtgtatgatgcatactcgaaggcgtttcatgaagctgtccgtcttcaatcactcgatatggtgactcttttgcttgacagaggagctcagcccgcgggatatagtgtttgggcattgttatatcaagccatcgactcaggctctgtacccatcatgatccgcttgcttgagaaaataattcccgtcaatcgctatctattgaccatgtcaaaactgttgaagcgagcaattacctcaaaatcagtggaaatggtgaacttattgcttgaccgaggggccgacattaattacgaacgtaatgacgcgacaccattatcatacgcagttgtgtctcaatctgccccaatcactgagctacttctgcagaggggtgctaccgttgatcctcaagattttattcgcattgctgctcgaaacggatggtggaacattgtacagggcatgatcaacagaggagccaaggtgaacttcaatttgactcatgacgtatctttattgaagaatgcaattaaaaaatcgaatacagcccttgtagagctgctccttcatcgcggttacgattccattgacggcccgactctaacagctgctttctttcaggcgatggccattaagtcggccgatatttgtgaggttctagtcaaatacgatagtcagactattggcctcaaacgcagcctacttgcgtcgcacgaaaccgcgtcgctgctactattcaaagccgtcgagttgaggaatcaccgtgtcattaatatttttctgcagcaaggtgtagatttgaactactctaccgattgcgagacagcgttatacagagctgtgcgtttaggcgatgaaggcatcgtggagcttttacttgccaatggagcagacccgactcttaggagcaaagcgggcccaaatttccgcagtacttgtgatccggcattttcagctgctgatcgcagcctagaagccagcattaagattgtcagcttgctgctcgaacatggcgctgattgtaatcaggccgacagagcctgcactttaccgctaacacttgcagtaactatctgcggcaacccagaaaaggcggttcttctgctcgaaaggggggcagactcgagtgttatagacaaaactggccagtcaccattttcaaaagctatttgcagcaaccgtgtttccatgtctatagtgagacttttttttgacagaggagccgattttcatggcttggatgatcgaacaagccagattttgttatcaagagctgcgggtgccggtctcaaagatgtaatagagcagcaaatgagcataggcctcgatcccatggcttttgacgaccagaccggcagatcgccaatattcatggccatcgacaatagggacaaggaaatgatcgagctcctgctgaatatggcgatcaaaattggcaacctgaccaattccgatttttgccaactgataaaaagagcagaaggtactgggtcaaaggagatcgtgaggcttttgtctgcatacaaatga

SEQ ID NO: 31748 - protein, 1534 aa, Muscodor strobelii
  misc_feature: SGI Peptide ID NO. 570933
  misc_feature (1297)..(1329): Pfam Id: PF00023 Pfam Desc: Ankyrin repeat
  misc_feature (1132)..(1164): Pfam Id: PF00023 Pfam Desc: Ankyrin repeat
  misc_feature (1299)..(1329): Pfam Id: PF00023 Pfam Desc: Ankyrin repeat
  misc_feature (53)..(1160): NCBI GI: 116202685 Blast Desc: CHGG_09227 [Chaetomium globosum CBS 148.51] gi|88177745|gb|EAQ85213.1| CHGG_09227 [Chaetomium globosum CBS 148.51]
  misc_feature (119)..(1530): NCBI GI: 70990006 Blast Desc: Pfs, NACHT and Ankyrin domain protein [Aspergillus fumigatus Af293] gi|66847484|gb|EAL87814.1| Pfs, NACHT and Ankyrin domain protein [Aspergillus fumigatus Af293]
  misc_feature (53)..(1160): NCBI GI: 119473587 Blast Desc: Pfs, NACHT and Ankyrin domain protein [Neosartorya fischeri NRRL 181] gi|119406822|gb|EAW16772.1| Pfs, NACHT and Ankyrin domain protein [Neosartorya fischeri NRRL 181]
  misc_feature (53)..(1163): NCBI GI: 115433911 Blast Desc: conserved [Aspergillus terreus NIH2624] gi|114189944|gb|EAU31644.1| conserved [Aspergillus terreus NIH2624]
  misc_feature (48)..(1219): NCBI GI: 171689444 Blast Desc: protein product [Podospora anserina] gi|170944684|emb|CAP70795.1| protein product [Podospora anserina]
  misc_feature (53)..(975): NCBI GI: 115390334 Blast Desc: conserved [Aspergillus terreus NIH2624] gi|114195068|gb|EAU36768.1| conserved [Aspergillus terreus NIH2624]
  misc_feature (48)..(1061): NCBI GI: 212545444 Blast Desc: Pfs, NACHT and Ankyrin domain protein [Penicillium marneffei ATCC 18224] gi|210065845|gb|EEA19939.1| Pfs, NACHT and Ankyrin domain protein [Penicillium marneffei ATCC 18224]
  misc_feature (48)..(888): NCBI GI: 145254107 Blast Desc: An18g00540 [Aspergillus niger] gi|134084101|emb|CAK43130.1| protein product [Aspergillus niger]
  misc_feature (44)..(1157): NCBI GI: 169774533 Blast Desc: [Aspergillus oryzae RIB40] gi|83769597|dbj|BAE59732.1| protein product [Aspergillus oryzae]
  misc_feature (44)..(1163): NCBI GI: 238496907 Blast Desc: Pfs, NACHT and Ankyrin domain protein [Aspergillus flavus NRRL3357] gi|220694569|gb|EED50913.1| Pfs, NACHT and Ankyrin domain protein [Aspergillus flavus NRRL3357]
  misc_feature: Useful for introducing or modulating the production of volatile compounds
MNTSTSHKRRLYDGSDGSSTPAASSKRQKWGPIDDHLRITHKSERFGLTASDYDVGWLCALPLELAASRAMLDVIHDSLPQGQEDTNTYTLGSIGRKNIVITCLPAEGMGLNNAAIVASHMRRTFPALHIFLMVGIGGGAPSMENDIRLGDVVVSTNVVQWDFGKIVYDGQTQSTSFPRQPSQALMSAVSTLRARHETESSRIQTFLAEMLERYPTMAKYADRSELKDILFDCAYEHDATLRHCDDCDQSRLIKRAVRDSAEPVVHFGVIASGNRVIKHGTSRDRLAREFNAICFEMEAAALMDTLRCLVIRGICDYSDSHKNKKWQPYAAAVAAAYAKELVLIMPAAISQSTDLIAQDGAPQYLDRKWLTDSLSFESIEARQTSIRPALKKTCRWLLNHPELLRWLDPACYTEHHGFLWIYGKPGAGKSTIMKFIHARYSEIKTSITISFFFHARGSELEKSTEGMYRSLLSQLLQKVPDLDKIFDSPVLLRQTRRECDVIWDMGLLRELFSRAIGSLADRQVMCFVDALDECSESQVRDMISFFEDLGDSAIESSAKFYICFSSRHYPTINIKNSRTLVLEDQSGHKQDLEQYVKTKLKAGKKSLEVENLILEKSAGVFLWVVLVIEILNKEFERGRLFAVKRRLNEMPAELSKLFKDILLRDTENMSDLLLCIQWILFAKRPLRPEEFYFAVVSGLDHDPEVLSEWNPDQMDAIVRFVSSSSKGLAETTKPPHRTVQFIHESVRDFLLKDDGLDQLWSDLGNDFQNLSHDQLKRCCYNYFQATIPHNQAVDMQLPKAHSTEAKIIRENVAGHFPFLEYATQHVLYHADIASVTRCQEEFIWTFELKSWIKADNVFGKHDTSRHTEYATLLYILAEKGFAGLIKMLLAGGVSPLPAIAERYQFPLQAAMAKGQKDAILAILQHSHATLPGINARFKHNSQRMITPIAWAVEYESGDIVKLLIDHGAMTHEIEPHKRLHLSTAIRRRSTDVVEALLDGGIDINKSMTMHLLEAIRGGSPEVVSLLLDKGADVYDAYSKAFHEAVRLQSLDMVTLLLDRGAQPAGYSVWALLYQAIDSGSVPIMIRLLEKIIPVNRYLLTMSKLLKRAITSKSVEMVNLLLDRGADINYERNDATPLSYAVVSQSAPITELLLQRGATVDPQDFIRIAARNGWWNIVQGMINRGAKVNFNLTHDVSLLKNAIKKSNTALVELLLHRGYDSIDGPTLTAAFFQAMAIKSADICEVLVKYDSQTIGLKRSLLASHETASLLLFKAVELRNHRVINIFLQQGVDLNYSTDCETALYRAVRLGDEGIVELLLANGADPTLRSKAGPNFRSTCDPAFSAADRSLEASIKIVSLLLEHGADCNQADRACTLPLTLAVTICGNPEKAVLLLERGADSSVIDKTGQSPFSKAICSNRVSMSIVRLFFDRGADFHGLDDRTSQILLSRAAGAGLKDVIEQQMSIGLDPMAFDDQTGRSPIFMAIDNRDKEMIELLLNMAIKIGNLTNSDFCQLIKRAEGTGSKEIVRLLSAYK

SEQ ID NO: 31749 - DNA, 5094 bp, Muscodor strobelii
  misc_feature: SGI EST ID NO. CUFF.75115.1
  misc_feature: Variant of the nucleotide sequence at SEQ ID NO 31747
ctgaatcattcgagttcctgctgctcacgaaaagctttacttcaattccatgagatgagagatgaacacatcgaccagccacaaaaggcgattgtatgacggaagtgatggaagctcgacgccagctgcttcatccaagcgacaaaaatggggacctatcgacgatcatttgagaattacgcacaagagcgagcgatttggtctcacagcatccgactatgatgttggttggctttgtgcccttcccctcgagctagcggcgagccgcgcgatgctagatgtaatacatgacagcttgcctcaagggcaagaggataccaacacatatactctcggcagcataggaagaaagaatatagtcattacgtgcttgccggccgaaggaatgggacttaataatgctgcaattgtagcgagccatatgcgtcgcacattccctgcgcttcatattttcttgatggttggaattggcggcggcgcaccatccatggaaaacgatattcgtcttggcgacgttgttgtttcaactaatgttgtgcagtgggattttggcaaaattgtttatgatggtcagacacaatcgacatcattccctcgtcagccttcacaagcactcatgagcgccgtatcgactttgcgagcacgtcatgagactgaatcctcgcgaattcaaacattcctcgccgaaatgttggaacggtaccctacaatggcaaagtatgcagacaggtcagaactgaaggatattctattcgactgcgcctacgaacacgatgccactttgcgacactgtgatgattgtgaccagtctaggttgataaagcgtgcggttagagacagcgccgagccggttgtccattttggcgtgattgcgtcaggaaatcgtgttatcaaacatggaacctcaagagatcggctagcacgggagttcaatgcgatttgcttcgagatggaagcggctgctctgatggacaccctacgatgcctggtgatacgtggaatttgtgactattccgacagccataagaacaaaaagtggcagccatacgcagccgcagttgcggcagcgtacgcaaaagagttggttctcattatgccagctgctatctcacagtcgacggatttgatagctcaagatggagcgcctcaatatctggaccgaaagtggctgacagattcgttatcgtttgagagcatcgaagcgcgccagacaagtataagacctgcgctcaagaaaacgtgcagatggcttttgaatcatcccgaacttctacgttggttggacccagcgtgctacactgagcaccatggctttctgtggatctatggaaagcccggtgcaggaaaatcgacaatcatgaagttcattcatgcaagatactctgaaatcaagacgagtattaccatatcattcttcttccacgcccggggtagcgaactggagaagtctaccgaaggaatgtatcgatctttgctgtctcagttactccagaaagtaccagacctcgacaaaatattcgacagtcccgtacttttgcgtcaaactcggcgcgaatgcgacgtaatctgggatatgggacttcttagagaacttttttctcgtgcgataggtagccttgctgaccgacaagtgatgtgcttcgttgatgcactagatgagtgcagcgagtcccaagttcgagacatgatcagcttctttgaagatctcggagactctgcaattgaatcaagcgcgaaattttacatttgtttctctagccggcactatccaactatcaacattaagaacagcagaacgctggtgctggaagatcaatcaggccataaacaagatcttgagcaatatgtgaaaaccaaactcaaggccggaaagaagtctcttgaggtggagaatctgattcttgaaaagtcagcaggcgttttcctatgggttgttttggtaattgaaatcctgaacaaggaattcgaacgtggtagactctttgcagtgaaaaggcggctcaatgagatgcctgccgaactaagtaagctcttcaaggacatattattacgagatacagaaaatatgtctgatcttctgttatgcatccaatggatactgtttgcaaaaagaccactgaggccggaggaattctacttcgccgtggtgtccggcctggaccacgatccagaagtattgtcagaatggaatcccgatcaaatggacgctatagtacgatttgtgtcgagttcttcgaaggggctcgccgaaaccacgaagccaccacatcgaactgttcagttcatacatgaatctgtacgagattttctactgaaggatgacggcttggatcagctatggtctgacctggggaacgactttcagaatttgagccacgatcagttgaagcgatgctgctataattatttccaggctaccatccctcacaatcaggcagtcgatatgcagctccctaaagcacattctaccgaagccaagataatacgggaaaacgtggcagggcatttcccgtttttagagtatgcgacccagcacgtcctctatcatgcagacatagcttcagtcactcgatgccaagaagaattcatatggacattcgagctaaagtcatggataaaagctgataacgtctttggcaagcacgatacatctcgacacacagaatacgctactctcttgtacatattagcagagaaaggttttgctgggctcatcaaaatgttgctcgctggtggagtcagcccgcttcctgcgattgcagagcgatatcagtttcctctgcaggcagcgatggcgaaaggtcaaaaagatgctattttagcaatcttgcaacatagccatgctacattgcccggcataaatgcgcgattcaagcataattcacaaaggatgataacaccgattgcttgggcggtagaatacgaatccggagacatcgtcaagctcttaatcgatcacggagcaatgactcacgagattgaaccgcacaaacgccttcatttatcgactgccatcagacgtcgttcaacggatgtcgtcgaagctctgctcgatggaggaatagacattaacaaatcaatgaccatgcacctattggaagccatacgtggagggtcccccgaagtcgtgagccttctgcttgacaaaggagctgatgtgtatgatgcatactcgaaggcgtttcatgaagctgtccgtcttcaatcactcgatatggtgactcttttgcttgacagaggagctcagcccgcgggatatagtgtttgggcattgttatatcaagccatcgactcaggctctgtacccatcatgatccgcttgcttgagaaaataattcccgtcaatcgctatctattgaccatgtcaaaactgttgaagcgagcaattacctcaaaatcagtggaaatggtgaacttattgcttgaccgaggggccgacattaattacgaacgtaatgacgcgacaccattatcatacgcagttgtgtctcaatctgccccaatcactgagctacttctgcagaggggtgctaccgttgatcctcaagattttattcgcattgctgctcgaaacggatggtggaacattgtacagggcatgatcaacagaggagccaaggcgatggccattaagtcggccgatatttgtgaggttctagtcaaatacgatagtcagactattggcctcaaacgcagcctacttgcgtcgcacgaaaccgcgtcgctgctactattcaaagccgtcgagttgaggaatcaccgtgtcattaatatttttctgcagcaaggtgtagatttgaactactctaccgattgcgagacagcgttatacagagctgtgcgtttaggcgatgaaggcatcgtggagcttttacttgccaatggagcagacccgactcttaggagcaaagcgggcccaaatttccgcagtacttgtgatccggcattttcagctgctgatcgcagcctagaagccagcattaagattgtcagcttgctgctcgaacatggcgctgattgtaatcaggccgacagagcctgcactttaccgctaacacttgcagtaactatctgcggcaacccagaaaaggcggttcttctgctcgaaaggggggcagactcgagtgttatagacaaaactggccagtcaccattttcaaaagctatttgcagcaaccgtgtttccatgtctatagtgagacttttttttgacagaggagccgattttcatggcttggatgatcgaacaagccagattttgttatcaagagctgcgggtgccggtctcaaagatgtaatagagcagcaaatgagcataggcctcgatcccatggcttttgacgaccagaccggcagatcgccaatattcatggccatcgacaatagggacaaggaaatgatcgagctcctgctgaatatggcgatcaaaattggcaacctgaccaattccgatttttgccaactgataaaaagagcagaaggtactgggtcaaaggagatcgtgaggcttttgtctgcatacaaatgatcgagccgcagcgctgttgagcagtgctatcaatgggcagcaggagcttgttaatttggttcttgacaggggattctgtaattgacagatttggcctgttaggcaagccaagcttagtggtaaaaccactcttaggcgcaaagaaacccagcctccaacatgacggtgcaatagatttggcggtcgtagggtggtactctgatatgacaaagtctttatgaccgtggaagcactactagatcaaagccgcatgcaattgagtatgcactattctgggcggaaatagcttacatgggagctgggagtaatggaacggaagaacttgcgtatctttcacccactggaaatatattaagtctatcgtcccctaaacatcacataagaagtatatagcgaagcctcaagtagtattgtgaatgcataaccaggaaaatgatcttagatatgcaactgcgaagtatagtaacaattagcccatccaggtaggttcaatgatatactccctcactgaaagatgacggtagcgatcacgatccgacctgacgtgacttctatctagaactcgt

SEQ ID NO: 31750 - DNA, 2055 bp, Muscodor strobelii
  misc_feature: SGI cDNA ID NO. 570934
  misc_feature: Encodes the peptide sequence at SEQ ID NO 31751
atgcccttcaacttattcaaggcgctaaagctagggtctaaccactaccctggagataatttaaggctaggtcgaattcgcgtactcaagttcgttaagcttacgcgcctgagcagactcaagtgtgagttagcagagattgatctcccctcagccggccagggtacctatgcggccttatcttaccgatggactctcaagggtgaatatgagataatatcatgcaacggagccgattttagaatccatagtgatgtcgagtgcgccctgaaacacatatggatcaggggcaaccagccatctctcccgatatggattgatgctgtgtgcatcaatcagaaagacttcaaagagctggagactcaggtgcgggtaatgagagatatctatcaacgtgcgaatcatgtcattgtctggctaggcaagggagacaaactttcgtggcgtgcttggagcgcgatgaacatcgtgctgtcatctgcgacgttgtcgaatagtgatgaggccactcggttgatgctcgacgaactcggaaccaccaaggagttatggggttcaattaagaagttatgggcaacggaatggtttcatagagtatggactctccaggagattttccttgctcggcgagcgacccttctgtgttcgacggacaccatggactggaacgatttcgtgaaggcctgtctccttctcgcccgtcgcacagagagaaggccagatggagaggttatggacttgaagatacagctaattcggaacttatctgcatatcccgaccaattaccggcgtccaagacgactttcgcactattataccttctagctatcaccgtccaccgcaagagcaccaacccacgagataagatctacgggctgctaggtcttgttcttggtcctagcttggaggcttttattgttgactacgagagcaatcatgaggtcatctataccattatcgcccgggcactggtaatacgcgcagcctggacggaacctgatagaatggcctcagagccattcaacctgagcgtcttgcacgccgcgggtctggataaccataattttgtgacctcggatggggatgactttagcccggatcgcgcaactacgactccggggcagataccttcatgggtgccggattggactaaaccctccgcatcgtggaggtctcgtattttcgatcacaaggccgagtgggtgccgcttatccggactgatggcctgaagcccggtggtgcgctgaagagcaactctgccggtggtgagctgcatgttgttgctgtagtcattggacgcttccaaatccgctcgtggacaaagacagagacgcaacgaatgaaaatagagttcgggttacaggagcttcccagctgcgctacggcccattccagcggcttgaagacggatagagtgtcttctaaacgtcagtatacacgatggactgatgggagtacgaaggaagatctgcgtcgataccccgacgataggtcgacggccatatacgaagcaccggacatcctacatcaactgcgacctcacgacgacaaaacctgcgtatgttttaggacacctaaatctgcttggaacccgtctctattagtcaagctccttattttgttcattccatttatcgtaagctatctcttatttaacatggaacttagagtatatgggctatttgcaatgctggtggcaggatacaccacgtcttttattatagatggcatctgggcaacgaaaaagcctgctaccgccccagtattcaaggtcaactgggagatcaaagactctcccgatactagggcttctaccggagattggctcgtttcccttgctggggagcagggcatgttcttactcaagcctggggatgatggacagttcaagttagtaacatctatgctccgcaacatacacgactcaagcatcgagatagcccctttttcagaaaactggaagtctaaagttcctaggcggaatggcgaaggcactgatcagccatcttggaaagacttccacgttgttcccgtctttttgactatcatttaa

SEQ ID NO: 31751 - protein, 684 aa, Muscodor strobelii
  misc_feature: SGI Peptide ID NO. 570934
  misc_feature (57)..(204): Pfam Id: PF06985 Pfam Desc: Heterokaryon incompatibility protein (HET)
  misc_feature (5)..(398): NCBI GI: 169622599 Blast Desc: SNOG_14524 [Phaeosphaeria nodorum SN15] gi|111056944|gb|EAT78064.1| SNOG_14524 [Phaeosphaeria nodorum SN15]
  misc_feature (26)..(309): NCBI GI: 238508078 Blast Desc: AFLA_009950 [Aspergillus flavus NRRL3357] gi|220688759|gb|EED45111.1| AFLA_009950 [Aspergillus flavus NRRL3357]
  misc_feature (26)..(377): NCBI GI: 169604370 Blast Desc: SNOG_05197 [Phaeosphaeria nodorum SN15] gi|111066468|gb|EAT87588.1| SNOG_05197 [Phaeosphaeria nodorum SN15]
  misc_feature (1)..(398): NCBI GI: 145245067 Blast Desc: An11g08370 [Aspergillus niger] gi|134079496|emb|CAK46028.1| protein product [Aspergillus niger]
  misc_feature (37)..(388): NCBI GI: 168042194 Blast Desc: [Physcomitrella patens subsp. patens] gi|162675113|gb|EDQ61612.1| [Physcomitrella patens subsp. patens]
  misc_feature (13)..(328): NCBI GI: 256731925 Blast Desc: NECHADRAFT_80792 [Nectria haematococca mpVI 77-13-4]
  misc_feature (31)..(384): NCBI GI: 46135655 Blast Desc: FG09350.1 [Gibberella zeae PH-1]
  misc_feature (20)..(433): NCBI GI: 46127485 Blast Desc: FG08120.1 [Gibberella zeae PH-1]
  misc_feature (11)..(338): NCBI GI: 238483469 Blast Desc: conserved [Aspergillus flavus NRRL3357] gi|220701023|gb|EED57361.1| conserved [Aspergillus flavus NRRL3357]
  misc_feature (7)..(385): NCBI GI: 256722564 Blast Desc: NECHADRAFT_49740 [Nectria haematococca mpVI 77-13-4]
MPFNLFKALKLGSNHYPGDNLRLGRIRVLKFVKLTRLSRLKCELAEIDLPSAGQGTYAALSYRWTLKGEYEIISCNGADFRIHSDVECALKHIWIRGNQPSLPIWIDAVCINQKDFKELETQVRVMRDIYQRANHVIVWLGKGDKLSWRAWSAMNIVLSSATLSNSDEATRLMLDELGTTKELWGSIKKLWATEWFHRVWTLQEIFLARRATLLCSTDTMDWNDFVKACLLLARRTERRPDGEVMDLKIQLIRNLSAYPDQLPASKTTFALLYLLAITVHRKSTNPRDKIYGLLGLVLGPSLEAFIVDYESNHEVIYTIIARALVIRAAWTEPDRMASEPFNLSVLHAAGLDNHNFVTSDGDDFSPDRATTTPGQIPSWVPDWTKPSASWRSRIFDHKAEWVPLIRTDGLKPGGALKSNSAGGELHVVAVVIGRFQIRSWTKTETQRMKIEFGLQELPSCATAHSSGLKTDRVSSKRQYTRWTDGSTKEDLRRYPDDRSTAIYEAPDILHQLRPHDDKTCVCFRTPKSAWNPSLLVKLLILFIPFIVSYLLFNMELRVYGLFAMLVAGYTTSFIIDGIWATKKPATAPVFKVNWEIKDSPDTRASTGDWLVSLAGEQGMFLLKPGDDGQFKLVTSMLRNIHDSSIEIAPFSENWKSKVPRRNGEGTDQPSWKDFHVVPVFLTII

SEQ ID NO: 31752 - DNA, 536 bp, Muscodor strobelii
  misc_feature: SGI EST ID NO. CUFF.75106.0
  misc_feature: Variant of the nucleotide sequence at SEQ ID NO 31750
gagcagggcatgttcttactcaagcctggggatgatggacagttcaagttagtaacatctatgctccgcaacatacacgactcaagcatcgagatagcccctttttcagaaaactggaagtctaaagttcctaggcggaatggcgaaggcactgatcagccatcttggaaagacttccacgttgttcccgtctttttgactatcatttaaaatttgctggttaccgtaataagccaaattcggtaaaacttccctctaagtgtcattcagaagcacaggatccccatacctttgggattgcgcttatgttcttgtaatatcaagatggtgctggtcatttctcttctcaacatgtgatagcttatggcactacttttcacaccgaccttcacatattcctgcaaagaattgtcaaagtcgcccaaaaaagctagcgtttccgccctattcatgaccaagcaccttgagcctcgtgagatggaatatcataatgcctaagcttggcattagcctggtctcacagaagtaagactagt

SEQ ID NO: 31753 - DNA, 1791 bp, Muscodor strobelii
  misc_feature: SGI cDNA ID NO. 570935
  misc_feature: Elevated expression when VOC is produced
  misc_feature: Encodes the peptide sequence at SEQ ID NO 31754
atgcgactattgaatacgaaaagtctcaggcttgagcatttcatcagccccaagccgcaatacgctatcctatctcatacttggggcgataatgagatagttttcgaagatattgcctatcaagatggacaatcaggctcatcgtggatgacaaaaattggtgcagaaaaagtactcaaagcagcacaaacagccagaacgaatggcttcgattacatttggattgacacttgctgcatcgacaaatctagtagcgccgaattgtccgaagctatcaattcaatgtacgagtggtacgaggcttcggagatctgttacgcatacctggcagattgcgattctcccgtagaggactatcgctctttcagggagagcagatggtttaggagaggatggacggagctcattgccccctctaaagtcgacttttacgataaggcatggactttcataggaaaccgatcttcgcttgcggcagagattcattctgtgactcgaattgacacccacatcttgaagcaggtctggtttgaaacgagatactcagcacctaggcgtgaccatgtacaaaaactatcaattcacacgaggatgaactgggcttgcggacgtcaaacttcgtacgcagaagacaaagcgtattgcttacttggtctcttcgacgttgccatgcctctactatatggagaaggtggtgccaaggcattccgaagactacaagaacatataatcgcgaacaccaatgaccaaagtatcctgcttttcaagcccgacacgtatgtattctctgatgagccaaccgctttgctggcatcggggcccgacaacttcaaatcgtcccatcgcttcggcgcgagccgttcccagcttggccattcgatgcaagtgacaaaggcaggctttgagatcaatctgcttttacatccattaagaaacccctatcacaggatggaatggtttctaggcattgttgacaacagtttcgaaaatgattccttccatctgaaccggcccgccatctatatggctaaaaatcacgaccgtgacacgtacactcgtttctgggatttttgcgttgtacagcgcaatgaacatggacaagccgaagtagtatacagtgagtggtataagttcgccaatcgtggaccaatacgtgcaatactcgaccagcacgggttcaagcgaaaagtaattacgataacgaatccttcgtacaacgatcagagcgcaagacttgacaacaagatctatgtcggccctatcactcacatgtttcttccagacgcgtacgaatatgacttcggatcgtgtagtccgcaagcagacggtaattggcttaggtgcaaactggctccattagctatcggtggcacgtggtggttattgtcttgcctcattttgcagccgacgggctctctcccgagtgcaccatttttaggcattctcatattctgcggtaacttttcgagtccgtttgtccacatcgtcgaactacagaaatgggtaggagttgatgacagcacacagtatatccatgtcagctccaagagtctctgttcagcggctgatcgactgaagaacctgccatcaatgatcaagtatgacaatgatatcgggatagcggacagcgacttagtagccatcattcaggcgatccaatacgattacggaatcaaggataaatcttcgattacgacatccagcgggctccacatcgcggcaaagttggaagatgatttgttcatagaggaaaaaatccatcgccttcacgtcaaagtcactaaatgctag

SEQ ID NO: 31754 - protein, 596 aa, Muscodor strobelii
  misc_feature: SGI Peptide ID NO. 570935
  misc_feature (21)..(134): Pfam Id: PF06985 Pfam Desc: Heterokaryon incompatibility protein (HET)
  misc_feature (21)..(118): Pfam Id: PF06985 Pfam Desc: Heterokaryon incompatibility protein (HET)
  misc_feature (1)..(595): NCBI GI: 256733325 Blast Desc: NECHADRAFT_77285 [Nectria haematococca mpVI 77-13-4]
  misc_feature (1)..(311): NCBI GI: 238493477 Blast Desc: conserved [Aspergillus flavus NRRL3357] gi|220696469|gb|EED52811.1| conserved [Aspergillus flavus NRRL3357]
  misc_feature (1)..(372): NCBI GI: 256733553 Blast Desc: [Nectria haematococca mpVI 77-13-4]
  misc_feature (1)..(305): NCBI GI: 256722255 Blast Desc: NECHADRAFT_52327 [Nectria haematococca mpVI 77-13-4]
  misc_feature (1)..(351): NCBI GI: 46107392 Blast Desc: FG00579.1 [Gibberella zeae PH-1]
  misc_feature (1)..(253): NCBI GI: 256732895 Blast Desc: NECHADRAFT_18070 [Nectria haematococca mpVI 77-13-4]
  misc_feature (1)..(283): NCBI GI: 46114894 Blast Desc: FG03289.1 [Gibberella zeae PH-1]
  misc_feature (1)..(400): NCBI GI: 46128083 Blast Desc: FG08419.1 [Gibberella zeae PH-1]
  misc_feature (1)..(312): NCBI GI: 261354085 Blast Desc: HET domain-containing protein [Verticillium albo-atrum VaMs.102]
  misc_feature (1)..(292): NCBI GI: 171680418 Blast Desc: protein product [Podospora anserina] gi|170939836|emb|CAP65061.1| protein product [Podospora anserina]
  misc_feature: Useful for introducing or modulating the production of volatile compounds
MRLLNTKSLRLEHFISPKPQYAILSHTWGDNEIVFEDIAYQDGQSGSSWMTKIGAEKVLKAAQTARTNGFDYIWIDTCCIDKSSSAELSEAINSMYEWYEASEICYAYLADCDSPVEDYRSFRESRWFRRGWTELIAPSKVDFYDKAWTFIGNRSSLAAEIHSVTRIDTHILKQVWFETRYSAPRRDHVQKLSIHTRMNWACGRQTSYAEDKAYCLLGLFDVAMPLLYGEGGAKAFRRLQEHIIANTNDQSILLFKPDTYVFSDEPTALLASGPDNFKSSHRFGASRSQLGHSMQVTKAGFEINLLLHPLRNPYHRMEWFLGIVDNSFENDSFHLNRPAIYMAKNHDRDTYTRFWDFCVVQRNEHGQAEVVYSEWYKFANRGPIRAILDQHGFKRKVITITNPSYNDQSARLDNKIYVGPITHMFLPDAYEYDFGSCSPQADGNWLRCKLAPLAIGGTWWLLSCLILQPTGSLPSAPFLGILIFCGNFSSPFVHIVELQKWVGVDDSTQYIHVSSKSLCSAADRLKNLPSMIKYDNDIGIADSDLVAIIQAIQYDYGIKDKSSITTSSGLHIAAKLEDDLFIEEKIHRLHVKVTKC

SEQ ID NO: 31755 - DNA, 3122 bp, Muscodor strobelii
  misc_feature: SGI EST ID NO. CUFF.75163.0
  misc_feature: Variant of the nucleotide sequence at SEQ ID NO 31753
gaaactctatctattgagaaactcttgccgagactaataattgttgggttgcgaccgcaatgccatacgccctatctcagaatgatggagtgtatataggacaagtaggtgtcttgccttagatcatgtctttaagcttctcttgattggcgcaggagtaaggctctctcatgtactacgcctcgcttggcatggtagacgcagcacactggatacttatttaaatacacttgagaccgtggaggcagaggaacgatgagcactacaaacaaaatttagttgcggcactttttgatgtactgaagatgttggagaacatccttctcttgcgttatatcgtaatgtcatcagcttttgcgcattgatgataggagtgtattctggctcgcttcggcgtccaagttccgctgaccaaatatcgaaaaattactgcttggtaattgtatcactttcgtttttttattgcctccatgctcaccgagtaagcccaccgcccaagatatcagagagccgcattattacttattctgccttgcgccactgcggggtttgcatataagttactacaggcgccgagaatctgtcagagccgcgagccttgcaggcattaactcatcttcaatcacaaagaaccgtaatcagcaatgcgactattgaatacgaaaagtctcaggcttgagcatttcatcagccccaagccgcaatacgctatcctatctcatacttggggcgataatgagatagttttcgaagatattgcctatcaagatggacaatcaggctcatcgtggatgacaaaaattggtgcagaaaaagtactcaaagcagcacaaacagccagaacgaatggcttcgattacatttggattgacacttgctgcatcgacaaatctagtagcgccgaattgtccgaagctatcaattcaatgtacgagtggtacgaggcttcggagatctgttacgcatacctggcagattgcgattctcccgtagaggactatcgctctttcagggagagcagatggtttaggagaggatggacgggtttgtagaagatcacttcttctaataatgaatgatgtgtccgaggctaacctttgacggcatacagtatgccttttacctggcatgatgcaatgctgttcattatatgcatagacatactaatgatagcgtaatagctccaagagctcattgccccctctaaagtcgacttttacgataaggcatggactttcataggaaaccgatcttcgcttgcggcagagattcattctgtgactcgaattgacacccacatcttgaagcaggtctggtttgaaacgagatactcagcacctaggcgtgaccatgtacaaaaactatcaattcacacgaggatgaactgggcttgcggacgtcaaacttcgtacgcagaagacaaagcgtattgcttacttggtctcttcgacgttgccatgcctctactatatggagaaggtggtgccaaggcattccgaagactacaagaacatataatcgcgaacaccaatgaccaaagtatcctgcttttcaagcccgacacgtatgtattctctgatgagccaaccgctttgctggcatcggggcccgacaacttcaaatcgtcccatcgcttcggcgcgagccgttcccagcttggccattcgatgcaagtgacaaaggcaggctttgagatcaatctgcttttacatccattaagaaacccctatcacaggatggaatggtttctaggcattgttgacaacagtttcgaaaatgattccttccatctgaaccggcccgccatctatatggctaaaaatcacgaccgtgacacgtacactcgtttctgggatttttgcgttgtacagcgcaatgaacatggacaagccgaagtagtatacagtgagtggtataagttcgccaatcgtggaccaatacgtgcaatactcgaccagcacgggttcaagcgaaaagtaattacgataacgaatccttcgtacaacgatcagagcgcaagacttgacaacaagatctatgtcggccctatcactcacatgtttcttccagacgcgtacgaatatgacttcggatcgtgtagtccgcaagcagacggtaattggcttaggtgcaaactggctccattagctatcggtggcacgtggtggttattgtcttgcctcattttgcagccgacgggctctctcccgagtgcaccatttttaggcattctcatattctgcggtaacttttcgatatatccatgtcagctccaagagtctctgttcagcggctgatcgactgaagaacctgccatcaatgatcaagtatgacaatgatatcgggatagcggacagcgacttagtagccatcattcaggcgatccaatacgattacggaatcaaggataaatcttcgattacgacatccagcgggctccacatcgcggcaaagttggaagatgatttgttcatagaggaaaaaatccatcgccttcacgtcaaagtcactaaatgctagaaatttcctcgcaatctgtgggaagtctgagtaaagaggccgaggggcatgcagctaatcggttggccacctgtattattcgcctatgacatcgaacctgacccgttcgcactttgtcatgcttgatattaagctcctatagtgtcgtcttcattttgattctctaaggcccaacttgcaagcatttaatatgagttctgggatctgacatactcgtccggtccacactctcagcagggcggagtcaaatctaccctgaacagacaattccagttcctcattcgttttctcaagaaggcggcgacgacagcgacaaacggctcagcctctgcgcgggacccgcgcatgttccccacctataagttgtgtcgaccagcacaatcgtgctcaatctggtaaatatggcggcagattaccgcggaatgtgccacttcagcaaccaggttggttggaatgggatgactgacatggctaccataaggaagatagagaaggcatctcggctagagtcgtatcgctactttaagtagtattaatgagttttcgagtttctggggcataacaagcttgatcatgagatctagggccacgtagttaagtca

SEQ ID NO: 31756 - DNA, 1071 bp, Muscodor strobelii
  misc_feature: SGI cDNA ID NO. 570936
  misc_feature: Elevated expression when VOC is produced
  misc_feature: Encodes the peptide sequence at SEQ ID NO 31757
atgctttctcgtaaccttctccgcacatcaacacgcgctctgcgttcagcaggcgctgcaatgcctcgccagacaccatcctcaaccgcaggtgcctttgcttttctttcgacaaatcctcccacagccttgcccaacaaagacaagaagcagacgcccggtgccttcgcccgaaccgatgagactattaccgtcgagtatcctgaggaaggcgagctgcctgcatcccagcctgtcaccggtcgtggtggcatgcacatgaagcgcacgctcggctcgttctcactcgagggcagagtcggtgtcgtgaccggcggtgctagaggtctgggtcttgtcatgggccagggcatggttattagcggtgctaatctggctattgttgatatgaacaaggaggaagccgagagacaggcccttgagcttgtccaagtcttccgcagagagaatcctggctcggcgcgcattcctaaggtgactgcacactacgccgacgtttccgatgccgagtcagtgcaggcctgcattgatgagattctcaaggagcacggaaagatcgacaacttggtgaccagtgccgggttcacggagaactacaatgctgtcgactatccgatcgaccgcatgcgcaagttgtggagtgtcaatgttgacggcacttacctcttcgctaccatcattgccaagcacctgatggcccgcaacagccccggtagcatggtgttcattggaagcatgtccggctccatcgtcaatgtaccccagccccaagctccatacaacagcgcgaaggccgccgttcggcacttggccgcttcattggccgtcgagtgggcacatgctggtatccgcgtgaactgcatctcacccggttacatgttgactgctttgactgagaagattctggacgacaacccagaactcaagaagcagtggacttctctcatcccccagggtaagatgggccagcccgtcgacctaatgggtcctgtcactttcctcctctccgatgccagccaatatgttactggtgctgatctgcgcgttgatggcggttacaccgtcacgtaa

SEQ ID NO: 31757 - protein, 356 aa, Muscodor strobelii
  misc_feature: SGI Peptide ID NO. 570936
  misc_feature (99)..(279): Pfam Id: PF00106 Pfam Desc: short chain dehydrogenase
  misc_feature (102)..(283): Pfam Id: PF08659 Pfam Desc: KR domain
  misc_feature (1)..(356): NCBI GI: 154310740 Blast Desc: BC1G_06844 [Botryotinia fuckeliana B05.10] gi|150851384|gb|EDN26577.1| BC1G_06844 [Botryotinia fuckeliana B05.10]
  misc_feature (1)..(356): NCBI GI: 156058556 Blast Desc: SS1G_03290 [Sclerotinia sclerotiorum 1980] gi|154701077|gb|EDO00816.1| SS1G_03290 [Sclerotinia sclerotiorum 1980]
  misc_feature (26)..(356): NCBI GI: 256733489 Blast Desc: [Nectria haematococca mpVI 77-13-4]
  misc_feature (19)..(356): NCBI GI: 46128267 Blast Desc: FG08511.1 [Gibberella zeae PH-1]
  misc_feature (54)..(354): NCBI GI: 164429718 Blast Desc: NCU02128 [Neurospora crassa OR74A] gi|157073590|gb|EAA35050.2| NCU02128 [Neurospora crassa OR74A]
  misc_feature (36)..(356): NCBI GI: 212534412 Blast Desc: D-arabinitol dehydrogenase ArbD, [Penicillium marneffei ATCC 18224] gi|210069761|gb|EEA23851.1| D-arabinitol dehydrogenase ArbD, [Penicillium marneffei ATCC 18224]
  misc_feature (46)..(355): NCBI GI: 145610366 Blast Desc: MGG_02544 [Magnaporthe grisea 70-15] gi|145017678|gb|EDK02041.1| MGG_02544 [Magnaporthe grisea 70-15]
  misc_feature (44)..(355): NCBI GI: 149209557 Blast Desc: MGCH7_ch7g261 [Magnaporthe grisea 70-15] gi|86196216|gb|EAQ70854.1| MGCH7_ch7g261 [Magnaporthe grisea 70-15]
  misc_feature (40)..(356): NCBI GI: 256723288 Blast Desc: [Nectria haematococca mpVI 77-13-4]
  misc_feature (42)..(356): NCBI GI: 225554500 Blast Desc: D-arabinitol dehydrogenase [Ajellomyces capsulatus G186AR]
  misc_feature (116)..(353): SWISSPROT Homolog: EC 1.1.1.250 D-arabinitol 2-dehydrogenase
  misc_feature: Useful for introducing or modulating the production of volatile compounds
MLSRNLLRTSTRALRSAGAAMPRQTPSSTAGAFAFLSTNPPTALPNKDKKQTPGAFARTDETITVEYPEEGELPASQPVTGRGGMHMKRTLGSFSLEGRVGVVTGGARGLGLVMGQGMVISGANLAIVDMNKEEAERQALELVQVFRRENPGSARIPKVTAHYADVSDAESVQACIDEILKEHGKIDNLVTSAGFTENYNAVDYPIDRMRKLWSVNVDGTYLFATIIAKHLMARNSPGSMVFIGSMSGSIVNVPQPQAPYNSAKAAVRHLAASLAVEWAHAGIRVNCISPGYMLTALTEKILDDNPELKKQWTSLIPQGKMGQPVDLMGPVTFLLSDASQYVTGADLRVDGGYTVT

SEQ ID NO: 31758 - DNA, 2982 bp, Muscodor strobelii
  misc_feature: SGI EST ID NO. CUFF.75136.0
  misc_feature: Variant of the nucleotide sequence at SEQ ID NO 31756
atttgctcgtatctgacttcctcatgaacttaccactccacgctagaggctcagcatggcgtcttgtctattaccgttgcatcagatggactattcgagttcgacaagaagccggtggctccgtaaccccatatatcgtggacccttgcgtcggcttgcccccgttctcaccatcaaacatagtggcgctggtcgatcgtacgcatgtgagtggacttgggcttcacattggctgtggaagatagggtggaattccggaattgcagtattagagcttgagagtcatggcagatcactgtacaagtctcgaagaatagtgaaacaacggggagctgggctgactaggggcctcgcggcgaggggtggaaaacgtttccccaccatagctccccatatctgcccctcttcttactcaagtcagcatagggagatcagggaagctcaatgcctagacgtgctagactgcaggctctgcaggccgctgcagcactccagagatacggtgtggtgatggacctcttctggacagcgctgccgagatggtgatggggcaaatctgatggggcaggatgcgcgggatggtggatggaatgctcatgtgagggcccagagttcttgggggtgtgcttcgcctgataagtgatgagtgttccattgaatccattccacatgaatcaatagcgaccaggccatgtcagggaccattcaatctgcattgtgcagtggactgtgcactcttgaccgtcttcggagggaaaaaaagatcgtgagtttgctagaggagcgagcagcgaagctcccctggccatggcagccctaacaaattttgagatatctgcgtgaccacggccactttttatttctgattgtgattgtccttttctctatagacttttttaaaggcacaagttctcatcgtgagatttctctcctctcatcttgtcgattgacactgcatcctctatcttctatatcggtgggttcggcctcgtcagatctatacttttcgaggaattgatactcgcccacgatacgtcattgcgattcctggcagcacaagctccagaggctgaacacacacctctagcttttcttacggtcgctcgcaacccccagcattgaatcgtcatctcgtacttcccattgccactcaattggcttcacatagagttatagtgaccattcattccaataatacctgctggatcacaccgaggagcacaattctctaaacttgccaacctagctgaggtgtcagctttccgcacctctttctaccatcttcctcatcttttccttcacatagcttgagagtcaattgattcaagatgctttctcgtaaccttctccgcacatcaacacgcgctctgcgttcagcaggcgctgcaatgcctcgccagacaccatcctcaaccgcaggtgcctttgcttttctttcgacaaatcctcccacagccttgcccaacaaagacaagaagcagacgcccggtgccttcgcccgaaccgatgagactattaccgtcgagtatcctgaggaaggcgagctgcctgcatcccagcctgtcaccggtcgtggtggcatgcacatgaagcgcacgctcggctcgttctcactcgagggcagagtcggtgtcgtgaccggcggtgctagaggtctgggtcttgtcatgggccagggcatggttattagcggtgctaatctggctattgttgatatgaacaaggaggaagccgagagacaggcccttgagcttgtccaagtcttccgcagagagaatcctggctcggcgcgcattcctaaggtgactgcacactacgccgacgtttccgatgccgagtcagtgcaggcctgcattgatgagattctcaaggagcacggaaagatcgacaacttggtgaccagtgccgggttcacggagaactacaatgctgtcgactatccgatcgaccgcatgcgcaagttgtggagtgtcaatgttgacggcacttacctcttcgctaccatcattgccaagcacctgatggcccgcaacagccccggtagcatggtgttcattggaagcatgtccggctccatcgtcaatgtaccccagccccaagctccatacaacagcgcgaaggccgccgttcggcacttggccgcttcattggccgtcgagtgggcacatgctggtatccgcgtgaactgcatctcacccggttacatgttgactgctttgactgagaagattctggacgacaacccagaactcaagaagcagtggacttctctcatcccccagggtaagatgggccagcccgtcgacctaatgggtcctgtcactttcctcctctccgatgccagccaatatgttactggtgctgatctgcgcgttgatggcggttacaccgtcacgtaagcgatcaatcgcatttaatgagccggggcgaaagaagtggaagggtataatgaatctcgcgatcatgaaccagcgtgagtcaggaatcggtccatcttggaaggtccggtatgtttaaatagtactcatcttggtacagatgagatgggaatgggattaaagcaagctgtcgtgcatcgtacagcgtcttaattaaaagccttcatttgttcaatctccgttcgtagccatgtcgttgcgtgaagcatattagactaacataggatatactgtattgcgtaattgacagtaccgaggattccaatgtgagaactcggctgaacgctagacagcttgttcaattgaccgagcgatatggtcatcatggctgctgtgtccagatgagggaggtgtagatgaaggagtgtatgctcgtgctctggtcatgcgctggtcaccatcactcgtcagaaagaatgccgtagacaagaaatgcctgcagaggaactcggtacaaatgcgatgcagagatgaacgtattcatctgtttatatgagttggagagagaggtgcctatccctgcgtttgtcccggtgcgttttcg

SEQ ID NO: 31759 - DNA, 4716 bp, Muscodor strobelii
  misc_feature: SGI cDNA ID NO. 570937
  misc_feature: Reduced expression when VOC is produced
  misc_feature: Encodes the peptide sequence at SEQ ID NO 31760
atgtttggtggcgcgcggcggcagcggcctcagagtctgcctctgaactcggccaccgccaacccgaatgcccatacggccgctgcagctgccttcatgtctgcttccggccagcaaccgaacaagtctctctccgccgccgctgctggcgctgctttgcgcgctcgccctcacacgcccaccaatgtcgccgaggtacaaacgaagcggaccgcccgccgaagcgcctccgtctcttcaaatggcagcgctgccgttgccgctgggaggttgggcggcccagcgcgactggagagacgaggcagctctgggagcatgacagaacgcacatttcgaagcccctctcccggtcgatcgtccgcgcgagtagcagagcccgaaccacccgttcctcaaattcccgcaagtcacagaaattctgccgctcatgagaggaaacctggaggtggtattggcatgcagacattccgcacagcgtcccagaaaatgcaatcagaacccacttcatattatacacagccctcagtcgacctcagccatgtgcgcacgtcagacgctcccatgcgcaccgcttcgggggcacaacctcagcatcctcaatctcctccaccgccagaaagatcagaaagtcgcaactcagtcaacttctcctaccctactgcttttcgcccgcagtccccccctgcttcgccaacctcatactcttcgccctaccgaaatatcgtatctccccaatcgactgcatcaaccaccaaatcatccaggggacatgtatcctcttcgaaaggaagtcaagagttagtgtacgacccgaactcgcggaggatggtcccaaagtatcaaacagggattgttatggagcctgacacgaggaggccagccccgaaacctgcaaagaggaagaaggatcctgggttacagagagaaggcagccaactcgcaaaggggaccatgacccgaccgagagggacgatcgtagaaaacgagcagccccagtatgaaccagccccgagggaaccatcggtaataagccccgtaccaactgcggaagaacacccattcctcgaagaaccggtcgtggaggctctcatcacacccgaagtagcggcgaggacggattcgataagagtgaccaagaaacagcaaagagcacggagcccatcaccggctgcggagcctgctaacgatgtttctgagcctgagccgacgagatcgtcaaaggctgaacccaaagtcgagccagagctccctgcagagagcgacgaagaatccgaactggagactcctcggccgtctcagaccgttatgggcgctttagatgctgtgcctacgcgccagactcggttcgatgatacacggtcacctccacccgcagcaatcgaccagcacgactttgcagtccaagagcccgagcctcgaaaatcctcagtttcccagaacgaagtgccgcaacaagcccgtggcaaacaaatggccgtctacgtcgagaacaaacccgtggccgaactcgttaggacaagtggtagcttgagtcgttcgccctctaacagtccagtgcgccaggccagatttgcctcgagtcccgcagacagcctagctgtgaggcacgtacctctgcctcgatcggcctccccgatcaaatctgccctgaagcgtaccagcccagcgcctcgagaggtttctcccccggataacttctcggacccctcaggctctggaggtgcctctcccgactccgcgatgctacggaagaaatccgttcgcgttagtttcgacgatcagaacactgtcatcgtaggcgagggtgctccagtgccggatacggattcaccaatagccccaagtccacaatcgaagcgcacatggtttagtaatattgggcgcaacaagaagaaggatttgctcttggaagaagacgagattatgaaaccacgacccgctctgcccagttttggtagtgttcgcgaaaagaagttacgcgaacccgaagaacggcctctggtccgacctctggaaatgccgcattctcctgcggctccgtcgtcaccagaactgcgtccggaaagctccagcacaatgaacgaaccagaggcagtggaagatcccaactttggtcagtcgagcgatcacgctatcggctcattgcttgctcaggaacacaactcacgcataccagcaaacacctcgcggtttagggaaccgctccctcctgtcgtgacttccatcgaaggaagtggataccattctgatagccttcagagttccgacagcgagatcgagtatgcaaatagccctacagcggcaagtgcgactctgagcactcagacgaccgagatgactcagcccgatgaacctgaaagctccatgaatgggtctcctcaattaaatatcgtcgaagaaccacagccactgaaacagaccgagccacacgatatcccccaaatttctgtcatactaccgagccccatgtctccaggacatcgggtagaagaggcgacttccactcagtactttaatgtacctggaggttttcccgaatccggatctgacatgaagagcgattctaagtcttcgactaccaacagttccgatagtgggtcgccggctgatgccatattcgaagcaccagctactgtgcaaccaactcagattgacgcattgccgcaaaccacactcgcgactgctttacctgtgcaagcattggatgttgttgcagcagacgaatcggaagagagtagtatttacagcgatgcatatgaggatatccctgaaggcgacgagggcggattccaatctctcgatgcagttgttgagagcccaactacggctgcctcaaagccaaaagactgggcgcaatccccgacagagcccaagtccccaacccgcgccaccggtagtgcctctcctcctcctccgcgagactccaacgactgggagcaggcgaaagctttctggcgtagtctcactgctgagaaaaggcgacaactcgaacttgaagctgttgaagatgctggcgcagaaggtgaccgcgaagaggtctcgattcctatccgtaggaatagcagcaaaaggaagtctgcagaacagaaggcttcagttgctgcaacagcaccttctcccgaggttgcgacgaaagccaaacaattagctcgggaaataacatcacagaaggctgaggctccaagagtcgaaactatccccaaagccgagacgaaggctcgccatgagcctgtgaccaccaagcagccgcgtatgcgcaaatctatgaggggtgagcagccagccaggcctgttgcggcacaagcacaagcacagactggcatgcgtaagaccatgagaaccaatggtggtgcacaaggtcccgcacagcgctcagcacgcccagcctcaaccatcgagcccgtagtatccgcctcgcagagagttgctaccaatcagactgccactaatcggactgccaaagcgcgacctcaatcagccgtgctaccttctacatcgatgcctctgcccaaacagagcaaaccctcgttgcaacgacggggctctgacgccagcgatagtagcttcacgcgtactcgtttagcgccgagtggagggttttcattccgcaagtcgatgcgcccaacgtctccccctcaggcgaaaccagaggctactagagggtctggaaggtttagtcttcgctcattgtcacctgctagctctacgacacgtcgaaattctactttcagctctccgcctccgagcggtatgatgagacattcactcagatcgaatagtgaatcgagtcgtgaggcaaagcgctcttcactacatttcccaggtttcgggaagtcaggcaaagcccctgcgggccgacgaagtagtcgacttgccgactcgagcgacgaggacgagagaccggcattgggcttcatgagcaggttcaatgactccagcgacgaagacgatcatcgcccttcttcttcaagagagaataaggcattggctagaggctcactacgcggatcggcccctgcgcctaatgctcgcaggcccgccgcaatgcctgatcttgaggaagactcgtcagaattaccggatagcgacgacaataaggacgacaagaataccatgccgagcccgctgcaaactccacaaggtcgcttcacagttggacgtcctgcagcggtaccacgaacgagctcgggcgctattggcacgtcgagcttggttagatctggatctggacgaggcgggatcacgccttcttacacagatcctggacttggaagacccaccagggaaagaaaggggtcattcctgggcattctaagacgcaataaaaacgacgcgggcaaaatcaagagatccgagttgaccgatagcgcggccaggcgggatacaaagctcgagcgcgatgcaggacaactcagggatctgagaagcgatgtagctacgagccctacgagcccgaaattgcagaaacggaatccgttcgacgccaatggcgcacgacctagctctgcaggtaatatctttggaaggagtaacacgacaaataccatcgaaagaccgaacttgagtggacggaggagcgttagtctgggtcaggaatcatccctcaagggcggggaggagctggataatgttattccagagacgacgaataatcctgcggtgcagaagaaaaagaagtttggcacgctgagacggatgtttaaacttgatgagtag

SEQ ID NO: 31760 - protein, 1571 aa, Muscodor strobelii
  misc_feature: SGI Peptide ID NO. 570937
  misc_feature (97)..(1571): NCBI GI: 46128273 Blast Desc: FG08514.1 [Gibberella zeae PH-1]
  misc_feature (14)..(1571): NCBI GI: 171685073 Blast Desc: protein product [Podospora anserina] gi|170942497|emb|CAP68149.1| protein product [Podospora anserina]
  misc_feature (504)..(1571): NCBI GI: 256733987 Blast Desc: NECHADRAFT_35639 [Nectria haematococca mpVI 77-13-4]
  misc_feature (1)..(1476): NCBI GI: 116193387 Blast Desc: CHGG_06411 [Chaetomium globosum CBS 148.51] gi|88182324|gb|EAQ89792.1| CHGG_06411 [Chaetomium globosum CBS 148.51]
  misc_feature (493)..(1571): NCBI GI: 261352187 Blast Desc: conserved [Verticillium albo-atrum VaMs.102]
  misc_feature (435)..(1053): NCBI GI: 85111270 Blast Desc: NCU02120 [Neurospora crassa OR74A] gi|28925599|gb|EAA34621.1| [Neurospora crassa OR74A]
  misc_feature (1)..(326): NCBI GI: 149209517 Blast Desc: MGCH7_ch7g242 [Magnaporthe grisea 70-15] gi|86196197|gb|EAQ70835.1| MGCH7_ch7g242 [Magnaporthe grisea 70-15]
  misc_feature (928)..(1348): NCBI GI: 154296630 Blast Desc: BC1G_12723 [Botryotinia fuckeliana B05.10] gi|150843306|gb|EDN18499.1| BC1G_12723 [Botryotinia fuckeliana B05.10]
  misc_feature (38)..(326): NCBI GI: 145610384 Blast Desc: MGG_02533 [Magnaporthe grisea 70-15] gi|145017692|gb|EDK02055.1| MGG_02533 [Magnaporthe grisea 70-15]
  misc_feature (1)..(327): NCBI GI: 154296630 Blast Desc: BC1G_12723 [Botryotinia fuckeliana B05.10] gi|150843306|gb|EDN18499.1| BC1G_12723 [Botryotinia fuckeliana B05.10]
  misc_feature: Useful for introducing or modulating the production of volatile compounds
MFGGARRQRPQSLPLNSATANPNAHTAAAAAFMSASGQQPNKSLSAAAAGAALRARPHTPTNVAEVQTKRTARRSASVSSNGSAAVAAGRLGGPARLERRGSSGSMTERTFRSPSPGRSSARVAEPEPPVPQIPASHRNSAAHERKPGGGIGMQTFRTASQKMQSEPTSYYTQPSVDLSHVRTSDAPMRTASGAQPQHPQSPPPPERSESRNSVNFSYPTAFRPQSPPASPTSYSSPYRNIVSPQSTASTTKSSRGHVSSSKGSQELVYDPNSRRMVPKYQTGIVMEPDTRRPAPKPAKRKKDPGLQREGSQLAKGTMTRPRGTIVENEQPQYEPAPREPSVISPVPTAEEHPFLEEPVVEALITPEVAARTDSIRVTKKQQRARSPSPAAEPANDVSEPEPTRSSKAEPKVEPELPAESDEESELETPRPSQTVMGALDAVPTRQTRFDDTRSPPPAAIDQHDFAVQEPEPRKSSVSQNEVPQQARGKQMAVYVENKPVAELVRTSGSLSRSPSNSPVRQARFASSPADSLAVRHVPLPRSASPIKSALKRTSPAPREVSPPDNFSDPSGSGGASPDSAMLRKKSVRVSFDDQNTVIVGEGAPVPDTDSPIAPSPQSKRTWFSNIGRNKKKDLLLEEDEIMKPRPALPSFGSVREKKLREPEERPLVRPLEMPHSPAAPSSPELRPESSSTMNEPEAVEDPNFGQSSDHAIGSLLAQEHNSRIPANTSRFREPLPPVVTSIEGSGYHSDSLQSSDSEIEYANSPTAASATLSTQTTEMTQPDEPESSMNGSPQLNIVEEPQPLKQTEPHDIPQISVILPSPMSPGHRVEEATSTQYFNVPGGFPESGSDMKSDSKSSTTNSSDSGSPADAIFEAPATVQPTQIDALPQTTLATALPVQALDVVAADESEESSIYSDAYEDIPEGDEGGFQSLDAVVESPTTAASKPKDWAQSPTEPKSPTRATGSASPPPPRDSNDWEQAKAFWRSLTAEKRRQLELEAVEDAGAEGDREEVSIPIRRNSSKRKSAEQKASVAATAPSPEVATKAKQLAREITSQKAEAPRVETIPKAETKARHEPVTTKQPRMRKSMRGEQPARPVAAQAQAQTGMRKTMRTNGGAQGPAQRSARPASTIEPVVSASQRVATNQTATNRTAKARPQSAVLPSTSMPLPKQSKPSLQRRGSDASDSSFTRTRLAPSGGFSFRKSMRPTSPPQAKPEATRGSGRFSLRSLSPASSTTRRNSTFSSPPPSGMMRHSLRSNSESSREAKRSSLHFPGFGKSGKAPAGRRSSRLADSSDEDERPALGFMSRFNDSSDEDDHRPSSSRENKALARGSLRGSAPAPNARRPAAMPDLEEDSSELPDSDDNKDDKNTMPSPLQTPQGRFTVGRPAAVPRTSSGAIGTSSLVRSGSGRGGITPSYTDPGLGRPTRERKGSFLGILRRNKNDAGKIKRSELTDSAARRDTKLERDAGQLRDLRSDVATSPTSPKLQKRNPFDANGARPSSAGNIFGRSNTTNTIERPNLSGRRSVSLGQESSLKGGEELDNVIPETTNNPAVQKKKKFGTLRRMFKLDE

SEQ ID NO: 31761 - DNA, 5777 bp, Muscodor strobelii
  misc_feature: SGI EST ID NO. CUFF.75130.0
  misc_feature: Variant of the nucleotide sequence at SEQ ID NO 31759
ctttgttaataacaacaactcccgagagagagggtcttccgagggtttcgttggctgcaaggaaggatctccctgttcctggatgcgattcggattgattgcatcagacctcaaagctctccggatcgccaagccccacgccgcatctgttttctcctttactctgttaggcacctctatccaccctcaacccatcatcaccatctgcgattctcgaactgatcttcgctttttcgcgctgcgttacctccattattgattctcctatccatcgagtagtcgcctttgtcttcatccccgtcgcgccgcccggcaacgccatcgctgtcccatcatccatcctgtgcgcattcaacgcatgcaacactaccatcaccaccaacagctttatcccatgtgtcctcaattatagtcgatcgccatcttggcattagaatatccaacaccacagcttcatcatgtttggtggcgcgcggcggcagcggcctcagagtctgcctctgaactcggccaccgccaacccgaatgcccatacggccgctgcagctgccttcatgtctgcttccggccagcaaccgaacaagtctctctccgccgccgctgctggcgctgctttgcgcgctcgccctcacacgcccaccaatgtcgccgaggtacaaacgaagcggaccgcccgccgaagcgcctccgtctcttcaaatggcagcgctgccgttgccgctgggaggttgggcggcccagcgcgactggagagacgaggcagctctgggagcatgacagaacgcacatttcgaagcccctctcccggtcgatcgtccgcgcgagtagcagagcccgaaccacccgttcctcaaattcccgcaagtcacagaaattctgccgctcatgagaggaaacctggaggtggtattggcatgcagacattccgcacagcgtcccagaaaatgcaatcagaacccacttcatattatacacagccctcagtcgacctcagccatgtgcgcacgtcagacgctcccatgcgcaccgcttcgggggcacaacctcagcatcctcaatctcctccaccgccagaaagatcagaaagtcgcaactcagtcaacttctcctaccctactgcttttcgcccgcagtccccccctgcttcgccaacctcatactcttcgccctaccgaaatatcgtatctccccaatcgactgcatcaaccaccaaatcatccaggggacatgtatcctcttcgaaaggaagtcaagagttagtgtacgacccgaactcgcggaggatggtcccaaagtatcaaacagggattgttatggagcctgacacgaggaggccagccccgaaacctgcaaagaggaagaaggatcctgggttacagagagaaggcagccaactcgcaaaggggaccatgacccgaccgagagggacgatcgtagaaaacgagcagccccagtatgaaccagccccgagggaaccatcggtaataagccccgtaccaactgcggaagaacacccattcctcgaagaaccggtcgtggaggctctcatcacacccgaagtagcggcgaggacggattcgataagagtgaccaagaaacagcaaagagcacggagcccatcaccggctgcggagcctgctaacgatgtttctgagcctgagccgacgagatcgtcaaaggctgaacccaaagtcgagccagagctccctgcagagagcgacgaagaatccgaactggagactcctcggccgtctcagaccgttatgggcgctttagatgctgtgcctacgcgccagactcggttcgatgatacacggtcacctccacccgcagcaatcgaccagcacgactttgcagtccaagagcccgagcctcgaaaatcctcagtttcccagaacgaagtgccgcaacaagcccgtggcaaacaaatggccgtctacgtcgagaacaaacccgtggccgaactcgttaggacaagtggtagcttgagtcgttcgccctctaacagtccagtgcgccaggccagatttgcctcgagtcccgcagacagcctagctgtgaggcacgtacctctgcctcgatcggcctccccgatcaaatctgccctgaagcgtaccagcccagcgcctcgagaggtttctcccccggataacttctcggacccctcaggctctggaggtgcctctcccgactccgcgatgctacggaagaaatccgttcgcgttagtttcgacgatcagaacactgtcatcgtaggcgagggtgctccagtgccggatacggattcaccaatagccccaagtccacaatcgaagcgcacatggtttagtaatattgggcgcaacaagaagaaggatttgctcttggaagaagacgagattatgaaaccacgacccgctctgcccagttttggtagtgttcgcgaaaagaagttacgcgaacccgaagaacggcctctggtccgacctctggaaatgccgcattctcctgcggctccgtcgtcaccagaactgcgtccggaaagctccagcacaatgaacgaaccagaggcagtggaagatcccaactttggtcagtcgagcgatcacgctatcggctcattgcttgctcaggaacacaactcacgcataccagcaaacacctcgcggtttagggaaccgctccctcctgtcgtgacttccatcgaaggaagtggataccattctgatagccttcagagttccgacagcgagatcgagtatgcaaatagccctacagcggcaagtgcgactctgagcactcagacgaccgagatgactcagcccgatgaacctgaaagctccatgaatgggtctcctcaattaaatatcgtcgaagaaccacagccactgaaacagaccgagccacacgatatcccccaaatttctgtcatactaccgagccccatgtctccaggacatcgggtagaagaggcgacttccactcagtactttaatgtacctggaggttttcccgaatccggatctgacatgaagagcgattctaagtcttcgactaccaacagttccgatagtgggtcgccggctgatgccatattcgaagcaccagctactgtgcaaccaactcagattgacgcattgccgcaaaccacactcgcgactgctttacctgtgcaagcattggatgttgttgcagcagacgaatcggaagagagtagtatttacagcgatgcatatgaggatatccctgaaggcgacgagggcggattccaatctctcgatgcagttgttgagagcccaactacggctgcctcaaagccaaaagactgggcgcaatccccgacagagcccaagtccccaacccgcgccaccggtagtgcctctcctcctcctccgcgagactccaacgactgggagcaggcgaaagctttctggcgtagtctcactgctgagaaaaggcgacaactcgaacttgaagctgttgaagatgctggcgcagaaggtgaccgcgaagaggtctcgattcctatccgtaggaatagcagcaaaaggaagtctgcagaacagaaggcttcagttgctgcaacagcaccttctcccgaggttgcgacgaaagccaaacaattagctcgggaaataacatcacagaaggctgaggctccaagagtcgaaactatccccaaagccgagacgaaggctcgccatgagcctgtgaccaccaagcagccgcgtatgcgcaaatctatgaggggtgagcagccagccaggcctgttgcggcacaagcacaagcacagactggcatgcgtaagaccatgagaaccaatggtggtgcacaaggtcccgcacagcgctcagcacgcccagcctcaaccatcgagcccgtagtatccgcctcgcagagagttgctaccaatcagactgccactaatcggactgccaaagcgcgacctcaatcagccgtgctaccttctacatcgatgcctctgcccaaacagagcaaaccctcgttgcaacgacggggctctgacgccagcgatagtagcttcacgcgtactcgtttagcgccgagtggagggttttcattccgcaagtcgatgcgcccaacgtctccccctcaggcgaaaccagaggctactagagggtctggaaggtttagtcttcgctcattgtcacctgctagctctacgacacgtcgaaattctactttcagctctccgcctccgagcggtatgatgagacattcactcagatcgaatagtgaatcgagtcgtgaggcaaagcgctcttcactacatttcccaggtttcgggaagtcaggcaaagcccctgcgggccgacgaagtagtcgacttgccgactcgagcgacgaggacgagagaccggcattgggcttcatgagcaggttcaatgactccagcgacgaagacgatcatcgcccttcttcttcaagagagaataaggcattggctagaggctcactacgcggatcggcccctgcgcctaatgctcgcaggcccgccgcaatgcctgatcttgaggaagactcgtcagaattaccggatagcgacgacaataaggacgacaagaataccatgccgagcccgctgcaaactccacaaggtcgcttcacagttggacgtcctgcagcggtaccacgaacgagctcgggcgctattggcacgtcgagcttggttagatctggatctggacgaggcgggatcacgccttcttacacagatcctggacttggaagacccaccagggaaagaaaggggtcattcctgggcattctaagacgcaataaaaacgacgcgggcaaaatcaagagatccgagttgaccgatagcgcggccaggcgggatacaaagctcgagcgcgatgcaggacaactcagggatctgagaagcgatgtagctacgagccctacgagcccgaaattgcagaaacggaatccgttcgacgccaatggcgcacgacctagctctgcaggtaatatctttggaaggagtaacacgacaaataccatcgaaagaccgaacttgagtggacggaggagcgttagtctgggtcaggaatcatccctcaagggcggggaggagctggataatgttattccagagacgacgaataatcctgcggtgcagaagaaaaagaagtttggcacgctgagacggatgtttaaacttgatgagtaggactcgttgaggtctaaacagacgaagaacgtaccaaaacagatgggaagtgtgcctgaacggagaaggagtttgcttgttaagattaggcggtagaactgcctggggttgaggattatggtcgtgaagattggggggtacgtggtgtgttgcaaagtagagtgtgtgctgtgttgagtagtggtgtgttgagtggactggatattataccccctctttttcttcttctttttttctattgtctcgtcctaccattaaggatggaccaaggatcggtggttatacatgcatcactcggcgaacgaaacaaaacggccgatttcccgggtcttctctctgccacttaaggaacatcacttttttttattttgtcttctcgttccgacggaatgataccgagcaaaaatataggtatggatataccacactacccagactaccccagggttttctttttcacaacaagggggccggaaaggacagaagaggaagacgggagatacatatacgtgatcaattctttaattttagtaattaatgattgtattcatatttgtagatacatactcagaagatgaataagaagaattgatggatgataga

SEQ ID NO: 31762 - DNA, 1008 bp, Muscodor strobelii
  misc_feature: SGI cDNA ID NO. 570938
  misc_feature: Encodes the peptide sequence at SEQ ID NO 31763
atgtcgccgtcgcttgctttcccggcctggggtctaccctcgaccatatctctaccactatacagcgctattccattggccattggcgccgttacactcacacgtacagcctggtctgtcctgtgcttcctgcgctttcactttctacacttcgcctcatcctccgccctgccgcaataccgcggagagcgccgtagctacgcgctgatcaccggctctgcggccggcatcggattcggcttcgcacaggagctagtgcgcgccgggtacggcgttgtcatccatggccggagcgccgctaagctgcaggctgcggaggttaacctacgcgctattgaccccaatgctgaggtacggcatctcgtcttcgatgctagcgattttaaggttgcagacctcgaggccgcgctctcgcagttctccgacctgcccatcacagtgctaatcaacaacgtgggcggcggcaccatcacaggcgatgagcacacgcgcccgctagcgacgtacagtgcccgcgacgtcgacatgtcgctcgacatgaacgctcgcttcatggcgcatgttacgcgcttgcttctgccgtcgcttctccgggctcctcgtgctctggtcctgaacttgacctcaggtgcccgtgacggtataccttggctcgtgacttattctgcgtctaaggcttttgtcacaaagttcagccatgccctaacacgagagatgcgcgcggagcgcgcccctgtagacgtgctcctcgtagtaccaggcgaagtccactcgcaatataacagcaagtcacttccggctggcacgccaacggccgaggagtacgctcgcgctgtgctgagcaaagtcgggatggcgacgcgctgggtgtggctcgagatggcgcccttctggggccacgacttattattcaggatcggtgccctcatgcctgaatgggtgttgcagcgcgctctggagaagaaggttggggagtataagaaacctgctgctaagaaggtggaatga

SEQ ID NO: 31763 - protein, 335 aa, Muscodor strobelii
  misc_feature: SGI Peptide ID NO. 570938
  misc_feature (66)..(240): Pfam Id: PF00106 Pfam Desc: short chain dehydrogenase
  misc_feature (26)..(325): NCBI GI: 256733838 Blast Desc: NECHADRAFT_77388 [Nectria haematococca mpVI 77-13-4]
  misc_feature (27)..(327): NCBI GI: 171683069 Blast Desc: protein product [Podospora anserina] gi|170941494|emb|CAP67145.1| protein product [Podospora anserina]
  misc_feature (27)..(324): NCBI GI: 258566091 Blast Desc: [Uncinocarpus reesii 1704] gi|237907491|gb|EEP81892.1| [Uncinocarpus reesii 1704]
  misc_feature (41)..(316): NCBI GI: 239609447 Blast Desc: short chain dehydrogenase/reductase [Ajellomyces dermatitidis ER-3]
  misc_feature (41)..(316): NCBI GI: 261196452 Blast Desc: short chain dehydrogenase/reductase [Ajellomyces dermatitidis SLH14081] gi|239595874|gb|EEQ78455.1| short chain dehydrogenase/reductase [Ajellomyces dermatitidis SLH14081]
  misc_feature (27)..(302): NCBI GI: 171678445 Blast Desc: protein product [Podospora anserina] gi|170937292|emb|CAP61949.1| protein product [Podospora anserina]
  misc_feature (9)..(334): NCBI GI: 121700733 Blast Desc: short chain dehydrogenase/reductase, [Aspergillus clavatus NRRL 1] gi|119396774|gb|EAW07205.1| short chain dehydrogenase/reductase, [Aspergillus clavatus NRRL 1]
  misc_feature (51)..(316): NCBI GI: 240111243 Blast Desc: oxidoreductase,short chain dehydrogenase, [Coccidioides posadasii C735 delta SOWgp]
  misc_feature (51)..(316): NCBI GI: 119189415 Blast Desc: CIMG_04755 [Coccidioides immitis RS]
  misc_feature (51)..(333): NCBI GI: 225677848 Blast Desc: estradiol 17-beta-dehydrogenase [Paracoccidioides brasiliensis Pb03] gi|226287415|gb|EEH42928.1| estradiol 17-beta-dehydrogenase 12-A [Paracoccidioides brasiliensis Pb18]
  misc_feature (67)..(314): SWISSPROT Homolog: EC 1.1.1.62 Estradiol 17-beta-dehydrogenase
MSPSLAFPAWGLPSTISLPLYSAIPLAIGAVTLTRTAWSVLCFLRFHFLHFASSSALPQYRGERRSYALITGSAAGIGFGFAQELVRAGYGVVIHGRSAAKLQAAEVNLRAIDPNAEVRHLVFDASDFKVADLEAALSQFSDLPITVLINNVGGGTITGDEHTRPLATYSARDVDMSLDMNARFMAHVTRLLLPSLLRAPRALVLNLTSGARDGIPWLVTYSASKAFVTKFSHALTREMRAERAPVDVLLVVPGEVHSQYNSKSLPAGTPTAEEYARAVLSKVGMATRWVWLEMAPFWGHDLLFRIGALMPEWVLQRALEKKVGEYKKPAAKKVE

SEQ ID NO: 31764 - DNA, 1955 bp, Muscodor strobelii
  misc_feature: SGI EST ID NO. CUFF.75199.2
  misc_feature: Variant of the nucleotide sequence at SEQ ID NO 31762
ttttgcttttcggctatggacaggacgaagtgccctgggctttggaccactggtctcgctgcataacaggggcaccctggctccccgcaacgggaaatcagccataacgcattctcaggatggaccgaacgtcgaccgaaagttcattactttccatggttacagctcaagcatatgtgggcgctcggaaatttcggtcgagcccatgcctttataatatacgaggcacgacatcagcaaccgggctagcttggccatgccgccgctagtaatccaccaccgccatgtcgccgtcgcttgctttcccggcctggggtctaccctcgaccatatctctaccactatacagcgctattccattggccattggcgccgttacactcacacgtacagcctggtctgtcctgtgcttcctgcgctttcactttctacacttcgcctcatcctccgccctgccgcaataccgcggagagcgccgtagctacgcgctgatcaccggctctgcggccggcatcggattcggcttcgcacaggagctagtgcgcgccgggtacggcgttgtcatccatggccggagcgccgctaagctgcaggctgcggaggttaacctacgcgctattgaccccaatgctgaggtacggcatctcgtcttcgatgctagcgattttaaggttgcagacctcgaggccgcgctctcgcagttctccgacctgcccatcacagtgctaatcaacaacgtgggcggcggcaccatcacaggcgatgagcacacgcgcccgctagcgacgtacagtgcccgcgacgtcgacatgtcgctcgacatgaacgctcgcttcatggcgcatgttacgcgcttgcttctgccgtcgcttctccgggctcctcgtgctctggtcctgaacttgacctcaggtgcccgtgacggtataccttggctcgtgacttattctgcgtctaaggcttttgtcacaaagttcagccatgccctaacacgagagatgcgcgcggagcgcgcccctgtagacgtgctcctcgtagtaccaggcgaagtccactcgcaatataacagcaagtcacttccggctggcacgccaacggccgaggagtacgctcgcgctgtgctgagcaaagtcgggatggcgacgcgctgggtgtggctcgagatggcgcccttctggggccacgacttattattcaggatcggtgccctcatgcctgaatgggtgttgcagcgcgctctggagaagaaggttggggagtataagaaacctgctgctaagaaggtggaatgaactcgaagcctaatagactgttagctacctattggcagatttgaatcggtactggtgatgcaacatgaccttggcatcgtgtactcgggcgtgccggcggacttaggtacctctaaatgggcacggtgcacgagtagaagagctagatgctcgtggggtcggtagcggagatgcacgaccgacaccgcgttcgctacataccggcactctgtgatatatatatatatatatcagcaccggtccatgcgcctctatcacggtgaagttgattatacgctgtaccagcaaagtgcaatacgaatataagggctggactatatgactctcgaggctatcattatgaaagacccggttccgccgtacacttgctatatgtacggcaaggacgtcgtggccatgtttgggaatatgaagaccccgagcggtctggctgcttccatgttgttcggctctataaaagacatatactcatagtgtaagaccatagaaactaagagagttcctgttggttgtataccatattactgtcttagataatcactagcatttctaggatattcaaagtttacgtagaattagcaggtcaagacgcaatcaagggtgagaactgctatctggtgatctcgtactcttaagtatgctcgcgaaatcataacatcaacg

SEQ ID NO: 31765 - DNA, 1263 bp, Muscodor strobelii
  misc_feature: SGI cDNA ID NO. 570939
  misc_feature: Encodes the peptide sequence at SEQ ID NO 31766
atggagttcaaagatgtggagcatctttacgctagctcttatacaagatctcctacgcgatggagagacaacagacgcctcgctcggcaccgaacattacggaaaggcatcatcgtcgctttggtcctggggttgtactacctaacgcatatacatacatcctaccgacaagccctcctatcgaaatactccccaacactcttcgattccacatcatcatgggagatattccatataccatgggatacgtcaaattcctcgattacccggccgattctagagcataggaaagagtggaaaagagtaggaggtggattcgaaggcgatgtcttcgtgtatggggatacggtgatcaagacctttcacacttcgcggagtccattgaggaattgcgtgaaaggtacaaacgggccgctgagaatgcctacggagatacaagccatgtacaccctcagtggaactgcaggtgaagttggggagggaacggacttcctaccgatgaaggactttttcctagacccgggcgacagtgaaagagaagcgagctggtacatcctcatgccgtttttgccatctgggaatctgcggaagttcgcgaagcgcctacaagcggaaaattcatcgattagggagttggactcgagatttcgaccgtccctcaacaaactgctaggcgctctacggaagatgcataccaacgggctatgtcacgacgatatcaaactcgacaatatcttcgtcacaggcacgccttctggggcgattaatggcactgactgggttcttgcggattttggaaatgtgagggatattgggcatccgtatcattcatcgaggatttggagggaggcagggcagcgtggggattgtaggattaatgacagtgtgagacttatcaaaagttatgtcgagtttttgaggagggcttcgtctggtaatgggaccaaggagtttgatgaagtgttttgggatgggagggagaactggagaggtctgtattggtctgctgttcgtgatgagttacaagggagtgtcgcagcggagaggctgagggaaaggtctggggcactgcctccgctgaatggacataaggcaattaaggagaagagggaatcgtgggggcttgggggtaggttgaggtgctttggcttggataaaaagactcagagggagctagaaaagggcatgccggttcctgaggacaaggctgagattcttggacttgcgagtgtatttgggaagccgactgttgagtgtcggtga

SEQ ID NO: 31766 - protein, 420 aa, Muscodor strobelii
  misc_feature: SGI Peptide ID NO. 570939
  misc_feature (14)..(420): NCBI GI: 256728725 Blast Desc: NECHADRAFT_101921 [Nectria haematococca mpVI 77-13-4]
  misc_feature (30)..(415): NCBI GI: 169612375 Blast Desc: SNOG_09310 [Phaeosphaeria nodorum SN15] gi|111062382|gb|EAT83502.1| SNOG_09310 [Phaeosphaeria nodorum SN15]
  misc_feature (36)..(354): NCBI GI: 189190350 Blast Desc: conserved [Pyrenophora tritici-repentis Pt-1C-BFP] gi|187973120|gb|EDU40619.1| conserved [Pyrenophora tritici-repentis Pt-1C-BFP]
  misc_feature (59)..(359): NCBI GI: 261352828 Blast Desc: conserved [Verticillium albo-atrum VaMs.102]
  misc_feature (184)..(272): NCBI GI: 46126877 Blast Desc: FG07816.1 [Gibberella zeae PH-1]
  misc_feature (85)..(247): NCBI GI: 154415803 Blast Desc: CAMK family protein kinase [Trichomonas vaginalis G3] gi|121915148|gb|EAY19939.1| CAMK family protein kinase [Trichomonas vaginalis G3]
  misc_feature (100)..(270): NCBI GI: 149175165 Blast Desc: serine/threonine kinase [Planctomyces maris DSM 8797] gi|148846143|gb|EDL60483.1| serine/threonine kinase [Planctomyces maris DSM 8797]
MEFKDVEHLYASSYTRSPTRWRDNRRLARHRTLRKGIIVALVLGLYYLTHIHTSYRQALLSKYSPTLFDSTSSWEIFHIPWDTSNSSITRPILEHRKEWKRVGGGFEGDVFVYGDTVIKTFHTSRSPLRNCVKGTNGPLRMPTEIQAMYTLSGTAGEVGEGTDFLPMKDFFLDPGDSEREASWYILMPFLPSGNLRKFAKRLQAENSSIRELDSRFRPSLNKLLGALRKMHTNGLCHDDIKLDNIFVTGTPSGAINGTDWVLADFGNVRDIGHPYHSSRIWREAGQRGDCRINDSVRLIKSYVEFLRRASSGNGTKEFDEVFWDGRENWRGLYWSAVRDELQGSVAAERLRERSGALPPLNGHKAIKEKRESWGLGGRLRCFGLDKKTQRELEKGMPVPEDKAEILGLASVFGKPTVECR

SEQ ID NO: 31767 - DNA, 1882 bp, Muscodor strobelii
  misc_feature: SGI EST ID NO. CUFF.75141.0
  misc_feature: Variant of the nucleotide sequence at SEQ ID NO 31765
ttgtcgacgaatgcttatttggtgaatagcatagaatagatcgacgaaacagggcatagccttacgctcgtagctgaaacagagagcttgggctaggcctgggagccaatagactatgggccctttccaagattcccttcttggcgagcttggctatggagatcaagattgagggcgctagtgccttgtttacttactgagtctttgtcctgaatgggtgtgtttttgcggtgagttgacagatgatgtaggtatcgagtccaaaatagttatgagccttgtttgtgtgacatcggtatagtgaacttggcgcgttcatactcccttgcggaaaccattctgacaggtgctagtataaaacttgaacaggacttctcccaggttggaccatggagcacaatctagatctttattttggcacacgtgactcgttgtgatggagttcaaagatgtggagcatctttacgctagctcttatacaagatctcctacgcgatggagagacaacagacgcctcgctcggcaccgaacattacggaaaggcatcatcgtcgctttggtcctggggttgtactacctaacgcatatacatacatcctaccgacaagccctcctatcgaaatactccccaacactcttcgattccacatcatcatgggagatattccatataccatgggatacgtcaaattcctcgattacccggccgattctagagcataggaaagagtggaaaagagtaggaggtggattcgaaggcgatgtcttcgtgtatggggatacggtgatcaagacctttcacacttcgcggagtccattgaggaattgcgtgaaaggtacaaacgggccgctgagaatgcctacggagatacaagccatgtacaccctcagtggaactgcaggtgaagttggggagggaacggacttcctaccgatgaaggactttttcctagacccgggcgacagtgaaagagaagcgagctggtacatcctcatgccgtttttgccatctgggaatctgcggaagttcgcgaagcgcctacaagcggaaaattcatcgattagggagttggactcgagatttcgaccgtccctcaacaaactgctaggcgctctacggaagatgcataccaacgggctatgtcacgacgatatcaaactcgacaatatcttcgtcacaggcacgccttctggggcgattaatggcactgactgggttcttgcggattttggaaatgtgagggatattgggcatccgtatcattcatcgaggatttggagggaggcagggcagcgtggggattgtaggattaatgacagtgtgagacttatcaaaagttatgtcgagtttttgaggagggcttcgtctggtaatgggaccaaggagtttgatgaagtgttttgggatgggagggagaactggagaggtctgtattggtctgctgttcgtgatgagttacaagggagtgtcgcagcggagaggctgagggaaaggtctggggcactgcctccgctgaatggacataaggcaattaaggagaagagggaatcgtgggggcttgggggtaggttgaggtgctttggcttggataaaaagactcagagggagctagaaaagggcatgccggttcctgaggacaaggctgagattcttggacttgcgagtgtatttgggaagccgactgttgagtgtcggtgagttgttggaattttgtatggaggaggcatcgcgaggatgggcgatgggcgatgtctgatgagaatacgatatagataccccgacatgtttatgagatataggtattgatcaacgagtaataccgaattcgccaatttaagatgcctctattttattaaaaggatacaagcaagagaatcgtac

SEQ ID NO: 31768 - DNA, 897 bp, Muscodor strobelii
  misc_feature: SGI cDNA ID NO. 570940
  misc_feature: Encodes the peptide sequence at SEQ ID NO 31769
atggtgagtatacagagccggtcgaattctcctggcagcaaccaggtcattaagtcgaatgcgagctttgggacagtatggactgtcaaggtgtctaacttcacttcaagcttcaatggatcgtcgtacggtcaatttgagtctagtatcatagacttcaactggtgtcacaaaaatctgcatggaatttacgcttctgaagaaggacttttcgtcaactcgacaactacgactccgtgggactgccgctcgcctggcgcagctccattggataacgacgagaggtttggcattcagtttcgccgcaatactggctgtgtaccagtattggagatagctagcgatgtgttgtctgaaatgccgttacttctcccccgcctcattggtgaaaaggttgtctctcttggtgatgaatattatggtgatccgccactccccaccatcgaatgggattttgttagctatgcaaatgctcgattcttcttatcgaacaatatagaatctgcggcgcataagatcgccgacgcattgacggcgtatatgaccgaacctggaggcgacaacgtcaacgctacagttatatctggagcaatgttttataatgagaccttctacgaaatcgtgtggccatggctttttgtactgtttttcgaaacaatactcgttagtatactgctagccttcacgatatacatcacaaggggacagcctttactcaaaaactcgattattgcgcttcttatctacacgatatcgggttggaaggaagaggagttacaggtacagcatccagaggagatggagaagtggaccaagttctcaaagactatgacggcgcagtttggaagggatacaagtggtctgcttcggtttcacagacgtgacgagacctattaa

SEQ ID NO: 31769 - protein, 298 aa, Muscodor strobelii
  misc_feature: SGI Peptide ID NO. 570940
  misc_feature (161)..(293): NCBI GI: 256726548 Blast Desc: NECHADRAFT_79608 [Nectria haematococca mpVI 77-13-4]
  misc_feature (50)..(287): NCBI GI: 256726092 Blast Desc: [Nectria haematococca mpVI 77-13-4]
  misc_feature (186)..(257): NCBI GI: 171693341 Blast Desc: protein product [Podospora anserina] gi|170946619|emb|CAP73421.1| protein product [Podospora anserina]
  misc_feature (198)..(295): NCBI GI: 261361233 Blast Desc: [Verticillium albo-atrum VaMs.102]
MVSIQSRSNSPGSNQVIKSNASFGTVWTVKVSNFTSSFNGSSYGQFESSIIDFNWCHKNLHGIYASEEGLFVNSTTTTPWDCRSPGAAPLDNDERFGIQFRRNTGCVPVLEIASDVLSEMPLLLPRLIGEKVVSLGDEYYGDPPLPTIEWDFVSYANARFFLSNNIESAAHKIADALTAYMTEPGGDNVNATVISGAMFYNETFYEIVWPWLFVLFFETILVSILLAFTIYITRGQPLLKNSIIALLIYTISGWKEEELQVQHPEEMEKWTKFSKTMTAQFGRDTSGLLRFHRRDETY

SEQ ID NO: 31770 - DNA, 1755 bp, Muscodor strobelii
  misc_feature: SGI cDNA ID NO. 570941
  misc_feature: Encodes the peptide sequence at SEQ ID NO 31771
atgttcccctgcgttatgcaggccctcaagtcactatggctgaccgttgctcaatttgcacttccaggcactcccgagaatatgtcaccagattccacctcgtcactgttccctgatagacccattcggccgctccccaagcgccgactgcgtgagcgtctgtcccctgaggtcgccgacagcatcaagttcccacctgcgccccagactaacacgcccctattcgtctacccctacaacaccagagacgagccattctcaactgcaccagactcagggaatgctgtcagtcgtgaaaatgtggcaagagtgggaggagaaggtgtgggtgttcggaggaacacattcacttccagccgtgacgatgacagcctgataggccaggctcgaagggccctgggctctcgggggttccacgagccacgcgcaagtccatcccggagtaccaaagcacagccaccaccttcgacagcatcttctgtcgacggctacgattcttttgaaaacacaaacaataagaagaagagaaagattcctattgcgggagagtcggccctgaacggtgcccatgcgcttagcgacgcagcaggactgattgtaccttcgcatcaggcaggcggagaaagcgagggagataccagtcccacggcgacggcttaccaccagaccgggggccttgtcagtaacggtcaaggtatctcagggcctggacgtggaaggtttggtcgcattgcatcgaacagtagagttcccctgcgagcattgtcagatgctaatggcagcttccctggacgcaacatcaaggtgcggcctggaagccagcattcaatcactccagcagcagagacctcgggcatcatctcgaccgccatcgccagcgccgagaagcttccggtcccgactgggcaggagaacataagtcttctgcaacaacatcagcagcctcagtccgtcaagactagtcctacctcctctacccaattcacgttcacattcggatcccacaaccctgtttcgtggcctggatcagatcctataccacacaacatgggcggcgccaatagtggagtgaatcgtgccaccccggcgacctcagctgcagcccgagccggacagcctcagcaaggcatatcttccaactcggccgggcccagtggtgtccagggaagcaaccacgcaccaaacgaccacggcaataggagcacacaagaaacgtcgtccacgaagaagtccaaacgcagaaccaactcacttctccgagctgccaatcaacgccgacgagaaaaggagctatcaaatctccataatcctccatccgacgacgactggtacctatgtgtgttctgcgagtatgagcgaatcttcggagtgccgccgcgttccttgatcaagtcgtacgaagtgaaggaccgccgccgccggcatgacgaagccgagagacgtagactgctggagaaggcaaagtcaaaatcgcgaaagggcaaaaaggcaaacaaggctccacccaagagcgacgcagccccaacagatcagaattcagtctcgaccaacgatggacaagtgccccctccgccccctcctctcgaaggcgaccaatcccatgtcgagaacgacaagtacaatatggaggacctcgattcacgagagtttggcaatgacaaagtgagcggccgacttgtcactgtcactggcaataccgatcatcttgcttcaagagctattgagcaattgaagcaggagggaaatatacactaa

SEQ ID NO: 31771 - protein, 584 aa, Muscodor strobelii
  misc_feature: SGI Peptide ID NO. 570941
  misc_feature (28)..(485): NCBI GI: 156040876 Blast Desc: SS1G_11416 [Sclerotinia sclerotiorum 1980] gi|154695800|gb|EDN95538.1| SS1G_11416 [Sclerotinia sclerotiorum 1980]
  misc_feature (28)..(539): NCBI GI: 256733988 Blast Desc: NECHADRAFT_58991 [Nectria haematococca mpVI 77-13-4]
  misc_feature (28)..(554): NCBI GI: 154303968 Blast Desc: BC1G_08868 [Botryotinia fuckeliana B05.10] gi|150854452|gb|EDN29644.1| BC1G_08868 [Botryotinia fuckeliana B05.10]
  misc_feature (28)..(519): NCBI GI: 116193385 Blast Desc: CHGG_06410 [Chaetomium globosum CBS 148.51] gi|88182323|gb|EAQ89791.1| CHGG_06410 [Chaetomium globosum CBS 148.51]
  misc_feature (28)..(489): NCBI GI: 46128275 Blast Desc: FG08515.1 [Gibberella zeae PH-1]
  misc_feature (28)..(486): NCBI GI: 171685075 Blast Desc: protein product [Podospora anserina] gi|170942498|emb|CAP68150.1| protein product [Podospora anserina]
  misc_feature (36)..(496): NCBI GI: 39970139 Blast Desc: MGG_02536 [Magnaporthe grisea 70-15] gi|145017689|gb|EDK02052.1| MGG_02536 [Magnaporthe grisea 70-15]
  misc_feature (36)..(496): NCBI GI: 149209527 Blast Desc: MGCH7_ch7g246 [Magnaporthe grisea 70-15] gi|86196201|gb|EAQ70839.1| MGCH7_ch7g246 [Magnaporthe grisea 70-15]
  misc_feature (5)..(499): NCBI GI: 169623347 Blast Desc: SNOG_14911 [Phaeosphaeria nodorum SN15] gi|160704968|gb|EAT77763.2| SNOG_14911 [Phaeosphaeria nodorum SN15]
  misc_feature (14)..(499): NCBI GI: 212534424 Blast Desc: conserved [Penicillium marneffei ATCC 18224] gi|210069767|gb|EEA23857.1| conserved [Penicillium marneffei ATCC 18224]
MFPCVMQALKSLWLTVAQFALPGTPENMSPDSTSSLFPDRPIRPLPKRRLRERLSPEVADSIKFPPAPQTNTPLFVYPYNTRDEPFSTAPDSGNAVSRENVARVGGEGVGVRRNTFTSSRDDDSLIGQARRALGSRGFHEPRASPSRSTKAQPPPSTASSVDGYDSFENTNNKKKRKIPIAGESALNGAHALSDAAGLIVPSHQAGGESEGDTSPTATAYHQTGGLVSNGQGISGPGRGRFGRIASNSRVPLRALSDANGSFPGRNIKVRPGSQHSITPAAETSGIISTAIASAEKLPVPTGQENISLLQQHQQPQSVKTSPTSSTQFTFTFGSHNPVSWPGSDPIPHNMGGANSGVNRATPATSAAARAGQPQQGISSNSAGPSGVQGSNHAPNDHGNRSTQETSSTKKSKRRTNSLLRAANQRRREKELSNLHNPPSDDDWYLCVFCEYERIFGVPPRSLIKSYEVKDRRRRHDEAERRRLLEKAKSKSRKGKKANKAPPKSDAAPTDQNSVSTNDGQVPPPPPPLEGDQSHVENDKYNMEDLDSREFGNDKVSGRLVTVTGNTDHLASRAIEQLKQEGNIH

SEQ ID NO: 31772 - DNA, 3012 bp, Muscodor strobelii
  misc_feature: SGI EST ID NO. CUFF.75356.2
  misc_feature: Variant of the nucleotide sequence at SEQ ID NO 31770
tgggcactgaaaggtggtgaaatgacgaccccccagaggcgccccccttgccccccttcattccacgctgctgctactgtaggtgctgaggtaggagtgagagggcaggccagcgcgggccggggcgcacagggcacatgtgcatctgccagcaattaccacgtaatcatgccgacctcattgatcaacgactgaacaagtgtgaccctgtcgtaccctgtctgtccatctgtccgtgttccattgctcgacgtcaaacccattcatactctctgcatactctttggccacttttatcttttcagctttaaatccagcttccaactgcaaagcgttcgaccaccatcggccatctatcctgcatctatccccgtcctgctgcttgattcccgtcggcctgcgggactcctctgccaccttgcggacgcttcctcctccaactgcgagtggcttaggtcatcgacttgacctgcttcacaacgccgtgctctccggtcatcgcttcctcctttgaaacacttgccatcccctcaataataccgtcgaagtgggaacattcaatcattcctgcacctgtataatcacctgtttgaagctagctgcaacctggctcgatagaattacctggctcacataagagctttgccgactgcctacgaactcgtataattgggcgttcctcggggcatcagaggtctgcatgtgccaatagttggtgaacgatatgtgatgggcactcccgagaatatgtcaccagattccacctcgtcactgttccctgatagacccattcggccgctccccaagcgccgactgcgtgagcgtctgtcccctgaggtcgccgacagcatcaagttcccacctgcgccccagactaacacgcccctattcgtctacccctacaacaccagagacgagccattctcaactgcaccagactcagggaatgctgtcagtcgtgaaaatgtggcaagagtgggaggagaaggtgtgggtgttcggaggaacacattcacttccagccgtgacgatgacagcctgataggccaggctcgaagggccctgggctctcgggggttccacgagccacgcgcaagtccatcccggagtaccaaagcacagccaccaccttcgacagcatcttctgtcgacggctacgattcttttgaaaacacaaacaataagaagaagagaaagattcctattgcgggagagtcggccctgaacggtgcccatgcgcttagcgacgcagcaggactgattgtaccttcgcatcaggcaggcggagaaagcgagggagataccagtcccacggcgacggcttaccaccagaccgggggccttgtcagtaacggtcaaggtatctcagggcctggacgtggaaggtttggtcgcattgcatcgaacagtagagttcccctgcgagcattgtcagatgctaatggcagcttccctggacgcaacatcaaggtgcggcctggaagccagcattcaatcactccagcagagacctcgggcatcatctcgaccgccatcgccagcgccgagaagcttccggtcccgactgggcaggagaacataagtcttctgcaacaacatcagcagcctcagtccgtcaagactagtcctacctcctctacccaattcacgttcacattcggatcccacaaccctgtttcgtggcctggatcagatcctataccacacaacatgggcggcgccaatagtggagtgaatcgtgccaccccggcgacctcagctgcagcccgagccggacagcctcagcaaggcatatcttccaactcggccgggcccagtggtgtccagggaagcaaccacgcaccaaacgaccacggcaataggagcacacaagaaacgtcgtccacgaagaagtccaaacgcagaaccaactcacttctccgagctgccaatcaacgccgacgagaaaaggagctatcaaatctccataatcctccatccgacgacgactggtacctatgtgtgttctgcgagtatgagcgaatcttcggagtgccgccgcgttccttgatcaagtcgtacgaagtgaaggaccgccgccgccggcatgacgaagccgagagacgtagactgctggagaaggcaaagtcaaaatcgcgaaagggcaaaaaggcaaacaaggctccacccaagagcgacgcagccccaacagatcagaattcagtctcgaccaacgatggacaagtgccccctccgccccctcctctcgaaggcgaccaatcccatgtcgagaacgacaagtacaatatggaggacctcgattcacgagagtttggcaatgacaaagtgagcggccgacttgtcactgtcactggcaataccgatcatcttgcttcaagagctattgagcaattgaagcaggagggaaatatacactaatcaggtggatccaattcccgaccaaagcattatctacttccaatgcactattgtctagggcgctcatatgagcagacgtctgtgtagcacgaaatctgaaatggggccccttacccatccgtgtacccatctgtgtacacttcatgcttgatggcgctttcaaacccttgggtcttgcgcagatcggctccttcagcaagtggccgaagcccgcattcagcatttacatcgcgttagcacacgagcatcagcacaccaaagcgatacgccacacgttgtcatgatcaataggttgtcgacgagagaaaaattttgacatcactgttgttcgagagcaggcaggatacgaattgagaaagatggcgggtatctgaatgagaagagtcagtaccgctgactttcactggcggaatgttcgtctagaggatagactttgcatcgagtgctttggacgttgatgtcgctctgcgctttctaggtactggtagctagaacgaggaatagaccacatccctctcatgtgtgttgatatttgcctggtgtgatttatatgtgttgatactgttaaagtttcgtagccttctgttataaccc

SEQ ID NO: 31773 - DNA, 1833 bp, Muscodor strobelii
  misc_feature: SGI cDNA ID NO. 570942
  misc_feature: Reduced expression when VOC is produced
  misc_feature: Encodes the peptide sequence at SEQ ID NO 31774
atggccggcacctctcccaccagacgctcttctcgcgcgcgtataacccaatctcaatcgcaagtctcctctaccgcctcgagctcctcggggcgcgccgaacgcacgactcgggccttcaacaagaccggctctcctcagaaatccaccggcagcggctcgctctcctctgagccgcccgaagactcgaccaccaccaacgaagactccctccaccgccgccgcagcacccgtggcaaagacgacgaccgcgacaagctgcccaagtcggagctcctcagcatcatgccgcccgtcgccgacgacatccaggaggacgacgagtcggtccggtgcatatgtggccacgacgagtacccggggccgccacccttcgacgaggactcgaagcacggcatcaaggacacaattgaccacgaccgcatcttcgcgatcgagatcaccgacgacatggccggcttcttcgtccagtgcgaaatttgcaacacctggcagcacggtgcctgtgtcggcttcaccaccgaggagtccaaccctgacgaccttgaatacttctgcgagcaatgccgcaaggatctacacaagatatacaccgccagcaacggacaaaaatactccatcttcctcccaatccaccgaccttctcgagcagcttcgcgtgccacatcggcaaccaaggaaggagcacggtcaccgaaacccaccggcagtaaagctgcacgtgctgctgccgccgcttcgtcatcgtccaagcgtcgatcgactatgaacagccgtgacgccgcctacgacgaggaagagcaacttcgtcgcgccatcgcggccagcaaagaagagacgatacctgaggacggggagccgtccagcaggcgtcccaaaagaggcagggacgatagcgaagataacccagaaaacgtcaagcgacagcgaacaaactcgaaatcgccctcacccgcactcgacgacccagattcagcgattgtcgacgattccgacgacgattcaacactccgcaatgggtccagcaagaagctaagaaacaccgtccgcaaccagcgtgaacgggccgaacgagacgagcgtcgagaagagatagagcgcaagaaggccgaagcggctagcaaacgcaaaagccgagccgagcgccgccgagctgatgattctgacccctctgatgaactgcccctcgcaactcgtgccacggcggcaaacagagcctccgagtccgcacaacctcccgatcctccaataccatcatctcaaccgcctcccgacactccgccagccaccgcatccgcctcgacaaccacaaccaagaagaaacccgtcctcaagaagaagggacgaaatcagtatacgaaagaccgggataatgaccacgacgactcccctgccagatctgtgtcacgcgacgtctccaagaacgccgatgatagtgccagcgcccctaccaccactaccaaaacagctgcccacgaaggcacggggaagcagggccgaggcaaaggtggcatgaactcgagagtcaccatgaccgatatgaaaagacgagccaacggcatcatggaattcatctctcggaaacaggtcgagttagcaagcgataccatttcagccacggccagcccggcccggcagcttctgaccgatgccaaaccggccaaagtcaatggctcgcccgggaagaaatcaggagccgcaaccccaataacgaatggcgacggcgagctcctggatcccctgaaggagttcaggggcatgagctgtgtggagatgatggacagcctaacgagagacttggtcaagtggcaacgggaattcgctcctagttaa

SEQ ID NO: 31774 - protein, 610 aa, Muscodor strobelii
  misc_feature: SGI Peptide ID NO. 570942
  misc_feature (111)..(192): Pfam Id: PF00628 Pfam Desc: PHD-finger
  misc_feature (153)..(192): Pfam Id: PF00628 Pfam Desc: PHD-finger
  misc_feature (1)..(607): NCBI GI: 85112117 Blast Desc: NCU02121 [Neurospora crassa OR74A] gi|28926055|gb|EAA35043.1| [Neurospora crassa OR74A]
  misc_feature (1)..(608): NCBI GI: 171685077 Blast Desc: protein product [Podospora anserina] gi|170942499|emb|CAP68151.1| protein product [Podospora anserina]
  misc_feature (8)..(607): NCBI GI: 256733491 Blast Desc: NECHADRAFT_2224 [Nectria haematococca mpVI 77-13-4]
  misc_feature (8)..(607): NCBI GI: 46128277 Blast Desc: FG08516.1 [Gibberella zeae PH-1]
  misc_feature (26)..(608): NCBI GI: 154303966 Blast Desc: BC1G_08867 [Botryotinia fuckeliana B05.10] gi|150854451|gb|EDN29643.1| BC1G_08867 [Botryotinia fuckeliana B05.10]
  misc_feature (1)..(608): NCBI GI: 261352185 Blast Desc: conserved [Verticillium albo-atrum VaMs.102]
  misc_feature (31)..(608): NCBI GI: 156040874 Blast Desc: SS1G_11415 [Sclerotinia sclerotiorum 1980] gi|154695799|gb|EDN95537.1| SS1G_11415 [Sclerotinia sclerotiorum 1980]
  misc_feature (3)..(535): NCBI GI: 149209523 Blast Desc: MGCH7_ch7g244 [Magnaporthe grisea 70-15] gi|86196199|gb|EAQ70837.1| MGCH7_ch7g244 [Magnaporthe grisea 70-15]
  misc_feature (8)..(608): NCBI GI: 121713116 Blast Desc: transcriptional regulator (Cti6), [Aspergillus clavatus NRRL 1] gi|119402322|gb|EAW12743.1| transcriptional regulator (Cti6), [Aspergillus clavatus NRRL 1]
  misc_feature (8)..(608): NCBI GI: 169780612 Blast Desc: [Aspergillus oryzae RIB40] gi|238505214|ref|XP_002383836.1| transcriptional regulator (Cti6), [Aspergillus flavus NRRL3357] gi|83773510|dbj|BAE63637.1|
  misc_feature: Useful for introducing or modulating the production of volatile compounds
MAGTSPTRRSSRARITQSQSQVSSTASSSSGRAERTTRAFNKTGSPQKSTGSGSLSSEPPEDSTTTNEDSLHRRRSTRGKDDDRDKLPKSELLSIMPPVADDIQEDDESVRCICGHDEYPGPPPFDEDSKHGIKDTIDHDRIFAIEITDDMAGFFVQCEICNTWQHGACVGFTTEESNPDDLEYFCEQCRKDLHKIYTASNGQKYSIFLPIHRPSRAASRATSATKEGARSPKPTGSKAARAAAAASSSSKRRSTMNSRDAAYDEEEQLRRAIAASKEETIPEDGEPSSRRPKRGRDDSEDNPENVKRQRTNSKSPSPALDDPDSAIVDDSDDDSTLRNGSSKKLRNTVRNQRERAERDERREEIERKKAEAASKRKSRAERRRADDSDPSDELPLATRATAANRASESAQPPDPPIPSSQPPPDTPPATASASTTTTKKKPVLKKKGRNQYTKDRDNDHDDSPARSVSRDVSKNADDSASAPTTTTKTAAHEGTGKQGRGKGGMNSRVTMTDMKRRANGIMEFISRKQVELASDTISATASPARQLLTDAKPAKVNGSPGKKSGAATPITNGDGELLDPLKEFRGMSCVEMMDSLTRDLVKWQREFAPS

SEQ ID NO: 31775 - DNA, 5779 bp, Muscodor strobelii
  misc_feature: SGI EST ID NO. CUFF.75386.0
  misc_feature: Variant of the nucleotide sequence at SEQ ID NO 31773
ccggagttcagacatatcagatacgccgccacgagggtcgggctacttgttacctgggaatttgattggtagaggatttgatgttagatgagtgttgctagcatctgtcatttgttctcgcttgtttgaagacaggtatggcaatctggagtgttcgtgcctggcgaaattaggctgcctgctttcctggcactgcaacacccaacatttccagaagatgcaactagtgaatctcgaccctttcaccacttatatacaccaacccacctgacgacatcaaaagctgctaatggatagccacagcccacgctcttcatctttatcttttctcctccggaaatcactctcgaccatacacttgcaatcttgtcgaatggggtataatgtattcgactgggcgccatggcaggccacgatacaagaacaaagacgtcgaatcttccaactacctagggcagcttcagctgcggatgcagatgcagatgcaaatgatggatgatgctcagtgccccgcgctacatgataggctgatggggcccatactacatgcagccagttcgtcaggtttgcatcgcggcagatgccaacagttggagtcgccgtccgatatcatcctctaaccagctattacactagggccagggcatgtggcctaaggccatgacctggcctggttcgtctggcacctgcatctgagcatggacaggcttgagctctaccatagtggactagtgtaccagggggcccataccagattgcccaagagacctgagaatctgccgtccgtttgcgcgcaaaagggctgctccgatgtagctcccaggtcttgttaggtgtgtgcagcggccgagagatacccgttggatacagaggcaggcgcccaagcagacccaagcagacccaagcttgcgaattgcagctgtgtgttgcgctgtgcagaggaggcatcggctctccatggaggttgacgggcagcagctctccaaaaagttgaccctctcttccgtctcacgcccgccgttgtccaacgctcgcttccaccccctctgcctcttccgcctttccaacctcgctgccgccccgtcttccctctcgaacaggttcacttttcgccatggtccatgcagactgttcccagcgaccattgatccgcctgtcgctctgttagcacacagtctacccacctgccgtcgacgcacagcgcacgctctcctcgtccttgtctccggccaccagctcgagcgccaaagacgcctcgactcgagcaacacactcgacagccaccaatccccgactctcaccctctgcccattccggatctagcattatattcttctctgactcgacactcgccaacattaactctgtacctgcagtcgtcgttggcccgtcccacccctcccctcctcctcttcttcctcctctcctctctccctgtcgctgcgctcccgagcgatggccggcacctctcccaccagacgctcttctcgcgcgcgtataacccaatctcaatcgcaagtctcctctaccgcctcgagctcctcggggcgcgccgaacgcacgactcgggccttcaacaagaccggctctcctcagaaatccaccggcagcggctcgctctcctctgagccgcccgaagactcgaccaccaccaacgaagactccctccaccgccgccgcagcacccgtggcaaagacgacgaccgcgacaagctgcccaagtcggagctcctcagcatcatgccgcccgtcgccgacgacatccaggaggacgacgagtcggtccggtgcatatgtggccacgacgagtacccggggccgccacccttcgacgaggactcgaagcacggcatcaaggacacaattgaccacgaccgcatcttcgcgatcgagatcaccgacgacatggccggcttcttcgtccagtgcgaaatttgcaacacctggcagcacggtgcctgtgtcggcttcaccaccgaggagtccaaccctgacgaccttgaatacttctgcgagcaatgccgcaaggatctacacaagatatacaccgccagcaacggacaaaaatactccatcttcctcccaatccaccgaccttctcgagcagcttcgcgtgccacatcggcaaccaaggaaggagcacggtcaccgaaacccaccggcagtaaagctgcacgtgctgctgccgccgcttcgtcatcgtccaagcgtcgatcgactatgaacagccgtgacgccgcctacgacgaggaagagcaacttcgtcgcgccatcgcggccagcaaagaagagacgatacctgaggacggggagccgtccagcaggcgtcccaaaagaggcagggacgatagcgaagagtacgtggcaacagctactgcccaatccgactcacgactaatccttatcctcgcagtaacccagaaaacgtcaagcgacagcgaacaaactcgaaatcgccctcacccgcactcgacgacccagattcagcgattgtcgacgattccgacgacgattcaacactccgcaatgggtccagcaagaagctaagaaacaccgtccgcaaccagcgtgaacgggccgaacgagacgagcgtcgagaagagatagagcgcaagaaggccgaagcggctagcaaacgcaaaagccgagccgagcgccgccgagctgatgattctgacccctctgatgaactgcccctcgcaactcgtgccacggcggcaaacagagcctccgagtccgcacaacctcccgatcctccaataccatcatctcaaccgcctcccgacactccgccagccaccgcatccgcctcgacaaccacaaccaagaagaaacccgtcctcaagaagaagggacgaaatcagtatacgaaagaccgggataatgaccacgacgactcccctgccagatctgtgtcacgcgacgtctccaagaacgccgatgatagtgccagcgcccctaccaccactaccaaaacagctgcccacgaaggcacggggaagcagggccgaggcaaaggtggcatgaactcgagagtcaccatgaccgatatgaaaagacgagccaacggcatcatggaattcatctctcggaaacaggtcgagttagcaagcgataccatttcagccacggccagcccggcccggcagcttctgaccgatgccaaaccggccaaagtcaatggctcgcccgggaagaaatcaggagccgcaaccccaataacgaatggcgacggcgagctcctggatcccctgaaggagttcaggggcatgagctgtgtggagatgatggacagcctaacgagagacttggtcaagtggcaacgggaattcgctcctagttaataactaaggagctgtccgcgttgtcattctcggtatcttttgtaggagtctatcacatggggttctggcgttaaggtctgttcgctatttaccggtaccatgccggtctagcatttgcattggaaggcgttgcttcgttgcttcactgttaatgtcaatattgcttttatgttgatggaggggcttaggagctcaggaacaggcaggaaatggaagggactggaatggacatctctgctatctttattcggcgtcatggctacctattcatgttgggagtaagggggatgatattgggagctgcaataactggctctggcaatacctggttctcatcaggatgatcgaacgtcttcgcatttactttgttcggaacgaaagggaaaagtacgcattcggttctataagaggtgacgagttttacacacgtatacgagaaaatcgattcgaaatgcgaaattcacagttactgcaaacattgatacccatggacgtgatggaatggatgatggattgagagcggacatgtgatagggaatctataatggagtattttggataatgtgatgggatgattgttcatacacatatcgtcatttaagtcctgggggagttcttccagacaattatctgtctatctataggtatctatatctacacgggaagcgatcatacttcatagcgctctaccatatgcttgaaatacatacaatattgtacaccaccctatacacatacaatcctacacctcccatctcccatctcctatcttcttgaaccatataaccagccacaacacgggtatcatcaactccatctcatcaaacacccacatcccccccacgtttcctagcctgcttcatcttattccgttcgcgacgctcatccttctgtttgcgccgtgcagcattcaaactcaacccaccaccctccctcccctccccctccctcatcctctcctccccccacctcttcacaccctcctcactcacatcatccaaacaacagcccaccaatcttccacctctccactgattaacaatccactgcgccgccccttctaaatccgggatcccgccctttaggagtttaccggttcgtttggcgacgccggttaggaggtcttcgatggagtttgttggaggagagtaggaggcgtaggagcggtggagatgcaggttgttgatgtggaagagtagatagtctgctaggatggtgaaggggattgtaccgtcgcggattgtgtttgtgaggcagagttttagcatggagtggagggaggttacgtaggggatgaaaacccctggggtgtcgattaggaggacgccttctccgtagtcttgttcttcctttttcccttttgtgagtgaggctgaggatgaggattgtgcttcgagggcggtttgtagctctggatctggatctggggagggagtgggggaggaatcgaaagatgttgatgaagctggcggatgaggagaatgaacagtccgttctacaactctaacaggcgtgcccagtttcctagtaataccgggattactcccagtcctcgcaacgatattcttcttcttcgctccctcacccctatcaatcccccgttttcttagggcattaagcaatgtactcttccccgcattcggcatcccaaccaccaacgcccttagtcccagtatactatcatgttcgacgcatcgccgtttaatctcatcaagtaactgctcaatccctttatccttcccatcactcgtaaacatcacacttgtccttcccacccccccaccaccattcgccctccccatacctatcccgttgttcatgtggaatttcgacatcacggttttgtaactgcgactttttgccgcgctgggatgggcgaggtcttgtttggtgtagactattattctgtctctaccgcttaatgccgactcgagcaaggggttggtggaggttagggggatccgggagtctcggcattcgatgattagaccgatgttcgagagcatgttggacatttttgtgagggcggcgcggtggtggcctaggaaataggaccgttttaaagaggaggaaacttcgaatttttcgcgcgggacgaagccctctgggaggggacggcggtggggtttgttgccgtcggaggggaggttttggtccgatttgatggaaggggaggtgtcatcaagatcgaggttgcgaaacgcacagctttcatatatgatactaggcgtgggcgtgggcgcaggcactgaggtgcgctgggggggcgttgttgtgagggtatgtcgtagttgaggattgatggaagataggggcagacggcgaaacgccggtctgatgttatggaggagcattttgggagtatgatgggcgtattatcatggttttatacgagatgtgagcctcatctttacaaatatcaaggtgcagttgtt

SEQ ID NO: 31776 - DNA, 1533 bp, Muscodor strobelii
  misc_feature: SGI cDNA ID NO. 570943
  misc_feature: Reduced expression when VOC is produced
  misc_feature: Encodes the peptide sequence at SEQ ID NO 31777
atgctcctccataacatcagaccggcgtttcgccgtctgcccctatcttccatcaatcctcaactacgacataccctcacaacaacgcccccccagcgcacctcagtgcctgcgcccacgcccacgcctagtatcatatatgaaagctgtgcgtttcgcaacctcgatcttgatgacacctccccttccatcaaatcggaccaaaacctcccctccgacggcaacaaaccccaccgccgtcccctcccagagggcttcgtcccgcgcgaaaaattcgaagtttcctcctctttaaaacggtcctatttcctaggccaccaccgcgccgccctcacaaaaatgtccaacatgctctcgaacatcggtctaatcatcgaatgccgagactcccggatccccctaacctccaccaaccccttgctcgagtcggcattaagcggtagagacagaataatagtctacaccaaacaagacctcgcccatcccagcgcggcaaaaagtcgcagttacaaaaccgtgatgtcgaaattccacatgaacaacgggataggtatggggagggcgaatggtggtgggggggtgggaaggacaagtgtgatgtttacgagtgatgggaaggataaagggattgagcagttacttgatgagattaaacggcgatgcgtcgaacatgatagtatactgggactaagggcgttggtggttgggatgccgaatgcggggaagagtacattgcttaatgccctaagaaaacgggggattgataggggtgagggagcgaagaagaagaatatcgttgcgaggactgggagtaatcccggtattactaggaaactgggcacgcctgttagagttgtagaacggactgttcattctcctcatccgccagcttcatcaacatctttcgattcctcccccactccctccccagatccagatccagagctacaaaccgccctcgaagcacaatcctcatcctcagcctcactcacaaaagggaaaaaggaagaacaagactacggagaaggcgtcctcctaatcgacaccccaggggttttcatcccctacgtaacctccctccactccatgctaaaactctgcctcacaaacacaatccgcgacggtacaatccccttcaccatcctagcagactatctactcttccacatcaacaacctgcatctccaccgctcctacgcctcctactctcctccaacaaactccatcgaagacctcctaaccggcgtcgccaaacgaaccggtaaactcctaaagggcgggatcccggatttagaaggggcggcgcagtggattgttaatcagtggagaggtggaagattggtgggctgttgtttggatgatgtgagtgaggagggtgtgaagaggtggggggaggagaggatgagggagggggaggggagggagggtggtgggttgagtttgaatgctgcacggcgcaaacagaaggatgagcgtcgcgaacggaataagatgaagcaggctaggaaacgtgggggggatgtgggtgtttga

SEQ ID NO: 31777 - protein, 510 aa, Muscodor strobelii
  misc_feature: SGI Peptide ID NO. 570943
  misc_feature (230)..(352): Pfam Id: PF01926 Pfam Desc: GTPase of function
  misc_feature (86)..(509): NCBI GI: 116193381 Blast Desc: CHGG_06408 [Chaetomium globosum CBS 148.51] gi|88182321|gb|EAQ89789.1| CHGG_06408 [Chaetomium globosum CBS 148.51]
  misc_feature (76)..(501): NCBI GI: 171685079 Blast Desc: protein product [Podospora anserina] gi|170942500|emb|CAP68152.1| protein product [Podospora anserina]
  misc_feature (86)..(505): NCBI GI: 154322421 Blast Desc: BC1G_00553 [Botryotinia fuckeliana B05.10] gi|150847887|gb|EDN23080.1| BC1G_00553 [Botryotinia fuckeliana B05.10]
  misc_feature (85)..(501): NCBI GI: 85112121 Blast Desc: NCU02123 [Neurospora crassa OR74A] gi|28926057|gb|EAA35045.1| [Neurospora crassa OR74A]
  misc_feature (50)..(461): NCBI GI: 169626188 Blast Desc: SNOG_16374 [Phaeosphaeria nodorum SN15] gi|160705782|gb|EAT76199.2| SNOG_16374 [Phaeosphaeria nodorum SN15]
  misc_feature (86)..(499): NCBI GI: 189207338 Blast Desc: mitochondrial GTPase 1 [Pyrenophora tritici-repentis Pt-1C-BFP] gi|187976096|gb|EDU42722.1| mitochondrial GTPase 1 [Pyrenophora tritici-repentis Pt-1C-BFP]
  misc_feature (82)..(504): NCBI GI: 67537076 Blast Desc: AN4708.2 [Aspergillus nidulans FGSC A4] gi|40741560|gb|EAA60750.1| AN4708.2 [Aspergillus nidulans FGSC A4] gi|259482454|tpe|CBF76953.1| TPA: mitochondrial GTPase FGSC
  misc_feature (81)..(492): NCBI GI: 149209521 Blast Desc: MGCH7_ch7g243 [Magnaporthe grisea 70-15] gi|86196198|gb|EAQ70836.1| MGCH7_ch7g243 [Magnaporthe grisea 70-15]
  misc_feature (86)..(455): NCBI GI: 238839126 Blast Desc: mitochondrial GTPase 1 [Microsporum canis CBS 113480]
  misc_feature (75)..(498): NCBI GI: 169780570 Blast Desc: [Aspergillus oryzae RIB40] gi|83773489|dbj|BAE63616.1| protein product [Aspergillus oryzae]
  misc_feature: Useful for introducing or modulating the production of volatile compounds
MLLHNIRPAFRRLPLSSINPQLRHTLTTTPPQRTSVPAPTPTPSIIYESCAFRNLDLDDTSPSIKSDQNLPSDGNKPHRRPLPEGFVPREKFEVSSSLKRSYFLGHHRAALTKMSNMLSNIGLIIECRDSRIPLTSTNPLLESALSGRDRIIVYTKQDLAHPSAAKSRSYKTVMSKFHMNNGIGMGRANGGGGVGRTSVMFTSDGKDKGIEQLLDEIKRRCVEHDSILGLRALVVGMPNAGKSTLLNALRKRGIDRGEGAKKKNIVARTGSNPGITRKLGTPVRVVERTVHSPHPPASSTSFDSSPTPSPDPDPELQTALEAQSSSSASLTKGKKEEQDYGEGVLLIDTPGVFIPYVTSLHSMLKLCLTNTIRDGTIPFTILADYLLFHINNLHLHRSYASYSPPTNSIEDLLTGVAKRTGKLLKGGIPDLEGAAQWIVNQWRGGRLVGCCLDDVSEEGVKRWGEERMREGEGREGGGLSLNAARRKQKDERRERNKMKQARKRGGDVGV

SEQ ID NO: 31778 - DNA, 6022 bp, Muscodor strobelii
  misc_feature: SGI EST ID NO. CUFF.75386.3
  misc_feature: Variant of the nucleotide sequence at SEQ ID NO 31776
aacaactgcaccttgatatttgtaaagatgaggctcacatctcgtataaaaccatgataatacgcccatcatactcccaaaatgctcctccataacatcagaccggcgtttcgccgtctgcccctatcttccatcaatcctcaactacgacataccctcacaacaacgcccccccagcgcacctcagtgcctgcgcccacgcccacgcctagtatcatatatgaaagctgtgcgtttcgcaacctcgatcttgatgacacctccccttccatcaaatcggaccaaaacctcccctccgacggcaacaaaccccaccgccgtcccctcccagagggcttcgtcccgcgcgaaaaattcgaagtttcctcctctttaaaacggtcctatttcctaggccaccaccgcgccgccctcacaaaaatgtccaacatgctctcgaacatcggtctaatcatcgaatgccgagactcccggatccccctaacctccaccaaccccttgctcgagtcggcattaagcggtagagacagaataatagtctacaccaaacaagacctcgcccatcccagcgcggcaaaaagtcgcagttacaaaaccgtgatgtcgaaattccacatgaacaacgggataggtatggggagggcgaatggtggtgggggggtgggaaggacaagtgtgatgtttacgagtgatgggaaggataaagggattgagcagttacttgatgagattaaacggcgatgcgtcgaacatgatagtatactgggactaagggcgttggtggttgggatgccgaatgcggggaagagtacattgcttaatgccctaagaaaacgggggattgataggggtgagggagcgaagaagaagaatatcgttgcgaggactgggagtaatcccggtattactaggaaactgggcacgcctgttagagttgtagaacggactgttcattctcctcatccgccagcttcatcaacatctttcgattcctcccccactccctccccagatccagatccagagctacaaaccgccctcgaagcacaatcctcatcctcagcctcactcacaaaagggaaaaaggaagaacaagactacggagaaggcgtcctcctaatcgacaccccaggggttttcatcccctacgtaacctccctccactccatgctaaaactctgcctcacaaacacaatccgcgacggtacaatccccttcaccatcctagcagactatctactcttccacatcaacaacctgcatctccaccgctcctacgcctcctactctcctccaacaaactccatcgaagacctcctaaccggcgtcgccaaacgaaccggtaaactcctaaagggcgggatcccggatttagaaggggcggcgcagtggattgttaatcagtggagaggtggaagattggtgggctgttgtttggatgatgtgagtgaggagggtgtgaagaggtggggggaggagaggatgagggagggggaggggagggagggtggtgggttgagtttgaatgctgcacggcgcaaacagaaggatgagcgtcgcgaacggaataagatgaagcaggctaggaaacgtgggggggatgtgggtgtttgatgagatggagttgatgatacccgtgttgtggctggttatatggttcaagaagataggagatgggagatgggaggtgtaggattgtatgtgtatagggtggtgtacaatattgtatgtatttcaagcatatggtagagcgctatgaagtatgatcgcttcccgtgtagatatagatacctatagatagacagataattgtctggaagaactcccccaggacttaaatgacgatatgtgtatgaacaatcatcccatcacattatccaaaatactccattatagattccctatcacatgtccgctctcaatccatcatccattccatcacgtccatgggtatcaatgtttgcagtaactgtgaatttcgcatttcgaatcgattttctcgtatacgtgtgtaaaactcgtcacctcttatagaaccgaatgcgtacttttccctttcgttccgaacaaagtaaatgcgaagacgttcgatcatcctgatgagaaccaggtattgccagagccagttattgcagctcccaatatcatcccccttactcccaacatgaataggtagccatgacgccgaataaagatagcagagatgtccattccagtcccttccatttcctgcctgttcctgagctcctaagcccctccatcaacataaaagcaatattgacattaacagtgaagcaacgaagcaacgccttccaatgcaaatgctagaccggcatggtaccggtaaatagcgaacagaccttaacgccagaaccccatgtgatagactcctacaaaagataccgagaatgacaacgcggacagctccttagttattaactaggagcgaattcccgttgccacttgaccaagtctctcgttaggctgtccatcatctccacacagctcatgcccctgaactccttcaggggatccaggagctcgccgtcgccattcgttattggggttgcggctcctgatttcttcccgggcgagccattgactttggccggtttggcatcggtcagaagctgccgggccgggctggccgtggctgaaatggtatcgcttgctaactcgacctgtttccgagagatgaattccatgatgccgttggctcgtcttttcatatcggtcatggtgactctcgagttcatgccacctttgcctcggccctgcttccccgtgccttcgtgggcagctgttttggtagtggtggtaggggcgctggcactatcatcggcgttcttggagacgtcgcgtgacacagatctggcaggggagtcgtcgtggtcattatcccggtctttcgtatactgatttcgtcccttcttcttgaggacgggtttcttcttggttgtggttgtcgaggcggatgcggtggctggcggagtgtcgggaggcggttgagatgatggtattggaggatcgggaggttgtgcggactcggaggctctgtttgccgccgtggcacgagttgcgaggggcagttcatcagaggggtcagaatctagacaatcattagtatcaacgatcaattaacttcatacgcagaagatcaaggaaaccgtaccatcagctcggcggcgctcggctcggcttttgcgtttgctagccgcttcggccttcttgcgctctatctcttctcgacgctcgtctcgttcggcccgttcacgctggttgcggacggtgtttcttagcttcttgctggacccattgcggagtgttgaatcgtcgtcggaatcgtcgacaatcgctgaatctgggtcgtcgagtgcgggtgagggcgatttcgagtttgttcgctgtcgcttgacgttttctgggttactgcgaggataaggattagtcgtgagtcggattgggcagtagctgttgccacgtactcttcgctatcgtccctgcctcttttgggacgcctgctggacggctccccgtcctcaggtatcgtctcttctttgctggccgcgatggcgcgacgaagttgctcttcctcgtcgtaggcggcgtcacggctgttcatagtcgatcgacgcttggacgatgacgaagcggcggcagcagcacgtgcagctttactgccggtgggtttcggtgaccgtgctccttccttggttgccgatgtggcacgcgaagctgctcgagaaggtcggtggattgggaggaagatggagtatttttgtctggtgacgattattttagcaaggcctgtaatgcagtgcgttgccggtgtcgcaacgacatgaacaatggagagtgaaacagcgccaatctgactgattgctacaagccagaacgtatgtgcgcgacattgttactcggcgaagagggcgtcaatcggacttgaagaagtgaatgcttacccgttgctggcggtgtatatcttgtgtagatccttgcggcattgctcgcagaagtattcaaggtcgtcagggttggactcctcggtggtgaagccgacacaggcaccgtgctgccaggtgttgcaaatttcgcactggacgaagaagccggccatgtcgtcggtgatctcgatcgcgaagatgcggtcgtggtcaattgtgtccttgatgccgtgcttcgagtcctcgtcgaagggtggcggccccgggtactcgtcgtggccacatatgcaccggaccgactcgtcgtcctcctggatgtcgtcggcgacgggcggcatgatgctgaggagctccgacttgggcagcttgtcgcggtcgtcgtctttgccacgggtgctgcggcggcggtggagggagtcttcgttggtggtggtcgagtcttcgggcggctcagaggagagcgagccgctgccggtggatttctgaggagagccggtcttgttgaaggcccgagtcgtgcgttcggcgcgccccgaggagctcgaggcggtagaggagacttgcgattgagattgggttatacgcgcgcgagaagagcgtctggtgggagaggtgccggccatcgctcgggagcgcagcgacagggagagaggagaggaggaagaagaggaggaggggaggggtgggacgggccaacgacgactgcaggtacagagttaatgttggcgagtgtcgagtcagagaagaatataatgctagatccggaatgggcagagggtgagagtcggggattggtggctgtcgagtgtgttgctcgagtcgaggcgtctttggcgctcgagctggtggccggagacaaggacgaggagagcgtgcgctgtgcgtcgacggcaggtgggtagactgtgtgctaacagagcgacaggcggatcaatggtcgctgggaacagtctgcatggaccatggcgaaaagtgaacctgttcgagagggaagacggggcggcagcgaggttggaaaggcggaagaggcagagggggtggaagcgagcgttggacaacggcgggcgtgagacggaagagagggtcaactttttggagagctgctgcccgtcaacctccatggagagccgatgcctcctctgcacagcgcaacacacagctgcaattcgcaagcttgggtctgcttgggtctgcttgggcgcctgcctctgtatccaacgggtatctctcggccgctgcacacacctaacaagacctgggagctacatcggagcagcccttttgcgcgcaaacggacggcagattctcaggtctcttgggcaatctggtatgggccccctggtacactagtccactatggtagagctcaagcctgtccatgctcagatgcaggtgccagacgaaccaggccaggtcatggccttaggccacatgccctggccctagtgtaatagctggttagaggatgatatcggacggcgactccaactgttggcatctgccgcgatgcaaacctgacgaactggctgcatgtagtatgggccccatcagcctatcatgtagcgcggggcactgagcatcatccatcatttgcatctgcatctgcatccgcagctgaagctgccctaggtagttggaagattcgacgtctttgttcttgtatcgtggcctgccatggcgcccagtcgaatacattataccccattcgacaagattgcaagtgtatggtcgagagtgatttccggaggagaaaagataaagatgaagagcgtgggctgtggctatccattagcagcttttgatgtcgtcaggtgggttggtgtatataagtggtgaaagggtcgagattcactagttgcatcttctggaaatgttgggtgttgcagtgccaggaaagcaggcagcctaatttcgccaggcacgaacactccagattgccatacctgtcttcaaacaagcgagaacaaatgacagatgctagcaacactcatctaacatcaaatcctctaccaatcaaattcccaggtaacaagtagcccgaccctcgtggcggcgtatctgatatgtctgaactccgg

SEQ ID NO: 31779 - DNA, 984 bp, Muscodor strobelii
  misc_feature: SGI cDNA ID NO. 570944
  misc_feature: Encodes the peptide sequence at SEQ ID NO 31780
atgtcacgtctctcagtagccggcaagttcgccatcgtaacaggtgccggctctggtaagattataattgtctactcattagccattccacacaaaaggctaacgaccaccacaggcatcaacttcgcattcgcaatgctcctcctacaaaaaggctgctcagtagtaataggcgatctcgccctacgtccagaagccgaaaaactcatagcggactacccctacactcaaggctcatccacaccctcagcaatcttccaccgcacagacgtaacatcatggcctcaactctcatctctctttgacaaaggtctttcatcctacggtcgtgtagatatcattgttcctggagccggtctcttcgagccgccattttccggattctggaaccctcctaagacggcgacgaatcctaattcgcctagcagggatgatgcgaatggtgagcctggatcatataagcagatcgaggtcaatttgacgcatccgattcgcttgagtcagttgggtattggatattggaccaagaataagattcccggcacgctggtacatgttagtagtattgcgggacatgctacggggattgggagtccgctttatttcgctactaagcacggcttacacgggttcgtccggtctttgggcagcttgagggactcggtcggtatcagagtgagcgcaattgcgccaggttcagtcaggactccgatgtggaccgaagccgaggataagaaacacctcacccggggagggcaagatactcccatagaaccagagacgattgccgatggtatgttagagttatgcgagaacccggaatacggaaatggcacgatcttggagtgtatcaatgattatacgagagttgtccccttatataatgctgatcccccaatattgagggcggtgagcatgccggcccttgctgagtcttatggagagctggttgagaaacttaagactgaggggttggatacgtga
